United States Patent Application Publication US 2021/0180091 A1 - sequence listing, part 7

SEQ ID NO: 134514 - DNA, 22 bp, Artificial Sequence
  Synthetic oligonucleotide; TTC chr11 5278447 5278468 5278452 5278447 -
tctgacttatctaccattttcc

SEQ ID NO: 134515 - DNA, 22 bp, Artificial Sequence
  Synthetic oligonucleotide; CTC chr11 5278445 5278466 5278450 5278445 -
tgacttatctaccattttccct

SEQ ID NO: 134516 - DNA, 22 bp, Artificial Sequence
  Synthetic oligonucleotide; CTG chr11 5278443 5278464 5278448 5278443 -
acttatctaccattttccctcc

SEQ ID NO: 134517 - DNA, 22 bp, Artificial Sequence
  Synthetic oligonucleotide; CTT chr11 5278439 5278460 5278444 5278439 -
atctaccattttccctccttaa

SEQ ID NO: 134518 - DNA, 22 bp, Artificial Sequence
  Synthetic oligonucleotide; TTA chr11 5278438 5278459 5278443 5278438 -
tctaccattttccctccttaaa

SEQ ID NO: 134519 - DNA, 22 bp, Artificial Sequence
  Synthetic oligonucleotide; CTA chr11 5278434 5278455 5278439 5278434 -
ccattttccctccttaaagaaa

SEQ ID NO: 134520 - DNA, 22 bp, Artificial Sequence
  Synthetic oligonucleotide; TTT chr11 5278428 5278449 5278433 5278428 -
tccctccttaaagaaactgtga

SEQ ID NO: 134521 - DNA, 22 bp, Artificial Sequence
  Synthetic oligonucleotide; TTT chr11 5278427 5278448 5278432 5278427 -
ccctccttaaagaaactgtgaa

SEQ ID NO: 134522 - DNA, 22 bp, Artificial Sequence
  Synthetic oligonucleotide; TTC chr11 5278426 5278447 5278431 5278426 -
cctccttaaagaaactgtgaac

SEQ ID NO: 134523 - DNA, 22 bp, Artificial Sequence
  Synthetic oligonucleotide; CTC chr11 5278422 5278443 5278427 5278422 -
cttaaagaaactgtgaacttcc

SEQ ID NO: 134524 - DNA, 22 bp, Artificial Sequence
  Synthetic oligonucleotide; CTT chr11 5278419 5278440 5278424 5278419 -
aaagaaactgtgaacttccttc

SEQ ID NO: 134525 - DNA, 22 bp, Artificial Sequence
  Synthetic oligonucleotide; TTA chr11 5278418 5278439 5278423 5278418 -
aagaaactgtgaacttccttca

SEQ ID NO: 134526 - DNA, 22 bp, Artificial Sequence
  Synthetic oligonucleotide; CTG chr11 5278409 5278430 5278414 5278409 -
tgaacttccttcagctagaggg

SEQ ID NO: 134527 - DNA, 22 bp, Artificial Sequence
  Synthetic oligonucleotide; CTT chr11 5278402 5278423 5278407 5278402 -
ccttcagctagaggggcctggc

SEQ ID NO: 134528 - DNA, 22 bp, Artificial Sequence
  Synthetic oligonucleotide; TTC chr11 5278401 5278422 5278406 5278401 -
cttcagctagaggggcctggct

SEQ ID NO: 134529 - DNA, 22 bp, Artificial Sequence
  Synthetic oligonucleotide; CTT chr11 5278398 5278419 5278403 5278398 -
cagctagaggggcctggctcag

SEQ ID NO: 134530 - DNA, 22 bp, Artificial Sequence
  Synthetic oligonucleotide; TTC chr11 5278397 5278418 5278402 5278397 -
agctagaggggcctggctcaga

SEQ ID NO: 134531 - DNA, 22 bp, Artificial Sequence
  Synthetic oligonucleotide; CTA chr11 5278392 5278413 5278397 5278392 -
gaggggcctggctcagaagcct

SEQ ID NO: 134532 - DNA, 22 bp, Artificial Sequence
  Synthetic oligonucleotide; CTG chr11 5278382 5278403 5278387 5278382 -
gctcagaagcctctggtcagca

SEQ ID NO: 134533 - DNA, 22 bp, Artificial Sequence
  Synthetic oligonucleotide; CTC chr11 5278378 5278399 5278383 5278378 -
agaagcctctggtcagcatcca

SEQ ID NO: 134534 - DNA, 22 bp, Artificial Sequence
  Synthetic oligonucleotide; CTC chr11 5278369 5278390 5278374 5278369 -
tggtcagcatccaagaaatact

SEQ ID NO: 134535 - DNA, 22 bp, Artificial Sequence
  Synthetic oligonucleotide; CTG chr11 5278367 5278388 5278372 5278367 -
gtcagcatccaagaaatacttg

SEQ ID NO: 134536 - DNA, 22 bp, Artificial Sequence
  Synthetic oligonucleotide; CTT chr11 5278346 5278367 5278351 5278346 -
gatgtcactttggctaaaggta

SEQ ID NO: 134537 - DNA, 22 bp, Artificial Sequence
  Synthetic oligonucleotide; TTG chr11 5278345 5278366 5278350 5278345 -
atgtcactttggctaaaggtat

SEQ ID NO: 134538 - DNA, 22 bp, Artificial Sequence
  Synthetic oligonucleotide; CTT chr11 5278336 5278357 5278341 5278336 -
tggctaaaggtatgatgtgtag

SEQ ID NO: 134539 - DNA, 22 bp, Artificial Sequence
  Synthetic oligonucleotide; TTT chr11 5278335 5278356 5278340 5278335 -
ggctaaaggtatgatgtgtaga

SEQ ID NO: 134540 - DNA, 22 bp, Artificial Sequence
  Synthetic oligonucleotide; TTG chr11 5278334 5278355 5278339 5278334 -
gctaaaggtatgatgtgtagac

SEQ ID NO: 134541 - DNA, 22 bp, Artificial Sequence
  Synthetic oligonucleotide; CTA chr11 5278330 5278351 5278335 5278330 -
aaggtatgatgtgtagacaagc

SEQ ID NO: 134542 - DNA, 22 bp, Artificial Sequence
  Synthetic oligonucleotide; CTC chr11 5278306 5278327 5278311 5278306 -
cagagatggtttctcatttcca

SEQ ID NO: 134543 - DNA, 22 bp, Artificial Sequence
  Synthetic oligonucleotide; TTT chr11 5278294 5278315 5278299 5278294 -
ctcatttccatatccacccacc

SEQ ID NO: 134544 - DNA, 22 bp, Artificial Sequence
  Synthetic oligonucleotide; TTC chr11 5278293 5278314 5278298 5278293 -
tcatttccatatccacccaccc

SEQ ID NO: 134545 - DNA, 22 bp, Artificial Sequence
  Synthetic oligonucleotide; CTC chr11 5278291 5278312 5278296 5278291 -
atttccatatccacccacccag

SEQ ID NO: 134546 - DNA, 22 bp, Artificial Sequence
  Synthetic oligonucleotide; TTT chr11 5278287 5278308 5278292 5278287 -
ccatatccacccacccagcttt

SEQ ID NO: 134547 - DNA, 22 bp, Artificial Sequence
  Synthetic oligonucleotide; TTC chr11 5278286 5278307 5278291 5278286 -
catatccacccacccagctttc

SEQ ID NO: 134548 - DNA, 22 bp, Artificial Sequence
  Synthetic oligonucleotide; CTT chr11 5278266 5278287 5278271 5278266 -
tccaattttaaagccaattctg

SEQ ID NO: 134549 - DNA, 22 bp, Artificial Sequence
  Synthetic oligonucleotide; TTT chr11 5278265 5278286 5278270 5278265 -
ccaattttaaagccaattctga

SEQ ID NO: 134550 - DNA, 22 bp, Artificial Sequence
  Synthetic oligonucleotide; TTC chr11 5278264 5278285 5278269 5278264 -
caattttaaagccaattctgag

SEQ ID NO: 134551 - DNA, 22 bp, Artificial Sequence
  Synthetic oligonucleotide; TTT chr11 5278258 5278279 5278263 5278258 -
taaagccaattctgaggtagag

SEQ ID NO: 134552 - DNA, 22 bp, Artificial Sequence
  Synthetic oligonucleotide; TTT chr11 5278257 5278278 5278262 5278257 -
aaagccaattctgaggtagaga

SEQ ID NO: 134553 - DNA, 22 bp, Artificial Sequence
  Synthetic oligonucleotide; TTA chr11 5278256 5278277 5278261 5278256 -
aagccaattctgaggtagagac

SEQ ID NO: 134554 - DNA, 22 bp, Artificial Sequence
  Synthetic oligonucleotide; TTC chr11 5278246 5278267 5278251 5278246 -
tgaggtagagactgtgatgaac

SEQ ID NO: 134555 - DNA, 22 bp, Artificial Sequence
  Synthetic oligonucleotide; CTG chr11 5278244 5278265 5278249 5278244 -
aggtagagactgtgatgaacaa

SEQ ID NO: 134556 - DNA, 22 bp, Artificial Sequence
  Synthetic oligonucleotide; CTG chr11 5278232 5278253 5278237 5278232 -
tgatgaacaaacaccttgacaa

SEQ ID NO: 134557 - DNA, 22 bp, Artificial Sequence
  Synthetic oligonucleotide; CTT chr11 5278215 5278236 5278220 5278215 -
gacaaaattcaacccaaagact

SEQ ID NO: 134558 - DNA, 22 bp, Artificial Sequence
  Synthetic oligonucleotide; TTG chr11 5278214 5278235 5278219 5278214 -
acaaaattcaacccaaagactc

SEQ ID NO: 134559 - DNA, 22 bp, Artificial Sequence
  Synthetic oligonucleotide; TTC chr11 5278205 5278226 5278210 5278205 -
aacccaaagactcactttgcct

SEQ ID NO: 134560 - DNA, 22 bp, Artificial Sequence
  Synthetic oligonucleotide; CTC chr11 5278192 5278213 5278197 5278192 -
actttgcctagcttcaaaatcc

SEQ ID NO: 134561 - DNA, 22 bp, Artificial Sequence
  Synthetic oligonucleotide; CTT chr11 5278188 5278209 5278193 5278188 -
tgcctagcttcaaaatccttac

SEQ ID NO: 134562 - DNA, 22 bp, Artificial Sequence
  Synthetic oligonucleotide; TTT chr11 5278187 5278208 5278192 5278187 -
gcctagcttcaaaatccttact

SEQ ID NO: 134563 - DNA, 22 bp, Artificial Sequence
  Synthetic oligonucleotide; TTG chr11 5278186 5278207 5278191 5278186 -
cctagcttcaaaatccttactc

SEQ ID NO: 134564 - DNA, 22 bp, Artificial Sequence
  Synthetic oligonucleotide; CTA chr11 5278182 5278203 5278187 5278182 -
gcttcaaaatccttactctgac

SEQ ID NO: 134565 - DNA, 22 bp, Artificial Sequence
  Synthetic oligonucleotide; CTT chr11 5278178 5278199 5278183 5278178 -
caaaatccttactctgacatat

SEQ ID NO: 134566 - DNA, 22 bp, Artificial Sequence
  Synthetic oligonucleotide; TTC chr11 5278177 5278198 5278182 5278177 -
aaaatccttactctgacatata

SEQ ID NO: 134567 - DNA, 22 bp, Artificial Sequence
  Synthetic oligonucleotide; CTT chr11 5278168 5278189 5278173 5278168 -
actctgacatatactcacagcc

SEQ ID NO: 134568 - DNA, 22 bp, Artificial Sequence
  Synthetic oligonucleotide; TTA chr11 5278167 5278188 5278172 5278167 -
ctctgacatatactcacagcca

SEQ ID NO: 134569 - DNA, 22 bp, Artificial Sequence
  Synthetic oligonucleotide; CTC chr11 5278164 5278185 5278169 5278164 -
tgacatatactcacagccagaa

SEQ ID NO: 134570 - DNA, 22 bp, Artificial Sequence
  Synthetic oligonucleotide; CTG chr11 5278162 5278183 5278167 5278162 -
acatatactcacagccagaaat

SEQ ID NO: 134571 - DNA, 22 bp, Artificial Sequence
  Synthetic oligonucleotide; CTC chr11 5278152 5278173 5278157 5278152 -
acagccagaaattagcatgcac

SEQ ID NO: 134572 - DNA, 22 bp, Artificial Sequence
  Synthetic oligonucleotide; TTA chr11 5278138 5278159 5278143 5278138 -
gcatgcactagagtgtgcatga

SEQ ID NO: 134573 - DNA, 22 bp, Artificial Sequence
  Synthetic oligonucleotide; CTA chr11 5278128 5278149 5278133 5278128 -
gagtgtgcatgagtgcaacaca

SEQ ID NO: 134574 - DNA, 22 bp, Artificial Sequence
  Synthetic oligonucleotide; TTC chr11 5278091 5278112 5278096 5278091 -
catattctctgtcagaaaatcc

SEQ ID NO: 134575 - DNA, 22 bp, Artificial Sequence
  Synthetic oligonucleotide; TTC chr11 5278084 5278105 5278089 5278084 -
tctgtcagaaaatcctgttggt

SEQ ID NO: 134576 - DNA, 22 bp, Artificial Sequence
  Synthetic oligonucleotide; CTC chr11 5278082 5278103 5278087 5278082 -
tgtcagaaaatcctgttggttt

SEQ ID NO: 134577 - DNA, 22 bp, Artificial Sequence
  Synthetic oligonucleotide; CTG chr11 5278080 5278101 5278085 5278080 -
tcagaaaatcctgttggttttt

SEQ ID NO: 134578 - DNA, 22 bp, Artificial Sequence
  Synthetic oligonucleotide; CTG chr11 5278067 5278088 5278072 5278067 -
ttggtttttcgtgaaaggatgt

SEQ ID NO: 134579 - DNA, 22 bp, Artificial Sequence
  Synthetic oligonucleotide; TTG chr11 5278064 5278085 5278069 5278064 -
gtttttcgtgaaaggatgtttt

SEQ ID NO: 134580 - DNA, 22 bp, Artificial Sequence
  Synthetic oligonucleotide; TTT chr11 5278060 5278081 5278065 5278060 -
ttcgtgaaaggatgttttcaga

SEQ ID NO: 134581 - DNA, 22 bp, Artificial Sequence
  Synthetic oligonucleotide; TTT chr11 5278059 5278080 5278064 5278059 -
tcgtgaaaggatgttttcagag

SEQ ID NO: 134582 - DNA, 22 bp, Artificial Sequence
  Synthetic oligonucleotide; TTT chr11 5278058 5278079 5278063 5278058 -
cgtgaaaggatgttttcagagg

SEQ ID NO: 134583 - DNA, 22 bp, Artificial Sequence
  Synthetic oligonucleotide; TTC chr11 5278057 5278078 5278062 5278057 -
gtgaaaggatgttttcagaggc

SEQ ID NO: 134584 - DNA, 22 bp, Artificial Sequence
  Synthetic oligonucleotide; TTT chr11 5278043 5278064 5278048 5278043 -
tcagaggctgaccccttgcctt

SEQ ID NO: 134585 - DNA, 22 bp, Artificial Sequence
  Synthetic oligonucleotide; TTT chr11 5278042 5278063 5278047 5278042 -
cagaggctgaccccttgccttc

SEQ ID NO: 134586 - DNA, 22 bp, Artificial Sequence
  Synthetic oligonucleotide; TTC chr11 5278041 5278062 5278046 5278041 -
agaggctgaccccttgccttca

SEQ ID NO: 134587 - DNA, 22 bp, Artificial Sequence
  Synthetic oligonucleotide; CTG chr11 5278033 5278054 5278038 5278033 -
accccttgccttcacctccaat

SEQ ID NO: 134588 - DNA, 22 bp, Artificial Sequence
  Synthetic oligonucleotide; CTT chr11 5278026 5278047 5278031 5278026 -
gccttcacctccaatgctacca

SEQ ID NO: 134589 - DNA, 22 bp, Artificial Sequence
  Synthetic oligonucleotide; TTG chr11 5278025 5278046 5278030 5278025 -
ccttcacctccaatgctaccac

SEQ ID NO: 134590 - DNA, 22 bp, Artificial Sequence
  Synthetic oligonucleotide; CTT chr11 5278021 5278042 5278026 5278021 -
cacctccaatgctaccactctg

SEQ ID NO: 134591 - DNA, 22 bp, Artificial Sequence
  Synthetic oligonucleotide; TTC chr11 5278020 5278041 5278025 5278020 -
acctccaatgctaccactctgg

SEQ ID NO: 134592 - DNA, 22 bp, Artificial Sequence
  Synthetic oligonucleotide; CTC chr11 5278015 5278036 5278020 5278015 -
caatgctaccactctggtctaa

SEQ ID NO: 134593 - DNA, 22 bp, Artificial Sequence
  Synthetic oligonucleotide; CTA chr11 5278007 5278028 5278012 5278007 -
ccactctggtctaagtcactgt

SEQ ID NO: 134594 - DNA, 22 bp, Artificial Sequence
  Synthetic oligonucleotide; CTC chr11 5278001 5278022 5278006 5278001 -
tggtctaagtcactgtcaccac

SEQ ID NO: 134595 - DNA, 22 bp, Artificial Sequence
  Synthetic oligonucleotide; CTG chr11 5277999 5278020 5278004 5277999 -
gtctaagtcactgtcaccacca

SEQ ID NO: 134596 - DNA, 22 bp, Artificial Sequence
  Synthetic oligonucleotide; CTA chr11 5277994 5278015 5277999 5277994 -
agtcactgtcaccaccacctaa

SEQ ID NO: 134597 - DNA, 22 bp, Artificial Sequence
  Synthetic oligonucleotide; CTG chr11 5277986 5278007 5277991 5277986 -
tcaccaccacctaaattatagc

SEQ ID NO: 134598 - DNA, 22 bp, Artificial Sequence
  Synthetic oligonucleotide; CTA chr11 5277973 5277994 5277978 5277973 -
aattatagctgttgactcataa

SEQ ID NO: 134599 - DNA, 22 bp, Artificial Sequence
  Synthetic oligonucleotide; TTA chr11 5277968 5277989 5277973 5277968 -
tagctgttgactcataacaatc

SEQ ID NO: 134600 - DNA, 22 bp, Artificial Sequence
  Synthetic oligonucleotide; CTG chr11 5277962 5277983 5277967 5277962 -
ttgactcataacaatcttcctg

SEQ ID NO: 134601 - DNA, 22 bp, Artificial Sequence
  Synthetic oligonucleotide; TTG chr11 5277959 5277980 5277964 5277959 -
actcataacaatcttcctgctt

SEQ ID NO: 134602 - DNA, 22 bp, Artificial Sequence
  Synthetic oligonucleotide; CTC chr11 5277955 5277976 5277960 5277955 -
ataacaatcttcctgcttctac

SEQ ID NO: 134603 - DNA, 22 bp, Artificial Sequence
  Synthetic oligonucleotide; CTT chr11 5277944 5277965 5277949 5277944 -
cctgcttctaccactgccccac

SEQ ID NO: 134604 - DNA, 22 bp, Artificial Sequence
  Synthetic oligonucleotide; TTC chr11 5277943 5277964 5277948 5277943 -
ctgcttctaccactgccccact

SEQ ID NO: 134605 - DNA, 22 bp, Artificial Sequence
  Synthetic oligonucleotide; CTG chr11 5277940 5277961 5277945 5277940 -
cttctaccactgccccactaca

SEQ ID NO: 134606 - DNA, 22 bp, Artificial Sequence
  Synthetic oligonucleotide; CTT chr11 5277937 5277958 5277942 5277937 -
ctaccactgccccactacaatt

SEQ ID NO: 134607 - DNA, 22 bp, Artificial Sequence
  Synthetic oligonucleotide; TTC chr11 5277936 5277957 5277941 5277936 -
taccactgccccactacaattt

SEQ ID NO: 134608 - DNA, 22 bp, Artificial Sequence
  Synthetic oligonucleotide; CTA chr11 5277934 5277955 5277939 5277934 -
ccactgccccactacaatttct

SEQ ID NO: 134609 - DNA, 22 bp, Artificial Sequence
  Synthetic oligonucleotide; CTG chr11 5277928 5277949 5277933 5277928 -
ccccactacaatttcttcccaa

SEQ ID NO: 134610 - DNA, 22 bp, Artificial Sequence
  Synthetic oligonucleotide; CTA chr11 5277920 5277941 5277925 5277920 -
caatttcttcccaatatactat

SEQ ID NO: 134611 - DNA, 22 bp, Artificial Sequence
  Synthetic oligonucleotide; TTT chr11 5277914 5277935 5277919 5277914 -
cttcccaatatactatccaaat

SEQ ID NO: 134612 - DNA, 22 bp, Artificial Sequence
  Synthetic oligonucleotide; TTC chr11 5277913 5277934 5277918 5277913 -
ttcccaatatactatccaaatt

SEQ ID NO: 134613 - DNA, 22 bp, Artificial Sequence
  Synthetic oligonucleotide; CTT chr11 5277911 5277932 5277916 5277911 -
cccaatatactatccaaattag

SEQ ID NO: 134614 - DNA, 22 bp, Artificial Sequence
  Synthetic oligonucleotide; TTC chr11 5277910 5277931 5277915 5277910 -
ccaatatactatccaaattagt

SEQ ID NO: 134615 - DNA, 22 bp, Artificial Sequence
  Synthetic oligonucleotide; CTA chr11 5277899 5277920 5277904 5277899 -
tccaaattagtcttttcaaaat

SEQ ID NO: 134616 - DNA, 22 bp, Artificial Sequence
  Synthetic oligonucleotide; TTA chr11 5277890 5277911 5277895 5277890 -
gtcttttcaaaatgtaagtcat

SEQ ID NO: 134617 - DNA, 22 bp, Artificial Sequence
  Synthetic oligonucleotide; CTT chr11 5277885 5277906 5277890 5277885 -
ttcaaaatgtaagtcatatatg

SEQ ID NO: 134618 - DNA, 22 bp, Artificial Sequence
  Synthetic oligonucleotide; TTT chr11 5277884 5277905 5277889 5277884 -
tcaaaatgtaagtcatatatgg

SEQ ID NO: 134619 - DNA, 22 bp, Artificial Sequence
  Synthetic oligonucleotide; TTT chr11 5277883 5277904 5277888 5277883 -
caaaatgtaagtcatatatggt

SEQ ID NO: 134620 - DNA, 22 bp, Artificial Sequence
  Synthetic oligonucleotide; TTC chr11 5277882 5277903 5277887 5277882 -
aaaatgtaagtcatatatggtc

SEQ ID NO: 134621 - DNA, 22 bp, Artificial Sequence
  Synthetic oligonucleotide; CTC chr11 5277855 5277876 5277860 5277855 -
tttgttcaaagtcttctgatag

SEQ ID NO: 134622 - DNA, 22 bp, Artificial Sequence
  Synthetic oligonucleotide; CTT chr11 5277853 5277874 5277858 5277853 -
tgttcaaagtcttctgatagtt

SEQ ID NO: 134623 - DNA, 22 bp, Artificial Sequence
  Synthetic oligonucleotide; TTT chr11 5277852 5277873 5277857 5277852 -
gttcaaagtcttctgatagttt

SEQ ID NO: 134624 - DNA, 22 bp, Artificial Sequence
  Synthetic oligonucleotide; TTG chr11 5277851 5277872 5277856 5277851 -
ttcaaagtcttctgatagtttc

SEQ ID NO: 134625 - DNA, 22 bp, Artificial Sequence
  Synthetic oligonucleotide; TTC chr11 5277848 5277869 5277853 5277848 -
aaagtcttctgatagtttccta

SEQ ID NO: 134626 - DNA, 22 bp, Artificial Sequence
  Synthetic oligonucleotide; CTT chr11 5277840 5277861 5277845 5277840 -
ctgatagtttcctatatcattt

SEQ ID NO: 134627 - DNA, 22 bp, Artificial Sequence
  Synthetic oligonucleotide; TTC chr11 5277839 5277860 5277844 5277839 -
tgatagtttcctatatcattta

SEQ ID NO: 134628 - DNA, 22 bp, Artificial Sequence
  Synthetic oligonucleotide; CTG chr11 5277837 5277858 5277842 5277837 -
atagtttcctatatcatttata

SEQ ID NO: 134629 - DNA, 22 bp, Artificial Sequence
  Synthetic oligonucleotide; TTT chr11 5277830 5277851 5277835 5277830 -
cctatatcatttataataaaac

SEQ ID NO: 134630 - DNA, 22 bp, Artificial Sequence
  Synthetic oligonucleotide; TTC chr11 5277829 5277850 5277834 5277829 -
ctatatcatttataataaaacc

SEQ ID NO: 134631 - DNA, 22 bp, Artificial Sequence
  Synthetic oligonucleotide; CTA chr11 5277826 5277847 5277831 5277826 -
tatcatttataataaaaccaaa

SEQ ID NO: 134632 - DNA, 22 bp, Artificial Sequence
  Synthetic oligonucleotide; TTT chr11 5277818 5277839 5277823 5277818 -
ataataaaaccaaatccttaca

SEQ ID NO: 134633 - DNA, 22 bp, Artificial Sequence
  Synthetic oligonucleotide; TTA chr11 5277817 5277838 5277822 5277817 -
taataaaaccaaatccttacaa

SEQ ID NO: 134634 - DNA, 22 bp, Artificial Sequence
  Synthetic oligonucleotide; CTT chr11 5277799 5277820 5277804 5277799 -
acaattctctacaatagttgtt

SEQ ID NO: 134635 - DNA, 22 bp, Artificial Sequence
  Synthetic oligonucleotide; TTA chr11 5277798 5277819 5277803 5277798 -
caattctctacaatagttgttc

SEQ ID NO: 134636 - DNA, 22 bp, Artificial Sequence
  Synthetic oligonucleotide; TTC chr11 5277792 5277813 5277797 5277792 -
tctacaatagttgttcatgcat

SEQ ID NO: 134637 - DNA, 22 bp, Artificial Sequence
  Synthetic oligonucleotide; CTC chr11 5277790 5277811 5277795 5277790 -
tacaatagttgttcatgcatat

SEQ ID NO: 134638 - DNA, 22 bp, Artificial Sequence
  Synthetic oligonucleotide; CTA chr11 5277788 5277809 5277793 5277788 -
caatagttgttcatgcatatat

SEQ ID NO: 134639 - DNA, 22 bp, Artificial Sequence
  Synthetic oligonucleotide; TTG chr11 5277779 5277800 5277784 5277779 -
ttcatgcatatattatgtttat

SEQ ID NO: 134640 - DNA, 22 bp, Artificial Sequence
  Synthetic oligonucleotide; TTC chr11 5277776 5277797 5277781 5277776 -
atgcatatattatgtttattac

SEQ ID NO: 134641 - DNA, 22 bp, Artificial Sequence
  Synthetic oligonucleotide; TTA chr11 5277764 5277785 5277769 5277764 -
tgtttattacagatacatatat

SEQ ID NO: 134642 - DNA, 22 bp, Artificial Sequence
  Synthetic oligonucleotide; TTT chr11 5277759 5277780 5277764 5277759 -
attacagatacatatatatagc

SEQ ID NO: 134643 - DNA, 22 bp, Artificial Sequence
  Synthetic oligonucleotide; TTA chr11 5277758 5277779 5277763 5277758 -
ttacagatacatatatatagct

SEQ ID NO: 134644 - DNA, 22 bp, Artificial Sequence
  Synthetic oligonucleotide; TTA chr11 5277755 5277776 5277760 5277755 -
cagatacatatatatagctctc

SEQ ID NO: 134645 - DNA, 22 bp, Artificial Sequence
  Synthetic oligonucleotide; CTC chr11 5277735 5277756 5277740 5277735 -
tcatataaataaatatatatat

SEQ ID NO: 134646 - DNA, 22 bp, Artificial Sequence
  Synthetic oligonucleotide; CTC chr11 5277733 5277754 5277738 5277733 -
atataaataaatatatatattt

SEQ ID NO: 134647 - DNA, 22 bp, Artificial Sequence
  Synthetic oligonucleotide; TTT chr11 5277711 5277732 5277716 5277711 -
atgtgtatgtgtgtagagtgtt

SEQ ID NO: 134648 - DNA, 22 bp, Artificial Sequence
  Synthetic oligonucleotide; TTA chr11 5277710 5277731 5277715 5277710 -
tgtgtatgtgtgtagagtgttt

SEQ ID NO: 134649 - DNA, 22 bp, Artificial Sequence
  Synthetic oligonucleotide; TTT chr11 5277688 5277709 5277693 5277688 -
tttcttacaactctatgatgta

SEQ ID NO: 134650 - DNA, 22 bp, Artificial Sequence
  Synthetic oligonucleotide; TTT chr11 5277687 5277708 5277692 5277687 -
ttcttacaactctatgatgtag

SEQ ID NO: 134651 - DNA, 22 bp, Artificial Sequence
  Synthetic oligonucleotide; TTT chr11 5277686 5277707 5277691 5277686 -
tcttacaactctatgatgtagg

SEQ ID NO: 134652 - DNA, 22 bp, Artificial Sequence
  Synthetic oligonucleotide; TTT chr11 5277685 5277706 5277690 5277685 -
cttacaactctatgatgtaggt

SEQ ID NO: 134653 - DNA, 22 bp, Artificial Sequence
  Synthetic oligonucleotide; TTC chr11 5277684 5277705 5277689 5277684 -
ttacaactctatgatgtaggta

SEQ ID NO: 134654 - DNA, 22 bp, Artificial Sequence
  Synthetic oligonucleotide; CTT chr11 5277682 5277703 5277687 5277682 -
acaactctatgatgtaggtatt

SEQ ID NO: 134655 - DNA, 22 bp, Artificial Sequence
  Synthetic oligonucleotide; TTA chr11 5277681 5277702 5277686 5277681 -
caactctatgatgtaggtatta

SEQ ID NO: 134656 - DNA, 22 bp, Artificial Sequence
  Synthetic oligonucleotide; CTC chr11 5277675 5277696 5277680 5277675 -
tatgatgtaggtattattagtg

SEQ ID NO: 134657 - DNA, 22 bp, Artificial Sequence
  Synthetic oligonucleotide; CTA chr11 5277673 5277694 5277678 5277673 -
tgatgtaggtattattagtgtc

SEQ ID NO: 134658 - DNA, 22 bp, Artificial Sequence
  Synthetic oligonucleotide; TTA chr11 5277659 5277680 5277664 5277659 -
ttagtgtcccaaattttataat

SEQ ID NO: 134659 - DNA, 22 bp, Artificial Sequence
  Synthetic oligonucleotide; TTA chr11 5277656 5277677 5277661 5277656 -
gtgtcccaaattttataattta

SEQ ID NO: 134660 - DNA, 22 bp, Artificial Sequence
  Synthetic oligonucleotide; TTT chr11 5277643 5277664 5277648 5277643 -
tataatttaggacttctatgat

SEQ ID NO: 134661 - DNA, 22 bp, Artificial Sequence
  Synthetic oligonucleotide; TTT chr11 5277642 5277663 5277647 5277642 -
ataatttaggacttctatgatc

SEQ ID NO: 134662 - DNA, 22 bp, Artificial Sequence
  Synthetic oligonucleotide; TTA chr11 5277641 5277662 5277646 5277641 -
taatttaggacttctatgatct

SEQ ID NO: 134663 - DNA, 22 bp, Artificial Sequence
  Synthetic oligonucleotide; TTT chr11 5277635 5277656 5277640 5277635 -
aggacttctatgatctcatctt

SEQ ID NO: 134664 - DNA, 22 bp, Artificial Sequence
  Synthetic oligonucleotide; TTA chr11 5277634 5277655 5277639 5277634 -
ggacttctatgatctcatcttt

SEQ ID NO: 134665 - DNA, 22 bp, Artificial Sequence
  Synthetic oligonucleotide; CTT chr11 5277628 5277649 5277633 5277628 -
ctatgatctcatcttttattct

SEQ ID NO: 134666 - DNA, 22 bp, Artificial Sequence
  Synthetic oligonucleotide; TTC chr11 5277627 5277648 5277632 5277627 -
tatgatctcatcttttattctc

SEQ ID NO: 134667 - DNA, 22 bp, Artificial Sequence
  Synthetic oligonucleotide; CTA chr11 5277625 5277646 5277630 5277625 -
tgatctcatcttttattctccc

SEQ ID NO: 134668 - DNA, 22 bp, Artificial Sequence
  Synthetic oligonucleotide; CTC chr11 5277618 5277639 5277623 5277618 -
atcttttattctccccttcacc

SEQ ID NO: 134669 - DNA, 22 bp, Artificial Sequence
  Synthetic oligonucleotide; CTT chr11 5277613 5277634 5277618 5277613 -
ttattctccccttcaccgaatc

SEQ ID NO: 134670 - DNA, 22 bp, Artificial Sequence
  Synthetic oligonucleotide; TTT chr11 5277612 5277633 5277617 5277612 -
tattctccccttcaccgaatct

SEQ ID NO: 134671 - DNA, 22 bp, Artificial Sequence
  Synthetic oligonucleotide; TTT chr11 5277611 5277632 5277616 5277611 -
attctccccttcaccgaatctc

SEQ ID NO: 134672 - DNA, 22 bp, Artificial Sequence
  Synthetic oligonucleotide; TTA chr11 5277610 5277631 5277615 5277610 -
ttctccccttcaccgaatctca

SEQ ID NO: 134673 - DNA, 22 bp, Artificial Sequence
  Synthetic oligonucleotide; TTC chr11 5277607 5277628 5277612 5277607 -
tccccttcaccgaatctcatcc

SEQ ID NO: 134674 - DNA, 22 bp, Artificial Sequence
  Synthetic oligonucleotide; CTC chr11 5277605 5277626 5277610 5277605 -
cccttcaccgaatctcatccta

SEQ ID NO: 134675 - DNA, 22 bp, Artificial Sequence
  Synthetic oligonucleotide; CTT chr11 5277600 5277621 5277605 5277600 -
caccgaatctcatcctacattg

SEQ ID NO: 134676 - DNA, 22 bp, Artificial Sequence
  Synthetic oligonucleotide; TTC chr11 5277599 5277620 5277604 5277599 -
accgaatctcatcctacattgg

SEQ ID NO: 134677 - DNA, 22 bp, Artificial Sequence
  Synthetic oligonucleotide; CTC chr11 5277589 5277610 5277594 5277589 -
atcctacattggccttattgat

SEQ ID NO: 134678 - DNA, 22 bp, Artificial Sequence
  Synthetic oligonucleotide; CTA chr11 5277583 5277604 5277588 5277583 -
cattggccttattgatattcct

SEQ ID NO: 134679 - DNA, 22 bp, Artificial Sequence
  Synthetic oligonucleotide; TTG chr11 5277578 5277599 5277583 5277578 -
gccttattgatattccttgaaa

SEQ ID NO: 134680 - DNA, 22 bp, Artificial Sequence
  Synthetic oligonucleotide; CTT chr11 5277573 5277594 5277578 5277573 -
attgatattccttgaaaattct

SEQ ID NO: 134681 - DNA, 22 bp, Artificial Sequence
  Synthetic oligonucleotide; TTA chr11 5277572 5277593 5277577 5277572 -
ttgatattccttgaaaattcta

SEQ ID NO: 134682 - DNA, 22 bp, Artificial Sequence
  Synthetic oligonucleotide; TTG chr11 5277569 5277590 5277574 5277569 -
atattccttgaaaattctaagc

SEQ ID NO: 134683 - DNA, 22 bp, Artificial Sequence
  Synthetic oligonucleotide; TTC chr11 5277563 5277584 5277568 5277563 -
cttgaaaattctaagcatctta

SEQ ID NO: 134684 - DNA, 22 bp, Artificial Sequence
  Synthetic oligonucleotide; CTT chr11 5277560 5277581 5277565 5277560 -
gaaaattctaagcatcttacat

SEQ ID NO: 134685 - DNA, 22 bp, Artificial Sequence
  Synthetic oligonucleotide; TTG chr11 5277559 5277580 5277564 5277559 -
aaaattctaagcatcttacatc

SEQ ID NO: 134686 - DNA, 22 bp, Artificial Sequence
  Synthetic oligonucleotide; TTC chr11 5277552 5277573 5277557 5277552 -
taagcatcttacatctttaggg

SEQ ID NO: 134687 - DNA, 22 bp, Artificial Sequence
  Synthetic oligonucleotide; CTA chr11 5277550 5277571 5277555 5277550 -
agcatcttacatctttagggta

SEQ ID NO: 134688 - DNA, 22 bp, Artificial Sequence
  Synthetic oligonucleotide; CTT chr11 5277542 5277563 5277547 5277542 -
acatctttagggtatttacatt

SEQ ID NO: 134689 - DNA, 22 bp, Artificial Sequence
  Synthetic oligonucleotide; TTA chr11 5277541 5277562 5277546 5277541 -
catctttagggtatttacattt

SEQ ID NO: 134690 - DNA, 22 bp, Artificial Sequence
  Synthetic oligonucleotide; CTT chr11 5277535 5277556 5277540 5277535 -
tagggtatttacatttgccatt

SEQ ID NO: 134691 - DNA, 22 bp, Artificial Sequence
  Synthetic oligonucleotide; TTT chr11 5277534 5277555 5277539 5277534 -
agggtatttacatttgccattc

SEQ ID NO: 134692 - DNA, 22 bp, Artificial Sequence
  Synthetic oligonucleotide; TTA chr11 5277533 5277554 5277538 5277533 -
gggtatttacatttgccattcc

SEQ ID NO: 134693 - DNA, 22 bp, Artificial Sequence
  Synthetic oligonucleotide; TTT chr11 5277525 5277546 5277530 5277525 -
acatttgccattccctatgccc

SEQ ID NO: 134694 - DNA, 22 bp, Artificial Sequence
  Synthetic oligonucleotide; TTA chr11 5277524 5277545 5277529 5277524 -
catttgccattccctatgccct

SEQ ID NO: 134695 - DNA, 22 bp, Artificial Sequence
  Synthetic oligonucleotide; TTT chr11 5277519 5277540 5277524 5277519 -
gccattccctatgccctaaata

SEQ ID NO: 134696 - DNA, 22 bp, Artificial Sequence
  Synthetic oligonucleotide; TTG chr11 5277518 5277539 5277523 5277518 -
ccattccctatgccctaaatat

SEQ ID NO: 134697 - DNA, 22 bp, Artificial Sequence
  Synthetic oligonucleotide; TTC chr11 5277512 5277533 5277517 5277512 -
cctatgccctaaatatttaatc

SEQ ID NO: 134698 - DNA, 22 bp, Artificial Sequence
  Synthetic oligonucleotide; CTA chr11 5277508 5277529 5277513 5277508 -
tgccctaaatatttaatcatag

SEQ ID NO: 134699 - DNA, 22 bp, Artificial Sequence
  Synthetic oligonucleotide; CTA chr11 5277501 5277522 5277506 5277501 -
aatatttaatcatagtttcata

SEQ ID NO: 134700 - DNA, 22 bp, Artificial Sequence
  Synthetic oligonucleotide; TTT chr11 5277494 5277515 5277499 5277494 -
aatcatagtttcatataaatgg

SEQ ID NO: 134701 - DNA, 22 bp, Artificial Sequence
  Synthetic oligonucleotide; TTA chr11 5277493 5277514 5277498 5277493 -
atcatagtttcatataaatggg

SEQ ID NO: 134702 - DNA, 22 bp, Artificial Sequence
  Synthetic oligonucleotide; TTT chr11 5277483 5277504 5277488 5277483 -
catataaatgggttcctcatca

SEQ ID NO: 134703 - DNA, 22 bp, Artificial Sequence
  Synthetic oligonucleotide; TTC chr11 5277482 5277503 5277487 5277482 -
atataaatgggttcctcatcat

SEQ ID NO: 134704 - DNA, 22 bp, Artificial Sequence
  Synthetic oligonucleotide; TTC chr11 5277468 5277489 5277473 5277468 -
ctcatcatctatgggtactctc

SEQ ID NO: 134705 - DNA, 22 bp, Artificial Sequence
  Synthetic oligonucleotide; CTC chr11 5277465 5277486 5277470 5277465 -
atcatctatgggtactctctca

SEQ ID NO: 134706 - DNA, 22 bp, Artificial Sequence
  Synthetic oligonucleotide; CTA chr11 5277457 5277478 5277462 5277457 -
tgggtactctctcaggtgttaa

SEQ ID NO: 134707 - DNA, 22 bp, Artificial Sequence
  Synthetic oligonucleotide; CTC chr11 5277448 5277469 5277453 5277448 -
tctcaggtgttaactttatagt

SEQ ID NO: 134708 - DNA, 22 bp, Artificial Sequence
  Synthetic oligonucleotide; CTC chr11 5277446 5277467 5277451 5277446 -
tcaggtgttaactttatagtga

SEQ ID NO: 134709 - DNA, 22 bp, Artificial Sequence
  Synthetic oligonucleotide; CTC chr11 5277444 5277465 5277449 5277444 -
aggtgttaactttatagtgagg

SEQ ID NO: 134710 - DNA, 22 bp, Artificial Sequence
  Synthetic oligonucleotide; TTA chr11 5277436 5277457 5277441 5277436 -
actttatagtgaggactttcct

SEQ ID NO: 134711 - DNA, 22 bp, Artificial Sequence
  Synthetic oligonucleotide; CTT chr11 5277432 5277453 5277437 5277432 -
tatagtgaggactttcctgcca

SEQ ID NO: 134712 - DNA, 22 bp, Artificial Sequence
  Synthetic oligonucleotide; TTT chr11 5277431 5277452 5277436 5277431 -
atagtgaggactttcctgccat

SEQ ID NO: 134713 - DNA, 22 bp, Artificial Sequence
  Synthetic oligonucleotide; TTA chr11 5277430 5277451 5277435 5277430 -
tagtgaggactttcctgccata

SEQ ID NO: 134714 - DNA, 22 bp, Artificial Sequence
  Synthetic oligonucleotide; CTT chr11 5277418 5277439 5277423 5277418 -
tcctgccatactacttaaagta

SEQ ID NO: 134715 - DNA, 22 bp, Artificial Sequence
  Synthetic oligonucleotide; TTT chr11 5277417 5277438 5277422 5277417 -
cctgccatactacttaaagtag

SEQ ID NO: 134716 - DNA, 22 bp, Artificial Sequence
  Synthetic oligonucleotide; TTC chr11 5277416 5277437 5277421 5277416 -
ctgccatactacttaaagtagc

SEQ ID NO: 134717 - DNA, 22 bp, Artificial Sequence
  Synthetic oligonucleotide; CTG chr11 5277413 5277434 5277418 5277413 -
ccatactacttaaagtagcgat

SEQ ID NO: 134718 - DNA, 22 bp, Artificial Sequence
  Synthetic oligonucleotide; CTA chr11 5277405 5277426 5277410 5277405 -
cttaaagtagcgataccctttc

SEQ ID NO: 134719 - DNA, 22 bp, Artificial Sequence
  Synthetic oligonucleotide; CTT chr11 5277402 5277423 5277407 5277402 -
aaagtagcgataccctttcacc

SEQ ID NO: 134720 - DNA, 22 bp, Artificial Sequence
  Synthetic oligonucleotide; TTA chr11 5277401 5277422 5277406 5277401 -
aagtagcgataccctttcaccc

SEQ ID NO: 134721 - DNA, 22 bp, Artificial Sequence
  Synthetic oligonucleotide; CTT chr11 5277385 5277406 5277390 5277385 -
tcaccctgtcctaatcacactc

SEQ ID NO: 134722 - DNA, 22 bp, Artificial Sequence
  Synthetic oligonucleotide; TTT chr11 5277384 5277405 5277389 5277384 -
caccctgtcctaatcacactct

SEQ ID NO: 134723 - DNA, 22 bp, Artificial Sequence
  Synthetic oligonucleotide; TTC chr11 5277383 5277404 5277388 5277383 -
accctgtcctaatcacactctg

SEQ ID NO: 134724 - DNA, 22 bp, Artificial Sequence
  Synthetic oligonucleotide; CTG chr11 5277377 5277398 5277382 5277377 -
tcctaatcacactctggccttc

SEQ ID NO: 134725 - DNA, 22 bp, Artificial Sequence
  Synthetic oligonucleotide; CTA chr11 5277372 5277393 5277377 5277372 -
atcacactctggccttcatttc

SEQ ID NO: 134726 - DNA, 22 bp, Artificial Sequence
  Synthetic oligonucleotide; CTC chr11 5277363 5277384 5277368 5277363 -
tggccttcatttcagttttttt

SEQ ID NO: 134727 - DNA, 22 bp, Artificial Sequence
  Synthetic oligonucleotide; CTG chr11 5277361 5277382 5277366 5277361 -
gccttcatttcagttttttttt

SEQ ID NO: 134728 - DNA, 22 bp, Artificial Sequence
  Synthetic oligonucleotide; CTT chr11 5277356 5277377 5277361 5277356 -
catttcagttttttttttttct

SEQ ID NO: 134729 - DNA, 22 bp, Artificial Sequence
  Synthetic oligonucleotide; TTC chr11 5277355 5277376 5277360 5277355 -
atttcagttttttttttttctc

SEQ ID NO: 134730 - DNA, 22 bp, Artificial Sequence
  Synthetic oligonucleotide; TTT chr11 5277351 5277372 5277356 5277351 -
cagttttttttttttctccata

SEQ ID NO: 134731 - DNA, 22 bp, Artificial Sequence
  Synthetic oligonucleotide; TTC chr11 5277350 5277371 5277355 5277350 -
agttttttttttttctccatag

SEQ ID NO: 134732 - DNA, 22 bp, Artificial Sequence
  Synthetic oligonucleotide; TTT chr11 5277345 5277366 5277350 5277345 -
tttttttttctccatagcacct

SEQ ID NO: 134733 - DNA, 22 bp, Artificial Sequence
  Synthetic oligonucleotide; TTT chr11 5277344 5277365 5277349 5277344 -
ttttttttctccatagcaccta

SEQ ID NO: 134734 - DNA, 22 bp, Artificial Sequence
  Synthetic oligonucleotide; TTT chr11 5277343 5277364 5277348 5277343 -
tttttttctccatagcacctaa

SEQ ID NO: 134735 - DNA, 22 bp, Artificial Sequence
  Synthetic oligonucleotide; TTT chr11 5277342 5277363 5277347 5277342 -
ttttttctccatagcacctaat

SEQ ID NO: 134736 - DNA, 22 bp, Artificial Sequence
  Synthetic oligonucleotide; TTT chr11 5277341 5277362 5277346 5277341 -
tttttctccatagcacctaatc

SEQ ID NO: 134737 - DNA, 22 bp, Artificial Sequence
  Synthetic oligonucleotide; TTT chr11 5277340 5277361 5277345 5277340 -
ttttctccatagcacctaatct

SEQ ID NO: 134738 - DNA, 22 bp, Artificial Sequence
  Synthetic oligonucleotide; TTT chr11 5277339 5277360 5277344 5277339 -
tttctccatagcacctaatctc

SEQ ID NO: 134739 - DNA, 22 bp, Artificial Sequence
  Synthetic oligonucleotide; TTT chr11 5277338 5277359 5277343 5277338 -
ttctccatagcacctaatctca

SEQ ID NO: 134740 - DNA, 22 bp, Artificial Sequence
  Synthetic oligonucleotide; TTT chr11 5277337 5277358 5277342 5277337 -
tctccatagcacctaatctcat

SEQ ID NO: 134741 - DNA, 22 bp, Artificial Sequence
  Synthetic oligonucleotide; TTT chr11 5277336 5277357 5277341 5277336 -
ctccatagcacctaatctcatt

SEQ ID NO: 134742 - DNA, 22 bp, Artificial Sequence
  Synthetic oligonucleotide; TTC chr11 5277335 5277356 5277340 5277335 -
tccatagcacctaatctcattg

SEQ ID NO: 134743 - DNA, 22 bp, Artificial Sequence
  Synthetic oligonucleotide; CTC chr11 5277333 5277354 5277338 5277333 -
catagcacctaatctcattggt

SEQ ID NO: 134744 - DNA, 22 bp, Artificial Sequence
  Synthetic oligonucleotide; CTA chr11 5277322 5277343 5277327 5277322 -
atctcattggtatataacatgt

SEQ ID NO: 134745 - DNA, 22 bp, Artificial Sequence
  Synthetic oligonucleotide; CTC chr11 5277317 5277338 5277322 5277317 -
attggtatataacatgtttcat

SEQ ID NO: 134746 - DNA, 22 bp, Artificial Sequence
  Synthetic oligonucleotide; TTG chr11 5277313 5277334 5277318 5277313 -
gtatataacatgtttcatttgc

SEQ ID NO: 134747 - DNA, 22 bp, Artificial Sequence
  Synthetic oligonucleotide; TTT chr11 5277298 5277319 5277303 5277298 -
catttgcttatttaatgtcaag

SEQ ID NO: 134748 - DNA, 22 bp, Artificial Sequence
  Synthetic oligonucleotide; TTC chr11 5277297 5277318 5277302 5277297 -
atttgcttatttaatgtcaagc

SEQ ID NO: 134749 - DNA, 22 bp, Artificial Sequence
  Synthetic oligonucleotide; TTT chr11 5277293 5277314 5277298 5277293 -
gcttatttaatgtcaagctctt

SEQ ID NO: 134750 - DNA, 22 bp, Artificial Sequence
  Synthetic oligonucleotide; TTG chr11 5277292 5277313 5277297 5277292 -
cttatttaatgtcaagctcttt

SEQ ID NO: 134751 - DNA, 22 bp, Artificial Sequence
  Synthetic oligonucleotide; CTT chr11 5277289 5277310 5277294 5277289 -
atttaatgtcaagctctttcca

SEQ ID NO: 134752 - DNA, 22 bp, Artificial Sequence
  Synthetic oligonucleotide; TTA chr11 5277288 5277309 5277293 5277288 -
tttaatgtcaagctctttccac

SEQ ID NO: 134753 - DNA, 22 bp, Artificial Sequence
  Synthetic oligonucleotide; TTT chr11 5277285 5277306 5277290 5277285 -
aatgtcaagctctttccactat

SEQ ID NO: 134754 - DNA, 22 bp, Artificial Sequence
  Synthetic oligonucleotide; TTA chr11 5277284 5277305 5277289 5277284 -
atgtcaagctctttccactatc

SEQ ID NO: 134755 - DNA, 22 bp, Artificial Sequence
  Synthetic oligonucleotide; CTC chr11 5277273 5277294 5277278 5277273 -
tttccactatcaagtccatgaa

SEQ ID NO: 134756 - DNA, 22 bp, Artificial Sequence
  Synthetic oligonucleotide; CTT chr11 5277271 5277292 5277276 5277271 -
tccactatcaagtccatgaaaa

SEQ ID NO: 134757 - DNA, 22 bp, Artificial Sequence
  Synthetic oligonucleotide; TTT chr11 5277270 5277291 5277275 5277270 -
ccactatcaagtccatgaaaac

SEQ ID NO: 134758 - DNA, 22 bp, Artificial Sequence
  Synthetic oligonucleotide; TTC chr11 5277269 5277290 5277274 5277269 -
cactatcaagtccatgaaaaca

SEQ ID NO: 134759 - DNA, 22 bp, Artificial Sequence
  Synthetic oligonucleotide; CTA chr11 5277264 5277285 5277269 5277264 -
tcaagtccatgaaaacaggaac

SEQ ID NO: 134760 - DNA, 22 bp, Artificial Sequence
  Synthetic oligonucleotide; CTT chr11 5277240 5277261 5277245 5277240 -
tattcctctattctgtttttgt

SEQ ID NO: 134761 - DNA, 22 bp, Artificial Sequence
  Synthetic oligonucleotide; TTT chr11 5277239 5277260 5277244 5277239 -
attcctctattctgtttttgtg

SEQ ID NO: 134762 - DNA, 22 bp, Artificial Sequence
  Synthetic oligonucleotide; TTA chr11 5277238 5277259 5277243 5277238 -
ttcctctattctgtttttgtgc

SEQ ID NO: 134763 - DNA, 22 bp, Artificial Sequence
  Synthetic oligonucleotide; TTC chr11 5277235 5277256 5277240 5277235 -
ctctattctgtttttgtgctgt

SEQ ID NO: 134764 - DNA, 22 bp, Artificial Sequence
  Synthetic oligonucleotide; CTC chr11 5277232 5277253 5277237 5277232 -
tattctgtttttgtgctgtatt

SEQ ID NO: 134765 - DNA, 22 bp, Artificial Sequence
  Synthetic oligonucleotide; CTA chr11 5277230 5277251 5277235 5277230 -
ttctgtttttgtgctgtattct

SEQ ID NO: 134766 - DNA, 22 bp, Artificial Sequence
  Synthetic oligonucleotide; TTC chr11 5277227 5277248 5277232 5277227 -
tgtttttgtgctgtattcttag

SEQ ID NO: 134767 - DNA, 22 bp, Artificial Sequence
  Synthetic oligonucleotide; CTG chr11 5277225 5277246 5277230 5277225 -
tttttgtgctgtattcttagca

SEQ ID NO: 134768 - DNA, 22 bp, Artificial Sequence
  Synthetic oligonucleotide; TTT chr11 5277222 5277243 5277227 5277222 -
ttgtgctgtattcttagcaatt

SEQ ID NO: 134769 - DNA, 22 bp, Artificial Sequence
  Synthetic oligonucleotide; TTT chr11 5277221 5277242 5277226 5277221 -
tgtgctgtattcttagcaattt

SEQ ID NO: 134770 - DNA, 22 bp, Artificial Sequence
  Synthetic oligonucleotide; TTT chr11 5277220 5277241 5277225 5277220 -
gtgctgtattcttagcaatttt

SEQ ID NO: 134771 - DNA, 22 bp, Artificial Sequence
  Synthetic oligonucleotide; TTG chr11 5277219 5277240 5277224 5277219 -
tgctgtattcttagcaatttta

SEQ ID NO: 134772 - DNA, 22 bp, Artificial Sequence
  Synthetic oligonucleotide; CTG chr11 5277214 5277235 5277219 5277214 -
tattcttagcaattttacaatt

SEQ ID NO: 134773 - DNA, 22 bp, Artificial Sequence
  Synthetic oligonucleotide; TTC chr11 5277209 5277230 5277214 5277209 -
ttagcaattttacaattttgaa

SEQ ID NO: 134774 - DNA, 22 bp, Artificial Sequence
  Synthetic oligonucleotide; CTT chr11 5277207 5277228 5277212 5277207 -
agcaattttacaattttgaatg

SEQ ID NO: 134775 - DNA, 22 bp, Artificial Sequence
  Synthetic oligonucleotide; TTA chr11 5277206 5277227 5277211 5277206 -
gcaattttacaattttgaatga

SEQ ID NO: 134776 - DNA, 22 bp, Artificial Sequence
  Synthetic oligonucleotide; TTT chr11 5277199 5277220 5277204 5277199 -
tacaattttgaatgaatgaatg

SEQ ID NO: 134777 - DNA, 22 bp, Artificial Sequence
  Synthetic oligonucleotide; TTT chr11 5277198 5277219 5277203 5277198 -
acaattttgaatgaatgaatga

SEQ ID NO: 134778 - DNA, 22 bp, Artificial Sequence
  Synthetic oligonucleotide; TTA chr11 5277197 5277218 5277202 5277197 -
caattttgaatgaatgaatgag

SEQ ID NO: 134779 - DNA, 22 bp, Artificial Sequence
  Synthetic oligonucleotide; TTT chr11 5277191 5277212 5277196 5277191 -
tgaatgaatgaatgagcagtca

SEQ ID NO: 134780 - DNA, 22 bp, Artificial Sequence
  Synthetic oligonucleotide; TTT chr11 5277190 5277211 5277195 5277190 -
gaatgaatgaatgagcagtcaa

SEQ ID NO: 134781 - DNA, 22 bp, Artificial Sequence
  Synthetic oligonucleotide; TTG chr11 5277189 5277210 5277194 5277189 -
aatgaatgaatgagcagtcaaa

SEQ ID NO: 134782 - DNA, 22 bp, Artificial Sequence
  Synthetic oligonucleotide; CTA chr11 5277153 5277174 5277158 5277153 -
taattaaaaggatgtatgctga

SEQ ID NO: 134783 - DNA, 22 bp, Artificial Sequence
  Synthetic oligonucleotide; TTA chr11 5277147 5277168 5277152 5277147 -
aaaggatgtatgctgacacatc

SEQ ID NO: 134784 - DNA, 22 bp, Artificial Sequence
  Synthetic oligonucleotide; CTG chr11 5277132 5277153 5277137 5277132 -
acacatccactgctatgcacac

SEQ ID NO: 134785 - DNA, 22 bp, Artificial Sequence
  Synthetic oligonucleotide; CTG chr11 5277120 5277141 5277125 5277120 -
ctatgcacacacaaagaaatca

SEQ ID NO: 134786 - DNA, 22 bp, Artificial Sequence
  Synthetic oligonucleotide; CTA chr11 5277117 5277138 5277122 5277117 -
tgcacacacaaagaaatcagtg

SEQ ID NO: 134787 - DNA, 22 bp, Artificial Sequence
  Synthetic oligonucleotide; CTG chr11 5277084 5277105 5277089 5277084 -
gaagtgctaagcctgcatagag

SEQ ID NO: 134788 - DNA, 22 bp, Artificial Sequence
  Synthetic oligonucleotide; CTA chr11 5277075 5277096 5277080 5277075 -
agcctgcatagagctagttagc

SEQ ID NO: 134789 - DNA, 22 bp, Artificial Sequence
  Synthetic oligonucleotide; CTG chr11 5277069 5277090 5277074 5277069 -
catagagctagttagccctccg

SEQ ID NO: 134790 - DNA, 22 bp, Artificial Sequence
  Synthetic oligonucleotide; CTA chr11 5277059 5277080 5277064 5277059 -
gttagccctccgcaggcagagc

SEQ ID NO: 134791 - DNA, 22 bp, Artificial Sequence
  Synthetic oligonucleotide; TTA chr11 5277055 5277076 5277060 5277055 -
gccctccgcaggcagagccttg

SEQ ID NO: 134792 - DNA, 22 bp, Artificial Sequence
  Synthetic oligonucleotide; CTC chr11 5277049 5277070 5277054 5277049 -
cgcaggcagagccttgatggga

SEQ ID NO: 134793 - DNA, 22 bp, Artificial Sequence
  Synthetic oligonucleotide; CTT chr11 5277034 5277055 5277039 5277034 -
gatgggattactgagttctaga

SEQ ID NO: 134794 - DNA, 22 bp, Artificial Sequence
  Synthetic oligonucleotide; TTG chr11 5277033 5277054 5277038 5277033 -
atgggattactgagttctagaa

SEQ ID NO: 134795 - DNA, 22 bp, Artificial Sequence
  Synthetic oligonucleotide; TTA chr11 5277024 5277045 5277029 5277024 -
ctgagttctagaattggactca

SEQ ID NO: 134796 - DNA, 22 bp, Artificial Sequence
  Synthetic oligonucleotide; CTG chr11 5277021 5277042 5277026 5277021 -
agttctagaattggactcattt

SEQ ID NO: 134797 - DNA, 22 bp, Artificial Sequence
  Synthetic oligonucleotide; TTC chr11 5277016 5277037 5277021 5277016 -
tagaattggactcatttgtttt

SEQ ID NO: 134798 - DNA, 22 bp, Artificial Sequence
  Synthetic oligonucleotide; CTA chr11 5277014 5277035 5277019 5277014 -
gaattggactcatttgttttgt

SEQ ID NO: 134799 - DNA, 22 bp, Artificial Sequence
  Synthetic oligonucleotide; TTG chr11 5277008 5277029 5277013 5277008 -
gactcatttgttttgtaggctg

SEQ ID NO: 134800 - DNA, 22 bp, Artificial Sequence
  Synthetic oligonucleotide; CTC chr11 5277003 5277024 5277008 5277003 -
atttgttttgtaggctgagatt

SEQ ID NO: 134801 - DNA, 22 bp, Artificial Sequence
  Synthetic oligonucleotide; TTT chr11 5276999 5277020 5277004 5276999 -
gttttgtaggctgagatttgct

SEQ ID NO: 134802 - DNA, 22 bp, Artificial Sequence
  Synthetic oligonucleotide; TTG chr11 5276998 5277019 5277003 5276998 -
ttttgtaggctgagatttgctc

SEQ ID NO: 134803 - DNA, 22 bp, Artificial Sequence
  Synthetic oligonucleotide; TTT chr11 5276995 5277016 5277000 5276995 -
tgtaggctgagatttgctcttg

SEQ ID NO: 134804 - DNA, 22 bp, Artificial Sequence
  Synthetic oligonucleotide; TTT chr11 5276994 5277015 5276999 5276994 -
gtaggctgagatttgctcttga

SEQ ID NO: 134805 - DNA, 22 bp, Artificial Sequence
  Synthetic oligonucleotide; TTG chr11 5276993 5277014 5276998 5276993 -
taggctgagatttgctcttgaa

SEQ ID NO: 134806 - DNA, 22 bp, Artificial Sequence
  Synthetic oligonucleotide; CTG chr11 5276986 5277007 5276991 5276986 -
agatttgctcttgaaaacttgt

SEQ ID NO: 134807 - DNA, 22 bp, Artificial Sequence
  Synthetic oligonucleotide; TTT chr11 5276980 5277001 5276985 5276980 -
gctcttgaaaacttgttctgac

SEQ ID NO: 134808 - DNA, 22 bp, Artificial Sequence
  Synthetic oligonucleotide; TTG chr11 5276979 5277000 5276984 5276979 -
ctcttgaaaacttgttctgacc

SEQ ID NO: 134809 - DNA, 22 bp, Artificial Sequence
  Synthetic oligonucleotide; CTC chr11 5276976 5276997 5276981 5276976 -
ttgaaaacttgttctgaccaaa

SEQ ID NO: 134810 - DNA, 22 bp, Artificial Sequence
  Synthetic oligonucleotide; CTT chr11 5276974 5276995 5276979 5276974 -
gaaaacttgttctgaccaaaat

SEQ ID NO: 134811 - DNA, 22 bp, Artificial Sequence
  Synthetic oligonucleotide; TTG chr11 5276973 5276994 5276978 5276973 -
aaaacttgttctgaccaaaata

SEQ ID NO: 134812 - DNA, 22 bp, Artificial Sequence
  Synthetic oligonucleotide; CTT chr11 5276966 5276987 5276971 5276966 -
gttctgaccaaaataaaaggct

SEQ ID NO: 134813 - DNA, 22 bp, Artificial Sequence
  Synthetic oligonucleotide; TTG chr11 5276965 5276986 5276970 5276965 -
ttctgaccaaaataaaaggctc

SEQ ID NO: 134814 - DNA, 22 bp, Artificial Sequence
  Synthetic oligonucleotide; TTC chr11 5276962 5276983 5276967 5276962 -
tgaccaaaataaaaggctcaaa

SEQ ID NO: 134815 - DNA, 22 bp, Artificial Sequence
  Synthetic oligonucleotide; CTG chr11 5276960 5276981 5276965 5276960 -
accaaaataaaaggctcaaaag

SEQ ID NO: 134816 - DNA, 22 bp, Artificial Sequence
  Synthetic oligonucleotide; CTC chr11 5276943 5276964 5276948 5276943 -
aaaagatgaatatcgaaaccag

SEQ ID NO: 134817 - DNA, 22 bp, Artificial Sequence
  Synthetic oligonucleotide; TTT chr11 5276914 5276935 5276919 5276914 -
tttacactggaatttataacta

SEQ ID NO: 134818 - DNA, 22 bp, Artificial Sequence
  Synthetic oligonucleotide; TTT chr11 5276913 5276934 5276918 5276913 -
ttacactggaatttataactag

SEQ ID NO: 134819 - DNA, 22 bp, Artificial Sequence
  Synthetic oligonucleotide; TTT chr11 5276912 5276933 5276917 5276912 -
tacactggaatttataactaga

SEQ ID NO: 134820 - DNA, 22 bp, Artificial Sequence
  Synthetic oligonucleotide; TTT chr11 5276911 5276932 5276916 5276911 -
acactggaatttataactagag

SEQ ID NO: 134821 - DNA, 22 bp, Artificial Sequence
  Synthetic oligonucleotide; TTA chr11 5276910 5276931 5276915 5276910 -
cactggaatttataactagagc

SEQ ID NO: 134822 - DNA, 22 bp, Artificial Sequence
  Synthetic oligonucleotide; CTG chr11 5276905 5276926 5276910 5276905 -
gaatttataactagagcactca

SEQ ID NO: 134823 - DNA, 22 bp, Artificial Sequence
  Synthetic oligonucleotide; TTT chr11 5276899 5276920 5276904 5276899 -
ataactagagcactcatgttta

SEQ ID NO: 134824 - DNA, 22 bp, Artificial Sequence
  Synthetic oligonucleotide; TTA chr11 5276898 5276919 5276903 5276898 -
taactagagcactcatgtttat

SEQ ID NO: 134825 - DNA, 22 bp, Artificial Sequence
  Synthetic oligonucleotide; CTA chr11 5276892 5276913 5276897 5276892 -
gagcactcatgtttatgtaagc

SEQ ID NO: 134826 - DNA, 22 bp, Artificial Sequence
  Synthetic oligonucleotide; CTC chr11 5276884 5276905 5276889 5276884 -
atgtttatgtaagcaattaatt

SEQ ID NO: 134827 - DNA, 22 bp, Artificial Sequence
  Synthetic oligonucleotide; TTT chr11 5276878 5276899 5276883 5276878 -
atgtaagcaattaattgtttca

SEQ ID NO: 134828 - DNA, 22 bp, Artificial Sequence
  Synthetic oligonucleotide; TTA chr11 5276877 5276898 5276882 5276877 -
tgtaagcaattaattgtttcat

SEQ ID NO: 134829 - DNA, 22 bp, Artificial Sequence
  Synthetic oligonucleotide; TTA chr11 5276865 5276886 5276870 5276865 -
attgtttcatcagtcaggtaaa

SEQ ID NO: 134830 - DNA, 22 bp, Artificial Sequence
  Synthetic oligonucleotide; TTG chr11 5276861 5276882 5276866 5276861 -
tttcatcagtcaggtaaaagta

SEQ ID NO: 134831 - DNA, 22 bp, Artificial Sequence
  Synthetic oligonucleotide; TTT chr11 5276858 5276879 5276863 5276858 -
catcagtcaggtaaaagtaaag

SEQ ID NO: 134832 - DNA, 22 bp, Artificial Sequence
  Synthetic oligonucleotide; TTC chr11 5276857 5276878 5276862 5276857 -
atcagtcaggtaaaagtaaaga

SEQ ID NO: 134833 - DNA, 22 bp, Artificial Sequence
  Synthetic oligonucleotide; CTG chr11 5276828 5276849 5276833 5276828 -
tgccaaggcaggtagcctaatg

SEQ ID NO: 134834 - DNA, 22 bp, Artificial Sequence
  Synthetic oligonucleotide; CTA chr11 5276809 5276830 5276814 5276809 -
atgcaatatgccactaaagtaa

SEQ ID NO: 134835 - DNA, 22 bp, Artificial Sequence
  Synthetic oligonucleotide; CTA chr11 5276793 5276814 5276798 5276793 -
aagtaaacattatttcataggt

SEQ ID NO: 134836 - DNA, 22 bp, Artificial Sequence
  Synthetic oligonucleotide; TTA chr11 5276781 5276802 5276786 5276781 -
tttcataggtgtcagatatggc

SEQ ID NO: 134837 - DNA, 22 bp, Artificial Sequence
  Synthetic oligonucleotide; TTT chr11 5276778 5276799 5276783 5276778 -
cataggtgtcagatatggctta

SEQ ID NO: 134838 - DNA, 22 bp, Artificial Sequence
  Synthetic oligonucleotide; TTC chr11 5276777 5276798 5276782 5276777 -
ataggtgtcagatatggcttat

SEQ ID NO: 134839 - DNA, 22 bp, Artificial Sequence
  Synthetic oligonucleotide; CTT chr11 5276757 5276778 5276762 5276757 -
attcatccatcttcatgggaag

SEQ ID NO: 134840 - DNA, 22 bp, Artificial Sequence
  Synthetic oligonucleotide; TTA chr11 5276756 5276777 5276761 5276756 -
ttcatccatcttcatgggaagg

SEQ ID NO: 134841 - DNA, 22 bp, Artificial Sequence
  Synthetic oligonucleotide; TTC chr11 5276753 5276774 5276758 5276753 -
atccatcttcatgggaaggatg

SEQ ID NO: 134842 - DNA, 22 bp, Artificial Sequence
  Synthetic oligonucleotide; CTT chr11 5276744 5276765 5276749 5276744 -
catgggaaggatggccttggcc

SEQ ID NO: 134843 - DNA, 22 bp, Artificial Sequence
  Synthetic oligonucleotide; TTC chr11 5276743 5276764 5276748 5276743 -
atgggaaggatggccttggcct

SEQ ID NO: 134844 - DNA, 22 bp, Artificial Sequence
  Synthetic oligonucleotide; CTT chr11 5276726 5276747 5276731 5276726 -
ggcctggacatcagtgttatgt

SEQ ID NO: 134845 - DNA, 22 bp, Artificial Sequence
  Synthetic oligonucleotide; TTG chr11 5276725 5276746 5276730 5276725 -
gcctggacatcagtgttatgtg

SEQ ID NO: 134846 - DNA, 22 bp, Artificial Sequence
  Synthetic oligonucleotide; CTG chr11 5276720 5276741 5276725 5276720 -
gacatcagtgttatgtgaggtt

SEQ ID NO: 134847 - DNA, 22 bp, Artificial Sequence
  Synthetic oligonucleotide; TTA chr11 5276707 5276728 5276712 5276707 -
tgtgaggttcaaaacacctcta

SEQ ID NO: 134848 - DNA, 22 bp, Artificial Sequence
  Synthetic oligonucleotide; TTC chr11 5276697 5276718 5276702 5276697 -
aaaacacctctaggctataagg

SEQ ID NO: 134849 - DNA, 22 bp, Artificial Sequence
  Synthetic oligonucleotide; CTC chr11 5276687 5276708 5276692 5276687 -
taggctataaggcaacagagct

SEQ ID NO: 134850 - DNA, 22 bp, Artificial Sequence
  Synthetic oligonucleotide; CTA chr11 5276685 5276706 5276690 5276685 -
ggctataaggcaacagagctcc

SEQ ID NO: 134851 - DNA, 22 bp, Artificial Sequence
  Synthetic oligonucleotide; CTA chr11 5276680 5276701 5276685 5276680 -
taaggcaacagagctccttttt

SEQ ID NO: 134852 - DNA, 22 bp, Artificial Sequence
  Synthetic oligonucleotide; CTC chr11 5276664 5276685 5276669 5276664 -
cttttttttttttctgtgcttt

SEQ ID NO: 134853 - DNA, 22 bp, Artificial Sequence
  Synthetic oligonucleotide; CTT chr11 5276661 5276682 5276666 5276661 -
ttttttttttctgtgctttcct

SEQ ID NO: 134854 - DNA, 22 bp, Artificial Sequence
  Synthetic oligonucleotide; TTT chr11 5276660 5276681 5276665 5276660 -
tttttttttctgtgctttcctg

SEQ ID NO: 134855 - DNA, 22 bp, Artificial Sequence
  Synthetic oligonucleotide; TTT chr11 5276659 5276680 5276664 5276659 -
ttttttttctgtgctttcctgg

SEQ ID NO: 134856 - DNA, 22 bp, Artificial Sequence
  Synthetic oligonucleotide; TTT chr11 5276658 5276679 5276663 5276658 -
tttttttctgtgctttcctggc

SEQ ID NO: 134857 - DNA, 22 bp, Artificial Sequence
  Synthetic oligonucleotide; TTT chr11 5276657 5276678 5276662 5276657 -
ttttttctgtgctttcctggct

SEQ ID NO: 134858 - DNA, 22 bp, Artificial Sequence
  Synthetic oligonucleotide; TTT chr11 5276656 5276677 5276661 5276656 -
tttttctgtgctttcctggctg

SEQ ID NO: 134859 - DNA, 22 bp, Artificial Sequence
  Synthetic oligonucleotide; TTT chr11 5276655 5276676 5276660 5276655 -
ttttctgtgctttcctggctgt

SEQ ID NO: 134860 - DNA, 22 bp, Artificial Sequence
  Synthetic oligonucleotide; TTT chr11 5276654 5276675 5276659 5276654 -
tttctgtgctttcctggctgtc

SEQ ID NO: 134861 - DNA, 22 bp, Artificial Sequence
  Synthetic oligonucleotide; TTT chr11 5276653 5276674 5276658 5276653 -
ttctgtgctttcctggctgtcc

SEQ ID NO: 134862 - DNA, 22 bp, Artificial Sequence
  Synthetic oligonucleotide; TTT chr11 5276652 5276673 5276657 5276652 -
tctgtgctttcctggctgtcca

SEQ ID NO: 134863 - DNA, 22 bp, Artificial Sequence
  Synthetic oligonucleotide; TTT chr11 5276651 5276672 5276656 5276651 -
ctgtgctttcctggctgtccaa

SEQ ID NO: 134864 - DNA, 22 bp, Artificial Sequence
  Synthetic oligonucleotide; TTC chr11 5276650 5276671 5276655 5276650 -
tgtgctttcctggctgtccaaa

SEQ ID NO: 134865 - DNA, 22 bp, Artificial Sequence
  Synthetic oligonucleotide; CTG chr11 5276648 5276669 5276653 5276648 -
tgctttcctggctgtccaaatc

SEQ ID NO: 134866 - DNA, 22 bp, Artificial Sequence
  Synthetic oligonucleotide; CTT chr11 5276643 5276664 5276648 5276643 -
tcctggctgtccaaatctctaa

SEQ ID NO: 134867 - DNA, 22 bp, Artificial Sequence
  Synthetic oligonucleotide; TTT chr11 5276642 5276663 5276647 5276642 -
cctggctgtccaaatctctaat

SEQ ID NO: 134868 - DNA, 22 bp, Artificial Sequence
  Synthetic oligonucleotide; TTC chr11 5276641 5276662 5276646 5276641 -
ctggctgtccaaatctctaatg

SEQ ID NO: 134869 - DNA, 22 bp, Artificial Sequence
  Synthetic oligonucleotide; CTG chr11 5276638 5276659 5276643 5276638 -
gctgtccaaatctctaatgata

SEQ ID NO: 134870 - DNA, 22 bp, Artificial Sequence
  Synthetic oligonucleotide; CTG chr11 5276634 5276655 5276639 5276634 -
tccaaatctctaatgataagca

SEQ ID NO: 134871 - DNA, 22 bp, Artificial Sequence
  Synthetic oligonucleotide; CTC chr11 5276624 5276645 5276629 5276624 -
taatgataagcatacttctatt

SEQ ID NO: 134872 - DNA, 22 bp, Artificial Sequence
  Synthetic oligonucleotide; CTA chr11 5276622 5276643 5276627 5276622 -
atgataagcatacttctattca

SEQ ID NO: 134873 - DNA, 22 bp, Artificial Sequence
  Synthetic oligonucleotide; CTT chr11 5276607 5276628 5276612 5276607 -
ctattcaatgagaatattctgt

SEQ ID NO: 134874 - DNA, 22 bp, Artificial Sequence
  Synthetic oligonucleotide; TTC chr11 5276606 5276627 5276611 5276606 -
tattcaatgagaatattctgta

SEQ ID NO: 134875 - DNA, 22 bp, Artificial Sequence
  Synthetic oligonucleotide; CTA chr11 5276604 5276625 5276609 5276604 -
ttcaatgagaatattctgtaag

SEQ ID NO: 134876 - DNA, 22 bp, Artificial Sequence
  Synthetic oligonucleotide; TTC chr11 5276601 5276622 5276606 5276601 -
aatgagaatattctgtaagatt

SEQ ID NO: 134877 - DNA, 22 bp, Artificial Sequence
  Synthetic oligonucleotide; TTC chr11 5276588 5276609 5276593 5276588 -
tgtaagattatagttaagaatt

SEQ ID NO: 134878 - DNA, 22 bp, Artificial Sequence
  Synthetic oligonucleotide; CTG chr11 5276586 5276607 5276591 5276586 -
taagattatagttaagaattgt

SEQ ID NO: 134879 - DNA, 22 bp, Artificial Sequence
  Synthetic oligonucleotide; TTA chr11 5276578 5276599 5276583 5276578 -
tagttaagaattgtgggagcca

SEQ ID NO: 134880 - DNA, 22 bp, Artificial Sequence
  Synthetic oligonucleotide; TTA chr11 5276572 5276593 5276577 5276572 -
agaattgtgggagccattccgt

SEQ ID NO: 134881 - DNA, 22 bp, Artificial Sequence
  Synthetic oligonucleotide; TTG chr11 5276565 5276586 5276570 5276565 -
tgggagccattccgtctcttat

SEQ ID NO: 134882 - DNA, 22 bp, Artificial Sequence
  Synthetic oligonucleotide; TTC chr11 5276553 5276574 5276558 5276553 -
cgtctcttatagttaaatttga

SEQ ID NO: 134883 - DNA, 22 bp, Artificial Sequence
  Synthetic oligonucleotide; CTC chr11 5276547 5276568 5276552 5276547 -
ttatagttaaatttgagcttct

SEQ ID NO: 134884 - DNA, 22 bp, Artificial Sequence
  Synthetic oligonucleotide; CTT chr11 5276545 5276566 5276550 5276545 -
atagttaaatttgagcttcttt

SEQ ID NO: 134885 - DNA, 22 bp, Artificial Sequence
  Synthetic oligonucleotide; TTA chr11 5276544 5276565 5276549 5276544 -
tagttaaatttgagcttctttt

SEQ ID NO: 134886 - DNA, 22 bp, Artificial Sequence
  Synthetic oligonucleotide; TTA chr11 5276538 5276559 5276543 5276538 -
aatttgagcttcttttatgatc

SEQ ID NO: 134887 - DNA, 22 bp, Artificial Sequence
  Synthetic oligonucleotide; TTT chr11 5276533 5276554 5276538 5276533 -
gagcttcttttatgatcactgt

SEQ ID NO: 134888 - DNA, 22 bp, Artificial Sequence
  Synthetic oligonucleotide; TTG chr11 5276532 5276553 5276537 5276532 -
agcttcttttatgatcactgtt

SEQ ID NO: 134889 - DNA, 22 bp, Artificial Sequence
  Synthetic oligonucleotide; CTT chr11 5276527 5276548 5276532 5276527 -
cttttatgatcactgttttttt

SEQ ID NO: 134890 - DNA, 22 bp, Artificial Sequence
  Synthetic oligonucleotide; TTC chr11 5276526 5276547 5276531 5276526 -
ttttatgatcactgttttttta

SEQ ID NO: 134891 - DNA, 22 bp, Artificial Sequence
  Synthetic oligonucleotide; CTT chr11 5276524 5276545 5276529 5276524 -
ttatgatcactgtttttttaat

SEQ ID NO: 134892 - DNA, 22 bp, Artificial Sequence
  Synthetic oligonucleotide; TTT chr11 5276523 5276544 5276528 5276523 -
tatgatcactgtttttttaata

SEQ ID NO: 134893 - DNA, 22 bp, Artificial Sequence
  Synthetic oligonucleotide; TTT chr11 5276522 5276543 5276527 5276522 -
atgatcactgtttttttaatat

SEQ ID NO: 134894 - DNA, 22 bp, Artificial Sequence
  Synthetic oligonucleotide; TTA chr11 5276521 5276542 5276526 5276521 -
tgatcactgtttttttaatatg

SEQ ID NO: 134895 - DNA, 22 bp, Artificial Sequence
  Synthetic oligonucleotide; CTG chr11 5276512 5276533 5276517 5276512 -
tttttttaatatgctttaagtt

SEQ ID NO: 134896 - DNA, 22 bp, Artificial Sequence
  Synthetic oligonucleotide; TTT chr11 5276509 5276530 5276514 5276509 -
ttttaatatgctttaagttctg

SEQ ID NO: 134897 - DNA, 22 bp, Artificial Sequence
  Synthetic oligonucleotide; TTT chr11 5276508 5276529 5276513 5276508 -
tttaatatgctttaagttctgg

SEQ ID NO: 134898 - DNA, 22 bp, Artificial Sequence
  Synthetic oligonucleotide; TTT chr11 5276507 5276528 5276512 5276507 -
ttaatatgctttaagttctggg

SEQ ID NO: 134899 - DNA, 22 bp, Artificial Sequence
  Synthetic oligonucleotide; TTT chr11 5276506 5276527 5276511 5276506 -
taatatgctttaagttctgggg

SEQ ID NO: 134900 - DNA, 22 bp, Artificial Sequence
  Synthetic oligonucleotide; TTT chr11 5276505 5276526 5276510 5276505 -
aatatgctttaagttctggggt

SEQ ID NO: 134901 - DNA, 22 bp, Artificial Sequence
  Synthetic oligonucleotide; TTA chr11 5276504 5276525 5276509 5276504 -
atatgctttaagttctggggta

SEQ ID NO: 134902 - DNA, 22 bp, Artificial Sequence
  Synthetic oligonucleotide; CTT chr11 5276496 5276517 5276501 5276496 -
taagttctggggtacatgtgcc

SEQ ID NO: 134903 - DNA, 22 bp, Artificial Sequence
  Synthetic oligonucleotide; TTT chr11 5276495 5276516 5276500 5276495 -
aagttctggggtacatgtgcca

SEQ ID NO: 134904 - DNA, 22 bp, Artificial Sequence
  Synthetic oligonucleotide; TTA chr11 5276494 5276515 5276499 5276494 -
agttctggggtacatgtgccat

SEQ ID NO: 134905 - DNA, 22 bp, Artificial Sequence
  Synthetic oligonucleotide; TTC chr11 5276489 5276510 5276494 5276489 -
tggggtacatgtgccatggtgg

SEQ ID NO: 134906 - DNA, 22 bp, Artificial Sequence
  Synthetic oligonucleotide; CTG chr11 5276487 5276508 5276492 5276487 -
gggtacatgtgccatggtggtt

SEQ ID NO: 134907 - DNA, 22 bp, Artificial Sequence
  Synthetic oligonucleotide; TTT chr11 5276464 5276485 5276469 5276464 -
gctgcacccatcaacccgtcat

SEQ ID NO: 134908 - DNA, 22 bp, Artificial Sequence
  Synthetic oligonucleotide; TTG chr11 5276463 5276484 5276468 5276463 -
ctgcacccatcaacccgtcatc

SEQ ID NO: 134909 - DNA, 22 bp, Artificial Sequence
  Synthetic oligonucleotide; CTG chr11 5276460 5276481 5276465 5276460 -
cacccatcaacccgtcatctac

SEQ ID NO: 134910 - DNA, 22 bp, Artificial Sequence
  Synthetic oligonucleotide; CTA chr11 5276439 5276460 5276444 5276439 -
cattaggtatttctcctaatgc

SEQ ID NO: 134911 - DNA, 22 bp, Artificial Sequence
  Synthetic oligonucleotide; TTA chr11 5276434 5276455 5276439 5276434 -
ggtatttctcctaatgctatcc

SEQ ID NO: 134912 - DNA, 22 bp, Artificial Sequence
  Synthetic oligonucleotide; TTT chr11 5276427 5276448 5276432 5276427 -
ctcctaatgctatccttcccct

SEQ ID NO: 134913 - DNA, 22 bp, Artificial Sequence
  Synthetic oligonucleotide; TTC chr11 5276426 5276447 5276431 5276426 -
tcctaatgctatccttccccta

SEQ ID NO: 134914 - DNA, 22 bp, Artificial Sequence
  Synthetic oligonucleotide; CTC chr11 5276424 5276445 5276429 5276424 -
ctaatgctatccttcccctagc

SEQ ID NO: 134915 - DNA, 22 bp, Artificial Sequence
  Synthetic oligonucleotide; CTA chr11 5276421 5276442 5276426 5276421 -
atgctatccttcccctagcccc

SEQ ID NO: 134916 - DNA, 22 bp, Artificial Sequence
  Synthetic oligonucleotide; CTA chr11 5276415 5276436 5276420 5276415 -
tccttcccctagccccccaccc

SEQ ID NO: 134917 - DNA, 22 bp, Artificial Sequence
  Synthetic oligonucleotide; CTT chr11 5276410 5276431 5276415 5276410 -
cccctagccccccacccccaac

SEQ ID NO: 134918 - DNA, 22 bp, Artificial Sequence
  Synthetic oligonucleotide; TTC chr11 5276409 5276430 5276414 5276409 -
ccctagccccccacccccaaca

SEQ ID NO: 134919 - DNA, 22 bp, Artificial Sequence
  Synthetic oligonucleotide; CTA chr11 5276404 5276425 5276409 5276404 -
gccccccacccccaacaggccc

SEQ ID NO: 134920 - DNA, 22 bp, Artificial Sequence
  Synthetic oligonucleotide; TTC chr11 5276367 5276388 5276372 5276367 -
ccctccctgtgtccatggatca

SEQ ID NO: 134921 - DNA, 22 bp, Artificial Sequence
  Synthetic oligonucleotide; CTC chr11 5276362 5276383 5276367 5276362 -
cctgtgtccatggatcactggt

SEQ ID NO: 134922 - DNA, 22 bp, Artificial Sequence
  Synthetic oligonucleotide; CTG chr11 5276358 5276379 5276363 5276358 -
tgtccatggatcactggttttt

SEQ ID NO: 134923 - DNA, 22 bp, Artificial Sequence
  Synthetic oligonucleotide; CTG chr11 5276342 5276363 5276347 5276342 -
gtttttttttgttttttttttt

SEQ ID NO: 134924 - DNA, 22 bp, Artificial Sequence
  Synthetic oligonucleotide; TTT chr11 5276338 5276359 5276343 5276338 -
ttttttgttttttttttttttt

SEQ ID NO: 134925 - DNA, 22 bp, Artificial Sequence
  Synthetic oligonucleotide; TTT chr11 5276337 5276358 5276342 5276337 -
tttttgtttttttttttttttt

SEQ ID NO: 134926 - DNA, 22 bp, Artificial Sequence
  Synthetic oligonucleotide; TTT chr11 5276336 5276357 5276341 5276336 -
ttttgtttttttttttttttta

SEQ ID NO: 134927 - DNA, 22 bp, Artificial Sequence
  Synthetic oligonucleotide; TTT chr11 5276335 5276356 5276340 5276335 -
tttgttttttttttttttttaa

SEQ ID NO: 134928 - DNA, 22 bp, Artificial Sequence
  Synthetic oligonucleotide; TTT chr11 5276334 5276355 5276339 5276334 -
ttgttttttttttttttttaaa

SEQ ID NO: 134929 - DNA, 22 bp, Artificial Sequence
  Synthetic oligonucleotide; TTT chr11 5276333 5276354 5276338 5276333 -
tgttttttttttttttttaaag

SEQ ID NO: 134930 - DNA, 22 bp, Artificial Sequence
  Synthetic oligonucleotide; TTT chr11 5276332 5276353 5276337 5276332 -
gttttttttttttttttaaagt

SEQ ID NO: 134931 - DNA, 22 bp, Artificial Sequence
  Synthetic oligonucleotide; TTG chr11 5276331 5276352 5276336 5276331 -
ttttttttttttttttaaagtc

SEQ ID NO: 134932 - DNA, 22 bp, Artificial Sequence
  Synthetic oligonucleotide; TTT chr11 5276328 5276349 5276333 5276328 -
tttttttttttttaaagtctca

SEQ ID NO: 134933 - DNA, 22 bp, Artificial Sequence
  Synthetic oligonucleotide; TTT chr11 5276327 5276348 5276332 5276327 -
ttttttttttttaaagtctcag

SEQ ID NO: 134934 - DNA, 22 bp, Artificial Sequence
  Synthetic oligonucleotide; TTT chr11 5276326 5276347 5276331 5276326 -
tttttttttttaaagtctcagt

SEQ ID NO: 134935 - DNA, 22 bp, Artificial Sequence
  Synthetic oligonucleotide; TTT chr11 5276325 5276346 5276330 5276325 -
ttttttttttaaagtctcagtt

SEQ ID NO: 134936 - DNA, 22 bp, Artificial Sequence
  Synthetic oligonucleotide; TTT chr11 5276324 5276345 5276329 5276324 -
tttttttttaaagtctcagtta

SEQ ID NO: 134937 - DNA, 22 bp, Artificial Sequence
  Synthetic oligonucleotide; TTT chr11 5276323 5276344 5276328 5276323 -
ttttttttaaagtctcagttaa

SEQ ID NO: 134938 - DNA, 22 bp, Artificial Sequence
  Synthetic oligonucleotide; TTT chr11 5276322 5276343 5276327 5276322 -
tttttttaaagtctcagttaaa

SEQ ID NO: 134939 - DNA, 22 bp, Artificial Sequence
  Synthetic oligonucleotide; TTT chr11 5276321 5276342 5276326 5276321 -
ttttttaaagtctcagttaaat

SEQ ID NO: 134940 - DNA, 22 bp, Artificial Sequence
  Synthetic oligonucleotide; TTT chr11 5276320 5276341 5276325 5276320 -
tttttaaagtctcagttaaatt

SEQ ID NO: 134941 - DNA, 22 bp, Artificial Sequence
  Synthetic oligonucleotide; TTT chr11 5276319 5276340 5276324 5276319 -
ttttaaagtctcagttaaattt

SEQ ID NO: 134942 - DNA, 22 bp, Artificial Sequence
  Synthetic oligonucleotide; TTT chr11 5276318 5276339 5276323 5276318 -
tttaaagtctcagttaaatttt

SEQ ID NO: 134943 - DNA, 22 bp, Artificial Sequence
  Synthetic oligonucleotide; TTT chr11 5276317 5276338 5276322 5276317 -
ttaaagtctcagttaaattttt

SEQ ID NO: 134944 - DNA, 22 bp, Artificial Sequence
  Synthetic oligonucleotide; TTT chr11 5276316 5276337 5276321 5276316 -
taaagtctcagttaaatttttg

SEQ ID NO: 134945 - DNA, 22 bp, Artificial Sequence
  Synthetic oligonucleotide; TTT chr11 5276315 5276336 5276320 5276315 -
aaagtctcagttaaatttttgg

SEQ ID NO: 134946 - DNA, 22 bp, Artificial Sequence
  Synthetic oligonucleotide; TTA chr11 5276314 5276335 5276319 5276314 -
aagtctcagttaaatttttgga

SEQ ID NO: 134947 - DNA, 22 bp, Artificial Sequence
  Synthetic oligonucleotide; CTC chr11 5276307 5276328 5276312 5276307 -
agttaaatttttggaatgtaat

SEQ ID NO: 134948 - DNA, 22 bp, Artificial Sequence
  Synthetic oligonucleotide; TTA chr11 5276302 5276323 5276307 5276302 -
aatttttggaatgtaatttatt

SEQ ID NO: 134949 - DNA, 22 bp, Artificial Sequence
  Synthetic oligonucleotide; TTT chr11 5276297 5276318 5276302 5276297 -
ttggaatgtaatttattttcct

SEQ ID NO: 134950 - DNA, 22 bp, Artificial Sequence
  Synthetic oligonucleotide; TTT chr11 5276296 5276317 5276301 5276296 -
tggaatgtaatttattttcctg

SEQ ID NO: 134951 - DNA, 22 bp, Artificial Sequence
  Synthetic oligonucleotide; TTT chr11 5276295 5276316 5276300 5276295 -
ggaatgtaatttattttcctgg

SEQ ID NO: 134952 - DNA, 22 bp, Artificial Sequence
  Synthetic oligonucleotide; TTG chr11 5276294 5276315 5276299 5276294 -
gaatgtaatttattttcctggt

SEQ ID NO: 134953 - DNA, 22 bp, Artificial Sequence
  Synthetic oligonucleotide; TTT chr11 5276283 5276304 5276288 5276283 -
attttcctggtatcctaggact

SEQ ID NO: 134954 - DNA, 22 bp, Artificial Sequence
  Synthetic oligonucleotide; TTA chr11 5276282 5276303 5276287 5276282 -
ttttcctggtatcctaggactt

SEQ ID NO: 134955 - DNA, 22 bp, Artificial Sequence
  Synthetic oligonucleotide; TTT chr11 5276279 5276300 5276284 5276279 -
tcctggtatcctaggacttgca

SEQ ID NO: 134956 - DNA, 22 bp, Artificial Sequence
  Synthetic oligonucleotide; TTT chr11 5276278 5276299 5276283 5276278 -
cctggtatcctaggacttgcaa

SEQ ID NO: 134957 - DNA, 22 bp, Artificial Sequence
  Synthetic oligonucleotide; TTC chr11 5276277 5276298 5276282 5276277 -
ctggtatcctaggacttgcaag

SEQ ID NO: 134958 - DNA, 22 bp, Artificial Sequence
  Synthetic oligonucleotide; CTG chr11 5276274 5276295 5276279 5276274 -
gtatcctaggacttgcaagtta

SEQ ID NO: 134959 - DNA, 22 bp, Artificial Sequence
  Synthetic oligonucleotide; CTA chr11 5276266 5276287 5276271 5276266 -
ggacttgcaagttatctggtca

SEQ ID NO: 134960 - DNA, 22 bp, Artificial Sequence
  Synthetic oligonucleotide; CTT chr11 5276260 5276281 5276265 5276260 -
gcaagttatctggtcactttag

SEQ ID NO: 134961 - DNA, 22 bp, Artificial Sequence
  Synthetic oligonucleotide; TTG chr11 5276259 5276280 5276264 5276259 -
caagttatctggtcactttagc

SEQ ID NO: 134962 - DNA, 22 bp, Artificial Sequence
  Synthetic oligonucleotide; TTA chr11 5276252 5276273 5276257 5276252 -
tctggtcactttagccctcacg

SEQ ID NO: 134963 - DNA, 22 bp, Artificial Sequence
  Synthetic oligonucleotide; CTG chr11 5276248 5276269 5276253 5276248 -
gtcactttagccctcacgtttt

SEQ ID NO: 134964 - DNA, 22 bp, Artificial Sequence
  Synthetic oligonucleotide; CTT chr11 5276241 5276262 5276246 5276241 -
tagccctcacgttttgatgata

SEQ ID NO: 134965 - DNA, 22 bp, Artificial Sequence
  Synthetic oligonucleotide; TTT chr11 5276240 5276261 5276245 5276240 -
agccctcacgttttgatgataa

SEQ ID NO: 134966 - DNA, 22 bp, Artificial Sequence
  Synthetic oligonucleotide; TTA chr11 5276239 5276260 5276244 5276239 -
gccctcacgttttgatgataat

SEQ ID NO: 134967 - DNA, 22 bp, Artificial Sequence
  Synthetic oligonucleotide; CTC chr11 5276233 5276254 5276238 5276233 -
acgttttgatgataatcacata

SEQ ID NO: 134968 - DNA, 22 bp, Artificial Sequence
  Synthetic oligonucleotide; TTT chr11 5276227 5276248 5276232 5276227 -
tgatgataatcacatatttgta

SEQ ID NO: 134969 - DNA, 22 bp, Artificial Sequence
  Synthetic oligonucleotide; TTT chr11 5276226 5276247 5276231 5276226 -
gatgataatcacatatttgtaa

SEQ ID NO: 134970 - DNA, 22 bp, Artificial Sequence
  Synthetic oligonucleotide; TTG chr11 5276225 5276246 5276230 5276225 -
atgataatcacatatttgtaaa

SEQ ID NO: 134971 - DNA, 22 bp, Artificial Sequence
  Synthetic oligonucleotide; TTT chr11 5276208 5276229 5276213 5276208 -
gtaaacacaacacacacacaca

SEQ ID NO: 134972 - DNA, 22 bp, Artificial Sequence
  Synthetic oligonucleotide; TTG chr11 5276207 5276228 5276212 5276207 -
taaacacaacacacacacacac

SEQ ID NO: 134973 - DNA, 22 bp, Artificial Sequence
  Synthetic oligonucleotide; TTT chr11 5276125 5276146 5276130 5276125 -
atcgggcatttctgagcaacta

SEQ ID NO: 134974 - DNA, 22 bp, Artificial Sequence
  Synthetic oligonucleotide; TTA chr11 5276124 5276145 5276129 5276124 -
tcgggcatttctgagcaactaa

SEQ ID NO: 134975 - DNA, 22 bp, Artificial Sequence
  Synthetic oligonucleotide; TTT chr11 5276114 5276135 5276119 5276114 -
ctgagcaactaatcatgcagga

SEQ ID NO: 134976 - DNA, 22 bp, Artificial Sequence
  Synthetic oligonucleotide; TTC chr11 5276113 5276134 5276118 5276113 -
tgagcaactaatcatgcaggac

SEQ ID NO: 134977 - DNA, 22 bp, Artificial Sequence
  Synthetic oligonucleotide; CTG chr11 5276111 5276132 5276116 5276111 -
agcaactaatcatgcaggactc

SEQ ID NO: 134978 - DNA, 22 bp, Artificial Sequence
  Synthetic oligonucleotide; CTA chr11 5276103 5276124 5276108 5276103 -
atcatgcaggactctcaaacac

SEQ ID NO: 134979 - DNA, 22 bp, Artificial Sequence
  Synthetic oligonucleotide; CTC chr11 5276089 5276110 5276094 5276089 -
tcaaacactaacctatagcctt

SEQ ID NO: 134980 - DNA, 22 bp, Artificial Sequence
  Synthetic oligonucleotide; CTC chr11 5276087 5276108 5276092 5276087 -
aaacactaacctatagcctttt

SEQ ID NO: 134981 - DNA, 22 bp, Artificial Sequence
  Synthetic oligonucleotide; CTA chr11 5276079 5276100 5276084 5276079 -
acctatagccttttctatgtat

SEQ ID NO: 134982 - DNA, 22 bp, Artificial Sequence
  Synthetic oligonucleotide; CTA chr11 5276074 5276095 5276079 5276074 -
tagccttttctatgtatctact

SEQ ID NO: 134983 - DNA, 22 bp, Artificial Sequence
  Synthetic oligonucleotide; CTT chr11 5276067 5276088 5276072 5276067 -
ttctatgtatctacttgtgtag

SEQ ID NO: 134984 - DNA, 22 bp, Artificial Sequence
  Synthetic oligonucleotide; TTT chr11 5276066 5276087 5276071 5276066 -
tctatgtatctacttgtgtaga

SEQ ID NO: 134985 - DNA, 22 bp, Artificial Sequence
  Synthetic oligonucleotide; TTT chr11 5276065 5276086 5276070 5276065 -
ctatgtatctacttgtgtagaa

SEQ ID NO: 134986 - DNA, 22 bp, Artificial Sequence
  Synthetic oligonucleotide; TTC chr11 5276064 5276085 5276069 5276064 -
tatgtatctacttgtgtagaaa

SEQ ID NO: 134987 - DNA, 22 bp, Artificial Sequence
  Synthetic oligonucleotide; CTA chr11 5276062 5276083 5276067 5276062 -
tgtatctacttgtgtagaaacc

SEQ ID NO: 134988 - DNA, 22 bp, Artificial Sequence
  Synthetic oligonucleotide; CTA chr11 5276054 5276075 5276059 5276054 -
cttgtgtagaaaccaagcgtgg

SEQ ID NO: 134989 - DNA, 22 bp, Artificial Sequence
  Synthetic oligonucleotide; CTT chr11 5276051 5276072 5276056 5276051 -
gtgtagaaaccaagcgtgggga

SEQ ID NO: 134990 - DNA, 22 bp, Artificial Sequence
  Synthetic oligonucleotide; TTG chr11 5276050 5276071 5276055 5276050 -
tgtagaaaccaagcgtggggac

SEQ ID NO: 134991 - DNA, 22 bp, Artificial Sequence
  Synthetic oligonucleotide; CTG chr11 5276026 5276047 5276031 5276026 -
agaaggcaatagcaggagcatt

SEQ ID NO: 134992 - DNA, 22 bp, Artificial Sequence
  Synthetic oligonucleotide; TTC chr11 5276003 5276024 5276008 5276003 -
tgactctcactgcctttagcta

SEQ ID NO: 134993 - DNA, 22 bp, Artificial Sequence
  Synthetic oligonucleotide; CTG chr11 5276001 5276022 5276006 5276001 -
actctcactgcctttagctagg

SEQ ID NO: 134994 - DNA, 22 bp, Artificial Sequence
  Synthetic oligonucleotide; CTC chr11 5275997 5276018 5276002 5275997 -
tcactgcctttagctaggcccc

SEQ ID NO: 134995 - DNA, 22 bp, Artificial Sequence
  Synthetic oligonucleotide; CTC chr11 5275995 5276016 5276000 5275995 -
actgcctttagctaggcccctc

SEQ ID NO: 134996 - DNA, 22 bp, Artificial Sequence
  Synthetic oligonucleotide; CTG chr11 5275991 5276012 5275996 5275991 -
cctttagctaggcccctccctc

SEQ ID NO: 134997 - DNA, 22 bp, Artificial Sequence
  Synthetic oligonucleotide; CTT chr11 5275987 5276008 5275992 5275987 -
tagctaggcccctccctcatca

SEQ ID NO: 134998 - DNA, 22 bp, Artificial Sequence
  Synthetic oligonucleotide; TTT chr11 5275986 5276007 5275991 5275986 -
agctaggcccctccctcatcac

SEQ ID NO: 134999 - DNA, 22 bp, Artificial Sequence
  Synthetic oligonucleotide; TTA chr11 5275985 5276006 5275990 5275985 -
gctaggcccctccctcatcaca

SEQ ID NO: 135000 - DNA, 22 bp, Artificial Sequence
  Synthetic oligonucleotide; CTA chr11 5275981 5276002 5275986 5275981 -
ggcccctccctcatcacagctc

SEQ ID NO: 135001 - DNA, 22 bp, Artificial Sequence
  Synthetic oligonucleotide; CTC chr11 5275973 5275994 5275978 5275973 -
cctcatcacagctcagcatagt

SEQ ID NO: 135002 - DNA, 22 bp, Artificial Sequence
  Synthetic oligonucleotide; CTC chr11 5275969 5275990 5275974 5275969 -
atcacagctcagcatagtcctg

SEQ ID NO: 135003 - DNA, 22 bp, Artificial Sequence
  Synthetic oligonucleotide; CTC chr11 5275959 5275980 5275964 5275959 -
agcatagtcctgagctcttatc

SEQ ID NO: 135004 - DNA, 22 bp, Artificial Sequence
  Synthetic oligonucleotide; CTG chr11 5275947 5275968 5275952 5275947 -
agctcttatctatatccacaca

SEQ ID NO: 135005 - DNA, 22 bp, Artificial Sequence
  Synthetic oligonucleotide; CTC chr11 5275942 5275963 5275947 5275942 -
ttatctatatccacacacagtt

SEQ ID NO: 135006 - DNA, 22 bp, Artificial Sequence
  Synthetic oligonucleotide; CTT chr11 5275940 5275961 5275945 5275940 -
atctatatccacacacagtttc

SEQ ID NO: 135007 - DNA, 22 bp, Artificial Sequence
  Synthetic oligonucleotide; TTA chr11 5275939 5275960 5275944 5275939 -
tctatatccacacacagtttct

SEQ ID NO: 135008 - DNA, 22 bp, Artificial Sequence
  Synthetic oligonucleotide; CTA chr11 5275935 5275956 5275940 5275935 -
tatccacacacagtttctgacg

SEQ ID NO: 135009 - DNA, 22 bp, Artificial Sequence
  Synthetic oligonucleotide; TTT chr11 5275919 5275940 5275924 5275919 -
ctgacgctgcccagctatcacc

SEQ ID NO: 135010 - DNA, 22 bp, Artificial Sequence
  Synthetic oligonucleotide; TTC chr11 5275918 5275939 5275923 5275918 -
tgacgctgcccagctatcacca

SEQ ID NO: 135011 - DNA, 22 bp, Artificial Sequence
  Synthetic oligonucleotide; CTG chr11 5275916 5275937 5275921 5275916 -
acgctgcccagctatcaccatc

SEQ ID NO: 135012 - DNA, 22 bp, Artificial Sequence
  Synthetic oligonucleotide; CTG chr11 5275910 5275931 5275915 5275910 -
cccagctatcaccatcccaagt

SEQ ID NO: 135013 - DNA, 22 bp, Artificial Sequence
  Synthetic oligonucleotide; CTA chr11 5275902 5275923 5275907 5275902 -
tcaccatcccaagtctaaagaa

SEQ ID NO: 135014 - DNA, 22 bp, Artificial Sequence
  Synthetic oligonucleotide; CTA chr11 5275885 5275906 5275890 5275885 -
aagaaaaaaataatgggtttgc

SEQ ID NO: 135015 - DNA, 22 bp, Artificial Sequence
  Synthetic oligonucleotide; TTT chr11 5275865 5275886 5275870 5275865 -
gcccatctctgttgattagaaa

SEQ ID NO: 135016 - DNA, 22 bp, Artificial Sequence
  Synthetic oligonucleotide; TTG chr11 5275864 5275885 5275869 5275864 -
cccatctctgttgattagaaaa

SEQ ID NO: 135017 - DNA, 22 bp, Artificial Sequence
  Synthetic oligonucleotide; CTC chr11 5275856 5275877 5275861 5275856 -
tgttgattagaaaacaaaacaa

SEQ ID NO: 135018 - DNA, 22 bp, Artificial Sequence
  Synthetic oligonucleotide; CTG chr11 5275854 5275875 5275859 5275854 -
ttgattagaaaacaaaacaaaa

SEQ ID NO: 135019 - DNA, 22 bp, Artificial Sequence
  Synthetic oligonucleotide; TTG chr11 5275851 5275872 5275856 5275851 -
attagaaaacaaaacaaaataa

SEQ ID NO: 135020 - DNA, 22 bp, Artificial Sequence
  Synthetic oligonucleotide; TTA chr11 5275847 5275868 5275852 5275847 -
gaaaacaaaacaaaataaaata

SEQ ID NO: 135021 - DNA, 22 bp, Artificial Sequence
  Synthetic oligonucleotide; CTA chr11 5275817 5275838 5275822 5275817 -
agctcccagaaaacatgactaa

SEQ ID NO: 135022 - DNA, 22 bp, Artificial Sequence
  Synthetic oligonucleotide; CTC chr11 5275812 5275833 5275817 5275812 -
ccagaaaacatgactaaaccag

SEQ ID NO: 135023 - DNA, 22 bp, Artificial Sequence
  Synthetic oligonucleotide; CTA chr11 5275796 5275817 5275801 5275796 -
aaccagcaagaagaagaaaata

SEQ ID NO: 135024 - DNA, 22 bp, Artificial Sequence
  Synthetic oligonucleotide; CTG chr11 5275752 5275773 5275757 5275752 -
gtgacactagtgtctgaatgag

SEQ ID NO: 135025 - DNA, 22 bp, Artificial Sequence
  Synthetic oligonucleotide; CTA chr11 5275743 5275764 5275748 5275743 -
gtgtctgaatgaggcttgagta

SEQ ID NO: 135026 - DNA, 22 bp, Artificial Sequence
  Synthetic oligonucleotide; CTG chr11 5275736 5275757 5275741 5275736 -
aatgaggcttgagtacagaaaa

SEQ ID NO: 135027 - DNA, 22 bp, Artificial Sequence
  Synthetic oligonucleotide; CTT chr11 5275726 5275747 5275731 5275726 -
gagtacagaaaagaggctctag

SEQ ID NO: 135028 - DNA, 22 bp, Artificial Sequence
  Synthetic oligonucleotide; TTG chr11 5275725 5275746 5275730 5275725 -
agtacagaaaagaggctctagc

SEQ ID NO: 135029 - DNA, 22 bp, Artificial Sequence
  Synthetic oligonucleotide; CTC chr11 5275707 5275728 5275712 5275707 -
tagcagcatagtggtttagagg

SEQ ID NO: 135030 - DNA, 22 bp, Artificial Sequence
  Synthetic oligonucleotide; CTA chr11 5275705 5275726 5275710 5275705 -
gcagcatagtggtttagaggag

SEQ ID NO: 135031 - DNA, 22 bp, Artificial Sequence
  Synthetic oligonucleotide; TTT chr11 5275690 5275711 5275695 5275690 -
agaggagatgtttctttccttc

SEQ ID NO: 135032 - DNA, 22 bp, Artificial Sequence
  Synthetic oligonucleotide; TTA chr11 5275689 5275710 5275694 5275689 -
gaggagatgtttctttccttca

SEQ ID NO: 135033 - DNA, 22 bp, Artificial Sequence
  Synthetic oligonucleotide; TTT chr11 5275677 5275698 5275682 5275677 -
ctttccttcacagatgccttag

SEQ ID NO: 135034 - DNA, 22 bp, Artificial Sequence
  Synthetic oligonucleotide; TTC chr11 5275676 5275697 5275681 5275676 -
tttccttcacagatgccttagc

SEQ ID NO: 135035 - DNA, 22 bp, Artificial Sequence
  Synthetic oligonucleotide; CTT chr11 5275674 5275695 5275679 5275674 -
tccttcacagatgccttagcct

SEQ ID NO: 135036 - DNA, 22 bp, Artificial Sequence
  Synthetic oligonucleotide; TTT chr11 5275673 5275694 5275678 5275673 -
ccttcacagatgccttagcctc

SEQ ID NO: 135037 - DNA, 22 bp, Artificial Sequence
  Synthetic oligonucleotide; TTC chr11 5275672 5275693 5275677 5275672 -
cttcacagatgccttagcctca

SEQ ID NO: 135038 - DNA, 22 bp, Artificial Sequence
  Synthetic oligonucleotide; CTT chr11 5275669 5275690 5275674 5275669 -
cacagatgccttagcctcaata

SEQ ID NO: 135039 - DNA, 22 bp, Artificial Sequence
  Synthetic oligonucleotide; TTC chr11 5275668 5275689 5275673 5275668 -
acagatgccttagcctcaataa

SEQ ID NO: 135040 - DNA, 22 bp, Artificial Sequence
  Synthetic oligonucleotide; CTT chr11 5275657 5275678 5275662 5275657 -
agcctcaataagcttgcggttg

SEQ ID NO: 135041 - DNA, 22 bp, Artificial Sequence
  Synthetic oligonucleotide; TTA chr11 5275656 5275677 5275661 5275656 -
gcctcaataagcttgcggttgt

SEQ ID NO: 135042 - DNA, 22 bp, Artificial Sequence
  Synthetic oligonucleotide; CTC chr11 5275651 5275672 5275656 5275651 -
aataagcttgcggttgtggaag

SEQ ID NO: 135043 - DNA, 22 bp, Artificial Sequence
  Synthetic oligonucleotide; CTT chr11 5275642 5275663 5275647 5275642 -
gcggttgtggaagtttactttc

SEQ ID NO: 135044 - DNA, 22 bp, Artificial Sequence
  Synthetic oligonucleotide; TTG chr11 5275641 5275662 5275646 5275641 -
cggttgtggaagtttactttca

SEQ ID NO: 135045 - DNA, 22 bp, Artificial Sequence
  Synthetic oligonucleotide; TTG chr11 5275635 5275656 5275640 5275635 -
tggaagtttactttcagaacaa

SEQ ID NO: 135046 - DNA, 22 bp, Artificial Sequence
  Synthetic oligonucleotide; TTT chr11 5275626 5275647 5275631 5275626 -
actttcagaacaaactcctgtg

SEQ ID NO: 135047 - DNA, 22 bp, Artificial Sequence
  Synthetic oligonucleotide; TTA chr11 5275625 5275646 5275630 5275625 -
ctttcagaacaaactcctgtgg

SEQ ID NO: 135048 - DNA, 22 bp, Artificial Sequence
  Synthetic oligonucleotide; CTT chr11 5275622 5275643 5275627 5275622 -
tcagaacaaactcctgtggggc

SEQ ID NO: 135049 - DNA, 22 bp, Artificial Sequence
  Synthetic oligonucleotide; TTT chr11 5275621 5275642 5275626 5275621 -
cagaacaaactcctgtggggct

SEQ ID NO: 135050 - DNA, 22 bp, Artificial Sequence
  Synthetic oligonucleotide; TTC chr11 5275620 5275641 5275625 5275620 -
agaacaaactcctgtggggcta

SEQ ID NO: 135051 - DNA, 22 bp, Artificial Sequence
  Synthetic oligonucleotide; CTC chr11 5275609 5275630 5275614 5275609 -
ctgtggggctagaattattgat

SEQ ID NO: 135052 - DNA, 22 bp, Artificial Sequence
  Synthetic oligonucleotide; CTG chr11 5275606 5275627 5275611 5275606 -
tggggctagaattattgatggc

SEQ ID NO: 135053 - DNA, 22 bp, Artificial Sequence
  Synthetic oligonucleotide; CTA chr11 5275598 5275619 5275603 5275598 -
gaattattgatggctaaaagaa

SEQ ID NO: 135054 - DNA, 22 bp, Artificial Sequence
  Synthetic oligonucleotide; TTA chr11 5275592 5275613 5275597 5275592 -
ttgatggctaaaagaagcccgg

SEQ ID NO: 135055 - DNA, 22 bp, Artificial Sequence
  Synthetic oligonucleotide; TTG chr11 5275589 5275610 5275594 5275589 -
atggctaaaagaagcccggggg

SEQ ID NO: 135056 - DNA, 22 bp, Artificial Sequence
  Synthetic oligonucleotide; CTA chr11 5275582 5275603 5275587 5275582 -
aaagaagcccgggggagggaaa

SEQ ID NO: 135057 - DNA, 22 bp, Artificial Sequence
  Synthetic oligonucleotide; TTC chr11 5275552 5275573 5275557 5275552 -
agcatcctcacccttagtgaca

SEQ ID NO: 135058 - DNA, 22 bp, Artificial Sequence
  Synthetic oligonucleotide; CTC chr11 5275543 5275564 5275548 5275543 -
acccttagtgacacaaaacaga

SEQ ID NO: 135059 - DNA, 22 bp, Artificial Sequence
  Synthetic oligonucleotide; CTT chr11 5275537 5275558 5275542 5275537 -
agtgacacaaaacagagggggc

SEQ ID NO: 135060 - DNA, 22 bp, Artificial Sequence
  Synthetic oligonucleotide; TTA chr11 5275536 5275557 5275541 5275536 -
gtgacacaaaacagagggggcc

SEQ ID NO: 135061 - DNA, 22 bp, Artificial Sequence
  Synthetic oligonucleotide; CTG chr11 5275512 5275533 5275517 5275512 -
gttttccatatttcctcatgat

SEQ ID NO: 135062 - DNA, 22 bp, Artificial Sequence
  Synthetic oligonucleotide; TTT chr11 5275508 5275529 5275513 5275508 -
tccatatttcctcatgatggat

SEQ ID NO: 135063 - DNA, 22 bp, Artificial Sequence
  Synthetic oligonucleotide; TTT chr11 5275507 5275528 5275512 5275507 -
ccatatttcctcatgatggatg

SEQ ID NO: 135064 - DNA, 22 bp, Artificial Sequence
  Synthetic oligonucleotide; TTC chr11 5275506 5275527 5275511 5275506 -
catatttcctcatgatggatga

SEQ ID NO: 135065 - DNA, 22 bp, Artificial Sequence
  Synthetic oligonucleotide; TTT chr11 5275499 5275520 5275504 5275499 -
cctcatgatggatgatctcgtt

SEQ ID NO: 135066 - DNA, 22 bp, Artificial Sequence
  Synthetic oligonucleotide; TTC chr11 5275498 5275519 5275503 5275498 -
ctcatgatggatgatctcgtta

SEQ ID NO: 135067 - DNA, 22 bp, Artificial Sequence
  Synthetic oligonucleotide; CTC chr11 5275495 5275516 5275500 5275495 -
atgatggatgatctcgttaatg

SEQ ID NO: 135068 - DNA, 22 bp, Artificial Sequence
  Synthetic oligonucleotide; CTC chr11 5275480 5275501 5275485 5275480 -
gttaatgaaggtggtctgacga

SEQ ID NO: 135069 - DNA, 22 bp, Artificial Sequence
  Synthetic oligonucleotide; TTA chr11 5275476 5275497 5275481 5275476 -
atgaaggtggtctgacgagatc

SEQ ID NO: 135070 - DNA, 22 bp, Artificial Sequence
  Synthetic oligonucleotide; CTG chr11 5275462 5275483 5275467 5275462 -
acgagatcattgcttcttccat

SEQ ID NO: 135071 - DNA, 22 bp, Artificial Sequence
  Synthetic oligonucleotide; TTG chr11 5275450 5275471 5275455 5275450 -
cttcttccatttaagccttgct

SEQ ID NO: 135072 - DNA, 22 bp, Artificial Sequence
  Synthetic oligonucleotide; CTT chr11 5275447 5275468 5275452 5275447 -
cttccatttaagccttgctcac

SEQ ID NO: 135073 - DNA, 22 bp, Artificial Sequence
  Synthetic oligonucleotide; TTC chr11 5275446 5275467 5275451 5275446 -
ttccatttaagccttgctcact

SEQ ID NO: 135074 - DNA, 22 bp, Artificial Sequence
  Synthetic oligonucleotide; CTT chr11 5275444 5275465 5275449 5275444 -
ccatttaagccttgctcacttg

SEQ ID NO: 135075 - DNA, 22 bp, Artificial Sequence
  Synthetic oligonucleotide; TTC chr11 5275443 5275464 5275448 5275443 -
catttaagccttgctcacttgc

SEQ ID NO: 135076 - DNA, 22 bp, Artificial Sequence
  Synthetic oligonucleotide; TTT chr11 5275438 5275459 5275443 5275438 -
aagccttgctcacttgccaatc

SEQ ID NO: 135077 - DNA, 22 bp, Artificial Sequence
  Synthetic oligonucleotide; TTA chr11 5275437 5275458 5275442 5275437 -
agccttgctcacttgccaatcc

SEQ ID NO: 135078 - DNA, 22 bp, Artificial Sequence
  Synthetic oligonucleotide; CTT chr11 5275431 5275452 5275436 5275431 -
gctcacttgccaatcctcagtt

SEQ ID NO: 135079 - DNA, 22 bp, Artificial Sequence
  Synthetic oligonucleotide; TTG chr11 5275430 5275451 5275435 5275430 -
ctcacttgccaatcctcagttt

SEQ ID NO: 135080 - DNA, 22 bp, Artificial Sequence
  Synthetic oligonucleotide; CTC chr11 5275427 5275448 5275432 5275427 -
acttgccaatcctcagttttaa

SEQ ID NO: 135081 - DNA, 22 bp, Artificial Sequence
  Synthetic oligonucleotide; CTT chr11 5275423 5275444 5275428 5275423 -
gccaatcctcagttttaacctt

SEQ ID NO: 135082 - DNA, 22 bp, Artificial Sequence
  Synthetic oligonucleotide; TTG chr11 5275422 5275443 5275427 5275422 -
ccaatcctcagttttaaccttc

SEQ ID NO: 135083 - DNA, 22 bp, Artificial Sequence
  Synthetic oligonucleotide; CTC chr11 5275413 5275434 5275418 5275413 -
agttttaaccttctccagagaa

SEQ ID NO: 135084 - DNA, 22 bp, Artificial Sequence
  Synthetic oligonucleotide; TTT chr11 5275408 5275429 5275413 5275408 -
taaccttctccagagaaataca

SEQ ID NO: 135085 - DNA, 22 bp, Artificial Sequence
  Synthetic oligonucleotide; TTT chr11 5275407 5275428 5275412 5275407 -
aaccttctccagagaaatacac

SEQ ID NO: 135086 - DNA, 22 bp, Artificial Sequence
  Synthetic oligonucleotide; TTA chr11 5275406 5275427 5275411 5275406 -
accttctccagagaaatacaca

SEQ ID NO: 135087 - DNA, 22 bp, Artificial Sequence
  Synthetic oligonucleotide; CTT chr11 5275401 5275422 5275406 5275401 -
ctccagagaaatacacattttt

SEQ ID NO: 135088 - DNA, 22 bp, Artificial Sequence
  Synthetic oligonucleotide; TTC chr11 5275400 5275421 5275405 5275400 -
tccagagaaatacacatttttt

SEQ ID NO: 135089 - DNA, 22 bp, Artificial Sequence
  Synthetic oligonucleotide; CTC chr11 5275398 5275419 5275403 5275398 -
cagagaaatacacattttttat

SEQ ID NO: 135090 - DNA, 22 bp, Artificial Sequence
  Synthetic oligonucleotide; TTT chr11 5275381 5275402 5275386 5275381 -
tttattcaggaaacatactatg

SEQ ID NO: 135091 - DNA, 22 bp, Artificial Sequence
  Synthetic oligonucleotide; TTT chr11 5275380 5275401 5275385 5275380 -
ttattcaggaaacatactatgt

SEQ ID NO: 135092 - DNA, 22 bp, Artificial Sequence
  Synthetic oligonucleotide; TTT chr11 5275379 5275400 5275384 5275379 -
tattcaggaaacatactatgtt

SEQ ID NO: 135093 - DNA, 22 bp, Artificial Sequence
  Synthetic oligonucleotide; TTT chr11 5275378 5275399 5275383 5275378 -
attcaggaaacatactatgtta

SEQ ID NO: 135094 - DNA, 22 bp, Artificial Sequence
  Synthetic oligonucleotide; TTA chr11 5275377 5275398 5275382 5275377 -
ttcaggaaacatactatgttat

SEQ ID NO: 135095 - DNA, 22 bp, Artificial Sequence
  Synthetic oligonucleotide; TTC chr11 5275374 5275395 5275379 5275374 -
aggaaacatactatgttatagt

SEQ ID NO: 135096 - DNA, 22 bp, Artificial Sequence
  Synthetic oligonucleotide; CTA chr11 5275361 5275382 5275366 5275361 -
tgttatagtttcaatactaaat

SEQ ID NO: 135097 - DNA, 22 bp, Artificial Sequence
  Synthetic oligonucleotide; TTA chr11 5275356 5275377 5275361 5275356 -
tagtttcaatactaaataatca

SEQ ID NO: 135098 - DNA, 22 bp, Artificial Sequence
  Synthetic oligonucleotide; TTT chr11 5275350 5275371 5275355 5275350 -
caatactaaataatcaaagtac

SEQ ID NO: 135099 - DNA, 22 bp, Artificial Sequence
  Synthetic oligonucleotide; TTC chr11 5275349 5275370 5275354 5275349 -
aatactaaataatcaaagtact

SEQ ID NO: 135100 - DNA, 22 bp, Artificial Sequence
  Synthetic oligonucleotide; CTA chr11 5275342 5275363 5275347 5275342 -
aataatcaaagtactgaagata

SEQ ID NO: 135101 - DNA, 22 bp, Artificial Sequence
  Synthetic oligonucleotide; CTG chr11 5275326 5275347 5275331 5275326 -
aagatagcatgcataggcaaga

SEQ ID NO: 135102 - DNA, 22 bp, Artificial Sequence
  Synthetic oligonucleotide; CTT chr11 5275294 5275315 5275299 5275294 -
agctttatgttgctgttgtttc

SEQ ID NO: 135103 - DNA, 22 bp, Artificial Sequence
  Synthetic oligonucleotide; TTA chr11 5275293 5275314 5275298 5275293 -
gctttatgttgctgttgtttca

SEQ ID NO: 135104 - DNA, 22 bp, Artificial Sequence
  Synthetic oligonucleotide; CTT chr11 5275289 5275310 5275294 5275289 -
tatgttgctgttgtttcagaat

SEQ ID NO: 135105 - DNA, 22 bp, Artificial Sequence
  Synthetic oligonucleotide; TTT chr11 5275288 5275309 5275293 5275288 -
atgttgctgttgtttcagaatt

SEQ ID NO: 135106 - DNA, 22 bp, Artificial Sequence
  Synthetic oligonucleotide; TTA chr11 5275287 5275308 5275292 5275287 -
tgttgctgttgtttcagaattt

SEQ ID NO: 135107 - DNA, 22 bp, Artificial Sequence
  Synthetic oligonucleotide; TTG chr11 5275282 5275303 5275287 5275282 -
ctgttgtttcagaatttaaaaa

SEQ ID NO: 135108 - DNA, 22 bp, Artificial Sequence
  Synthetic oligonucleotide; CTG chr11 5275279 5275300 5275284 5275279 -
ttgtttcagaatttaaaaaaga

SEQ ID NO: 135109 - DNA, 22 bp, Artificial Sequence
  Synthetic oligonucleotide; TTG chr11 5275276 5275297 5275281 5275276 -
tttcagaatttaaaaaagatca

SEQ ID NO: 135110 - DNA, 22 bp, Artificial Sequence
  Synthetic oligonucleotide; TTT chr11 5275273 5275294 5275278 5275273 -
cagaatttaaaaaagatcacca

SEQ ID NO: 135111 - DNA, 22 bp, Artificial Sequence
  Synthetic oligonucleotide; TTC chr11 5275272 5275293 5275277 5275272 -
agaatttaaaaaagatcaccaa

SEQ ID NO: 135112 - DNA, 22 bp, Artificial Sequence
  Synthetic oligonucleotide; TTT chr11 5275265 5275286 5275270 5275265 -
aaaaaagatcaccaagtcaagg

SEQ ID NO: 135113 - DNA, 22 bp, Artificial Sequence
  Synthetic oligonucleotide; TTA chr11 5275264 5275285 5275269 5275264 -
aaaaagatcaccaagtcaagga

SEQ ID NO: 135114 - DNA, 22 bp, Artificial Sequence
  Synthetic oligonucleotide; CTT chr11 5275239 5275260 5275244 5275239 -
ctcagttctagcactagaggtg

SEQ ID NO: 135115 - DNA, 22 bp, Artificial Sequence
  Synthetic oligonucleotide; TTC chr11 5275238 5275259 5275243 5275238 -
tcagttctagcactagaggtgg

SEQ ID NO: 135116 - DNA, 22 bp, Artificial Sequence
  Synthetic oligonucleotide; CTC chr11 5275236 5275257 5275241 5275236 -
agttctagcactagaggtggaa

SEQ ID NO: 135117 - DNA, 22 bp, Artificial Sequence
  Synthetic oligonucleotide; TTC chr11 5275231 5275252 5275236 5275231 -
tagcactagaggtggaatctta

SEQ ID NO: 135118 - DNA, 22 bp, Artificial Sequence
  Synthetic oligonucleotide; CTA chr11 5275229 5275250 5275234 5275229 -
gcactagaggtggaatcttagc

SEQ ID NO: 135119 - DNA, 22 bp, Artificial Sequence
  Synthetic oligonucleotide; CTA chr11 5275223 5275244 5275228 5275223 -
gaggtggaatcttagcatataa

SEQ ID NO: 135120 - DNA, 22 bp, Artificial Sequence
  Synthetic oligonucleotide; CTT chr11 5275210 5275231 5275215 5275210 -
agcatataatcagaggtttttc

SEQ ID NO: 135121 - DNA, 22 bp, Artificial Sequence
  Synthetic oligonucleotide; TTA chr11 5275209 5275230 5275214 5275209 -
gcatataatcagaggtttttca

SEQ ID NO: 135122 - DNA, 22 bp, Artificial Sequence
  Synthetic oligonucleotide; TTT chr11 5275191 5275212 5275196 5275191 -
ttcaaaatttctagacataaga

SEQ ID NO: 135123 - DNA, 22 bp, Artificial Sequence
  Synthetic oligonucleotide; TTT chr11 5275190 5275211 5275195 5275190 -
tcaaaatttctagacataagat

SEQ ID NO: 135124 - DNA, 22 bp, Artificial Sequence
  Synthetic oligonucleotide; TTT chr11 5275189 5275210 5275194 5275189 -
caaaatttctagacataagatt

SEQ ID NO: 135125 - DNA, 22 bp, Artificial Sequence
  Synthetic oligonucleotide; TTC chr11 5275188 5275209 5275193 5275188 -
aaaatttctagacataagattc

SEQ ID NO: 135126 - DNA, 22 bp, Artificial Sequence
  Synthetic oligonucleotide; TTT chr11 5275181 5275202 5275186 5275181 -
ctagacataagattcaaagccc

SEQ ID NO: 135127 - DNA, 22 bp, Artificial Sequence
  Synthetic oligonucleotide; TTC chr11 5275180 5275201 5275185 5275180 -
tagacataagattcaaagccct

SEQ ID NO: 135128 - DNA, 22 bp, Artificial Sequence
  Synthetic oligonucleotide; CTA chr11 5275178 5275199 5275183 5275178 -
gacataagattcaaagccctgc

SEQ ID NO: 135129 - DNA, 22 bp, Artificial Sequence
  Synthetic oligonucleotide; TTC chr11 5275166 5275187 5275171 5275166 -
aaagccctgcacttaaaatagt

SEQ ID NO: 135130 - DNA, 22 bp, Artificial Sequence
  Synthetic oligonucleotide; CTG chr11 5275157 5275178 5275162 5275157 -
cacttaaaatagtctcatttga

SEQ ID NO: 135131 - DNA, 22 bp, Artificial Sequence
  Synthetic oligonucleotide; CTT chr11 5275152 5275173 5275157 5275152 -
aaaatagtctcatttgaattaa

SEQ ID NO: 135132 - DNA, 22 bp, Artificial Sequence
  Synthetic oligonucleotide; TTA chr11 5275151 5275172 5275156 5275151 -
aaatagtctcatttgaattaac

SEQ ID NO: 135133 - DNA, 22 bp, Artificial Sequence
  Synthetic oligonucleotide; CTC chr11 5275141 5275162 5275146 5275141 -
atttgaattaactctttatata

SEQ ID NO: 135134 - DNA, 22 bp, Artificial Sequence
  Synthetic oligonucleotide; TTT chr11 5275137 5275158 5275142 5275137 -
gaattaactctttatataaatt

SEQ ID NO: 135135 - DNA, 22 bp, Artificial Sequence
  Synthetic oligonucleotide; TTG chr11 5275136 5275157 5275141 5275136 -
aattaactctttatataaattg

SEQ ID NO: 135136 - DNA, 22 bp, Artificial Sequence
  Synthetic oligonucleotide; TTA chr11 5275131 5275152 5275136 5275131 -
actctttatataaattgaaagc

SEQ ID NO: 135137 - DNA, 22 bp, Artificial Sequence
  Synthetic oligonucleotide; CTC chr11 5275127 5275148 5275132 5275127 -
tttatataaattgaaagcacat

SEQ ID NO: 135138 - DNA, 22 bp, Artificial Sequence
  Synthetic oligonucleotide; CTT chr11 5275125 5275146 5275130 5275125 -
tatataaattgaaagcacattc

SEQ ID NO: 135139 - DNA, 22 bp, Artificial Sequence
  Synthetic oligonucleotide; TTT chr11 5275124 5275145 5275129 5275124 -
atataaattgaaagcacattct

SEQ ID NO: 135140 - DNA, 22 bp, Artificial Sequence
  Synthetic oligonucleotide; TTA chr11 5275123 5275144 5275128 5275123 -
tataaattgaaagcacattctg

SEQ ID NO: 135141 - DNA, 22 bp, Artificial Sequence
  Synthetic oligonucleotide; TTG chr11 5275114 5275135 5275119 5275114 -
aaagcacattctgaactacttc

SEQ ID NO: 135142 - DNA, 22 bp, Artificial Sequence
  Synthetic oligonucleotide; TTC chr11 5275103 5275124 5275108 5275103 -
tgaactacttcagagtattgtt

SEQ ID NO: 135143 - DNA, 22 bp, Artificial Sequence
  Synthetic oligonucleotide; CTG chr11 5275101 5275122 5275106 5275101 -
aactacttcagagtattgtttt

SEQ ID NO: 135144 - DNA, 22 bp, Artificial Sequence
  Synthetic oligonucleotide; CTA chr11 5275096 5275117 5275101 5275096 -
cttcagagtattgttttatttc

SEQ ID NO: 135145 - DNA, 22 bp, Artificial Sequence
  Synthetic oligonucleotide; CTT chr11 5275093 5275114 5275098 5275093 -
cagagtattgttttatttctat

SEQ ID NO: 135146 - DNA, 22 bp, Artificial Sequence
  Synthetic oligonucleotide; TTC chr11 5275092 5275113 5275097 5275092 -
agagtattgttttatttctatg

SEQ ID NO: 135147 - DNA, 22 bp, Artificial Sequence
  Synthetic oligonucleotide; TTG chr11 5275083 5275104 5275088 5275083 -
ttttatttctatgttcttagtt

SEQ ID NO: 135148 - DNA, 22 bp, Artificial Sequence
  Synthetic oligonucleotide; TTT chr11 5275080 5275101 5275085 5275080 -
tatttctatgttcttagttcat

SEQ ID NO: 135149 - DNA, 22 bp, Artificial Sequence
  Synthetic oligonucleotide; TTT chr11 5275079 5275100 5275084 5275079 -
atttctatgttcttagttcata

SEQ ID NO: 135150 - DNA, 22 bp, Artificial Sequence
  Synthetic oligonucleotide; TTA chr11 5275078 5275099 5275083 5275078 -
tttctatgttcttagttcataa

SEQ ID NO: 135151 - DNA, 22 bp, Artificial Sequence
  Synthetic oligonucleotide; TTT chr11 5275075 5275096 5275080 5275075 -
ctatgttcttagttcataaata

SEQ ID NO: 135152 - DNA, 22 bp, Artificial Sequence
  Synthetic oligonucleotide; TTC chr11 5275074 5275095 5275079 5275074 -
tatgttcttagttcataaatac

SEQ ID NO: 135153 - DNA, 22 bp, Artificial Sequence
  Synthetic oligonucleotide; CTA chr11 5275072 5275093 5275077 5275072 -
tgttcttagttcataaatacat

SEQ ID NO: 135154 - DNA, 22 bp, Artificial Sequence
  Synthetic oligonucleotide; TTC chr11 5275067 5275088 5275072 5275067 -
ttagttcataaatacattaggc

SEQ ID NO: 135155 - DNA, 22 bp, Artificial Sequence
  Synthetic oligonucleotide; CTT chr11 5275065 5275086 5275070 5275065 -
agttcataaatacattaggcaa

SEQ ID NO: 135156 - DNA, 22 bp, Artificial Sequence
  Synthetic oligonucleotide; TTA chr11 5275064 5275085 5275069 5275064 -
gttcataaatacattaggcaat

SEQ ID NO: 135157 - DNA, 22 bp, Artificial Sequence
  Synthetic oligonucleotide; TTC chr11 5275060 5275081 5275065 5275060 -
ataaatacattaggcaatgcaa

SEQ ID NO: 135158 - DNA, 22 bp, Artificial Sequence
  Synthetic oligonucleotide; TTA chr11 5275048 5275069 5275053 5275048 -
ggcaatgcaatttaattaaaaa

SEQ ID NO: 135159 - DNA, 22 bp, Artificial Sequence
  Synthetic oligonucleotide; TTT chr11 5275035 5275056 5275040 5275035 -
aattaaaaaaacccaagaattt

SEQ ID NO: 135160 - DNA, 22 bp, Artificial Sequence
  Synthetic oligonucleotide; TTA chr11 5275034 5275055 5275039 5275034 -
attaaaaaaacccaagaatttc

SEQ ID NO: 135161 - DNA, 22 bp, Artificial Sequence
  Synthetic oligonucleotide; TTA chr11 5275030 5275051 5275035 5275030 -
aaaaaacccaagaatttcttag

SEQ ID NO: 135162 - DNA, 22 bp, Artificial Sequence
  Synthetic oligonucleotide; TTT chr11 5275013 5275034 5275018 5275013 -
cttagaattttaatcatgaaaa

SEQ ID NO: 135163 - DNA, 22 bp, Artificial Sequence
  Synthetic oligonucleotide; TTC chr11 5275012 5275033 5275017 5275012 -
ttagaattttaatcatgaaaat

SEQ ID NO: 135164 - DNA, 22 bp, Artificial Sequence
  Synthetic oligonucleotide; CTT chr11 5275010 5275031 5275015 5275010 -
agaattttaatcatgaaaataa

SEQ ID NO: 135165 - DNA, 22 bp, Artificial Sequence
  Synthetic oligonucleotide; TTA chr11 5275009 5275030 5275014 5275009 -
gaattttaatcatgaaaataaa

SEQ ID NO: 135166 - DNA, 22 bp, Artificial Sequence
  Synthetic oligonucleotide; TTT chr11 5275003 5275024 5275008 5275003 -
taatcatgaaaataaatgaagg

SEQ ID NO: 135167 - DNA, 22 bp, Artificial Sequence
  Synthetic oligonucleotide; TTT chr11 5275002 5275023 5275007 5275002 -
aatcatgaaaataaatgaaggc

SEQ ID NO: 135168 - DNA, 22 bp, Artificial Sequence
  Synthetic oligonucleotide; TTA chr11 5275001 5275022 5275006 5275001 -
atcatgaaaataaatgaaggca

SEQ ID NO: 135169 - DNA, 22 bp, Artificial Sequence
  Synthetic oligonucleotide; CTT chr11 5274975 5274996 5274980 5274975 -
tacttactcaaggtcccaaaag

SEQ ID NO: 135170 - DNA, 22 bp, Artificial Sequence
  Synthetic oligonucleotide; TTT chr11 5274974 5274995 5274979 5274974 -
acttactcaaggtcccaaaagg

SEQ ID NO: 135171 - DNA, 22 bp, Artificial Sequence
  Synthetic oligonucleotide; TTA chr11 5274973 5274994 5274978 5274973 -
cttactcaaggtcccaaaaggt

SEQ ID NO: 135172 - DNA, 22 bp, Artificial Sequence
  Synthetic oligonucleotide; CTT chr11 5274970 5274991 5274975 5274970 -
actcaaggtcccaaaaggtcaa

SEQ ID NO: 135173 - DNA, 22 bp, Artificial Sequence
  Synthetic oligonucleotide; TTA chr11 5274969 5274990 5274974 5274969 -
ctcaaggtcccaaaaggtcaaa

SEQ ID NO: 135174 - DNA, 22 bp, Artificial Sequence
  Synthetic oligonucleotide; CTC chr11 5274966 5274987 5274971 5274966 -
aaggtcccaaaaggtcaaagaa

SEQ ID NO: 135175 - DNA, 22 bp, Artificial Sequence
  Synthetic oligonucleotide; CTA chr11 5274926 5274947 5274931 5274926 -
tatttcagcggaaaatgggata

SEQ ID NO: 135176 - DNA, 22 bp, Artificial Sequence
  Synthetic oligonucleotide; TTT chr11 5274921 5274942 5274926 5274921 -
cagcggaaaatgggatatttat

SEQ ID NO: 135177 - DNA, 22 bp, Artificial Sequence
  Synthetic oligonucleotide; TTC chr11 5274920 5274941 5274925 5274920 -
agcggaaaatgggatatttatg

SEQ ID NO: 135178 - DNA, 22 bp, Artificial Sequence
  Synthetic oligonucleotide; TTT chr11 5274901 5274922 5274906 5274901 -
atgagttttctaagttgacaga

SEQ ID NO: 135179 - DNA, 22 bp, Artificial Sequence
  Synthetic oligonucleotide; TTA chr11 5274900 5274921 5274905 5274900 -
tgagttttctaagttgacagac

SEQ ID NO: 135180 - DNA, 22 bp, Artificial Sequence
  Synthetic oligonucleotide; TTT chr11 5274893 5274914 5274898 5274893 -
tctaagttgacagactcaagtt

SEQ ID NO: 135181 - DNA, 22 bp, Artificial Sequence
  Synthetic oligonucleotide; TTT chr11 5274892 5274913 5274897 5274892 -
ctaagttgacagactcaagttt

SEQ ID NO: 135182 - DNA, 22 bp, Artificial Sequence
  Synthetic oligonucleotide; TTC chr11 5274891 5274912 5274896 5274891 -
taagttgacagactcaagtttt

SEQ ID NO: 135183 - DNA, 22 bp, Artificial Sequence
  Synthetic oligonucleotide; CTA chr11 5274889 5274910 5274894 5274889 -
agttgacagactcaagttttaa

SEQ ID NO: 135184 - DNA, 22 bp, Artificial Sequence
  Synthetic oligonucleotide; TTG chr11 5274884 5274905 5274889 5274884 -
acagactcaagttttaaccttc

SEQ ID NO: 135185 - DNA, 22 bp, Artificial Sequence
  Synthetic oligonucleotide; CTC chr11 5274876 5274897 5274881 5274876 -
aagttttaaccttcagtgccca

SEQ ID NO: 135186 - DNA, 22 bp, Artificial Sequence
  Synthetic oligonucleotide; TTT chr11 5274870 5274891 5274875 5274870 -
taaccttcagtgcccatcatgt

SEQ ID NO: 135187 - DNA, 22 bp, Artificial Sequence
  Synthetic oligonucleotide; TTT chr11 5274869 5274890 5274874 5274869 -
aaccttcagtgcccatcatgta

SEQ ID NO: 135188 - DNA, 22 bp, Artificial Sequence
  Synthetic oligonucleotide; TTA chr11 5274868 5274889 5274873 5274868 -
accttcagtgcccatcatgtag

SEQ ID NO: 135189 - DNA, 22 bp, Artificial Sequence
  Synthetic oligonucleotide; CTT chr11 5274863 5274884 5274868 5274863 -
cagtgcccatcatgtaggaaag

SEQ ID NO: 135190 - DNA, 22 bp, Artificial Sequence
  Synthetic oligonucleotide; TTC chr11 5274862 5274883 5274867 5274862 -
agtgcccatcatgtaggaaagt

SEQ ID NO: 135191 - DNA, 22 bp, Artificial Sequence
  Synthetic oligonucleotide; CTG chr11 5274828 5274849 5274833 5274828 -
gctgattctggctttctactcc

SEQ ID NO: 135192 - DNA, 22 bp, Artificial Sequence
  Synthetic oligonucleotide; CTG chr11 5274824 5274845 5274829 5274824 -
attctggctttctactcctttt

SEQ ID NO: 135193 - DNA, 22 bp, Artificial Sequence
  Synthetic oligonucleotide; TTC chr11 5274820 5274841 5274825 5274820 -
tggctttctactcctttttccc

SEQ ID NO: 135194 - DNA, 22 bp, Artificial Sequence
  Synthetic oligonucleotide; CTG chr11 5274818 5274839 5274823 5274818 -
gctttctactcctttttcccat

SEQ ID NO: 135195 - DNA, 22 bp, Artificial Sequence
  Synthetic oligonucleotide; CTT chr11 5274814 5274835 5274819 5274814 -
tctactcctttttcccattaaa

SEQ ID NO: 135196 - DNA, 22 bp, Artificial Sequence
  Synthetic oligonucleotide; TTT chr11 5274813 5274834 5274818 5274813 -
ctactcctttttcccattaaag

SEQ ID NO: 135197 - DNA, 22 bp, Artificial Sequence
  Synthetic oligonucleotide; TTC chr11 5274812 5274833 5274817 5274812 -
tactcctttttcccattaaaga

SEQ ID NO: 135198 - DNA, 22 bp, Artificial Sequence
  Synthetic oligonucleotide; CTA chr11 5274810 5274831 5274815 5274810 -
ctcctttttcccattaaagatc

SEQ ID NO: 135199 - DNA, 22 bp, Artificial Sequence
  Synthetic oligonucleotide; CTC chr11 5274807 5274828 5274812 5274807 -
ctttttcccattaaagatccct

SEQ ID NO: 135200 - DNA, 22 bp, Artificial Sequence
  Synthetic oligonucleotide; CTT chr11 5274804 5274825 5274809 5274804 -
tttcccattaaagatccctcct

SEQ ID NO: 135201 - DNA, 22 bp, Artificial Sequence
  Synthetic oligonucleotide; TTT chr11 5274803 5274824 5274808 5274803 -
ttcccattaaagatccctcctg

SEQ ID NO: 135202 - DNA, 22 bp, Artificial Sequence
  Synthetic oligonucleotide; TTT chr11 5274802 5274823 5274807 5274802 -
tcccattaaagatccctcctgc

SEQ ID NO: 135203 - DNA, 22 bp, Artificial Sequence
  Synthetic oligonucleotide; TTT chr11 5274801 5274822 5274806 5274801 -
cccattaaagatccctcctgct

SEQ ID NO: 135204 - DNA, 22 bp, Artificial Sequence
  Synthetic oligonucleotide; TTC chr11 5274800 5274821 5274805 5274800 -
ccattaaagatccctcctgctt

SEQ ID NO: 135205 - DNA, 22 bp, Artificial Sequence
  Synthetic oligonucleotide; TTA chr11 5274794 5274815 5274799 5274794 -
aagatccctcctgcttaattaa

SEQ ID NO: 135206 - DNA, 22 bp, Artificial Sequence
  Synthetic oligonucleotide; CTC chr11 5274784 5274805 5274789 5274784 -
ctgcttaattaacattcacaag

SEQ ID NO: 135207 - DNA, 22 bp, Artificial Sequence
  Synthetic oligonucleotide; CTG chr11 5274781 5274802 5274786 5274781 -
cttaattaacattcacaagtaa

SEQ ID NO: 135208 - DNA, 22 bp, Artificial Sequence
  Synthetic oligonucleotide; CTT chr11 5274778 5274799 5274783 5274778 -
aattaacattcacaagtaactc

SEQ ID NO: 135209 - DNA, 22 bp, Artificial Sequence
  Synthetic oligonucleotide; TTA chr11 5274777 5274798 5274782 5274777 -
attaacattcacaagtaactct

SEQ ID NO: 135210 - DNA, 22 bp, Artificial Sequence
  Synthetic oligonucleotide; TTA chr11 5274773 5274794 5274778 5274773 -
acattcacaagtaactctggtt

SEQ ID NO: 135211 - DNA, 22 bp, Artificial Sequence
  Synthetic oligonucleotide; TTC chr11 5274767 5274788 5274772 5274767 -
acaagtaactctggttgtactt

SEQ ID NO: 135212 - DNA, 22 bp, Artificial Sequence
  Synthetic oligonucleotide; CTC chr11 5274756 5274777 5274761 5274756 -
tggttgtactttaggcacagtg

SEQ ID NO: 135213 - DNA, 22 bp, Artificial Sequence
  Synthetic oligonucleotide; CTG chr11 5274754 5274775 5274759 5274754 -
gttgtactttaggcacagtggc

SEQ ID NO: 135214 - DNA, 22 bp, Artificial Sequence
  Synthetic oligonucleotide; TTG chr11 5274750 5274771 5274755 5274750 -
tactttaggcacagtggctccc

SEQ ID NO: 135215 - DNA, 22 bp, Artificial Sequence
  Synthetic oligonucleotide; CTT chr11 5274745 5274766 5274750 5274745 -
taggcacagtggctcccgaggt

SEQ ID NO: 135216 - DNA, 22 bp, Artificial Sequence
  Synthetic oligonucleotide; TTT chr11 5274744 5274765 5274749 5274744 -
aggcacagtggctcccgaggtc

SEQ ID NO: 135217 - DNA, 22 bp, Artificial Sequence
  Synthetic oligonucleotide; TTA chr11 5274743 5274764 5274748 5274743 -
ggcacagtggctcccgaggtca

SEQ ID NO: 135218 - DNA, 22 bp, Artificial Sequence
  Synthetic oligonucleotide; CTC chr11 5274730 5274751 5274735 5274730 -
ccgaggtcagtcacacaatagg

SEQ ID NO: 135219 - DNA, 22 bp, Artificial Sequence
  Synthetic oligonucleotide; CTG chr11 5274701 5274722 5274706 5274701 -
tgctccaagttgccagagagag

SEQ ID NO: 135220 - DNA, 22 bp, Artificial Sequence
  Synthetic oligonucleotide; CTC chr11 5274696 5274717 5274701 5274696 -
caagttgccagagagagagatt

SEQ ID NO: 135221 - DNA, 22 bp, Artificial Sequence
  Synthetic oligonucleotide; TTG chr11 5274689 5274710 5274694 5274689 -
ccagagagagagattactcttg

SEQ ID NO: 135222 - DNA, 22 bp, Artificial Sequence
  Synthetic oligonucleotide; TTA chr11 5274673 5274694 5274678 5274673 -
ctcttgagaatgagcctcagcc

SEQ ID NO: 135223 - DNA, 22 bp, Artificial Sequence
  Synthetic oligonucleotide; CTC chr11 5274670 5274691 5274675 5274670 -
ttgagaatgagcctcagccctg

SEQ ID NO: 135224 - DNA, 22 bp, Artificial Sequence
  Synthetic oligonucleotide; CTT chr11 5274668 5274689 5274673 5274668 -
gagaatgagcctcagccctggc

SEQ ID NO: 135225 - DNA, 22 bp, Artificial Sequence
  Synthetic oligonucleotide; TTG chr11 5274667 5274688 5274672 5274667 -
agaatgagcctcagccctggct

SEQ ID NO: 135226 - DNA, 22 bp, Artificial Sequence
  Synthetic oligonucleotide; CTC chr11 5274655 5274676 5274660 5274655 -
agccctggctcaaactcacctg

SEQ ID NO: 135227 - DNA, 22 bp, Artificial Sequence
  Synthetic oligonucleotide; CTG chr11 5274648 5274669 5274653 5274648 -
gctcaaactcacctgcaaactt

SEQ ID NO: 135228 - DNA, 22 bp, Artificial Sequence
  Synthetic oligonucleotide; CTC chr11 5274644 5274665 5274649 5274644 -
aaactcacctgcaaacttcgtg

SEQ ID NO: 135229 - DNA, 22 bp, Artificial Sequence
  Synthetic oligonucleotide; CTC chr11 5274638 5274659 5274643 5274638 -
acctgcaaacttcgtgagagat

SEQ ID NO: 135230 - DNA, 22 bp, Artificial Sequence
  Synthetic oligonucleotide; CTG chr11 5274633 5274654 5274638 5274633 -
caaacttcgtgagagatgaggc

SEQ ID NO: 135231 - DNA, 22 bp, Artificial Sequence
  Synthetic oligonucleotide; CTT chr11 5274626 5274647 5274631 5274626 -
cgtgagagatgaggcagaggta

SEQ ID NO: 135232 - DNA, 22 bp, Artificial Sequence
  Synthetic oligonucleotide; TTC chr11 5274625 5274646 5274630 5274625 -
gtgagagatgaggcagaggtac

SEQ ID NO: 135233 - DNA, 22 bp, Artificial Sequence
  Synthetic oligonucleotide; CTA chr11 5274599 5274620 5274604 5274599 -
cgaaagcaacagttagaagcta

SEQ ID NO: 135234 - DNA, 22 bp, Artificial Sequence
  Synthetic oligonucleotide; TTA chr11 5274584 5274605 5274589 5274584 -
gaagctaaatgatgagaacaca

SEQ ID NO: 135235 - DNA, 22 bp, Artificial Sequence
  Synthetic oligonucleotide; CTA chr11 5274577 5274598 5274582 5274577 -
aatgatgagaacacatggactc

SEQ ID NO: 135236 - DNA, 22 bp, Artificial Sequence
  Synthetic oligonucleotide; CTC chr11 5274555 5274576 5274560 5274555 -
atagagggaaacaacgcatact

SEQ ID NO: 135237 - DNA, 22 bp, Artificial Sequence
  Synthetic oligonucleotide; CTG chr11 5274532 5274553 5274537 5274532 -
gggcctatcagagggtggaggg

SEQ ID NO: 135238 - DNA, 22 bp, Artificial Sequence
  Synthetic oligonucleotide; CTA chr11 5274525 5274546 5274530 5274525 -
tcagagggtggagggtgagaga

SEQ ID NO: 135239 - DNA, 22 bp, Artificial Sequence
  Synthetic oligonucleotide; CTA chr11 5274478 5274499 5274483 5274478 -
atggatgctaagcgtaatacct

SEQ ID NO: 135240 - DNA, 22 bp, Artificial Sequence
  Synthetic oligonucleotide; CTA chr11 5274468 5274489 5274473 5274468 -
agcgtaatacctgagtgatgag

SEQ ID NO: 135241 - DNA, 22 bp, Artificial Sequence
  Synthetic oligonucleotide; CTG chr11 5274455 5274476 5274460 5274455 -
agtgatgagatcatctatacaa

SEQ ID NO: 135242 - DNA, 22 bp, Artificial Sequence
  Synthetic oligonucleotide; CTA chr11 5274438 5274459 5274443 5274438 -
tacaacaaacccccttgacatt

SEQ ID NO: 135243 - DNA, 22 bp, Artificial Sequence
  Synthetic oligonucleotide; CTT chr11 5274422 5274443 5274427 5274422 -
gacattcatttatctatgtaac

SEQ ID NO: 135244 - DNA, 22 bp, Artificial Sequence
  Synthetic oligonucleotide; TTG chr11 5274421 5274442 5274426 5274421 -
acattcatttatctatgtaaca

SEQ ID NO: 135245 - DNA, 22 bp, Artificial Sequence
  Synthetic oligonucleotide; TTC chr11 5274415 5274436 5274420 5274415 -
atttatctatgtaacaaacctg

SEQ ID NO: 135246 - DNA, 22 bp, Artificial Sequence
  Synthetic oligonucleotide; TTT chr11 5274411 5274432 5274416 5274411 -
atctatgtaacaaacctgcaca

SEQ ID NO: 135247 - DNA, 22 bp, Artificial Sequence
  Synthetic oligonucleotide; TTA chr11 5274410 5274431 5274415 5274410 -
tctatgtaacaaacctgcacat

SEQ ID NO: 135248 - DNA, 22 bp, Artificial Sequence
  Synthetic oligonucleotide; CTA chr11 5274406 5274427 5274411 5274406 -
tgtaacaaacctgcacatcctg

SEQ ID NO: 135249 - DNA, 22 bp, Artificial Sequence
  Synthetic oligonucleotide; CTG chr11 5274393 5274414 5274398 5274393 -
cacatcctgtacatgtacccct

SEQ ID NO: 135250 - DNA, 22 bp, Artificial Sequence
  Synthetic oligonucleotide; CTG chr11 5274384 5274405 5274389 5274384 -
tacatgtacccctgaacttaaa

SEQ ID NO: 135251 - DNA, 22 bp, Artificial Sequence
  Synthetic oligonucleotide; CTG chr11 5274370 5274391 5274375 5274370 -
aacttaaaataaaagttgaaaa

SEQ ID NO: 135252 - DNA, 22 bp, Artificial Sequence
  Synthetic oligonucleotide; CTT chr11 5274365 5274386 5274370 5274365 -
aaaataaaagttgaaaacaaga

SEQ ID NO: 135253 - DNA, 22 bp, Artificial Sequence
  Synthetic oligonucleotide; TTA chr11 5274364 5274385 5274369 5274364 -
aaataaaagttgaaaacaagaa

SEQ ID NO: 135254 - DNA, 22 bp, Artificial Sequence
  Synthetic oligonucleotide; TTG chr11 5274352 5274373 5274357 5274352 -
aaaacaagaaagcaacagtttg

SEQ ID NO: 135255 - DNA, 22 bp, Artificial Sequence
  Synthetic oligonucleotide; TTT chr11 5274331 5274352 5274336 5274331 -
gaacacttgttatggtctattc

SEQ ID NO: 135256 - DNA, 22 bp, Artificial Sequence
  Synthetic oligonucleotide; TTG chr11 5274330 5274351 5274335 5274330 -
aacacttgttatggtctattct

SEQ ID NO: 135257 - DNA, 22 bp, Artificial Sequence
  Synthetic oligonucleotide; CTT chr11 5274323 5274344 5274328 5274323 -
gttatggtctattctctcattc

SEQ ID NO: 135258 - DNA, 22 bp, Artificial Sequence
  Synthetic oligonucleotide; TTG chr11 5274322 5274343 5274327 5274322 -
ttatggtctattctctcattct

SEQ ID NO: 135259 - DNA, 22 bp, Artificial Sequence
  Synthetic oligonucleotide; TTA chr11 5274319 5274340 5274324 5274319 -
tggtctattctctcattcttta

SEQ ID NO: 135260 - DNA, 22 bp, Artificial Sequence
  Synthetic oligonucleotide; CTA chr11 5274312 5274333 5274317 5274312 -
ttctctcattctttacaattac

SEQ ID NO: 135261 - DNA, 22 bp, Artificial Sequence
  Synthetic oligonucleotide; TTC chr11 5274309 5274330 5274314 5274309 -
tctcattctttacaattacact

SEQ ID NO: 135262 - DNA, 22 bp, Artificial Sequence
  Synthetic oligonucleotide; CTC chr11 5274307 5274328 5274312 5274307 -
tcattctttacaattacactag

SEQ ID NO: 135263 - DNA, 22 bp, Artificial Sequence
  Synthetic oligonucleotide; CTC chr11 5274305 5274326 5274310 5274305 -
attctttacaattacactagaa

SEQ ID NO: 135264 - DNA, 22 bp, Artificial Sequence
  Synthetic oligonucleotide; TTC chr11 5274301 5274322 5274306 5274301 -
tttacaattacactagaaaata

SEQ ID NO: 135265 - DNA, 22 bp, Artificial Sequence
  Synthetic oligonucleotide; CTT chr11 5274299 5274320 5274304 5274299 -
tacaattacactagaaaatagc

SEQ ID NO: 135266 - DNA, 22 bp, Artificial Sequence
  Synthetic oligonucleotide; TTT chr11 5274298 5274319 5274303 5274298 -
acaattacactagaaaatagcc

SEQ ID NO: 135267 - DNA, 22 bp, Artificial Sequence
  Synthetic oligonucleotide; TTA chr11 5274297 5274318 5274302 5274297 -
caattacactagaaaatagcca

SEQ ID NO: 135268 - DNA, 22 bp, Artificial Sequence
  Synthetic oligonucleotide; TTA chr11 5274291 5274312 5274296 5274291 -
cactagaaaatagccacaggct

SEQ ID NO: 135269 - DNA, 22 bp, Artificial Sequence
  Synthetic oligonucleotide; CTA chr11 5274286 5274307 5274291 5274286 -
gaaaatagccacaggcttcctg

SEQ ID NO: 135270 - DNA, 22 bp, Artificial Sequence
  Synthetic oligonucleotide; CTT chr11 5274268 5274289 5274273 5274268 -
cctgcaaggcagccacagaatt

SEQ ID NO: 135271 - DNA, 22 bp, Artificial Sequence
  Synthetic oligonucleotide; TTC chr11 5274267 5274288 5274272 5274267 -
ctgcaaggcagccacagaattt

SEQ ID NO: 135272 - DNA, 22 bp, Artificial Sequence
  Synthetic oligonucleotide; CTG chr11 5274264 5274285 5274269 5274264 -
caaggcagccacagaatttatg

SEQ ID NO: 135273 - DNA, 22 bp, Artificial Sequence
  Synthetic oligonucleotide; TTT chr11 5274245 5274266 5274250 5274245 -
atgacttgtgatatccaagtca

SEQ ID NO: 135274 - DNA, 22 bp, Artificial Sequence
  Synthetic oligonucleotide; TTA chr11 5274244 5274265 5274249 5274244 -
tgacttgtgatatccaagtcat

SEQ ID NO: 135275 - DNA, 22 bp, Artificial Sequence
  Synthetic oligonucleotide; CTT chr11 5274238 5274259 5274243 5274238 -
gtgatatccaagtcattcctgg

SEQ ID NO: 135276 - DNA, 22 bp, Artificial Sequence
  Synthetic oligonucleotide; TTG chr11 5274237 5274258 5274242 5274237 -
tgatatccaagtcattcctgga

SEQ ID NO: 135277 - DNA, 22 bp, Artificial Sequence
  Synthetic oligonucleotide; TTC chr11 5274220 5274241 5274225 5274220 -
ctggataatgcaaaatctaaca

SEQ ID NO: 135278 - DNA, 22 bp, Artificial Sequence
  Synthetic oligonucleotide; CTG chr11 5274217 5274238 5274222 5274217 -
gataatgcaaaatctaacacaa

SEQ ID NO: 135279 - DNA, 22 bp, Artificial Sequence
  Synthetic oligonucleotide; CTA chr11 5274201 5274222 5274206 5274201 -
acacaaaatctagtagaatcat

SEQ ID NO: 135280 - DNA, 22 bp, Artificial Sequence
  Synthetic oligonucleotide; CTA chr11 5274189 5274210 5274194 5274189 -
gtagaatcatttgcttacatct

SEQ ID NO: 135281 - DNA, 22 bp, Artificial Sequence
  Synthetic oligonucleotide; TTT chr11 5274177 5274198 5274182 5274177 -
gcttacatctatttttgttctg

SEQ ID NO: 135282 - DNA, 22 bp, Artificial Sequence
  Synthetic oligonucleotide; TTG chr11 5274176 5274197 5274181 5274176 -
cttacatctatttttgttctga

SEQ ID NO: 135283 - DNA, 22 bp, Artificial Sequence
  Synthetic oligonucleotide; CTT chr11 5274173 5274194 5274178 5274173 -
acatctatttttgttctgagaa

SEQ ID NO: 135284 - DNA, 22 bp, Artificial Sequence
  Synthetic oligonucleotide; TTA chr11 5274172 5274193 5274177 5274172 -
catctatttttgttctgagaat

SEQ ID NO: 135285 - DNA, 22 bp, Artificial Sequence
  Synthetic oligonucleotide; CTA chr11 5274166 5274187 5274171 5274166 -
tttttgttctgagaatatagat

SEQ ID NO: 135286 - DNA, 22 bp, Artificial Sequence
  Synthetic oligonucleotide; TTT chr11 5274163 5274184 5274168 5274163 -
ttgttctgagaatatagattta

SEQ ID NO: 135287 - DNA, 22 bp, Artificial Sequence
  Synthetic oligonucleotide; TTT chr11 5274162 5274183 5274167 5274162 -
tgttctgagaatatagatttag

SEQ ID NO: 135288 - DNA, 22 bp, Artificial Sequence
  Synthetic oligonucleotide; TTT chr11 5274161 5274182 5274166 5274161 -
gttctgagaatatagatttaga

SEQ ID NO: 135289 - DNA, 22 bp, Artificial Sequence
  Synthetic oligonucleotide; TTG chr11 5274160 5274181 5274165 5274160 -
ttctgagaatatagatttagat

SEQ ID NO: 135290 - DNA, 22 bp, Artificial Sequence
  Synthetic oligonucleotide; TTC chr11 5274157 5274178 5274162 5274157 -
tgagaatatagatttagataca

SEQ ID NO: 135291 - DNA, 22 bp, Artificial Sequence
  Synthetic oligonucleotide; CTG chr11 5274155 5274176 5274160 5274155 -
agaatatagatttagatacata

SEQ ID NO: 135292 - DNA, 22 bp, Artificial Sequence
  Synthetic oligonucleotide; TTT chr11 5274142 5274163 5274147 5274142 -
agatacataatggaagcagaat

SEQ ID NO: 135293 - DNA, 22 bp, Artificial Sequence
  Synthetic oligonucleotide; TTA chr11 5274141 5274162 5274146 5274141 -
gatacataatggaagcagaata

SEQ ID NO: 135294 - DNA, 22 bp, Artificial Sequence
  Synthetic oligonucleotide; TTT chr11 5274115 5274136 5274120 5274115 -
aaaatctggctaatttagaatc

SEQ ID NO: 135295 - DNA, 22 bp, Artificial Sequence
  Synthetic oligonucleotide; TTA chr11 5274114 5274135 5274119 5274114 -
aaatctggctaatttagaatcc

SEQ ID NO: 135296 - DNA, 22 bp, Artificial Sequence
  Synthetic oligonucleotide; CTG chr11 5274107 5274128 5274112 5274107 -
gctaatttagaatcctaagcag

SEQ ID NO: 135297 - DNA, 22 bp, Artificial Sequence
  Synthetic oligonucleotide; CTA chr11 5274103 5274124 5274108 5274103 -
atttagaatcctaagcagctct

SEQ ID NO: 135298 - DNA, 22 bp, Artificial Sequence
  Synthetic oligonucleotide; TTT chr11 5274099 5274120 5274104 5274099 -
agaatcctaagcagctcttttc

SEQ ID NO: 135299 - DNA, 22 bp, Artificial Sequence
  Synthetic oligonucleotide; TTA chr11 5274098 5274119 5274103 5274098 -
gaatcctaagcagctcttttcc

SEQ ID NO: 135300 - DNA, 22 bp, Artificial Sequence
  Synthetic oligonucleotide; CTA chr11 5274090 5274111 5274095 5274090 -
agcagctcttttcctatcagtg

SEQ ID NO: 135301 - DNA, 22 bp, Artificial Sequence
  Synthetic oligonucleotide; CTC chr11 5274082 5274103 5274087 5274082 -
ttttcctatcagtggtttacaa

SEQ ID NO: 135302 - DNA, 22 bp, Artificial Sequence
  Synthetic oligonucleotide; CTT chr11 5274080 5274101 5274085 5274080 -
ttcctatcagtggtttacaagc

SEQ ID NO: 135303 - DNA, 22 bp, Artificial Sequence
  Synthetic oligonucleotide; TTT chr11 5274079 5274100 5274084 5274079 -
tcctatcagtggtttacaagcc

SEQ ID NO: 135304 - DNA, 22 bp, Artificial Sequence
  Synthetic oligonucleotide; TTT chr11 5274078 5274099 5274083 5274078 -
cctatcagtggtttacaagcct

SEQ ID NO: 135305 - DNA, 22 bp, Artificial Sequence
  Synthetic oligonucleotide; TTC chr11 5274077 5274098 5274082 5274077 -
ctatcagtggtttacaagcctt

SEQ ID NO: 135306 - DNA, 22 bp, Artificial Sequence
  Synthetic oligonucleotide; CTA chr11 5274074 5274095 5274079 5274074 -
tcagtggtttacaagccttgtt

SEQ ID NO: 135307 - DNA, 22 bp, Artificial Sequence
  Synthetic oligonucleotide; TTT chr11 5274064 5274085 5274069 5274064 -
acaagccttgtttatatttttc

SEQ ID NO: 135308 - DNA, 22 bp, Artificial Sequence
  Synthetic oligonucleotide; TTA chr11 5274063 5274084 5274068 5274063 -
caagccttgtttatatttttcc

SEQ ID NO: 135309 - DNA, 22 bp, Artificial Sequence
  Synthetic oligonucleotide; CTT chr11 5274055 5274076 5274060 5274055 -
gtttatatttttcctattttaa

SEQ ID NO: 135310 - DNA, 22 bp, Artificial Sequence
  Synthetic oligonucleotide; TTG chr11 5274054 5274075 5274059 5274054 -
tttatatttttcctattttaaa

SEQ ID NO: 135311 - DNA, 22 bp, Artificial Sequence
  Synthetic oligonucleotide; TTT chr11 5274051 5274072 5274056 5274051 -
atatttttcctattttaaaaat

SEQ ID NO: 135312 - DNA, 22 bp, Artificial Sequence
  Synthetic oligonucleotide; TTA chr11 5274050 5274071 5274055 5274050 -
tatttttcctattttaaaaata

SEQ ID NO: 135313 - DNA, 22 bp, Artificial Sequence
  Synthetic oligonucleotide; TTT chr11 5274045 5274066 5274050 5274045 -
ttcctattttaaaaataaaaat

SEQ ID NO: 135314 - DNA, 22 bp, Artificial Sequence
  Synthetic oligonucleotide; TTT chr11 5274044 5274065 5274049 5274044 -
tcctattttaaaaataaaaata

SEQ ID NO: 135315 - DNA, 22 bp, Artificial Sequence
  Synthetic oligonucleotide; TTT chr11 5274043 5274064 5274048 5274043 -
cctattttaaaaataaaaataa

SEQ ID NO: 135316 - DNA, 22 bp, Artificial Sequence
  Synthetic oligonucleotide; TTC chr11 5274042 5274063 5274047 5274042 -
ctattttaaaaataaaaataaa

SEQ ID NO: 135317 - DNA, 22 bp, Artificial Sequence
  Synthetic oligonucleotide; CTA chr11 5274039 5274060 5274044 5274039 -
ttttaaaaataaaaataaagta

SEQ ID NO: 135318 - DNA, 22 bp, Artificial Sequence
  Synthetic oligonucleotide; TTT chr11 5274036 5274057 5274041 5274036 -
taaaaataaaaataaagtaagt

SEQ ID NO: 135319 - DNA, 22 bp, Artificial Sequence
  Synthetic oligonucleotide; TTT chr11 5274035 5274056 5274040 5274035 -
aaaaataaaaataaagtaagtt

SEQ ID NO: 135320 - DNA, 22 bp, Artificial Sequence
  Synthetic oligonucleotide; TTA chr11 5274034 5274055 5274039 5274034 -
aaaataaaaataaagtaagtta

SEQ ID NO: 135321 - DNA, 22 bp, Artificial Sequence
  Synthetic oligonucleotide; TTA chr11 5274012 5274033 5274017 5274012 -
tttgtggtaaagaatattcatt

SEQ ID NO: 135322 - DNA, 22 bp, Artificial Sequence
  Synthetic oligonucleotide; TTT chr11 5274009 5274030 5274014 5274009 -
gtggtaaagaatattcattaaa

SEQ ID NO: 135323 - DNA, 22 bp, Artificial Sequence
  Synthetic oligonucleotide; TTG chr11 5274008 5274029 5274013 5274008 -
tggtaaagaatattcattaaag

SEQ ID NO: 135324 - DNA, 22 bp, Artificial Sequence
  Synthetic oligonucleotide; TTC chr11 5273993 5274014 5273998 5273993 -
attaaagtatttatttcttaga

SEQ ID NO: 135325 - DNA, 22 bp, Artificial Sequence
  Synthetic oligonucleotide; TTA chr11 5273989 5274010 5273994 5273989 -
aagtatttatttcttagataat

SEQ ID NO: 135326 - DNA, 22 bp, Artificial Sequence
  Synthetic oligonucleotide; TTT chr11 5273981 5274002 5273986 5273981 -
atttcttagataataccatgaa

SEQ ID NO: 135327 - DNA, 22 bp, Artificial Sequence
  Synthetic oligonucleotide; TTA chr11 5273980 5274001 5273985 5273980 -
tttcttagataataccatgaaa

SEQ ID NO: 135328 - DNA, 22 bp, Artificial Sequence
  Synthetic oligonucleotide; TTT chr11 5273977 5273998 5273982 5273977 -
cttagataataccatgaaaaac

SEQ ID NO: 135329 - DNA, 22 bp, Artificial Sequence
  Synthetic oligonucleotide; TTC chr11 5273976 5273997 5273981 5273976 -
ttagataataccatgaaaaaca

SEQ ID NO: 135330 - DNA, 22 bp, Artificial Sequence
  Synthetic oligonucleotide; CTT chr11 5273974 5273995 5273979 5273974 -
agataataccatgaaaaacatt

SEQ ID NO: 135331 - DNA, 22 bp, Artificial Sequence
  Synthetic oligonucleotide; TTA chr11 5273973 5273994 5273978 5273973 -
gataataccatgaaaaacattc

SEQ ID NO: 135332 - DNA, 22 bp, Artificial Sequence
  Synthetic oligonucleotide; TTC chr11 5273951 5273972 5273956 5273951 -
agtgaagtgaagggcctacttt

SEQ ID NO: 135333 - DNA, 22 bp, Artificial Sequence
  Synthetic oligonucleotide; CTA chr11 5273933 5273954 5273938 5273933 -
ctttacttaacaagaatctaat

SEQ ID NO: 135334 - DNA, 22 bp, Artificial Sequence
  Synthetic oligonucleotide; CTT chr11 5273930 5273951 5273935 5273930 -
tacttaacaagaatctaattta

SEQ ID NO: 135335 - DNA, 22 bp, Artificial Sequence
  Synthetic oligonucleotide; TTT chr11 5273929 5273950 5273934 5273929 -
acttaacaagaatctaatttat

SEQ ID NO: 135336 - DNA, 22 bp, Artificial Sequence
  Synthetic oligonucleotide; TTA chr11 5273928 5273949 5273933 5273928 -
cttaacaagaatctaatttata

SEQ ID NO: 135337 - DNA, 22 bp, Artificial Sequence
  Synthetic oligonucleotide; CTT chr11 5273925 5273946 5273930 5273925 -
aacaagaatctaatttatataa

SEQ ID NO: 135338 - DNA, 22 bp, Artificial Sequence
  Synthetic oligonucleotide; TTA chr11 5273924 5273945 5273929 5273924 -
acaagaatctaatttatataat

SEQ ID NO: 135339 - DNA, 22 bp, Artificial Sequence
  Synthetic oligonucleotide; CTA chr11 5273913 5273934 5273918 5273913 -
atttatataatttttcatacta

SEQ ID NO: 135340 - DNA, 22 bp, Artificial Sequence
  Synthetic oligonucleotide; TTT chr11 5273909 5273930 5273914 5273909 -
atataatttttcatactaatag

SEQ ID NO: 135341 - DNA, 22 bp, Artificial Sequence
  Synthetic oligonucleotide; TTA chr11 5273908 5273929 5273913 5273908 -
tataatttttcatactaatagc

SEQ ID NO: 135342 - DNA, 22 bp, Artificial Sequence
  Synthetic oligonucleotide; TTT chr11 5273900 5273921 5273905 5273900 -
ttcatactaatagcatctaaga

SEQ ID NO: 135343 - DNA, 22 bp, Artificial Sequence
  Synthetic oligonucleotide; TTT chr11 5273899 5273920 5273904 5273899 -
tcatactaatagcatctaagaa

SEQ ID NO: 135344 - DNA, 22 bp, Artificial Sequence
  Synthetic oligonucleotide; TTT chr11 5273898 5273919 5273903 5273898 -
catactaatagcatctaagaac

SEQ ID NO: 135345 - DNA, 22 bp, Artificial Sequence
  Synthetic oligonucleotide; TTC chr11 5273897 5273918 5273902 5273897 -
atactaatagcatctaagaaca

SEQ ID NO: 135346 - DNA, 22 bp, Artificial Sequence
  Synthetic oligonucleotide; CTA chr11 5273891 5273912 5273896 5273891 -
atagcatctaagaacagtacaa

SEQ ID NO: 135347 - DNA, 22 bp, Artificial Sequence
  Synthetic oligonucleotide; CTA chr11 5273881 5273902 5273886 5273881 -
agaacagtacaatatttgactc

SEQ ID NO: 135348 - DNA, 22 bp, Artificial Sequence
  Synthetic oligonucleotide; TTT chr11 5273864 5273885 5273869 5273864 -
gactcttcaggttaaacatatg

SEQ ID NO: 135349 - DNA, 22 bp, Artificial Sequence
  Synthetic oligonucleotide; TTG chr11 5273863 5273884 5273868 5273863 -
actcttcaggttaaacatatgt

SEQ ID NO: 135350 - DNA, 22 bp, Artificial Sequence
  Synthetic oligonucleotide; CTC chr11 5273859 5273880 5273864 5273859 -
ttcaggttaaacatatgtcata

SEQ ID NO: 135351 - DNA, 22 bp, Artificial Sequence
  Synthetic oligonucleotide; CTT chr11 5273857 5273878 5273862 5273857 -
caggttaaacatatgtcataaa

SEQ ID NO: 135352 - DNA, 22 bp, Artificial Sequence
  Synthetic oligonucleotide; TTC chr11 5273856 5273877 5273861 5273856 -
aggttaaacatatgtcataaat

SEQ ID NO: 135353 - DNA, 22 bp, Artificial Sequence
  Synthetic oligonucleotide; TTA chr11 5273850 5273871 5273855 5273850 -
aacatatgtcataaattagcca

SEQ ID NO: 135354 - DNA, 22 bp, Artificial Sequence
  Synthetic oligonucleotide; TTA chr11 5273832 5273853 5273837 5273832 -
gccagaaagatttaagaaaata

SEQ ID NO: 135355 - DNA, 22 bp, Artificial Sequence
  Synthetic oligonucleotide; TTT chr11 5273819 5273840 5273824 5273819 -
aagaaaatattggatgtttcct

SEQ ID NO: 135356 - DNA, 22 bp, Artificial Sequence
  Synthetic oligonucleotide; TTA chr11 5273818 5273839 5273823 5273818 -
agaaaatattggatgtttcctt

SEQ ID NO: 135357 - DNA, 22 bp, Artificial Sequence
  Synthetic oligonucleotide; TTG chr11 5273807 5273828 5273812 5273807 -
gatgtttccttgtttaaattag

SEQ ID NO: 135358 - DNA, 22 bp, Artificial Sequence
  Synthetic oligonucleotide; TTT chr11 5273800 5273821 5273805 5273800 -
ccttgtttaaattaggcatctt

SEQ ID NO: 135359 - DNA, 22 bp, Artificial Sequence
  Synthetic oligonucleotide; TTC chr11 5273799 5273820 5273804 5273799 -
cttgtttaaattaggcatctta

SEQ ID NO: 135360 - DNA, 22 bp, Artificial Sequence
  Synthetic oligonucleotide; CTT chr11 5273796 5273817 5273801 5273796 -
gtttaaattaggcatcttacag

SEQ ID NO: 135361 - DNA, 22 bp, Artificial Sequence
  Synthetic oligonucleotide; TTG chr11 5273795 5273816 5273800 5273795 -
tttaaattaggcatcttacagt

SEQ ID NO: 135362 - DNA, 22 bp, Artificial Sequence
  Synthetic oligonucleotide; TTT chr11 5273792 5273813 5273797 5273792 -
aaattaggcatcttacagtttt

SEQ ID NO: 135363 - DNA, 22 bp, Artificial Sequence
  Synthetic oligonucleotide; TTA chr11 5273791 5273812 5273796 5273791 -
aattaggcatcttacagttttt

SEQ ID NO: 135364 - DNA, 22 bp, Artificial Sequence
  Synthetic oligonucleotide; TTA chr11 5273786 5273807 5273791 5273786 -
ggcatcttacagtttttagaat

SEQ ID NO: 135365 - DNA, 22 bp, Artificial Sequence
  Synthetic oligonucleotide; CTT chr11 5273778 5273799 5273783 5273778 -
acagtttttagaatcctgcata

SEQ ID NO: 135366 - DNA, 22 bp, Artificial Sequence
  Synthetic oligonucleotide; TTA chr11 5273777 5273798 5273782 5273777 -
cagtttttagaatcctgcatag

SEQ ID NO: 135367 - DNA, 22 bp, Artificial Sequence
  Synthetic oligonucleotide; TTT chr11 5273771 5273792 5273776 5273771 -
ttagaatcctgcatagaactta

SEQ ID NO: 135368 - DNA, 22 bp, Artificial Sequence
  Synthetic oligonucleotide; TTT chr11 5273770 5273791 5273775 5273770 -
tagaatcctgcatagaacttaa

SEQ ID NO: 135369 - DNA, 22 bp, Artificial Sequence
  Synthetic oligonucleotide; TTT chr11 5273769 5273790 5273774 5273769 -
agaatcctgcatagaacttaag

SEQ ID NO: 135370 - DNA, 22 bp, Artificial Sequence
  Synthetic oligonucleotide; TTA chr11 5273768 5273789 5273773 5273768 -
gaatcctgcatagaacttaaga

SEQ ID NO: 135371 - DNA, 22 bp, Artificial Sequence
  Synthetic oligonucleotide; CTG chr11 5273760 5273781 5273765 5273760 -
catagaacttaagaaattacaa

SEQ ID NO: 135372 - DNA, 22 bp, Artificial Sequence
  Synthetic oligonucleotide; CTT chr11 5273750 5273771 5273755 5273750 -
aagaaattacaaatgctaaagc

SEQ ID NO: 135373 - DNA, 22 bp, Artificial Sequence
  Synthetic oligonucleotide; TTA chr11 5273749 5273770 5273754 5273749 -
agaaattacaaatgctaaagca

SEQ ID NO: 135374 - DNA, 22 bp, Artificial Sequence
  Synthetic oligonucleotide; TTA chr11 5273741 5273762 5273746 5273741 -
caaatgctaaagcaaacccaaa

SEQ ID NO: 135375 - DNA, 22 bp, Artificial Sequence
  Synthetic oligonucleotide; CTA chr11 5273732 5273753 5273737 5273732 -
aagcaaacccaaacaggcagga

SEQ ID NO: 135376 - DNA, 22 bp, Artificial Sequence
  Synthetic oligonucleotide; TTA chr11 5273706 5273727 5273711 5273706 -
atcttcatcgaatttgggtgtt

SEQ ID NO: 135377 - DNA, 22 bp, Artificial Sequence
  Synthetic oligonucleotide; CTT chr11 5273701 5273722 5273706 5273701 -
catcgaatttgggtgtttcttt

SEQ ID NO: 135378 - DNA, 22 bp, Artificial Sequence
  Synthetic oligonucleotide; TTC chr11 5273700 5273721 5273705 5273700 -
atcgaatttgggtgtttctttc

SEQ ID NO: 135379 - DNA, 22 bp, Artificial Sequence
  Synthetic oligonucleotide; TTT chr11 5273691 5273712 5273696 5273691 -
gggtgtttctttctaaaagtcc

SEQ ID NO: 135380 - DNA, 22 bp, Artificial Sequence
  Synthetic oligonucleotide; TTG chr11 5273690 5273711 5273695 5273690 -
ggtgtttctttctaaaagtcct

SEQ ID NO: 135381 - DNA, 22 bp, Artificial Sequence
  Synthetic oligonucleotide; TTT chr11 5273683 5273704 5273688 5273683 -
ctttctaaaagtcctttatact

SEQ ID NO: 135382 - DNA, 22 bp, Artificial Sequence
  Synthetic oligonucleotide; TTC chr11 5273682 5273703 5273687 5273682 -
tttctaaaagtcctttatactt

SEQ ID NO: 135383 - DNA, 22 bp, Artificial Sequence
  Synthetic oligonucleotide; CTT chr11 5273680 5273701 5273685 5273680 -
tctaaaagtcctttatacttaa

SEQ ID NO: 135384 - DNA, 22 bp, Artificial Sequence
  Synthetic oligonucleotide; TTT chr11 5273679 5273700 5273684 5273679 -
ctaaaagtcctttatacttaaa

SEQ ID NO: 135385 - DNA, 22 bp, Artificial Sequence
  Synthetic oligonucleotide; TTC chr11 5273678 5273699 5273683 5273678 -
taaaagtcctttatacttaaat

SEQ ID NO: 135386 - DNA, 22 bp, Artificial Sequence
  Synthetic oligonucleotide; CTA chr11 5273676 5273697 5273681 5273676 -
aaagtcctttatacttaaatgt

SEQ ID NO: 135387 - DNA, 22 bp, Artificial Sequence
  Synthetic oligonucleotide; CTT chr11 5273667 5273688 5273672 5273667 -
tatacttaaatgtcttaagaca

SEQ ID NO: 135388 - DNA, 22 bp, Artificial Sequence
  Synthetic oligonucleotide; TTT chr11 5273666 5273687 5273671 5273666 -
atacttaaatgtcttaagacat

SEQ ID NO: 135389 - DNA, 22 bp, Artificial Sequence
  Synthetic oligonucleotide; TTA chr11 5273665 5273686 5273670 5273665 -
tacttaaatgtcttaagacata

SEQ ID NO: 135390 - DNA, 22 bp, Artificial Sequence
  Synthetic oligonucleotide; CTT chr11 5273660 5273681 5273665 5273660 -
aaatgtcttaagacatacatag

SEQ ID NO: 135391 - DNA, 22 bp, Artificial Sequence
  Synthetic oligonucleotide; TTA chr11 5273659 5273680 5273664 5273659 -
aatgtcttaagacatacataga

SEQ ID NO: 135392 - DNA, 22 bp, Artificial Sequence
  Synthetic oligonucleotide; CTT chr11 5273651 5273672 5273656 5273651 -
aagacatacatagattttattt

SEQ ID NO: 135393 - DNA, 22 bp, Artificial Sequence
  Synthetic oligonucleotide; TTA chr11 5273650 5273671 5273655 5273650 -
agacatacatagattttatttt

SEQ ID NO: 135394 - DNA, 22 bp, Artificial Sequence
  Synthetic oligonucleotide; TTT chr11 5273634 5273655 5273639 5273634 -
tattttactaattttaattata

SEQ ID NO: 135395 - DNA, 22 bp, Artificial Sequence
  Synthetic oligonucleotide; TTT chr11 5273633 5273654 5273638 5273633 -
attttactaattttaattatat

SEQ ID NO: 135396 - DNA, 22 bp, Artificial Sequence
  Synthetic oligonucleotide; TTA chr11 5273632 5273653 5273637 5273632 -
ttttactaattttaattatata

SEQ ID NO: 135397 - DNA, 22 bp, Artificial Sequence
  Synthetic oligonucleotide; TTT chr11 5273629 5273650 5273634 5273629 -
tactaattttaattatatagac

SEQ ID NO: 135398 - DNA, 22 bp, Artificial Sequence
  Synthetic oligonucleotide; TTT chr11 5273628 5273649 5273633 5273628 -
actaattttaattatatagaca

SEQ ID NO: 135399 - DNA, 22 bp, Artificial Sequence
  Synthetic oligonucleotide; TTA chr11 5273627 5273648 5273632 5273627 -
ctaattttaattatatagacaa

SEQ ID NO: 135400 - DNA, 22 bp, Artificial Sequence
  Synthetic oligonucleotide; CTA chr11 5273624 5273645 5273629 5273624 -
attttaattatatagacaataa

SEQ ID NO: 135401 - DNA, 22 bp, Artificial Sequence
  Synthetic oligonucleotide; TTT chr11 5273620 5273641 5273625 5273620 -
taattatatagacaataaatga

SEQ ID NO: 135402 - DNA, 22 bp, Artificial Sequence
  Synthetic oligonucleotide; TTT chr11 5273619 5273640 5273624 5273619 -
aattatatagacaataaatgaa

SEQ ID NO: 135403 - DNA, 22 bp, Artificial Sequence
  Synthetic oligonucleotide; TTA chr11 5273618 5273639 5273623 5273618 -
attatatagacaataaatgaat

SEQ ID NO: 135404 - DNA, 22 bp, Artificial Sequence
  Synthetic oligonucleotide; TTA chr11 5273614 5273635 5273619 5273614 -
tatagacaataaatgaatattc

SEQ ID NO: 135405 - DNA, 22 bp, Artificial Sequence
  Synthetic oligonucleotide; TTC chr11 5273592 5273613 5273597 5273592 -
ttactgattactttttctgact

SEQ ID NO: 135406 - DNA, 22 bp, Artificial Sequence
  Synthetic oligonucleotide; CTT chr11 5273590 5273611 5273595 5273590 -
actgattactttttctgactgt

SEQ ID NO: 135407 - DNA, 22 bp, Artificial Sequence
  Synthetic oligonucleotide; TTA chr11 5273589 5273610 5273594 5273589 -
ctgattactttttctgactgtc

SEQ ID NO: 135408 - DNA, 22 bp, Artificial Sequence
  Synthetic oligonucleotide; CTG chr11 5273586 5273607 5273591 5273586 -
attactttttctgactgtctaa

SEQ ID NO: 135409 - DNA, 22 bp, Artificial Sequence
  Synthetic oligonucleotide; TTA chr11 5273582 5273603 5273587 5273582 -
ctttttctgactgtctaatctt

SEQ ID NO: 135410 - DNA, 22 bp, Artificial Sequence
  Synthetic oligonucleotide; CTT chr11 5273579 5273600 5273584 5273579 -
tttctgactgtctaatctttct

SEQ ID NO: 135411 - DNA, 22 bp, Artificial Sequence
  Synthetic oligonucleotide; TTT chr11 5273578 5273599 5273583 5273578 -
ttctgactgtctaatctttctg

SEQ ID NO: 135412 - DNA, 22 bp, Artificial Sequence
  Synthetic oligonucleotide; TTT chr11 5273577 5273598 5273582 5273577 -
tctgactgtctaatctttctga

SEQ ID NO: 135413 - DNA, 22 bp, Artificial Sequence
  Synthetic oligonucleotide; TTT chr11 5273576 5273597 5273581 5273576 -
ctgactgtctaatctttctgat

SEQ ID NO: 135414 - DNA, 22 bp, Artificial Sequence
  Synthetic oligonucleotide; TTC chr11 5273575 5273596 5273580 5273575 -
tgactgtctaatctttctgatc

SEQ ID NO: 135415 - DNA, 22 bp, Artificial Sequence
  Synthetic oligonucleotide; CTG chr11 5273573 5273594 5273578 5273573 -
actgtctaatctttctgatcta

SEQ ID NO: 135416 - DNA, 22 bp, Artificial Sequence
  Synthetic oligonucleotide; CTG chr11 5273569 5273590 5273574 5273569 -
tctaatctttctgatctatcct

SEQ ID NO: 135417 - DNA, 22 bp, Artificial Sequence
  Synthetic oligonucleotide; CTA chr11 5273565 5273586 5273570 5273565 -
atctttctgatctatcctggat

SEQ ID NO: 135418 - DNA, 22 bp, Artificial Sequence
  Synthetic oligonucleotide; CTT chr11 5273560 5273581 5273565 5273560 -
tctgatctatcctggatggcca

SEQ ID NO: 135419 - DNA, 22 bp, Artificial Sequence
  Synthetic oligonucleotide; TTT chr11 5273559 5273580 5273564 5273559 -
ctgatctatcctggatggccat

SEQ ID NO: 135420 - DNA, 22 bp, Artificial Sequence
  Synthetic oligonucleotide; TTC chr11 5273558 5273579 5273563 5273558 -
tgatctatcctggatggccata

SEQ ID NO: 135421 - DNA, 22 bp, Artificial Sequence
  Synthetic oligonucleotide; CTG chr11 5273556 5273577 5273561 5273556 -
atctatcctggatggccataac

SEQ ID NO: 135422 - DNA, 22 bp, Artificial Sequence
  Synthetic oligonucleotide; CTA chr11 5273551 5273572 5273556 5273551 -
tcctggatggccataacactta

SEQ ID NO: 135423 - DNA, 22 bp, Artificial Sequence
  Synthetic oligonucleotide; CTG chr11 5273546 5273567 5273551 5273546 -
gatggccataacacttatctct

SEQ ID NO: 135424 - DNA, 22 bp, Artificial Sequence
  Synthetic oligonucleotide; CTT chr11 5273530 5273551 5273535 5273530 -
atctctctgaactttgggcttt

SEQ ID NO: 135425 - DNA, 22 bp, Artificial Sequence
  Synthetic oligonucleotide; TTA chr11 5273529 5273550 5273534 5273529 -
tctctctgaactttgggctttt

SEQ ID NO: 135426 - DNA, 22 bp, Artificial Sequence
  Synthetic oligonucleotide; CTC chr11 5273525 5273546 5273530 5273525 -
tctgaactttgggcttttaata

SEQ ID NO: 135427 - DNA, 22 bp, Artificial Sequence
  Synthetic oligonucleotide; CTC chr11 5273523 5273544 5273528 5273523 -
tgaactttgggcttttaatata

SEQ ID NO: 135428 - DNA, 22 bp, Artificial Sequence
  Synthetic oligonucleotide; CTG chr11 5273521 5273542 5273526 5273521 -
aactttgggcttttaatatagg

SEQ ID NO: 135429 - DNA, 22 bp, Artificial Sequence
  Synthetic oligonucleotide; CTT chr11 5273516 5273537 5273521 5273516 -
tgggcttttaatataggaaaga

SEQ ID NO: 135430 - DNA, 22 bp, Artificial Sequence
  Synthetic oligonucleotide; TTT chr11 5273515 5273536 5273520 5273515 -
gggcttttaatataggaaagaa

SEQ ID NO: 135431 - DNA, 22 bp, Artificial Sequence
  Synthetic oligonucleotide; TTG chr11 5273514 5273535 5273519 5273514 -
ggcttttaatataggaaagaaa

SEQ ID NO: 135432 - DNA, 22 bp, Artificial Sequence
  Synthetic oligonucleotide; CTT chr11 5273509 5273530 5273514 5273509 -
ttaatataggaaagaaaagcaa

SEQ ID NO: 135433 - DNA, 22 bp, Artificial Sequence
  Synthetic oligonucleotide; TTT chr11 5273508 5273529 5273513 5273508 -
taatataggaaagaaaagcaat

SEQ ID NO: 135434 - DNA, 22 bp, Artificial Sequence
  Synthetic oligonucleotide; TTT chr11 5273507 5273528 5273512 5273507 -
aatataggaaagaaaagcaata

SEQ ID NO: 135435 - DNA, 22 bp, Artificial Sequence
  Synthetic oligonucleotide; TTA chr11 5273506 5273527 5273511 5273506 -
atataggaaagaaaagcaataa

SEQ ID NO: 135436 - DNA, 22 bp, Artificial Sequence
  Synthetic oligonucleotide; TTT chr11 5273477 5273498 5273482 5273477 -
ttcatggtatctcatatgataa

SEQ ID NO: 135437 - DNA, 22 bp, Artificial Sequence
  Synthetic oligonucleotide; TTT chr11 5273476 5273497 5273481 5273476 -
tcatggtatctcatatgataaa

SEQ ID NO: 135438 - DNA, 22 bp, Artificial Sequence
  Synthetic oligonucleotide; TTT chr11 5273475 5273496 5273480 5273475 -
catggtatctcatatgataaac

SEQ ID NO: 135439 - DNA, 22 bp, Artificial Sequence
  Synthetic oligonucleotide; TTC chr11 5273474 5273495 5273479 5273474 -
atggtatctcatatgataaaca

SEQ ID NO: 135440 - DNA, 22 bp, Artificial Sequence
  Synthetic oligonucleotide; CTC chr11 5273464 5273485 5273469 5273464 -
atatgataaacaaataaaatgc

SEQ ID NO: 135441 - DNA, 22 bp, Artificial Sequence
  Synthetic oligonucleotide; CTT chr11 5273440 5273461 5273445 5273440 -
aaaaatgagcaggtgaagcaat

SEQ ID NO: 135442 - DNA, 22 bp, Artificial Sequence
  Synthetic oligonucleotide; TTA chr11 5273439 5273460 5273444 5273439 -
aaaatgagcaggtgaagcaatt

SEQ ID NO: 135443 - DNA, 22 bp, Artificial Sequence
  Synthetic oligonucleotide; TTT chr11 5273416 5273437 5273421 5273416 -
atcttgaaccaacaagcatcga

SEQ ID NO: 135444 - DNA, 22 bp, Artificial Sequence
  Synthetic oligonucleotide; TTA chr11 5273415 5273436 5273420 5273415 -
tcttgaaccaacaagcatcgaa

SEQ ID NO: 135445 - DNA, 22 bp, Artificial Sequence
  Synthetic oligonucleotide; CTT chr11 5273411 5273432 5273416 5273411 -
gaaccaacaagcatcgaagcaa

SEQ ID NO: 135446 - DNA, 22 bp, Artificial Sequence
  Synthetic oligonucleotide; TTG chr11 5273410 5273431 5273415 5273410 -
aaccaacaagcatcgaagcaat

SEQ ID NO: 135447 - DNA, 22 bp, Artificial Sequence
  Synthetic oligonucleotide; CTG chr11 5273378 5273399 5273383 5273378 -
cccgcagcctacctgacttctg

SEQ ID NO: 135448 - DNA, 22 bp, Artificial Sequence
  Synthetic oligonucleotide; CTA chr11 5273367 5273388 5273372 5273367 -
cctgacttctgagtcaggattt

SEQ ID NO: 135449 - DNA, 22 bp, Artificial Sequence
  Synthetic oligonucleotide; CTG chr11 5273363 5273384 5273368 5273363 -
acttctgagtcaggatttataa

SEQ ID NO: 135450 - DNA, 22 bp, Artificial Sequence
  Synthetic oligonucleotide; CTT chr11 5273359 5273380 5273364 5273359 -
ctgagtcaggatttataagcct

SEQ ID NO: 135451 - DNA, 22 bp, Artificial Sequence
  Synthetic oligonucleotide; TTC chr11 5273358 5273379 5273363 5273358 -
tgagtcaggatttataagcctt

SEQ ID NO: 135452 - DNA, 22 bp, Artificial Sequence
  Synthetic oligonucleotide; CTG chr11 5273356 5273377 5273361 5273356 -
agtcaggatttataagccttgt

SEQ ID NO: 135453 - DNA, 22 bp, Artificial Sequence
  Synthetic oligonucleotide; TTT chr11 5273345 5273366 5273350 5273345 -
ataagccttgttactgagacac

SEQ ID NO: 135454 - DNA, 22 bp, Artificial Sequence
  Synthetic oligonucleotide; TTA chr11 5273344 5273365 5273349 5273344 -
taagccttgttactgagacaca

SEQ ID NO: 135455 - DNA, 22 bp, Artificial Sequence
  Synthetic oligonucleotide; CTT chr11 5273336 5273357 5273341 5273336 -
gttactgagacacaaacctggg

SEQ ID NO: 135456 - DNA, 22 bp, Artificial Sequence
  Synthetic oligonucleotide; TTG chr11 5273335 5273356 5273340 5273335 -
ttactgagacacaaacctgggc

SEQ ID NO: 135457 - DNA, 22 bp, Artificial Sequence
  Synthetic oligonucleotide; TTA chr11 5273332 5273353 5273337 5273332 -
ctgagacacaaacctgggcctt

SEQ ID NO: 135458 - DNA, 22 bp, Artificial Sequence
  Synthetic oligonucleotide; CTG chr11 5273329 5273350 5273334 5273329 -
agacacaaacctgggcctttca

SEQ ID NO: 135459 - DNA, 22 bp, Artificial Sequence
  Synthetic oligonucleotide; CTG chr11 5273316 5273337 5273321 5273316 -
ggcctttcaatgctataacctt

SEQ ID NO: 135460 - DNA, 22 bp, Artificial Sequence
  Synthetic oligonucleotide; CTT chr11 5273310 5273331 5273315 5273310 -
tcaatgctataacctttcttga

SEQ ID NO: 135461 - DNA, 22 bp, Artificial Sequence
  Synthetic oligonucleotide; TTT chr11 5273309 5273330 5273314 5273309 -
caatgctataacctttcttgaa

SEQ ID NO: 135462 - DNA, 22 bp, Artificial Sequence
  Synthetic oligonucleotide; TTC chr11 5273308 5273329 5273313 5273308 -
aatgctataacctttcttgaag

SEQ ID NO: 135463 - DNA, 22 bp, Artificial Sequence
  Synthetic oligonucleotide; CTA chr11 5273301 5273322 5273306 5273301 -
taacctttcttgaagctcctcc

SEQ ID NO: 135464 - DNA, 22 bp, Artificial Sequence
  Synthetic oligonucleotide; CTT chr11 5273294 5273315 5273299 5273294 -
tcttgaagctcctccctaccac

SEQ ID NO: 135465 - DNA, 22 bp, Artificial Sequence
  Synthetic oligonucleotide; TTT chr11 5273293 5273314 5273298 5273293 -
cttgaagctcctccctaccacc

SEQ ID NO: 135466 - DNA, 22 bp, Artificial Sequence
  Synthetic oligonucleotide; TTC chr11 5273292 5273313 5273297 5273292 -
ttgaagctcctccctaccacct

SEQ ID NO: 135467 - DNA, 22 bp, Artificial Sequence
  Synthetic oligonucleotide; CTT chr11 5273290 5273311 5273295 5273290 -
gaagctcctccctaccaccttt

SEQ ID NO: 135468 - DNA, 22 bp, Artificial Sequence
  Synthetic oligonucleotide; TTG chr11 5273289 5273310 5273294 5273289 -
aagctcctccctaccaccttta

SEQ ID NO: 135469 - DNA, 22 bp, Artificial Sequence
  Synthetic oligonucleotide; CTC chr11 5273283 5273304 5273288 5273283 -
ctccctaccacctttagccata

SEQ ID NO: 135470 - DNA, 22 bp, Artificial Sequence
  Synthetic oligonucleotide; CTC chr11 5273280 5273301 5273285 5273280 -
cctaccacctttagccataagg

SEQ ID NO: 135471 - DNA, 22 bp, Artificial Sequence
  Synthetic oligonucleotide; CTA chr11 5273276 5273297 5273281 5273276 -
ccacctttagccataaggaaac

SEQ ID NO: 135472 - DNA, 22 bp, Artificial Sequence
  Synthetic oligonucleotide; CTT chr11 5273269 5273290 5273274 5273269 -
tagccataaggaaacatggaat

SEQ ID NO: 135473 - DNA, 22 bp, Artificial Sequence
  Synthetic oligonucleotide; TTT chr11 5273268 5273289 5273273 5273268 -
agccataaggaaacatggaatg

SEQ ID NO: 135474 - DNA, 22 bp, Artificial Sequence
  Synthetic oligonucleotide; TTA chr11 5273267 5273288 5273272 5273267 -
gccataaggaaacatggaatgg

SEQ ID NO: 135475 - DNA, 22 bp, Artificial Sequence
  Synthetic oligonucleotide; CTG chr11 5273233 5273254 5273238 5273233 -
gatgcaagccaggtctggaacc

SEQ ID NO: 135476 - DNA, 22 bp, Artificial Sequence
  Synthetic oligonucleotide; CTG chr11 5273216 5273237 5273221 5273216 -
gaaccataggcagtaaggagag

SEQ ID NO: 135477 - DNA, 22 bp, Artificial Sequence
  Synthetic oligonucleotide; CTC chr11 5273178 5273199 5273183 5273178 -
tgcaactggctccgagggagca

SEQ ID NO: 135478 - DNA, 22 bp, Artificial Sequence
  Synthetic oligonucleotide; CTG chr11 5273176 5273197 5273181 5273176 -
caactggctccgagggagcagg

SEQ ID NO: 135479 - DNA, 22 bp, Artificial Sequence
  Synthetic oligonucleotide; CTG chr11 5273170 5273191 5273175 5273170 -
gctccgagggagcaggagagga

SEQ ID NO: 135480 - DNA, 22 bp, Artificial Sequence
  Synthetic oligonucleotide; CTC chr11 5273166 5273187 5273171 5273166 -
cgagggagcaggagaggatcaa

SEQ ID NO: 135481 - DNA, 22 bp, Artificial Sequence
  Synthetic oligonucleotide; CTC chr11 5273134 5273155 5273139 5273134 -
tgaatctaagagaagactggtg

SEQ ID NO: 135482 - DNA, 22 bp, Artificial Sequence
  Synthetic oligonucleotide; CTG chr11 5273132 5273153 5273137 5273132 -
aatctaagagaagactggtgtc

SEQ ID NO: 135483 - DNA, 22 bp, Artificial Sequence
  Synthetic oligonucleotide; CTA chr11 5273126 5273147 5273131 5273126 -
agagaagactggtgtccatact

SEQ ID NO: 135484 - DNA, 22 bp, Artificial Sequence
  Synthetic oligonucleotide; CTG chr11 5273115 5273136 5273120 5273115 -
gtgtccatactctgaatgggaa

SEQ ID NO: 135485 - DNA, 22 bp, Artificial Sequence
  Synthetic oligonucleotide; CTC chr11 5273103 5273124 5273108 5273103 -
tgaatgggaagaatgatgggat

SEQ ID NO: 135486 - DNA, 22 bp, Artificial Sequence
  Synthetic oligonucleotide; CTG chr11 5273101 5273122 5273106 5273101 -
aatgggaagaatgatgggatta

SEQ ID NO: 135487 - DNA, 22 bp, Artificial Sequence
  Synthetic oligonucleotide; TTA chr11 5273079 5273100 5273084 5273079 -
cccatagggcttgttttaggga

SEQ ID NO: 135488 - DNA, 22 bp, Artificial Sequence
  Synthetic oligonucleotide; CTT chr11 5273067 5273088 5273072 5273067 -
gttttagggagaaacctgttct

SEQ ID NO: 135489 - DNA, 22 bp, Artificial Sequence
  Synthetic oligonucleotide; TTG chr11 5273066 5273087 5273071 5273066 -
ttttagggagaaacctgttctc

SEQ ID NO: 135490 - DNA, 22 bp, Artificial Sequence
  Synthetic oligonucleotide; TTT chr11 5273063 5273084 5273068 5273063 -
tagggagaaacctgttctccaa

SEQ ID NO: 135491 - DNA, 22 bp, Artificial Sequence
  Synthetic oligonucleotide; TTT chr11 5273062 5273083 5273067 5273062 -
agggagaaacctgttctccaaa

SEQ ID NO: 135492 - DNA, 22 bp, Artificial Sequence
  Synthetic oligonucleotide; TTA chr11 5273061 5273082 5273066 5273061 -
gggagaaacctgttctccaaac

SEQ ID NO: 135493 - DNA, 22 bp, Artificial Sequence
  Synthetic oligonucleotide; CTG chr11 5273049 5273070 5273054 5273049 -
ttctccaaactcttggccttga

SEQ ID NO: 135494 - DNA, 22 bp, Artificial Sequence
  Synthetic oligonucleotide; TTC chr11 5273046 5273067 5273051 5273046 -
tccaaactcttggccttgagat

SEQ ID NO: 135495 - DNA, 22 bp, Artificial Sequence
  Synthetic oligonucleotide; CTC chr11 5273044 5273065 5273049 5273044 -
caaactcttggccttgagatac

SEQ ID NO: 135496 - DNA, 22 bp, Artificial Sequence
  Synthetic oligonucleotide; CTC chr11 5273037 5273058 5273042 5273037 -
ttggccttgagatacctggtcc

SEQ ID NO: 135497 - DNA, 22 bp, Artificial Sequence
  Synthetic oligonucleotide; CTT chr11 5273035 5273056 5273040 5273035 -
ggccttgagatacctggtcctt

SEQ ID NO: 135498 - DNA, 22 bp, Artificial Sequence
  Synthetic oligonucleotide; TTG chr11 5273034 5273055 5273039 5273034 -
gccttgagatacctggtcctta

SEQ ID NO: 135499 - DNA, 22 bp, Artificial Sequence
  Synthetic oligonucleotide; CTT chr11 5273029 5273050 5273034 5273029 -
gagatacctggtccttattcct

SEQ ID NO: 135500 - DNA, 22 bp, Artificial Sequence
  Synthetic oligonucleotide; TTG chr11 5273028 5273049 5273033 5273028 -
agatacctggtccttattcctt

SEQ ID NO: 135501 - DNA, 22 bp, Artificial Sequence
  Synthetic oligonucleotide; CTG chr11 5273019 5273040 5273024 5273019 -
gtccttattccttggactttgg

SEQ ID NO: 135502 - DNA, 22 bp, Artificial Sequence
  Synthetic oligonucleotide; CTT chr11 5273013 5273034 5273018 5273013 -
attccttggactttggcaatgt

SEQ ID NO: 135503 - DNA, 22 bp, Artificial Sequence
  Synthetic oligonucleotide; TTA chr11 5273012 5273033 5273017 5273012 -
ttccttggactttggcaatgtc

SEQ ID NO: 135504 - DNA, 22 bp, Artificial Sequence
  Synthetic oligonucleotide; TTC chr11 5273009 5273030 5273014 5273009 -
cttggactttggcaatgtctga

SEQ ID NO: 135505 - DNA, 22 bp, Artificial Sequence
  Synthetic oligonucleotide; CTT chr11 5273006 5273027 5273011 5273006 -
ggactttggcaatgtctgaccc

SEQ ID NO: 135506 - DNA, 22 bp, Artificial Sequence
  Synthetic oligonucleotide; TTG chr11 5273005 5273026 5273010 5273005 -
gactttggcaatgtctgaccct

SEQ ID NO: 135507 - DNA, 22 bp, Artificial Sequence
  Synthetic oligonucleotide; CTT chr11 5273000 5273021 5273005 5273000 -
tggcaatgtctgaccctcacat

SEQ ID NO: 135508 - DNA, 22 bp, Artificial Sequence
  Synthetic oligonucleotide; TTT chr11 5272999 5273020 5273004 5272999 -
ggcaatgtctgaccctcacatt

SEQ ID NO: 135509 - DNA, 22 bp, Artificial Sequence
  Synthetic oligonucleotide; TTG chr11 5272998 5273019 5273003 5272998 -
gcaatgtctgaccctcacattc

SEQ ID NO: 135510 - DNA, 22 bp, Artificial Sequence
  Synthetic oligonucleotide; CTG chr11 5272988 5273009 5272993 5272988 -
accctcacattcaagttctgag

SEQ ID NO: 135511 - DNA, 22 bp, Artificial Sequence
  Synthetic oligonucleotide; CTC chr11 5272982 5273003 5272987 5272982 -
acattcaagttctgaggaaggg

SEQ ID NO: 135512 - DNA, 22 bp, Artificial Sequence
  Synthetic oligonucleotide; TTC chr11 5272976 5272997 5272981 5272976 -
aagttctgaggaagggccactg

SEQ ID NO: 135513 - DNA, 22 bp, Artificial Sequence
  Synthetic oligonucleotide; TTC chr11 5272970 5272991 5272975 5272970 -
tgaggaagggccactgccttca

SEQ ID NO: 135514 - DNA, 22 bp, Artificial Sequence
  Synthetic oligonucleotide; CTG chr11 5272968 5272989 5272973 5272968 -
aggaagggccactgccttcata

SEQ ID NO: 135515 - DNA, 22 bp, Artificial Sequence
  Synthetic oligonucleotide; CTG chr11 5272954 5272975 5272959 5272954 -
ccttcatactgtggatctgtag

SEQ ID NO: 135516 - DNA, 22 bp, Artificial Sequence
  Synthetic oligonucleotide; CTT chr11 5272950 5272971 5272955 5272950 -
catactgtggatctgtagcaaa

SEQ ID NO: 135517 - DNA, 22 bp, Artificial Sequence
  Synthetic oligonucleotide; TTC chr11 5272949 5272970 5272954 5272949 -
atactgtggatctgtagcaaat

SEQ ID NO: 135518 - DNA, 22 bp, Artificial Sequence
  Synthetic oligonucleotide; CTG chr11 5272943 5272964 5272948 5272943 -
tggatctgtagcaaattccccc

SEQ ID NO: 135519 - DNA, 22 bp, Artificial Sequence
  Synthetic oligonucleotide; CTG chr11 5272935 5272956 5272940 5272935 -
tagcaaattccccctgaaaacc

SEQ ID NO: 135520 - DNA, 22 bp, Artificial Sequence
  Synthetic oligonucleotide; TTC chr11 5272925 5272946 5272930 5272925 -
cccctgaaaacccagagctgta

SEQ ID NO: 135521 - DNA, 22 bp, Artificial Sequence
  Synthetic oligonucleotide; CTG chr11 5272919 5272940 5272924 5272919 -
aaaacccagagctgtatcttaa

SEQ ID NO: 135522 - DNA, 22 bp, Artificial Sequence
  Synthetic oligonucleotide; CTG chr11 5272905 5272926 5272910 5272905 -
tatcttaattggttaaaaaaaa

SEQ ID NO: 135523 - DNA, 22 bp, Artificial Sequence
  Synthetic oligonucleotide; CTT chr11 5272899 5272920 5272904 5272899 -
aattggttaaaaaaaattatat

SEQ ID NO: 135524 - DNA, 22 bp, Artificial Sequence
  Synthetic oligonucleotide; TTA chr11 5272898 5272919 5272903 5272898 -
attggttaaaaaaaattatatt

SEQ ID NO: 135525 - DNA, 22 bp, Artificial Sequence
  Synthetic oligonucleotide; TTG chr11 5272894 5272915 5272899 5272894 -
gttaaaaaaaattatattatct

SEQ ID NO: 135526 - DNA, 22 bp, Artificial Sequence
  Synthetic oligonucleotide; TTA chr11 5272890 5272911 5272895 5272890 -
aaaaaaattatattatctcaac

SEQ ID NO: 135527 - DNA, 22 bp, Artificial Sequence
  Synthetic oligonucleotide; TTA chr11 5272880 5272901 5272885 5272880 -
tattatctcaacgactgttctt

SEQ ID NO: 135528 - DNA, 22 bp, Artificial Sequence
  Synthetic oligonucleotide; TTA chr11 5272875 5272896 5272880 5272875 -
tctcaacgactgttcttctctg

SEQ ID NO: 135529 - DNA, 22 bp, Artificial Sequence
  Synthetic oligonucleotide; CTC chr11 5272871 5272892 5272876 5272871 -
aacgactgttcttctctgagta

SEQ ID NO: 135530 - DNA, 22 bp, Artificial Sequence
  Synthetic oligonucleotide; CTG chr11 5272863 5272884 5272868 5272863 -
ttcttctctgagtagccaagct

SEQ ID NO: 135531 - DNA, 22 bp, Artificial Sequence
  Synthetic oligonucleotide; TTC chr11 5272860 5272881 5272865 5272860 -
ttctctgagtagccaagctcag

SEQ ID NO: 135532 - DNA, 22 bp, Artificial Sequence
  Synthetic oligonucleotide; CTT chr11 5272858 5272879 5272863 5272858 -
ctctgagtagccaagctcagct

SEQ ID NO: 135533 - DNA, 22 bp, Artificial Sequence
  Synthetic oligonucleotide; TTC chr11 5272857 5272878 5272862 5272857 -
tctgagtagccaagctcagctt

SEQ ID NO: 135534 - DNA, 22 bp, Artificial Sequence
  Synthetic oligonucleotide; CTC chr11 5272855 5272876 5272860 5272855 -
tgagtagccaagctcagcttgg

SEQ ID NO: 135535 - DNA, 22 bp, Artificial Sequence
  Synthetic oligonucleotide; CTG chr11 5272853 5272874 5272858 5272853 -
agtagccaagctcagcttggtt

SEQ ID NO: 135536 - DNA, 22 bp, Artificial Sequence
  Synthetic oligonucleotide; CTC chr11 5272840 5272861 5272845 5272840 -
agcttggttcaagctacaagca

SEQ ID NO: 135537 - DNA, 22 bp, Artificial Sequence
  Synthetic oligonucleotide; CTT chr11 5272835 5272856 5272840 5272835 -
ggttcaagctacaagcagctga

SEQ ID NO: 135538 - DNA, 22 bp, Artificial Sequence
  Synthetic oligonucleotide; TTG chr11 5272834 5272855 5272839 5272834 -
gttcaagctacaagcagctgag

SEQ ID NO: 135539 - DNA, 22 bp, Artificial Sequence
  Synthetic oligonucleotide; TTC chr11 5272830 5272851 5272835 5272830 -
aagctacaagcagctgagctgc

SEQ ID NO: 135540 - DNA, 22 bp, Artificial Sequence
  Synthetic oligonucleotide; CTA chr11 5272824 5272845 5272829 5272824 -
caagcagctgagctgctttttg

SEQ ID NO: 135541 - DNA, 22 bp, Artificial Sequence
  Synthetic oligonucleotide; CTG chr11 5272814 5272835 5272819 5272814 -
agctgctttttgtctagtcatt

SEQ ID NO: 135542 - DNA, 22 bp, Artificial Sequence
  Synthetic oligonucleotide; CTG chr11 5272809 5272830 5272814 5272809 -
ctttttgtctagtcattgttct

SEQ ID NO: 135543 - DNA, 22 bp, Artificial Sequence
  Synthetic oligonucleotide; CTT chr11 5272806 5272827 5272811 5272806 -
tttgtctagtcattgttctttt

SEQ ID NO: 135544 - DNA, 22 bp, Artificial Sequence
  Synthetic oligonucleotide; TTT chr11 5272805 5272826 5272810 5272805 -
ttgtctagtcattgttctttta

SEQ ID NO: 135545 - DNA, 22 bp, Artificial Sequence
  Synthetic oligonucleotide; TTT chr11 5272804 5272825 5272809 5272804 -
tgtctagtcattgttcttttat

SEQ ID NO: 135546 - DNA, 22 bp, Artificial Sequence
  Synthetic oligonucleotide; TTT chr11 5272803 5272824 5272808 5272803 -
gtctagtcattgttcttttatt

SEQ ID NO: 135547 - DNA, 22 bp, Artificial Sequence
  Synthetic oligonucleotide; TTG chr11 5272802 5272823 5272807 5272802 -
tctagtcattgttcttttattt

SEQ ID NO: 135548 - DNA, 22 bp, Artificial Sequence
  Synthetic oligonucleotide; CTA chr11 5272798 5272819 5272803 5272798 -
gtcattgttcttttatttcagt

SEQ ID NO: 135549 - DNA, 22 bp, Artificial Sequence
  Synthetic oligonucleotide; TTG chr11 5272791 5272812 5272796 5272791 -
ttcttttatttcagtggatcaa

SEQ ID NO: 135550 - DNA, 22 bp, Artificial Sequence
  Synthetic oligonucleotide; TTC chr11 5272788 5272809 5272793 5272788 -
ttttatttcagtggatcaaata

SEQ ID NO: 135551 - DNA, 22 bp, Artificial Sequence
  Synthetic oligonucleotide; CTT chr11 5272786 5272807 5272791 5272786 -
ttatttcagtggatcaaatacg

SEQ ID NO: 135552 - DNA, 22 bp, Artificial Sequence
  Synthetic oligonucleotide; TTT chr11 5272785 5272806 5272790 5272785 -
tatttcagtggatcaaatacgt

SEQ ID NO: 135553 - DNA, 22 bp, Artificial Sequence
  Synthetic oligonucleotide; TTT chr11 5272784 5272805 5272789 5272784 -
atttcagtggatcaaatacgtt

SEQ ID NO: 135554 - DNA, 22 bp, Artificial Sequence
  Synthetic oligonucleotide; TTA chr11 5272783 5272804 5272788 5272783 -
tttcagtggatcaaatacgttc

SEQ ID NO: 135555 - DNA, 22 bp, Artificial Sequence
  Synthetic oligonucleotide; TTT chr11 5272780 5272801 5272785 5272780 -
cagtggatcaaatacgttcttt

SEQ ID NO: 135556 - DNA, 22 bp, Artificial Sequence
  Synthetic oligonucleotide; TTC chr11 5272779 5272800 5272784 5272779 -
agtggatcaaatacgttctttc

SEQ ID NO: 135557 - DNA, 22 bp, Artificial Sequence
  Synthetic oligonucleotide; TTC chr11 5272761 5272782 5272766 5272761 -
tttccaaacctaggatcttgtc

SEQ ID NO: 135558 - DNA, 22 bp, Artificial Sequence
  Synthetic oligonucleotide; CTT chr11 5272759 5272780 5272764 5272759 -
tccaaacctaggatcttgtctt

SEQ ID NO: 135559 - DNA, 22 bp, Artificial Sequence
  Synthetic oligonucleotide; TTT chr11 5272758 5272779 5272763 5272758 -
ccaaacctaggatcttgtcttc

SEQ ID NO: 135560 - DNA, 22 bp, Artificial Sequence
  Synthetic oligonucleotide; TTC chr11 5272757 5272778 5272762 5272757 -
caaacctaggatcttgtcttcc

SEQ ID NO: 135561 - DNA, 22 bp, Artificial Sequence
  Synthetic oligonucleotide; CTA chr11 5272749 5272770 5272754 5272749 -
ggatcttgtcttcctaggctat

SEQ ID NO: 135562 - DNA, 22 bp, Artificial Sequence
  Synthetic oligonucleotide; CTT chr11 5272742 5272763 5272747 5272742 -
gtcttcctaggctatatatttt

SEQ ID NO: 135563 - DNA, 22 bp, Artificial Sequence
  Synthetic oligonucleotide; TTG chr11 5272741 5272762 5272746 5272741 -
tcttcctaggctatatattttg

SEQ ID NO: 135564 - DNA, 22 bp, Artificial Sequence
  Synthetic oligonucleotide; CTT chr11 5272737 5272758 5272742 5272737 -
cctaggctatatattttgtccc

SEQ ID NO: 135565 - DNA, 22 bp, Artificial Sequence
  Synthetic oligonucleotide; TTC chr11 5272736 5272757 5272741 5272736 -
ctaggctatatattttgtccca

SEQ ID NO: 135566 - DNA, 22 bp, Artificial Sequence
  Synthetic oligonucleotide; CTA chr11 5272733 5272754 5272738 5272733 -
ggctatatattttgtcccagga

SEQ ID NO: 135567 - DNA, 22 bp, Artificial Sequence
  Synthetic oligonucleotide; CTA chr11 5272728 5272749 5272733 5272728 -
tatattttgtcccaggaagtct

SEQ ID NO: 135568 - DNA, 22 bp, Artificial Sequence
  Synthetic oligonucleotide; TTT chr11 5272721 5272742 5272726 5272721 -
tgtcccaggaagtcttaatctg

SEQ ID NO: 135569 - DNA, 22 bp, Artificial Sequence
  Synthetic oligonucleotide; TTT chr11 5272720 5272741 5272725 5272720 -
gtcccaggaagtcttaatctgg

SEQ ID NO: 135570 - DNA, 22 bp, Artificial Sequence
  Synthetic oligonucleotide; TTG chr11 5272719 5272740 5272724 5272719 -
tcccaggaagtcttaatctggg

SEQ ID NO: 135571 - DNA, 22 bp, Artificial Sequence
  Synthetic oligonucleotide; CTT chr11 5272705 5272726 5272710 5272705 -
aatctggggtccacagaacact

SEQ ID NO: 135572 - DNA, 22 bp, Artificial Sequence
  Synthetic oligonucleotide; TTA chr11 5272704 5272725 5272709 5272704 -
atctggggtccacagaacacta

SEQ ID NO: 135573 - DNA, 22 bp, Artificial Sequence
  Synthetic oligonucleotide; CTG chr11 5272699 5272720 5272704 5272699 -
gggtccacagaacactaggggg

SEQ ID NO: 135574 - DNA, 22 bp, Artificial Sequence
  Synthetic oligonucleotide; CTA chr11 5272682 5272703 5272687 5272682 -
gggggctggtgaagtttataga

SEQ ID NO: 135575 - DNA, 22 bp, Artificial Sequence
  Synthetic oligonucleotide; CTG chr11 5272674 5272695 5272679 5272674 -
gtgaagtttatagaaaaaaaat

SEQ ID NO: 135576 - DNA, 22 bp, Artificial Sequence
  Synthetic oligonucleotide; TTT chr11 5272665 5272686 5272670 5272665 -
atagaaaaaaaatctgtatttt

SEQ ID NO: 135577 - DNA, 22 bp, Artificial Sequence
  Synthetic oligonucleotide; TTA chr11 5272664 5272685 5272669 5272664 -
tagaaaaaaaatctgtattttt

SEQ ID NO: 135578 - DNA, 22 bp, Artificial Sequence
  Synthetic oligonucleotide; CTG chr11 5272649 5272670 5272654 5272649 -
tatttttacttacatgtaactg

SEQ ID NO: 135579 - DNA, 22 bp, Artificial Sequence
  Synthetic oligonucleotide; TTT chr11 5272644 5272665 5272649 5272644 -
ttacttacatgtaactgaaatt

SEQ ID NO: 135580 - DNA, 22 bp, Artificial Sequence
  Synthetic oligonucleotide; TTT chr11 5272643 5272664 5272648 5272643 -
tacttacatgtaactgaaattt

SEQ ID NO: 135581 - DNA, 22 bp, Artificial Sequence
  Synthetic oligonucleotide; TTT chr11 5272642 5272663 5272647 5272642 -
acttacatgtaactgaaattta

SEQ ID NO: 135582 - DNA, 22 bp, Artificial Sequence
  Synthetic oligonucleotide; TTA chr11 5272641 5272662 5272646 5272641 -
cttacatgtaactgaaatttag

SEQ ID NO: 135583 - DNA, 22 bp, Artificial Sequence
  Synthetic oligonucleotide; CTT chr11 5272638 5272659 5272643 5272638 -
acatgtaactgaaatttagcat

SEQ ID NO: 135584 - DNA, 22 bp, Artificial Sequence
  Synthetic oligonucleotide; TTA chr11 5272637 5272658 5272642 5272637 -
catgtaactgaaatttagcatt

SEQ ID NO: 135585 - DNA, 22 bp, Artificial Sequence
  Synthetic oligonucleotide; CTG chr11 5272627 5272648 5272632 5272627 -
aaatttagcattttcttctact

SEQ ID NO: 135586 - DNA, 22 bp, Artificial Sequence
  Synthetic oligonucleotide; TTT chr11 5272621 5272642 5272626 5272621 -
agcattttcttctactttgaat

SEQ ID NO: 135587 - DNA, 22 bp, Artificial Sequence
  Synthetic oligonucleotide; TTA chr11 5272620 5272641 5272625 5272620 -
gcattttcttctactttgaatg

SEQ ID NO: 135588 - DNA, 22 bp, Artificial Sequence
  Synthetic oligonucleotide; TTT chr11 5272614 5272635 5272619 5272614 -
tcttctactttgaatgcaaagg

SEQ ID NO: 135589 - DNA, 22 bp, Artificial Sequence
  Synthetic oligonucleotide; TTT chr11 5272613 5272634 5272618 5272613 -
cttctactttgaatgcaaagga

SEQ ID NO: 135590 - DNA, 22 bp, Artificial Sequence
  Synthetic oligonucleotide; TTC chr11 5272612 5272633 5272617 5272612 -
ttctactttgaatgcaaaggac

SEQ ID NO: 135591 - DNA, 22 bp, Artificial Sequence
  Synthetic oligonucleotide; CTT chr11 5272610 5272631 5272615 5272610 -
ctactttgaatgcaaaggacaa

SEQ ID NO: 135592 - DNA, 22 bp, Artificial Sequence
  Synthetic oligonucleotide; TTC chr11 5272609 5272630 5272614 5272609 -
tactttgaatgcaaaggacaaa

SEQ ID NO: 135593 - DNA, 22 bp, Artificial Sequence
  Synthetic oligonucleotide; CTA chr11 5272607 5272628 5272612 5272607 -
ctttgaatgcaaaggacaaact

SEQ ID NO: 135594 - DNA, 22 bp, Artificial Sequence
  Synthetic oligonucleotide; CTT chr11 5272604 5272625 5272609 5272604 -
tgaatgcaaaggacaaactaga

SEQ ID NO: 135595 - DNA, 22 bp, Artificial Sequence
  Synthetic oligonucleotide; TTT chr11 5272603 5272624 5272608 5272603 -
gaatgcaaaggacaaactagaa

SEQ ID NO: 135596 - DNA, 22 bp, Artificial Sequence
  Synthetic oligonucleotide; TTG chr11 5272602 5272623 5272607 5272602 -
aatgcaaaggacaaactagaat

SEQ ID NO: 135597 - DNA, 22 bp, Artificial Sequence
  Synthetic oligonucleotide; CTA chr11 5272584 5272605 5272589 5272584 -
gaatgacatcatcagtacctat

SEQ ID NO: 135598 - DNA, 22 bp, Artificial Sequence
  Synthetic oligonucleotide; CTA chr11 5272563 5272584 5272568 5272563 -
ttgcatagttataaagagaaac

SEQ ID NO: 135599 - DNA, 22 bp, Artificial Sequence
  Synthetic oligonucleotide; TTG chr11 5272560 5272581 5272565 5272560 -
catagttataaagagaaaccac

SEQ ID NO: 135600 - DNA, 22 bp, Artificial Sequence
  Synthetic oligonucleotide; TTA chr11 5272552 5272573 5272557 5272552 -
taaagagaaaccacagatattt

SEQ ID NO: 135601 - DNA, 22 bp, Artificial Sequence
  Synthetic oligonucleotide; TTT chr11 5272530 5272551 5272535 5272530 -
tcatactacaccataggtattg

SEQ ID NO: 135602 - DNA, 22 bp, Artificial Sequence
  Synthetic oligonucleotide; TTT chr11 5272529 5272550 5272534 5272529 -
catactacaccataggtattgc

SEQ ID NO: 135603 - DNA, 22 bp, Artificial Sequence
  Synthetic oligonucleotide; TTC chr11 5272528 5272549 5272533 5272528 -
atactacaccataggtattgca

SEQ ID NO: 135604 - DNA, 22 bp, Artificial Sequence
  Synthetic oligonucleotide; CTA chr11 5272522 5272543 5272527 5272522 -
caccataggtattgcagatctt

SEQ ID NO: 135605 - DNA, 22 bp, Artificial Sequence
  Synthetic oligonucleotide; TTG chr11 5272508 5272529 5272513 5272508 -
cagatctttttgtttttgtttt

SEQ ID NO: 135606 - DNA, 22 bp, Artificial Sequence
  Synthetic oligonucleotide; CTT chr11 5272500 5272521 5272505 5272500 -
tttgtttttgtttttgtttgag

SEQ ID NO: 135607 - DNA, 22 bp, Artificial Sequence
  Synthetic oligonucleotide; TTT chr11 5272499 5272520 5272504 5272499 -
ttgtttttgtttttgtttgaga

SEQ ID NO: 135608 - DNA, 22 bp, Artificial Sequence
  Synthetic oligonucleotide; TTT chr11 5272498 5272519 5272503 5272498 -
tgtttttgtttttgtttgagat

SEQ ID NO: 135609 - DNA, 22 bp, Artificial Sequence
  Synthetic oligonucleotide; TTT chr11 5272497 5272518 5272502 5272497 -
gtttttgtttttgtttgagatg

SEQ ID NO: 135610 - DNA, 22 bp, Artificial Sequence
  Synthetic oligonucleotide; TTG chr11 5272496 5272517 5272501 5272496 -
tttttgtttttgtttgagatgg

SEQ ID NO: 135611 - DNA, 22 bp, Artificial Sequence
  Synthetic oligonucleotide; TTT chr11 5272493 5272514 5272498 5272493 -
ttgtttttgtttgagatggagt

SEQ ID NO: 135612 - DNA, 22 bp, Artificial Sequence
  Synthetic oligonucleotide; TTT chr11 5272492 5272513 5272497 5272492 -
tgtttttgtttgagatggagtt

SEQ ID NO: 135613 - DNA, 22 bp, Artificial Sequence
  Synthetic oligonucleotide; TTT chr11 5272491 5272512 5272496 5272491 -
gtttttgtttgagatggagttt

SEQ ID NO: 135614 - DNA, 22 bp, Artificial Sequence
  Synthetic oligonucleotide; TTG chr11 5272490 5272511 5272495 5272490 -
tttttgtttgagatggagtttc

SEQ ID NO: 135615 - DNA, 22 bp, Artificial Sequence
  Synthetic oligonucleotide; TTT chr11 5272487 5272508 5272492 5272487 -
ttgtttgagatggagtttcgct

SEQ ID NO: 135616 - DNA, 22 bp, Artificial Sequence
  Synthetic oligonucleotide; TTT chr11 5272486 5272507 5272491 5272486 -
tgtttgagatggagtttcgctc

SEQ ID NO: 135617 - DNA, 22 bp, Artificial Sequence
  Synthetic oligonucleotide; TTT chr11 5272485 5272506 5272490 5272485 -
gtttgagatggagtttcgctct

SEQ ID NO: 135618 - DNA, 22 bp, Artificial Sequence
  Synthetic oligonucleotide; TTG chr11 5272484 5272505 5272489 5272484 -
tttgagatggagtttcgctctt

SEQ ID NO: 135619 - DNA, 22 bp, Artificial Sequence
  Synthetic oligonucleotide; TTT chr11 5272481 5272502 5272486 5272481 -
gagatggagtttcgctcttatt

SEQ ID NO: 135620 - DNA, 22 bp, Artificial Sequence
  Synthetic oligonucleotide; TTG chr11 5272480 5272501 5272485 5272480 -
agatggagtttcgctcttattg

SEQ ID NO: 135621 - DNA, 22 bp, Artificial Sequence
  Synthetic oligonucleotide; TTT chr11 5272469 5272490 5272474 5272469 -
cgctcttattgcccaggctgga

SEQ ID NO: 135622 - DNA, 22 bp, Artificial Sequence
  Synthetic oligonucleotide; TTC chr11 5272468 5272489 5272473 5272468 -
gctcttattgcccaggctggag

SEQ ID NO: 135623 - DNA, 22 bp, Artificial Sequence
  Synthetic oligonucleotide; CTC chr11 5272464 5272485 5272469 5272464 -
ttattgcccaggctggagtgca

SEQ ID NO: 135624 - DNA, 22 bp, Artificial Sequence
  Synthetic oligonucleotide; CTT chr11 5272462 5272483 5272467 5272462 -
attgcccaggctggagtgcagt

SEQ ID NO: 135625 - DNA, 22 bp, Artificial Sequence
  Synthetic oligonucleotide; TTA chr11 5272461 5272482 5272466 5272461 -
ttgcccaggctggagtgcagtg

SEQ ID NO: 135626 - DNA, 22 bp, Artificial Sequence
  Synthetic oligonucleotide; TTG chr11 5272458 5272479 5272463 5272458 -
cccaggctggagtgcagtggca

SEQ ID NO: 135627 - DNA, 22 bp, Artificial Sequence
  Synthetic oligonucleotide; CTG chr11 5272449 5272470 5272454 5272449 -
gagtgcagtggcatgatttcgg

SEQ ID NO: 135628 - DNA, 22 bp, Artificial Sequence
  Synthetic oligonucleotide; TTT chr11 5272430 5272451 5272435 5272430 -
cggctcactgcaacctcccctt

SEQ ID NO: 135629 - DNA, 22 bp, Artificial Sequence
  Synthetic oligonucleotide; TTC chr11 5272429 5272450 5272434 5272429 -
ggctcactgcaacctccccttc

SEQ ID NO: 135630 - DNA, 22 bp, Artificial Sequence
  Synthetic oligonucleotide; CTC chr11 5272424 5272445 5272429 5272424 -
actgcaacctccccttcctgca

SEQ ID NO: 135631 - DNA, 22 bp, Artificial Sequence
  Synthetic oligonucleotide; CTG chr11 5272420 5272441 5272425 5272420 -
caacctccccttcctgcattca

SEQ ID NO: 135632 - DNA, 22 bp, Artificial Sequence
  Synthetic oligonucleotide; CTC chr11 5272413 5272434 5272418 5272413 -
cccttcctgcattcaagcaatt

SEQ ID NO: 135633 - DNA, 22 bp, Artificial Sequence
  Synthetic oligonucleotide; CTT chr11 5272408 5272429 5272413 5272408 -
cctgcattcaagcaattctcct

SEQ ID NO: 135634 - DNA, 22 bp, Artificial Sequence
  Synthetic oligonucleotide; TTC chr11 5272407 5272428 5272412 5272407 -
ctgcattcaagcaattctcctg

SEQ ID NO: 135635 - DNA, 22 bp, Artificial Sequence
  Synthetic oligonucleotide; CTG chr11 5272404 5272425 5272409 5272404 -
cattcaagcaattctcctgcct

SEQ ID NO: 135636 - DNA, 22 bp, Artificial Sequence
  Synthetic oligonucleotide; TTC chr11 5272399 5272420 5272404 5272399 -
aagcaattctcctgccttggcc

SEQ ID NO: 135637 - DNA, 22 bp, Artificial Sequence
  Synthetic oligonucleotide; TTC chr11 5272390 5272411 5272395 5272390 -
tcctgccttggcctcctgagta

SEQ ID NO: 135638 - DNA, 22 bp, Artificial Sequence
  Synthetic oligonucleotide; CTC chr11 5272388 5272409 5272393 5272388 -
ctgccttggcctcctgagtagc

SEQ ID NO: 135639 - DNA, 22 bp, Artificial Sequence
  Synthetic oligonucleotide; CTG chr11 5272385 5272406 5272390 5272385 -
ccttggcctcctgagtagctgg

SEQ ID NO: 135640 - DNA, 22 bp, Artificial Sequence
  Synthetic oligonucleotide; CTT chr11 5272381 5272402 5272386 5272381 -
ggcctcctgagtagctggggat

SEQ ID NO: 135641 - DNA, 22 bp, Artificial Sequence
  Synthetic oligonucleotide; TTG chr11 5272380 5272401 5272385 5272380 -
gcctcctgagtagctggggatt

SEQ ID NO: 135642 - DNA, 22 bp, Artificial Sequence
  Synthetic oligonucleotide; CTC chr11 5272375 5272396 5272380 5272375 -
ctgagtagctggggattacagg

SEQ ID NO: 135643 - DNA, 22 bp, Artificial Sequence
  Synthetic oligonucleotide; CTG chr11 5272372 5272393 5272377 5272372 -
agtagctggggattacaggcac

SEQ ID NO: 135644 - DNA, 22 bp, Artificial Sequence
  Synthetic oligonucleotide; CTG chr11 5272364 5272385 5272369 5272364 -
gggattacaggcacctgccacc

SEQ ID NO: 135645 - DNA, 22 bp, Artificial Sequence
  Synthetic oligonucleotide; TTA chr11 5272357 5272378 5272362 5272357 -
caggcacctgccaccatgccag

SEQ ID NO: 135646 - DNA, 22 bp, Artificial Sequence
  Synthetic oligonucleotide; CTG chr11 5272347 5272368 5272352 5272347 -
ccaccatgccagtctaattttt

SEQ ID NO: 135647 - DNA, 22 bp, Artificial Sequence
  Synthetic oligonucleotide; CTA chr11 5272331 5272352 5272336 5272331 -
atttttgtatttttagtagaga

SEQ ID NO: 135648 - DNA, 22 bp, Artificial Sequence
  Synthetic oligonucleotide; TTT chr11 5272327 5272348 5272332 5272327 -
ttgtatttttagtagagatggg

SEQ ID NO: 135649 - DNA, 22 bp, Artificial Sequence
  Synthetic oligonucleotide; TTT chr11 5272326 5272347 5272331 5272326 -
tgtatttttagtagagatgggg

SEQ ID NO: 135650 - DNA, 22 bp, Artificial Sequence
  Synthetic oligonucleotide; TTT chr11 5272325 5272346 5272330 5272325 -
gtatttttagtagagatggggt

SEQ ID NO: 135651 - DNA, 22 bp, Artificial Sequence
  Synthetic oligonucleotide; TTG chr11 5272324 5272345 5272329 5272324 -
tatttttagtagagatggggtt

SEQ ID NO: 135652 - DNA, 22 bp, Artificial Sequence
  Synthetic oligonucleotide; TTT chr11 5272319 5272340 5272324 5272319 -
ttagtagagatggggtttcgcc

SEQ ID NO: 135653 - DNA, 22 bp, Artificial Sequence
  Synthetic oligonucleotide; TTT chr11 5272318 5272339 5272323 5272318 -
tagtagagatggggtttcgcca

SEQ ID NO: 135654 - DNA, 22 bp, Artificial Sequence
  Synthetic oligonucleotide; TTT chr11 5272317 5272338 5272322 5272317 -
agtagagatggggtttcgccat

SEQ ID NO: 135655 - DNA, 22 bp, Artificial Sequence
  Synthetic oligonucleotide; TTA chr11 5272316 5272337 5272321 5272316 -
gtagagatggggtttcgccatg

SEQ ID NO: 135656 - DNA, 22 bp, Artificial Sequence
  Synthetic oligonucleotide; TTT chr11 5272301 5272322 5272306 5272301 -
cgccatgttggccaggctggtc

SEQ ID NO: 135657 - DNA, 22 bp, Artificial Sequence
  Synthetic oligonucleotide; TTC chr11 5272300 5272321 5272305 5272300 -
gccatgttggccaggctggtct

SEQ ID NO: 135658 - DNA, 22 bp, Artificial Sequence
  Synthetic oligonucleotide; TTG chr11 5272291 5272312 5272296 5272291 -
gccaggctggtcttgaactcct

SEQ ID NO: 135659 - DNA, 22 bp, Artificial Sequence
  Synthetic oligonucleotide; CTG chr11 5272282 5272303 5272287 5272282 -
gtcttgaactcctgacctcaga

SEQ ID NO: 135660 - DNA, 22 bp, Artificial Sequence
  Synthetic oligonucleotide; CTT chr11 5272277 5272298 5272282 5272277 -
gaactcctgacctcagatgatc

SEQ ID NO: 135661 - DNA, 22 bp, Artificial Sequence
  Synthetic oligonucleotide; TTG chr11 5272276 5272297 5272281 5272276 -
aactcctgacctcagatgatct

SEQ ID NO: 135662 - DNA, 22 bp, Artificial Sequence
  Synthetic oligonucleotide; CTC chr11 5272271 5272292 5272276 5272271 -
ctgacctcagatgatctgcccg

SEQ ID NO: 135663 - DNA, 22 bp, Artificial Sequence
  Synthetic oligonucleotide; CTG chr11 5272268 5272289 5272273 5272268 -
acctcagatgatctgcccgcct

SEQ ID NO: 135664 - DNA, 22 bp, Artificial Sequence
  Synthetic oligonucleotide; CTC chr11 5272263 5272284 5272268 5272263 -
agatgatctgcccgccttggcc

SEQ ID NO: 135665 - DNA, 22 bp, Artificial Sequence
  Synthetic oligonucleotide; CTG chr11 5272253 5272274 5272258 5272253 -
cccgccttggcctcctgaagtg

SEQ ID NO: 135666 - DNA, 22 bp, Artificial Sequence
  Synthetic oligonucleotide; CTT chr11 5272245 5272266 5272250 5272245 -
ggcctcctgaagtgctgggatt

SEQ ID NO: 135667 - DNA, 22 bp, Artificial Sequence
  Synthetic oligonucleotide; TTG chr11 5272244 5272265 5272249 5272244 -
gcctcctgaagtgctgggatta

SEQ ID NO: 135668 - DNA, 22 bp, Artificial Sequence
  Synthetic oligonucleotide; CTC chr11 5272239 5272260 5272244 5272239 -
ctgaagtgctgggattataggt

SEQ ID NO: 135669 - DNA, 22 bp, Artificial Sequence
  Synthetic oligonucleotide; CTG chr11 5272236 5272257 5272241 5272236 -
aagtgctgggattataggtgtg

SEQ ID NO: 135670 - DNA, 22 bp, Artificial Sequence
  Synthetic oligonucleotide; CTG chr11 5272228 5272249 5272233 5272228 -
ggattataggtgtgagccacca

SEQ ID NO: 135671 - DNA, 22 bp, Artificial Sequence
  Synthetic oligonucleotide; TTA chr11 5272222 5272243 5272227 5272222 -
taggtgtgagccaccacgcctg

SEQ ID NO: 135672 - DNA, 22 bp, Artificial Sequence
  Synthetic oligonucleotide; CTG chr11 5272200 5272221 5272205 5272200 -
gcccattgcagatatttttaat

SEQ ID NO: 135673 - DNA, 22 bp, Artificial Sequence
  Synthetic oligonucleotide; TTG chr11 5272192 5272213 5272197 5272192 -
cagatatttttaattcacattt

SEQ ID NO: 135674 - DNA, 22 bp, Artificial Sequence
  Synthetic oligonucleotide; TTT chr11 5272183 5272204 5272188 5272183 -
ttaattcacatttatctgcatc

SEQ ID NO: 135675 - DNA, 22 bp, Artificial Sequence
  Synthetic oligonucleotide; TTT chr11 5272182 5272203 5272187 5272182 -
taattcacatttatctgcatca

SEQ ID NO: 135676 - DNA, 22 bp, Artificial Sequence
  Synthetic oligonucleotide; TTT chr11 5272181 5272202 5272186 5272181 -
aattcacatttatctgcatcac

SEQ ID NO: 135677 - DNA, 22 bp, Artificial Sequence
  Synthetic oligonucleotide; TTA chr11 5272180 5272201 5272185 5272180 -
attcacatttatctgcatcact

SEQ ID NO: 135678 - DNA, 22 bp, Artificial Sequence
  Synthetic oligonucleotide; TTC chr11 5272176 5272197 5272181 5272176 -
acatttatctgcatcactactt

SEQ ID NO: 135679 - DNA, 22 bp, Artificial Sequence
  Synthetic oligonucleotide; TTT chr11 5272170 5272191 5272175 5272170 -
atctgcatcactacttggatct

SEQ ID NO: 135680 - DNA, 22 bp, Artificial Sequence
  Synthetic oligonucleotide; TTA chr11 5272169 5272190 5272174 5272169 -
tctgcatcactacttggatctt

SEQ ID NO: 135681 - DNA, 22 bp, Artificial Sequence
  Synthetic oligonucleotide; CTG chr11 5272165 5272186 5272170 5272165 -
catcactacttggatcttaagg

SEQ ID NO: 135682 - DNA, 22 bp, Artificial Sequence
  Synthetic oligonucleotide; CTA chr11 5272157 5272178 5272162 5272157 -
cttggatcttaaggtagctgta

SEQ ID NO: 135683 - DNA, 22 bp, Artificial Sequence
  Synthetic oligonucleotide; CTT chr11 5272154 5272175 5272159 5272154 -
ggatcttaaggtagctgtagac

SEQ ID NO: 135684 - DNA, 22 bp, Artificial Sequence
  Synthetic oligonucleotide; TTG chr11 5272153 5272174 5272158 5272153 -
gatcttaaggtagctgtagacc

SEQ ID NO: 135685 - DNA, 22 bp, Artificial Sequence
  Synthetic oligonucleotide; CTT chr11 5272147 5272168 5272152 5272147 -
aaggtagctgtagacccaatcc

SEQ ID NO: 135686 - DNA, 22 bp, Artificial Sequence
  Synthetic oligonucleotide; TTA chr11 5272146 5272167 5272151 5272146 -
aggtagctgtagacccaatcct

SEQ ID NO: 135687 - DNA, 22 bp, Artificial Sequence
  Synthetic oligonucleotide; CTG chr11 5272137 5272158 5272142 5272137 -
tagacccaatcctagatctaat

SEQ ID NO: 135688 - DNA, 22 bp, Artificial Sequence
  Synthetic oligonucleotide; CTA chr11 5272123 5272144 5272128 5272123 -
gatctaatgctttcataaagaa

SEQ ID NO: 135689 - DNA, 22 bp, Artificial Sequence
  Synthetic oligonucleotide; CTA chr11 5272117 5272138 5272122 5272117 -
atgctttcataaagaagcaaat

SEQ ID NO: 135690 - DNA, 22 bp, Artificial Sequence
  Synthetic oligonucleotide; CTT chr11 5272111 5272132 5272116 5272111 -
tcataaagaagcaaatataata

SEQ ID NO: 135691 - DNA, 22 bp, Artificial Sequence
  Synthetic oligonucleotide; TTT chr11 5272110 5272131 5272115 5272110 -
cataaagaagcaaatataataa

SEQ ID NO: 135692 - DNA, 22 bp, Artificial Sequence
  Synthetic oligonucleotide; TTC chr11 5272109 5272130 5272114 5272109 -
ataaagaagcaaatataataaa

SEQ ID NO: 135693 - DNA, 22 bp, Artificial Sequence
  Synthetic oligonucleotide; CTA chr11 5272082 5272103 5272087 5272082 -
taccacaaatgtaatgtttgat

SEQ ID NO: 135694 - DNA, 22 bp, Artificial Sequence
  Synthetic oligonucleotide; TTT chr11 5272063 5272084 5272068 5272063 -
gatgtctgataatgatatttca

SEQ ID NO: 135695 - DNA, 22 bp, Artificial Sequence
  Synthetic oligonucleotide; TTG chr11 5272062 5272083 5272067 5272062 -
atgtctgataatgatatttcag

SEQ ID NO: 135696 - DNA, 22 bp, Artificial Sequence
  Synthetic oligonucleotide; CTG chr11 5272055 5272076 5272060 5272055 -
ataatgatatttcagtgtaatt

SEQ ID NO: 135697 - DNA, 22 bp, Artificial Sequence
  Synthetic oligonucleotide; TTT chr11 5272043 5272064 5272048 5272043 -
cagtgtaattaaacttagcact

SEQ ID NO: 135698 - DNA, 22 bp, Artificial Sequence
  Synthetic oligonucleotide; TTC chr11 5272042 5272063 5272047 5272042 -
agtgtaattaaacttagcactc

SEQ ID NO: 135699 - DNA, 22 bp, Artificial Sequence
  Synthetic oligonucleotide; TTA chr11 5272032 5272053 5272037 5272032 -
aacttagcactcctatgtatat

SEQ ID NO: 135700 - DNA, 22 bp, Artificial Sequence
  Synthetic oligonucleotide; CTT chr11 5272027 5272048 5272032 5272027 -
agcactcctatgtatattattt

SEQ ID NO: 135701 - DNA, 22 bp, Artificial Sequence
  Synthetic oligonucleotide; TTA chr11 5272026 5272047 5272031 5272026 -
gcactcctatgtatattatttg

SEQ ID NO: 135702 - DNA, 22 bp, Artificial Sequence
  Synthetic oligonucleotide; CTC chr11 5272020 5272041 5272025 5272020 -
ctatgtatattatttgatgcaa

SEQ ID NO: 135703 - DNA, 22 bp, Artificial Sequence
  Synthetic oligonucleotide; CTA chr11 5272017 5272038 5272022 5272017 -
tgtatattatttgatgcaataa

SEQ ID NO: 135704 - DNA, 22 bp, Artificial Sequence
  Synthetic oligonucleotide; TTA chr11 5272008 5272029 5272013 5272008 -
tttgatgcaataaaaacatatt

SEQ ID NO: 135705 - DNA, 22 bp, Artificial Sequence
  Synthetic oligonucleotide; TTT chr11 5272005 5272026 5272010 5272005 -
gatgcaataaaaacatattttt

SEQ ID NO: 135706 - DNA, 22 bp, Artificial Sequence
  Synthetic oligonucleotide; TTG chr11 5272004 5272025 5272009 5272004 -
atgcaataaaaacatatttttt

SEQ ID NO: 135707 - DNA, 22 bp, Artificial Sequence
  Synthetic oligonucleotide; TTT chr11 5271985 5272006 5271990 5271985 -
ttttagcacttacagtctgcca

SEQ ID NO: 135708 - DNA, 22 bp, Artificial Sequence
  Synthetic oligonucleotide; TTT chr11 5271984 5272005 5271989 5271984 -
tttagcacttacagtctgccaa

SEQ ID NO: 135709 - DNA, 22 bp, Artificial Sequence
  Synthetic oligonucleotide; TTT chr11 5271983 5272004 5271988 5271983 -
ttagcacttacagtctgccaaa

SEQ ID NO: 135710 - DNA, 22 bp, Artificial Sequence
  Synthetic oligonucleotide; TTT chr11 5271982 5272003 5271987 5271982 -
tagcacttacagtctgccaaac

SEQ ID NO: 135711 - DNA, 22 bp, Artificial Sequence
  Synthetic oligonucleotide; TTT chr11 5271981 5272002 5271986 5271981 -
agcacttacagtctgccaaact

SEQ ID NO: 135712 - DNA, 22 bp, Artificial Sequence
  Synthetic oligonucleotide; TTA chr11 5271980 5272001 5271985 5271980 -
gcacttacagtctgccaaactg

SEQ ID NO: 135713 - DNA, 22 bp, Artificial Sequence
  Synthetic oligonucleotide; CTT chr11 5271974 5271995 5271979 5271974 -
acagtctgccaaactggcctgt

SEQ ID NO: 135714 - DNA, 22 bp, Artificial Sequence
  Synthetic oligonucleotide; TTA chr11 5271973 5271994 5271978 5271973 -
cagtctgccaaactggcctgtg

SEQ ID NO: 135715 - DNA, 22 bp, Artificial Sequence
  Synthetic oligonucleotide; CTG chr11 5271966 5271987 5271971 5271966 -
ccaaactggcctgtgacacaaa

SEQ ID NO: 135716 - DNA, 22 bp, Artificial Sequence
  Synthetic oligonucleotide; CTG chr11 5271958 5271979 5271963 5271958 -
gcctgtgacacaaaaaaagttt

SEQ ID NO: 135717 - DNA, 22 bp, Artificial Sequence
  Synthetic oligonucleotide; CTG chr11 5271953 5271974 5271958 5271953 -
tgacacaaaaaaagtttaggaa

SEQ ID NO: 135718 - DNA, 22 bp, Artificial Sequence
  Synthetic oligonucleotide; TTT chr11 5271936 5271957 5271941 5271936 -
aggaattcctggttttgtctgt

SEQ ID NO: 135719 - DNA, 22 bp, Artificial Sequence
  Synthetic oligonucleotide; TTA chr11 5271935 5271956 5271940 5271935 -
ggaattcctggttttgtctgtg

SEQ ID NO: 135720 - DNA, 22 bp, Artificial Sequence
  Synthetic oligonucleotide; TTC chr11 5271928 5271949 5271933 5271928 -
ctggttttgtctgtgttagcca

SEQ ID NO: 135721 - DNA, 22 bp, Artificial Sequence
  Synthetic oligonucleotide; CTG chr11 5271925 5271946 5271930 5271925 -
gttttgtctgtgttagccaatg

SEQ ID NO: 135722 - DNA, 22 bp, Artificial Sequence
  Synthetic oligonucleotide; TTT chr11 5271921 5271942 5271926 5271921 -
tgtctgtgttagccaatggtta

SEQ ID NO: 135723 - DNA, 22 bp, Artificial Sequence
  Synthetic oligonucleotide; TTT chr11 5271920 5271941 5271925 5271920 -
gtctgtgttagccaatggttag

SEQ ID NO: 135724 - DNA, 22 bp, Artificial Sequence
  Synthetic oligonucleotide; TTG chr11 5271919 5271940 5271924 5271919 -
tctgtgttagccaatggttaga

SEQ ID NO: 135725 - DNA, 22 bp, Artificial Sequence
  Synthetic oligonucleotide; CTG chr11 5271915 5271936 5271920 5271915 -
tgttagccaatggttagaatat

SEQ ID NO: 135726 - DNA, 22 bp, Artificial Sequence
  Synthetic oligonucleotide; TTA chr11 5271910 5271931 5271915 5271910 -
gccaatggttagaatatatgct

SEQ ID NO: 135727 - DNA, 22 bp, Artificial Sequence
  Synthetic oligonucleotide; TTA chr11 5271899 5271920 5271904 5271899 -
gaatatatgctcagaaagatac

SEQ ID NO: 135728 - DNA, 22 bp, Artificial Sequence
  Synthetic oligonucleotide; CTC chr11 5271887 5271908 5271892 5271887 -
agaaagataccattggttaata

SEQ ID NO: 135729 - DNA, 22 bp, Artificial Sequence
  Synthetic oligonucleotide; TTG chr11 5271872 5271893 5271877 5271872 -
gttaatagctaaaagaaaatgg

SEQ ID NO: 135730 - DNA, 22 bp, Artificial Sequence
  Synthetic oligonucleotide; TTA chr11 5271868 5271889 5271873 5271868 -
atagctaaaagaaaatggagta

SEQ ID NO: 135731 - DNA, 22 bp, Artificial Sequence
  Synthetic oligonucleotide; CTA chr11 5271861 5271882 5271866 5271861 -
aaagaaaatggagtagaaattc

SEQ ID NO: 135732 - DNA, 22 bp, Artificial Sequence
  Synthetic oligonucleotide; TTC chr11 5271839 5271860 5271844 5271839 -
agtggcctggaataataacaat

SEQ ID NO: 135733 - DNA, 22 bp, Artificial Sequence
  Synthetic oligonucleotide; CTG chr11 5271830 5271851 5271835 5271830 -
gaataataacaatttgggcagt

SEQ ID NO: 135734 - DNA, 22 bp, Artificial Sequence
  Synthetic oligonucleotide; TTT chr11 5271815 5271836 5271820 5271815 -
gggcagtcattaagtcaggtga

SEQ ID NO: 135735 - DNA, 22 bp, Artificial Sequence
  Synthetic oligonucleotide; TTG chr11 5271814 5271835 5271819 5271814 -
ggcagtcattaagtcaggtgaa

SEQ ID NO: 135736 - DNA, 22 bp, Artificial Sequence
  Synthetic oligonucleotide; TTA chr11 5271803 5271824 5271808 5271803 -
agtcaggtgaagacttctggaa

SEQ ID NO: 135737 - DNA, 22 bp, Artificial Sequence
  Synthetic oligonucleotide; CTT chr11 5271787 5271808 5271792 5271787 -
ctggaatcatgggagaaaagca

SEQ ID NO: 135738 - DNA, 22 bp, Artificial Sequence
  Synthetic oligonucleotide; TTC chr11 5271786 5271807 5271791 5271786 -
tggaatcatgggagaaaagcaa

SEQ ID NO: 135739 - DNA, 22 bp, Artificial Sequence
  Synthetic oligonucleotide; CTG chr11 5271784 5271805 5271789 5271784 -
gaatcatgggagaaaagcaagg

SEQ ID NO: 135740 - DNA, 22 bp, Artificial Sequence
  Synthetic oligonucleotide; TTC chr11 5271753 5271774 5271758 5271753 -
ttacttgccacaagtgtttttt

SEQ ID NO: 135741 - DNA, 22 bp, Artificial Sequence
  Synthetic oligonucleotide; CTT chr11 5271751 5271772 5271756 5271751 -
acttgccacaagtgtttttttt

SEQ ID NO: 135742 - DNA, 22 bp, Artificial Sequence
  Synthetic oligonucleotide; TTA chr11 5271750 5271771 5271755 5271750 -
cttgccacaagtgttttttttt

SEQ ID NO: 135743 - DNA, 22 bp, Artificial Sequence
  Synthetic oligonucleotide; CTT chr11 5271747 5271768 5271752 5271747 -
gccacaagtgtttttttttttt

SEQ ID NO: 135744 - DNA, 22 bp, Artificial Sequence
  Synthetic oligonucleotide; TTG chr11 5271746 5271767 5271751 5271746 -
ccacaagtgttttttttttttt

SEQ ID NO: 135745 - DNA, 22 bp, Artificial Sequence
  Synthetic oligonucleotide; TTT chr11 5271734 5271755 5271739 5271734 -
ttttttttttttttttttatca

SEQ ID NO: 135746 - DNA, 22 bp, Artificial Sequence
  Synthetic oligonucleotide; TTT chr11 5271733 5271754 5271738 5271733 -
tttttttttttttttttatcac

SEQ ID NO: 135747 - DNA, 22 bp, Artificial Sequence
  Synthetic oligonucleotide; TTT chr11 5271732 5271753 5271737 5271732 -
ttttttttttttttttatcaca

SEQ ID NO: 135748 - DNA, 22 bp, Artificial Sequence
  Synthetic oligonucleotide; TTT chr11 5271731 5271752 5271736 5271731 -
tttttttttttttttatcacaa

SEQ ID NO: 135749 - DNA, 22 bp, Artificial Sequence
  Synthetic oligonucleotide; TTT chr11 5271730 5271751 5271735 5271730 -
ttttttttttttttatcacaaa

SEQ ID NO: 135750 - DNA, 22 bp, Artificial Sequence
  Synthetic oligonucleotide; TTT chr11 5271729 5271750 5271734 5271729 -
tttttttttttttatcacaaac

SEQ ID NO: 135751 - DNA, 22 bp, Artificial Sequence
  Synthetic oligonucleotide; TTT chr11 5271728 5271749 5271733 5271728 -
ttttttttttttatcacaaaca

SEQ ID NO: 135752 - DNA, 22 bp, Artificial Sequence
  Synthetic oligonucleotide; TTT chr11 5271727 5271748 5271732 5271727 -
tttttttttttatcacaaacat

SEQ ID NO: 135753 - DNA, 22 bp, Artificial Sequence
  Synthetic oligonucleotide; TTT chr11 5271726 5271747 5271731 5271726 -
ttttttttttatcacaaacata

SEQ ID NO: 135754 - DNA, 22 bp, Artificial Sequence
  Synthetic oligonucleotide; TTT chr11 5271725 5271746 5271730 5271725 -
tttttttttatcacaaacataa

SEQ ID NO: 135755 - DNA, 22 bp, Artificial Sequence
  Synthetic oligonucleotide; TTT chr11 5271724 5271745 5271729 5271724 -
ttttttttatcacaaacataag

SEQ ID NO: 135756 - DNA, 22 bp, Artificial Sequence
  Synthetic oligonucleotide; TTT chr11 5271723 5271744 5271728 5271723 -
tttttttatcacaaacataaga

SEQ ID NO: 135757 - DNA, 22 bp, Artificial Sequence
  Synthetic oligonucleotide; TTT chr11 5271722 5271743 5271727 5271722 -
ttttttatcacaaacataagaa

SEQ ID NO: 135758 - DNA, 22 bp, Artificial Sequence
  Synthetic oligonucleotide; TTT chr11 5271721 5271742 5271726 5271721 -
tttttatcacaaacataagaaa

SEQ ID NO: 135759 - DNA, 22 bp, Artificial Sequence
  Synthetic oligonucleotide; TTT chr11 5271720 5271741 5271725 5271720 -
ttttatcacaaacataagaaaa

SEQ ID NO: 135760 - DNA, 22 bp, Artificial Sequence
  Synthetic oligonucleotide; TTT chr11 5271719 5271740 5271724 5271719 -
tttatcacaaacataagaaaat

SEQ ID NO: 135761 - DNA, 22 bp, Artificial Sequence
  Synthetic oligonucleotide; TTT chr11 5271718 5271739 5271723 5271718 -
ttatcacaaacataagaaaata

SEQ ID NO: 135762 - DNA, 22 bp, Artificial Sequence
  Synthetic oligonucleotide; TTT chr11 5271717 5271738 5271722 5271717 -
tatcacaaacataagaaaatat

SEQ ID NO: 135763 - DNA, 22 bp, Artificial Sequence
  Synthetic oligonucleotide; TTT chr11 5271716 5271737 5271721 5271716 -
atcacaaacataagaaaatata

SEQ ID NO: 135764 - DNA, 22 bp, Artificial Sequence
  Synthetic oligonucleotide; TTA chr11 5271715 5271736 5271720 5271715 -
tcacaaacataagaaaatataa

SEQ ID NO: 135765 - DNA, 22 bp, Artificial Sequence
  Synthetic oligonucleotide; TTA chr11 5271673 5271694 5271678 5271673 -
tagaagagagaaacgctcttag

SEQ ID NO: 135766 - DNA, 22 bp, Artificial Sequence
  Synthetic oligonucleotide; CTC chr11 5271655 5271676 5271660 5271655 -
ttagtaaacttggaatatggaa

SEQ ID NO: 135767 - DNA, 22 bp, Artificial Sequence
  Synthetic oligonucleotide; CTT chr11 5271653 5271674 5271658 5271653 -
agtaaacttggaatatggaatc

SEQ ID NO: 135768 - DNA, 22 bp, Artificial Sequence
  Synthetic oligonucleotide; TTA chr11 5271652 5271673 5271657 5271652 -
gtaaacttggaatatggaatcc

SEQ ID NO: 135769 - DNA, 22 bp, Artificial Sequence
  Synthetic oligonucleotide; CTT chr11 5271644 5271665 5271649 5271644 -
ggaatatggaatccccaaaggc

SEQ ID NO: 135770 - DNA, 22 bp, Artificial Sequence
  Synthetic oligonucleotide; TTG chr11 5271643 5271664 5271648 5271643 -
gaatatggaatccccaaaggca

SEQ ID NO: 135771 - DNA, 22 bp, Artificial Sequence
  Synthetic oligonucleotide; CTT chr11 5271618 5271639 5271623 5271618 -
gacttgggagacaggagccata

SEQ ID NO: 135772 - DNA, 22 bp, Artificial Sequence
  Synthetic oligonucleotide; TTG chr11 5271617 5271638 5271622 5271617 -
acttgggagacaggagccatac

SEQ ID NO: 135773 - DNA, 22 bp, Artificial Sequence
  Synthetic oligonucleotide; CTT chr11 5271613 5271634 5271618 5271613 -
gggagacaggagccatactgct

SEQ ID NO: 135774 - DNA, 22 bp, Artificial Sequence
  Synthetic oligonucleotide; TTG chr11 5271612 5271633 5271617 5271612 -
ggagacaggagccatactgcta

SEQ ID NO: 135775 - DNA, 22 bp, Artificial Sequence
  Synthetic oligonucleotide; CTG chr11 5271593 5271614 5271598 5271593 -
ctaagtgaaaaagacgaagaac

SEQ ID NO: 135776 - DNA, 22 bp, Artificial Sequence
  Synthetic oligonucleotide; CTA chr11 5271590 5271611 5271595 5271590 -
agtgaaaaagacgaagaacctc

SEQ ID NO: 135777 - DNA, 22 bp, Artificial Sequence
  Synthetic oligonucleotide; CTC chr11 5271568 5271589 5271573 5271568 -
tagggcctgaacatacaggaaa

SEQ ID NO: 135778 - DNA, 22 bp, Artificial Sequence
  Synthetic oligonucleotide; CTA chr11 5271566 5271587 5271571 5271566 -
gggcctgaacatacaggaaatt

SEQ ID NO: 135779 - DNA, 22 bp, Artificial Sequence
  Synthetic oligonucleotide; CTG chr11 5271559 5271580 5271564 5271559 -
aacatacaggaaattgtaggaa

SEQ ID NO: 135780 - DNA, 22 bp, Artificial Sequence
  Synthetic oligonucleotide; TTG chr11 5271543 5271564 5271548 5271543 -
taggaacagaaattcctagatc

SEQ ID NO: 135781 - DNA, 22 bp, Artificial Sequence
  Synthetic oligonucleotide; TTC chr11 5271528 5271549 5271533 5271528 -
ctagatctggtggggcaagggg

SEQ ID NO: 135782 - DNA, 22 bp, Artificial Sequence
  Synthetic oligonucleotide; CTA chr11 5271525 5271546 5271530 5271525 -
gatctggtggggcaaggggagc

SEQ ID NO: 135783 - DNA, 22 bp, Artificial Sequence
  Synthetic oligonucleotide; CTG chr11 5271519 5271540 5271524 5271519 -
gtggggcaaggggagccatagg

SEQ ID NO: 135784 - DNA, 22 bp, Artificial Sequence
  Synthetic oligonucleotide; CTG chr11 5271419 5271440 5271424 5271419 -
gcaaacatggtgaaatcccgtc

SEQ ID NO: 135785 - DNA, 22 bp, Artificial Sequence
  Synthetic oligonucleotide; CTC chr11 5271395 5271416 5271400 5271395 -
tactaaaaataaaaaaattagc

SEQ ID NO: 135786 - DNA, 22 bp, Artificial Sequence
  Synthetic oligonucleotide; CTA chr11 5271393 5271414 5271398 5271393 -
ctaaaaataaaaaaattagctg

SEQ ID NO: 135787 - DNA, 22 bp, Artificial Sequence
  Synthetic oligonucleotide; CTA chr11 5271390 5271411 5271395 5271390 -
aaaataaaaaaattagctgggc

SEQ ID NO: 135788 - DNA, 22 bp, Artificial Sequence
  Synthetic oligonucleotide; TTA chr11 5271375 5271396 5271380 5271375 -
gctgggcatggtggcatgcgcc

SEQ ID NO: 135789 - DNA, 22 bp, Artificial Sequence
  Synthetic oligonucleotide; CTG chr11 5271371 5271392 5271376 5271371 -
ggcatggtggcatgcgcctgta

SEQ ID NO: 135790 - DNA, 22 bp, Artificial Sequence
  Synthetic oligonucleotide; CTG chr11 5271351 5271372 5271356 5271351 -
tagtcccagctgctcgggaggc

SEQ ID NO: 135791 - DNA, 22 bp, Artificial Sequence
  Synthetic oligonucleotide; CTG chr11 5271339 5271360 5271344 5271339 -
ctcgggaggctgaggcaggaga

SEQ ID NO: 135792 - DNA, 22 bp, Artificial Sequence
  Synthetic oligonucleotide; CTC chr11 5271336 5271357 5271341 5271336 -
gggaggctgaggcaggagaatc

SEQ ID NO: 135793 - DNA, 22 bp, Artificial Sequence
  Synthetic oligonucleotide; CTG chr11 5271327 5271348 5271332 5271327 -
aggcaggagaatcgtttgaacc

SEQ ID NO: 135794 - DNA, 22 bp, Artificial Sequence
  Synthetic oligonucleotide; TTT chr11 5271310 5271331 5271315 5271310 -
gaacccaggaggcgaaggttgc

SEQ ID NO: 135795 - DNA, 22 bp, Artificial Sequence
  Synthetic oligonucleotide; TTG chr11 5271309 5271330 5271314 5271309 -
aacccaggaggcgaaggttgca

SEQ ID NO: 135796 - DNA, 22 bp, Artificial Sequence
  Synthetic oligonucleotide; TTG chr11 5271289 5271310 5271294 5271289 -
cagtgagctgagatagtgccat

SEQ ID NO: 135797 - DNA, 22 bp, Artificial Sequence
  Synthetic oligonucleotide; CTG chr11 5271279 5271300 5271284 5271279 -
agatagtgccattgcactccag

SEQ ID NO: 135798 - DNA, 22 bp, Artificial Sequence
  Synthetic oligonucleotide; TTG chr11 5271265 5271286 5271270 5271265 -
cactccagtctggcaacagagt

SEQ ID NO: 135799 - DNA, 22 bp, Artificial Sequence
  Synthetic oligonucleotide; CTC chr11 5271260 5271281 5271265 5271260 -
cagtctggcaacagagtgagac

SEQ ID NO: 135800 - DNA, 22 bp, Artificial Sequence
  Synthetic oligonucleotide; CTG chr11 5271253 5271274 5271258 5271253 -
gcaacagagtgagactccgtct

SEQ ID NO: 135801 - DNA, 22 bp, Artificial Sequence
  Synthetic oligonucleotide; CTC chr11 5271236 5271257 5271241 5271236 -
cgtctcaaaaaaaaaaaaaaaa

SEQ ID NO: 135802 - DNA, 22 bp, Artificial Sequence
  Synthetic oligonucleotide; CTC chr11 5271230 5271251 5271235 5271230 -
aaaaaaaaaaaaaaaagaaaga

SEQ ID NO: 135803 - DNA, 22 bp, Artificial Sequence
  Synthetic oligonucleotide; CTG chr11 5271146 5271167 5271151 5271146 -
ggctggggcaatgagattatgg

SEQ ID NO: 135804 - DNA, 22 bp, Artificial Sequence
  Synthetic oligonucleotide; CTG chr11 5271141 5271162 5271146 5271141 -
gggcaatgagattatggtgatg

SEQ ID NO: 135805 - DNA, 22 bp, Artificial Sequence
  Synthetic oligonucleotide; TTA chr11 5271127 5271148 5271132 5271127 -
tggtgatgtaagggacttttat

SEQ ID NO: 135806 - DNA, 22 bp, Artificial Sequence
  Synthetic oligonucleotide; CTT chr11 5271109 5271130 5271114 5271109 -
ttatagaattaacaatgctgga

SEQ ID NO: 135807 - DNA, 22 bp, Artificial Sequence
  Synthetic oligonucleotide; TTT chr11 5271108 5271129 5271113 5271108 -
tatagaattaacaatgctggaa

SEQ ID NO: 135808 - DNA, 22 bp, Artificial Sequence
  Synthetic oligonucleotide; TTT chr11 5271107 5271128 5271112 5271107 -
atagaattaacaatgctggaat

SEQ ID NO: 135809 - DNA, 22 bp, Artificial Sequence
  Synthetic oligonucleotide; TTA chr11 5271106 5271127 5271111 5271106 -
tagaattaacaatgctggaatt

SEQ ID NO: 135810 - DNA, 22 bp, Artificial Sequence
  Synthetic oligonucleotide; TTA chr11 5271098 5271119 5271103 5271098 -
acaatgctggaatttgtggaac

SEQ ID NO: 135811 - DNA, 22 bp, Artificial Sequence
  Synthetic oligonucleotide; CTG chr11 5271089 5271110 5271094 5271089 -
gaatttgtggaactctgcttct

SEQ ID NO: 135812 - DNA, 22 bp, Artificial Sequence
  Synthetic oligonucleotide; TTT chr11 5271083 5271104 5271088 5271083 -
gtggaactctgcttctattatt

SEQ ID NO: 135813 - DNA, 22 bp, Artificial Sequence
  Synthetic oligonucleotide; TTG chr11 5271082 5271103 5271087 5271082 -
tggaactctgcttctattattc

SEQ ID NO: 135814 - DNA, 22 bp, Artificial Sequence
  Synthetic oligonucleotide; CTC chr11 5271074 5271095 5271079 5271074 -
tgcttctattattcccccaatc

SEQ ID NO: 135815 - DNA, 22 bp, Artificial Sequence
  Synthetic oligonucleotide; CTG chr11 5271072 5271093 5271077 5271072 -
cttctattattcccccaatcat

SEQ ID NO: 135816 - DNA, 22 bp, Artificial Sequence
  Synthetic oligonucleotide; CTT chr11 5271069 5271090 5271074 5271069 -
ctattattcccccaatcattac

SEQ ID NO: 135817 - DNA, 22 bp, Artificial Sequence
  Synthetic oligonucleotide; TTC chr11 5271068 5271089 5271073 5271068 -
tattattcccccaatcattact

SEQ ID NO: 135818 - DNA, 22 bp, Artificial Sequence
  Synthetic oligonucleotide; CTA chr11 5271066 5271087 5271071 5271066 -
ttattcccccaatcattacttc

SEQ ID NO: 135819 - DNA, 22 bp, Artificial Sequence
  Synthetic oligonucleotide; TTA chr11 5271063 5271084 5271068 5271063 -
ttcccccaatcattacttctgt

SEQ ID NO: 135820 - DNA, 22 bp, Artificial Sequence
  Synthetic oligonucleotide; TTC chr11 5271060 5271081 5271065 5271060 -
ccccaatcattacttctgtcac

SEQ ID NO: 135821 - DNA, 22 bp, Artificial Sequence
  Synthetic oligonucleotide; TTA chr11 5271048 5271069 5271053 5271048 -
cttctgtcacattgatagttaa

SEQ ID NO: 135822 - DNA, 22 bp, Artificial Sequence
  Synthetic oligonucleotide; CTT chr11 5271045 5271066 5271050 5271045 -
ctgtcacattgatagttaaata

SEQ ID NO: 135823 - DNA, 22 bp, Artificial Sequence
  Synthetic oligonucleotide; TTC chr11 5271044 5271065 5271049 5271044 -
tgtcacattgatagttaaataa

SEQ ID NO: 135824 - DNA, 22 bp, Artificial Sequence
  Synthetic oligonucleotide; CTG chr11 5271042 5271063 5271047 5271042 -
tcacattgatagttaaataatt

SEQ ID NO: 135825 - DNA, 22 bp, Artificial Sequence
  Synthetic oligonucleotide; TTG chr11 5271034 5271055 5271039 5271034 -
atagttaaataatttctgtgaa

SEQ ID NO: 135826 - DNA, 22 bp, Artificial Sequence
  Synthetic oligonucleotide; TTA chr11 5271027 5271048 5271032 5271027 -
aataatttctgtgaatttattc

SEQ ID NO: 135827 - DNA, 22 bp, Artificial Sequence
  Synthetic oligonucleotide; TTT chr11 5271019 5271040 5271024 5271019 -
ctgtgaatttattccttgattc

SEQ ID NO: 135828 - DNA, 22 bp, Artificial Sequence
  Synthetic oligonucleotide; TTC chr11 5271018 5271039 5271023 5271018 -
tgtgaatttattccttgattct

SEQ ID NO: 135829 - DNA, 22 bp, Artificial Sequence
  Synthetic oligonucleotide; CTG chr11 5271016 5271037 5271021 5271016 -
tgaatttattccttgattctaa

SEQ ID NO: 135830 - DNA, 22 bp, Artificial Sequence
  Synthetic oligonucleotide; TTT chr11 5271009 5271030 5271014 5271009 -
attccttgattctaaaatatga

SEQ ID NO: 135831 - DNA, 22 bp, Artificial Sequence
  Synthetic oligonucleotide; TTA chr11 5271008 5271029 5271013 5271008 -
ttccttgattctaaaatatgag

SEQ ID NO: 135832 - DNA, 22 bp, Artificial Sequence
  Synthetic oligonucleotide; TTC chr11 5271005 5271026 5271010 5271005 -
cttgattctaaaatatgaggat

SEQ ID NO: 135833 - DNA, 22 bp, Artificial Sequence
  Synthetic oligonucleotide; CTT chr11 5271002 5271023 5271007 5271002 -
gattctaaaatatgaggataat

SEQ ID NO: 135834 - DNA, 22 bp, Artificial Sequence
  Synthetic oligonucleotide; TTG chr11 5271001 5271022 5271006 5271001 -
attctaaaatatgaggataatg

SEQ ID NO: 135835 - DNA, 22 bp, Artificial Sequence
  Synthetic oligonucleotide; TTC chr11 5270997 5271018 5271002 5270997 -
taaaatatgaggataatgacaa

SEQ ID NO: 135836 - DNA, 22 bp, Artificial Sequence
  Synthetic oligonucleotide; CTA chr11 5270995 5271016 5271000 5270995 -
aaatatgaggataatgacaatg

SEQ ID NO: 135837 - DNA, 22 bp, Artificial Sequence
  Synthetic oligonucleotide; TTA chr11 5270967 5270988 5270972 5270967 -
taagggcagattaagtgatata

SEQ ID NO: 135838 - DNA, 22 bp, Artificial Sequence
  Synthetic oligonucleotide; TTA chr11 5270954 5270975 5270959 5270954 -
agtgatatagcatgagcaatat

SEQ ID NO: 135839 - DNA, 22 bp, Artificial Sequence
  Synthetic oligonucleotide; TTC chr11 5270930 5270951 5270935 5270930 -
ttcaggcacatggatcgaattg

SEQ ID NO: 135840 - DNA, 22 bp, Artificial Sequence
  Synthetic oligonucleotide; CTT chr11 5270928 5270949 5270933 5270928 -
caggcacatggatcgaattgaa

SEQ ID NO: 135841 - DNA, 22 bp, Artificial Sequence
  Synthetic oligonucleotide; TTC chr11 5270927 5270948 5270932 5270927 -
aggcacatggatcgaattgaat

SEQ ID NO: 135842 - DNA, 22 bp, Artificial Sequence
  Synthetic oligonucleotide; TTG chr11 5270908 5270929 5270913 5270908 -
aatacactgtaaatcccaactt

SEQ ID NO: 135843 - DNA, 22 bp, Artificial Sequence
  Synthetic oligonucleotide; CTG chr11 5270899 5270920 5270904 5270899 -
taaatcccaacttccagtttca

SEQ ID NO: 135844 - DNA, 22 bp, Artificial Sequence
  Synthetic oligonucleotide; CTT chr11 5270886 5270907 5270891 5270886 -
ccagtttcagctctaccaagta

SEQ ID NO: 135845 - DNA, 22 bp, Artificial Sequence
  Synthetic oligonucleotide; TTC chr11 5270885 5270906 5270890 5270885 -
cagtttcagctctaccaagtaa

SEQ ID NO: 135846 - DNA, 22 bp, Artificial Sequence
  Synthetic oligonucleotide; TTT chr11 5270879 5270900 5270884 5270879 -
cagctctaccaagtaaagagct

SEQ ID NO: 135847 - DNA, 22 bp, Artificial Sequence
  Synthetic oligonucleotide; TTC chr11 5270878 5270899 5270883 5270878 -
agctctaccaagtaaagagcta

SEQ ID NO: 135848 - DNA, 22 bp, Artificial Sequence
  Synthetic oligonucleotide; CTC chr11 5270873 5270894 5270878 5270873 -
taccaagtaaagagctagcaag

SEQ ID NO: 135849 - DNA, 22 bp, Artificial Sequence
  Synthetic oligonucleotide; CTA chr11 5270871 5270892 5270876 5270871 -
ccaagtaaagagctagcaagtc

SEQ ID NO: 135850 - DNA, 22 bp, Artificial Sequence
  Synthetic oligonucleotide; CTA chr11 5270856 5270877 5270861 5270856 -
gcaagtcatcaaaatggggaca

SEQ ID NO: 135851 - DNA, 22 bp, Artificial Sequence
  Synthetic oligonucleotide; CTA chr11 5270811 5270832 5270816 5270811 -
gaggaataatataccctgactc

SEQ ID NO: 135852 - DNA, 22 bp, Artificial Sequence
  Synthetic oligonucleotide; CTG chr11 5270793 5270814 5270798 5270793 -
actcctagcctgattaatatat

SEQ ID NO: 135853 - DNA, 22 bp, Artificial Sequence
  Synthetic oligonucleotide; CTC chr11 5270789 5270810 5270794 5270789 -
ctagcctgattaatatatcgat

SEQ ID NO: 135854 - DNA, 22 bp, Artificial Sequence
  Synthetic oligonucleotide; CTA chr11 5270786 5270807 5270791 5270786 -
gcctgattaatatatcgattca

SEQ ID NO: 135855 - DNA, 22 bp, Artificial Sequence
  Synthetic oligonucleotide; CTG chr11 5270781 5270802 5270786 5270781 -
attaatatatcgattcactttt

SEQ ID NO: 135856 - DNA, 22 bp, Artificial Sequence
  Synthetic oligonucleotide; TTA chr11 5270777 5270798 5270782 5270777 -
atatatcgattcacttttttct

SEQ ID NO: 135857 - DNA, 22 bp, Artificial Sequence
  Synthetic oligonucleotide; TTC chr11 5270765 5270786 5270770 5270765 -
acttttttctctgtttgatgac

SEQ ID NO: 135858 - DNA, 22 bp, Artificial Sequence
  Synthetic oligonucleotide; CTT chr11 5270761 5270782 5270766 5270761 -
ttttctctgtttgatgacaaat

SEQ ID NO: 135859 - DNA, 22 bp, Artificial Sequence
  Synthetic oligonucleotide; TTT chr11 5270760 5270781 5270765 5270760 -
tttctctgtttgatgacaaatt

SEQ ID NO: 135860 - DNA, 22 bp, Artificial Sequence
  Synthetic oligonucleotide; TTT chr11 5270759 5270780 5270764 5270759 -
ttctctgtttgatgacaaattc

SEQ ID NO: 135861 - DNA, 22 bp, Artificial Sequence
  Synthetic oligonucleotide; TTT chr11 5270758 5270779 5270763 5270758 -
tctctgtttgatgacaaattct

SEQ ID NO: 135862 - DNA, 22 bp, Artificial Sequence
  Synthetic oligonucleotide; TTT chr11 5270757 5270778 5270762 5270757 -
ctctgtttgatgacaaattctg

SEQ ID NO: 135863 - DNA, 22 bp, Artificial Sequence
  Synthetic oligonucleotide; TTC chr11 5270756 5270777 5270761 5270756 -
tctgtttgatgacaaattctgg

SEQ ID NO: 135864 - DNA, 22 bp, Artificial Sequence
  Synthetic oligonucleotide; CTC chr11 5270754 5270775 5270759 5270754 -
tgtttgatgacaaattctggct

SEQ ID NO: 135865 - DNA, 22 bp, Artificial Sequence
  Synthetic oligonucleotide; CTG chr11 5270752 5270773 5270757 5270752 -
tttgatgacaaattctggcttt

SEQ ID NO: 135866 - DNA, 22 bp, Artificial Sequence
  Synthetic oligonucleotide; TTT chr11 5270749 5270770 5270754 5270749 -
gatgacaaattctggctttaaa

SEQ ID NO: 135867 - DNA, 22 bp, Artificial Sequence
  Synthetic oligonucleotide; TTG chr11 5270748 5270769 5270753 5270748 -
atgacaaattctggctttaaat

SEQ ID NO: 135868 - DNA, 22 bp, Artificial Sequence
  Synthetic oligonucleotide; TTC chr11 5270737 5270758 5270742 5270737 -
tggctttaaataattttaggat

SEQ ID NO: 135869 - DNA, 22 bp, Artificial Sequence
  Synthetic oligonucleotide; CTG chr11 5270735 5270756 5270740 5270735 -
gctttaaataattttaggattt

SEQ ID NO: 135870 - DNA, 22 bp, Artificial Sequence
  Synthetic oligonucleotide; CTT chr11 5270731 5270752 5270736 5270731 -
taaataattttaggattttagg

SEQ ID NO: 135871 - DNA, 22 bp, Artificial Sequence
  Synthetic oligonucleotide; TTT chr11 5270730 5270751 5270735 5270730 -
aaataattttaggattttaggc

SEQ ID NO: 135872 - DNA, 22 bp, Artificial Sequence
  Synthetic oligonucleotide; TTA chr11 5270729 5270750 5270734 5270729 -
aataattttaggattttaggct

SEQ ID NO: 135873 - DNA, 22 bp, Artificial Sequence
  Synthetic oligonucleotide; TTT chr11 5270721 5270742 5270726 5270721 -
taggattttaggcttctcagct

SEQ ID NO: 135874 - DNA, 22 bp, Artificial Sequence
  Synthetic oligonucleotide; TTT chr11 5270720 5270741 5270725 5270720 -
aggattttaggcttctcagctc

SEQ ID NO: 135875 - DNA, 22 bp, Artificial Sequence
  Synthetic oligonucleotide; TTA chr11 5270719 5270740 5270724 5270719 -
ggattttaggcttctcagctcc

SEQ ID NO: 135876 - DNA, 22 bp, Artificial Sequence
  Synthetic oligonucleotide; TTT chr11 5270713 5270734 5270718 5270713 -
taggcttctcagctcccttccc

SEQ ID NO: 135877 - DNA, 22 bp, Artificial Sequence
  Synthetic oligonucleotide; TTT chr11 5270712 5270733 5270717 5270712 -
aggcttctcagctcccttccca

SEQ ID NO: 135878 - DNA, 22 bp, Artificial Sequence
  Synthetic oligonucleotide; TTA chr11 5270711 5270732 5270716 5270711 -
ggcttctcagctcccttcccag

SEQ ID NO: 135879 - DNA, 22 bp, Artificial Sequence
  Synthetic oligonucleotide; CTT chr11 5270706 5270727 5270711 5270706 -
ctcagctcccttcccagtgaga

SEQ ID NO: 135880 - DNA, 22 bp, Artificial Sequence
  Synthetic oligonucleotide; TTC chr11 5270705 5270726 5270710 5270705 -
tcagctcccttcccagtgagaa

SEQ ID NO: 135881 - DNA, 22 bp, Artificial Sequence
  Synthetic oligonucleotide; CTC chr11 5270703 5270724 5270708 5270703 -
agctcccttcccagtgagaagt

SEQ ID NO: 135882 - DNA, 22 bp, Artificial Sequence
  Synthetic oligonucleotide; CTC chr11 5270698 5270719 5270703 5270698 -
ccttcccagtgagaagtataag

SEQ ID NO: 135883 - DNA, 22 bp, Artificial Sequence
  Synthetic oligonucleotide; CTT chr11 5270694 5270715 5270699 5270694 -
cccagtgagaagtataagcagg

SEQ ID NO: 135884 - DNA, 22 bp, Artificial Sequence
  Synthetic oligonucleotide; TTC chr11 5270693 5270714 5270698 5270693 -
ccagtgagaagtataagcagga

SEQ ID NO: 135885 - DNA, 22 bp, Artificial Sequence
  Synthetic oligonucleotide; CTC chr11 5270633 5270654 5270638 5270633 -
acaaagtagccaatgtcccctg

SEQ ID NO: 135886 - DNA, 22 bp, Artificial Sequence
  Synthetic oligonucleotide; CTG chr11 5270611 5270632 5270616 5270611 -
tggtcatagagaaatgaaaaga

SEQ ID NO: 135887 - DNA, 22 bp, Artificial Sequence
  Synthetic oligonucleotide; TTC chr11 5270579 5270600 5270584 5270579 -
tctggaagcactggatgtaatc

SEQ ID NO: 135888 - DNA, 22 bp, Artificial Sequence
  Synthetic oligonucleotide; CTC chr11 5270577 5270598 5270582 5270577 -
tggaagcactggatgtaatctt

SEQ ID NO: 135889 - DNA, 22 bp, Artificial Sequence
  Synthetic oligonucleotide; CTG chr11 5270575 5270596 5270580 5270575 -
gaagcactggatgtaatctttt

SEQ ID NO: 135890 - DNA, 22 bp, Artificial Sequence
  Synthetic oligonucleotide; CTG chr11 5270566 5270587 5270571 5270566 -
gatgtaatcttttctgtctgtc

SEQ ID NO: 135891 - DNA, 22 bp, Artificial Sequence
  Synthetic oligonucleotide; CTT chr11 5270555 5270576 5270560 5270555 -
ttctgtctgtcctctctaggga

SEQ ID NO: 135892 - DNA, 22 bp, Artificial Sequence
  Synthetic oligonucleotide; TTT chr11 5270554 5270575 5270559 5270554 -
tctgtctgtcctctctagggaa

SEQ ID NO: 135893 - DNA, 22 bp, Artificial Sequence
  Synthetic oligonucleotide; TTT chr11 5270553 5270574 5270558 5270553 -
ctgtctgtcctctctagggaat

SEQ ID NO: 135894 - DNA, 22 bp, Artificial Sequence
  Synthetic oligonucleotide; TTC chr11 5270552 5270573 5270557 5270552 -
tgtctgtcctctctagggaatc

SEQ ID NO: 135895 - DNA, 22 bp, Artificial Sequence
  Synthetic oligonucleotide; CTG chr11 5270550 5270571 5270555 5270550 -
tctgtcctctctagggaatcac

SEQ ID NO: 135896 - DNA, 22 bp, Artificial Sequence
  Synthetic oligonucleotide; CTG chr11 5270546 5270567 5270551 5270546 -
tcctctctagggaatcacccca

SEQ ID NO: 135897 - DNA, 22 bp, Artificial Sequence
  Synthetic oligonucleotide; CTC chr11 5270541 5270562 5270546 5270541 -
tctagggaatcaccccaaggta

SEQ ID NO: 135898 - DNA, 22 bp, Artificial Sequence
  Synthetic oligonucleotide; CTC chr11 5270539 5270560 5270544 5270539 -
tagggaatcaccccaaggtact

SEQ ID NO: 135899 - DNA, 22 bp, Artificial Sequence
  Synthetic oligonucleotide; CTA chr11 5270537 5270558 5270542 5270537 -
gggaatcaccccaaggtactgt

SEQ ID NO: 135900 - DNA, 22 bp, Artificial Sequence
  Synthetic oligonucleotide; CTG chr11 5270516 5270537 5270521 5270516 -
tactttgggattaaggctttag

SEQ ID NO: 135901 - DNA, 22 bp, Artificial Sequence
  Synthetic oligonucleotide; CTT chr11 5270511 5270532 5270516 5270511 -
tgggattaaggctttagtccca

SEQ ID NO: 135902 - DNA, 22 bp, Artificial Sequence
  Synthetic oligonucleotide; TTT chr11 5270510 5270531 5270515 5270510 -
gggattaaggctttagtcccac

SEQ ID NO: 135903 - DNA, 22 bp, Artificial Sequence
  Synthetic oligonucleotide; TTG chr11 5270509 5270530 5270514 5270509 -
ggattaaggctttagtcccact

SEQ ID NO: 135904 - DNA, 22 bp, Artificial Sequence
  Synthetic oligonucleotide; TTA chr11 5270503 5270524 5270508 5270503 -
aggctttagtcccactgtggac

SEQ ID NO: 135905 - DNA, 22 bp, Artificial Sequence
  Synthetic oligonucleotide; CTT chr11 5270497 5270518 5270502 5270497 -
tagtcccactgtggactacttg

SEQ ID NO: 135906 - DNA, 22 bp, Artificial Sequence
  Synthetic oligonucleotide; TTT chr11 5270496 5270517 5270501 5270496 -
agtcccactgtggactacttgc

SEQ ID NO: 135907 - DNA, 22 bp, Artificial Sequence
  Synthetic oligonucleotide; TTA chr11 5270495 5270516 5270500 5270495 -
gtcccactgtggactacttgct

SEQ ID NO: 135908 - DNA, 22 bp, Artificial Sequence
  Synthetic oligonucleotide; CTG chr11 5270486 5270507 5270491 5270486 -
tggactacttgctattctgttc

SEQ ID NO: 135909 - DNA, 22 bp, Artificial Sequence
  Synthetic oligonucleotide; CTA chr11 5270479 5270500 5270484 5270479 -
cttgctattctgttcagtttct

SEQ ID NO: 135910 - DNA, 22 bp, Artificial Sequence
  Synthetic oligonucleotide; CTT chr11 5270476 5270497 5270481 5270476 -
gctattctgttcagtttctaga

SEQ ID NO: 135911 - DNA, 22 bp, Artificial Sequence
  Synthetic oligonucleotide; TTG chr11 5270475 5270496 5270480 5270475 -
ctattctgttcagtttctagaa

SEQ ID NO: 135912 - DNA, 22 bp, Artificial Sequence
  Synthetic oligonucleotide; CTA chr11 5270472 5270493 5270477 5270472 -
ttctgttcagtttctagaagga

SEQ ID NO: 135913 - DNA, 22 bp, Artificial Sequence
  Synthetic oligonucleotide; TTC chr11 5270469 5270490 5270474 5270469 -
tgttcagtttctagaaggaact

SEQ ID NO: 135914 - DNA, 22 bp, Artificial Sequence
  Synthetic oligonucleotide; CTG chr11 5270467 5270488 5270472 5270467 -
ttcagtttctagaaggaactat

SEQ ID NO: 135915 - DNA, 22 bp, Artificial Sequence
  Synthetic oligonucleotide; TTC chr11 5270464 5270485 5270469 5270464 -
agtttctagaaggaactatgta

SEQ ID NO: 135916 - DNA, 22 bp, Artificial Sequence
  Synthetic oligonucleotide; TTT chr11 5270459 5270480 5270464 5270459 -
ctagaaggaactatgtacggtt

SEQ ID NO: 135917 - DNA, 22 bp, Artificial Sequence
  Synthetic oligonucleotide; TTC chr11 5270458 5270479 5270463 5270458 -
tagaaggaactatgtacggttt

SEQ ID NO: 135918 - DNA, 22 bp, Artificial Sequence
  Synthetic oligonucleotide; CTA chr11 5270456 5270477 5270461 5270456 -
gaaggaactatgtacggttttt

SEQ ID NO: 135919 - DNA, 22 bp, Artificial Sequence
  Synthetic oligonucleotide; CTA chr11 5270446 5270467 5270451 5270446 -
tgtacggtttttgtctccctag

SEQ ID NO: 135920 - DNA, 22 bp, Artificial Sequence
  Synthetic oligonucleotide; TTT chr11 5270436 5270457 5270441 5270436 -
ttgtctccctagagaaactaag

SEQ ID NO: 135921 - DNA, 22 bp, Artificial Sequence
  Synthetic oligonucleotide; TTT chr11 5270435 5270456 5270440 5270435 -
tgtctccctagagaaactaagg

SEQ ID NO: 135922 - DNA, 22 bp, Artificial Sequence
  Synthetic oligonucleotide; TTT chr11 5270434 5270455 5270439 5270434 -
gtctccctagagaaactaaggt

SEQ ID NO: 135923 - DNA, 22 bp, Artificial Sequence
  Synthetic oligonucleotide; TTG chr11 5270433 5270454 5270438 5270433 -
tctccctagagaaactaaggta

SEQ ID NO: 135924 - DNA, 22 bp, Artificial Sequence
  Synthetic oligonucleotide; CTC chr11 5270429 5270450 5270434 5270429 -
cctagagaaactaaggtacaga

SEQ ID NO: 135925 - DNA, 22 bp, Artificial Sequence
  Synthetic oligonucleotide; CTA chr11 5270425 5270446 5270430 5270425 -
gagaaactaaggtacagaagtt

SEQ ID NO: 135926 - DNA, 22 bp, Artificial Sequence
  Synthetic oligonucleotide; CTA chr11 5270416 5270437 5270421 5270416 -
aggtacagaagttttgtttaca

SEQ ID NO: 135927 - DNA, 22 bp, Artificial Sequence
  Synthetic oligonucleotide; TTT chr11 5270402 5270423 5270407 5270402 -
tgtttacaatgcactccttaag

SEQ ID NO: 135928 - DNA, 22 bp, Artificial Sequence
  Synthetic oligonucleotide; TTT chr11 5270401 5270422 5270406 5270401 -
gtttacaatgcactccttaaga

SEQ ID NO: 135929 - DNA, 22 bp, Artificial Sequence
  Synthetic oligonucleotide; TTG chr11 5270400 5270421 5270405 5270400 -
tttacaatgcactccttaagag

SEQ ID NO: 135930 - DNA, 22 bp, Artificial Sequence
  Synthetic oligonucleotide; TTT chr11 5270397 5270418 5270402 5270397 -
acaatgcactccttaagagagc

SEQ ID NO: 135931 - DNA, 22 bp, Artificial Sequence
  Synthetic oligonucleotide; TTA chr11 5270396 5270417 5270401 5270396 -
caatgcactccttaagagagct

SEQ ID NO: 135932 - DNA, 22 bp, Artificial Sequence
  Synthetic oligonucleotide; CTC chr11 5270386 5270407 5270391 5270386 -
cttaagagagctagaactgggt

SEQ ID NO: 135933 - DNA, 22 bp, Artificial Sequence
  Synthetic oligonucleotide; CTT chr11 5270383 5270404 5270388 5270383 -
aagagagctagaactgggtgag

SEQ ID NO: 135934 - DNA, 22 bp, Artificial Sequence
  Synthetic oligonucleotide; TTA chr11 5270382 5270403 5270387 5270382 -
agagagctagaactgggtgaga

SEQ ID NO: 135935 - DNA, 22 bp, Artificial Sequence
  Synthetic oligonucleotide; CTA chr11 5270373 5270394 5270378 5270373 -
gaactgggtgagattctgtttt

SEQ ID NO: 135936 - DNA, 22 bp, Artificial Sequence
  Synthetic oligonucleotide; CTG chr11 5270367 5270388 5270372 5270367 -
ggtgagattctgttttaacagc

SEQ ID NO: 135937 - DNA, 22 bp, Artificial Sequence
  Synthetic oligonucleotide; TTC chr11 5270357 5270378 5270362 5270357 -
tgttttaacagctttattttct

SEQ ID NO: 135938 - DNA, 22 bp, Artificial Sequence
  Synthetic oligonucleotide; CTG chr11 5270355 5270376 5270360 5270355 -
ttttaacagctttattttcttt

SEQ ID NO: 135939 - DNA, 22 bp, Artificial Sequence
  Synthetic oligonucleotide; TTT chr11 5270352 5270373 5270357 5270352 -
taacagctttattttcttttcc

SEQ ID NO: 135940 - DNA, 22 bp, Artificial Sequence
  Synthetic oligonucleotide; TTT chr11 5270351 5270372 5270356 5270351 -
aacagctttattttcttttcct

SEQ ID NO: 135941 - DNA, 22 bp, Artificial Sequence
  Synthetic oligonucleotide; TTA chr11 5270350 5270371 5270355 5270350 -
acagctttattttcttttcctt

SEQ ID NO: 135942 - DNA, 22 bp, Artificial Sequence
  Synthetic oligonucleotide; CTT chr11 5270343 5270364 5270348 5270343 -
tattttcttttccttggccctg

SEQ ID NO: 135943 - DNA, 22 bp, Artificial Sequence
  Synthetic oligonucleotide; TTT chr11 5270342 5270363 5270347 5270342 -
attttcttttccttggccctgt

SEQ ID NO: 135944 - DNA, 22 bp, Artificial Sequence
  Synthetic oligonucleotide; TTA chr11 5270341 5270362 5270346 5270341 -
ttttcttttccttggccctgtt

SEQ ID NO: 135945 - DNA, 22 bp, Artificial Sequence
  Synthetic oligonucleotide; TTT chr11 5270338 5270359 5270343 5270338 -
tcttttccttggccctgttttt

SEQ ID NO: 135946 - DNA, 22 bp, Artificial Sequence
  Synthetic oligonucleotide; TTT chr11 5270337 5270358 5270342 5270337 -
cttttccttggccctgtttttg

SEQ ID NO: 135947 - DNA, 22 bp, Artificial Sequence
  Synthetic oligonucleotide; TTC chr11 5270336 5270357 5270341 5270336 -
ttttccttggccctgtttttgt

SEQ ID NO: 135948 - DNA, 22 bp, Artificial Sequence
  Synthetic oligonucleotide; CTT chr11 5270334 5270355 5270339 5270334 -
ttccttggccctgtttttgtca

SEQ ID NO: 135949 - DNA, 22 bp, Artificial Sequence
  Synthetic oligonucleotide; TTT chr11 5270333 5270354 5270338 5270333 -
tccttggccctgtttttgtcac

SEQ ID NO: 135950 - DNA, 22 bp, Artificial Sequence
  Synthetic oligonucleotide; TTT chr11 5270332 5270353 5270337 5270332 -
ccttggccctgtttttgtcact

SEQ ID NO: 135951 - DNA, 22 bp, Artificial Sequence
  Synthetic oligonucleotide; TTC chr11 5270331 5270352 5270336 5270331 -
cttggccctgtttttgtcactg

SEQ ID NO: 135952 - DNA, 22 bp, Artificial Sequence
  Synthetic oligonucleotide; CTT chr11 5270328 5270349 5270333 5270328 -
ggccctgtttttgtcactgtca

SEQ ID NO: 135953 - DNA, 22 bp, Artificial Sequence
  Synthetic oligonucleotide; TTG chr11 5270327 5270348 5270332 5270327 -
gccctgtttttgtcactgtcac

SEQ ID NO: 135954 - DNA, 22 bp, Artificial Sequence
  Synthetic oligonucleotide; CTG chr11 5270321 5270342 5270326 5270321 -
tttttgtcactgtcaccacctt

SEQ ID NO: 135955 - DNA, 22 bp, Artificial Sequence
  Synthetic oligonucleotide; TTT chr11 5270318 5270339 5270323 5270318 -
ttgtcactgtcaccacctttaa

SEQ ID NO: 135956 - DNA, 22 bp, Artificial Sequence
  Synthetic oligonucleotide; TTT chr11 5270317 5270338 5270322 5270317 -
tgtcactgtcaccacctttaag

SEQ ID NO: 135957 - DNA, 22 bp, Artificial Sequence
  Synthetic oligonucleotide; TTT chr11 5270316 5270337 5270321 5270316 -
gtcactgtcaccacctttaagg

SEQ ID NO: 135958 - DNA, 22 bp, Artificial Sequence
  Synthetic oligonucleotide; TTG chr11 5270315 5270336 5270320 5270315 -
tcactgtcaccacctttaaggc

SEQ ID NO: 135959 - DNA, 22 bp, Artificial Sequence
  Synthetic oligonucleotide; CTG chr11 5270309 5270330 5270314 5270309 -
tcaccacctttaaggcaaatgt

SEQ ID NO: 135960 - DNA, 22 bp, Artificial Sequence
  Synthetic oligonucleotide; CTT chr11 5270299 5270320 5270304 5270299 -
taaggcaaatgttaaatgcgct

SEQ ID NO: 135961 - DNA, 22 bp, Artificial Sequence
  Synthetic oligonucleotide; TTT chr11 5270298 5270319 5270303 5270298 -
aaggcaaatgttaaatgcgctt

SEQ ID NO: 135962 - DNA, 22 bp, Artificial Sequence
  Synthetic oligonucleotide; TTA chr11 5270297 5270318 5270302 5270297 -
aggcaaatgttaaatgcgcttt

SEQ ID NO: 135963 - DNA, 22 bp, Artificial Sequence
  Synthetic oligonucleotide; TTA chr11 5270285 5270306 5270290 5270285 -
aatgcgctttggctgaaacttt

SEQ ID NO: 135964 - DNA, 22 bp, Artificial Sequence
  Synthetic oligonucleotide; CTT chr11 5270276 5270297 5270281 5270276 -
tggctgaaactttttttcctat

SEQ ID NO: 135965 - DNA, 22 bp, Artificial Sequence
  Synthetic oligonucleotide; TTT chr11 5270275 5270296 5270280 5270275 -
ggctgaaactttttttcctatt

SEQ ID NO: 135966 - DNA, 22 bp, Artificial Sequence
  Synthetic oligonucleotide; TTG chr11 5270274 5270295 5270279 5270274 -
gctgaaactttttttcctattt

SEQ ID NO: 135967 - DNA, 22 bp, Artificial Sequence
  Synthetic oligonucleotide; CTG chr11 5270270 5270291 5270275 5270270 -
aaactttttttcctattttgag

SEQ ID NO: 135968 - DNA, 22 bp, Artificial Sequence
  Synthetic oligonucleotide; CTT chr11 5270264 5270285 5270269 5270264 -
tttttcctattttgagatttgc

SEQ ID NO: 135969 - DNA, 22 bp, Artificial Sequence
  Synthetic oligonucleotide; TTT chr11 5270263 5270284 5270268 5270263 -
ttttcctattttgagatttgct

SEQ ID NO: 135970 - DNA, 22 bp, Artificial Sequence
  Synthetic oligonucleotide; TTT chr11 5270262 5270283 5270267 5270262 -
tttcctattttgagatttgctc

SEQ ID NO: 135971 - DNA, 22 bp, Artificial Sequence
  Synthetic oligonucleotide; TTT chr11 5270261 5270282 5270266 5270261 -
ttcctattttgagatttgctcc

SEQ ID NO: 135972 - DNA, 22 bp, Artificial Sequence
  Synthetic oligonucleotide; TTT chr11 5270260 5270281 5270265 5270260 -
tcctattttgagatttgctcct

SEQ ID NO: 135973 - DNA, 22 bp, Artificial Sequence
  Synthetic oligonucleotide; TTT chr11 5270259 5270280 5270264 5270259 -
cctattttgagatttgctcctt

SEQ ID NO: 135974 - DNA, 22 bp, Artificial Sequence
  Synthetic oligonucleotide; TTC chr11 5270258 5270279 5270263 5270258 -
ctattttgagatttgctccttt

SEQ ID NO: 135975 - DNA, 22 bp, Artificial Sequence
  Synthetic oligonucleotide; CTA chr11 5270255 5270276 5270260 5270255 -
ttttgagatttgctcctttata

SEQ ID NO: 135976 - DNA, 22 bp, Artificial Sequence
  Synthetic oligonucleotide; TTT chr11 5270252 5270273 5270257 5270252 -
tgagatttgctcctttatatga

SEQ ID NO: 135977 - DNA, 22 bp, Artificial Sequence
  Synthetic oligonucleotide; TTT chr11 5270251 5270272 5270256 5270251 -
gagatttgctcctttatatgag

SEQ ID NO: 135978 - DNA, 22 bp, Artificial Sequence
  Synthetic oligonucleotide; TTG chr11 5270250 5270271 5270255 5270250 -
agatttgctcctttatatgagg

SEQ ID NO: 135979 - DNA, 22 bp, Artificial Sequence
  Synthetic oligonucleotide; TTT chr11 5270244 5270265 5270249 5270244 -
gctcctttatatgaggctttct

SEQ ID NO: 135980 - DNA, 22 bp, Artificial Sequence
  Synthetic oligonucleotide; TTG chr11 5270243 5270264 5270248 5270243 -
ctcctttatatgaggctttctt

SEQ ID NO: 135981 - DNA, 22 bp, Artificial Sequence
  Synthetic oligonucleotide; CTC chr11 5270240 5270261 5270245 5270240 -
ctttatatgaggctttcttgga

SEQ ID NO: 135982 - DNA, 22 bp, Artificial Sequence
  Synthetic oligonucleotide; CTT chr11 5270237 5270258 5270242 5270237 -
tatatgaggctttcttggaaaa

SEQ ID NO: 135983 - DNA, 22 bp, Artificial Sequence
  Synthetic oligonucleotide; TTT chr11 5270236 5270257 5270241 5270236 -
atatgaggctttcttggaaaag

SEQ ID NO: 135984 - DNA, 22 bp, Artificial Sequence
  Synthetic oligonucleotide; TTA chr11 5270235 5270256 5270240 5270235 -
tatgaggctttcttggaaaagg

SEQ ID NO: 135985 - DNA, 22 bp, Artificial Sequence
  Synthetic oligonucleotide; CTT chr11 5270225 5270246 5270230 5270225 -
tcttggaaaaggagaatgggag

SEQ ID NO: 135986 - DNA, 22 bp, Artificial Sequence
  Synthetic oligonucleotide; TTT chr11 5270224 5270245 5270229 5270224 -
cttggaaaaggagaatgggaga

SEQ ID NO: 135987 - DNA, 22 bp, Artificial Sequence
  Synthetic oligonucleotide; TTC chr11 5270223 5270244 5270228 5270223 -
ttggaaaaggagaatgggagag

SEQ ID NO: 135988 - DNA, 22 bp, Artificial Sequence
  Synthetic oligonucleotide; CTT chr11 5270221 5270242 5270226 5270221 -
ggaaaaggagaatgggagagat

SEQ ID NO: 135989 - DNA, 22 bp, Artificial Sequence
  Synthetic oligonucleotide; TTG chr11 5270220 5270241 5270225 5270220 -
gaaaaggagaatgggagagatg

SEQ ID NO: 135990 - DNA, 22 bp, Artificial Sequence
  Synthetic oligonucleotide; TTT chr11 5270188 5270209 5270193 5270188 -
tggaagatgatgaagagggtaa

SEQ ID NO: 135991 - DNA, 22 bp, Artificial Sequence
  Synthetic oligonucleotide; TTT chr11 5270187 5270208 5270192 5270187 -
ggaagatgatgaagagggtaaa

SEQ ID NO: 135992 - DNA, 22 bp, Artificial Sequence
  Synthetic oligonucleotide; TTG chr11 5270186 5270207 5270191 5270186 -
gaagatgatgaagagggtaaaa

SEQ ID NO: 135993 - DNA, 22 bp, Artificial Sequence
  Synthetic oligonucleotide; TTT chr11 5270144 5270165 5270149 5270144 -
gtgttgcagatagatgaggagc

SEQ ID NO: 135994 - DNA, 22 bp, Artificial Sequence
  Synthetic oligonucleotide; TTG chr11 5270143 5270164 5270148 5270143 -
tgttgcagatagatgaggagcc

SEQ ID NO: 135995 - DNA, 22 bp, Artificial Sequence
  Synthetic oligonucleotide; TTG chr11 5270138 5270159 5270143 5270138 -
cagatagatgaggagccaacaa

SEQ ID NO: 135996 - DNA, 22 bp, Artificial Sequence
  Synthetic oligonucleotide; CTC chr11 5270105 5270126 5270110 5270105 -
aggatccagcacacattatcac

SEQ ID NO: 135997 - DNA, 22 bp, Artificial Sequence
  Synthetic oligonucleotide; TTA chr11 5270087 5270108 5270092 5270087 -
tcacaaacttagtgtccatcca

SEQ ID NO: 135998 - DNA, 22 bp, Artificial Sequence
  Synthetic oligonucleotide; CTT chr11 5270077 5270098 5270082 5270077 -
agtgtccatccatcactgctga

SEQ ID NO: 135999 - DNA, 22 bp, Artificial Sequence
  Synthetic oligonucleotide; TTA chr11 5270076 5270097 5270081 5270076 -
gtgtccatccatcactgctgac

SEQ ID NO: 136000 - DNA, 22 bp, Artificial Sequence
  Synthetic oligonucleotide; CTG chr11 5270059 5270080 5270064 5270059 -
ctgaccctctccggacctgact

SEQ ID NO: 136001 - DNA, 22 bp, Artificial Sequence
  Synthetic oligonucleotide; CTG chr11 5270056 5270077 5270061 5270056 -
accctctccggacctgactcca

SEQ ID NO: 136002 - DNA, 22 bp, Artificial Sequence
  Synthetic oligonucleotide; CTC chr11 5270050 5270071 5270055 5270050 -
tccggacctgactccacccctg

SEQ ID NO: 136003 - DNA, 22 bp, Artificial Sequence
  Synthetic oligonucleotide; CTC chr11 5270048 5270069 5270053 5270048 -
cggacctgactccacccctgag

SEQ ID NO: 136004 - DNA, 22 bp, Artificial Sequence
  Synthetic oligonucleotide; CTG chr11 5270040 5270061 5270045 5270040 -
actccacccctgagggacacag

SEQ ID NO: 136005 - DNA, 22 bp, Artificial Sequence
  Synthetic oligonucleotide; CTC chr11 5270036 5270057 5270041 5270036 -
cacccctgagggacacaggtca

SEQ ID NO: 136006 - DNA, 22 bp, Artificial Sequence
  Synthetic oligonucleotide; CTG chr11 5270028 5270049 5270033 5270028 -
agggacacaggtcagccttgac

SEQ ID NO: 136007 - DNA, 22 bp, Artificial Sequence
  Synthetic oligonucleotide; CTT chr11 5270009 5270030 5270014 5270009 -
gaccaatgacttttaagtacca

SEQ ID NO: 136008 - DNA, 22 bp, Artificial Sequence
  Synthetic oligonucleotide; TTG chr11 5270008 5270029 5270013 5270008 -
accaatgacttttaagtaccat

SEQ ID NO: 136009 - DNA, 22 bp, Artificial Sequence
  Synthetic oligonucleotide; CTT chr11 5269997 5270018 5270002 5269997 -
ttaagtaccatggagaacaggg

SEQ ID NO: 136010 - DNA, 22 bp, Artificial Sequence
  Synthetic oligonucleotide; TTT chr11 5269996 5270017 5270001 5269996 -
taagtaccatggagaacagggg

SEQ ID NO: 136011 - DNA, 22 bp, Artificial Sequence
  Synthetic oligonucleotide; TTT chr11 5269995 5270016 5270000 5269995 -
aagtaccatggagaacaggggg

SEQ ID NO: 136012 - DNA, 22 bp, Artificial Sequence
  Synthetic oligonucleotide; TTA chr11 5269994 5270015 5269999 5269994 -
agtaccatggagaacagggggc

SEQ ID NO: 136013 - DNA, 22 bp, Artificial Sequence
  Synthetic oligonucleotide; CTT chr11 5269964 5269985 5269969 5269964 -
cggcagtaaagaataaaaggcc

SEQ ID NO: 136014 - DNA, 22 bp, Artificial Sequence
  Synthetic oligonucleotide; TTC chr11 5269963 5269984 5269968 5269963 -
ggcagtaaagaataaaaggcca

SEQ ID NO: 136015 - DNA, 22 bp, Artificial Sequence
  Synthetic oligonucleotide; CTG chr11 5269915 5269936 5269920 5269915 -
cttccgacacagctgcaatcac

SEQ ID NO: 136016 - DNA, 22 bp, Artificial Sequence
  Synthetic oligonucleotide; CTT chr11 5269912 5269933 5269917 5269912 -
ccgacacagctgcaatcactag

SEQ ID NO: 136017 - DNA, 22 bp, Artificial Sequence
  Synthetic oligonucleotide; TTC chr11 5269911 5269932 5269916 5269911 -
cgacacagctgcaatcactagc

SEQ ID NO: 136018 - DNA, 22 bp, Artificial Sequence
  Synthetic oligonucleotide; CTG chr11 5269900 5269921 5269905 5269900 -
caatcactagcaagctctcagg

SEQ ID NO: 136019 - DNA, 22 bp, Artificial Sequence
  Synthetic oligonucleotide; CTA chr11 5269891 5269912 5269896 5269891 -
gcaagctctcaggcctggcatc

SEQ ID NO: 136020 - DNA, 22 bp, Artificial Sequence
  Synthetic oligonucleotide; CTC chr11 5269883 5269904 5269888 5269883 -
tcaggcctggcatcatggtgca

SEQ ID NO: 136021 - DNA, 22 bp, Artificial Sequence
  Synthetic oligonucleotide; CTC chr11 5269881 5269902 5269886 5269881 -
aggcctggcatcatggtgcatt

SEQ ID NO: 136022 - DNA, 22 bp, Artificial Sequence
  Synthetic oligonucleotide; CTG chr11 5269874 5269895 5269879 5269874 -
gcatcatggtgcattttactgc

SEQ ID NO: 136023 - DNA, 22 bp, Artificial Sequence
  Synthetic oligonucleotide; TTT chr11 5269858 5269879 5269863 5269858 -
tactgctgaggagaaggctgcc

SEQ ID NO: 136024 - DNA, 22 bp, Artificial Sequence
  Synthetic oligonucleotide; TTT chr11 5269857 5269878 5269862 5269857 -
actgctgaggagaaggctgccg

SEQ ID NO: 136025 - DNA, 22 bp, Artificial Sequence
  Synthetic oligonucleotide; TTA chr11 5269856 5269877 5269861 5269856 -
ctgctgaggagaaggctgccgt

SEQ ID NO: 136026 - DNA, 22 bp, Artificial Sequence
  Synthetic oligonucleotide; CTG chr11 5269853 5269874 5269858 5269853 -
ctgaggagaaggctgccgtcac

SEQ ID NO: 136027 - DNA, 22 bp, Artificial Sequence
  Synthetic oligonucleotide; CTG chr11 5269850 5269871 5269855 5269850 -
aggagaaggctgccgtcactag

SEQ ID NO: 136028 - DNA, 22 bp, Artificial Sequence
  Synthetic oligonucleotide; CTG chr11 5269838 5269859 5269843 5269838 -
ccgtcactagcctgtggagcaa

SEQ ID NO: 136029 - DNA, 22 bp, Artificial Sequence
  Synthetic oligonucleotide; CTA chr11 5269829 5269850 5269834 5269829 -
gcctgtggagcaagatgaatgt

SEQ ID NO: 136030 - DNA, 22 bp, Artificial Sequence
  Synthetic oligonucleotide; CTG chr11 5269824 5269845 5269829 5269824 -
tggagcaagatgaatgtggaag

SEQ ID NO: 136031 - DNA, 22 bp, Artificial Sequence
  Synthetic oligonucleotide; CTG chr11 5269796 5269817 5269801 5269796 -
gaggtgaagccttgggcaggta

SEQ ID NO: 136032 - DNA, 22 bp, Artificial Sequence
  Synthetic oligonucleotide; CTT chr11 5269783 5269804 5269788 5269783 -
gggcaggtaagcattggttctc

SEQ ID NO: 136033 - DNA, 22 bp, Artificial Sequence
  Synthetic oligonucleotide; TTG chr11 5269782 5269803 5269787 5269782 -
ggcaggtaagcattggttctca

SEQ ID NO: 136034 - DNA, 22 bp, Artificial Sequence
  Synthetic oligonucleotide; TTG chr11 5269767 5269788 5269772 5269767 -
gttctcaatgcatgggaatgaa

SEQ ID NO: 136035 - DNA, 22 bp, Artificial Sequence
  Synthetic oligonucleotide; TTC chr11 5269763 5269784 5269768 5269763 -
tcaatgcatgggaatgaagggt

SEQ ID NO: 136036 - DNA, 22 bp, Artificial Sequence
  Synthetic oligonucleotide; CTC chr11 5269761 5269782 5269766 5269761 -
aatgcatgggaatgaagggtga

SEQ ID NO: 136037 - DNA, 22 bp, Artificial Sequence
  Synthetic oligonucleotide; TTA chr11 5269733 5269754 5269738 5269733 -
ccctagcaagttgattgggaaa

SEQ ID NO: 136038 - DNA, 22 bp, Artificial Sequence
  Synthetic oligonucleotide; CTA chr11 5269728 5269749 5269733 5269728 -
gcaagttgattgggaaagtcct

SEQ ID NO: 136039 - DNA, 22 bp, Artificial Sequence
  Synthetic oligonucleotide; TTG chr11 5269720 5269741 5269725 5269720 -
attgggaaagtcctcaagattt

SEQ ID NO: 136040 - DNA, 22 bp, Artificial Sequence
  Synthetic oligonucleotide; TTG chr11 5269716 5269737 5269721 5269716 -
ggaaagtcctcaagattttttg

SEQ ID NO: 136041 - DNA, 22 bp, Artificial Sequence
  Synthetic oligonucleotide; CTC chr11 5269705 5269726 5269710 5269705 -
aagattttttgcatctctaatt

SEQ ID NO: 136042 - DNA, 22 bp, Artificial Sequence
  Synthetic oligonucleotide; TTT chr11 5269698 5269719 5269703 5269698 -
tttgcatctctaattttgtatc

SEQ ID NO: 136043 - DNA, 22 bp, Artificial Sequence
  Synthetic oligonucleotide; TTT chr11 5269697 5269718 5269702 5269697 -
ttgcatctctaattttgtatct

SEQ ID NO: 136044 - DNA, 22 bp, Artificial Sequence
  Synthetic oligonucleotide; TTT chr11 5269696 5269717 5269701 5269696 -
tgcatctctaattttgtatctg

SEQ ID NO: 136045 - DNA, 22 bp, Artificial Sequence
  Synthetic oligonucleotide; TTT chr11 5269695 5269716 5269700 5269695 -
gcatctctaattttgtatctga

SEQ ID NO: 136046 - DNA, 22 bp, Artificial Sequence
  Synthetic oligonucleotide; TTG chr11 5269694 5269715 5269699 5269694 -
catctctaattttgtatctgat

SEQ ID NO: 136047 - DNA, 22 bp, Artificial Sequence
  Synthetic oligonucleotide; CTC chr11 5269688 5269709 5269693 5269688 -
taattttgtatctgatatggtg

SEQ ID NO: 136048 - DNA, 22 bp, Artificial Sequence
  Synthetic oligonucleotide; CTA chr11 5269686 5269707 5269691 5269686 -
attttgtatctgatatggtgtc

SEQ ID NO: 136049 - DNA, 22 bp, Artificial Sequence
  Synthetic oligonucleotide; TTT chr11 5269682 5269703 5269687 5269682 -
tgtatctgatatggtgtcattt

SEQ ID NO: 136050 - DNA, 22 bp, Artificial Sequence
  Synthetic oligonucleotide; TTT chr11 5269681 5269702 5269686 5269681 -
gtatctgatatggtgtcatttc

SEQ ID NO: 136051 - DNA, 22 bp, Artificial Sequence
  Synthetic oligonucleotide; TTG chr11 5269680 5269701 5269685 5269680 -
tatctgatatggtgtcatttca

SEQ ID NO: 136052 - DNA, 22 bp, Artificial Sequence
  Synthetic oligonucleotide; CTG chr11 5269674 5269695 5269679 5269674 -
atatggtgtcatttcatagact

SEQ ID NO: 136053 - DNA, 22 bp, Artificial Sequence
  Synthetic oligonucleotide; TTT chr11 5269660 5269681 5269665 5269660 -
catagactcctcgttgtttacc

SEQ ID NO: 136054 - DNA, 22 bp, Artificial Sequence
  Synthetic oligonucleotide; TTC chr11 5269659 5269680 5269664 5269659 -
atagactcctcgttgtttaccc

SEQ ID NO: 136055 - DNA, 22 bp, Artificial Sequence
  Synthetic oligonucleotide; CTC chr11 5269651 5269672 5269656 5269651 -
ctcgttgtttacccctggaccc

SEQ ID NO: 136056 - DNA, 22 bp, Artificial Sequence
  Synthetic oligonucleotide; CTC chr11 5269648 5269669 5269653 5269648 -
gttgtttacccctggacccaga

SEQ ID NO: 136057 - DNA, 22 bp, Artificial Sequence
  Synthetic oligonucleotide; TTG chr11 5269644 5269665 5269649 5269644 -
tttacccctggacccagagatt

SEQ ID NO: 136058 - DNA, 22 bp, Artificial Sequence
  Synthetic oligonucleotide; TTT chr11 5269641 5269662 5269646 5269641 -
acccctggacccagagattttt

SEQ ID NO: 136059 - DNA, 22 bp, Artificial Sequence
  Synthetic oligonucleotide; TTA chr11 5269640 5269661 5269645 5269640 -
cccctggacccagagatttttt

SEQ ID NO: 136060 - DNA, 22 bp, Artificial Sequence
  Synthetic oligonucleotide; CTG chr11 5269634 5269655 5269639 5269634 -
gacccagagattttttgacagc

SEQ ID NO: 136061 - DNA, 22 bp, Artificial Sequence
  Synthetic oligonucleotide; TTT chr11 5269621 5269642 5269626 5269621 -
tttgacagctttggaaacctgt

SEQ ID NO: 136062 - DNA, 22 bp, Artificial Sequence
  Synthetic oligonucleotide; TTT chr11 5269620 5269641 5269625 5269620 -
ttgacagctttggaaacctgtc

SEQ ID NO: 136063 - DNA, 22 bp, Artificial Sequence
  Synthetic oligonucleotide; TTT chr11 5269619 5269640 5269624 5269619 -
tgacagctttggaaacctgtcg

SEQ ID NO: 136064 - DNA, 22 bp, Artificial Sequence
  Synthetic oligonucleotide; TTT chr11 5269618 5269639 5269623 5269618 -
gacagctttggaaacctgtcgt

SEQ ID NO: 136065 - DNA, 22 bp, Artificial Sequence
  Synthetic oligonucleotide; TTG chr11 5269617 5269638 5269622 5269617 -
acagctttggaaacctgtcgtc

SEQ ID NO: 136066 - DNA, 22 bp, Artificial Sequence
  Synthetic oligonucleotide; CTT chr11 5269610 5269631 5269615 5269610 -
tggaaacctgtcgtctccctct

SEQ ID NO: 136067 - DNA, 22 bp, Artificial Sequence
  Synthetic oligonucleotide; TTT chr11 5269609 5269630 5269614 5269609 -
ggaaacctgtcgtctccctctg

SEQ ID NO: 136068 - DNA, 22 bp, Artificial Sequence
  Synthetic oligonucleotide; TTG chr11 5269608 5269629 5269613 5269608 -
gaaacctgtcgtctccctctgc

SEQ ID NO: 136069 - DNA, 22 bp, Artificial Sequence
  Synthetic oligonucleotide; CTG chr11 5269600 5269621 5269605 5269600 -
tcgtctccctctgccatcctgg

SEQ ID NO: 136070 - DNA, 22 bp, Artificial Sequence
  Synthetic oligonucleotide; CTC chr11 5269593 5269614 5269598 5269593 -
cctctgccatcctgggcaaccc

SEQ ID NO: 136071 - DNA, 22 bp, Artificial Sequence
  Synthetic oligonucleotide; CTC chr11 5269589 5269610 5269594 5269589 -
tgccatcctgggcaaccccaag

SEQ ID NO: 136072 - DNA, 22 bp, Artificial Sequence
  Synthetic oligonucleotide; CTG chr11 5269587 5269608 5269592 5269587 -
ccatcctgggcaaccccaaggt

SEQ ID NO: 136073 - DNA, 22 bp, Artificial Sequence
  Synthetic oligonucleotide; CTG chr11 5269579 5269600 5269584 5269579 -
ggcaaccccaaggtcaaggccc

SEQ ID NO: 136074 - DNA, 22 bp, Artificial Sequence
  Synthetic oligonucleotide; CTG chr11 5269540 5269561 5269545 5269540 -
acttcctttggagatgctatta

SEQ ID NO: 136075 - DNA, 22 bp, Artificial Sequence
  Synthetic oligonucleotide; CTT chr11 5269536 5269557 5269541 5269536 -
cctttggagatgctattaaaaa

SEQ ID NO: 136076 - DNA, 22 bp, Artificial Sequence
  Synthetic oligonucleotide; TTC chr11 5269535 5269556 5269540 5269535 -
ctttggagatgctattaaaaac

SEQ ID NO: 136077 - DNA, 22 bp, Artificial Sequence
  Synthetic oligonucleotide; CTT chr11 5269532 5269553 5269537 5269532 -
tggagatgctattaaaaacatg

SEQ ID NO: 136078 - DNA, 22 bp, Artificial Sequence
  Synthetic oligonucleotide; TTT chr11 5269531 5269552 5269536 5269531 -
ggagatgctattaaaaacatgg

SEQ ID NO: 136079 - DNA, 22 bp, Artificial Sequence
  Synthetic oligonucleotide; TTG chr11 5269530 5269551 5269535 5269530 -
gagatgctattaaaaacatgga

SEQ ID NO: 136080 - DNA, 22 bp, Artificial Sequence
  Synthetic oligonucleotide; CTA chr11 5269521 5269542 5269526 5269521 -
ttaaaaacatggacaacctcaa

SEQ ID NO: 136081 - DNA, 22 bp, Artificial Sequence
  Synthetic oligonucleotide; TTA chr11 5269518 5269539 5269523 5269518 -
aaaacatggacaacctcaagcc

SEQ ID NO: 136082 - DNA, 22 bp, Artificial Sequence
  Synthetic oligonucleotide; CTC chr11 5269501 5269522 5269506 5269501 -
aagcccgcctttgctaagctga

SEQ ID NO: 136083 - DNA, 22 bp, Artificial Sequence
  Synthetic oligonucleotide; CTT chr11 5269490 5269511 5269495 5269490 -
tgctaagctgagtgagctgcac

SEQ ID NO: 136084 - DNA, 22 bp, Artificial Sequence
  Synthetic oligonucleotide; TTT chr11 5269489 5269510 5269494 5269489 -
gctaagctgagtgagctgcact

SEQ ID NO: 136085 - DNA, 22 bp, Artificial Sequence
  Synthetic oligonucleotide; TTG chr11 5269488 5269509 5269493 5269488 -
ctaagctgagtgagctgcactg

SEQ ID NO: 136086 - DNA, 22 bp, Artificial Sequence
  Synthetic oligonucleotide; CTA chr11 5269485 5269506 5269490 5269485 -
agctgagtgagctgcactgtga

SEQ ID NO: 136087 - DNA, 22 bp, Artificial Sequence
  Synthetic oligonucleotide; CTG chr11 5269480 5269501 5269485 5269480 -
agtgagctgcactgtgacaagc

SEQ ID NO: 136088 - DNA, 22 bp, Artificial Sequence
  Synthetic oligonucleotide; CTG chr11 5269471 5269492 5269476 5269471 -
cactgtgacaagctgcatgtgg

SEQ ID NO: 136089 - DNA, 22 bp, Artificial Sequence
  Synthetic oligonucleotide; CTG chr11 5269466 5269487 5269471 5269466 -
tgacaagctgcatgtggatcct

SEQ ID NO: 136090 - DNA, 22 bp, Artificial Sequence
  Synthetic oligonucleotide; CTG chr11 5269456 5269477 5269461 5269456 -
catgtggatcctgagaacttca

SEQ ID NO: 136091 - DNA, 22 bp, Artificial Sequence
  Synthetic oligonucleotide; CTG chr11 5269443 5269464 5269448 5269443 -
agaacttcaaggtgagttcagg

SEQ ID NO: 136092 - DNA, 22 bp, Artificial Sequence
  Synthetic oligonucleotide; CTT chr11 5269436 5269457 5269441 5269436 -
caaggtgagttcaggtgctggt

SEQ ID NO: 136093 - DNA, 22 bp, Artificial Sequence
  Synthetic oligonucleotide; TTC chr11 5269435 5269456 5269440 5269435 -
aaggtgagttcaggtgctggtg

SEQ ID NO: 136094 - DNA, 22 bp, Artificial Sequence
  Synthetic oligonucleotide; TTC chr11 5269424 5269445 5269429 5269424 -
aggtgctggtgatgtgattttt

SEQ ID NO: 136095 - DNA, 22 bp, Artificial Sequence
  Synthetic oligonucleotide; CTG chr11 5269416 5269437 5269421 5269416 -
gtgatgtgattttttggcttta

SEQ ID NO: 136096 - DNA, 22 bp, Artificial Sequence
  Synthetic oligonucleotide; TTT chr11 5269404 5269425 5269409 5269404 -
tttggctttatattttgacatt

SEQ ID NO: 136097 - DNA, 22 bp, Artificial Sequence
  Synthetic oligonucleotide; TTT chr11 5269403 5269424 5269408 5269403 -
ttggctttatattttgacatta

SEQ ID NO: 136098 - DNA, 22 bp, Artificial Sequence
  Synthetic oligonucleotide; TTT chr11 5269402 5269423 5269407 5269402 -
tggctttatattttgacattaa

SEQ ID NO: 136099 - DNA, 22 bp, Artificial Sequence
  Synthetic oligonucleotide; TTT chr11 5269401 5269422 5269406 5269401 -
ggctttatattttgacattaat

SEQ ID NO: 136100 - DNA, 22 bp, Artificial Sequence
  Synthetic oligonucleotide; TTG chr11 5269400 5269421 5269405 5269400 -
gctttatattttgacattaatt

SEQ ID NO: 136101 - DNA, 22 bp, Artificial Sequence
  Synthetic oligonucleotide; CTT chr11 5269396 5269417 5269401 5269396 -
tatattttgacattaattgaag

SEQ ID NO: 136102 - DNA, 22 bp, Artificial Sequence
  Synthetic oligonucleotide; TTT chr11 5269395 5269416 5269400 5269395 -
atattttgacattaattgaagc

SEQ ID NO: 136103 - DNA, 22 bp, Artificial Sequence
  Synthetic oligonucleotide; TTA chr11 5269394 5269415 5269399 5269394 -
tattttgacattaattgaagct

SEQ ID NO: 136104 - DNA, 22 bp, Artificial Sequence
  Synthetic oligonucleotide; TTT chr11 5269389 5269410 5269394 5269389 -
tgacattaattgaagctcataa

SEQ ID NO: 136105 - DNA, 22 bp, Artificial Sequence
  Synthetic oligonucleotide; TTT chr11 5269388 5269409 5269393 5269388 -
gacattaattgaagctcataat

SEQ ID NO: 136106 - DNA, 22 bp, Artificial Sequence
  Synthetic oligonucleotide; TTG chr11 5269387 5269408 5269392 5269387 -
acattaattgaagctcataatc

SEQ ID NO: 136107 - DNA, 22 bp, Artificial Sequence
  Synthetic oligonucleotide; TTA chr11 5269381 5269402 5269386 5269381 -
attgaagctcataatcttattg

SEQ ID NO: 136108 - DNA, 22 bp, Artificial Sequence
  Synthetic oligonucleotide; TTG chr11 5269377 5269398 5269382 5269377 -
aagctcataatcttattggaaa

SEQ ID NO: 136109 - DNA, 22 bp, Artificial Sequence
  Synthetic oligonucleotide; CTC chr11 5269371 5269392 5269376 5269371 -
ataatcttattggaaagaccaa

SEQ ID NO: 136110 - DNA, 22 bp, Artificial Sequence
  Synthetic oligonucleotide; CTT chr11 5269363 5269384 5269368 5269363 -
attggaaagaccaacaaagatc

SEQ ID NO: 136111 - DNA, 22 bp, Artificial Sequence
  Synthetic oligonucleotide; TTA chr11 5269362 5269383 5269367 5269362 -
ttggaaagaccaacaaagatct

SEQ ID NO: 136112 - DNA, 22 bp, Artificial Sequence
  Synthetic oligonucleotide; TTG chr11 5269359 5269380 5269364 5269359 -
gaaagaccaacaaagatctcag

SEQ ID NO: 136113 - DNA, 22 bp, Artificial Sequence
  Synthetic oligonucleotide; CTC chr11 5269339 5269360 5269344 5269339 -
agaaatcatgggtcgagcttga

SEQ ID NO: 136114 - DNA, 22 bp, Artificial Sequence
  Synthetic oligonucleotide; CTT chr11 5269319 5269340 5269324 5269319 -
gatgttagaacagcagacttct

SEQ ID NO: 136115 - DNA, 22 bp, Artificial Sequence
  Synthetic oligonucleotide; TTG chr11 5269318 5269339 5269323 5269318 -
atgttagaacagcagacttcta

SEQ ID NO: 136116 - DNA, 22 bp, Artificial Sequence
  Synthetic oligonucleotide; TTA chr11 5269312 5269333 5269317 5269312 -
gaacagcagacttctagtgagc

SEQ ID NO: 136117 - DNA, 22 bp, Artificial Sequence
  Synthetic oligonucleotide; CTT chr11 5269299 5269320 5269304 5269299 -
ctagtgagcataaccaaaactt

SEQ ID NO: 136118 - DNA, 22 bp, Artificial Sequence
  Synthetic oligonucleotide; TTC chr11 5269298 5269319 5269303 5269298 -
tagtgagcataaccaaaactta

SEQ ID NO: 136119 - DNA, 22 bp, Artificial Sequence
  Synthetic oligonucleotide; CTA chr11 5269296 5269317 5269301 5269296 -
gtgagcataaccaaaacttaca

SEQ ID NO: 136120 - DNA, 22 bp, Artificial Sequence
  Synthetic oligonucleotide; CTT chr11 5269277 5269298 5269282 5269277 -
acatgattcagaactagtgaca

SEQ ID NO: 136121 - DNA, 22 bp, Artificial Sequence
  Synthetic oligonucleotide; TTA chr11 5269276 5269297 5269281 5269276 -
catgattcagaactagtgacag

SEQ ID NO: 136122 - DNA, 22 bp, Artificial Sequence
  Synthetic oligonucleotide; TTC chr11 5269268 5269289 5269273 5269268 -
agaactagtgacagtaaaggac

SEQ ID NO: 136123 - DNA, 22 bp, Artificial Sequence
  Synthetic oligonucleotide; CTA chr11 5269261 5269282 5269266 5269261 -
gtgacagtaaaggactactaac

SEQ ID NO: 136124 - DNA, 22 bp, Artificial Sequence
  Synthetic oligonucleotide; CTA chr11 5269244 5269265 5269249 5269244 -
ctaacagcctgaattggcttaa

SEQ ID NO: 136125 - DNA, 22 bp, Artificial Sequence
  Synthetic oligonucleotide; CTA chr11 5269241 5269262 5269246 5269241 -
acagcctgaattggcttaactt

SEQ ID NO: 136126 - DNA, 22 bp, Artificial Sequence
  Synthetic oligonucleotide; CTG chr11 5269233 5269254 5269238 5269233 -
aattggcttaacttttcaggaa

SEQ ID NO: 136127 - DNA, 22 bp, Artificial Sequence
  Synthetic oligonucleotide; TTG chr11 5269228 5269249 5269233 5269228 -
gcttaacttttcaggaaatctt

SEQ ID NO: 136128 - DNA, 22 bp, Artificial Sequence
  Synthetic oligonucleotide; CTT chr11 5269224 5269245 5269229 5269224 -
aacttttcaggaaatcttgcca

SEQ ID NO: 136129 - DNA, 22 bp, Artificial Sequence
  Synthetic oligonucleotide; TTA chr11 5269223 5269244 5269228 5269223 -
acttttcaggaaatcttgccag

SEQ ID NO: 136130 - DNA, 22 bp, Artificial Sequence
  Synthetic oligonucleotide; CTT chr11 5269219 5269240 5269224 5269219 -
ttcaggaaatcttgccagaact

SEQ ID NO: 136131 - DNA, 22 bp, Artificial Sequence
  Synthetic oligonucleotide; TTT chr11 5269218 5269239 5269223 5269218 -
tcaggaaatcttgccagaactt

SEQ ID NO: 136132 - DNA, 22 bp, Artificial Sequence
  Synthetic oligonucleotide; TTT chr11 5269217 5269238 5269222 5269217 -
caggaaatcttgccagaacttg

SEQ ID NO: 136133 - DNA, 22 bp, Artificial Sequence
  Synthetic oligonucleotide; TTC chr11 5269216 5269237 5269221 5269216 -
aggaaatcttgccagaacttga

SEQ ID NO: 136134 - DNA, 22 bp, Artificial Sequence
  Synthetic oligonucleotide; CTT chr11 5269206 5269227 5269211 5269206 -
gccagaacttgatgtgtttatc

SEQ ID NO: 136135 - DNA, 22 bp, Artificial Sequence
  Synthetic oligonucleotide; TTG chr11 5269205 5269226 5269210 5269205 -
ccagaacttgatgtgtttatcc

SEQ ID NO: 136136 - DNA, 22 bp, Artificial Sequence
  Synthetic oligonucleotide; CTT chr11 5269196 5269217 5269201 5269196 -
gatgtgtttatcccagagaatt

SEQ ID NO: 136137 - DNA, 22 bp, Artificial Sequence
  Synthetic oligonucleotide; TTG chr11 5269195 5269216 5269200 5269195 -
atgtgtttatcccagagaattg

SEQ ID NO: 136138 - DNA, 22 bp, Artificial Sequence
  Synthetic oligonucleotide; TTT chr11 5269187 5269208 5269192 5269187 -
atcccagagaattgtattatag

SEQ ID NO: 136139 - DNA, 22 bp, Artificial Sequence
  Synthetic oligonucleotide; TTA chr11 5269186 5269207 5269191 5269186 -
tcccagagaattgtattataga

SEQ ID NO: 136140 - DNA, 22 bp, Artificial Sequence
  Synthetic oligonucleotide; TTG chr11 5269173 5269194 5269178 5269173 -
tattatagaattgtagacttgt

SEQ ID NO: 136141 - DNA, 22 bp, Artificial Sequence
  Synthetic oligonucleotide; TTA chr11 5269168 5269189 5269173 5269168 -
tagaattgtagacttgtgaaag

SEQ ID NO: 136142 - DNA, 22 bp, Artificial Sequence
  Synthetic oligonucleotide; TTG chr11 5269160 5269181 5269165 5269160 -
tagacttgtgaaagaagaatga

SEQ ID NO: 136143 - DNA, 22 bp, Artificial Sequence
  Synthetic oligonucleotide; CTT chr11 5269153 5269174 5269158 5269153 -
gtgaaagaagaatgaaatttgg

SEQ ID NO: 136144 - DNA, 22 bp, Artificial Sequence
  Synthetic oligonucleotide; TTG chr11 5269152 5269173 5269157 5269152 -
tgaaagaagaatgaaatttggc

SEQ ID NO: 136145 - DNA, 22 bp, Artificial Sequence
  Synthetic oligonucleotide; TTT chr11 5269133 5269154 5269138 5269133 -
ggcttttggtagatgaaagtcc

SEQ ID NO: 136146 - DNA, 22 bp, Artificial Sequence
  Synthetic oligonucleotide; TTG chr11 5269132 5269153 5269137 5269132 -
gcttttggtagatgaaagtcca

SEQ ID NO: 136147 - DNA, 22 bp, Artificial Sequence
  Synthetic oligonucleotide; CTT chr11 5269128 5269149 5269133 5269128 -
ttggtagatgaaagtccatttc

SEQ ID NO: 136148 - DNA, 22 bp, Artificial Sequence
  Synthetic oligonucleotide; TTT chr11 5269127 5269148 5269132 5269127 -
tggtagatgaaagtccatttca

SEQ ID NO: 136149 - DNA, 22 bp, Artificial Sequence
  Synthetic oligonucleotide; TTT chr11 5269126 5269147 5269131 5269126 -
ggtagatgaaagtccatttcaa

SEQ ID NO: 136150 - DNA, 22 bp, Artificial Sequence
  Synthetic oligonucleotide; TTG chr11 5269125 5269146 5269130 5269125 -
gtagatgaaagtccatttcaag

SEQ ID NO: 136151 - DNA, 22 bp, Artificial Sequence
  Synthetic oligonucleotide; TTT chr11 5269107 5269128 5269112 5269107 -
caaggaaatagaaatgccttat

SEQ ID NO: 136152 - DNA, 22 bp, Artificial Sequence
  Synthetic oligonucleotide; TTC chr11 5269106 5269127 5269111 5269106 -
aaggaaatagaaatgccttatt

SEQ ID NO: 136153 - DNA, 22 bp, Artificial Sequence
  Synthetic oligonucleotide; CTT chr11 5269087 5269108 5269092 5269087 -
attttatgtgggtcatgataat

SEQ ID NO: 136154 - DNA, 22 bp, Artificial Sequence
  Synthetic oligonucleotide; TTA chr11 5269086 5269107 5269091 5269086 -
ttttatgtgggtcatgataatt

SEQ ID NO: 136155 - DNA, 22 bp, Artificial Sequence
  Synthetic oligonucleotide; TTT chr11 5269083 5269104 5269088 5269083 -
tatgtgggtcatgataattgag

SEQ ID NO: 136156 - DNA, 22 bp, Artificial Sequence
  Synthetic oligonucleotide; TTT chr11 5269082 5269103 5269087 5269082 -
atgtgggtcatgataattgagg

SEQ ID NO: 136157 - DNA, 22 bp, Artificial Sequence
  Synthetic oligonucleotide; TTA chr11 5269081 5269102 5269086 5269081 -
tgtgggtcatgataattgaggt

SEQ ID NO: 136158 - DNA, 22 bp, Artificial Sequence
  Synthetic oligonucleotide; TTG chr11 5269063 5269084 5269068 5269063 -
aggtttagaaagagatttttgc

SEQ ID NO: 136159 - DNA, 22 bp, Artificial Sequence
  Synthetic oligonucleotide; TTT chr11 5269057 5269078 5269062 5269057 -
agaaagagatttttgcaaaaaa

SEQ ID NO: 136160 - DNA, 22 bp, Artificial Sequence
  Synthetic oligonucleotide; TTA chr11 5269056 5269077 5269061 5269056 -
gaaagagatttttgcaaaaaaa

SEQ ID NO: 136161 - DNA, 22 bp, Artificial Sequence
  Synthetic oligonucleotide; TTT chr11 5269045 5269066 5269050 5269045 -
ttgcaaaaaaaataaaagattt

SEQ ID NO: 136162 - DNA, 22 bp, Artificial Sequence
  Synthetic oligonucleotide; TTT chr11 5269044 5269065 5269049 5269044 -
tgcaaaaaaaataaaagatttg

SEQ ID NO: 136163 - DNA, 22 bp, Artificial Sequence
  Synthetic oligonucleotide; TTT chr11 5269043 5269064 5269048 5269043 -
gcaaaaaaaataaaagatttgc

SEQ ID NO: 136164 - DNA, 22 bp, Artificial Sequence
  Synthetic oligonucleotide; TTG chr11 5269042 5269063 5269047 5269042 -
caaaaaaaataaaagatttgct

SEQ ID NO: 136165 - DNA, 22 bp, Artificial Sequence
  Synthetic oligonucleotide; TTT chr11 5269023 5269044 5269028 5269023 -
gctcaaagaaaaataagacaca

SEQ ID NO: 136166 - DNA, 22 bp, Artificial Sequence
  Synthetic oligonucleotide; TTG chr11 5269022 5269043 5269027 5269022 -
ctcaaagaaaaataagacacat

SEQ ID NO: 136167 - DNA, 22 bp, Artificial Sequence
  Synthetic oligonucleotide; CTC chr11 5269019 5269040 5269024 5269019 -
aaagaaaaataagacacatttt

SEQ ID NO: 136168 - DNA, 22 bp, Artificial Sequence
  Synthetic oligonucleotide; TTT chr11 5268998 5269019 5269003 5268998 -
tctaaaatatgttaaatttccc

SEQ ID NO: 136169 - DNA, 22 bp, Artificial Sequence
  Synthetic oligonucleotide; TTT chr11 5268997 5269018 5269002 5268997 -
ctaaaatatgttaaatttccca

SEQ ID NO: 136170 - DNA, 22 bp, Artificial Sequence
  Synthetic oligonucleotide; TTC chr11 5268996 5269017 5269001 5268996 -
taaaatatgttaaatttcccat

SEQ ID NO: 136171 - DNA, 22 bp, Artificial Sequence
  Synthetic oligonucleotide; CTA chr11 5268994 5269015 5268999 5268994 -
aaatatgttaaatttcccatca

SEQ ID NO: 136172 - DNA, 22 bp, Artificial Sequence
  Synthetic oligonucleotide; TTA chr11 5268984 5269005 5268989 5268984 -
aatttcccatcagtattgtgac

SEQ ID NO: 136173 - DNA, 22 bp, Artificial Sequence
  Synthetic oligonucleotide; TTT chr11 5268979 5269000 5268984 5268979 -
cccatcagtattgtgaccaagt

SEQ ID NO: 136174 - DNA, 22 bp, Artificial Sequence
  Synthetic oligonucleotide; TTC chr11 5268978 5268999 5268983 5268978 -
ccatcagtattgtgaccaagtg

SEQ ID NO: 136175 - DNA, 22 bp, Artificial Sequence
  Synthetic oligonucleotide; TTG chr11 5268966 5268987 5268971 5268966 -
tgaccaagtgaaggcttgtttc

SEQ ID NO: 136176 - DNA, 22 bp, Artificial Sequence
  Synthetic oligonucleotide; CTT chr11 5268949 5268970 5268954 5268949 -
gtttccgaatttgttggggatt

SEQ ID NO: 136177 - DNA, 22 bp, Artificial Sequence
  Synthetic oligonucleotide; TTG chr11 5268948 5268969 5268953 5268948 -
tttccgaatttgttggggattt

SEQ ID NO: 136178 - DNA, 22 bp, Artificial Sequence
  Synthetic oligonucleotide; TTT chr11 5268945 5268966 5268950 5268945 -
ccgaatttgttggggattttaa

SEQ ID NO: 136179 - DNA, 22 bp, Artificial Sequence
  Synthetic oligonucleotide; TTC chr11 5268944 5268965 5268949 5268944 -
cgaatttgttggggattttaaa

SEQ ID NO: 136180 - DNA, 22 bp, Artificial Sequence
  Synthetic oligonucleotide; TTT chr11 5268937 5268958 5268942 5268937 -
gttggggattttaaactcccgc

SEQ ID NO: 136181 - DNA, 22 bp, Artificial Sequence
  Synthetic oligonucleotide; TTG chr11 5268936 5268957 5268941 5268936 -
ttggggattttaaactcccgct

SEQ ID NO: 136182 - DNA, 22 bp, Artificial Sequence
  Synthetic oligonucleotide; TTG chr11 5268933 5268954 5268938 5268933 -
gggattttaaactcccgctgag

SEQ ID NO: 136183 - DNA, 22 bp, Artificial Sequence
  Synthetic oligonucleotide; TTT chr11 5268926 5268947 5268931 5268926 -
taaactcccgctgagaactctt

SEQ ID NO: 136184 - DNA, 22 bp, Artificial Sequence
  Synthetic oligonucleotide; TTT chr11 5268925 5268946 5268930 5268925 -
aaactcccgctgagaactcttg

SEQ ID NO: 136185 - DNA, 22 bp, Artificial Sequence
  Synthetic oligonucleotide; TTA chr11 5268924 5268945 5268929 5268924 -
aactcccgctgagaactcttgc

SEQ ID NO: 136186 - DNA, 22 bp, Artificial Sequence
  Synthetic oligonucleotide; CTC chr11 5268919 5268940 5268924 5268919 -
ccgctgagaactcttgcagcac

SEQ ID NO: 136187 - DNA, 22 bp, Artificial Sequence
  Synthetic oligonucleotide; CTG chr11 5268913 5268934 5268918 5268913 -
agaactcttgcagcactcacat

SEQ ID NO: 136188 - DNA, 22 bp, Artificial Sequence
  Synthetic oligonucleotide; CTC chr11 5268906 5268927 5268911 5268906 -
ttgcagcactcacattctacat

SEQ ID NO: 136189 - DNA, 22 bp, Artificial Sequence
  Synthetic oligonucleotide; CTT chr11 5268904 5268925 5268909 5268904 -
gcagcactcacattctacattt

SEQ ID NO: 136190 - DNA, 22 bp, Artificial Sequence
  Synthetic oligonucleotide; TTG chr11 5268903 5268924 5268908 5268903 -
cagcactcacattctacattta

SEQ ID NO: 136191 - DNA, 22 bp, Artificial Sequence
  Synthetic oligonucleotide; CTC chr11 5268895 5268916 5268900 5268895 -
acattctacatttacaaaaatt

SEQ ID NO: 136192 - DNA, 22 bp, Artificial Sequence
  Synthetic oligonucleotide; TTC chr11 5268889 5268910 5268894 5268889 -
tacatttacaaaaattagacaa

SEQ ID NO: 136193 - DNA, 22 bp, Artificial Sequence
  Synthetic oligonucleotide; CTA chr11 5268887 5268908 5268892 5268887 -
catttacaaaaattagacaatt

SEQ ID NO: 136194 - DNA, 22 bp, Artificial Sequence
  Synthetic oligonucleotide; TTT chr11 5268882 5268903 5268887 5268882 -
acaaaaattagacaattgctta

SEQ ID NO: 136195 - DNA, 22 bp, Artificial Sequence
  Synthetic oligonucleotide; TTA chr11 5268881 5268902 5268886 5268881 -
caaaaattagacaattgcttaa

SEQ ID NO: 136196 - DNA, 22 bp, Artificial Sequence
  Synthetic oligonucleotide; TTA chr11 5268872 5268893 5268877 5268872 -
gacaattgcttaaagaaaaaca

SEQ ID NO: 136197 - DNA, 22 bp, Artificial Sequence
  Synthetic oligonucleotide; TTG chr11 5268864 5268885 5268869 5268864 -
cttaaagaaaaacagggagaga

SEQ ID NO: 136198 - DNA, 22 bp, Artificial Sequence
  Synthetic oligonucleotide; CTT chr11 5268861 5268882 5268866 5268861 -
aaagaaaaacagggagagaggg

SEQ ID NO: 136199 - DNA, 22 bp, Artificial Sequence
  Synthetic oligonucleotide; TTA chr11 5268860 5268881 5268865 5268860 -
aagaaaaacagggagagaggga

SEQ ID NO: 136200 - DNA, 22 bp, Artificial Sequence
  Synthetic oligonucleotide; CTG chr11 5268824 5268845 5268829 5268824 -
gtaaaatggggaagggggtgag

SEQ ID NO: 136201 - DNA, 22 bp, Artificial Sequence
  Synthetic oligonucleotide; TTG chr11 5268780 5268801 5268785 5268780 -
aatgtagggctcatagaataaa

SEQ ID NO: 136202 - DNA, 22 bp, Artificial Sequence
  Synthetic oligonucleotide; CTC chr11 5268768 5268789 5268773 5268768 -
atagaataaaattgaacctaag

SEQ ID NO: 136203 - DNA, 22 bp, Artificial Sequence
  Synthetic oligonucleotide; TTG chr11 5268754 5268775 5268759 5268754 -
aacctaagctcatctgaatttt

SEQ ID NO: 136204 - DNA, 22 bp, Artificial Sequence
  Synthetic oligonucleotide; CTA chr11 5268748 5268769 5268753 5268748 -
agctcatctgaattttttgggt

SEQ ID NO: 136205 - DNA, 22 bp, Artificial Sequence
  Synthetic oligonucleotide; CTC chr11 5268743 5268764 5268748 5268743 -
atctgaattttttgggtgggca

SEQ ID NO: 136206 - DNA, 22 bp, Artificial Sequence
  Synthetic oligonucleotide; CTG chr11 5268738 5268759 5268743 5268738 -
aattttttgggtgggcacaaac

SEQ ID NO: 136207 - DNA, 22 bp, Artificial Sequence
  Synthetic oligonucleotide; TTT chr11 5268733 5268754 5268738 5268733 -
tttgggtgggcacaaaccttgg

SEQ ID NO: 136208 - DNA, 22 bp, Artificial Sequence
  Synthetic oligonucleotide; TTT chr11 5268732 5268753 5268737 5268732 -
ttgggtgggcacaaaccttgga

SEQ ID NO: 136209 - DNA, 22 bp, Artificial Sequence
  Synthetic oligonucleotide; TTT chr11 5268731 5268752 5268736 5268731 -
tgggtgggcacaaaccttggaa

SEQ ID NO: 136210 - DNA, 22 bp, Artificial Sequence
  Synthetic oligonucleotide; TTT chr11 5268730 5268751 5268735 5268730 -
gggtgggcacaaaccttggaac

SEQ ID NO: 136211 - DNA, 22 bp, Artificial Sequence
  Synthetic oligonucleotide; TTG chr11 5268729 5268750 5268734 5268729 -
ggtgggcacaaaccttggaaca

SEQ ID NO: 136212 - DNA, 22 bp, Artificial Sequence
  Synthetic oligonucleotide; CTT chr11 5268713 5268734 5268718 5268713 -
ggaacagtttgaggtcagggtt

SEQ ID NO: 136213 - DNA, 22 bp, Artificial Sequence
  Synthetic oligonucleotide; TTG chr11 5268712 5268733 5268717 5268712 -
gaacagtttgaggtcagggttg

SEQ ID NO: 136214 - DNA, 22 bp, Artificial Sequence
  Synthetic oligonucleotide; TTT chr11 5268703 5268724 5268708 5268703 -
gaggtcagggttgtctaggaat

SEQ ID NO: 136215 - DNA, 22 bp, Artificial Sequence
  Synthetic oligonucleotide; TTG chr11 5268702 5268723 5268707 5268702 -
aggtcagggttgtctaggaatg

SEQ ID NO: 136216 - DNA, 22 bp, Artificial Sequence
  Synthetic oligonucleotide; TTG chr11 5268690 5268711 5268695 5268690 -
tctaggaatgtaggtataaagc

SEQ ID NO: 136217 - DNA, 22 bp, Artificial Sequence
  Synthetic oligonucleotide; CTA chr11 5268686 5268707 5268691 5268686 -
ggaatgtaggtataaagccgtt

SEQ ID NO: 136218 - DNA, 22 bp, Artificial Sequence
  Synthetic oligonucleotide; TTT chr11 5268663 5268684 5268668 5268663 -
ttgtttgtttgtttgttttttc

SEQ ID NO: 136219 - DNA, 22 bp, Artificial Sequence
  Synthetic oligonucleotide; TTT chr11 5268662 5268683 5268667 5268662 -
tgtttgtttgtttgttttttca

SEQ ID NO: 136220 - DNA, 22 bp, Artificial Sequence
  Synthetic oligonucleotide; TTT chr11 5268661 5268682 5268666 5268661 -
gtttgtttgtttgttttttcat

SEQ ID NO: 136221 - DNA, 22 bp, Artificial Sequence
  Synthetic oligonucleotide; TTG chr11 5268660 5268681 5268665 5268660 -
tttgtttgtttgttttttcatc

SEQ ID NO: 136222 - DNA, 22 bp, Artificial Sequence
  Synthetic oligonucleotide; TTT chr11 5268657 5268678 5268662 5268657 -
gtttgtttgttttttcatcaag

SEQ ID NO: 136223 - DNA, 22 bp, Artificial Sequence
  Synthetic oligonucleotide; TTG chr11 5268656 5268677 5268661 5268656 -
tttgtttgttttttcatcaagt

SEQ ID NO: 136224 - DNA, 22 bp, Artificial Sequence
  Synthetic oligonucleotide; TTT chr11 5268653 5268674 5268658 5268653 -
gtttgttttttcatcaagttgt

SEQ ID NO: 136225 - DNA, 22 bp, Artificial Sequence
  Synthetic oligonucleotide; TTG chr11 5268652 5268673 5268657 5268652 -
tttgttttttcatcaagttgtt

SEQ ID NO: 136226 - DNA, 22 bp, Artificial Sequence
  Synthetic oligonucleotide; TTT chr11 5268649 5268670 5268654 5268649 -
gttttttcatcaagttgttttc

SEQ ID NO: 136227 - DNA, 22 bp, Artificial Sequence
  Synthetic oligonucleotide; TTG chr11 5268648 5268669 5268653 5268648 -
ttttttcatcaagttgttttcg

SEQ ID NO: 136228 - DNA, 22 bp, Artificial Sequence
  Synthetic oligonucleotide; TTT chr11 5268645 5268666 5268650 5268645 -
tttcatcaagttgttttcggaa

SEQ ID NO: 136229 - DNA, 22 bp, Artificial Sequence
  Synthetic oligonucleotide; TTT chr11 5268644 5268665 5268649 5268644 -
ttcatcaagttgttttcggaaa

SEQ ID NO: 136230 - DNA, 22 bp, Artificial Sequence
  Synthetic oligonucleotide; TTT chr11 5268643 5268664 5268648 5268643 -
tcatcaagttgttttcggaaac

SEQ ID NO: 136231 - DNA, 22 bp, Artificial Sequence
  Synthetic oligonucleotide; TTT chr11 5268642 5268663 5268647 5268642 -
catcaagttgttttcggaaact

SEQ ID NO: 136232 - DNA, 22 bp, Artificial Sequence
  Synthetic oligonucleotide; TTC chr11 5268641 5268662 5268646 5268641 -
atcaagttgttttcggaaactt

SEQ ID NO: 136233 - DNA, 22 bp, Artificial Sequence
  Synthetic oligonucleotide; TTG chr11 5268632 5268653 5268637 5268632 -
ttttcggaaacttctactcaac

SEQ ID NO: 136234 - DNA, 22 bp, Artificial Sequence
  Synthetic oligonucleotide; TTT chr11 5268629 5268650 5268634 5268629 -
tcggaaacttctactcaacatg

SEQ ID NO: 136235 - DNA, 22 bp, Artificial Sequence
  Synthetic oligonucleotide; TTT chr11 5268628 5268649 5268633 5268628 -
cggaaacttctactcaacatgc

SEQ ID NO: 136236 - DNA, 22 bp, Artificial Sequence
  Synthetic oligonucleotide; TTC chr11 5268627 5268648 5268632 5268627 -
ggaaacttctactcaacatgcc

SEQ ID NO: 136237 - DNA, 22 bp, Artificial Sequence
  Synthetic oligonucleotide; CTT chr11 5268619 5268640 5268624 5268619 -
ctactcaacatgcctgtgtgtt

SEQ ID NO: 136238 - DNA, 22 bp, Artificial Sequence
  Synthetic oligonucleotide; TTC chr11 5268618 5268639 5268623 5268618 -
tactcaacatgcctgtgtgtta

SEQ ID NO: 136239 - DNA, 22 bp, Artificial Sequence
  Synthetic oligonucleotide; CTA chr11 5268616 5268637 5268621 5268616 -
ctcaacatgcctgtgtgttatt

SEQ ID NO: 136240 - DNA, 22 bp, Artificial Sequence
  Synthetic oligonucleotide; CTC chr11 5268613 5268634 5268618 5268613 -
aacatgcctgtgtgttattttg

SEQ ID NO: 136241 - DNA, 22 bp, Artificial Sequence
  Synthetic oligonucleotide; CTG chr11 5268603 5268624 5268608 5268603 -
tgtgttattttgtcttttgcct

SEQ ID NO: 136242 - DNA, 22 bp, Artificial Sequence
  Synthetic oligonucleotide; TTA chr11 5268596 5268617 5268601 5268596 -
ttttgtcttttgcctaacagct

SEQ ID NO: 136243 - DNA, 22 bp, Artificial Sequence
  Synthetic oligonucleotide; TTT chr11 5268593 5268614 5268598 5268593 -
tgtcttttgcctaacagctcct

SEQ ID NO: 136244 - DNA, 22 bp, Artificial Sequence
  Synthetic oligonucleotide; TTT chr11 5268592 5268613 5268597 5268592 -
gtcttttgcctaacagctcctg

SEQ ID NO: 136245 - DNA, 22 bp, Artificial Sequence
  Synthetic oligonucleotide; TTG chr11 5268591 5268612 5268596 5268591 -
tcttttgcctaacagctcctgg

SEQ ID NO: 136246 - DNA, 22 bp, Artificial Sequence
  Synthetic oligonucleotide; CTT chr11 5268587 5268608 5268592 5268587 -
ttgcctaacagctcctgggtaa

SEQ ID NO: 136247 - DNA, 22 bp, Artificial Sequence
  Synthetic oligonucleotide; TTT chr11 5268586 5268607 5268591 5268586 -
tgcctaacagctcctgggtaac

SEQ ID NO: 136248 - DNA, 22 bp, Artificial Sequence
  Synthetic oligonucleotide; TTT chr11 5268585 5268606 5268590 5268585 -
gcctaacagctcctgggtaacg

SEQ ID NO: 136249 - DNA, 22 bp, Artificial Sequence
  Synthetic oligonucleotide; TTG chr11 5268584 5268605 5268589 5268584 -
cctaacagctcctgggtaacgt

SEQ ID NO: 136250 - DNA, 22 bp, Artificial Sequence
  Synthetic oligonucleotide; CTA chr11 5268580 5268601 5268585 5268580 -
acagctcctgggtaacgtgatg

SEQ ID NO: 136251 - DNA, 22 bp, Artificial Sequence
  Synthetic oligonucleotide; CTC chr11 5268573 5268594 5268578 5268573 -
ctgggtaacgtgatggtgatta

SEQ ID NO: 136252 - DNA, 22 bp, Artificial Sequence
  Synthetic oligonucleotide; CTG chr11 5268570 5268591 5268575 5268570 -
ggtaacgtgatggtgattattc

SEQ ID NO: 136253 - DNA, 22 bp, Artificial Sequence
  Synthetic oligonucleotide; TTA chr11 5268551 5268572 5268556 5268551 -
ttctggctactcactttggcaa

SEQ ID NO: 136254 - DNA, 22 bp, Artificial Sequence
  Synthetic oligonucleotide; TTC chr11 5268548 5268569 5268553 5268548 -
tggctactcactttggcaagga

SEQ ID NO: 136255 - DNA, 22 bp, Artificial Sequence
  Synthetic oligonucleotide; CTG chr11 5268546 5268567 5268551 5268546 -
gctactcactttggcaaggagt

SEQ ID NO: 136256 - DNA, 22 bp, Artificial Sequence
  Synthetic oligonucleotide; CTA chr11 5268542 5268563 5268547 5268542 -
ctcactttggcaaggagttcac

SEQ ID NO: 136257 - DNA, 22 bp, Artificial Sequence
  Synthetic oligonucleotide; CTC chr11 5268539 5268560 5268544 5268539 -
actttggcaaggagttcacccc

SEQ ID NO: 136258 - DNA, 22 bp, Artificial Sequence
  Synthetic oligonucleotide; CTT chr11 5268535 5268556 5268540 5268535 -
tggcaaggagttcacccctgaa

SEQ ID NO: 136259 - DNA, 22 bp, Artificial Sequence
  Synthetic oligonucleotide; TTT chr11 5268534 5268555 5268539 5268534 -
ggcaaggagttcacccctgaag

SEQ ID NO: 136260 - DNA, 22 bp, Artificial Sequence
  Synthetic oligonucleotide; TTG chr11 5268533 5268554 5268538 5268533 -
gcaaggagttcacccctgaagt

SEQ ID NO: 136261 - DNA, 22 bp, Artificial Sequence
  Synthetic oligonucleotide; TTC chr11 5268522 5268543 5268527 5268522 -
acccctgaagtgcaggctgcct

SEQ ID NO: 136262 - DNA, 22 bp, Artificial Sequence
  Synthetic oligonucleotide; CTG chr11 5268515 5268536 5268520 5268515 -
aagtgcaggctgcctggcagaa

SEQ ID NO: 136263 - DNA, 22 bp, Artificial Sequence
  Synthetic oligonucleotide; CTG chr11 5268503 5268524 5268508 5268503 -
cctggcagaagctggtgtctgc

SEQ ID NO: 136264 - DNA, 22 bp, Artificial Sequence
  Synthetic oligonucleotide; CTG chr11 5268499 5268520 5268504 5268499 -
gcagaagctggtgtctgctgtc

SEQ ID NO: 136265 - DNA, 22 bp, Artificial Sequence
  Synthetic oligonucleotide; CTG chr11 5268489 5268510 5268494 5268489 -
gtgtctgctgtcgccattgccc

SEQ ID NO: 136266 - DNA, 22 bp, Artificial Sequence
  Synthetic oligonucleotide; CTG chr11 5268482 5268503 5268487 5268482 -
ctgtcgccattgccctggccca

SEQ ID NO: 136267 - DNA, 22 bp, Artificial Sequence
  Synthetic oligonucleotide; CTG chr11 5268479 5268500 5268484 5268479 -
tcgccattgccctggcccataa

SEQ ID NO: 136268 - DNA, 22 bp, Artificial Sequence
  Synthetic oligonucleotide; TTG chr11 5268470 5268491 5268475 5268470 -
ccctggcccataagtaccactg

SEQ ID NO: 136269 - DNA, 22 bp, Artificial Sequence
  Synthetic oligonucleotide; CTG chr11 5268465 5268486 5268470 5268465 -
gcccataagtaccactgagttc

SEQ ID NO: 136270 - DNA, 22 bp, Artificial Sequence
  Synthetic oligonucleotide; CTG chr11 5268448 5268469 5268453 5268448 -
agttctcttccagtttgcaggt

SEQ ID NO: 136271 - DNA, 22 bp, Artificial Sequence
  Synthetic oligonucleotide; TTC chr11 5268443 5268464 5268448 5268443 -
tcttccagtttgcaggtgttcc

SEQ ID NO: 136272 - DNA, 22 bp, Artificial Sequence
  Synthetic oligonucleotide; CTC chr11 5268441 5268462 5268446 5268441 -
ttccagtttgcaggtgttcctg

SEQ ID NO: 136273 - DNA, 22 bp, Artificial Sequence
  Synthetic oligonucleotide; CTT chr11 5268439 5268460 5268444 5268439 -
ccagtttgcaggtgttcctgtg

SEQ ID NO: 136274 - DNA, 22 bp, Artificial Sequence
  Synthetic oligonucleotide; TTC chr11 5268438 5268459 5268443 5268438 -
cagtttgcaggtgttcctgtga

SEQ ID NO: 136275 - DNA, 22 bp, Artificial Sequence
  Synthetic oligonucleotide; TTT chr11 5268432 5268453 5268437 5268432 -
gcaggtgttcctgtgaccctga

SEQ ID NO: 136276 - DNA, 22 bp, Artificial Sequence
  Synthetic oligonucleotide; TTG chr11 5268431 5268452 5268436 5268431 -
caggtgttcctgtgaccctgac

SEQ ID NO: 136277 - DNA, 22 bp, Artificial Sequence
  Synthetic oligonucleotide; TTC chr11 5268422 5268443 5268427 5268422 -
ctgtgaccctgacaccctcctt

SEQ ID NO: 136278 - DNA, 22 bp, Artificial Sequence
  Synthetic oligonucleotide; CTG chr11 5268419 5268440 5268424 5268419 -
tgaccctgacaccctccttctg

SEQ ID NO: 136279 - DNA, 22 bp, Artificial Sequence
  Synthetic oligonucleotide; CTG chr11 5268411 5268432 5268416 5268411 -
acaccctccttctgcacatggg

SEQ ID NO: 136280 - DNA, 22 bp, Artificial Sequence
  Synthetic oligonucleotide; CTC chr11 5268403 5268424 5268408 5268403 -
cttctgcacatggggactgggc

SEQ ID NO: 136281 - DNA, 22 bp, Artificial Sequence
  Synthetic oligonucleotide; CTT chr11 5268400 5268421 5268405 5268400 -
ctgcacatggggactgggcttg

SEQ ID NO: 136282 - DNA, 22 bp, Artificial Sequence
  Synthetic oligonucleotide; TTC chr11 5268399 5268420 5268404 5268399 -
tgcacatggggactgggcttgg

SEQ ID NO: 136283 - DNA, 22 bp, Artificial Sequence
  Synthetic oligonucleotide; CTG chr11 5268397 5268418 5268402 5268397 -
cacatggggactgggcttggcc

SEQ ID NO: 136284 - DNA, 22 bp, Artificial Sequence
  Synthetic oligonucleotide; CTG chr11 5268384 5268405 5268389 5268384 -
ggcttggccttgagagaaagcc

SEQ ID NO: 136285 - DNA, 22 bp, Artificial Sequence
  Synthetic oligonucleotide; CTT chr11 5268379 5268400 5268384 5268379 -
ggccttgagagaaagccttctg

SEQ ID NO: 136286 - DNA, 22 bp, Artificial Sequence
  Synthetic oligonucleotide; TTG chr11 5268378 5268399 5268383 5268378 -
gccttgagagaaagccttctgt

SEQ ID NO: 136287 - DNA, 22 bp, Artificial Sequence
  Synthetic oligonucleotide; CTT chr11 5268373 5268394 5268378 5268373 -
gagagaaagccttctgtttaat

SEQ ID NO: 136288 - DNA, 22 bp, Artificial Sequence
  Synthetic oligonucleotide; TTG chr11 5268372 5268393 5268377 5268372 -
agagaaagccttctgtttaata

SEQ ID NO: 136289 - DNA, 22 bp, Artificial Sequence
  Synthetic oligonucleotide; CTT chr11 5268360 5268381 5268365 5268360 -
ctgtttaataaagtacattttc

SEQ ID NO: 136290 - DNA, 22 bp, Artificial Sequence
  Synthetic oligonucleotide; TTC chr11 5268359 5268380 5268364 5268359 -
tgtttaataaagtacattttct

SEQ ID NO: 136291 - DNA, 22 bp, Artificial Sequence
  Synthetic oligonucleotide; CTG chr11 5268357 5268378 5268362 5268357 -
tttaataaagtacattttcttc

SEQ ID NO: 136292 - DNA, 22 bp, Artificial Sequence
  Synthetic oligonucleotide; TTT chr11 5268354 5268375 5268359 5268354 -
aataaagtacattttcttcagt

SEQ ID NO: 136293 - DNA, 22 bp, Artificial Sequence
  Synthetic oligonucleotide; TTA chr11 5268353 5268374 5268358 5268353 -
ataaagtacattttcttcagta

SEQ ID NO: 136294 - DNA, 22 bp, Artificial Sequence
  Synthetic oligonucleotide; TTT chr11 5268340 5268361 5268345 5268340 -
tcttcagtaatcaaaaattgca

SEQ ID NO: 136295 - DNA, 22 bp, Artificial Sequence
  Synthetic oligonucleotide; TTT chr11 5268339 5268360 5268344 5268339 -
cttcagtaatcaaaaattgcaa

SEQ ID NO: 136296 - DNA, 22 bp, Artificial Sequence
  Synthetic oligonucleotide; TTC chr11 5268338 5268359 5268343 5268338 -
ttcagtaatcaaaaattgcaat

SEQ ID NO: 136297 - DNA, 22 bp, Artificial Sequence
  Synthetic oligonucleotide; CTT chr11 5268336 5268357 5268341 5268336 -
cagtaatcaaaaattgcaattt

SEQ ID NO: 136298 - DNA, 22 bp, Artificial Sequence
  Synthetic oligonucleotide; TTC chr11 5268335 5268356 5268340 5268335 -
agtaatcaaaaattgcaatttt

SEQ ID NO: 136299 - DNA, 22 bp, Artificial Sequence
  Synthetic oligonucleotide; TTG chr11 5268320 5268341 5268325 5268320 -
caattttatcttctccatcttt

SEQ ID NO: 136300 - DNA, 22 bp, Artificial Sequence
  Synthetic oligonucleotide; TTT chr11 5268314 5268335 5268319 5268314 -
tatcttctccatcttttactct

SEQ ID NO: 136301 - DNA, 22 bp, Artificial Sequence
  Synthetic oligonucleotide; TTT chr11 5268313 5268334 5268318 5268313 -
atcttctccatcttttactctt

SEQ ID NO: 136302 - DNA, 22 bp, Artificial Sequence
  Synthetic oligonucleotide; TTA chr11 5268312 5268333 5268317 5268312 -
tcttctccatcttttactcttg

SEQ ID NO: 136303 - DNA, 22 bp, Artificial Sequence
  Synthetic oligonucleotide; CTT chr11 5268308 5268329 5268313 5268308 -
ctccatcttttactcttgtgtt

SEQ ID NO: 136304 - DNA, 22 bp, Artificial Sequence
  Synthetic oligonucleotide; TTC chr11 5268307 5268328 5268312 5268307 -
tccatcttttactcttgtgtta

SEQ ID NO: 136305 - DNA, 22 bp, Artificial Sequence
  Synthetic oligonucleotide; CTC chr11 5268305 5268326 5268310 5268305 -
catcttttactcttgtgttaaa

SEQ ID NO: 136306 - DNA, 22 bp, Artificial Sequence
  Synthetic oligonucleotide; CTT chr11 5268299 5268320 5268304 5268299 -
ttactcttgtgttaaaaggaaa

SEQ ID NO: 136307 - DNA, 22 bp, Artificial Sequence
  Synthetic oligonucleotide; TTT chr11 5268298 5268319 5268303 5268298 -
tactcttgtgttaaaaggaaaa

SEQ ID NO: 136308 - DNA, 22 bp, Artificial Sequence
  Synthetic oligonucleotide; TTT chr11 5268297 5268318 5268302 5268297 -
actcttgtgttaaaaggaaaaa

SEQ ID NO: 136309 - DNA, 22 bp, Artificial Sequence
  Synthetic oligonucleotide; TTA chr11 5268296 5268317 5268301 5268296 -
ctcttgtgttaaaaggaaaaag

SEQ ID NO: 136310 - DNA, 22 bp, Artificial Sequence
  Synthetic oligonucleotide; CTC chr11 5268293 5268314 5268298 5268293 -
ttgtgttaaaaggaaaaagtgt

SEQ ID NO: 136311 - DNA, 22 bp, Artificial Sequence
  Synthetic oligonucleotide; CTT chr11 5268291 5268312 5268296 5268291 -
gtgttaaaaggaaaaagtgttc

SEQ ID NO: 136312 - DNA, 22 bp, Artificial Sequence
  Synthetic oligonucleotide; TTG chr11 5268290 5268311 5268295 5268290 -
tgttaaaaggaaaaagtgttca

SEQ ID NO: 136313 - DNA, 22 bp, Artificial Sequence
  Synthetic oligonucleotide; TTA chr11 5268285 5268306 5268290 5268285 -
aaaggaaaaagtgttcatgggc

SEQ ID NO: 136314 - DNA, 22 bp, Artificial Sequence
  Synthetic oligonucleotide; TTC chr11 5268269 5268290 5268274 5268269 -
atgggctgagggatggagagaa

SEQ ID NO: 136315 - DNA, 22 bp, Artificial Sequence
  Synthetic oligonucleotide; CTG chr11 5268261 5268282 5268266 5268261 -
agggatggagagaaacatagga

SEQ ID NO: 136316 - DNA, 22 bp, Artificial Sequence
  Synthetic oligonucleotide; CTT chr11 5268225 5268246 5268230 5268225 -
ccttaagaaatgtatgggggct

SEQ ID NO: 136317 - DNA, 22 bp, Artificial Sequence
  Synthetic oligonucleotide; TTC chr11 5268224 5268245 5268229 5268224 -
cttaagaaatgtatgggggctt

SEQ ID NO: 136318 - DNA, 22 bp, Artificial Sequence
  Synthetic oligonucleotide; CTT chr11 5268221 5268242 5268226 5268221 -
aagaaatgtatgggggcttgta

SEQ ID NO: 136319 - DNA, 22 bp, Artificial Sequence
  Synthetic oligonucleotide; TTA chr11 5268220 5268241 5268225 5268220 -
agaaatgtatgggggcttgtaa

SEQ ID NO: 136320 - DNA, 22 bp, Artificial Sequence
  Synthetic oligonucleotide; CTT chr11 5268202 5268223 5268207 5268202 -
gtaaaattaatgtggatgttat

SEQ ID NO: 136321 - DNA, 22 bp, Artificial Sequence
  Synthetic oligonucleotide; TTG chr11 5268201 5268222 5268206 5268201 -
taaaattaatgtggatgttatg

SEQ ID NO: 136322 - DNA, 22 bp, Artificial Sequence
  Synthetic oligonucleotide; TTA chr11 5268193 5268214 5268198 5268193 -
atgtggatgttatgggagaatt

SEQ ID NO: 136323 - DNA, 22 bp, Artificial Sequence
  Synthetic oligonucleotide; TTA chr11 5268181 5268202 5268186 5268181 -
tgggagaattccaggattccaa

SEQ ID NO: 136324 - DNA, 22 bp, Artificial Sequence
  Synthetic oligonucleotide; TTC chr11 5268170 5268191 5268175 5268170 -
caggattccaaggaggatgata

SEQ ID NO: 136325 - DNA, 22 bp, Artificial Sequence
  Synthetic oligonucleotide; TTC chr11 5268162 5268183 5268167 5268162 -
caaggaggatgatatgatggag

SEQ ID NO: 136326 - DNA, 22 bp, Artificial Sequence
  Synthetic oligonucleotide; CTT chr11 5268131 5268152 5268136 5268131 -
tatcggggtgggaaaatggtta

SEQ ID NO: 136327 - DNA, 22 bp, Artificial Sequence
  Synthetic oligonucleotide; TTT chr11 5268130 5268151 5268135 5268130 -
atcggggtgggaaaatggttaa

SEQ ID NO: 136328 - DNA, 22 bp, Artificial Sequence
  Synthetic oligonucleotide; TTA chr11 5268129 5268150 5268134 5268129 -
tcggggtgggaaaatggttaat

SEQ ID NO: 136329 - DNA, 22 bp, Artificial Sequence
  Synthetic oligonucleotide; TTA chr11 5268109 5268130 5268114 5268109 -
attaagtggacagagactccta

SEQ ID NO: 136330 - DNA, 22 bp, Artificial Sequence
  Synthetic oligonucleotide; TTA chr11 5268105 5268126 5268110 5268105 -
agtggacagagactcctaggca

SEQ ID NO: 136331 - DNA, 22 bp, Artificial Sequence
  Synthetic oligonucleotide; CTC chr11 5268090 5268111 5268095 5268090 -
ctaggcagtttttactgcaccg

SEQ ID NO: 136332 - DNA, 22 bp, Artificial Sequence
  Synthetic oligonucleotide; CTA chr11 5268087 5268108 5268092 5268087 -
ggcagtttttactgcaccgggg

SEQ ID NO: 136333 - DNA, 22 bp, Artificial Sequence
  Synthetic oligonucleotide; TTT chr11 5268079 5268100 5268084 5268079 -
ttactgcaccggggaaagaagg

SEQ ID NO: 136334 - DNA, 22 bp, Artificial Sequence
  Synthetic oligonucleotide; TTT chr11 5268078 5268099 5268083 5268078 -
tactgcaccggggaaagaagga

SEQ ID NO: 136335 - DNA, 22 bp, Artificial Sequence
  Synthetic oligonucleotide; TTT chr11 5268077 5268098 5268082 5268077 -
actgcaccggggaaagaaggag

SEQ ID NO: 136336 - DNA, 22 bp, Artificial Sequence
  Synthetic oligonucleotide; TTA chr11 5268076 5268097 5268081 5268076 -
ctgcaccggggaaagaaggagc

SEQ ID NO: 136337 - DNA, 22 bp, Artificial Sequence
  Synthetic oligonucleotide; CTG chr11 5268073 5268094 5268078 5268073 -
caccggggaaagaaggagctgt

SEQ ID NO: 136338 - DNA, 22 bp, Artificial Sequence
  Synthetic oligonucleotide; CTG chr11 5268052 5268073 5268057 5268052 -
ttagtggtacctgagaaagcag

SEQ ID NO: 136339 - DNA, 22 bp, Artificial Sequence
  Synthetic oligonucleotide; TTA chr11 5268049 5268070 5268054 5268049 -
gtggtacctgagaaagcagatt

SEQ ID NO: 136340 - DNA, 22 bp, Artificial Sequence
  Synthetic oligonucleotide; CTG chr11 5268039 5268060 5268044 5268039 -
agaaagcagatttgtggtacat

SEQ ID NO: 136341 - DNA, 22 bp, Artificial Sequence
  Synthetic oligonucleotide; TTT chr11 5268026 5268047 5268031 5268026 -
gtggtacatgtcacttttcatt

SEQ ID NO: 136342 - DNA, 22 bp, Artificial Sequence
  Synthetic oligonucleotide; TTG chr11 5268025 5268046 5268030 5268025 -
tggtacatgtcacttttcatta

SEQ ID NO: 136343 - DNA, 22 bp, Artificial Sequence
  Synthetic oligonucleotide; CTT chr11 5268010 5268031 5268015 5268010 -
ttcattaaaaacaaaaacaaaa

SEQ ID NO: 136344 - DNA, 22 bp, Artificial Sequence
  Synthetic oligonucleotide; TTT chr11 5268009 5268030 5268014 5268009 -
tcattaaaaacaaaaacaaaac

SEQ ID NO: 136345 - DNA, 22 bp, Artificial Sequence
  Synthetic oligonucleotide; TTT chr11 5268008 5268029 5268013 5268008 -
cattaaaaacaaaaacaaaaca

SEQ ID NO: 136346 - DNA, 22 bp, Artificial Sequence
  Synthetic oligonucleotide; TTC chr11 5268007 5268028 5268012 5268007 -
attaaaaacaaaaacaaaacaa

SEQ ID NO: 136347 - DNA, 22 bp, Artificial Sequence
  Synthetic oligonucleotide; TTA chr11 5268003 5268024 5268008 5268003 -
aaaacaaaaacaaaacaaaaca

SEQ ID NO: 136348 - DNA, 22 bp, Artificial Sequence
  Synthetic oligonucleotide; CTT chr11 5267975 5267996 5267980 5267975 -
catagatatccaagatataggc

SEQ ID NO: 136349 - DNA, 22 bp, Artificial Sequence
  Synthetic oligonucleotide; TTC chr11 5267974 5267995 5267979 5267974 -
atagatatccaagatataggct

SEQ ID NO: 136350 - DNA, 22 bp, Artificial Sequence
  Synthetic oligonucleotide; CTA chr11 5267951 5267972 5267956 5267951 -
gaattactattttaatttactc

SEQ ID NO: 136351 - DNA, 22 bp, Artificial Sequence
  Synthetic oligonucleotide; TTA chr11 5267945 5267966 5267950 5267945 -
ctattttaatttactcttattt

SEQ ID NO: 136352 - DNA, 22 bp, Artificial Sequence
  Synthetic oligonucleotide; CTA chr11 5267942 5267963 5267947 5267942 -
ttttaatttactcttatttaca

SEQ ID NO: 136353 - DNA, 22 bp, Artificial Sequence
  Synthetic oligonucleotide; TTT chr11 5267939 5267960 5267944 5267939 -
taatttactcttatttacattt

SEQ ID NO: 136354 - DNA, 22 bp, Artificial Sequence
  Synthetic oligonucleotide; TTT chr11 5267938 5267959 5267943 5267938 -
aatttactcttatttacatttt

SEQ ID NO: 136355 - DNA, 22 bp, Artificial Sequence
  Synthetic oligonucleotide; TTA chr11 5267937 5267958 5267942 5267937 -
atttactcttatttacattttg

SEQ ID NO: 136356 - DNA, 22 bp, Artificial Sequence
  Synthetic oligonucleotide; TTT chr11 5267933 5267954 5267938 5267933 -
actcttatttacattttgaagt

SEQ ID NO: 136357 - DNA, 22 bp, Artificial Sequence
  Synthetic oligonucleotide; TTA chr11 5267932 5267953 5267937 5267932 -
ctcttatttacattttgaagta

SEQ ID NO: 136358 - DNA, 22 bp, Artificial Sequence
  Synthetic oligonucleotide; CTC chr11 5267929 5267950 5267934 5267929 -
ttatttacattttgaagtagct

SEQ ID NO: 136359 - DNA, 22 bp, Artificial Sequence
  Synthetic oligonucleotide; CTT chr11 5267927 5267948 5267932 5267927 -
atttacattttgaagtagctag

SEQ ID NO: 136360 - DNA, 22 bp, Artificial Sequence
  Synthetic oligonucleotide; TTA chr11 5267926 5267947 5267931 5267926 -
tttacattttgaagtagctagc

SEQ ID NO: 136361 - DNA, 22 bp, Artificial Sequence
  Synthetic oligonucleotide; TTT chr11 5267923 5267944 5267928 5267923 -
acattttgaagtagctagcttg

SEQ ID NO: 136362 - DNA, 22 bp, Artificial Sequence
  Synthetic oligonucleotide; TTA chr11 5267922 5267943 5267927 5267922 -
cattttgaagtagctagcttgt

SEQ ID NO: 136363 - DNA, 22 bp, Artificial Sequence
  Synthetic oligonucleotide; TTT chr11 5267917 5267938 5267922 5267917 -
tgaagtagctagcttgtcacat

SEQ ID NO: 136364 - DNA, 22 bp, Artificial Sequence
  Synthetic oligonucleotide; TTT chr11 5267916 5267937 5267921 5267916 -
gaagtagctagcttgtcacatg

SEQ ID NO: 136365 - DNA, 22 bp, Artificial Sequence
  Synthetic oligonucleotide; TTG chr11 5267915 5267936 5267920 5267915 -
aagtagctagcttgtcacatgt

SEQ ID NO: 136366 - DNA, 22 bp, Artificial Sequence
  Synthetic oligonucleotide; CTA chr11 5267906 5267927 5267911 5267906 -
gcttgtcacatgttttatgaaa

SEQ ID NO: 136367 - DNA, 22 bp, Artificial Sequence
  Synthetic oligonucleotide; CTT chr11 5267902 5267923 5267907 5267902 -
gtcacatgttttatgaaattga

SEQ ID NO: 136368 - DNA, 22 bp, Artificial Sequence
  Synthetic oligonucleotide; TTG chr11 5267901 5267922 5267906 5267901 -
tcacatgttttatgaaattgat

SEQ ID NO: 136369 - DNA, 22 bp, Artificial Sequence
  Synthetic oligonucleotide; TTT chr11 5267891 5267912 5267896 5267891 -
tatgaaattgatttggagataa

SEQ ID NO: 136370 - DNA, 22 bp, Artificial Sequence
  Synthetic oligonucleotide; TTT chr11 5267890 5267911 5267895 5267890 -
atgaaattgatttggagataag

SEQ ID NO: 136371 - DNA, 22 bp, Artificial Sequence
  Synthetic oligonucleotide; TTA chr11 5267889 5267910 5267894 5267889 -
tgaaattgatttggagataaga

SEQ ID NO: 136372 - DNA, 22 bp, Artificial Sequence
  Synthetic oligonucleotide; TTG chr11 5267881 5267902 5267886 5267881 -
atttggagataagatgagtgtg

SEQ ID NO: 136373 - DNA, 22 bp, Artificial Sequence
  Synthetic oligonucleotide; TTT chr11 5267877 5267898 5267882 5267877 -
ggagataagatgagtgtgtatc

SEQ ID NO: 136374 - DNA, 22 bp, Artificial Sequence
  Synthetic oligonucleotide; TTG chr11 5267876 5267897 5267881 5267876 -
gagataagatgagtgtgtatca

SEQ ID NO: 136375 - DNA, 22 bp, Artificial Sequence
  Synthetic oligonucleotide; CTG chr11 5267843 5267864 5267848 5267843 -
ctctttccatgaaggattccat

SEQ ID NO: 136376 - DNA, 22 bp, Artificial Sequence
  Synthetic oligonucleotide; CTC chr11 5267840 5267861 5267845 5267840 -
tttccatgaaggattccattat

SEQ ID NO: 136377 - DNA, 22 bp, Artificial Sequence
  Synthetic oligonucleotide; CTT chr11 5267838 5267859 5267843 5267838 -
tccatgaaggattccattattt

SEQ ID NO: 136378 - DNA, 22 bp, Artificial Sequence
  Synthetic oligonucleotide; TTT chr11 5267837 5267858 5267842 5267837 -
ccatgaaggattccattatttc

SEQ ID NO: 136379 - DNA, 22 bp, Artificial Sequence
  Synthetic oligonucleotide; TTC chr11 5267836 5267857 5267841 5267836 -
catgaaggattccattatttca

SEQ ID NO: 136380 - DNA, 22 bp, Artificial Sequence
  Synthetic oligonucleotide; TTC chr11 5267824 5267845 5267829 5267824 -
cattatttcatgggttagctga

SEQ ID NO: 136381 - DNA, 22 bp, Artificial Sequence
  Synthetic oligonucleotide; TTA chr11 5267819 5267840 5267824 5267819 -
tttcatgggttagctgaagcta

SEQ ID NO: 136382 - DNA, 22 bp, Artificial Sequence
  Synthetic oligonucleotide; TTT chr11 5267816 5267837 5267821 5267816 -
catgggttagctgaagctaaga

SEQ ID NO: 136383 - DNA, 22 bp, Artificial Sequence
  Synthetic oligonucleotide; TTC chr11 5267815 5267836 5267820 5267815 -
atgggttagctgaagctaagac

SEQ ID NO: 136384 - DNA, 22 bp, Artificial Sequence
  Synthetic oligonucleotide; TTA chr11 5267807 5267828 5267812 5267807 -
gctgaagctaagacacatgata

SEQ ID NO: 136385 - DNA, 22 bp, Artificial Sequence
  Synthetic oligonucleotide; CTG chr11 5267803 5267824 5267808 5267803 -
aagctaagacacatgatatcat

SEQ ID NO: 136386 - DNA, 22 bp, Artificial Sequence
  Synthetic oligonucleotide; CTA chr11 5267797 5267818 5267802 5267797 -
agacacatgatatcattgtgca

SEQ ID NO: 136387 - DNA, 22 bp, Artificial Sequence
  Synthetic oligonucleotide; TTG chr11 5267779 5267800 5267784 5267779 -
tgcattatcttctgatagaatg

SEQ ID NO: 136388 - DNA, 22 bp, Artificial Sequence
  Synthetic oligonucleotide; TTA chr11 5267772 5267793 5267777 5267772 -
tcttctgatagaatgtaacatg

SEQ ID NO: 136389 - DNA, 22 bp, Artificial Sequence
  Synthetic oligonucleotide; CTT chr11 5267768 5267789 5267773 5267768 -
ctgatagaatgtaacatgcact

SEQ ID NO: 136390 - DNA, 22 bp, Artificial Sequence
  Synthetic oligonucleotide; TTC chr11 5267767 5267788 5267772 5267767 -
tgatagaatgtaacatgcacta

SEQ ID NO: 136391 - DNA, 22 bp, Artificial Sequence
  Synthetic oligonucleotide; CTG chr11 5267765 5267786 5267770 5267765 -
atagaatgtaacatgcactaaa

SEQ ID NO: 136392 - DNA, 22 bp, Artificial Sequence
  Synthetic oligonucleotide; CTA chr11 5267745 5267766 5267750 5267745 -
aaataaagttagagttaggacc

SEQ ID NO: 136393 - DNA, 22 bp, Artificial Sequence
  Synthetic oligonucleotide; TTA chr11 5267734 5267755 5267739 5267734 -
gagttaggacctgagtgggaaa

SEQ ID NO: 136394 - DNA, 22 bp, Artificial Sequence
  Synthetic oligonucleotide; TTA chr11 5267728 5267749 5267733 5267728 -
ggacctgagtgggaaagttttt

SEQ ID NO: 136395 - DNA, 22 bp, Artificial Sequence
  Synthetic oligonucleotide; CTG chr11 5267721 5267742 5267726 5267721 -
agtgggaaagtttttggagagt

SEQ ID NO: 136396 - DNA, 22 bp, Artificial Sequence
  Synthetic oligonucleotide; TTT chr11 5267708 5267729 5267713 5267708 -
ttggagagtgtgatgaagactt

SEQ ID NO: 136397 - DNA, 22 bp, Artificial Sequence
  Synthetic oligonucleotide; TTT chr11 5267707 5267728 5267712 5267707 -
tggagagtgtgatgaagacttt

SEQ ID NO: 136398 - DNA, 22 bp, Artificial Sequence
  Synthetic oligonucleotide; TTT chr11 5267706 5267727 5267711 5267706 -
ggagagtgtgatgaagactttc

SEQ ID NO: 136399 - DNA, 22 bp, Artificial Sequence
  Synthetic oligonucleotide; TTG chr11 5267705 5267726 5267710 5267705 -
gagagtgtgatgaagactttcc

SEQ ID NO: 136400 - DNA, 22 bp, Artificial Sequence
  Synthetic oligonucleotide; CTT chr11 5267686 5267707 5267691 5267686 -
tccgtgggagatagaatactaa

SEQ ID NO: 136401 - DNA, 22 bp, Artificial Sequence
  Synthetic oligonucleotide; TTT chr11 5267685 5267706 5267690 5267685 -
ccgtgggagatagaatactaat

SEQ ID NO: 136402 - DNA, 22 bp, Artificial Sequence
  Synthetic oligonucleotide; TTC chr11 5267684 5267705 5267689 5267684 -
cgtgggagatagaatactaata

SEQ ID NO: 136403 - DNA, 22 bp, Artificial Sequence
  Synthetic oligonucleotide; CTA chr11 5267665 5267686 5267670 5267665 -
ataaaggcttaaattctaaaac

SEQ ID NO: 136404 - DNA, 22 bp, Artificial Sequence
  Synthetic oligonucleotide; CTT chr11 5267655 5267676 5267660 5267655 -
aaattctaaaaccagcaagcta

SEQ ID NO: 136405 - DNA, 22 bp, Artificial Sequence
  Synthetic oligonucleotide; TTA chr11 5267654 5267675 5267659 5267654 -
aattctaaaaccagcaagctag

SEQ ID NO: 136406 - DNA, 22 bp, Artificial Sequence
  Synthetic oligonucleotide; TTC chr11 5267649 5267670 5267654 5267649 -
taaaaccagcaagctagggctt

SEQ ID NO: 136407 - DNA, 22 bp, Artificial Sequence
  Synthetic oligonucleotide; CTA chr11 5267647 5267668 5267652 5267647 -
aaaccagcaagctagggcttcg

SEQ ID NO: 136408 - DNA, 22 bp, Artificial Sequence
  Synthetic oligonucleotide; CTA chr11 5267633 5267654 5267638 5267633 -
gggcttcgtgacttgcatgaaa

SEQ ID NO: 136409 - DNA, 22 bp, Artificial Sequence
  Synthetic oligonucleotide; CTT chr11 5267627 5267648 5267632 5267627 -
cgtgacttgcatgaaactggct

SEQ ID NO: 136410 - DNA, 22 bp, Artificial Sequence
  Synthetic oligonucleotide; TTC chr11 5267626 5267647 5267631 5267626 -
gtgacttgcatgaaactggctc

SEQ ID NO: 136411 - DNA, 22 bp, Artificial Sequence
  Synthetic oligonucleotide; CTT chr11 5267619 5267640 5267624 5267619 -
gcatgaaactggctctctggaa

SEQ ID NO: 136412 - DNA, 22 bp, Artificial Sequence
  Synthetic oligonucleotide; TTG chr11 5267618 5267639 5267623 5267618 -
catgaaactggctctctggaag

SEQ ID NO: 136413 - DNA, 22 bp, Artificial Sequence
  Synthetic oligonucleotide; CTG chr11 5267608 5267629 5267613 5267608 -
gctctctggaagtagaagggag

SEQ ID NO: 136414 - DNA, 22 bp, Artificial Sequence
  Synthetic oligonucleotide; CTC chr11 5267604 5267625 5267609 5267604 -
tctggaagtagaagggagagta

SEQ ID NO: 136415 - DNA, 22 bp, Artificial Sequence
  Synthetic oligonucleotide; CTC chr11 5267602 5267623 5267607 5267602 -
tggaagtagaagggagagtaag

SEQ ID NO: 136416 - DNA, 22 bp, Artificial Sequence
  Synthetic oligonucleotide; CTG chr11 5267600 5267621 5267605 5267600 -
gaagtagaagggagagtaagac

SEQ ID NO: 136417 - DNA, 22 bp, Artificial Sequence
  Synthetic oligonucleotide; CTA chr11 5267563 5267584 5267568 5267563 -
ggaaagaccagatagtacaggg

SEQ ID NO: 136418 - DNA, 22 bp, Artificial Sequence
  Synthetic oligonucleotide; CTG chr11 5267537 5267558 5267542 5267537 -
gctacaaaaatacaagctttta

SEQ ID NO: 136419 - DNA, 22 bp, Artificial Sequence
  Synthetic oligonucleotide; CTA chr11 5267533 5267554 5267538 5267533 -
caaaaatacaagcttttactat

SEQ ID NO: 136420 - DNA, 22 bp, Artificial Sequence
  Synthetic oligonucleotide; CTT chr11 5267518 5267539 5267523 5267518 -
ttactatgctattgcaatacta

SEQ ID NO: 136421 - DNA, 22 bp, Artificial Sequence
  Synthetic oligonucleotide; TTT chr11 5267517 5267538 5267522 5267517 -
tactatgctattgcaatactaa

SEQ ID NO: 136422 - DNA, 22 bp, Artificial Sequence
  Synthetic oligonucleotide; TTT chr11 5267516 5267537 5267521 5267516 -
actatgctattgcaatactaaa

SEQ ID NO: 136423 - DNA, 22 bp, Artificial Sequence
  Synthetic oligonucleotide; TTA chr11 5267515 5267536 5267520 5267515 -
ctatgctattgcaatactaaac

SEQ ID NO: 136424 - DNA, 22 bp, Artificial Sequence
  Synthetic oligonucleotide; CTA chr11 5267512 5267533 5267517 5267512 -
tgctattgcaatactaaacgat

SEQ ID NO: 136425 - DNA, 22 bp, Artificial Sequence
  Synthetic oligonucleotide; CTA chr11 5267507 5267528 5267512 5267507 -
ttgcaatactaaacgataagca

SEQ ID NO: 136426 - DNA, 22 bp, Artificial Sequence
  Synthetic oligonucleotide; TTG chr11 5267504 5267525 5267509 5267504 -
caatactaaacgataagcatta

SEQ ID NO: 136427 - DNA, 22 bp, Artificial Sequence
  Synthetic oligonucleotide; CTA chr11 5267496 5267517 5267501 5267496 -
aacgataagcattaggatgtta

SEQ ID NO: 136428 - DNA, 22 bp, Artificial Sequence
  Synthetic oligonucleotide; TTA chr11 5267482 5267503 5267487 5267482 -
ggatgttaagtgactcaggaaa

SEQ ID NO: 136429 - DNA, 22 bp, Artificial Sequence
  Synthetic oligonucleotide; TTA chr11 5267474 5267495 5267479 5267474 -
agtgactcaggaaataagattt

SEQ ID NO: 136430 - DNA, 22 bp, Artificial Sequence
  Synthetic oligonucleotide; CTC chr11 5267466 5267487 5267471 5267466 -
aggaaataagattttgggaaaa

SEQ ID NO: 136431 - DNA, 22 bp, Artificial Sequence
  Synthetic oligonucleotide; TTT chr11 5267452 5267473 5267457 5267452 -
tgggaaaaagtaatctgcttat

SEQ ID NO: 136432 - DNA, 22 bp, Artificial Sequence
  Synthetic oligonucleotide; TTT chr11 5267451 5267472 5267456 5267451 -
gggaaaaagtaatctgcttatg

SEQ ID NO: 136433 - DNA, 22 bp, Artificial Sequence
  Synthetic oligonucleotide; TTG chr11 5267450 5267471 5267455 5267450 -
ggaaaaagtaatctgcttatgt

SEQ ID NO: 136434 - DNA, 22 bp, Artificial Sequence
  Synthetic oligonucleotide; CTG chr11 5267435 5267456 5267440 5267435 -
cttatgtgcacaaaatggattc

SEQ ID NO: 136435 - DNA, 22 bp, Artificial Sequence
  Synthetic oligonucleotide; CTT chr11 5267432 5267453 5267437 5267432 -
atgtgcacaaaatggattcaag

SEQ ID NO: 136436 - DNA, 22 bp, Artificial Sequence
  Synthetic oligonucleotide; TTA chr11 5267431 5267452 5267436 5267431 -
tgtgcacaaaatggattcaagt

SEQ ID NO: 136437 - DNA, 22 bp, Artificial Sequence
  Synthetic oligonucleotide; TTC chr11 5267413 5267434 5267418 5267413 -
aagtttgcagataaaataaaat

SEQ ID NO: 136438 - DNA, 22 bp, Artificial Sequence
  Synthetic oligonucleotide; TTT chr11 5267407 5267428 5267412 5267407 -
gcagataaaataaaatatggat

SEQ ID NO: 136439 - DNA, 22 bp, Artificial Sequence
  Synthetic oligonucleotide; TTG chr11 5267406 5267427 5267411 5267406 -
cagataaaataaaatatggatg

SEQ ID NO: 136440 - DNA, 22 bp, Artificial Sequence
  Synthetic oligonucleotide; TTC chr11 5267377 5267398 5267382 5267377 -
aaggggacagatacaatggttc

SEQ ID NO: 136441 - DNA, 22 bp, Artificial Sequence
  Synthetic oligonucleotide; TTC chr11 5267355 5267376 5267360 5267355 -
aaacccaagaggagcagtgagt

SEQ ID NO: 136442 - DNA, 22 bp, Artificial Sequence
  Synthetic oligonucleotide; CTG chr11 5267330 5267351 5267335 5267330 -
tggaatttgaaggatggacaaa

SEQ ID NO: 136443 - DNA, 22 bp, Artificial Sequence
  Synthetic oligonucleotide; TTT chr11 5267322 5267343 5267327 5267322 -
gaaggatggacaaaggtggggt

SEQ ID NO: 136444 - DNA, 22 bp, Artificial Sequence
  Synthetic oligonucleotide; TTG chr11 5267321 5267342 5267326 5267321 -
aaggatggacaaaggtggggtg

SEQ ID NO: 136445 - DNA, 22 bp, Artificial Sequence
  Synthetic oligonucleotide; TTC chr11 5267282 5267303 5267287 5267282 -
gactgactgtgggagatgagaa

SEQ ID NO: 136446 - DNA, 22 bp, Artificial Sequence
  Synthetic oligonucleotide; CTG chr11 5267277 5267298 5267282 5267277 -
actgtgggagatgagaaggaag

SEQ ID NO: 136447 - DNA, 22 bp, Artificial Sequence
  Synthetic oligonucleotide; CTG chr11 5267273 5267294 5267278 5267273 -
tgggagatgagaaggaagaagg

SEQ ID NO: 136448 - DNA, 22 bp, Artificial Sequence
  Synthetic oligonucleotide; CTG chr11 5267235 5267256 5267240 5267235 -
aaagctcccagactggtgaaga

SEQ ID NO: 136449 - DNA, 22 bp, Artificial Sequence
  Synthetic oligonucleotide; CTC chr11 5267228 5267249 5267233 5267228 -
ccagactggtgaagataacagg

SEQ ID NO: 136450 - DNA, 22 bp, Artificial Sequence
  Synthetic oligonucleotide; CTG chr11 5267220 5267241 5267225 5267220 -
gtgaagataacaggaggaaacc

SEQ ID NO: 136451 - DNA, 22 bp, Artificial Sequence
  Synthetic oligonucleotide; CTG chr11 5267190 5267211 5267195 5267190 -
acctggtgactctcatgtgtga

SEQ ID NO: 136452 - DNA, 22 bp, Artificial Sequence
  Synthetic oligonucleotide; CTG chr11 5267185 5267206 5267190 5267185 -
gtgactctcatgtgtgaagggt

SEQ ID NO: 136453 - DNA, 22 bp, Artificial Sequence
  Synthetic oligonucleotide; CTC chr11 5267178 5267199 5267183 5267178 -
tcatgtgtgaagggtagaggga

SEQ ID NO: 136454 - DNA, 22 bp, Artificial Sequence
  Synthetic oligonucleotide; CTC chr11 5267176 5267197 5267181 5267176 -
atgtgtgaagggtagagggata

SEQ ID NO: 136455 - DNA, 22 bp, Artificial Sequence
  Synthetic oligonucleotide; TTA chr11 5267151 5267172 5267156 5267151 -
acagatttactttttaggaagt

SEQ ID NO: 136456 - DNA, 22 bp, Artificial Sequence
  Synthetic oligonucleotide; TTT chr11 5267143 5267164 5267148 5267143 -
actttttaggaagtgctagatt

SEQ ID NO: 136457 - DNA, 22 bp, Artificial Sequence
  Synthetic oligonucleotide; TTA chr11 5267142 5267163 5267147 5267142 -
ctttttaggaagtgctagattg

SEQ ID NO: 136458 - DNA, 22 bp, Artificial Sequence
  Synthetic oligonucleotide; CTT chr11 5267139 5267160 5267144 5267139 -
tttaggaagtgctagattggtc

SEQ ID NO: 136459 - DNA, 22 bp, Artificial Sequence
  Synthetic oligonucleotide; TTT chr11 5267138 5267159 5267143 5267138 -
ttaggaagtgctagattggtca

SEQ ID NO: 136460 - DNA, 22 bp, Artificial Sequence
  Synthetic oligonucleotide; TTT chr11 5267137 5267158 5267142 5267137 -
taggaagtgctagattggtcag

SEQ ID NO: 136461 - DNA, 22 bp, Artificial Sequence
  Synthetic oligonucleotide; TTT chr11 5267136 5267157 5267141 5267136 -
aggaagtgctagattggtcagg

SEQ ID NO: 136462 - DNA, 22 bp, Artificial Sequence
  Synthetic oligonucleotide; TTA chr11 5267135 5267156 5267140 5267135 -
ggaagtgctagattggtcaggg

SEQ ID NO: 136463 - DNA, 22 bp, Artificial Sequence
  Synthetic oligonucleotide; CTA chr11 5267125 5267146 5267130 5267125 -
gattggtcagggagttttgacc

SEQ ID NO: 136464 - DNA, 22 bp, Artificial Sequence
  Synthetic oligonucleotide; TTG chr11 5267120 5267141 5267125 5267120 -
gtcagggagttttgaccttcag

SEQ ID NO: 136465 - DNA, 22 bp, Artificial Sequence
  Synthetic oligonucleotide; TTT chr11 5267108 5267129 5267113 5267108 -
tgaccttcaggtcttgtgtctt

SEQ ID NO: 136466 - DNA, 22 bp, Artificial Sequence
  Synthetic oligonucleotide; TTT chr11 5267107 5267128 5267112 5267107 -
gaccttcaggtcttgtgtcttt

SEQ ID NO: 136467 - DNA, 22 bp, Artificial Sequence
  Synthetic oligonucleotide; TTG chr11 5267106 5267127 5267111 5267106 -
accttcaggtcttgtgtctttc

SEQ ID NO: 136468 - DNA, 22 bp, Artificial Sequence
  Synthetic oligonucleotide; CTT chr11 5267101 5267122 5267106 5267101 -
caggtcttgtgtctttcatatc

SEQ ID NO: 136469 - DNA, 22 bp, Artificial Sequence
  Synthetic oligonucleotide; TTC chr11 5267100 5267121 5267105 5267100 -
aggtcttgtgtctttcatatca

SEQ ID NO: 136470 - DNA, 22 bp, Artificial Sequence
  Synthetic oligonucleotide; CTT chr11 5267093 5267114 5267098 5267093 -
gtgtctttcatatcaaggaacc

SEQ ID NO: 136471 - DNA, 22 bp, Artificial Sequence
  Synthetic oligonucleotide; TTG chr11 5267092 5267113 5267097 5267092 -
tgtctttcatatcaaggaacct

SEQ ID NO: 136472 - DNA, 22 bp, Artificial Sequence
  Synthetic oligonucleotide; CTT chr11 5267086 5267107 5267091 5267086 -
tcatatcaaggaacctttgcat

SEQ ID NO: 136473 - DNA, 22 bp, Artificial Sequence
  Synthetic oligonucleotide; TTT chr11 5267085 5267106 5267090 5267085 -
catatcaaggaacctttgcatt

SEQ ID NO: 136474 - DNA, 22 bp, Artificial Sequence
  Synthetic oligonucleotide; TTC chr11 5267084 5267105 5267089 5267084 -
atatcaaggaacctttgcattt

SEQ ID NO: 136475 - DNA, 22 bp, Artificial Sequence
  Synthetic oligonucleotide; CTT chr11 5267069 5267090 5267074 5267069 -
tgcattttccaagttagagtgc

SEQ ID NO: 136476 - DNA, 22 bp, Artificial Sequence
  Synthetic oligonucleotide; TTT chr11 5267068 5267089 5267073 5267068 -
gcattttccaagttagagtgcc

SEQ ID NO: 136477 - DNA, 22 bp, Artificial Sequence
  Synthetic oligonucleotide; TTG chr11 5267067 5267088 5267072 5267067 -
cattttccaagttagagtgcca

SEQ ID NO: 136478 - DNA, 22 bp, Artificial Sequence
  Synthetic oligonucleotide; TTT chr11 5267062 5267083 5267067 5267062 -
tccaagttagagtgccatattt

SEQ ID NO: 136479 - DNA, 22 bp, Artificial Sequence
  Synthetic oligonucleotide; TTT chr11 5267061 5267082 5267066 5267061 -
ccaagttagagtgccatatttt

SEQ ID NO: 136480 - DNA, 22 bp, Artificial Sequence
  Synthetic oligonucleotide; TTC chr11 5267060 5267081 5267065 5267060 -
caagttagagtgccatattttg

SEQ ID NO: 136481 - DNA, 22 bp, Artificial Sequence
  Synthetic oligonucleotide; TTA chr11 5267053 5267074 5267058 5267053 -
gagtgccatattttggcaaata

SEQ ID NO: 136482 - DNA, 22 bp, Artificial Sequence
  Synthetic oligonucleotide; TTT chr11 5267040 5267061 5267045 5267040 -
tggcaaatataactttattagt

SEQ ID NO: 136483 - DNA, 22 bp, Artificial Sequence
  Synthetic oligonucleotide; TTT chr11 5267039 5267060 5267044 5267039 -
ggcaaatataactttattagta

SEQ ID NO: 136484 - DNA, 22 bp, Artificial Sequence
  Synthetic oligonucleotide; TTG chr11 5267038 5267059 5267043 5267038 -
gcaaatataactttattagtaa

SEQ ID NO: 136485 - DNA, 22 bp, Artificial Sequence
  Synthetic oligonucleotide; CTT chr11 5267025 5267046 5267030 5267025 -
tattagtaattttatagtgctc

SEQ ID NO: 136486 - DNA, 22 bp, Artificial Sequence
  Synthetic oligonucleotide; TTT chr11 5267024 5267045 5267029 5267024 -
attagtaattttatagtgctct

SEQ ID NO: 136487 - DNA, 22 bp, Artificial Sequence
  Synthetic oligonucleotide; TTA chr11 5267023 5267044 5267028 5267023 -
ttagtaattttatagtgctctc

SEQ ID NO: 136488 - DNA, 22 bp, Artificial Sequence
  Synthetic oligonucleotide; TTA chr11 5267020 5267041 5267025 5267020 -
gtaattttatagtgctctcaca

SEQ ID NO: 136489 - DNA, 22 bp, Artificial Sequence
  Synthetic oligonucleotide; TTT chr11 5267013 5267034 5267018 5267013 -
tatagtgctctcacattgatca

SEQ ID NO: 136490 - DNA, 22 bp, Artificial Sequence
  Synthetic oligonucleotide; TTT chr11 5267012 5267033 5267017 5267012 -
atagtgctctcacattgatcag

SEQ ID NO: 136491 - DNA, 22 bp, Artificial Sequence
  Synthetic oligonucleotide; TTA chr11 5267011 5267032 5267016 5267011 -
tagtgctctcacattgatcaga

SEQ ID NO: 136492 - DNA, 22 bp, Artificial Sequence
  Synthetic oligonucleotide; CTC chr11 5267003 5267024 5267008 5267003 -
tcacattgatcagactttttcc

SEQ ID NO: 136493 - DNA, 22 bp, Artificial Sequence
  Synthetic oligonucleotide; CTC chr11 5267001 5267022 5267006 5267001 -
acattgatcagactttttcctg

SEQ ID NO: 136494 - DNA, 22 bp, Artificial Sequence
  Synthetic oligonucleotide; TTG chr11 5266995 5267016 5267000 5266995 -
atcagactttttcctgtgaatt

SEQ ID NO: 136495 - DNA, 22 bp, Artificial Sequence
  Synthetic oligonucleotide; CTT chr11 5266986 5267007 5266991 5266986 -
tttcctgtgaattacttttgaa

SEQ ID NO: 136496 - DNA, 22 bp, Artificial Sequence
  Synthetic oligonucleotide; TTT chr11 5266985 5267006 5266990 5266985 -
ttcctgtgaattacttttgaat

SEQ ID NO: 136497 - DNA, 22 bp, Artificial Sequence
  Synthetic oligonucleotide; TTT chr11 5266984 5267005 5266989 5266984 -
tcctgtgaattacttttgaatt

SEQ ID NO: 136498 - DNA, 22 bp, Artificial Sequence
  Synthetic oligonucleotide; TTT chr11 5266983 5267004 5266988 5266983 -
cctgtgaattacttttgaattt

SEQ ID NO: 136499 - DNA, 22 bp, Artificial Sequence
  Synthetic oligonucleotide; TTC chr11 5266982 5267003 5266987 5266982 -
ctgtgaattacttttgaatttg

SEQ ID NO: 136500 - DNA, 22 bp, Artificial Sequence
  Synthetic oligonucleotide; CTG chr11 5266979 5267000 5266984 5266979 -
tgaattacttttgaatttggct

SEQ ID NO: 136501 - DNA, 22 bp, Artificial Sequence
  Synthetic oligonucleotide; TTA chr11 5266972 5266993 5266977 5266972 -
cttttgaatttggctgtatata

SEQ ID NO: 136502 - DNA, 22 bp, Artificial Sequence
  Synthetic oligonucleotide; CTT chr11 5266969 5266990 5266974 5266969 -
ttgaatttggctgtatatatcc

SEQ ID NO: 136503 - DNA, 22 bp, Artificial Sequence
  Synthetic oligonucleotide; TTT chr11 5266968 5266989 5266973 5266968 -
tgaatttggctgtatatatcca

SEQ ID NO: 136504 - DNA, 22 bp, Artificial Sequence
  Synthetic oligonucleotide; TTT chr11 5266967 5266988 5266972 5266967 -
gaatttggctgtatatatccag

SEQ ID NO: 136505 - DNA, 22 bp, Artificial Sequence
  Synthetic oligonucleotide; TTG chr11 5266966 5266987 5266971 5266966 -
aatttggctgtatatatccaga

SEQ ID NO: 136506 - DNA, 22 bp, Artificial Sequence
  Synthetic oligonucleotide; TTT chr11 5266961 5266982 5266966 5266961 -
ggctgtatatatccagaatatg

SEQ ID NO: 136507 - DNA, 22 bp, Artificial Sequence
  Synthetic oligonucleotide; TTG chr11 5266960 5266981 5266965 5266960 -
gctgtatatatccagaatatgg

SEQ ID NO: 136508 - DNA, 22 bp, Artificial Sequence
  Synthetic oligonucleotide; CTG chr11 5266956 5266977 5266961 5266956 -
tatatatccagaatatgggaga

SEQ ID NO: 136509 - DNA, 22 bp, Artificial Sequence
  Synthetic oligonucleotide; TTA chr11 5266920 5266941 5266925 5266920 -
ttgtagttgcaggctatcaaca

SEQ ID NO: 136510 - DNA, 22 bp, Artificial Sequence
  Synthetic oligonucleotide; TTG chr11 5266917 5266938 5266922 5266917 -
tagttgcaggctatcaacaata

SEQ ID NO: 136511 - DNA, 22 bp, Artificial Sequence
  Synthetic oligonucleotide; TTG chr11 5266911 5266932 5266916 5266911 -
caggctatcaacaatactggtc

SEQ ID NO: 136512 - DNA, 22 bp, Artificial Sequence
  Synthetic oligonucleotide; CTA chr11 5266904 5266925 5266909 5266904 -
tcaacaatactggtctctctga

SEQ ID NO: 136513 - DNA, 22 bp, Artificial Sequence
  Synthetic oligonucleotide; CTG chr11 5266892 5266913 5266897 5266892 -
gtctctctgagccttataacct

SEQ ID NO: 136514 - DNA, 22 bp, Artificial Sequence
  Synthetic oligonucleotide; CTC chr11 5266887 5266908 5266892 5266887 -
tctgagccttataacctttcaa

SEQ ID NO: 136515 - DNA, 22 bp, Artificial Sequence
  Synthetic oligonucleotide; CTC chr11 5266885 5266906 5266890 5266885 -
tgagccttataacctttcaata

SEQ ID NO: 136516 - DNA, 22 bp, Artificial Sequence
  Synthetic oligonucleotide; CTG chr11 5266883 5266904 5266888 5266883 -
agccttataacctttcaatatg

SEQ ID NO: 136517 - DNA, 22 bp, Artificial Sequence
  Synthetic oligonucleotide; CTT chr11 5266877 5266898 5266882 5266877 -
ataacctttcaatatgcccata

SEQ ID NO: 136518 - DNA, 22 bp, Artificial Sequence
  Synthetic oligonucleotide; TTA chr11 5266876 5266897 5266881 5266876 -
taacctttcaatatgcccataa

SEQ ID NO: 136519 - DNA, 22 bp, Artificial Sequence
  Synthetic oligonucleotide; CTT chr11 5266869 5266890 5266874 5266869 -
tcaatatgcccataaacagagt

SEQ ID NO: 136520 - DNA, 22 bp, Artificial Sequence
  Synthetic oligonucleotide; TTT chr11 5266868 5266889 5266873 5266868 -
caatatgcccataaacagagta

SEQ ID NO: 136521 - DNA, 22 bp, Artificial Sequence
  Synthetic oligonucleotide; TTC chr11 5266867 5266888 5266872 5266867 -
aatatgcccataaacagagtaa

SEQ ID NO: 136522 - DNA, 22 bp, Artificial Sequence
  Synthetic oligonucleotide; TTA chr11 5266835 5266856 5266840 5266835 -
ttcatggcactaaatattttca

SEQ ID NO: 136523 - DNA, 22 bp, Artificial Sequence
  Synthetic oligonucleotide; TTC chr11 5266832 5266853 5266837 5266832 -
atggcactaaatattttcacct

SEQ ID NO: 136524 - DNA, 22 bp, Artificial Sequence
  Synthetic oligonucleotide; CTA chr11 5266823 5266844 5266828 5266823 -
aatattttcacctagtcagtca

SEQ ID NO: 136525 - DNA, 22 bp, Artificial Sequence
  Synthetic oligonucleotide; TTT chr11 5266816 5266837 5266821 5266816 -
tcacctagtcagtcaacaaatg

SEQ ID NO: 136526 - DNA, 22 bp, Artificial Sequence
  Synthetic oligonucleotide; TTT chr11 5266815 5266836 5266820 5266815 -
cacctagtcagtcaacaaatgg

SEQ ID NO: 136527 - DNA, 22 bp, Artificial Sequence
  Synthetic oligonucleotide; TTC chr11 5266814 5266835 5266819 5266814 -
acctagtcagtcaacaaatggg

SEQ ID NO: 136528 - DNA, 22 bp, Artificial Sequence
  Synthetic oligonucleotide; CTA chr11 5266809 5266830 5266814 5266809 -
gtcagtcaacaaatgggagcaa

SEQ ID NO: 136529 - DNA, 22 bp, Artificial Sequence
  Synthetic oligonucleotide; TTT chr11 5266778 5266799 5266783 5266778 -
tttgatacatatttttatatat

SEQ ID NO: 136530 - DNA, 22 bp, Artificial Sequence
  Synthetic oligonucleotide; TTT chr11 5266777 5266798 5266782 5266777 -
ttgatacatatttttatatatt

SEQ ID NO: 136531 - DNA, 22 bp, Artificial Sequence
  Synthetic oligonucleotide; TTT chr11 5266776 5266797 5266781 5266776 -
tgatacatatttttatatattt

SEQ ID NO: 136532 - DNA, 22 bp, Artificial Sequence
  Synthetic oligonucleotide; TTT chr11 5266775 5266796 5266780 5266775 -
gatacatatttttatatattta

SEQ ID NO: 136533 - DNA, 22 bp, Artificial Sequence
  Synthetic oligonucleotide; TTG chr11 5266774 5266795 5266779 5266774 -
atacatatttttatatatttat

SEQ ID NO: 136534 - DNA, 22 bp, Artificial Sequence
  Synthetic oligonucleotide; TTT chr11 5266764 5266785 5266769 5266764 -
ttatatatttatggggtacatg

SEQ ID NO: 136535 - DNA, 22 bp, Artificial Sequence
  Synthetic oligonucleotide; TTT chr11 5266763 5266784 5266768 5266763 -
tatatatttatggggtacatgt

SEQ ID NO: 136536 - DNA, 22 bp, Artificial Sequence
  Synthetic oligonucleotide; TTT chr11 5266762 5266783 5266767 5266762 -
atatatttatggggtacatgtg

SEQ ID NO: 136537 - DNA, 22 bp, Artificial Sequence
  Synthetic oligonucleotide; TTA chr11 5266761 5266782 5266766 5266761 -
tatatttatggggtacatgtga

SEQ ID NO: 136538 - DNA, 22 bp, Artificial Sequence
  Synthetic oligonucleotide; TTT chr11 5266754 5266775 5266759 5266754 -
atggggtacatgtgatacttac

SEQ ID NO: 136539 - DNA, 22 bp, Artificial Sequence
  Synthetic oligonucleotide; TTA chr11 5266753 5266774 5266758 5266753 -
tggggtacatgtgatacttaca

SEQ ID NO: 136540 - DNA, 22 bp, Artificial Sequence
  Synthetic oligonucleotide; CTT chr11 5266734 5266755 5266739 5266734 -
acatgcctagaacatgtgatga

SEQ ID NO: 136541 - DNA, 22 bp, Artificial Sequence
  Synthetic oligonucleotide; TTA chr11 5266733 5266754 5266738 5266733 -
catgcctagaacatgtgatgat

SEQ ID NO: 136542 - DNA, 22 bp, Artificial Sequence
  Synthetic oligonucleotide; CTA chr11 5266725 5266746 5266730 5266725 -
gaacatgtgatgattaagtcta

SEQ ID NO: 136543 - DNA, 22 bp, Artificial Sequence
  Synthetic oligonucleotide; TTA chr11 5266709 5266730 5266714 5266709 -
agtctagatatttaggatatcc

SEQ ID NO: 136544 - DNA, 22 bp, Artificial Sequence
  Synthetic oligonucleotide; CTA chr11 5266703 5266724 5266708 5266703 -
gatatttaggatatccattgct

SEQ ID NO: 136545 - DNA, 22 bp, Artificial Sequence
  Synthetic oligonucleotide; TTT chr11 5266696 5266717 5266701 5266696 -
aggatatccattgctttgagca

SEQ ID NO: 136546 - DNA, 22 bp, Artificial Sequence
  Synthetic oligonucleotide; TTA chr11 5266695 5266716 5266700 5266695 -
ggatatccattgctttgagcat

SEQ ID NO: 136547 - DNA, 22 bp, Artificial Sequence
  Synthetic oligonucleotide; TTG chr11 5266683 5266704 5266688 5266683 -
ctttgagcatttatcatttcta

SEQ ID NO: 136548 - DNA, 22 bp, Artificial Sequence
  Synthetic oligonucleotide; CTT chr11 5266680 5266701 5266685 5266680 -
tgagcatttatcatttctatgt

SEQ ID NO: 136549 - DNA, 22 bp, Artificial Sequence
  Synthetic oligonucleotide; TTT chr11 5266679 5266700 5266684 5266679 -
gagcatttatcatttctatgta

SEQ ID NO: 136550 - DNA, 22 bp, Artificial Sequence
  Synthetic oligonucleotide; TTG chr11 5266678 5266699 5266683 5266678 -
agcatttatcatttctatgtat

SEQ ID NO: 136551 - DNA, 22 bp, Artificial Sequence
  Synthetic oligonucleotide; TTT chr11 5266671 5266692 5266676 5266671 -
atcatttctatgtattgagaaa

SEQ ID NO: 136552 - DNA, 22 bp, Artificial Sequence
  Synthetic oligonucleotide; TTA chr11 5266670 5266691 5266675 5266670 -
tcatttctatgtattgagaaaa

SEQ ID NO: 136553 - DNA, 22 bp, Artificial Sequence
  Synthetic oligonucleotide; TTT chr11 5266664 5266685 5266669 5266664 -
ctatgtattgagaaaatttcaa

SEQ ID NO: 136554 - DNA, 22 bp, Artificial Sequence
  Synthetic oligonucleotide; TTC chr11 5266663 5266684 5266668 5266663 -
tatgtattgagaaaatttcaaa

SEQ ID NO: 136555 - DNA, 22 bp, Artificial Sequence
  Synthetic oligonucleotide; CTA chr11 5266661 5266682 5266666 5266661 -
tgtattgagaaaatttcaaatc

SEQ ID NO: 136556 - DNA, 22 bp, Artificial Sequence
  Synthetic oligonucleotide; TTG chr11 5266654 5266675 5266659 5266654 -
agaaaatttcaaatcctcattt

SEQ ID NO: 136557 - DNA, 22 bp, Artificial Sequence
  Synthetic oligonucleotide; TTT chr11 5266645 5266666 5266650 5266645 -
caaatcctcatttctagccatt

SEQ ID NO: 136558 - DNA, 22 bp, Artificial Sequence
  Synthetic oligonucleotide; TTC chr11 5266644 5266665 5266649 5266644 -
aaatcctcatttctagccattt

SEQ ID NO: 136559 - DNA, 22 bp, Artificial Sequence
  Synthetic oligonucleotide; CTC chr11 5266636 5266657 5266641 5266636 -
atttctagccattttgaaatat

SEQ ID NO: 136560 - DNA, 22 bp, Artificial Sequence
  Synthetic oligonucleotide; TTT chr11 5266632 5266653 5266637 5266632 -
ctagccattttgaaatatataa

SEQ ID NO: 136561 - DNA, 22 bp, Artificial Sequence
  Synthetic oligonucleotide; TTC chr11 5266631 5266652 5266636 5266631 -
tagccattttgaaatatataat

SEQ ID NO: 136562 - DNA, 22 bp, Artificial Sequence
  Synthetic oligonucleotide; CTA chr11 5266629 5266650 5266634 5266629 -
gccattttgaaatatataataa

SEQ ID NO: 136563 - DNA, 22 bp, Artificial Sequence
  Synthetic oligonucleotide; TTT chr11 5266622 5266643 5266627 5266622 -
tgaaatatataataaatagtaa

SEQ ID NO: 136564 - DNA, 22 bp, Artificial Sequence
  Synthetic oligonucleotide; TTT chr11 5266621 5266642 5266626 5266621 -
gaaatatataataaatagtaat

SEQ ID NO: 136565 - DNA, 22 bp, Artificial Sequence
  Synthetic oligonucleotide; TTG chr11 5266620 5266641 5266625 5266620 -
aaatatataataaatagtaatt

SEQ ID NO: 136566 - DNA, 22 bp, Artificial Sequence
  Synthetic oligonucleotide; TTA chr11 5266597 5266618 5266602 5266597 -
actatagtcaccctactcaaat

SEQ ID NO: 136567 - DNA, 22 bp, Artificial Sequence
  Synthetic oligonucleotide; CTA chr11 5266593 5266614 5266598 5266593 -
tagtcaccctactcaaatatca

SEQ ID NO: 136568 - DNA, 22 bp, Artificial Sequence
  Synthetic oligonucleotide; CTA chr11 5266582 5266603 5266587 5266582 -
ctcaaatatcaaacattatggc

SEQ ID NO: 136569 - DNA, 22 bp, Artificial Sequence
  Synthetic oligonucleotide; CTC chr11 5266579 5266600 5266584 5266579 -
aaatatcaaacattatggctta

SEQ ID NO: 136570 - DNA, 22 bp, Artificial Sequence
  Synthetic oligonucleotide; TTA chr11 5266564 5266585 5266569 5266564 -
tggcttaatccttctatccaac

SEQ ID NO: 136571 - DNA, 22 bp, Artificial Sequence
  Synthetic oligonucleotide; CTT chr11 5266558 5266579 5266563 5266558 -
aatccttctatccaactgtgtt

SEQ ID NO: 136572 - DNA, 22 bp, Artificial Sequence
  Synthetic oligonucleotide; TTA chr11 5266557 5266578 5266562 5266557 -
atccttctatccaactgtgttt

SEQ ID NO: 136573 - DNA, 22 bp, Artificial Sequence
  Synthetic oligonucleotide; CTT chr11 5266551 5266572 5266556 5266551 -
ctatccaactgtgtttgtacct

SEQ ID NO: 136574 - DNA, 22 bp, Artificial Sequence
  Synthetic oligonucleotide; TTC chr11 5266550 5266571 5266555 5266550 -
tatccaactgtgtttgtaccta

SEQ ID NO: 136575 - DNA, 22 bp, Artificial Sequence
  Synthetic oligonucleotide; CTA chr11 5266548 5266569 5266553 5266548 -
tccaactgtgtttgtacctatt

SEQ ID NO: 136576 - DNA, 22 bp, Artificial Sequence
  Synthetic oligonucleotide; CTG chr11 5266540 5266561 5266545 5266540 -
tgtttgtacctattaaccaaca

SEQ ID NO: 136577 - DNA, 22 bp, Artificial Sequence
  Synthetic oligonucleotide; TTT chr11 5266535 5266556 5266540 5266535 -
gtacctattaaccaacatctct

SEQ ID NO: 136578 - DNA, 22 bp, Artificial Sequence
  Synthetic oligonucleotide; TTG chr11 5266534 5266555 5266539 5266534 -
tacctattaaccaacatctctt

SEQ ID NO: 136579 - DNA, 22 bp, Artificial Sequence
  Synthetic oligonucleotide; CTA chr11 5266528 5266549 5266533 5266528 -
ttaaccaacatctcttaaatcc

SEQ ID NO: 136580 - DNA, 22 bp, Artificial Sequence
  Synthetic oligonucleotide; TTA chr11 5266525 5266546 5266530 5266525 -
accaacatctcttaaatcccct

SEQ ID NO: 136581 - DNA, 22 bp, Artificial Sequence
  Synthetic oligonucleotide; CTC chr11 5266514 5266535 5266519 5266514 -
ttaaatcccctcccatacacac

SEQ ID NO: 136582 - DNA, 22 bp, Artificial Sequence
  Synthetic oligonucleotide; CTT chr11 5266512 5266533 5266517 5266512 -
aaatcccctcccatacacactc

SEQ ID NO: 136583 - DNA, 22 bp, Artificial Sequence
  Synthetic oligonucleotide; TTA chr11 5266511 5266532 5266516 5266511 -
aatcccctcccatacacactca

SEQ ID NO: 136584 - DNA, 22 bp, Artificial Sequence
  Synthetic oligonucleotide; CTC chr11 5266502 5266523 5266507 5266502 -
ccatacacactcacactttttc

SEQ ID NO: 136585 - DNA, 22 bp, Artificial Sequence
  Synthetic oligonucleotide; CTC chr11 5266490 5266511 5266495 5266490 -
acactttttccagcctctgata

SEQ ID NO: 136586 - DNA, 22 bp, Artificial Sequence
  Synthetic oligonucleotide; CTT chr11 5266484 5266505 5266489 5266484 -
tttccagcctctgataactatc

SEQ ID NO: 136587 - DNA, 22 bp, Artificial Sequence
  Synthetic oligonucleotide; TTT chr11 5266483 5266504 5266488 5266483 -
ttccagcctctgataactatca

SEQ ID NO: 136588 - DNA, 22 bp, Artificial Sequence
  Synthetic oligonucleotide; TTT chr11 5266482 5266503 5266487 5266482 -
tccagcctctgataactatcat

SEQ ID NO: 136589 - DNA, 22 bp, Artificial Sequence
  Synthetic oligonucleotide; TTT chr11 5266481 5266502 5266486 5266481 -
ccagcctctgataactatcatt

SEQ ID NO: 136590 - DNA, 22 bp, Artificial Sequence
  Synthetic oligonucleotide; TTC chr11 5266480 5266501 5266485 5266480 -
cagcctctgataactatcattc

SEQ ID NO: 136591 - DNA, 22 bp, Artificial Sequence
  Synthetic oligonucleotide; CTC chr11 5266473 5266494 5266478 5266473 -
tgataactatcattctactctc

SEQ ID NO: 136592 - DNA, 22 bp, Artificial Sequence
  Synthetic oligonucleotide; CTG chr11 5266471 5266492 5266476 5266471 -
ataactatcattctactctcta

SEQ ID NO: 136593 - DNA, 22 bp, Artificial Sequence
  Synthetic oligonucleotide; CTA chr11 5266464 5266485 5266469 5266464 -
tcattctactctctaccaccat

SEQ ID NO: 136594 - DNA, 22 bp, Artificial Sequence
  Synthetic oligonucleotide; TTC chr11 5266458 5266479 5266463 5266458 -
tactctctaccaccatgagacc

SEQ ID NO: 136595 - DNA, 22 bp, Artificial Sequence
  Synthetic oligonucleotide; CTA chr11 5266456 5266477 5266461 5266456 -
ctctctaccaccatgagaccca

SEQ ID NO: 136596 - DNA, 22 bp, Artificial Sequence
  Synthetic oligonucleotide; CTC chr11 5266453 5266474 5266458 5266453 -
tctaccaccatgagacccactt

SEQ ID NO: 136597 - DNA, 22 bp, Artificial Sequence
  Synthetic oligonucleotide; CTC chr11 5266451 5266472 5266456 5266451 -
taccaccatgagacccactttt

SEQ ID NO: 136598 - DNA, 22 bp, Artificial Sequence
  Synthetic oligonucleotide; CTA chr11 5266449 5266470 5266454 5266449 -
ccaccatgagacccactttttt

SEQ ID NO: 136599 - DNA, 22 bp, Artificial Sequence
  Synthetic oligonucleotide; CTT chr11 5266431 5266452 5266436 5266431 -
ttttagctcccacagatgaata

SEQ ID NO: 136600 - DNA, 22 bp, Artificial Sequence
  Synthetic oligonucleotide; TTT chr11 5266430 5266451 5266435 5266430 -
tttagctcccacagatgaataa

SEQ ID NO: 136601 - DNA, 22 bp, Artificial Sequence
  Synthetic oligonucleotide; TTT chr11 5266429 5266450 5266434 5266429 -
ttagctcccacagatgaataaa

SEQ ID NO: 136602 - DNA, 22 bp, Artificial Sequence
  Synthetic oligonucleotide; TTT chr11 5266428 5266449 5266433 5266428 -
tagctcccacagatgaataaaa

SEQ ID NO: 136603 - DNA, 22 bp, Artificial Sequence
  Synthetic oligonucleotide; TTT chr11 5266427 5266448 5266432 5266427 -
agctcccacagatgaataaaaa

SEQ ID NO: 136604 - DNA, 22 bp, Artificial Sequence
  Synthetic oligonucleotide; TTA chr11 5266426 5266447 5266431 5266426 -
gctcccacagatgaataaaaac

SEQ ID NO: 136605 - DNA, 22 bp, Artificial Sequence
  Synthetic oligonucleotide; CTC chr11 5266422 5266443 5266427 5266422 -
ccacagatgaataaaaacatgt

SEQ ID NO: 136606 - DNA, 22 bp, Artificial Sequence
  Synthetic oligonucleotide; TTT chr11 5266393 5266414 5266398 5266393 -
gactttctgtatctggcttatt

SEQ ID NO: 136607 - DNA, 22 bp, Artificial Sequence
  Synthetic oligonucleotide; TTG chr11 5266392 5266413 5266397 5266392 -
actttctgtatctggcttattt

SEQ ID NO: 136608 - DNA, 22 bp, Artificial Sequence
  Synthetic oligonucleotide; CTT chr11 5266388 5266409 5266393 5266388 -
tctgtatctggcttattttatt

SEQ ID NO: 136609 - DNA, 22 bp, Artificial Sequence
  Synthetic oligonucleotide; TTT chr11 5266387 5266408 5266392 5266387 -
ctgtatctggcttattttatta

SEQ ID NO: 136610 - DNA, 22 bp, Artificial Sequence
  Synthetic oligonucleotide; TTC chr11 5266386 5266407 5266391 5266386 -
tgtatctggcttattttattat

SEQ ID NO: 136611 - DNA, 22 bp, Artificial Sequence
  Synthetic oligonucleotide; CTG chr11 5266384 5266405 5266389 5266384 -
tatctggcttattttattatct

SEQ ID NO: 136612 - DNA, 22 bp, Artificial Sequence
  Synthetic oligonucleotide; CTG chr11 5266378 5266399 5266383 5266378 -
gcttattttattatctatctct

SEQ ID NO: 136613 - DNA, 22 bp, Artificial Sequence
  Synthetic oligonucleotide; CTT chr11 5266374 5266395 5266379 5266374 -
attttattatctatctctttgg

SEQ ID NO: 136614 - DNA, 22 bp, Artificial Sequence
  Synthetic oligonucleotide; TTA chr11 5266373 5266394 5266378 5266373 -
ttttattatctatctctttggc

SEQ ID NO: 136615 - DNA, 22 bp, Artificial Sequence
  Synthetic oligonucleotide; TTT chr11 5266370 5266391 5266375 5266370 -
tattatctatctctttggcata

SEQ ID NO: 136616 - DNA, 22 bp, Artificial Sequence
  Synthetic oligonucleotide; TTT chr11 5266369 5266390 5266374 5266369 -
attatctatctctttggcatac

SEQ ID NO: 136617 - DNA, 22 bp, Artificial Sequence
  Synthetic oligonucleotide; TTA chr11 5266368 5266389 5266373 5266368 -
ttatctatctctttggcatacc

SEQ ID NO: 136618 - DNA, 22 bp, Artificial Sequence
  Synthetic oligonucleotide; TTA chr11 5266365 5266386 5266370 5266365 -
tctatctctttggcataccaag

SEQ ID NO: 136619 - DNA, 22 bp, Artificial Sequence
  Synthetic oligonucleotide; CTA chr11 5266361 5266382 5266366 5266361 -
tctctttggcataccaagagtt

SEQ ID NO: 136620 - DNA, 22 bp, Artificial Sequence
  Synthetic oligonucleotide; CTC chr11 5266357 5266378 5266362 5266357 -
tttggcataccaagagtttgtt

SEQ ID NO: 136621 - DNA, 22 bp, Artificial Sequence
  Synthetic oligonucleotide; CTT chr11 5266355 5266376 5266360 5266355 -
tggcataccaagagtttgtttt

SEQ ID NO: 136622 - DNA, 22 bp, Artificial Sequence
  Synthetic oligonucleotide; TTT chr11 5266354 5266375 5266359 5266354 -
ggcataccaagagtttgttttt

SEQ ID NO: 136623 - DNA, 22 bp, Artificial Sequence
  Synthetic oligonucleotide; TTG chr11 5266353 5266374 5266358 5266353 -
gcataccaagagtttgtttttg

SEQ ID NO: 136624 - DNA, 22 bp, Artificial Sequence
  Synthetic oligonucleotide; TTT chr11 5266338 5266359 5266343 5266338 -
gtttttgttctgcttcagggct

SEQ ID NO: 136625 - DNA, 22 bp, Artificial Sequence
  Synthetic oligonucleotide; TTG chr11 5266337 5266358 5266342 5266337 -
tttttgttctgcttcagggctt

SEQ ID NO: 136626 - DNA, 22 bp, Artificial Sequence
  Synthetic oligonucleotide; TTT chr11 5266334 5266355 5266339 5266334 -
ttgttctgcttcagggctttca

SEQ ID NO: 136627 - DNA, 22 bp, Artificial Sequence
  Synthetic oligonucleotide; TTT chr11 5266333 5266354 5266338 5266333 -
tgttctgcttcagggctttcaa

SEQ ID NO: 136628 - DNA, 22 bp, Artificial Sequence
  Synthetic oligonucleotide; TTT chr11 5266332 5266353 5266337 5266332 -
gttctgcttcagggctttcaat

SEQ ID NO: 136629 - DNA, 22 bp, Artificial Sequence
  Synthetic oligonucleotide; TTG chr11 5266331 5266352 5266336 5266331 -
ttctgcttcagggctttcaatt

SEQ ID NO: 136630 - DNA, 22 bp, Artificial Sequence
  Synthetic oligonucleotide; TTC chr11 5266328 5266349 5266333 5266328 -
tgcttcagggctttcaattaac

SEQ ID NO: 136631 - DNA, 22 bp, Artificial Sequence
  Synthetic oligonucleotide; CTG chr11 5266326 5266347 5266331 5266326 -
cttcagggctttcaattaacat

SEQ ID NO: 136632 - DNA, 22 bp, Artificial Sequence
  Synthetic oligonucleotide; CTT chr11 5266323 5266344 5266328 5266323 -
cagggctttcaattaacataat

SEQ ID NO: 136633 - DNA, 22 bp, Artificial Sequence
  Synthetic oligonucleotide; TTC chr11 5266322 5266343 5266327 5266322 -
agggctttcaattaacataatg

SEQ ID NO: 136634 - DNA, 22 bp, Artificial Sequence
  Synthetic oligonucleotide; CTT chr11 5266315 5266336 5266320 5266315 -
tcaattaacataatgacctctg

SEQ ID NO: 136635 - DNA, 22 bp, Artificial Sequence
  Synthetic oligonucleotide; TTT chr11 5266314 5266335 5266319 5266314 -
caattaacataatgacctctgg

SEQ ID NO: 136636 - DNA, 22 bp, Artificial Sequence
  Synthetic oligonucleotide; TTC chr11 5266313 5266334 5266318 5266313 -
aattaacataatgacctctggt

SEQ ID NO: 136637 - DNA, 22 bp, Artificial Sequence
  Synthetic oligonucleotide; TTA chr11 5266308 5266329 5266313 5266308 -
acataatgacctctggttccat

SEQ ID NO: 136638 - DNA, 22 bp, Artificial Sequence
  Synthetic oligonucleotide; CTC chr11 5266295 5266316 5266300 5266295 -
tggttccatccatgttgctaca

SEQ ID NO: 136639 - DNA, 22 bp, Artificial Sequence
  Synthetic oligonucleotide; CTG chr11 5266293 5266314 5266298 5266293 -
gttccatccatgttgctacaaa

SEQ ID NO: 136640 - DNA, 22 bp, Artificial Sequence
  Synthetic oligonucleotide; TTC chr11 5266289 5266310 5266294 5266289 -
catccatgttgctacaaatgac

SEQ ID NO: 136641 - DNA, 22 bp, Artificial Sequence
  Synthetic oligonucleotide; TTG chr11 5266278 5266299 5266283 5266278 -
ctacaaatgacaagatttcatt

SEQ ID NO: 136642 - DNA, 22 bp, Artificial Sequence
  Synthetic oligonucleotide; CTA chr11 5266275 5266296 5266280 5266275 -
caaatgacaagatttcattctt

SEQ ID NO: 136643 - DNA, 22 bp, Artificial Sequence
  Synthetic oligonucleotide; TTT chr11 5266260 5266281 5266265 5266260 -
cattctttttcatggcaaaata

SEQ ID NO: 136644 - DNA, 22 bp, Artificial Sequence
  Synthetic oligonucleotide; TTC chr11 5266259 5266280 5266264 5266259 -
attctttttcatggcaaaatag

SEQ ID NO: 136645 - DNA, 22 bp, Artificial Sequence
  Synthetic oligonucleotide; TTC chr11 5266255 5266276 5266260 5266255 -
tttttcatggcaaaatagtact

SEQ ID NO: 136646 - DNA, 22 bp, Artificial Sequence
  Synthetic oligonucleotide; CTT chr11 5266253 5266274 5266258 5266253 -
tttcatggcaaaatagtactgt

SEQ ID NO: 136647 - DNA, 22 bp, Artificial Sequence
  Synthetic oligonucleotide; TTT chr11 5266252 5266273 5266257 5266252 -
ttcatggcaaaatagtactgtg

SEQ ID NO: 136648 - DNA, 22 bp, Artificial Sequence
  Synthetic oligonucleotide; TTT chr11 5266251 5266272 5266256 5266251 -
tcatggcaaaatagtactgtgc

SEQ ID NO: 136649 - DNA, 22 bp, Artificial Sequence
  Synthetic oligonucleotide; TTT chr11 5266250 5266271 5266255 5266250 -
catggcaaaatagtactgtgca

SEQ ID NO: 136650 - DNA, 22 bp, Artificial Sequence
  Synthetic oligonucleotide; TTC chr11 5266249 5266270 5266254 5266249 -
atggcaaaatagtactgtgcaa

SEQ ID NO: 136651 - DNA, 22 bp, Artificial Sequence
  Synthetic oligonucleotide; CTG chr11 5266232 5266253 5266237 5266232 -
tgcaaaaatacaattttttaat

SEQ ID NO: 136652 - DNA, 22 bp, Artificial Sequence
  Synthetic oligonucleotide; TTT chr11 5266216 5266237 5266221 5266216 -
tttaatccgttcatctgttgat

SEQ ID NO: 136653 - DNA, 22 bp, Artificial Sequence
  Synthetic oligonucleotide; TTT chr11 5266215 5266236 5266220 5266215 -
ttaatccgttcatctgttgata

SEQ ID NO: 136654 - DNA, 22 bp, Artificial Sequence
  Synthetic oligonucleotide; TTT chr11 5266214 5266235 5266219 5266214 -
taatccgttcatctgttgatag

SEQ ID NO: 136655 - DNA, 22 bp, Artificial Sequence
  Synthetic oligonucleotide; TTT chr11 5266213 5266234 5266218 5266213 -
aatccgttcatctgttgataga

SEQ ID NO: 136656 - DNA, 22 bp, Artificial Sequence
  Synthetic oligonucleotide; TTA chr11 5266212 5266233 5266217 5266212 -
atccgttcatctgttgatagac

SEQ ID NO: 136657 - DNA, 22 bp, Artificial Sequence
  Synthetic oligonucleotide; TTC chr11 5266204 5266225 5266209 5266204 -
atctgttgatagacacttaggt

SEQ ID NO: 136658 - DNA, 22 bp, Artificial Sequence
  Synthetic oligonucleotide; CTG chr11 5266199 5266220 5266204 5266199 -
ttgatagacacttaggttgatc

SEQ ID NO: 136659 - DNA, 22 bp, Artificial Sequence
  Synthetic oligonucleotide; TTG chr11 5266196 5266217 5266201 5266196 -
atagacacttaggttgatccca

SEQ ID NO: 136660 - DNA, 22 bp, Artificial Sequence
  Synthetic oligonucleotide; CTT chr11 5266186 5266207 5266191 5266186 -
aggttgatcccaaaccttaact

SEQ ID NO: 136661 - DNA, 22 bp, Artificial Sequence
  Synthetic oligonucleotide; TTA chr11 5266185 5266206 5266190 5266185 -
ggttgatcccaaaccttaacta

SEQ ID NO: 136662 - DNA, 22 bp, Artificial Sequence
  Synthetic oligonucleotide; TTG chr11 5266180 5266201 5266185 5266180 -
atcccaaaccttaactattgtg

SEQ ID NO: 136663 - DNA, 22 bp, Artificial Sequence
  Synthetic oligonucleotide; CTT chr11 5266168 5266189 5266173 5266168 -
aactattgtgaatagtgcttca

SEQ ID NO: 136664 - DNA, 22 bp, Artificial Sequence
  Synthetic oligonucleotide; TTA chr11 5266167 5266188 5266172 5266167 -
actattgtgaatagtgcttcaa

SEQ ID NO: 136665 - DNA, 22 bp, Artificial Sequence
  Synthetic oligonucleotide; CTA chr11 5266163 5266184 5266168 5266163 -
ttgtgaatagtgcttcaataaa

SEQ ID NO: 136666 - DNA, 22 bp, Artificial Sequence
  Synthetic oligonucleotide; TTG chr11 5266160 5266181 5266165 5266160 -
tgaatagtgcttcaataaacat

SEQ ID NO: 136667 - DNA, 22 bp, Artificial Sequence
  Synthetic oligonucleotide; CTT chr11 5266148 5266169 5266153 5266148 -
caataaacatgagtgtaatgtg

SEQ ID NO: 136668 - DNA, 22 bp, Artificial Sequence
  Synthetic oligonucleotide; TTC chr11 5266147 5266168 5266152 5266147 -
aataaacatgagtgtaatgtgt

SEQ ID NO: 136669 - DNA, 22 bp, Artificial Sequence
  Synthetic oligonucleotide; TTG chr11 5266119 5266140 5266124 5266119 -
gatatactgatttcctttcttt

SEQ ID NO: 136670 - DNA, 22 bp, Artificial Sequence
  Synthetic oligonucleotide; CTG chr11 5266110 5266131 5266115 5266110 -
atttcctttcttttggataaat

SEQ ID NO: 136671 - DNA, 22 bp, Artificial Sequence
  Synthetic oligonucleotide; TTT chr11 5266106 5266127 5266111 5266106 -
cctttcttttggataaataacc

SEQ ID NO: 136672 - DNA, 22 bp, Artificial Sequence
  Synthetic oligonucleotide; TTC chr11 5266105 5266126 5266110 5266105 -
ctttcttttggataaataacca

SEQ ID NO: 136673 - DNA, 22 bp, Artificial Sequence
  Synthetic oligonucleotide; CTT chr11 5266102 5266123 5266107 5266102 -
tcttttggataaataaccacta

SEQ ID NO: 136674 - DNA, 22 bp, Artificial Sequence
  Synthetic oligonucleotide; TTT chr11 5266101 5266122 5266106 5266101 -
cttttggataaataaccactag

SEQ ID NO: 136675 - DNA, 22 bp, Artificial Sequence
  Synthetic oligonucleotide; TTC chr11 5266100 5266121 5266105 5266100 -
ttttggataaataaccactagt

SEQ ID NO: 136676 - DNA, 22 bp, Artificial Sequence
  Synthetic oligonucleotide; CTT chr11 5266098 5266119 5266103 5266098 -
ttggataaataaccactagtga

SEQ ID NO: 136677 - DNA, 22 bp, Artificial Sequence
  Synthetic oligonucleotide; TTT chr11 5266097 5266118 5266102 5266097 -
tggataaataaccactagtgag

SEQ ID NO: 136678 - DNA, 22 bp, Artificial Sequence
  Synthetic oligonucleotide; TTT chr11 5266096 5266117 5266101 5266096 -
ggataaataaccactagtgaga

SEQ ID NO: 136679 - DNA, 22 bp, Artificial Sequence
  Synthetic oligonucleotide; TTG chr11 5266095 5266116 5266100 5266095 -
gataaataaccactagtgagat

SEQ ID NO: 136680 - DNA, 22 bp, Artificial Sequence
  Synthetic oligonucleotide; CTA chr11 5266080 5266101 5266085 5266080 -
gtgagattgctggattgtatga

SEQ ID NO: 136681 - DNA, 22 bp, Artificial Sequence
  Synthetic oligonucleotide; TTG chr11 5266071 5266092 5266076 5266071 -
ctggattgtatgatagttctgt

SEQ ID NO: 136682 - DNA, 22 bp, Artificial Sequence
  Synthetic oligonucleotide; CTG chr11 5266068 5266089 5266073 5266068 -
gattgtatgatagttctgtttt

SEQ ID NO: 136683 - DNA, 22 bp, Artificial Sequence
  Synthetic oligonucleotide; TTG chr11 5266063 5266084 5266068 5266063 -
tatgatagttctgtttttagtt

SEQ ID NO: 136684 - DNA, 22 bp, Artificial Sequence
  Synthetic oligonucleotide; TTC chr11 5266052 5266073 5266057 5266052 -
tgtttttagtttactgagaaat

SEQ ID NO: 136685 - DNA, 22 bp, Artificial Sequence
  Synthetic oligonucleotide; CTG chr11 5266050 5266071 5266055 5266050 -
tttttagtttactgagaaatct

SEQ ID NO: 136686 - DNA, 22 bp, Artificial Sequence
  Synthetic oligonucleotide; TTT chr11 5266047 5266068 5266052 5266047 -
ttagtttactgagaaatcttca

SEQ ID NO: 136687 - DNA, 22 bp, Artificial Sequence
  Synthetic oligonucleotide; TTT chr11 5266046 5266067 5266051 5266046 -
tagtttactgagaaatcttcat

SEQ ID NO: 136688 - DNA, 22 bp, Artificial Sequence
  Synthetic oligonucleotide; TTT chr11 5266045 5266066 5266050 5266045 -
agtttactgagaaatcttcata

SEQ ID NO: 136689 - DNA, 22 bp, Artificial Sequence
  Synthetic oligonucleotide; TTA chr11 5266044 5266065 5266049 5266044 -
gtttactgagaaatcttcatac

SEQ ID NO: 136690 - DNA, 22 bp, Artificial Sequence
  Synthetic oligonucleotide; TTT chr11 5266040 5266061 5266045 5266040 -
actgagaaatcttcatactgtt

SEQ ID NO: 136691 - DNA, 22 bp, Artificial Sequence
  Synthetic oligonucleotide; TTA chr11 5266039 5266060 5266044 5266039 -
ctgagaaatcttcatactgttt

SEQ ID NO: 136692 - DNA, 22 bp, Artificial Sequence
  Synthetic oligonucleotide; CTG chr11 5266036 5266057 5266041 5266036 -
agaaatcttcatactgttttcc

SEQ ID NO: 136693 - DNA, 22 bp, Artificial Sequence
  Synthetic oligonucleotide; CTT chr11 5266027 5266048 5266032 5266027 -
catactgttttccataatggtt

SEQ ID NO: 136694 - DNA, 22 bp, Artificial Sequence
  Synthetic oligonucleotide; TTC chr11 5266026 5266047 5266031 5266026 -
atactgttttccataatggttg

SEQ ID NO: 136695 - DNA, 22 bp, Artificial Sequence
  Synthetic oligonucleotide; CTG chr11 5266020 5266041 5266025 5266020 -
ttttccataatggttgtactat

SEQ ID NO: 136696 - DNA, 22 bp, Artificial Sequence
  Synthetic oligonucleotide; TTT chr11 5266017 5266038 5266022 5266017 -
tccataatggttgtactatttt

SEQ ID NO: 136697 - DNA, 22 bp, Artificial Sequence
  Synthetic oligonucleotide; TTT chr11 5266016 5266037 5266021 5266016 -
ccataatggttgtactatttta

SEQ ID NO: 136698 - DNA, 22 bp, Artificial Sequence
  Synthetic oligonucleotide; TTC chr11 5266015 5266036 5266020 5266015 -
cataatggttgtactattttac

SEQ ID NO: 136699 - DNA, 22 bp, Artificial Sequence
  Synthetic oligonucleotide; TTG chr11 5266004 5266025 5266009 5266004 -
tactattttacattcccaccaa

SEQ ID NO: 136700 - DNA, 22 bp, Artificial Sequence
  Synthetic oligonucleotide; CTA chr11 5265999 5266020 5266004 5265999 -
ttttacattcccaccaacagtg

SEQ ID NO: 136701 - DNA, 22 bp, Artificial Sequence
  Synthetic oligonucleotide; TTT chr11 5265996 5266017 5266001 5265996 -
tacattcccaccaacagtgtgt

SEQ ID NO: 136702 - DNA, 22 bp, Artificial Sequence
  Synthetic oligonucleotide; TTT chr11 5265995 5266016 5266000 5265995 -
acattcccaccaacagtgtgta

SEQ ID NO: 136703 - DNA, 22 bp, Artificial Sequence
  Synthetic oligonucleotide; TTA chr11 5265994 5266015 5265999 5265994 -
cattcccaccaacagtgtgtaa

SEQ ID NO: 136704 - DNA, 22 bp, Artificial Sequence
  Synthetic oligonucleotide; TTC chr11 5265989 5266010 5265994 5265989 -
ccaccaacagtgtgtaagaaag

SEQ ID NO: 136705 - DNA, 22 bp, Artificial Sequence
  Synthetic oligonucleotide; TTC chr11 5265962 5265983 5265967 5265962 -
ccttttctccatatcctcacaa

SEQ ID NO: 136706 - DNA, 22 bp, Artificial Sequence
  Synthetic oligonucleotide; CTT chr11 5265958 5265979 5265963 5265958 -
ttctccatatcctcacaaggat

SEQ ID NO: 136707 - DNA, 22 bp, Artificial Sequence
  Synthetic oligonucleotide; TTT chr11 5265957 5265978 5265962 5265957 -
tctccatatcctcacaaggatc

SEQ ID NO: 136708 - DNA, 22 bp, Artificial Sequence
  Synthetic oligonucleotide; TTT chr11 5265956 5265977 5265961 5265956 -
ctccatatcctcacaaggatct

SEQ ID NO: 136709 - DNA, 22 bp, Artificial Sequence
  Synthetic oligonucleotide; TTC chr11 5265955 5265976 5265960 5265955 -
tccatatcctcacaaggatctg

SEQ ID NO: 136710 - DNA, 22 bp, Artificial Sequence
  Synthetic oligonucleotide; CTC chr11 5265953 5265974 5265958 5265953 -
catatcctcacaaggatctgtt

SEQ ID NO: 136711 - DNA, 22 bp, Artificial Sequence
  Synthetic oligonucleotide; CTC chr11 5265944 5265965 5265949 5265944 -
acaaggatctgttattttttgt

SEQ ID NO: 136712 - DNA, 22 bp, Artificial Sequence
  Synthetic oligonucleotide; CTG chr11 5265933 5265954 5265938 5265933 -
ttattttttgtcttttttgtta

SEQ ID NO: 136713 - DNA, 22 bp, Artificial Sequence
  Synthetic oligonucleotide; TTA chr11 5265930 5265951 5265935 5265930 -
ttttttgtcttttttgttaata

SEQ ID NO: 136714 - DNA, 22 bp, Artificial Sequence
  Synthetic oligonucleotide; TTT chr11 5265927 5265948 5265932 5265927 -
tttgtcttttttgttaatagcc

SEQ ID NO: 136715 - DNA, 22 bp, Artificial Sequence
  Synthetic oligonucleotide; TTT chr11 5265926 5265947 5265931 5265926 -
ttgtcttttttgttaatagccg

SEQ ID NO: 136716 - DNA, 22 bp, Artificial Sequence
  Synthetic oligonucleotide; TTT chr11 5265925 5265946 5265930 5265925 -
tgtcttttttgttaatagccgt

SEQ ID NO: 136717 - DNA, 22 bp, Artificial Sequence
  Synthetic oligonucleotide; TTT chr11 5265924 5265945 5265929 5265924 -
gtcttttttgttaatagccgtt

SEQ ID NO: 136718 - DNA, 22 bp, Artificial Sequence
  Synthetic oligonucleotide; TTG chr11 5265923 5265944 5265928 5265923 -
tcttttttgttaatagccgttt

SEQ ID NO: 136719 - DNA, 22 bp, Artificial Sequence
  Synthetic oligonucleotide; CTT chr11 5265919 5265940 5265924 5265919 -
ttttgttaatagccgttttaac

SEQ ID NO: 136720 - DNA, 22 bp, Artificial Sequence
  Synthetic oligonucleotide; TTT chr11 5265918 5265939 5265923 5265918 -
tttgttaatagccgttttaact

SEQ ID NO: 136721 - DNA, 22 bp, Artificial Sequence
  Synthetic oligonucleotide; TTT chr11 5265917 5265938 5265922 5265917 -
ttgttaatagccgttttaacta

SEQ ID NO: 136722 - DNA, 22 bp, Artificial Sequence
  Synthetic oligonucleotide; TTT chr11 5265916 5265937 5265921 5265916 -
tgttaatagccgttttaactag

SEQ ID NO: 136723 - DNA, 22 bp, Artificial Sequence
  Synthetic oligonucleotide; TTT chr11 5265915 5265936 5265920 5265915 -
gttaatagccgttttaactaga

SEQ ID NO: 136724 - DNA, 22 bp, Artificial Sequence
  Synthetic oligonucleotide; TTG chr11 5265914 5265935 5265919 5265914 -
ttaatagccgttttaactagag

SEQ ID NO: 136725 - DNA, 22 bp, Artificial Sequence
  Synthetic oligonucleotide; TTA chr11 5265911 5265932 5265916 5265911 -
atagccgttttaactagagtaa

SEQ ID NO: 136726 - DNA, 22 bp, Artificial Sequence
  Synthetic oligonucleotide; TTT chr11 5265901 5265922 5265906 5265901 -
taactagagtaagtagatatct

SEQ ID NO: 136727 - DNA, 22 bp, Artificial Sequence
  Synthetic oligonucleotide; TTT chr11 5265900 5265921 5265905 5265900 -
aactagagtaagtagatatctc

SEQ ID NO: 136728 - DNA, 22 bp, Artificial Sequence
  Synthetic oligonucleotide; TTA chr11 5265899 5265920 5265904 5265899 -
actagagtaagtagatatctca

SEQ ID NO: 136729 - DNA, 22 bp, Artificial Sequence
  Synthetic oligonucleotide; CTA chr11 5265895 5265916 5265900 5265895 -
gagtaagtagatatctcattgt

SEQ ID NO: 136730 - DNA, 22 bp, Artificial Sequence
  Synthetic oligonucleotide; CTC chr11 5265878 5265899 5265883 5265878 -
attgtagttttgatttgcattt

SEQ ID NO: 136731 - DNA, 22 bp, Artificial Sequence
  Synthetic oligonucleotide; TTG chr11 5265874 5265895 5265879 5265874 -
tagttttgatttgcatttccct

SEQ ID NO: 136732 - DNA, 22 bp, Artificial Sequence
  Synthetic oligonucleotide; TTT chr11 5265868 5265889 5265873 5265868 -
tgatttgcatttccctgatcat

SEQ ID NO: 136733 - DNA, 22 bp, Artificial Sequence
  Synthetic oligonucleotide; TTT chr11 5265867 5265888 5265872 5265867 -
gatttgcatttccctgatcatt

SEQ ID NO: 136734 - DNA, 22 bp, Artificial Sequence
  Synthetic oligonucleotide; TTG chr11 5265866 5265887 5265871 5265866 -
atttgcatttccctgatcatta

SEQ ID NO: 136735 - DNA, 22 bp, Artificial Sequence
  Synthetic oligonucleotide; TTT chr11 5265862 5265883 5265867 5265862 -
gcatttccctgatcattagtga

SEQ ID NO: 136736 - DNA, 22 bp, Artificial Sequence
  Synthetic oligonucleotide; TTG chr11 5265861 5265882 5265866 5265861 -
catttccctgatcattagtgat

SEQ ID NO: 136737 - DNA, 22 bp, Artificial Sequence
  Synthetic oligonucleotide; TTT chr11 5265856 5265877 5265861 5265856 -
ccctgatcattagtgatgttga

SEQ ID NO: 136738 - DNA, 22 bp, Artificial Sequence
  Synthetic oligonucleotide; TTC chr11 5265855 5265876 5265860 5265855 -
cctgatcattagtgatgttgag

SEQ ID NO: 136739 - DNA, 22 bp, Artificial Sequence
  Synthetic oligonucleotide; CTG chr11 5265851 5265872 5265856 5265851 -
atcattagtgatgttgagaatt

SEQ ID NO: 136740 - DNA, 22 bp, Artificial Sequence
  Synthetic oligonucleotide; TTA chr11 5265844 5265865 5265849 5265844 -
gtgatgttgagaattttttcat

SEQ ID NO: 136741 - DNA, 22 bp, Artificial Sequence
  Synthetic oligonucleotide; TTG chr11 5265835 5265856 5265840 5265835 -
agaattttttcatatgtttgtt

SEQ ID NO: 136742 - DNA, 22 bp, Artificial Sequence
  Synthetic oligonucleotide; TTT chr11 5265828 5265849 5265833 5265828 -
tttcatatgtttgttggtcatt

SEQ ID NO: 136743 - DNA, 22 bp, Artificial Sequence
  Synthetic oligonucleotide; TTT chr11 5265827 5265848 5265832 5265827 -
ttcatatgtttgttggtcattt

SEQ ID NO: 136744 - DNA, 22 bp, Artificial Sequence
  Synthetic oligonucleotide; TTT chr11 5265826 5265847 5265831 5265826 -
tcatatgtttgttggtcatttg

SEQ ID NO: 136745 - DNA, 22 bp, Artificial Sequence
  Synthetic oligonucleotide; TTT chr11 5265825 5265846 5265830 5265825 -
catatgtttgttggtcatttgt

SEQ ID NO: 136746 - DNA, 22 bp, Artificial Sequence
  Synthetic oligonucleotide; TTC chr11 5265824 5265845 5265829 5265824 -
atatgtttgttggtcatttgta

SEQ ID NO: 136747 - DNA, 22 bp, Artificial Sequence
  Synthetic oligonucleotide; TTT chr11 5265816 5265837 5265821 5265816 -
gttggtcatttgtatatctttt

SEQ ID NO: 136748 - DNA, 22 bp, Artificial Sequence
  Synthetic oligonucleotide; TTG chr11 5265815 5265836 5265820 5265815 -
ttggtcatttgtatatcttttt

SEQ ID NO: 136749 - DNA, 22 bp, Artificial Sequence
  Synthetic oligonucleotide; TTG chr11 5265812 5265833 5265817 5265812 -
gtcatttgtatatctttttctg

SEQ ID NO: 136750 - DNA, 22 bp, Artificial Sequence
  Synthetic oligonucleotide; TTT chr11 5265805 5265826 5265810 5265805 -
gtatatctttttctgagaattg

SEQ ID NO: 136751 - DNA, 22 bp, Artificial Sequence
  Synthetic oligonucleotide; TTG chr11 5265804 5265825 5265809 5265804 -
tatatctttttctgagaattgt

SEQ ID NO: 136752 - DNA, 22 bp, Artificial Sequence
  Synthetic oligonucleotide; CTT chr11 5265796 5265817 5265801 5265796 -
tttctgagaattgtctgttcat

SEQ ID NO: 136753 - DNA, 22 bp, Artificial Sequence
  Synthetic oligonucleotide; TTT chr11 5265795 5265816 5265800 5265795 -
ttctgagaattgtctgttcatg

SEQ ID NO: 136754 - DNA, 22 bp, Artificial Sequence
  Synthetic oligonucleotide; TTT chr11 5265794 5265815 5265799 5265794 -
tctgagaattgtctgttcatgt

SEQ ID NO: 136755 - DNA, 22 bp, Artificial Sequence
  Synthetic oligonucleotide; TTT chr11 5265793 5265814 5265798 5265793 -
ctgagaattgtctgttcatgtc

SEQ ID NO: 136756 - DNA, 22 bp, Artificial Sequence
  Synthetic oligonucleotide; TTC chr11 5265792 5265813 5265797 5265792 -
tgagaattgtctgttcatgtcc

SEQ ID NO: 136757 - DNA, 22 bp, Artificial Sequence
  Synthetic oligonucleotide; CTG chr11 5265790 5265811 5265795 5265790 -
agaattgtctgttcatgtcctt

SEQ ID NO: 136758 - DNA, 22 bp, Artificial Sequence
  Synthetic oligonucleotide; TTG chr11 5265783 5265804 5265788 5265783 -
tctgttcatgtccttagcctac

SEQ ID NO: 136759 - DNA, 22 bp, Artificial Sequence
  Synthetic oligonucleotide; CTG chr11 5265779 5265800 5265784 5265779 -
ttcatgtccttagcctactttt

SEQ ID NO: 136760 - DNA, 22 bp, Artificial Sequence
  Synthetic oligonucleotide; TTC chr11 5265776 5265797 5265781 5265776 -
atgtccttagcctactttttat

SEQ ID NO: 136761 - DNA, 22 bp, Artificial Sequence
  Synthetic oligonucleotide; CTT chr11 5265768 5265789 5265773 5265768 -
agcctactttttattgggattg

SEQ ID NO: 136762 - DNA, 22 bp, Artificial Sequence
  Synthetic oligonucleotide; TTA chr11 5265767 5265788 5265772 5265767 -
gcctactttttattgggattgt

SEQ ID NO: 136763 - DNA, 22 bp, Artificial Sequence
  Synthetic oligonucleotide; CTA chr11 5265762 5265783 5265767 5265762 -
ctttttattgggattgtttgtt

SEQ ID NO: 136764 - DNA, 22 bp, Artificial Sequence
  Synthetic oligonucleotide; CTT chr11 5265759 5265780 5265764 5265759 -
tttattgggattgtttgttatt

SEQ ID NO: 136765 - DNA, 22 bp, Artificial Sequence
  Synthetic oligonucleotide; TTT chr11 5265758 5265779 5265763 5265758 -
ttattgggattgtttgttattt

SEQ ID NO: 136766 - DNA, 22 bp, Artificial Sequence
  Synthetic oligonucleotide; TTT chr11 5265757 5265778 5265762 5265757 -
tattgggattgtttgttatttt

SEQ ID NO: 136767 - DNA, 22 bp, Artificial Sequence
  Synthetic oligonucleotide; TTT chr11 5265756 5265777 5265761 5265756 -
attgggattgtttgttattttc

SEQ ID NO: 136768 - DNA, 22 bp, Artificial Sequence
  Synthetic oligonucleotide; TTA chr11 5265755 5265776 5265760 5265755 -
ttgggattgtttgttattttct

SEQ ID NO: 136769 - DNA, 22 bp, Artificial Sequence
  Synthetic oligonucleotide; TTG chr11 5265752 5265773 5265757 5265752 -
ggattgtttgttattttcttga

SEQ ID NO: 136770 - DNA, 22 bp, Artificial Sequence
  Synthetic oligonucleotide; TTG chr11 5265746 5265767 5265751 5265746 -
tttgttattttcttgataatct

SEQ ID NO: 136771 - DNA, 22 bp, Artificial Sequence
  Synthetic oligonucleotide; TTT chr11 5265743 5265764 5265748 5265743 -
gttattttcttgataatctatt

SEQ ID NO: 136772 - DNA, 22 bp, Artificial Sequence
  Synthetic oligonucleotide; TTG chr11 5265742 5265763 5265747 5265742 -
ttattttcttgataatctattt

SEQ ID NO: 136773 - DNA, 22 bp, Artificial Sequence
  Synthetic oligonucleotide; TTA chr11 5265739 5265760 5265744 5265739 -
ttttcttgataatctatttgtg

SEQ ID NO: 136774 - DNA, 22 bp, Artificial Sequence
  Synthetic oligonucleotide; TTT chr11 5265736 5265757 5265741 5265736 -
tcttgataatctatttgtgttc

SEQ ID NO: 136775 - DNA, 22 bp, Artificial Sequence
  Synthetic oligonucleotide; TTT chr11 5265735 5265756 5265740 5265735 -
cttgataatctatttgtgttca

SEQ ID NO: 136776 - DNA, 22 bp, Artificial Sequence
  Synthetic oligonucleotide; TTC chr11 5265734 5265755 5265739 5265734 -
ttgataatctatttgtgttcat

SEQ ID NO: 136777 - DNA, 22 bp, Artificial Sequence
  Synthetic oligonucleotide; CTT chr11 5265732 5265753 5265737 5265732 -
gataatctatttgtgttcattt

SEQ ID NO: 136778 - DNA, 22 bp, Artificial Sequence
  Synthetic oligonucleotide; TTG chr11 5265731 5265752 5265736 5265731 -
ataatctatttgtgttcatttt

SEQ ID NO: 136779 - DNA, 22 bp, Artificial Sequence
  Synthetic oligonucleotide; CTA chr11 5265723 5265744 5265728 5265723 -
tttgtgttcattttagagcctg

SEQ ID NO: 136780 - DNA, 22 bp, Artificial Sequence
  Synthetic oligonucleotide; TTT chr11 5265720 5265741 5265725 5265720 -
gtgttcattttagagcctggat

SEQ ID NO: 136781 - DNA, 22 bp, Artificial Sequence
  Synthetic oligonucleotide; TTG chr11 5265719 5265740 5265724 5265719 -
tgttcattttagagcctggata

SEQ ID NO: 136782 - DNA, 22 bp, Artificial Sequence
  Synthetic oligonucleotide; TTC chr11 5265714 5265735 5265719 5265714 -
attttagagcctggatattatt

SEQ ID NO: 136783 - DNA, 22 bp, Artificial Sequence
  Synthetic oligonucleotide; TTT chr11 5265710 5265731 5265715 5265710 -
tagagcctggatattattcttt

SEQ ID NO: 136784 - DNA, 22 bp, Artificial Sequence
  Synthetic oligonucleotide; TTT chr11 5265709 5265730 5265714 5265709 -
agagcctggatattattctttt

SEQ ID NO: 136785 - DNA, 22 bp, Artificial Sequence
  Synthetic oligonucleotide; TTA chr11 5265708 5265729 5265713 5265708 -
gagcctggatattattcttttg

SEQ ID NO: 136786 - DNA, 22 bp, Artificial Sequence
  Synthetic oligonucleotide; CTG chr11 5265701 5265722 5265706 5265701 -
gatattattcttttgtcagatg

SEQ ID NO: 136787 - DNA, 22 bp, Artificial Sequence
  Synthetic oligonucleotide; TTA chr11 5265694 5265715 5265699 5265694 -
ttcttttgtcagatgtatagat

SEQ ID NO: 136788 - DNA, 22 bp, Artificial Sequence
  Synthetic oligonucleotide; TTC chr11 5265691 5265712 5265696 5265691 -
ttttgtcagatgtatagattgt

SEQ ID NO: 136789 - DNA, 22 bp, Artificial Sequence
  Synthetic oligonucleotide; CTT chr11 5265689 5265710 5265694 5265689 -
ttgtcagatgtatagattgtga

SEQ ID NO: 136790 - DNA, 22 bp, Artificial Sequence
  Synthetic oligonucleotide; TTT chr11 5265688 5265709 5265693 5265688 -
tgtcagatgtatagattgtgaa

SEQ ID NO: 136791 - DNA, 22 bp, Artificial Sequence
  Synthetic oligonucleotide; TTT chr11 5265687 5265708 5265692 5265687 -
gtcagatgtatagattgtgaag

SEQ ID NO: 136792 - DNA, 22 bp, Artificial Sequence
  Synthetic oligonucleotide; TTG chr11 5265686 5265707 5265691 5265686 -
tcagatgtatagattgtgaaga

SEQ ID NO: 136793 - DNA, 22 bp, Artificial Sequence
  Synthetic oligonucleotide; TTG chr11 5265670 5265691 5265675 5265670 -
tgaagattttctcccactctgt

SEQ ID NO: 136794 - DNA, 22 bp, Artificial Sequence
  Synthetic oligonucleotide; TTT chr11 5265661 5265682 5265666 5265661 -
tctcccactctgtgggttgtct

SEQ ID NO: 136795 - DNA, 22 bp, Artificial Sequence
  Synthetic oligonucleotide; TTT chr11 5265660 5265681 5265665 5265660 -
ctcccactctgtgggttgtctg

SEQ ID NO: 136796 - DNA, 22 bp, Artificial Sequence
  Synthetic oligonucleotide; TTC chr11 5265659 5265680 5265664 5265659 -
tcccactctgtgggttgtctgt

SEQ ID NO: 136797 - DNA, 22 bp, Artificial Sequence
  Synthetic oligonucleotide; CTC chr11 5265657 5265678 5265662 5265657 -
ccactctgtgggttgtctgttt

SEQ ID NO: 136798 - DNA, 22 bp, Artificial Sequence
  Synthetic oligonucleotide; CTC chr11 5265651 5265672 5265656 5265651 -
tgtgggttgtctgtttattctg

SEQ ID NO: 136799 - DNA, 22 bp, Artificial Sequence
  Synthetic oligonucleotide; CTG chr11 5265649 5265670 5265654 5265649 -
tgggttgtctgtttattctgca

SEQ ID NO: 136800 - DNA, 22 bp, Artificial Sequence
  Synthetic oligonucleotide; TTG chr11 5265642 5265663 5265647 5265642 -
tctgtttattctgcagactctt

SEQ ID NO: 136801 - DNA, 22 bp, Artificial Sequence
  Synthetic oligonucleotide; CTG chr11 5265638 5265659 5265643 5265638 -
tttattctgcagactcttcctt

SEQ ID NO: 136802 - DNA, 22 bp, Artificial Sequence
  Synthetic oligonucleotide; TTT chr11 5265635 5265656 5265640 5265635 -
attctgcagactcttccttttg

SEQ ID NO: 136803 - DNA, 22 bp, Artificial Sequence
  Synthetic oligonucleotide; TTA chr11 5265634 5265655 5265639 5265634 -
ttctgcagactcttccttttgc

SEQ ID NO: 136804 - DNA, 22 bp, Artificial Sequence
  Synthetic oligonucleotide; TTC chr11 5265631 5265652 5265636 5265631 -
tgcagactcttccttttgccat

SEQ ID NO: 136805 - DNA, 22 bp, Artificial Sequence
  Synthetic oligonucleotide; CTG chr11 5265629 5265650 5265634 5265629 -
cagactcttccttttgccatgc

SEQ ID NO: 136806 - DNA, 22 bp, Artificial Sequence
  Synthetic oligonucleotide; CTC chr11 5265622 5265643 5265627 5265622 -
ttccttttgccatgcaaaagct

SEQ ID NO: 136807 - DNA, 22 bp, Artificial Sequence
  Synthetic oligonucleotide; CTT chr11 5265620 5265641 5265625 5265620 -
ccttttgccatgcaaaagctct

SEQ ID NO: 136808 - DNA, 22 bp, Artificial Sequence
  Synthetic oligonucleotide; TTC chr11 5265619 5265640 5265624 5265619 -
cttttgccatgcaaaagctctt

SEQ ID NO: 136809 - DNA, 22 bp, Artificial Sequence
  Synthetic oligonucleotide; CTT chr11 5265616 5265637 5265621 5265616 -
ttgccatgcaaaagctctttag

SEQ ID NO: 136810 - DNA, 22 bp, Artificial Sequence
  Synthetic oligonucleotide; TTT chr11 5265615 5265636 5265620 5265615 -
tgccatgcaaaagctctttagt

SEQ ID NO: 136811 - DNA, 22 bp, Artificial Sequence
  Synthetic oligonucleotide; TTT chr11 5265614 5265635 5265619 5265614 -
gccatgcaaaagctctttagtt

SEQ ID NO: 136812 - DNA, 22 bp, Artificial Sequence
  Synthetic oligonucleotide; TTG chr11 5265613 5265634 5265618 5265613 -
ccatgcaaaagctctttagttt

SEQ ID NO: 136813 - DNA, 22 bp, Artificial Sequence
  Synthetic oligonucleotide; CTC chr11 5265599 5265620 5265604 5265599 -
tttagtttaatttagtcccaga

SEQ ID NO: 136814 - DNA, 22 bp, Artificial Sequence
  Synthetic oligonucleotide; CTT chr11 5265597 5265618 5265602 5265597 -
tagtttaatttagtcccagata

SEQ ID NO: 136815 - DNA, 22 bp, Artificial Sequence
  Synthetic oligonucleotide; TTT chr11 5265596 5265617 5265601 5265596 -
agtttaatttagtcccagatat

SEQ ID NO: 136816 - DNA, 22 bp, Artificial Sequence
  Synthetic oligonucleotide; TTA chr11 5265595 5265616 5265600 5265595 -
gtttaatttagtcccagatatt

SEQ ID NO: 136817 - DNA, 22 bp, Artificial Sequence
  Synthetic oligonucleotide; TTT chr11 5265591 5265612 5265596 5265591 -
aatttagtcccagatattttct

SEQ ID NO: 136818 - DNA, 22 bp, Artificial Sequence
  Synthetic oligonucleotide; TTA chr11 5265590 5265611 5265595 5265590 -
atttagtcccagatattttctt

SEQ ID NO: 136819 - DNA, 22 bp, Artificial Sequence
  Synthetic oligonucleotide; TTT chr11 5265586 5265607 5265591 5265586 -
agtcccagatattttctttgtt

SEQ ID NO: 136820 - DNA, 22 bp, Artificial Sequence
  Synthetic oligonucleotide; TTA chr11 5265585 5265606 5265590 5265585 -
gtcccagatattttctttgttt

SEQ ID NO: 136821 - DNA, 22 bp, Artificial Sequence
  Synthetic oligonucleotide; TTT chr11 5265572 5265593 5265577 5265572 -
tctttgtttttatgtatttgca

SEQ ID NO: 136822 - DNA, 22 bp, Artificial Sequence
  Synthetic oligonucleotide; TTT chr11 5265571 5265592 5265576 5265571 -
ctttgtttttatgtatttgcat

SEQ ID NO: 136823 - DNA, 22 bp, Artificial Sequence
  Synthetic oligonucleotide; TTC chr11 5265570 5265591 5265575 5265570 -
tttgtttttatgtatttgcatt

SEQ ID NO: 136824 - DNA, 22 bp, Artificial Sequence
  Synthetic oligonucleotide; CTT chr11 5265568 5265589 5265573 5265568 -
tgtttttatgtatttgcatttg

SEQ ID NO: 136825 - DNA, 22 bp, Artificial Sequence
  Synthetic oligonucleotide; TTT chr11 5265567 5265588 5265572 5265567 -
gtttttatgtatttgcatttgt

SEQ ID NO: 136826 - DNA, 22 bp, Artificial Sequence
  Synthetic oligonucleotide; TTG chr11 5265566 5265587 5265571 5265566 -
tttttatgtatttgcatttgtg

SEQ ID NO: 136827 - DNA, 22 bp, Artificial Sequence
  Synthetic oligonucleotide; TTT chr11 5265563 5265584 5265568 5265563 -
ttatgtatttgcatttgtgttc

SEQ ID NO: 136828 - DNA, 22 bp, Artificial Sequence
  Synthetic oligonucleotide; TTT chr11 5265562 5265583 5265567 5265562 -
tatgtatttgcatttgtgttct

SEQ ID NO: 136829 - DNA, 22 bp, Artificial Sequence
  Synthetic oligonucleotide; TTT chr11 5265561 5265582 5265566 5265561 -
atgtatttgcatttgtgttctt

SEQ ID NO: 136830 - DNA, 22 bp, Artificial Sequence
  Synthetic oligonucleotide; TTA chr11 5265560 5265581 5265565 5265560 -
tgtatttgcatttgtgttcttg

SEQ ID NO: 136831 - DNA, 22 bp, Artificial Sequence
  Synthetic oligonucleotide; TTT chr11 5265553 5265574 5265558 5265553 -
gcatttgtgttcttggtcatga

SEQ ID NO: 136832 - DNA, 22 bp, Artificial Sequence
  Synthetic oligonucleotide; TTG chr11 5265552 5265573 5265557 5265552 -
catttgtgttcttggtcatgaa

SEQ ID NO: 136833 - DNA, 22 bp, Artificial Sequence
  Synthetic oligonucleotide; TTT chr11 5265547 5265568 5265552 5265547 -
gtgttcttggtcatgaaatcct

SEQ ID NO: 136834 - DNA, 22 bp, Artificial Sequence
  Synthetic oligonucleotide; TTG chr11 5265546 5265567 5265551 5265546 -
tgttcttggtcatgaaatcctt

SEQ ID NO: 136835 - DNA, 22 bp, Artificial Sequence
  Synthetic oligonucleotide; TTC chr11 5265541 5265562 5265546 5265541 -
ttggtcatgaaatcctttccta

SEQ ID NO: 136836 - DNA, 22 bp, Artificial Sequence
  Synthetic oligonucleotide; CTT chr11 5265539 5265560 5265544 5265539 -
ggtcatgaaatcctttcctaag

SEQ ID NO: 136837 - DNA, 22 bp, Artificial Sequence
  Synthetic oligonucleotide; TTG chr11 5265538 5265559 5265543 5265538 -
gtcatgaaatcctttcctaagc

SEQ ID NO: 136838 - DNA, 22 bp, Artificial Sequence
  Synthetic oligonucleotide; CTT chr11 5265524 5265545 5265529 5265524 -
tcctaagccaatgtgtagaagg

SEQ ID NO: 136839 - DNA, 22 bp, Artificial Sequence
  Synthetic oligonucleotide; TTT chr11 5265523 5265544 5265528 5265523 -
cctaagccaatgtgtagaaggg

SEQ ID NO: 136840 - DNA, 22 bp, Artificial Sequence
  Synthetic oligonucleotide; TTC chr11 5265522 5265543 5265527 5265522 -
ctaagccaatgtgtagaagggt

SEQ ID NO: 136841 - DNA, 22 bp, Artificial Sequence
  Synthetic oligonucleotide; CTA chr11 5265519 5265540 5265524 5265519 -
agccaatgtgtagaagggtttt

SEQ ID NO: 136842 - DNA, 22 bp, Artificial Sequence
  Synthetic oligonucleotide; TTT chr11 5265498 5265519 5265503 5265498 -
ttccgatgttattttctagaat

SEQ ID NO: 136843 - DNA, 22 bp, Artificial Sequence
  Synthetic oligonucleotide; TTT chr11 5265497 5265518 5265502 5265497 -
tccgatgttattttctagaatt

SEQ ID NO: 136844 - DNA, 22 bp, Artificial Sequence
  Synthetic oligonucleotide; TTT chr11 5265496 5265517 5265501 5265496 -
ccgatgttattttctagaattg

SEQ ID NO: 136845 - DNA, 22 bp, Artificial Sequence
  Synthetic oligonucleotide; TTC chr11 5265495 5265516 5265500 5265495 -
cgatgttattttctagaattgt

SEQ ID NO: 136846 - DNA, 22 bp, Artificial Sequence
  Synthetic oligonucleotide; TTA chr11 5265487 5265508 5265492 5265487 -
ttttctagaattgttacagttt

SEQ ID NO: 136847 - DNA, 22 bp, Artificial Sequence
  Synthetic oligonucleotide; TTT chr11 5265484 5265505 5265489 5265484 -
tctagaattgttacagtttcag

SEQ ID NO: 136848 - DNA, 22 bp, Artificial Sequence
  Synthetic oligonucleotide; TTT chr11 5265483 5265504 5265488 5265483 -
ctagaattgttacagtttcagg

SEQ ID NO: 136849 - DNA, 22 bp, Artificial Sequence
  Synthetic oligonucleotide; TTC chr11 5265482 5265503 5265487 5265482 -
tagaattgttacagtttcaggg

SEQ ID NO: 136850 - DNA, 22 bp, Artificial Sequence
  Synthetic oligonucleotide; CTA chr11 5265480 5265501 5265485 5265480 -
gaattgttacagtttcagggct

SEQ ID NO: 136851 - DNA, 22 bp, Artificial Sequence
  Synthetic oligonucleotide; TTG chr11 5265474 5265495 5265479 5265474 -
ttacagtttcagggcttagatt

SEQ ID NO: 136852 - DNA, 22 bp, Artificial Sequence
  Synthetic oligonucleotide; TTA chr11 5265471 5265492 5265476 5265471 -
cagtttcagggcttagatttaa

SEQ ID NO: 136853 - DNA, 22 bp, Artificial Sequence
  Synthetic oligonucleotide; TTT chr11 5265465 5265486 5265470 5265465 -
cagggcttagatttaagtcctt

SEQ ID NO: 136854 - DNA, 22 bp, Artificial Sequence
  Synthetic oligonucleotide; TTC chr11 5265464 5265485 5265469 5265464 -
agggcttagatttaagtccttg

SEQ ID NO: 136855 - DNA, 22 bp, Artificial Sequence
  Synthetic oligonucleotide; CTT chr11 5265457 5265478 5265462 5265457 -
agatttaagtccttgatccatc

SEQ ID NO: 136856 - DNA, 22 bp, Artificial Sequence
  Synthetic oligonucleotide; TTA chr11 5265456 5265477 5265461 5265456 -
gatttaagtccttgatccatct

SEQ ID NO: 136857 - DNA, 22 bp, Artificial Sequence
  Synthetic oligonucleotide; TTT chr11 5265451 5265472 5265456 5265451 -
aagtccttgatccatcttgagt

SEQ ID NO: 136858 - DNA, 22 bp, Artificial Sequence
  Synthetic oligonucleotide; TTA chr11 5265450 5265471 5265455 5265450 -
agtccttgatccatcttgagtt

SEQ ID NO: 136859 - DNA, 22 bp, Artificial Sequence
  Synthetic oligonucleotide; CTT chr11 5265443 5265464 5265448 5265443 -
gatccatcttgagttgattttt

SEQ ID NO: 136860 - DNA, 22 bp, Artificial Sequence
  Synthetic oligonucleotide; TTG chr11 5265442 5265463 5265447 5265442 -
atccatcttgagttgatttttg

SEQ ID NO: 136861 - DNA, 22 bp, Artificial Sequence
  Synthetic oligonucleotide; CTT chr11 5265433 5265454 5265438 5265433 -
gagttgatttttgtataaggtg

SEQ ID NO: 136862 - DNA, 22 bp, Artificial Sequence
  Synthetic oligonucleotide; TTG chr11 5265432 5265453 5265437 5265432 -
agttgatttttgtataaggtga

SEQ ID NO: 136863 - DNA, 22 bp, Artificial Sequence
  Synthetic oligonucleotide; TTG chr11 5265427 5265448 5265432 5265427 -
atttttgtataaggtgagagat

SEQ ID NO: 136864 - DNA, 22 bp, Artificial Sequence
  Synthetic oligonucleotide; TTT chr11 5265423 5265444 5265428 5265423 -
ttgtataaggtgagagatgaag

SEQ ID NO: 136865 - DNA, 22 bp, Artificial Sequence
  Synthetic oligonucleotide; TTT chr11 5265422 5265443 5265427 5265422 -
tgtataaggtgagagatgaaga

SEQ ID NO: 136866 - DNA, 22 bp, Artificial Sequence
  Synthetic oligonucleotide; TTT chr11 5265421 5265442 5265426 5265421 -
gtataaggtgagagatgaagat

SEQ ID NO: 136867 - DNA, 22 bp, Artificial Sequence
  Synthetic oligonucleotide; TTG chr11 5265420 5265441 5265425 5265420 -
tataaggtgagagatgaagatc

SEQ ID NO: 136868 - DNA, 22 bp, Artificial Sequence
  Synthetic oligonucleotide; TTT chr11 5265392 5265413 5265397 5265392 -
cattctcctacatgtagcttgc

SEQ ID NO: 136869 - DNA, 22 bp, Artificial Sequence
  Synthetic oligonucleotide; TTC chr11 5265391 5265412 5265396 5265391 -
attctcctacatgtagcttgcc

SEQ ID NO: 136870 - DNA, 22 bp, Artificial Sequence
  Synthetic oligonucleotide; TTC chr11 5265387 5265408 5265392 5265387 -
tcctacatgtagcttgccagct

SEQ ID NO: 136871 - DNA, 22 bp, Artificial Sequence
  Synthetic oligonucleotide; CTC chr11 5265385 5265406 5265390 5265385 -
ctacatgtagcttgccagctat

SEQ ID NO: 136872 - DNA, 22 bp, Artificial Sequence
  Synthetic oligonucleotide; CTA chr11 5265382 5265403 5265387 5265382 -
catgtagcttgccagctatccc

SEQ ID NO: 136873 - DNA, 22 bp, Artificial Sequence
  Synthetic oligonucleotide; CTT chr11 5265372 5265393 5265377 5265372 -
gccagctatccccgcaccattt

SEQ ID NO: 136874 - DNA, 22 bp, Artificial Sequence
  Synthetic oligonucleotide; TTG chr11 5265371 5265392 5265376 5265371 -
ccagctatccccgcaccatttg

SEQ ID NO: 136875 - DNA, 22 bp, Artificial Sequence
  Synthetic oligonucleotide; CTA chr11 5265364 5265385 5265369 5265364 -
tccccgcaccatttgttgaata

SEQ ID NO: 136876 - DNA, 22 bp, Artificial Sequence
  Synthetic oligonucleotide; TTT chr11 5265350 5265371 5265355 5265350 -
gttgaatagggtgccctttccc

SEQ ID NO: 136877 - DNA, 22 bp, Artificial Sequence
  Synthetic oligonucleotide; TTG chr11 5265349 5265370 5265354 5265349 -
ttgaatagggtgccctttcccc

SEQ ID NO: 136878 - DNA, 22 bp, Artificial Sequence
  Synthetic oligonucleotide; TTG chr11 5265346 5265367 5265351 5265346 -
aatagggtgccctttccccact

SEQ ID NO: 136879 - DNA, 22 bp, Artificial Sequence
  Synthetic oligonucleotide; CTT chr11 5265332 5265353 5265337 5265332 -
tccccactttatgtttttgttt

SEQ ID NO: 136880 - DNA, 22 bp, Artificial Sequence
  Synthetic oligonucleotide; TTT chr11 5265331 5265352 5265336 5265331 -
ccccactttatgtttttgtttg

SEQ ID NO: 136881 - DNA, 22 bp, Artificial Sequence
  Synthetic oligonucleotide; TTC chr11 5265330 5265351 5265335 5265330 -
cccactttatgtttttgtttgc

SEQ ID NO: 136882 - DNA, 22 bp, Artificial Sequence
  Synthetic oligonucleotide; CTT chr11 5265323 5265344 5265328 5265323 -
tatgtttttgtttgctttgtca

SEQ ID NO: 136883 - DNA, 22 bp, Artificial Sequence
  Synthetic oligonucleotide; TTT chr11 5265322 5265343 5265327 5265322 -
atgtttttgtttgctttgtcaa

SEQ ID NO: 136884 - DNA, 22 bp, Artificial Sequence
  Synthetic oligonucleotide; TTA chr11 5265321 5265342 5265326 5265321 -
tgtttttgtttgctttgtcaaa

SEQ ID NO: 136885 - DNA, 22 bp, Artificial Sequence
  Synthetic oligonucleotide; TTT chr11 5265316 5265337 5265321 5265316 -
ttgtttgctttgtcaaagatca

SEQ ID NO: 136886 - DNA, 22 bp, Artificial Sequence
  Synthetic oligonucleotide; TTT chr11 5265315 5265336 5265320 5265315 -
tgtttgctttgtcaaagatcag

SEQ ID NO: 136887 - DNA, 22 bp, Artificial Sequence
  Synthetic oligonucleotide; TTT chr11 5265314 5265335 5265319 5265314 -
gtttgctttgtcaaagatcagt

SEQ ID NO: 136888 - DNA, 22 bp, Artificial Sequence
  Synthetic oligonucleotide; TTG chr11 5265313 5265334 5265318 5265313 -
tttgctttgtcaaagatcagtt

SEQ ID NO: 136889 - DNA, 22 bp, Artificial Sequence
  Synthetic oligonucleotide; TTT chr11 5265310 5265331 5265315 5265310 -
gctttgtcaaagatcagttgga

SEQ ID NO: 136890 - DNA, 22 bp, Artificial Sequence
  Synthetic oligonucleotide; TTG chr11 5265309 5265330 5265314 5265309 -
ctttgtcaaagatcagttggat

SEQ ID NO: 136891 - DNA, 22 bp, Artificial Sequence
  Synthetic oligonucleotide; CTT chr11 5265306 5265327 5265311 5265306 -
tgtcaaagatcagttggatgta

SEQ ID NO: 136892 - DNA, 22 bp, Artificial Sequence
  Synthetic oligonucleotide; TTT chr11 5265305 5265326 5265310 5265305 -
gtcaaagatcagttggatgtaa

SEQ ID NO: 136893 - DNA, 22 bp, Artificial Sequence
  Synthetic oligonucleotide; TTG chr11 5265304 5265325 5265309 5265304 -
tcaaagatcagttggatgtaag

SEQ ID NO: 136894 - DNA, 22 bp, Artificial Sequence
  Synthetic oligonucleotide; TTG chr11 5265290 5265311 5265295 5265290 -
gatgtaagtatttgagtttatt

SEQ ID NO: 136895 - DNA, 22 bp, Artificial Sequence
  Synthetic oligonucleotide; TTT chr11 5265277 5265298 5265282 5265277 -
gagtttatttctgggttctcta

SEQ ID NO: 136896 - DNA, 22 bp, Artificial Sequence
  Synthetic oligonucleotide; TTG chr11 5265276 5265297 5265281 5265276 -
agtttatttctgggttctctat

SEQ ID NO: 136897 - DNA, 22 bp, Artificial Sequence
  Synthetic oligonucleotide; TTT chr11 5265271 5265292 5265276 5265271 -
atttctgggttctctattctgt

SEQ ID NO: 136898 - DNA, 22 bp, Artificial Sequence
  Synthetic oligonucleotide; TTA chr11 5265270 5265291 5265275 5265270 -
tttctgggttctctattctgtt

SEQ ID NO: 136899 - DNA, 22 bp, Artificial Sequence
  Synthetic oligonucleotide; TTT chr11 5265267 5265288 5265272 5265267 -
ctgggttctctattctgttcca

SEQ ID NO: 136900 - DNA, 22 bp, Artificial Sequence
  Synthetic oligonucleotide; TTC chr11 5265266 5265287 5265271 5265266 -
tgggttctctattctgttccat

SEQ ID NO: 136901 - DNA, 22 bp, Artificial Sequence
  Synthetic oligonucleotide; CTG chr11 5265264 5265285 5265269 5265264 -
ggttctctattctgttccattg

SEQ ID NO: 136902 - DNA, 22 bp, Artificial Sequence
  Synthetic oligonucleotide; TTC chr11 5265259 5265280 5265264 5265259 -
tctattctgttccattggtcga

SEQ ID NO: 136903 - DNA, 22 bp, Artificial Sequence
  Synthetic oligonucleotide; CTC chr11 5265257 5265278 5265262 5265257 -
tattctgttccattggtcgatg

SEQ ID NO: 136904 - DNA, 22 bp, Artificial Sequence
  Synthetic oligonucleotide; CTA chr11 5265255 5265276 5265260 5265255 -
ttctgttccattggtcgatgtg

SEQ ID NO: 136905 - DNA, 22 bp, Artificial Sequence
  Synthetic oligonucleotide; TTC chr11 5265252 5265273 5265257 5265252 -
tgttccattggtcgatgtgcct

SEQ ID NO: 136906 - DNA, 22 bp, Artificial Sequence
  Synthetic oligonucleotide; CTG chr11 5265250 5265271 5265255 5265250 -
ttccattggtcgatgtgcctat

SEQ ID NO: 136907 - DNA, 22 bp, Artificial Sequence
  Synthetic oligonucleotide; TTC chr11 5265247 5265268 5265252 5265247 -
cattggtcgatgtgcctatttg

SEQ ID NO: 136908 - DNA, 22 bp, Artificial Sequence
  Synthetic oligonucleotide; TTG chr11 5265242 5265263 5265247 5265242 -
gtcgatgtgcctatttgtacac

SEQ ID NO: 136909 - DNA, 22 bp, Artificial Sequence
  Synthetic oligonucleotide; CTA chr11 5265229 5265250 5265234 5265229 -
tttgtacaccagcatcatgctg

SEQ ID NO: 136910 - DNA, 22 bp, Artificial Sequence
  Synthetic oligonucleotide; TTT chr11 5265226 5265247 5265231 5265226 -
gtacaccagcatcatgctgttt

SEQ ID NO: 136911 - DNA, 22 bp, Artificial Sequence
  Synthetic oligonucleotide; TTG chr11 5265225 5265246 5265230 5265225 -
tacaccagcatcatgctgtttt

SEQ ID NO: 136912 - DNA, 22 bp, Artificial Sequence
  Synthetic oligonucleotide; CTG chr11 5265207 5265228 5265212 5265207 -
ttttggtgactatggccttatt

SEQ ID NO: 136913 - DNA, 22 bp, Artificial Sequence
  Synthetic oligonucleotide; TTT chr11 5265204 5265225 5265209 5265204 -
tggtgactatggccttattgta

SEQ ID NO: 136914 - DNA, 22 bp, Artificial Sequence
  Synthetic oligonucleotide; TTT chr11 5265203 5265224 5265208 5265203 -
ggtgactatggccttattgtat

SEQ ID NO: 136915 - DNA, 22 bp, Artificial Sequence
  Synthetic oligonucleotide; TTG chr11 5265202 5265223 5265207 5265202 -
gtgactatggccttattgtata

SEQ ID NO: 136916 - DNA, 22 bp, Artificial Sequence
  Synthetic oligonucleotide; CTA chr11 5265195 5265216 5265200 5265195 -
tggccttattgtatagtttgaa

SEQ ID NO: 136917 - DNA, 22 bp, Artificial Sequence
  Synthetic oligonucleotide; CTT chr11 5265188 5265209 5265193 5265188 -
attgtatagtttgaaatgaggt

SEQ ID NO: 136918 - DNA, 22 bp, Artificial Sequence
  Synthetic oligonucleotide; TTA chr11 5265187 5265208 5265192 5265187 -
ttgtatagtttgaaatgaggta

SEQ ID NO: 136919 - DNA, 22 bp, Artificial Sequence
  Synthetic oligonucleotide; TTG chr11 5265184 5265205 5265189 5265184 -
tatagtttgaaatgaggtaatg

SEQ ID NO: 136920 - DNA, 22 bp, Artificial Sequence
  Synthetic oligonucleotide; TTT chr11 5265176 5265197 5265181 5265176 -
gaaatgaggtaatgtaatgcct

SEQ ID NO: 136921 - DNA, 22 bp, Artificial Sequence
  Synthetic oligonucleotide; TTG chr11 5265175 5265196 5265180 5265175 -
aaatgaggtaatgtaatgcctt

SEQ ID NO: 136922 - DNA, 22 bp, Artificial Sequence
  Synthetic oligonucleotide; CTT chr11 5265153 5265174 5265158 5265153 -
cagatttgttcttttttttaga

SEQ ID NO: 136923 - DNA, 22 bp, Artificial Sequence
  Synthetic oligonucleotide; TTC chr11 5265152 5265173 5265157 5265152 -
agatttgttcttttttttagac

SEQ ID NO: 136924 - DNA, 22 bp, Artificial Sequence
  Synthetic oligonucleotide; TTT chr11 5265146 5265167 5265151 5265146 -
gttcttttttttagacttgctt

SEQ ID NO: 136925 - DNA, 22 bp, Artificial Sequence
  Synthetic oligonucleotide; TTG chr11 5265145 5265166 5265150 5265145 -
ttcttttttttagacttgcttg

SEQ ID NO: 136926 - DNA, 22 bp, Artificial Sequence
  Synthetic oligonucleotide; TTC chr11 5265142 5265163 5265147 5265142 -
ttttttttagacttgcttgttt

SEQ ID NO: 136927 - DNA, 22 bp, Artificial Sequence
  Synthetic oligonucleotide; CTT chr11 5265140 5265161 5265145 5265140 -
ttttttagacttgcttgtttat

SEQ ID NO: 136928 - DNA, 22 bp, Artificial Sequence
  Synthetic oligonucleotide; TTT chr11 5265139 5265160 5265144 5265139 -
tttttagacttgcttgtttatt

SEQ ID NO: 136929 - DNA, 22 bp, Artificial Sequence
  Synthetic oligonucleotide; TTT chr11 5265138 5265159 5265143 5265138 -
ttttagacttgcttgtttattg

SEQ ID NO: 136930 - DNA, 22 bp, Artificial Sequence
  Synthetic oligonucleotide; TTT chr11 5265137 5265158 5265142 5265137 -
tttagacttgcttgtttattgg

SEQ ID NO: 136931 - DNA, 22 bp, Artificial Sequence
  Synthetic oligonucleotide; TTT chr11 5265136 5265157 5265141 5265136 -
ttagacttgcttgtttattggg

SEQ ID NO: 136932 - DNA, 22 bp, Artificial Sequence
  Synthetic oligonucleotide; TTT chr11 5265135 5265156 5265140 5265135 -
tagacttgcttgtttattgggc

SEQ ID NO: 136933 - DNA, 22 bp, Artificial Sequence
  Synthetic oligonucleotide; TTT chr11 5265134 5265155 5265139 5265134 -
agacttgcttgtttattgggct

SEQ ID NO: 136934 - DNA, 22 bp, Artificial Sequence
  Synthetic oligonucleotide; TTA chr11 5265133 5265154 5265138 5265133 -
gacttgcttgtttattgggctc

SEQ ID NO: 136935 - DNA, 22 bp, Artificial Sequence
  Synthetic oligonucleotide; CTT chr11 5265128 5265149 5265133 5265128 -
gcttgtttattgggctcttttt

SEQ ID NO: 136936 - DNA, 22 bp, Artificial Sequence
  Synthetic oligonucleotide; TTG chr11 5265127 5265148 5265132 5265127 -
cttgtttattgggctctttttt

SEQ ID NO: 136937 - DNA, 22 bp, Artificial Sequence
  Synthetic oligonucleotide; CTT chr11 5265124 5265145 5265129 5265124 -
gtttattgggctcttttttggt

SEQ ID NO: 136938 - DNA, 22 bp, Artificial Sequence
  Synthetic oligonucleotide; TTG chr11 5265123 5265144 5265128 5265123 -
tttattgggctcttttttggtt

SEQ ID NO: 136939 - DNA, 22 bp, Artificial Sequence
  Synthetic oligonucleotide; TTT chr11 5265120 5265141 5265125 5265120 -
attgggctcttttttggttcca

SEQ ID NO: 136940 - DNA, 22 bp, Artificial Sequence
  Synthetic oligonucleotide; TTA chr11 5265119 5265140 5265124 5265119 -
ttgggctcttttttggttccat

SEQ ID NO: 136941 - DNA, 22 bp, Artificial Sequence
  Synthetic oligonucleotide; TTG chr11 5265116 5265137 5265121 5265116 -
ggctcttttttggttccataag

SEQ ID NO: 136942 - DNA, 22 bp, Artificial Sequence
  Synthetic oligonucleotide; CTC chr11 5265111 5265132 5265116 5265111 -
ttttttggttccataagaattt

SEQ ID NO: 136943 - DNA, 22 bp, Artificial Sequence
  Synthetic oligonucleotide; CTT chr11 5265109 5265130 5265114 5265109 -
ttttggttccataagaatttta

SEQ ID NO: 136944 - DNA, 22 bp, Artificial Sequence
  Synthetic oligonucleotide; TTT chr11 5265108 5265129 5265113 5265108 -
tttggttccataagaattttag

SEQ ID NO: 136945 - DNA, 22 bp, Artificial Sequence
  Synthetic oligonucleotide; TTT chr11 5265107 5265128 5265112 5265107 -
ttggttccataagaattttagg

SEQ ID NO: 136946 - DNA, 22 bp, Artificial Sequence
  Synthetic oligonucleotide; TTT chr11 5265106 5265127 5265111 5265106 -
tggttccataagaattttagga

SEQ ID NO: 136947 - DNA, 22 bp, Artificial Sequence
  Synthetic oligonucleotide; TTT chr11 5265105 5265126 5265110 5265105 -
ggttccataagaattttaggat

SEQ ID NO: 136948 - DNA, 22 bp, Artificial Sequence
  Synthetic oligonucleotide; TTG chr11 5265104 5265125 5265109 5265104 -
gttccataagaattttaggatt

SEQ ID NO: 136949 - DNA, 22 bp, Artificial Sequence
  Synthetic oligonucleotide; TTC chr11 5265100 5265121 5265105 5265100 -
cataagaattttaggattgttt

SEQ ID NO: 136950 - DNA, 22 bp, Artificial Sequence
  Synthetic oligonucleotide; TTT chr11 5265089 5265110 5265094 5265089 -
taggattgttttttctagttct

SEQ ID NO: 136951 - DNA, 22 bp, Artificial Sequence
  Synthetic oligonucleotide; TTT chr11 5265088 5265109 5265093 5265088 -
aggattgttttttctagttctg

SEQ ID NO: 136952 - DNA, 22 bp, Artificial Sequence
  Synthetic oligonucleotide; TTA chr11 5265087 5265108 5265092 5265087 -
ggattgttttttctagttctgt

SEQ ID NO: 136953 - DNA, 22 bp, Artificial Sequence
  Synthetic oligonucleotide; TTG chr11 5265081 5265102 5265086 5265081 -
ttttttctagttctgtgaagac

SEQ ID NO: 136954 - DNA, 22 bp, Artificial Sequence
  Synthetic oligonucleotide; TTT chr11 5265078 5265099 5265083 5265078 -
tttctagttctgtgaagactaa

SEQ ID NO: 136955 - DNA, 22 bp, Artificial Sequence
  Synthetic oligonucleotide; TTT chr11 5265077 5265098 5265082 5265077 -
ttctagttctgtgaagactaat

SEQ ID NO: 136956 - DNA, 22 bp, Artificial Sequence
  Synthetic oligonucleotide; TTT chr11 5265076 5265097 5265081 5265076 -
tctagttctgtgaagactaatg

SEQ ID NO: 136957 - DNA, 22 bp, Artificial Sequence
  Synthetic oligonucleotide; TTT chr11 5265075 5265096 5265080 5265075 -
ctagttctgtgaagactaatgg

SEQ ID NO: 136958 - DNA, 22 bp, Artificial Sequence
  Synthetic oligonucleotide; TTC chr11 5265074 5265095 5265079 5265074 -
tagttctgtgaagactaatggt

SEQ ID NO: 136959 - DNA, 22 bp, Artificial Sequence
  Synthetic oligonucleotide; CTA chr11 5265072 5265093 5265077 5265072 -
gttctgtgaagactaatggtgg

SEQ ID NO: 136960 - DNA, 22 bp, Artificial Sequence
  Synthetic oligonucleotide; TTC chr11 5265068 5265089 5265073 5265068 -
tgtgaagactaatggtggtatt

SEQ ID NO: 136961 - DNA, 22 bp, Artificial Sequence
  Synthetic oligonucleotide; CTG chr11 5265066 5265087 5265071 5265066 -
tgaagactaatggtggtatttt

SEQ ID NO: 136962 - DNA, 22 bp, Artificial Sequence
  Synthetic oligonucleotide; CTA chr11 5265057 5265078 5265062 5265057 -
atggtggtattttgatgggaat

SEQ ID NO: 136963 - DNA, 22 bp, Artificial Sequence
  Synthetic oligonucleotide; TTT chr11 5265045 5265066 5265050 5265045 -
tgatgggaattgcaatgaattt

SEQ ID NO: 136964 - DNA, 22 bp, Artificial Sequence
  Synthetic oligonucleotide; TTT chr11 5265044 5265065 5265049 5265044 -
gatgggaattgcaatgaatttg

SEQ ID NO: 136965 - DNA, 22 bp, Artificial Sequence
  Synthetic oligonucleotide; TTG chr11 5265043 5265064 5265048 5265043 -
atgggaattgcaatgaatttgt

SEQ ID NO: 136966 - DNA, 22 bp, Artificial Sequence
  Synthetic oligonucleotide; TTG chr11 5265033 5265054 5265038 5265033 -
caatgaatttgtaggttgcttc

SEQ ID NO: 136967 - DNA, 22 bp, Artificial Sequence
  Synthetic oligonucleotide; TTT chr11 5265023 5265044 5265028 5265023 -
gtaggttgcttctggcattatg

SEQ ID NO: 136968 - DNA, 22 bp, Artificial Sequence
  Synthetic oligonucleotide; TTG chr11 5265022 5265043 5265027 5265022 -
taggttgcttctggcattatgg

SEQ ID NO: 136969 - DNA, 22 bp, Artificial Sequence
  Synthetic oligonucleotide; TTG chr11 5265015 5265036 5265020 5265015 -
cttctggcattatggccatttt

SEQ ID NO: 136970 - DNA, 22 bp, Artificial Sequence
  Synthetic oligonucleotide; CTT chr11 5265012 5265033 5265017 5265012 -
ctggcattatggccattttcac

SEQ ID NO: 136971 - DNA, 22 bp, Artificial Sequence
  Synthetic oligonucleotide; TTC chr11 5265011 5265032 5265016 5265011 -
tggcattatggccattttcaca

SEQ ID NO: 136972 - DNA, 22 bp, Artificial Sequence
  Synthetic oligonucleotide; CTG chr11 5265009 5265030 5265014 5265009 -
gcattatggccattttcacaat

SEQ ID NO: 136973 - DNA, 22 bp, Artificial Sequence
  Synthetic oligonucleotide; TTA chr11 5265003 5265024 5265008 5265003 -
tggccattttcacaatattgat

SEQ ID NO: 136974 - DNA, 22 bp, Artificial Sequence
  Synthetic oligonucleotide; TTT chr11 5264994 5265015 5264999 5264994 -
tcacaatattgattctacccat

SEQ ID NO: 136975 - DNA, 22 bp, Artificial Sequence
  Synthetic oligonucleotide; TTT chr11 5264993 5265014 5264998 5264993 -
cacaatattgattctacccatc

SEQ ID NO: 136976 - DNA, 22 bp, Artificial Sequence
  Synthetic oligonucleotide; TTC chr11 5264992 5265013 5264997 5264992 -
acaatattgattctacccatct

SEQ ID NO: 136977 - DNA, 22 bp, Artificial Sequence
  Synthetic oligonucleotide; TTG chr11 5264983 5265004 5264988 5264983 -
attctacccatctatgagaatg

SEQ ID NO: 136978 - DNA, 22 bp, Artificial Sequence
  Synthetic oligonucleotide; TTC chr11 5264979 5265000 5264984 5264979 -
tacccatctatgagaatggcat

SEQ ID NO: 136979 - DNA, 22 bp, Artificial Sequence
  Synthetic oligonucleotide; CTA chr11 5264977 5264998 5264982 5264977 -
cccatctatgagaatggcatgt

SEQ ID NO: 136980 - DNA, 22 bp, Artificial Sequence
  Synthetic oligonucleotide; CTA chr11 5264969 5264990 5264974 5264969 -
tgagaatggcatgtgtttccat

SEQ ID NO: 136981 - DNA, 22 bp, Artificial Sequence
  Synthetic oligonucleotide; TTT chr11 5264951 5264972 5264956 5264951 -
ccatttgtttgtgtcttatatg

SEQ ID NO: 136982 - DNA, 22 bp, Artificial Sequence
  Synthetic oligonucleotide; TTC chr11 5264950 5264971 5264955 5264950 -
catttgtttgtgtcttatatga

SEQ ID NO: 136983 - DNA, 22 bp, Artificial Sequence
  Synthetic oligonucleotide; TTT chr11 5264945 5264966 5264950 5264945 -
gtttgtgtcttatatgattact

SEQ ID NO: 136984 - DNA, 22 bp, Artificial Sequence
  Synthetic oligonucleotide; TTG chr11 5264944 5264965 5264949 5264944 -
tttgtgtcttatatgattactt

SEQ ID NO: 136985 - DNA, 22 bp, Artificial Sequence
  Synthetic oligonucleotide; TTT chr11 5264941 5264962 5264946 5264941 -
gtgtcttatatgattactttca

SEQ ID NO: 136986 - DNA, 22 bp, Artificial Sequence
  Synthetic oligonucleotide; TTG chr11 5264940 5264961 5264945 5264940 -
tgtcttatatgattactttcag

SEQ ID NO: 136987 - DNA, 22 bp, Artificial Sequence
  Synthetic oligonucleotide; CTT chr11 5264934 5264955 5264939 5264934 -
atatgattactttcagccgtgt

SEQ ID NO: 136988 - DNA, 22 bp, Artificial Sequence
  Synthetic oligonucleotide; TTA chr11 5264933 5264954 5264938 5264933 -
tatgattactttcagccgtgtt

SEQ ID NO: 136989 - DNA, 22 bp, Artificial Sequence
  Synthetic oligonucleotide; TTA chr11 5264925 5264946 5264930 5264925 -
ctttcagccgtgttttgtagtt

SEQ ID NO: 136990 - DNA, 22 bp, Artificial Sequence
  Synthetic oligonucleotide; CTT chr11 5264922 5264943 5264927 5264922 -
tcagccgtgttttgtagttttc

SEQ ID NO: 136991 - DNA, 22 bp, Artificial Sequence
  Synthetic oligonucleotide; TTT chr11 5264921 5264942 5264926 5264921 -
cagccgtgttttgtagttttcc

SEQ ID NO: 136992 - DNA, 22 bp, Artificial Sequence
  Synthetic oligonucleotide; TTC chr11 5264920 5264941 5264925 5264920 -
agccgtgttttgtagttttcct

SEQ ID NO: 136993 - DNA, 22 bp, Artificial Sequence
  Synthetic oligonucleotide; TTT chr11 5264910 5264931 5264915 5264910 -
tgtagttttccttgtagatgtc

SEQ ID NO: 136994 - DNA, 22 bp, Artificial Sequence
  Synthetic oligonucleotide; TTT chr11 5264909 5264930 5264914 5264909 -
gtagttttccttgtagatgtct

SEQ ID NO: 136995 - DNA, 22 bp, Artificial Sequence
  Synthetic oligonucleotide; TTG chr11 5264908 5264929 5264913 5264908 -
tagttttccttgtagatgtctt

SEQ ID NO: 136996 - DNA, 22 bp, Artificial Sequence
  Synthetic oligonucleotide; TTT chr11 5264902 5264923 5264907 5264902 -
tccttgtagatgtctttcacct

SEQ ID NO: 136997 - DNA, 22 bp, Artificial Sequence
  Synthetic oligonucleotide; TTT chr11 5264901 5264922 5264906 5264901 -
ccttgtagatgtctttcacctc

SEQ ID NO: 136998 - DNA, 22 bp, Artificial Sequence
  Synthetic oligonucleotide; TTC chr11 5264900 5264921 5264905 5264900 -
cttgtagatgtctttcacctcc

SEQ ID NO: 136999 - DNA, 22 bp, Artificial Sequence
  Synthetic oligonucleotide; CTT chr11 5264897 5264918 5264902 5264897 -
gtagatgtctttcacctccttg

SEQ ID NO: 137000 - DNA, 22 bp, Artificial Sequence
  Synthetic oligonucleotide; TTG chr11 5264896 5264917 5264901 5264896 -
tagatgtctttcacctccttgg

SEQ ID NO: 137001 - DNA, 22 bp, Artificial Sequence
  Synthetic oligonucleotide; CTT chr11 5264886 5264907 5264891 5264886 -
tcacctccttggttaggtatat

SEQ ID NO: 137002 - DNA, 22 bp, Artificial Sequence
  Synthetic oligonucleotide; TTT chr11 5264885 5264906 5264890 5264885 -
cacctccttggttaggtatata

SEQ ID NO: 137003 - DNA, 22 bp, Artificial Sequence
  Synthetic oligonucleotide; TTC chr11 5264884 5264905 5264889 5264884 -
acctccttggttaggtatatat

SEQ ID NO: 137004 - DNA, 22 bp, Artificial Sequence
  Synthetic oligonucleotide; CTC chr11 5264879 5264900 5264884 5264879 -
cttggttaggtatatattccta

SEQ ID NO: 137005 - DNA, 22 bp, Artificial Sequence
  Synthetic oligonucleotide; CTT chr11 5264876 5264897 5264881 5264876 -
ggttaggtatatattcctaagt

SEQ ID NO: 137006 - DNA, 22 bp, Artificial Sequence
  Synthetic oligonucleotide; TTG chr11 5264875 5264896 5264880 5264875 -
gttaggtatatattcctaagtt

SEQ ID NO: 137007 - DNA, 22 bp, Artificial Sequence
  Synthetic oligonucleotide; TTA chr11 5264871 5264892 5264876 5264871 -
ggtatatattcctaagtttttg

SEQ ID NO: 137008 - DNA, 22 bp, Artificial Sequence
  Synthetic oligonucleotide; TTC chr11 5264860 5264881 5264865 5264860 -
ctaagtttttgttttgttttgt

SEQ ID NO: 137009 - DNA, 22 bp, Artificial Sequence
  Synthetic oligonucleotide; CTA chr11 5264857 5264878 5264862 5264857 -
agtttttgttttgttttgtttt

SEQ ID NO: 137010 - DNA, 22 bp, Artificial Sequence
  Synthetic oligonucleotide; TTT chr11 5264852 5264873 5264857 5264852 -
ttgttttgttttgttttgtttt

SEQ ID NO: 137011 - DNA, 22 bp, Artificial Sequence
  Synthetic oligonucleotide; TTT chr11 5264851 5264872 5264856 5264851 -
tgttttgttttgttttgttttt

SEQ ID NO: 137012 - DNA, 22 bp, Artificial Sequence
  Synthetic oligonucleotide; TTT chr11 5264850 5264871 5264855 5264850 -
gttttgttttgttttgtttttt

SEQ ID NO: 137013 - DNA, 22 bp, Artificial Sequence
  Synthetic oligonucleotide; TTG chr11 5264849 5264870 5264854 5264849 -
ttttgttttgttttgttttttg

SEQ ID NO: 137014 - DNA, 22 bp, Artificial Sequence
  Synthetic oligonucleotide; TTT chr11 5264846 5264867 5264851 5264846 -
tgttttgttttgttttttgcag

SEQ ID NO: 137015 - DNA, 22 bp, Artificial Sequence
  Synthetic oligonucleotide; TTT chr11 5264845 5264866 5264850 5264845 -
gttttgttttgttttttgcagc

SEQ ID NO: 137016 - DNA, 22 bp, Artificial Sequence
  Synthetic oligonucleotide; TTG chr11 5264844 5264865 5264849 5264844 -
ttttgttttgttttttgcagct

SEQ ID NO: 137017 - DNA, 22 bp, Artificial Sequence
  Synthetic oligonucleotide; TTT chr11 5264841 5264862 5264846 5264841 -
tgttttgttttttgcagctatt

SEQ ID NO: 137018 - DNA, 22 bp, Artificial Sequence
  Synthetic oligonucleotide; TTT chr11 5264840 5264861 5264845 5264840 -
gttttgttttttgcagctattg

SEQ ID NO: 137019 - DNA, 22 bp, Artificial Sequence
  Synthetic oligonucleotide; TTG chr11 5264839 5264860 5264844 5264839 -
ttttgttttttgcagctattgt

SEQ ID NO: 137020 - DNA, 22 bp, Artificial Sequence
  Synthetic oligonucleotide; TTT chr11 5264836 5264857 5264841 5264836 -
tgttttttgcagctattgtaaa

SEQ ID NO: 137021 - DNA, 22 bp, Artificial Sequence
  Synthetic oligonucleotide; TTT chr11 5264835 5264856 5264840 5264835 -
gttttttgcagctattgtaaaa

SEQ ID NO: 137022 - DNA, 22 bp, Artificial Sequence
  Synthetic oligonucleotide; TTG chr11 5264834 5264855 5264839 5264834 -
ttttttgcagctattgtaaaag

SEQ ID NO: 137023 - DNA, 22 bp, Artificial Sequence
  Synthetic oligonucleotide; TTT chr11 5264831 5264852 5264836 5264831 -
tttgcagctattgtaaaagggg

SEQ ID NO: 137024 - DNA, 22 bp, Artificial Sequence
  Synthetic oligonucleotide; TTT chr11 5264830 5264851 5264835 5264830 -
ttgcagctattgtaaaaggggt

SEQ ID NO: 137025 - DNA, 22 bp, Artificial Sequence
  Synthetic oligonucleotide; TTT chr11 5264829 5264850 5264834 5264829 -
tgcagctattgtaaaaggggtt

SEQ ID NO: 137026 - DNA, 22 bp, Artificial Sequence
  Synthetic oligonucleotide; TTT chr11 5264828 5264849 5264833 5264828 -
gcagctattgtaaaaggggttg

SEQ ID NO: 137027 - DNA, 22 bp, Artificial Sequence
  Synthetic oligonucleotide; TTG chr11 5264827 5264848 5264832 5264827 -
cagctattgtaaaaggggttga

SEQ ID NO: 137028 - DNA, 22 bp, Artificial Sequence
  Synthetic oligonucleotide; CTA chr11 5264821 5264842 5264826 5264821 -
ttgtaaaaggggttgagttctt

SEQ ID NO: 137029 - DNA, 22 bp, Artificial Sequence
  Synthetic oligonucleotide; TTG chr11 5264818 5264839 5264823 5264818 -
taaaaggggttgagttcttgat

SEQ ID NO: 137030 - DNA, 22 bp, Artificial Sequence
  Synthetic oligonucleotide; TTG chr11 5264806 5264827 5264811 5264806 -
agttcttgattttattctcagc

SEQ ID NO: 137031 - DNA, 22 bp, Artificial Sequence
  Synthetic oligonucleotide; TTC chr11 5264801 5264822 5264806 5264801 -
ttgattttattctcagcttggt

SEQ ID NO: 137032 - DNA, 22 bp, Artificial Sequence
  Synthetic oligonucleotide; CTT chr11 5264799 5264820 5264804 5264799 -
gattttattctcagcttggtca

SEQ ID NO: 137033 - DNA, 22 bp, Artificial Sequence
  Synthetic oligonucleotide; TTG chr11 5264798 5264819 5264803 5264798 -
attttattctcagcttggtcat

SEQ ID NO: 137034 - DNA, 22 bp, Artificial Sequence
  Synthetic oligonucleotide; TTT chr11 5264794 5264815 5264799 5264794 -
tattctcagcttggtcattgct

SEQ ID NO: 137035 - DNA, 22 bp, Artificial Sequence
  Synthetic oligonucleotide; TTT chr11 5264793 5264814 5264798 5264793 -
attctcagcttggtcattgctg

SEQ ID NO: 137036 - DNA, 22 bp, Artificial Sequence
  Synthetic oligonucleotide; TTA chr11 5264792 5264813 5264797 5264792 -
ttctcagcttggtcattgctgg

SEQ ID NO: 137037 - DNA, 22 bp, Artificial Sequence
  Synthetic oligonucleotide; TTC chr11 5264789 5264810 5264794 5264789 -
tcagcttggtcattgctggtat

SEQ ID NO: 137038 - DNA, 22 bp, Artificial Sequence
  Synthetic oligonucleotide; CTC chr11 5264787 5264808 5264792 5264787 -
agcttggtcattgctggtatgt

SEQ ID NO: 137039 - DNA, 22 bp, Artificial Sequence
  Synthetic oligonucleotide; CTT chr11 5264782 5264803 5264787 5264782 -
ggtcattgctggtatgtaagaa

SEQ ID NO: 137040 - DNA, 22 bp, Artificial Sequence
  Synthetic oligonucleotide; TTG chr11 5264781 5264802 5264786 5264781 -
gtcattgctggtatgtaagaaa

SEQ ID NO: 137041 - DNA, 22 bp, Artificial Sequence
  Synthetic oligonucleotide; TTG chr11 5264774 5264795 5264779 5264774 -
ctggtatgtaagaaagcaactc

SEQ ID NO: 137042 - DNA, 22 bp, Artificial Sequence
  Synthetic oligonucleotide; CTG chr11 5264771 5264792 5264776 5264771 -
gtatgtaagaaagcaactcatt

SEQ ID NO: 137043 - DNA, 22 bp, Artificial Sequence
  Synthetic oligonucleotide; CTC chr11 5264752 5264773 5264757 5264752 -
attggtgtacgttaattttgta

SEQ ID NO: 137044 - DNA, 22 bp, Artificial Sequence
  Synthetic oligonucleotide; TTG chr11 5264748 5264769 5264753 5264748 -
gtgtacgttaattttgtatcca

SEQ ID NO: 137045 - DNA, 22 bp, Artificial Sequence
  Synthetic oligonucleotide; TTA chr11 5264738 5264759 5264743 5264738 -
attttgtatccagaaactttgc

SEQ ID NO: 137046 - DNA, 22 bp, Artificial Sequence
  Synthetic oligonucleotide; TTT chr11 5264734 5264755 5264739 5264734 -
tgtatccagaaactttgctgaa

SEQ ID NO: 137047 - DNA, 22 bp, Artificial Sequence
  Synthetic oligonucleotide; TTT chr11 5264733 5264754 5264738 5264733 -
gtatccagaaactttgctgaat

SEQ ID NO: 137048 - DNA, 22 bp, Artificial Sequence
  Synthetic oligonucleotide; TTG chr11 5264732 5264753 5264737 5264732 -
tatccagaaactttgctgaatt

SEQ ID NO: 137049 - DNA, 22 bp, Artificial Sequence
  Synthetic oligonucleotide; CTT chr11 5264719 5264740 5264724 5264719 -
tgctgaattattttatcagttc

SEQ ID NO: 137050 - DNA, 22 bp, Artificial Sequence
  Synthetic oligonucleotide; TTT chr11 5264718 5264739 5264723 5264718 -
gctgaattattttatcagttct

SEQ ID NO: 137051 - DNA, 22 bp, Artificial Sequence
  Synthetic oligonucleotide; TTG chr11 5264717 5264738 5264722 5264717 -
ctgaattattttatcagttcta

SEQ ID NO: 137052 - DNA, 22 bp, Artificial Sequence
  Synthetic oligonucleotide; CTG chr11 5264714 5264735 5264719 5264714 -
aattattttatcagttctaggg

SEQ ID NO: 137053 - DNA, 22 bp, Artificial Sequence
  Synthetic oligonucleotide; TTA chr11 5264709 5264730 5264714 5264709 -
ttttatcagttctagggggttt

SEQ ID NO: 137054 - DNA, 22 bp, Artificial Sequence
  Synthetic oligonucleotide; TTT chr11 5264706 5264727 5264711 5264706 -
tatcagttctagggggttttgg

SEQ ID NO: 137055 - DNA, 22 bp, Artificial Sequence
  Synthetic oligonucleotide; TTT chr11 5264705 5264726 5264710 5264705 -
atcagttctagggggttttgga

SEQ ID NO: 137056 - DNA, 22 bp, Artificial Sequence
  Synthetic oligonucleotide; TTA chr11 5264704 5264725 5264709 5264704 -
tcagttctagggggttttggag

SEQ ID NO: 137057 - DNA, 22 bp, Artificial Sequence
  Synthetic oligonucleotide; TTC chr11 5264697 5264718 5264702 5264697 -
tagggggttttggaggagtctt

SEQ ID NO: 137058 - DNA, 22 bp, Artificial Sequence
  Synthetic oligonucleotide; CTA chr11 5264695 5264716 5264700 5264695 -
gggggttttggaggagtcttta

SEQ ID NO: 137059 - DNA, 22 bp, Artificial Sequence
  Synthetic oligonucleotide; TTT chr11 5264687 5264708 5264692 5264687 -
tggaggagtctttagagttttc

SEQ ID NO: 137060 - DNA, 22 bp, Artificial Sequence
  Synthetic oligonucleotide; TTT chr11 5264686 5264707 5264691 5264686 -
ggaggagtctttagagttttct

SEQ ID NO: 137061 - DNA, 22 bp, Artificial Sequence
  Synthetic oligonucleotide; TTG chr11 5264685 5264706 5264690 5264685 -
gaggagtctttagagttttcta

SEQ ID NO: 137062 - DNA, 22 bp, Artificial Sequence
  Synthetic oligonucleotide; CTT chr11 5264675 5264696 5264680 5264675 -
tagagttttctacatacacaat

SEQ ID NO: 137063 - DNA, 22 bp, Artificial Sequence
  Synthetic oligonucleotide; TTT chr11 5264674 5264695 5264679 5264674 -
agagttttctacatacacaatc

SEQ ID NO: 137064 - DNA, 22 bp, Artificial Sequence
  Synthetic oligonucleotide; TTA chr11 5264673 5264694 5264678 5264673 -
gagttttctacatacacaatca

SEQ ID NO: 137065 - DNA, 22 bp, Artificial Sequence
  Synthetic oligonucleotide; TTT chr11 5264667 5264688 5264672 5264667 -
tctacatacacaatcatatcat

SEQ ID NO: 137066 - DNA, 22 bp, Artificial Sequence
  Synthetic oligonucleotide; TTT chr11 5264666 5264687 5264671 5264666 -
ctacatacacaatcatatcatc

SEQ ID NO: 137067 - DNA, 22 bp, Artificial Sequence
  Synthetic oligonucleotide; TTC chr11 5264665 5264686 5264670 5264665 -
tacatacacaatcatatcatca

SEQ ID NO: 137068 - DNA, 22 bp, Artificial Sequence
  Synthetic oligonucleotide; CTA chr11 5264663 5264684 5264668 5264663 -
catacacaatcatatcatcagc

SEQ ID NO: 137069 - DNA, 22 bp, Artificial Sequence
  Synthetic oligonucleotide; TTT chr11 5264626 5264647 5264631 5264626 -
gactttctctttaacaatttgg

SEQ ID NO: 137070 - DNA, 22 bp, Artificial Sequence
  Synthetic oligonucleotide; TTG chr11 5264625 5264646 5264630 5264625 -
actttctctttaacaatttgga

SEQ ID NO: 137071 - DNA, 22 bp, Artificial Sequence
  Synthetic oligonucleotide; CTT chr11 5264621 5264642 5264626 5264621 -
tctctttaacaatttggatgtg

SEQ ID NO: 137072 - DNA, 22 bp, Artificial Sequence
  Synthetic oligonucleotide; TTT chr11 5264620 5264641 5264625 5264620 -
ctctttaacaatttggatgtgc

SEQ ID NO: 137073 - DNA, 22 bp, Artificial Sequence
  Synthetic oligonucleotide; TTC chr11 5264619 5264640 5264624 5264619 -
tctttaacaatttggatgtgct

SEQ ID NO: 137074 - DNA, 22 bp, Artificial Sequence
  Synthetic oligonucleotide; CTC chr11 5264617 5264638 5264622 5264617 -
tttaacaatttggatgtgcttt

SEQ ID NO: 137075 - DNA, 22 bp, Artificial Sequence
  Synthetic oligonucleotide; CTT chr11 5264615 5264636 5264620 5264615 -
taacaatttggatgtgctttac

SEQ ID NO: 137076 - DNA, 22 bp, Artificial Sequence
  Synthetic oligonucleotide; TTT chr11 5264614 5264635 5264619 5264614 -
aacaatttggatgtgctttact

SEQ ID NO: 137077 - DNA, 22 bp, Artificial Sequence
  Synthetic oligonucleotide; TTA chr11 5264613 5264634 5264618 5264613 -
acaatttggatgtgctttactt

SEQ ID NO: 137078 - DNA, 22 bp, Artificial Sequence
  Synthetic oligonucleotide; TTT chr11 5264606 5264627 5264611 5264606 -
ggatgtgctttacttgtttctc

SEQ ID NO: 137079 - DNA, 22 bp, Artificial Sequence
  Synthetic oligonucleotide; TTG chr11 5264605 5264626 5264610 5264605 -
gatgtgctttacttgtttctct

SEQ ID NO: 137080 - DNA, 22 bp, Artificial Sequence
  Synthetic oligonucleotide; CTT chr11 5264596 5264617 5264601 5264596 -
tacttgtttctcttgtctgatt

SEQ ID NO: 137081 - DNA, 22 bp, Artificial Sequence
  Synthetic oligonucleotide; TTT chr11 5264595 5264616 5264600 5264595 -
acttgtttctcttgtctgattg

SEQ ID NO: 137082 - DNA, 22 bp, Artificial Sequence
  Synthetic oligonucleotide; TTA chr11 5264594 5264615 5264599 5264594 -
cttgtttctcttgtctgattgc

SEQ ID NO: 137083 - DNA, 22 bp, Artificial Sequence
  Synthetic oligonucleotide; CTT chr11 5264591 5264612 5264596 5264591 -
gtttctcttgtctgattgctct

SEQ ID NO: 137084 - DNA, 22 bp, Artificial Sequence
  Synthetic oligonucleotide; TTG chr11 5264590 5264611 5264595 5264590 -
tttctcttgtctgattgctctt

SEQ ID NO: 137085 - DNA, 22 bp, Artificial Sequence
  Synthetic oligonucleotide; TTT chr11 5264587 5264608 5264592 5264587 -
ctcttgtctgattgctcttgct

SEQ ID NO: 137086 - DNA, 22 bp, Artificial Sequence
  Synthetic oligonucleotide; TTC chr11 5264586 5264607 5264591 5264586 -
tcttgtctgattgctcttgcta

SEQ ID NO: 137087 - DNA, 22 bp, Artificial Sequence
  Synthetic oligonucleotide; CTC chr11 5264584 5264605 5264589 5264584 -
ttgtctgattgctcttgctagg

SEQ ID NO: 137088 - DNA, 22 bp, Artificial Sequence
  Synthetic oligonucleotide; CTT chr11 5264582 5264603 5264587 5264582 -
gtctgattgctcttgctaggac

SEQ ID NO: 137089 - DNA, 22 bp, Artificial Sequence
  Synthetic oligonucleotide; TTG chr11 5264581 5264602 5264586 5264581 -
tctgattgctcttgctaggact

SEQ ID NO: 137090 - DNA, 22 bp, Artificial Sequence
  Synthetic oligonucleotide; CTG chr11 5264577 5264598 5264582 5264577 -
attgctcttgctaggacttcca

SEQ ID NO: 137091 - DNA, 22 bp, Artificial Sequence
  Synthetic oligonucleotide; TTG chr11 5264573 5264594 5264578 5264573 -
ctcttgctaggacttccagtaa

SEQ ID NO: 137092 - DNA, 22 bp, Artificial Sequence
  Synthetic oligonucleotide; CTC chr11 5264570 5264591 5264575 5264570 -
ttgctaggacttccagtaatat

SEQ ID NO: 137093 - DNA, 22 bp, Artificial Sequence
  Synthetic oligonucleotide; CTT chr11 5264568 5264589 5264573 5264568 -
gctaggacttccagtaatatgt

SEQ ID NO: 137094 - DNA, 22 bp, Artificial Sequence
  Synthetic oligonucleotide; TTG chr11 5264567 5264588 5264572 5264567 -
ctaggacttccagtaatatgtt

SEQ ID NO: 137095 - DNA, 22 bp, Artificial Sequence
  Synthetic oligonucleotide; CTA chr11 5264564 5264585 5264569 5264564 -
ggacttccagtaatatgttaaa

SEQ ID NO: 137096 - DNA, 22 bp, Artificial Sequence
  Synthetic oligonucleotide; CTT chr11 5264558 5264579 5264563 5264558 -
ccagtaatatgttaaagagaag

SEQ ID NO: 137097 - DNA, 22 bp, Artificial Sequence
  Synthetic oligonucleotide; TTC chr11 5264557 5264578 5264562 5264557 -
cagtaatatgttaaagagaagt

SEQ ID NO: 137098 - DNA, 22 bp, Artificial Sequence
  Synthetic oligonucleotide; TTA chr11 5264544 5264565 5264549 5264544 -
aagagaagtggtgagagtgggt

SEQ ID NO: 137099 - DNA, 22 bp, Artificial Sequence
  Synthetic oligonucleotide; CTT chr11 5264516 5264537 5264521 5264516 -
gtctcattccagttttcagaca

SEQ ID NO: 137100 - DNA, 22 bp, Artificial Sequence
  Synthetic oligonucleotide; TTG chr11 5264515 5264536 5264520 5264515 -
tctcattccagttttcagacag

SEQ ID NO: 137101 - DNA, 22 bp, Artificial Sequence
  Synthetic oligonucleotide; CTC chr11 5264511 5264532 5264516 5264511 -
attccagttttcagacagaatg

SEQ ID NO: 137102 - DNA, 22 bp, Artificial Sequence
  Synthetic oligonucleotide; TTC chr11 5264507 5264528 5264512 5264507 -
cagttttcagacagaatgcttt

SEQ ID NO: 137103 - DNA, 22 bp, Artificial Sequence
  Synthetic oligonucleotide; TTT chr11 5264501 5264522 5264506 5264501 -
tcagacagaatgcttttaactt

SEQ ID NO: 137104 - DNA, 22 bp, Artificial Sequence
  Synthetic oligonucleotide; TTT chr11 5264500 5264521 5264505 5264500 -
cagacagaatgcttttaacttt

SEQ ID NO: 137105 - DNA, 22 bp, Artificial Sequence
  Synthetic oligonucleotide; TTC chr11 5264499 5264520 5264504 5264499 -
agacagaatgcttttaactttt

SEQ ID NO: 137106 - DNA, 22 bp, Artificial Sequence
  Synthetic oligonucleotide; CTT chr11 5264486 5264507 5264491 5264486 -
ttaactttttcccattcaatat

SEQ ID NO: 137107 - DNA, 22 bp, Artificial Sequence
  Synthetic oligonucleotide; TTT chr11 5264485 5264506 5264490 5264485 -
taactttttcccattcaatata

SEQ ID NO: 137108 - DNA, 22 bp, Artificial Sequence
  Synthetic oligonucleotide; TTT chr11 5264484 5264505 5264489 5264484 -
aactttttcccattcaatataa

SEQ ID NO: 137109 - DNA, 22 bp, Artificial Sequence
  Synthetic oligonucleotide; TTA chr11 5264483 5264504 5264488 5264483 -
actttttcccattcaatataat

SEQ ID NO: 137110 - DNA, 22 bp, Artificial Sequence
  Synthetic oligonucleotide; CTT chr11 5264479 5264500 5264484 5264479 -
tttcccattcaatataatgttg

SEQ ID NO: 137111 - DNA, 22 bp, Artificial Sequence
  Synthetic oligonucleotide; TTT chr11 5264478 5264499 5264483 5264478 -
ttcccattcaatataatgttgg

SEQ ID NO: 137112 - DNA, 22 bp, Artificial Sequence
  Synthetic oligonucleotide; TTT chr11 5264477 5264498 5264482 5264477 -
tcccattcaatataatgttggc

SEQ ID NO: 137113 - DNA, 22 bp, Artificial Sequence
  Synthetic oligonucleotide; TTT chr11 5264476 5264497 5264481 5264476 -
cccattcaatataatgttggct

SEQ ID NO: 137114 - DNA, 22 bp, Artificial Sequence
  Synthetic oligonucleotide; TTC chr11 5264475 5264496 5264480 5264475 -
ccattcaatataatgttggctg

SEQ ID NO: 137115 - DNA, 22 bp, Artificial Sequence
  Synthetic oligonucleotide; TTC chr11 5264469 5264490 5264474 5264469 -
aatataatgttggctgtgtgtt

SEQ ID NO: 137116 - DNA, 22 bp, Artificial Sequence
  Synthetic oligonucleotide; TTG chr11 5264457 5264478 5264462 5264457 -
gctgtgtgtttaccatagctgg

SEQ ID NO: 137117 - DNA, 22 bp, Artificial Sequence
  Synthetic oligonucleotide; CTG chr11 5264453 5264474 5264458 5264453 -
tgtgtttaccatagctggcttt

SEQ ID NO: 137118 - DNA, 22 bp, Artificial Sequence
  Synthetic oligonucleotide; TTT chr11 5264446 5264467 5264451 5264446 -
accatagctggcttttattaca

SEQ ID NO: 137119 - DNA, 22 bp, Artificial Sequence
  Synthetic oligonucleotide; TTA chr11 5264445 5264466 5264450 5264445 -
ccatagctggcttttattacat

SEQ ID NO: 137120 - DNA, 22 bp, Artificial Sequence
  Synthetic oligonucleotide; CTG chr11 5264436 5264457 5264441 5264436 -
gcttttattacattgaggtatg

SEQ ID NO: 137121 - DNA, 22 bp, Artificial Sequence
  Synthetic oligonucleotide; CTT chr11 5264432 5264453 5264437 5264432 -
ttattacattgaggtatgtcct

SEQ ID NO: 137122 - DNA, 22 bp, Artificial Sequence
  Synthetic oligonucleotide; TTT chr11 5264431 5264452 5264436 5264431 -
tattacattgaggtatgtcctt

SEQ ID NO: 137123 - DNA, 22 bp, Artificial Sequence
  Synthetic oligonucleotide; TTT chr11 5264430 5264451 5264435 5264430 -
attacattgaggtatgtccttt

SEQ ID NO: 137124 - DNA, 22 bp, Artificial Sequence
  Synthetic oligonucleotide; TTA chr11 5264429 5264450 5264434 5264429 -
ttacattgaggtatgtcctttg

SEQ ID NO: 137125 - DNA, 22 bp, Artificial Sequence
  Synthetic oligonucleotide; TTA chr11 5264426 5264447 5264431 5264426 -
cattgaggtatgtcctttgtaa

SEQ ID NO: 137126 - DNA, 22 bp, Artificial Sequence
  Synthetic oligonucleotide; TTG chr11 5264421 5264442 5264426 5264421 -
aggtatgtcctttgtaaaccga

SEQ ID NO: 137127 - DNA, 22 bp, Artificial Sequence
  Synthetic oligonucleotide; CTT chr11 5264409 5264430 5264414 5264409 -
tgtaaaccgattttgctgagtt

SEQ ID NO: 137128 - DNA, 22 bp, Artificial Sequence
  Synthetic oligonucleotide; TTT chr11 5264408 5264429 5264413 5264408 -
gtaaaccgattttgctgagttt

SEQ ID NO: 137129 - DNA, 22 bp, Artificial Sequence
  Synthetic oligonucleotide; TTG chr11 5264407 5264428 5264412 5264407 -
taaaccgattttgctgagtttt

SEQ ID NO: 137130 - DNA, 22 bp, Artificial Sequence
  Synthetic oligonucleotide; TTT chr11 5264396 5264417 5264401 5264396 -
tgctgagttttagtcataaagt

SEQ ID NO: 137131 - DNA, 22 bp, Artificial Sequence
  Synthetic oligonucleotide; TTT chr11 5264395 5264416 5264400 5264395 -
gctgagttttagtcataaagtg

SEQ ID NO: 137132 - DNA, 22 bp, Artificial Sequence
  Synthetic oligonucleotide; TTG chr11 5264394 5264415 5264399 5264394 -
ctgagttttagtcataaagtga

SEQ ID NO: 137133 - DNA, 22 bp, Artificial Sequence
  Synthetic oligonucleotide; CTG chr11 5264391 5264412 5264396 5264391 -
agttttagtcataaagtgatgt

SEQ ID NO: 137134 - DNA, 22 bp, Artificial Sequence
  Synthetic oligonucleotide; TTT chr11 5264386 5264407 5264391 5264386 -
tagtcataaagtgatgttgaat

SEQ ID NO: 137135 - DNA, 22 bp, Artificial Sequence
  Synthetic oligonucleotide; TTT chr11 5264385 5264406 5264390 5264385 -
agtcataaagtgatgttgaatt

SEQ ID NO: 137136 - DNA, 22 bp, Artificial Sequence
  Synthetic oligonucleotide; TTA chr11 5264384 5264405 5264389 5264384 -
gtcataaagtgatgttgaattt

SEQ ID NO: 137137 - DNA, 22 bp, Artificial Sequence
  Synthetic oligonucleotide; TTG chr11 5264367 5264388 5264372 5264367 -
aattttgttgaatgcagtttct

SEQ ID NO: 137138 - DNA, 22 bp, Artificial Sequence
  Synthetic oligonucleotide; TTT chr11 5264362 5264383 5264367 5264362 -
tgttgaatgcagtttctgtggc

SEQ ID NO: 137139 - DNA, 22 bp, Artificial Sequence
  Synthetic oligonucleotide; TTT chr11 5264361 5264382 5264366 5264361 -
gttgaatgcagtttctgtggct

SEQ ID NO: 137140 - DNA, 22 bp, Artificial Sequence
  Synthetic oligonucleotide; TTG chr11 5264360 5264381 5264365 5264360 -
ttgaatgcagtttctgtggcta

SEQ ID NO: 137141 - DNA, 22 bp, Artificial Sequence
  Synthetic oligonucleotide; TTG chr11 5264357 5264378 5264362 5264357 -
aatgcagtttctgtggctattg

SEQ ID NO: 137142 - DNA, 22 bp, Artificial Sequence
  Synthetic oligonucleotide; TTT chr11 5264347 5264368 5264352 5264347 -
ctgtggctattgagataatcac

SEQ ID NO: 137143 - DNA, 22 bp, Artificial Sequence
  Synthetic oligonucleotide; TTC chr11 5264346 5264367 5264351 5264346 -
tgtggctattgagataatcaca

SEQ ID NO: 137144 - DNA, 22 bp, Artificial Sequence
  Synthetic oligonucleotide; CTG chr11 5264344 5264365 5264349 5264344 -
tggctattgagataatcacatg

SEQ ID NO: 137145 - DNA, 22 bp, Artificial Sequence
  Synthetic oligonucleotide; CTA chr11 5264338 5264359 5264343 5264338 -
ttgagataatcacatgattttt

SEQ ID NO: 137146 - DNA, 22 bp, Artificial Sequence
  Synthetic oligonucleotide; TTG chr11 5264335 5264356 5264340 5264335 -
agataatcacatgatttttgtt

SEQ ID NO: 137147 - DNA, 22 bp, Artificial Sequence
  Synthetic oligonucleotide; TTT chr11 5264318 5264339 5264323 5264318 -
ttgtttccaattctctttatgt

SEQ ID NO: 137148 - DNA, 22 bp, Artificial Sequence
  Synthetic oligonucleotide; TTT chr11 5264317 5264338 5264322 5264317 -
tgtttccaattctctttatgtt

SEQ ID NO: 137149 - DNA, 22 bp, Artificial Sequence
  Synthetic oligonucleotide; TTT chr11 5264316 5264337 5264321 5264316 -
gtttccaattctctttatgttg

SEQ ID NO: 137150 - DNA, 22 bp, Artificial Sequence
  Synthetic oligonucleotide; TTG chr11 5264315 5264336 5264320 5264315 -
tttccaattctctttatgttgt

SEQ ID NO: 137151 - DNA, 22 bp, Artificial Sequence
  Synthetic oligonucleotide; TTT chr11 5264312 5264333 5264317 5264312 -
ccaattctctttatgttgtgta

SEQ ID NO: 137152 - DNA, 22 bp, Artificial Sequence
  Synthetic oligonucleotide; TTC chr11 5264311 5264332 5264316 5264311 -
caattctctttatgttgtgtat

SEQ ID NO: 137153 - DNA, 22 bp, Artificial Sequence
  Synthetic oligonucleotide; TTC chr11 5264305 5264326 5264310 5264305 -
tctttatgttgtgtatcacact

SEQ ID NO: 137154 - DNA, 22 bp, Artificial Sequence
  Synthetic oligonucleotide; CTC chr11 5264303 5264324 5264308 5264303 -
tttatgttgtgtatcacactta

SEQ ID NO: 137155 - DNA, 22 bp, Artificial Sequence
  Synthetic oligonucleotide; CTT chr11 5264301 5264322 5264306 5264301 -
tatgttgtgtatcacacttatt

SEQ ID NO: 137156 - DNA, 22 bp, Artificial Sequence
  Synthetic oligonucleotide; TTT chr11 5264300 5264321 5264305 5264300 -
atgttgtgtatcacacttattg

SEQ ID NO: 137157 - DNA, 22 bp, Artificial Sequence
  Synthetic oligonucleotide; TTA chr11 5264299 5264320 5264304 5264299 -
tgttgtgtatcacacttattga

SEQ ID NO: 137158 - DNA, 22 bp, Artificial Sequence
  Synthetic oligonucleotide; TTG chr11 5264294 5264315 5264299 5264294 -
tgtatcacacttattgacttgc

SEQ ID NO: 137159 - DNA, 22 bp, Artificial Sequence
  Synthetic oligonucleotide; CTT chr11 5264282 5264303 5264287 5264282 -
attgacttgcgtatgttaaacc

SEQ ID NO: 137160 - DNA, 22 bp, Artificial Sequence
  Synthetic oligonucleotide; TTA chr11 5264281 5264302 5264286 5264281 -
ttgacttgcgtatgttaaacca

SEQ ID NO: 137161 - DNA, 22 bp, Artificial Sequence
  Synthetic oligonucleotide; TTG chr11 5264278 5264299 5264283 5264278 -
acttgcgtatgttaaaccatcc

SEQ ID NO: 137162 - DNA, 22 bp, Artificial Sequence
  Synthetic oligonucleotide; CTT chr11 5264274 5264295 5264279 5264274 -
gcgtatgttaaaccatccgtgc

SEQ ID NO: 137163 - DNA, 22 bp, Artificial Sequence
  Synthetic oligonucleotide; TTG chr11 5264273 5264294 5264278 5264273 -
cgtatgttaaaccatccgtgca

SEQ ID NO: 137164 - DNA, 22 bp, Artificial Sequence
  Synthetic oligonucleotide; TTA chr11 5264264 5264285 5264269 5264264 -
aaccatccgtgcatccctcgca

SEQ ID NO: 137165 - DNA, 22 bp, Artificial Sequence
  Synthetic oligonucleotide; CTC chr11 5264245 5264266 5264250 5264245 -
gcatgaaacccacttgatcatg

SEQ ID NO: 137166 - DNA, 22 bp, Artificial Sequence
  Synthetic oligonucleotide; CTT chr11 5264230 5264251 5264235 5264230 -
gatcatgggttttgatatgctg

SEQ ID NO: 137167 - DNA, 22 bp, Artificial Sequence
  Synthetic oligonucleotide; TTG chr11 5264229 5264250 5264234 5264229 -
atcatgggttttgatatgctgt

SEQ ID NO: 137168 - DNA, 22 bp, Artificial Sequence
  Synthetic oligonucleotide; TTT chr11 5264218 5264239 5264223 5264218 -
tgatatgctgtcggatgctatt

SEQ ID NO: 137169 - DNA, 22 bp, Artificial Sequence
  Synthetic oligonucleotide; TTT chr11 5264217 5264238 5264222 5264217 -
gatatgctgtcggatgctatta

SEQ ID NO: 137170 - DNA, 22 bp, Artificial Sequence
  Synthetic oligonucleotide; TTG chr11 5264216 5264237 5264221 5264216 -
atatgctgtcggatgctattag

SEQ ID NO: 137171 - DNA, 22 bp, Artificial Sequence
  Synthetic oligonucleotide; CTG chr11 5264208 5264229 5264213 5264208 -
tcggatgctattagctagtatt

SEQ ID NO: 137172 - DNA, 22 bp, Artificial Sequence
  Synthetic oligonucleotide; CTA chr11 5264198 5264219 5264203 5264198 -
ttagctagtattttgtcaagga

SEQ ID NO: 137173 - DNA, 22 bp, Artificial Sequence
  Synthetic oligonucleotide; TTA chr11 5264195 5264216 5264200 5264195 -
gctagtattttgtcaaggatgt

SEQ ID NO: 137174 - DNA, 22 bp, Artificial Sequence
  Synthetic oligonucleotide; CTA chr11 5264191 5264212 5264196 5264191 -
gtattttgtcaaggatgttggc

SEQ ID NO: 137175 - DNA, 22 bp, Artificial Sequence
  Synthetic oligonucleotide; TTT chr11 5264185 5264206 5264190 5264185 -
tgtcaaggatgttggcatctat

SEQ ID NO: 137176 - DNA, 22 bp, Artificial Sequence
  Synthetic oligonucleotide; TTT chr11 5264184 5264205 5264189 5264184 -
gtcaaggatgttggcatctatg

SEQ ID NO: 137177 - DNA, 22 bp, Artificial Sequence
  Synthetic oligonucleotide; TTG chr11 5264183 5264204 5264188 5264183 -
tcaaggatgttggcatctatgt

SEQ ID NO: 137178 - DNA, 22 bp, Artificial Sequence
  Synthetic oligonucleotide; TTG chr11 5264171 5264192 5264176 5264171 -
gcatctatgttcatcagggata

SEQ ID NO: 137179 - DNA, 22 bp, Artificial Sequence
  Synthetic oligonucleotide; CTA chr11 5264164 5264185 5264169 5264164 -
tgttcatcagggatattgatct

SEQ ID NO: 137180 - DNA, 22 bp, Artificial Sequence
  Synthetic oligonucleotide; TTC chr11 5264159 5264180 5264164 5264159 -
atcagggatattgatctgtagt

SEQ ID NO: 137181 - DNA, 22 bp, Artificial Sequence
  Synthetic oligonucleotide; TTG chr11 5264146 5264167 5264151 5264146 -
atctgtagtgtttttttttttt

SEQ ID NO: 137182 - DNA, 22 bp, Artificial Sequence
  Synthetic oligonucleotide; CTG chr11 5264141 5264162 5264146 5264141 -
tagtgttttttttttttggtta

SEQ ID NO: 137183 - DNA, 22 bp, Artificial Sequence
  Synthetic oligonucleotide; TTT chr11 5264133 5264154 5264138 5264133 -
tttttttttggttatgttcttt

SEQ ID NO: 137184 - DNA, 22 bp, Artificial Sequence
  Synthetic oligonucleotide; TTT chr11 5264132 5264153 5264137 5264132 -
ttttttttggttatgttctttc

SEQ ID NO: 137185 - DNA, 22 bp, Artificial Sequence
  Synthetic oligonucleotide; TTT chr11 5264131 5264152 5264136 5264131 -
tttttttggttatgttctttcc

SEQ ID NO: 137186 - DNA, 22 bp, Artificial Sequence
  Synthetic oligonucleotide; TTT chr11 5264130 5264151 5264135 5264130 -
ttttttggttatgttctttccc

SEQ ID NO: 137187 - DNA, 22 bp, Artificial Sequence
  Synthetic oligonucleotide; TTT chr11 5264129 5264150 5264134 5264129 -
tttttggttatgttctttccca

SEQ ID NO: 137188 - DNA, 22 bp, Artificial Sequence
  Synthetic oligonucleotide; TTT chr11 5264128 5264149 5264133 5264128 -
ttttggttatgttctttcccag

SEQ ID NO: 137189 - DNA, 22 bp, Artificial Sequence
  Synthetic oligonucleotide; TTT chr11 5264127 5264148 5264132 5264127 -
tttggttatgttctttcccagt

SEQ ID NO: 137190 - DNA, 22 bp, Artificial Sequence
  Synthetic oligonucleotide; TTT chr11 5264126 5264147 5264131 5264126 -
ttggttatgttctttcccagtt

SEQ ID NO: 137191 - DNA, 22 bp, Artificial Sequence
  Synthetic oligonucleotide; TTT chr11 5264125 5264146 5264130 5264125 -
tggttatgttctttcccagttt

SEQ ID NO: 137192 - DNA, 22 bp, Artificial Sequence
  Synthetic oligonucleotide; TTT chr11 5264124 5264145 5264129 5264124 -
ggttatgttctttcccagtttt

SEQ ID NO: 137193 - DNA, 22 bp, Artificial Sequence
  Synthetic oligonucleotide; TTG chr11 5264123 5264144 5264128 5264123 -
gttatgttctttcccagttttg

SEQ ID NO: 137194 - DNA, 22 bp, Artificial Sequence
  Synthetic oligonucleotide; TTA chr11 5264119 5264140 5264124 5264119 -
tgttctttcccagttttggtat

SEQ ID NO: 137195 - DNA, 22 bp, Artificial Sequence
  Synthetic oligonucleotide; TTC chr11 5264114 5264135 5264119 5264114 -
tttcccagttttggtattaagg

SEQ ID NO: 137196 - DNA, 22 bp, Artificial Sequence
  Synthetic oligonucleotide; CTT chr11 5264112 5264133 5264117 5264112 -
tcccagttttggtattaaggtg

SEQ ID NO: 137197 - DNA, 22 bp, Artificial Sequence
  Synthetic oligonucleotide; TTT chr11 5264111 5264132 5264116 5264111 -
cccagttttggtattaaggtga

SEQ ID NO: 137198 - DNA, 22 bp, Artificial Sequence
  Synthetic oligonucleotide; TTC chr11 5264110 5264131 5264115 5264110 -
ccagttttggtattaaggtgat

SEQ ID NO: 137199 - DNA, 22 bp, Artificial Sequence
  Synthetic oligonucleotide; TTT chr11 5264103 5264124 5264108 5264103 -
tggtattaaggtgatactggct

SEQ ID NO: 137200 - DNA, 22 bp, Artificial Sequence
  Synthetic oligonucleotide; TTT chr11 5264102 5264123 5264107 5264102 -
ggtattaaggtgatactggctt

SEQ ID NO: 137201 - DNA, 22 bp, Artificial Sequence
  Synthetic oligonucleotide; TTG chr11 5264101 5264122 5264106 5264101 -
gtattaaggtgatactggcttc

SEQ ID NO: 137202 - DNA, 22 bp, Artificial Sequence
  Synthetic oligonucleotide; TTA chr11 5264095 5264116 5264100 5264095 -
aggtgatactggcttcatagaa

SEQ ID NO: 137203 - DNA, 22 bp, Artificial Sequence
  Synthetic oligonucleotide; CTG chr11 5264084 5264105 5264089 5264084 -
gcttcatagaatgatttaggga

SEQ ID NO: 137204 - DNA, 22 bp, Artificial Sequence
  Synthetic oligonucleotide; CTT chr11 5264080 5264101 5264085 5264080 -
catagaatgatttagggaggat

SEQ ID NO: 137205 - DNA, 22 bp, Artificial Sequence
  Synthetic oligonucleotide; TTC chr11 5264079 5264100 5264084 5264079 -
atagaatgatttagggaggatt

SEQ ID NO: 137206 - DNA, 22 bp, Artificial Sequence
  Synthetic oligonucleotide; TTT chr11 5264067 5264088 5264072 5264067 -
agggaggattctctctttctct

SEQ ID NO: 137207 - DNA, 22 bp, Artificial Sequence
  Synthetic oligonucleotide; TTA chr11 5264066 5264087 5264071 5264066 -
gggaggattctctctttctcta

SEQ ID NO: 137208 - DNA, 22 bp, Artificial Sequence
  Synthetic oligonucleotide; TTC chr11 5264056 5264077 5264061 5264056 -
tctctttctctatcttgtagaa

SEQ ID NO: 137209 - DNA, 22 bp, Artificial Sequence
  Synthetic oligonucleotide; CTC chr11 5264054 5264075 5264059 5264054 -
tctttctctatcttgtagaata

SEQ ID NO: 137210 - DNA, 22 bp, Artificial Sequence
  Synthetic oligonucleotide; CTC chr11 5264052 5264073 5264057 5264052 -
tttctctatcttgtagaatact

SEQ ID NO: 137211 - DNA, 22 bp, Artificial Sequence
  Synthetic oligonucleotide; CTT chr11 5264050 5264071 5264055 5264050 -
tctctatcttgtagaatactgt

SEQ ID NO: 137212 - DNA, 22 bp, Artificial Sequence
  Synthetic oligonucleotide; TTT chr11 5264049 5264070 5264054 5264049 -
ctctatcttgtagaatactgtc

SEQ ID NO: 137213 - DNA, 22 bp, Artificial Sequence
  Synthetic oligonucleotide; TTC chr11 5264048 5264069 5264053 5264048 -
tctatcttgtagaatactgtca

SEQ ID NO: 137214 - DNA, 22 bp, Artificial Sequence
  Synthetic oligonucleotide; CTC chr11 5264046 5264067 5264051 5264046 -
tatcttgtagaatactgtcaat

SEQ ID NO: 137215 - DNA, 22 bp, Artificial Sequence
  Synthetic oligonucleotide; CTA chr11 5264044 5264065 5264049 5264044 -
tcttgtagaatactgtcaatag

SEQ ID NO: 137216 - DNA, 22 bp, Artificial Sequence
  Synthetic oligonucleotide; CTT chr11 5264040 5264061 5264045 5264040 -
gtagaatactgtcaataggatt

SEQ ID NO: 137217 - DNA, 22 bp, Artificial Sequence
  Synthetic oligonucleotide; TTG chr11 5264039 5264060 5264044 5264039 -
tagaatactgtcaataggattg

SEQ ID NO: 137218 - DNA, 22 bp, Artificial Sequence
  Synthetic oligonucleotide; CTG chr11 5264029 5264050 5264034 5264029 -
tcaataggattggtatcaattc

SEQ ID NO: 137219 - DNA, 22 bp, Artificial Sequence
  Synthetic oligonucleotide; TTG chr11 5264017 5264038 5264022 5264017 -
gtatcaattcttctttgaatgt

SEQ ID NO: 137220 - DNA, 22 bp, Artificial Sequence
  Synthetic oligonucleotide; TTC chr11 5264007 5264028 5264012 5264007 -
ttctttgaatgtctggtagaat

SEQ ID NO: 137221 - DNA, 22 bp, Artificial Sequence
  Synthetic oligonucleotide; CTT chr11 5264005 5264026 5264010 5264005 -
ctttgaatgtctggtagaattc

SEQ ID NO: 137222 - DNA, 22 bp, Artificial Sequence
  Synthetic oligonucleotide; TTC chr11 5264004 5264025 5264009 5264004 -
tttgaatgtctggtagaattca

SEQ ID NO: 137223 - DNA, 22 bp, Artificial Sequence
  Synthetic oligonucleotide; CTT chr11 5264002 5264023 5264007 5264002 -
tgaatgtctggtagaattcagc

SEQ ID NO: 137224 - DNA, 22 bp, Artificial Sequence
  Synthetic oligonucleotide; TTT chr11 5264001 5264022 5264006 5264001 -
gaatgtctggtagaattcagct

SEQ ID NO: 137225 - DNA, 22 bp, Artificial Sequence
  Synthetic oligonucleotide; TTG chr11 5264000 5264021 5264005 5264000 -
aatgtctggtagaattcagctg

SEQ ID NO: 137226 - DNA, 22 bp, Artificial Sequence
  Synthetic oligonucleotide; CTG chr11 5263992 5264013 5263997 5263992 -
gtagaattcagctgtgaatcta

SEQ ID NO: 137227 - DNA, 22 bp, Artificial Sequence
  Synthetic oligonucleotide; TTC chr11 5263983 5264004 5263988 5263983 -
agctgtgaatctatctggtcct

SEQ ID NO: 137228 - DNA, 22 bp, Artificial Sequence
  Synthetic oligonucleotide; CTG chr11 5263978 5263999 5263983 5263978 -
tgaatctatctggtcctggact

SEQ ID NO: 137229 - DNA, 22 bp, Artificial Sequence
  Synthetic oligonucleotide; CTA chr11 5263970 5263991 5263975 5263970 -
tctggtcctggacttttttgtt

SEQ ID NO: 137230 - DNA, 22 bp, Artificial Sequence
  Synthetic oligonucleotide; CTG chr11 5263966 5263987 5263971 5263966 -
gtcctggacttttttgttgttg

SEQ ID NO: 137231 - DNA, 22 bp, Artificial Sequence
  Synthetic oligonucleotide; CTG chr11 5263960 5263981 5263965 5263960 -
gacttttttgttgttggtaaat

SEQ ID NO: 137232 - DNA, 22 bp, Artificial Sequence
  Synthetic oligonucleotide; CTT chr11 5263955 5263976 5263960 5263955 -
ttttgttgttggtaaattttta

SEQ ID NO: 137233 - DNA, 22 bp, Artificial Sequence
  Synthetic oligonucleotide; TTT chr11 5263954 5263975 5263959 5263954 -
tttgttgttggtaaatttttat

SEQ ID NO: 137234 - DNA, 22 bp, Artificial Sequence
  Synthetic oligonucleotide; TTT chr11 5263953 5263974 5263958 5263953 -
ttgttgttggtaaatttttatt

SEQ ID NO: 137235 - DNA, 22 bp, Artificial Sequence
  Synthetic oligonucleotide; TTT chr11 5263952 5263973 5263957 5263952 -
tgttgttggtaaatttttatta

SEQ ID NO: 137236 - DNA, 22 bp, Artificial Sequence
  Synthetic oligonucleotide; TTT chr11 5263951 5263972 5263956 5263951 -
gttgttggtaaatttttattat

SEQ ID NO: 137237 - DNA, 22 bp, Artificial Sequence
  Synthetic oligonucleotide; TTG chr11 5263950 5263971 5263955 5263950 -
ttgttggtaaatttttattatc

SEQ ID NO: 137238 - DNA, 22 bp, Artificial Sequence
  Synthetic oligonucleotide; TTG chr11 5263947 5263968 5263952 5263947 -
ttggtaaatttttattatcatt

SEQ ID NO: 137239 - DNA, 22 bp, Artificial Sequence
  Synthetic oligonucleotide; TTG chr11 5263944 5263965 5263949 5263944 -
gtaaatttttattatcatttca

SEQ ID NO: 137240 - DNA, 22 bp, Artificial Sequence
  Synthetic oligonucleotide; TTT chr11 5263936 5263957 5263941 5263936 -
ttattatcatttcagtcttgct

SEQ ID NO: 137241 - DNA, 22 bp, Artificial Sequence
  Synthetic oligonucleotide; TTT chr11 5263935 5263956 5263940 5263935 -
tattatcatttcagtcttgctg

SEQ ID NO: 137242 - DNA, 22 bp, Artificial Sequence
  Synthetic oligonucleotide; TTT chr11 5263934 5263955 5263939 5263934 -
attatcatttcagtcttgctgc

SEQ ID NO: 137243 - DNA, 22 bp, Artificial Sequence
  Synthetic oligonucleotide; TTA chr11 5263933 5263954 5263938 5263933 -
ttatcatttcagtcttgctgct

SEQ ID NO: 137244 - DNA, 22 bp, Artificial Sequence
  Synthetic oligonucleotide; TTA chr11 5263930 5263951 5263935 5263930 -
tcatttcagtcttgctgcttat

SEQ ID NO: 137245 - DNA, 22 bp, Artificial Sequence
  Synthetic oligonucleotide; TTT chr11 5263924 5263945 5263929 5263924 -
cagtcttgctgcttattactgg

SEQ ID NO: 137246 - DNA, 22 bp, Artificial Sequence
  Synthetic oligonucleotide; TTC chr11 5263923 5263944 5263928 5263923 -
agtcttgctgcttattactggt

SEQ ID NO: 137247 - DNA, 22 bp, Artificial Sequence
  Synthetic oligonucleotide; CTT chr11 5263917 5263938 5263922 5263917 -
gctgcttattactggtctgttc

SEQ ID NO: 137248 - DNA, 22 bp, Artificial Sequence
  Synthetic oligonucleotide; TTG chr11 5263916 5263937 5263921 5263916 -
ctgcttattactggtctgttca

SEQ ID NO: 137249 - DNA, 22 bp, Artificial Sequence
  Synthetic oligonucleotide; CTG chr11 5263913 5263934 5263918 5263913 -
cttattactggtctgttcaggg

SEQ ID NO: 137250 - DNA, 22 bp, Artificial Sequence
  Synthetic oligonucleotide; CTT chr11 5263910 5263931 5263915 5263910 -
attactggtctgttcagggtat

SEQ ID NO: 137251 - DNA, 22 bp, Artificial Sequence
  Synthetic oligonucleotide; TTA chr11 5263909 5263930 5263914 5263909 -
ttactggtctgttcagggtatc

SEQ ID NO: 137252 - DNA, 22 bp, Artificial Sequence
  Synthetic oligonucleotide; TTA chr11 5263906 5263927 5263911 5263906 -
ctggtctgttcagggtatctaa

SEQ ID NO: 137253 - DNA, 22 bp, Artificial Sequence
  Synthetic oligonucleotide; CTG chr11 5263903 5263924 5263908 5263903 -
gtctgttcagggtatctaattc

SEQ ID NO: 137254 - DNA, 22 bp, Artificial Sequence
  Synthetic oligonucleotide; CTG chr11 5263898 5263919 5263903 5263898 -
ttcagggtatctaattcttcct

SEQ ID NO: 137255 - DNA, 22 bp, Artificial Sequence
  Synthetic oligonucleotide; TTC chr11 5263895 5263916 5263900 5263895 -
agggtatctaattcttcctgac

SEQ ID NO: 137256 - DNA, 22 bp, Artificial Sequence
  Synthetic oligonucleotide; CTA chr11 5263885 5263906 5263890 5263885 -
attcttcctgacttaagctaga

SEQ ID NO: 137257 - DNA, 22 bp, Artificial Sequence
  Synthetic oligonucleotide; TTC chr11 5263881 5263902 5263886 5263881 -
ttcctgacttaagctagagccc

SEQ ID NO: 137258 - DNA, 22 bp, Artificial Sequence
  Synthetic oligonucleotide; CTT chr11 5263879 5263900 5263884 5263879 -
cctgacttaagctagagccctg

SEQ ID NO: 137259 - DNA, 22 bp, Artificial Sequence
  Synthetic oligonucleotide; TTC chr11 5263878 5263899 5263883 5263878 -
ctgacttaagctagagccctgt

SEQ ID NO: 137260 - DNA, 22 bp, Artificial Sequence
  Synthetic oligonucleotide; CTG chr11 5263875 5263896 5263880 5263875 -
acttaagctagagccctgtatc

SEQ ID NO: 137261 - DNA, 22 bp, Artificial Sequence
  Synthetic oligonucleotide; CTT chr11 5263871 5263892 5263876 5263871 -
aagctagagccctgtatctttc

SEQ ID NO: 137262 - DNA, 22 bp, Artificial Sequence
  Synthetic oligonucleotide; TTA chr11 5263870 5263891 5263875 5263870 -
agctagagccctgtatctttcc

SEQ ID NO: 137263 - DNA, 22 bp, Artificial Sequence
  Synthetic oligonucleotide; CTA chr11 5263865 5263886 5263870 5263865 -
gagccctgtatctttccaggaa

SEQ ID NO: 137264 - DNA, 22 bp, Artificial Sequence
  Synthetic oligonucleotide; CTG chr11 5263857 5263878 5263862 5263857 -
tatctttccaggaattcgaacg

SEQ ID NO: 137265 - DNA, 22 bp, Artificial Sequence
  Synthetic oligonucleotide; CTT chr11 5263851 5263872 5263856 5263851 -
tccaggaattcgaacgtctcct

SEQ ID NO: 137266 - DNA, 22 bp, Artificial Sequence
  Synthetic oligonucleotide; TTT chr11 5263850 5263871 5263855 5263850 -
ccaggaattcgaacgtctcctt

SEQ ID NO: 137267 - DNA, 22 bp, Artificial Sequence
  Synthetic oligonucleotide; TTC chr11 5263849 5263870 5263854 5263849 -
caggaattcgaacgtctccttt

SEQ ID NO: 137268 - DNA, 22 bp, Artificial Sequence
  Synthetic oligonucleotide; TTC chr11 5263840 5263861 5263845 5263840 -
gaacgtctcctttaggttttct

SEQ ID NO: 137269 - DNA, 22 bp, Artificial Sequence
  Synthetic oligonucleotide; CTC chr11 5263831 5263852 5263836 5263831 -
ctttaggttttctagtttatgc

SEQ ID NO: 137270 - DNA, 22 bp, Artificial Sequence
  Synthetic oligonucleotide; CTT chr11 5263828 5263849 5263833 5263828 -
taggttttctagtttatgcatg

SEQ ID NO: 137271 - DNA, 22 bp, Artificial Sequence
  Synthetic oligonucleotide; TTT chr11 5263827 5263848 5263832 5263827 -
aggttttctagtttatgcatgt

SEQ ID NO: 137272 - DNA, 22 bp, Artificial Sequence
  Synthetic oligonucleotide; TTA chr11 5263826 5263847 5263831 5263826 -
ggttttctagtttatgcatgta

SEQ ID NO: 137273 - DNA, 22 bp, Artificial Sequence
  Synthetic oligonucleotide; TTT chr11 5263821 5263842 5263826 5263821 -
tctagtttatgcatgtaaaggt

SEQ ID NO: 137274 - DNA, 22 bp, Artificial Sequence
  Synthetic oligonucleotide; TTT chr11 5263820 5263841 5263825 5263820 -
ctagtttatgcatgtaaaggtg

SEQ ID NO: 137275 - DNA, 22 bp, Artificial Sequence
  Synthetic oligonucleotide; TTC chr11 5263819 5263840 5263824 5263819 -
tagtttatgcatgtaaaggtgt

SEQ ID NO: 137276 - DNA, 22 bp, Artificial Sequence
  Synthetic oligonucleotide; CTA chr11 5263817 5263838 5263822 5263817 -
gtttatgcatgtaaaggtgttc

SEQ ID NO: 137277 - DNA, 22 bp, Artificial Sequence
  Synthetic oligonucleotide; TTT chr11 5263813 5263834 5263818 5263813 -
atgcatgtaaaggtgttcatag

SEQ ID NO: 137278 - DNA, 22 bp, Artificial Sequence
  Synthetic oligonucleotide; TTA chr11 5263812 5263833 5263817 5263812 -
tgcatgtaaaggtgttcatagt

SEQ ID NO: 137279 - DNA, 22 bp, Artificial Sequence
  Synthetic oligonucleotide; TTC chr11 5263795 5263816 5263800 5263795 -
atagtagccttgaataatcttt

SEQ ID NO: 137280 - DNA, 22 bp, Artificial Sequence
  Synthetic oligonucleotide; CTT chr11 5263784 5263805 5263789 5263784 -
gaataatcttttgtatttctgt

SEQ ID NO: 137281 - DNA, 22 bp, Artificial Sequence
  Synthetic oligonucleotide; TTG chr11 5263783 5263804 5263788 5263783 -
aataatcttttgtatttctgtg

SEQ ID NO: 137282 - DNA, 22 bp, Artificial Sequence
  Synthetic oligonucleotide; CTT chr11 5263774 5263795 5263779 5263774 -
ttgtatttctgtggtatcagta

SEQ ID NO: 137283 - DNA, 22 bp, Artificial Sequence
  Synthetic oligonucleotide; TTT chr11 5263773 5263794 5263778 5263773 -
tgtatttctgtggtatcagtaa

SEQ ID NO: 137284 - DNA, 22 bp, Artificial Sequence
  Synthetic oligonucleotide; TTT chr11 5263772 5263793 5263777 5263772 -
gtatttctgtggtatcagtaat

SEQ ID NO: 137285 - DNA, 22 bp, Artificial Sequence
  Synthetic oligonucleotide; TTG chr11 5263771 5263792 5263776 5263771 -
tatttctgtggtatcagtaata

SEQ ID NO: 137286 - DNA, 22 bp, Artificial Sequence
  Synthetic oligonucleotide; TTT chr11 5263766 5263787 5263771 5263766 -
ctgtggtatcagtaatagtatc

SEQ ID NO: 137287 - DNA, 22 bp, Artificial Sequence
  Synthetic oligonucleotide; TTC chr11 5263765 5263786 5263770 5263765 -
tgtggtatcagtaatagtatct

SEQ ID NO: 137288 - DNA, 22 bp, Artificial Sequence
  Synthetic oligonucleotide; CTG chr11 5263763 5263784 5263768 5263763 -
tggtatcagtaatagtatctcc

SEQ ID NO: 137289 - DNA, 22 bp, Artificial Sequence
  Synthetic oligonucleotide; CTC chr11 5263742 5263763 5263747 5263742 -
ctgttttgtttctaattgagtt

SEQ ID NO: 137290 - DNA, 22 bp, Artificial Sequence
  Synthetic oligonucleotide; CTG chr11 5263739 5263760 5263744 5263739 -
ttttgtttctaattgagtttat

SEQ ID NO: 137291 - DNA, 22 bp, Artificial Sequence
  Synthetic oligonucleotide; TTT chr11 5263736 5263757 5263741 5263736 -
tgtttctaattgagtttatttg

SEQ ID NO: 137292 - DNA, 22 bp, Artificial Sequence
  Synthetic oligonucleotide; TTT chr11 5263735 5263756 5263740 5263735 -
gtttctaattgagtttatttgc

SEQ ID NO: 137293 - DNA, 22 bp, Artificial Sequence
  Synthetic oligonucleotide; TTG chr11 5263734 5263755 5263739 5263734 -
tttctaattgagtttatttgca

SEQ ID NO: 137294 - DNA, 22 bp, Artificial Sequence
  Synthetic oligonucleotide; TTT chr11 5263731 5263752 5263736 5263731 -
ctaattgagtttatttgcactt

SEQ ID NO: 137295 - DNA, 22 bp, Artificial Sequence
  Synthetic oligonucleotide; TTC chr11 5263730 5263751 5263735 5263730 -
taattgagtttatttgcacttc

SEQ ID NO: 137296 - DNA, 22 bp, Artificial Sequence
  Synthetic oligonucleotide; CTA chr11 5263728 5263749 5263733 5263728 -
attgagtttatttgcacttctc

SEQ ID NO: 137297 - DNA, 22 bp, Artificial Sequence
  Synthetic oligonucleotide; TTG chr11 5263724 5263745 5263729 5263724 -
agtttatttgcacttctctcct

SEQ ID NO: 137298 - DNA, 22 bp, Artificial Sequence
  Synthetic oligonucleotide; TTT chr11 5263719 5263740 5263724 5263719 -
atttgcacttctctcctctttt

SEQ ID NO: 137299 - DNA, 22 bp, Artificial Sequence
  Synthetic oligonucleotide; TTA chr11 5263718 5263739 5263723 5263718 -
tttgcacttctctcctcttttc

SEQ ID NO: 137300 - DNA, 22 bp, Artificial Sequence
  Synthetic oligonucleotide; TTT chr11 5263715 5263736 5263720 5263715 -
gcacttctctcctcttttcttg

SEQ ID NO: 137301 - DNA, 22 bp, Artificial Sequence
  Synthetic oligonucleotide; TTG chr11 5263714 5263735 5263719 5263714 -
cacttctctcctcttttcttgg

SEQ ID NO: 137302 - DNA, 22 bp, Artificial Sequence
  Synthetic oligonucleotide; CTT chr11 5263709 5263730 5263714 5263709 -
ctctcctcttttcttggttaat

SEQ ID NO: 137303 - DNA, 22 bp, Artificial Sequence
  Synthetic oligonucleotide; TTC chr11 5263708 5263729 5263713 5263708 -
tctcctcttttcttggttaatc

SEQ ID NO: 137304 - DNA, 22 bp, Artificial Sequence
  Synthetic oligonucleotide; CTC chr11 5263706 5263727 5263711 5263706 -
tcctcttttcttggttaatctt

SEQ ID NO: 137305 - DNA, 22 bp, Artificial Sequence
  Synthetic oligonucleotide; CTC chr11 5263704 5263725 5263709 5263704 -
ctcttttcttggttaatcttgc

SEQ ID NO: 137306 - DNA, 22 bp, Artificial Sequence
  Synthetic oligonucleotide; CTC chr11 5263701 5263722 5263706 5263701 -
ttttcttggttaatcttgctaa

SEQ ID NO: 137307 - DNA, 22 bp, Artificial Sequence
  Synthetic oligonucleotide; CTT chr11 5263699 5263720 5263704 5263699 -
ttcttggttaatcttgctaatg

SEQ ID NO: 137308 - DNA, 22 bp, Artificial Sequence
  Synthetic oligonucleotide; TTT chr11 5263698 5263719 5263703 5263698 -
tcttggttaatcttgctaatgg

SEQ ID NO: 137309 - DNA, 22 bp, Artificial Sequence
  Synthetic oligonucleotide; TTT chr11 5263697 5263718 5263702 5263697 -
cttggttaatcttgctaatggt

SEQ ID NO: 137310 - DNA, 22 bp, Artificial Sequence
  Synthetic oligonucleotide; TTC chr11 5263696 5263717 5263701 5263696 -
ttggttaatcttgctaatggtc

SEQ ID NO: 137311 - DNA, 22 bp, Artificial Sequence
  Synthetic oligonucleotide; CTT chr11 5263694 5263715 5263699 5263694 -
ggttaatcttgctaatggtcta

SEQ ID NO: 137312 - DNA, 22 bp, Artificial Sequence
  Synthetic oligonucleotide; TTG chr11 5263693 5263714 5263698 5263693 -
gttaatcttgctaatggtctat

SEQ ID NO: 137313 - DNA, 22 bp, Artificial Sequence
  Synthetic oligonucleotide; TTA chr11 5263689 5263710 5263694 5263689 -
atcttgctaatggtctatcagt

SEQ ID NO: 137314 - DNA, 22 bp, Artificial Sequence
  Synthetic oligonucleotide; CTT chr11 5263684 5263705 5263689 5263684 -
gctaatggtctatcagttttat

SEQ ID NO: 137315 - DNA, 22 bp, Artificial Sequence
  Synthetic oligonucleotide; TTG chr11 5263683 5263704 5263688 5263683 -
ctaatggtctatcagttttatt

SEQ ID NO: 137316 - DNA, 22 bp, Artificial Sequence
  Synthetic oligonucleotide; CTA chr11 5263680 5263701 5263685 5263680 -
atggtctatcagttttatttat

SEQ ID NO: 137317 - DNA, 22 bp, Artificial Sequence
  Synthetic oligonucleotide; CTA chr11 5263672 5263693 5263677 5263672 -
tcagttttatttatcttttcaa

SEQ ID NO: 137318 - DNA, 22 bp, Artificial Sequence
  Synthetic oligonucleotide; TTT chr11 5263665 5263686 5263670 5263665 -
tatttatcttttcaaagaacca

SEQ ID NO: 137319 - DNA, 22 bp, Artificial Sequence
  Synthetic oligonucleotide; TTT chr11 5263664 5263685 5263669 5263664 -
atttatcttttcaaagaaccag

SEQ ID NO: 137320 - DNA, 22 bp, Artificial Sequence
  Synthetic oligonucleotide; TTA chr11 5263663 5263684 5263668 5263663 -
tttatcttttcaaagaaccagc

SEQ ID NO: 137321 - DNA, 22 bp, Artificial Sequence
  Synthetic oligonucleotide; TTT chr11 5263660 5263681 5263665 5263660 -
atcttttcaaagaaccagcttt

SEQ ID NO: 137322 - DNA, 22 bp, Artificial Sequence
  Synthetic oligonucleotide; TTA chr11 5263659 5263680 5263664 5263659 -
tcttttcaaagaaccagctttt

SEQ ID NO: 137323 - DNA, 22 bp, Artificial Sequence
  Synthetic oligonucleotide; CTT chr11 5263655 5263676 5263660 5263655 -
ttcaaagaaccagctttttatt

SEQ ID NO: 137324 - DNA, 22 bp, Artificial Sequence
  Synthetic oligonucleotide; TTT chr11 5263654 5263675 5263659 5263654 -
tcaaagaaccagctttttattt

SEQ ID NO: 137325 - DNA, 22 bp, Artificial Sequence
  Synthetic oligonucleotide; TTT chr11 5263653 5263674 5263658 5263653 -
caaagaaccagctttttatttc

SEQ ID NO: 137326 - DNA, 22 bp, Artificial Sequence
  Synthetic oligonucleotide; TTC chr11 5263652 5263673 5263657 5263652 -
aaagaaccagctttttatttca

SEQ ID NO: 137327 - DNA, 22 bp, Artificial Sequence
  Synthetic oligonucleotide; CTT chr11 5263639 5263660 5263644 5263639 -
tttatttcatttagcttttgta

SEQ ID NO: 137328 - DNA, 22 bp, Artificial Sequence
  Synthetic oligonucleotide; TTT chr11 5263638 5263659 5263643 5263638 -
ttatttcatttagcttttgtat

SEQ ID NO: 137329 - DNA, 22 bp, Artificial Sequence
  Synthetic oligonucleotide; TTT chr11 5263637 5263658 5263642 5263637 -
tatttcatttagcttttgtatt

SEQ ID NO: 137330 - DNA, 22 bp, Artificial Sequence
  Synthetic oligonucleotide; TTT chr11 5263636 5263657 5263641 5263636 -
atttcatttagcttttgtattt

SEQ ID NO: 137331 - DNA, 22 bp, Artificial Sequence
  Synthetic oligonucleotide; TTA chr11 5263635 5263656 5263640 5263635 -
tttcatttagcttttgtatttt

SEQ ID NO: 137332 - DNA, 22 bp, Artificial Sequence
  Synthetic oligonucleotide; TTT chr11 5263632 5263653 5263637 5263632 -
catttagcttttgtattttttt

SEQ ID NO: 137333 - DNA, 22 bp, Artificial Sequence
  Synthetic oligonucleotide; TTC chr11 5263631 5263652 5263636 5263631 -
atttagcttttgtatttttttg

SEQ ID NO: 137334 - DNA, 22 bp, Artificial Sequence
  Synthetic oligonucleotide; TTT chr11 5263627 5263648 5263632 5263627 -
agcttttgtatttttttgcagt

SEQ ID NO: 137335 - DNA, 22 bp, Artificial Sequence
  Synthetic oligonucleotide; TTA chr11 5263626 5263647 5263631 5263626 -
gcttttgtatttttttgcagtt

SEQ ID NO: 137336 - DNA, 22 bp, Artificial Sequence
  Synthetic oligonucleotide; CTT chr11 5263622 5263643 5263627 5263622 -
ttgtatttttttgcagttgttt

SEQ ID NO: 137337 - DNA, 22 bp, Artificial Sequence
  Synthetic oligonucleotide; TTT chr11 5263621 5263642 5263626 5263621 -
tgtatttttttgcagttgtttt

SEQ ID NO: 137338 - DNA, 22 bp, Artificial Sequence
  Synthetic oligonucleotide; TTT chr11 5263620 5263641 5263625 5263620 -
gtatttttttgcagttgtttta

SEQ ID NO: 137339 - DNA, 22 bp, Artificial Sequence
  Synthetic oligonucleotide; TTG chr11 5263619 5263640 5263624 5263619 -
tatttttttgcagttgttttaa

SEQ ID NO: 137340 - DNA, 22 bp, Artificial Sequence
  Synthetic oligonucleotide; TTT chr11 5263614 5263635 5263619 5263614 -
ttttgcagttgttttaatttca

SEQ ID NO: 137341 - DNA, 22 bp, Artificial Sequence
  Synthetic oligonucleotide; TTT chr11 5263613 5263634 5263618 5263613 -
tttgcagttgttttaatttcat

SEQ ID NO: 137342 - DNA, 22 bp, Artificial Sequence
  Synthetic oligonucleotide; TTT chr11 5263612 5263633 5263617 5263612 -
ttgcagttgttttaatttcatt

SEQ ID NO: 137343 - DNA, 22 bp, Artificial Sequence
  Synthetic oligonucleotide; TTT chr11 5263611 5263632 5263616 5263611 -
tgcagttgttttaatttcattt

SEQ ID NO: 137344 - DNA, 22 bp, Artificial Sequence
  Synthetic oligonucleotide; TTT chr11 5263610 5263631 5263615 5263610 -
gcagttgttttaatttcattta

SEQ ID NO: 137345 - DNA, 22 bp, Artificial Sequence
  Synthetic oligonucleotide; TTG chr11 5263609 5263630 5263614 5263609 -
cagttgttttaatttcatttag

SEQ ID NO: 137346 - DNA, 22 bp, Artificial Sequence
  Synthetic oligonucleotide; TTG chr11 5263603 5263624 5263608 5263603 -
ttttaatttcatttagttctcc

SEQ ID NO: 137347 - DNA, 22 bp, Artificial Sequence
  Synthetic oligonucleotide; TTT chr11 5263600 5263621 5263605 5263600 -
taatttcatttagttctcctct

SEQ ID NO: 137348 - DNA, 22 bp, Artificial Sequence
  Synthetic oligonucleotide; TTT chr11 5263599 5263620 5263604 5263599 -
aatttcatttagttctcctctt

SEQ ID NO: 137349 - DNA, 22 bp, Artificial Sequence
  Synthetic oligonucleotide; TTA chr11 5263598 5263619 5263603 5263598 -
atttcatttagttctcctctta

SEQ ID NO: 137350 - DNA, 22 bp, Artificial Sequence
  Synthetic oligonucleotide; TTT chr11 5263594 5263615 5263599 5263594 -
catttagttctcctcttatctt

SEQ ID NO: 137351 - DNA, 22 bp, Artificial Sequence
  Synthetic oligonucleotide; TTC chr11 5263593 5263614 5263598 5263593 -
atttagttctcctcttatctta

SEQ ID NO: 137352 - DNA, 22 bp, Artificial Sequence
  Synthetic oligonucleotide; TTT chr11 5263589 5263610 5263594 5263589 -
agttctcctcttatcttagtta

SEQ ID NO: 137353 - DNA, 22 bp, Artificial Sequence
  Synthetic oligonucleotide; TTA chr11 5263588 5263609 5263593 5263588 -
gttctcctcttatcttagttat

SEQ ID NO: 137354 - DNA, 22 bp, Artificial Sequence
  Synthetic oligonucleotide; TTC chr11 5263584 5263605 5263589 5263584 -
tcctcttatcttagttattccc

SEQ ID NO: 137355 - DNA, 22 bp, Artificial Sequence
  Synthetic oligonucleotide; CTC chr11 5263582 5263603 5263587 5263582 -
ctcttatcttagttattccctt

SEQ ID NO: 137356 - DNA, 22 bp, Artificial Sequence
  Synthetic oligonucleotide; CTC chr11 5263579 5263600 5263584 5263579 -
ttatcttagttattccctttct

SEQ ID NO: 137357 - DNA, 22 bp, Artificial Sequence
  Synthetic oligonucleotide; CTT chr11 5263577 5263598 5263582 5263577 -
atcttagttattccctttcttt

SEQ ID NO: 137358 - DNA, 22 bp, Artificial Sequence
  Synthetic oligonucleotide; TTA chr11 5263576 5263597 5263581 5263576 -
tcttagttattccctttctttt

SEQ ID NO: 137359 - DNA, 22 bp, Artificial Sequence
  Synthetic oligonucleotide; CTT chr11 5263572 5263593 5263577 5263572 -
agttattccctttcttttgctg

SEQ ID NO: 137360 - DNA, 22 bp, Artificial Sequence
  Synthetic oligonucleotide; TTA chr11 5263571 5263592 5263576 5263571 -
gttattccctttcttttgctgg

SEQ ID NO: 137361 - DNA, 22 bp, Artificial Sequence
  Synthetic oligonucleotide; TTA chr11 5263567 5263588 5263572 5263567 -
ttccctttcttttgctgggttt

SEQ ID NO: 137362 - DNA, 22 bp, Artificial Sequence
  Synthetic oligonucleotide; TTC chr11 5263564 5263585 5263569 5263564 -
cctttcttttgctgggttttgg

SEQ ID NO: 137363 - DNA, 22 bp, Artificial Sequence
  Synthetic oligonucleotide; CTT chr11 5263560 5263581 5263565 5263560 -
tcttttgctgggttttggttct

SEQ ID NO: 137364 - DNA, 22 bp, Artificial Sequence
  Synthetic oligonucleotide; TTT chr11 5263559 5263580 5263564 5263559 -
cttttgctgggttttggttctg

SEQ ID NO: 137365 - DNA, 22 bp, Artificial Sequence
  Synthetic oligonucleotide; TTC chr11 5263558 5263579 5263563 5263558 -
ttttgctgggttttggttctgt

SEQ ID NO: 137366 - DNA, 22 bp, Artificial Sequence
  Synthetic oligonucleotide; CTT chr11 5263556 5263577 5263561 5263556 -
ttgctgggttttggttctgttt

SEQ ID NO: 137367 - DNA, 22 bp, Artificial Sequence
  Synthetic oligonucleotide; TTT chr11 5263555 5263576 5263560 5263555 -
tgctgggttttggttctgtttg

SEQ ID NO: 137368 - DNA, 22 bp, Artificial Sequence
  Synthetic oligonucleotide; TTT chr11 5263554 5263575 5263559 5263554 -
gctgggttttggttctgtttgt

SEQ ID NO: 137369 - DNA, 22 bp, Artificial Sequence
  Synthetic oligonucleotide; TTG chr11 5263553 5263574 5263558 5263553 -
ctgggttttggttctgtttgtt

SEQ ID NO: 137370 - DNA, 22 bp, Artificial Sequence
  Synthetic oligonucleotide; CTG chr11 5263550 5263571 5263555 5263550 -
ggttttggttctgtttgttttt

SEQ ID NO: 137371 - DNA, 22 bp, Artificial Sequence
  Synthetic oligonucleotide; TTT chr11 5263545 5263566 5263550 5263545 -
tggttctgtttgtttttgtttc

SEQ ID NO: 137372 - DNA, 22 bp, Artificial Sequence
  Synthetic oligonucleotide; TTT chr11 5263544 5263565 5263549 5263544 -
ggttctgtttgtttttgtttct

SEQ ID NO: 137373 - DNA, 22 bp, Artificial Sequence
  Synthetic oligonucleotide; TTG chr11 5263543 5263564 5263548 5263543 -
gttctgtttgtttttgtttctc

SEQ ID NO: 137374 - DNA, 22 bp, Artificial Sequence
  Synthetic oligonucleotide; TTC chr11 5263539 5263560 5263544 5263539 -
tgtttgtttttgtttctctagt

SEQ ID NO: 137375 - DNA, 22 bp, Artificial Sequence
  Synthetic oligonucleotide; CTG chr11 5263537 5263558 5263542 5263537 -
tttgtttttgtttctctagttt

SEQ ID NO: 137376 - DNA, 22 bp, Artificial Sequence
  Synthetic oligonucleotide; TTT chr11 5263534 5263555 5263539 5263534 -
gtttttgtttctctagtttctt

SEQ ID NO: 137377 - DNA, 22 bp, Artificial Sequence
  Synthetic oligonucleotide; TTG chr11 5263533 5263554 5263538 5263533 -
tttttgtttctctagtttcttg

SEQ ID NO: 137378 - DNA, 22 bp, Artificial Sequence
  Synthetic oligonucleotide; TTT chr11 5263530 5263551 5263535 5263530 -
ttgtttctctagtttcttgtgg

SEQ ID NO: 137379 - DNA, 22 bp, Artificial Sequence
  Synthetic oligonucleotide; TTT chr11 5263529 5263550 5263534 5263529 -
tgtttctctagtttcttgtggt

SEQ ID NO: 137380 - DNA, 22 bp, Artificial Sequence
  Synthetic oligonucleotide; TTT chr11 5263528 5263549 5263533 5263528 -
gtttctctagtttcttgtggtg

SEQ ID NO: 137381 - DNA, 22 bp, Artificial Sequence
  Synthetic oligonucleotide; TTG chr11 5263527 5263548 5263532 5263527 -
tttctctagtttcttgtggtgt

SEQ ID NO: 137382 - DNA, 22 bp, Artificial Sequence
  Synthetic oligonucleotide; TTT chr11 5263524 5263545 5263529 5263524 -
ctctagtttcttgtggtgtgac

SEQ ID NO: 137383 - DNA, 22 bp, Artificial Sequence
  Synthetic oligonucleotide; TTC chr11 5263523 5263544 5263528 5263523 -
tctagtttcttgtggtgtgacc

SEQ ID NO: 137384 - DNA, 22 bp, Artificial Sequence
  Synthetic oligonucleotide; CTC chr11 5263521 5263542 5263526 5263521 -
tagtttcttgtggtgtgacctt

SEQ ID NO: 137385 - DNA, 22 bp, Artificial Sequence
  Synthetic oligonucleotide; CTA chr11 5263519 5263540 5263524 5263519 -
gtttcttgtggtgtgaccttat

SEQ ID NO: 137386 - DNA, 22 bp, Artificial Sequence
  Synthetic oligonucleotide; TTT chr11 5263515 5263536 5263520 5263515 -
cttgtggtgtgaccttatattg

SEQ ID NO: 137387 - DNA, 22 bp, Artificial Sequence
  Synthetic oligonucleotide; TTC chr11 5263514 5263535 5263519 5263514 -
ttgtggtgtgaccttatattgt

SEQ ID NO: 137388 - DNA, 22 bp, Artificial Sequence
  Synthetic oligonucleotide; CTT chr11 5263512 5263533 5263517 5263512 -
gtggtgtgaccttatattgtct

SEQ ID NO: 137389 - DNA, 22 bp, Artificial Sequence
  Synthetic oligonucleotide; TTG chr11 5263511 5263532 5263516 5263511 -
tggtgtgaccttatattgtctg

SEQ ID NO: 137390 - DNA, 22 bp, Artificial Sequence
  Synthetic oligonucleotide; CTT chr11 5263499 5263520 5263504 5263499 -
atattgtctgtctgtcctcttt

SEQ ID NO: 137391 - DNA, 22 bp, Artificial Sequence
  Synthetic oligonucleotide; TTA chr11 5263498 5263519 5263503 5263498 -
tattgtctgtctgtcctctttc

SEQ ID NO: 137392 - DNA, 22 bp, Artificial Sequence
  Synthetic oligonucleotide; TTG chr11 5263493 5263514 5263498 5263493 -
tctgtctgtcctctttcagact

SEQ ID NO: 137393 - DNA, 22 bp, Artificial Sequence
  Synthetic oligonucleotide; CTG chr11 5263489 5263510 5263494 5263489 -
tctgtcctctttcagactcttt

SEQ ID NO: 137394 - DNA, 22 bp, Artificial Sequence
  Synthetic oligonucleotide; CTG chr11 5263485 5263506 5263490 5263485 -
tcctctttcagactctttgaca

SEQ ID NO: 137395 - DNA, 22 bp, Artificial Sequence
  Synthetic oligonucleotide; CTC chr11 5263480 5263501 5263485 5263480 -
tttcagactctttgacatcgac

SEQ ID NO: 137396 - DNA, 22 bp, Artificial Sequence
  Synthetic oligonucleotide; CTT chr11 5263478 5263499 5263483 5263478 -
tcagactctttgacatcgacat

SEQ ID NO: 137397 - DNA, 22 bp, Artificial Sequence
  Synthetic oligonucleotide; TTT chr11 5263477 5263498 5263482 5263477 -
cagactctttgacatcgacatt

SEQ ID NO: 137398 - DNA, 22 bp, Artificial Sequence
  Synthetic oligonucleotide; TTC chr11 5263476 5263497 5263481 5263476 -
agactctttgacatcgacattt

SEQ ID NO: 137399 - DNA, 22 bp, Artificial Sequence
  Synthetic oligonucleotide; CTC chr11 5263470 5263491 5263475 5263470 -
tttgacatcgacatttagggct

SEQ ID NO: 137400 - DNA, 22 bp, Artificial Sequence
  Synthetic oligonucleotide; CTT chr11 5263468 5263489 5263473 5263468 -
tgacatcgacatttagggctgt

SEQ ID NO: 137401 - DNA, 22 bp, Artificial Sequence
  Synthetic oligonucleotide; TTT chr11 5263467 5263488 5263472 5263467 -
gacatcgacatttagggctgtg

SEQ ID NO: 137402 - DNA, 22 bp, Artificial Sequence
  Synthetic oligonucleotide; TTG chr11 5263466 5263487 5263471 5263466 -
acatcgacatttagggctgtga

SEQ ID NO: 137403 - DNA, 22 bp, Artificial Sequence
  Synthetic oligonucleotide; TTT chr11 5263454 5263475 5263459 5263454 -
agggctgtgaactttcctttta

SEQ ID NO: 137404 - DNA, 22 bp, Artificial Sequence
  Synthetic oligonucleotide; TTA chr11 5263453 5263474 5263458 5263453 -
gggctgtgaactttccttttag

SEQ ID NO: 137405 - DNA, 22 bp, Artificial Sequence
  Synthetic oligonucleotide; CTG chr11 5263447 5263468 5263452 5263447 -
tgaactttccttttagcaccat

SEQ ID NO: 137406 - DNA, 22 bp, Artificial Sequence
  Synthetic oligonucleotide; CTT chr11 5263440 5263461 5263445 5263440 -
tccttttagcaccatctttgct

SEQ ID NO: 137407 - DNA, 22 bp, Artificial Sequence
  Synthetic oligonucleotide; TTT chr11 5263439 5263460 5263444 5263439 -
ccttttagcaccatctttgctg

SEQ ID NO: 137408 - DNA, 22 bp, Artificial Sequence
  Synthetic oligonucleotide; TTC chr11 5263438 5263459 5263443 5263438 -
cttttagcaccatctttgctgt

SEQ ID NO: 137409 - DNA, 22 bp, Artificial Sequence
  Synthetic oligonucleotide; CTT chr11 5263435 5263456 5263440 5263435 -
ttagcaccatctttgctgtatc

SEQ ID NO: 137410 - DNA, 22 bp, Artificial Sequence
  Synthetic oligonucleotide; TTT chr11 5263434 5263455 5263439 5263434 -
tagcaccatctttgctgtatcc

SEQ ID NO: 137411 - DNA, 22 bp, Artificial Sequence
  Synthetic oligonucleotide; TTT chr11 5263433 5263454 5263438 5263433 -
agcaccatctttgctgtatcct

SEQ ID NO: 137412 - DNA, 22 bp, Artificial Sequence
  Synthetic oligonucleotide; TTA chr11 5263432 5263453 5263437 5263432 -
gcaccatctttgctgtatccta

SEQ ID NO: 137413 - DNA, 22 bp, Artificial Sequence
  Synthetic oligonucleotide; CTT chr11 5263422 5263443 5263427 5263422 -
tgctgtatcctagaggttttga

SEQ ID NO: 137414 - DNA, 22 bp, Artificial Sequence
  Synthetic oligonucleotide; TTT chr11 5263421 5263442 5263426 5263421 -
gctgtatcctagaggttttgat

SEQ ID NO: 137415 - DNA, 22 bp, Artificial Sequence
  Synthetic oligonucleotide; TTG chr11 5263420 5263441 5263425 5263420 -
ctgtatcctagaggttttgata

SEQ ID NO: 137416 - DNA, 22 bp, Artificial Sequence
  Synthetic oligonucleotide; CTG chr11 5263417 5263438 5263422 5263417 -
tatcctagaggttttgataggt

SEQ ID NO: 137417 - DNA, 22 bp, Artificial Sequence
  Synthetic oligonucleotide; CTA chr11 5263410 5263431 5263415 5263410 -
gaggttttgataggttgtgtca

SEQ ID NO: 137418 - DNA, 22 bp, Artificial Sequence
  Synthetic oligonucleotide; TTT chr11 5263403 5263424 5263408 5263403 -
tgataggttgtgtcactattgt

SEQ ID NO: 137419 - DNA, 22 bp, Artificial Sequence
  Synthetic oligonucleotide; TTT chr11 5263402 5263423 5263407 5263402 -
gataggttgtgtcactattgtc

SEQ ID NO: 137420 - DNA, 22 bp, Artificial Sequence
  Synthetic oligonucleotide; TTG chr11 5263401 5263422 5263406 5263401 -
ataggttgtgtcactattgtcg

SEQ ID NO: 137421 - DNA, 22 bp, Artificial Sequence
  Synthetic oligonucleotide; TTG chr11 5263393 5263414 5263398 5263393 -
tgtcactattgtcggtcagttc

SEQ ID NO: 137422 - DNA, 22 bp, Artificial Sequence
  Synthetic oligonucleotide; CTA chr11 5263385 5263406 5263390 5263385 -
ttgtcggtcagttcaagtaatt

SEQ ID NO: 137423 - DNA, 22 bp, Artificial Sequence
  Synthetic oligonucleotide; TTG chr11 5263382 5263403 5263387 5263382 -
tcggtcagttcaagtaattttg

SEQ ID NO: 137424 - DNA, 22 bp, Artificial Sequence
  Synthetic oligonucleotide; TTC chr11 5263371 5263392 5263376 5263371 -
aagtaattttgttgttcttatt

SEQ ID NO: 137425 - DNA, 22 bp, Artificial Sequence
  Synthetic oligonucleotide; TTT chr11 5263362 5263383 5263367 5263362 -
tgttgttcttattatactttaa

SEQ ID NO: 137426 - DNA, 22 bp, Artificial Sequence
  Synthetic oligonucleotide; TTT chr11 5263361 5263382 5263366 5263361 -
gttgttcttattatactttaag

SEQ ID NO: 137427 - DNA, 22 bp, Artificial Sequence
  Synthetic oligonucleotide; TTG chr11 5263360 5263381 5263365 5263360 -
ttgttcttattatactttaagt

SEQ ID NO: 137428 - DNA, 22 bp, Artificial Sequence
  Synthetic oligonucleotide; TTG chr11 5263357 5263378 5263362 5263357 -
ttcttattatactttaagttct

SEQ ID NO: 137429 - DNA, 22 bp, Artificial Sequence
  Synthetic oligonucleotide; TTC chr11 5263354 5263375 5263359 5263354 -
ttattatactttaagttctggg

SEQ ID NO: 137430 - DNA, 22 bp, Artificial Sequence
  Synthetic oligonucleotide; CTT chr11 5263352 5263373 5263357 5263352 -
attatactttaagttctgggat

SEQ ID NO: 137431 - DNA, 22 bp, Artificial Sequence
  Synthetic oligonucleotide; TTA chr11 5263351 5263372 5263356 5263351 -
ttatactttaagttctgggata

SEQ ID NO: 137432 - DNA, 22 bp, Artificial Sequence
  Synthetic oligonucleotide; TTA chr11 5263348 5263369 5263353 5263348 -
tactttaagttctgggatacat

SEQ ID NO: 137433 - DNA, 22 bp, Artificial Sequence
  Synthetic oligonucleotide; CTT chr11 5263343 5263364 5263348 5263343 -
taagttctgggatacatgtgca

SEQ ID NO: 137434 - DNA, 22 bp, Artificial Sequence
  Synthetic oligonucleotide; TTT chr11 5263342 5263363 5263347 5263342 -
aagttctgggatacatgtgcag

SEQ ID NO: 137435 - DNA, 22 bp, Artificial Sequence
  Synthetic oligonucleotide; TTA chr11 5263341 5263362 5263346 5263341 -
agttctgggatacatgtgcaga

SEQ ID NO: 137436 - DNA, 22 bp, Artificial Sequence
  Synthetic oligonucleotide; TTC chr11 5263336 5263357 5263341 5263336 -
tgggatacatgtgcagaatgtg

SEQ ID NO: 137437 - DNA, 22 bp, Artificial Sequence
  Synthetic oligonucleotide; CTG chr11 5263334 5263355 5263339 5263334 -
ggatacatgtgcagaatgtgca

SEQ ID NO: 137438 - DNA, 22 bp, Artificial Sequence
  Synthetic oligonucleotide; TTT chr11 5263307 5263328 5263312 5263307 -
gttacataggtatagatgtgcc

SEQ ID NO: 137439 - DNA, 22 bp, Artificial Sequence
  Synthetic oligonucleotide; TTG chr11 5263306 5263327 5263311 5263306 -
ttacataggtatagatgtgcca

SEQ ID NO: 137440 - DNA, 22 bp, Artificial Sequence
  Synthetic oligonucleotide; TTA chr11 5263303 5263324 5263308 5263303 -
cataggtatagatgtgccatgg

SEQ ID NO: 137441 - DNA, 22 bp, Artificial Sequence
  Synthetic oligonucleotide; TTT chr11 5263275 5263296 5263280 5263275 -
gctgcacccatcaacctgtcat

SEQ ID NO: 137442 - DNA, 22 bp, Artificial Sequence
  Synthetic oligonucleotide; TTG chr11 5263274 5263295 5263279 5263274 -
ctgcacccatcaacctgtcatc

SEQ ID NO: 137443 - DNA, 22 bp, Artificial Sequence
  Synthetic oligonucleotide; CTG chr11 5263271 5263292 5263276 5263271 -
cacccatcaacctgtcatctac

SEQ ID NO: 137444 - DNA, 22 bp, Artificial Sequence
  Synthetic oligonucleotide; CTG chr11 5263257 5263278 5263262 5263257 -
tcatctacattaggtatttctt

SEQ ID NO: 137445 - DNA, 22 bp, Artificial Sequence
  Synthetic oligonucleotide; CTA chr11 5263250 5263271 5263255 5263250 -
cattaggtatttcttttaatgt

SEQ ID NO: 137446 - DNA, 22 bp, Artificial Sequence
  Synthetic oligonucleotide; TTA chr11 5263245 5263266 5263250 5263245 -
ggtatttcttttaatgttatcc

SEQ ID NO: 137447 - DNA, 22 bp, Artificial Sequence
  Synthetic oligonucleotide; TTT chr11 5263238 5263259 5263243 5263238 -
cttttaatgttatccctctcct

SEQ ID NO: 137448 - DNA, 22 bp, Artificial Sequence
  Synthetic oligonucleotide; TTC chr11 5263237 5263258 5263242 5263237 -
ttttaatgttatccctctccta

SEQ ID NO: 137449 - DNA, 22 bp, Artificial Sequence
  Synthetic oligonucleotide; CTT chr11 5263235 5263256 5263240 5263235 -
ttaatgttatccctctcctaac

SEQ ID NO: 137450 - DNA, 22 bp, Artificial Sequence
  Synthetic oligonucleotide; TTT chr11 5263234 5263255 5263239 5263234 -
taatgttatccctctcctaacc

SEQ ID NO: 137451 - DNA, 22 bp, Artificial Sequence
  Synthetic oligonucleotide; TTT chr11 5263233 5263254 5263238 5263233 -
aatgttatccctctcctaaccc

SEQ ID NO: 137452 - DNA, 22 bp, Artificial Sequence
  Synthetic oligonucleotide; TTA chr11 5263232 5263253 5263237 5263232 -
atgttatccctctcctaacccc

SEQ ID NO: 137453 - DNA, 22 bp, Artificial Sequence
  Synthetic oligonucleotide; TTA chr11 5263226 5263247 5263231 5263226 -
tccctctcctaaccccctcacc

SEQ ID NO: 137454 - DNA, 22 bp, Artificial Sequence
  Synthetic oligonucleotide; CTC chr11 5263220 5263241 5263225 5263220 -
tcctaaccccctcaccccccga

SEQ ID NO: 137455 - DNA, 22 bp, Artificial Sequence
  Synthetic oligonucleotide; CTC chr11 5263218 5263239 5263223 5263218 -
ctaaccccctcaccccccgaca

SEQ ID NO: 137456 - DNA, 22 bp, Artificial Sequence
  Synthetic oligonucleotide; CTA chr11 5263215 5263236 5263220 5263215 -
accccctcaccccccgacaggc

SEQ ID NO: 137457 - DNA, 22 bp, Artificial Sequence
  Synthetic oligonucleotide; CTC chr11 5263207 5263228 5263212 5263207 -
accccccgacaggccctggtgt

SEQ ID NO: 137458 - DNA, 22 bp, Artificial Sequence
  Synthetic oligonucleotide; CTG chr11 5263189 5263210 5263194 5263189 -
gtgtgtgatgttcccctccctg

SEQ ID NO: 137459 - DNA, 22 bp, Artificial Sequence
  Synthetic oligonucleotide; TTC chr11 5263176 5263197 5263181 5263176 -
ccctccctgtgtccatgtgttc

SEQ ID NO: 137460 - DNA, 22 bp, Artificial Sequence
  Synthetic oligonucleotide; CTC chr11 5263171 5263192 5263176 5263171 -
cctgtgtccatgtgttctcatt

SEQ ID NO: 137461 - DNA, 22 bp, Artificial Sequence
  Synthetic oligonucleotide; CTG chr11 5263167 5263188 5263172 5263167 -
tgtccatgtgttctcattgttc

SEQ ID NO: 137462 - DNA, 22 bp, Artificial Sequence
  Synthetic oligonucleotide; TTC chr11 5263154 5263175 5263159 5263154 -
tcattgttcaactcccacttat

SEQ ID NO: 137463 - DNA, 22 bp, Artificial Sequence
  Synthetic oligonucleotide; CTC chr11 5263152 5263173 5263157 5263152 -
attgttcaactcccacttatga

SEQ ID NO: 137464 - DNA, 22 bp, Artificial Sequence
  Synthetic oligonucleotide; TTG chr11 5263148 5263169 5263153 5263148 -
ttcaactcccacttatgagtga

SEQ ID NO: 137465 - DNA, 22 bp, Artificial Sequence
  Synthetic oligonucleotide; TTC chr11 5263145 5263166 5263150 5263145 -
aactcccacttatgagtgagaa

SEQ ID NO: 137466 - DNA, 22 bp, Artificial Sequence
  Synthetic oligonucleotide; CTC chr11 5263140 5263161 5263145 5263140 -
ccacttatgagtgagaacgtgt

SEQ ID NO: 137467 - DNA, 22 bp, Artificial Sequence
  Synthetic oligonucleotide; CTT chr11 5263134 5263155 5263139 5263134 -
atgagtgagaacgtgtggtgtt

SEQ ID NO: 137468 - DNA, 22 bp, Artificial Sequence
  Synthetic oligonucleotide; TTA chr11 5263133 5263154 5263138 5263133 -
tgagtgagaacgtgtggtgttt

SEQ ID NO: 137469 - DNA, 22 bp, Artificial Sequence
  Synthetic oligonucleotide; TTT chr11 5263111 5263132 5263116 5263111 -
ggtttctctgttcctgtgttag

SEQ ID NO: 137470 - DNA, 22 bp, Artificial Sequence
  Synthetic oligonucleotide; TTG chr11 5263110 5263131 5263115 5263110 -
gtttctctgttcctgtgttagt

SEQ ID NO: 137471 - DNA, 22 bp, Artificial Sequence
  Synthetic oligonucleotide; TTT chr11 5263106 5263127 5263111 5263106 -
ctctgttcctgtgttagtttgc

SEQ ID NO: 137472 - DNA, 22 bp, Artificial Sequence
  Synthetic oligonucleotide; TTC chr11 5263105 5263126 5263110 5263105 -
tctgttcctgtgttagtttgct

SEQ ID NO: 137473 - DNA, 22 bp, Artificial Sequence
  Synthetic oligonucleotide; CTC chr11 5263103 5263124 5263108 5263103 -
tgttcctgtgttagtttgctca

SEQ ID NO: 137474 - DNA, 22 bp, Artificial Sequence
  Synthetic oligonucleotide; CTG chr11 5263101 5263122 5263106 5263101 -
ttcctgtgttagtttgctcaga

SEQ ID NO: 137475 - DNA, 22 bp, Artificial Sequence
  Synthetic oligonucleotide; TTC chr11 5263098 5263119 5263103 5263098 -
ctgtgttagtttgctcagaatg

SEQ ID NO: 137476 - DNA, 22 bp, Artificial Sequence
  Synthetic oligonucleotide; CTG chr11 5263095 5263116 5263100 5263095 -
tgttagtttgctcagaatgatg

SEQ ID NO: 137477 - DNA, 22 bp, Artificial Sequence
  Synthetic oligonucleotide; TTA chr11 5263090 5263111 5263095 5263090 -
gtttgctcagaatgatggtttc

SEQ ID NO: 137478 - DNA, 22 bp, Artificial Sequence
  Synthetic oligonucleotide; TTT chr11 5263086 5263107 5263091 5263086 -
gctcagaatgatggtttccacc

SEQ ID NO: 137479 - DNA, 22 bp, Artificial Sequence
  Synthetic oligonucleotide; TTG chr11 5263085 5263106 5263090 5263085 -
ctcagaatgatggtttccacct

SEQ ID NO: 137480 - DNA, 22 bp, Artificial Sequence
  Synthetic oligonucleotide; CTC chr11 5263082 5263103 5263087 5263082 -
agaatgatggtttccaccttca

SEQ ID NO: 137481 - DNA, 22 bp, Artificial Sequence
  Synthetic oligonucleotide; TTT chr11 5263069 5263090 5263074 5263069 -
ccaccttcatccatgtccctgc

SEQ ID NO: 137482 - DNA, 22 bp, Artificial Sequence
  Synthetic oligonucleotide; TTC chr11 5263068 5263089 5263073 5263068 -
caccttcatccatgtccctgca

SEQ ID NO: 137483 - DNA, 22 bp, Artificial Sequence
  Synthetic oligonucleotide; CTT chr11 5263062 5263083 5263067 5263062 -
catccatgtccctgcaaagaca

SEQ ID NO: 137484 - DNA, 22 bp, Artificial Sequence
  Synthetic oligonucleotide; TTC chr11 5263061 5263082 5263066 5263061 -
atccatgtccctgcaaagacat

SEQ ID NO: 137485 - DNA, 22 bp, Artificial Sequence
  Synthetic oligonucleotide; CTG chr11 5263048 5263069 5263053 5263048 -
caaagacatgaactcatcattt

SEQ ID NO: 137486 - DNA, 22 bp, Artificial Sequence
  Synthetic oligonucleotide; CTC chr11 5263033 5263054 5263038 5263033 -
atcatttttatggctgcatagt

SEQ ID NO: 137487 - DNA, 22 bp, Artificial Sequence
  Synthetic oligonucleotide; TTT chr11 5263026 5263047 5263031 5263026 -
ttatggctgcatagtattccat

SEQ ID NO: 137488 - DNA, 22 bp, Artificial Sequence
  Synthetic oligonucleotide; TTT chr11 5263025 5263046 5263030 5263025 -
tatggctgcatagtattccatg

SEQ ID NO: 137489 - DNA, 22 bp, Artificial Sequence
  Synthetic oligonucleotide; TTT chr11 5263024 5263045 5263029 5263024 -
atggctgcatagtattccatgg

SEQ ID NO: 137490 - DNA, 22 bp, Artificial Sequence
  Synthetic oligonucleotide; TTA chr11 5263023 5263044 5263028 5263023 -
tggctgcatagtattccatggt

SEQ ID NO: 137491 - DNA, 22 bp, Artificial Sequence
  Synthetic oligonucleotide; CTG chr11 5263017 5263038 5263022 5263017 -
catagtattccatggtgtatat

SEQ ID NO: 137492 - DNA, 22 bp, Artificial Sequence
  Synthetic oligonucleotide; TTC chr11 5263007 5263028 5263012 5263007 -
catggtgtatatgtgccacatt

SEQ ID NO: 137493 - DNA, 22 bp, Artificial Sequence
  Synthetic oligonucleotide; TTT chr11 5262984 5263005 5262989 5262984 -
tctttatccattatatcgctga

SEQ ID NO: 137494 - DNA, 22 bp, Artificial Sequence
  Synthetic oligonucleotide; TTT chr11 5262983 5263004 5262988 5262983 -
ctttatccattatatcgctgat

SEQ ID NO: 137495 - DNA, 22 bp, Artificial Sequence
  Synthetic oligonucleotide; TTC chr11 5262982 5263003 5262987 5262982 -
tttatccattatatcgctgatg

SEQ ID NO: 137496 - DNA, 22 bp, Artificial Sequence
  Synthetic oligonucleotide; CTT chr11 5262980 5263001 5262985 5262980 -
tatccattatatcgctgatggc

SEQ ID NO: 137497 - DNA, 22 bp, Artificial Sequence
  Synthetic oligonucleotide; TTT chr11 5262979 5263000 5262984 5262979 -
atccattatatcgctgatggcc

SEQ ID NO: 137498 - DNA, 22 bp, Artificial Sequence
  Synthetic oligonucleotide; TTA chr11 5262978 5262999 5262983 5262978 -
tccattatatcgctgatggcca

SEQ ID NO: 137499 - DNA, 22 bp, Artificial Sequence
  Synthetic oligonucleotide; TTA chr11 5262971 5262992 5262976 5262971 -
tatcgctgatggccatttgggt

SEQ ID NO: 137500 - DNA, 22 bp, Artificial Sequence
  Synthetic oligonucleotide; CTG chr11 5262963 5262984 5262968 5262963 -
atggccatttgggttggttcca

SEQ ID NO: 137501 - DNA, 22 bp, Artificial Sequence
  Synthetic oligonucleotide; TTT chr11 5262953 5262974 5262958 5262953 -
gggttggttccaagtctttgct

SEQ ID NO: 137502 - DNA, 22 bp, Artificial Sequence
  Synthetic oligonucleotide; TTG chr11 5262952 5262973 5262957 5262952 -
ggttggttccaagtctttgcta

SEQ ID NO: 137503 - DNA, 22 bp, Artificial Sequence
  Synthetic oligonucleotide; TTG chr11 5262947 5262968 5262952 5262947 -
gttccaagtctttgctattgtg

SEQ ID NO: 137504 - DNA, 22 bp, Artificial Sequence
  Synthetic oligonucleotide; TTC chr11 5262943 5262964 5262948 5262943 -
caagtctttgctattgtgaata

SEQ ID NO: 137505 - DNA, 22 bp, Artificial Sequence
  Synthetic oligonucleotide; CTT chr11 5262935 5262956 5262940 5262935 -
tgctattgtgaatagtgccaca

SEQ ID NO: 137506 - DNA, 22 bp, Artificial Sequence
  Synthetic oligonucleotide; TTT chr11 5262934 5262955 5262939 5262934 -
gctattgtgaatagtgccacaa

SEQ ID NO: 137507 - DNA, 22 bp, Artificial Sequence
  Synthetic oligonucleotide; TTG chr11 5262933 5262954 5262938 5262933 -
ctattgtgaatagtgccacaat

SEQ ID NO: 137508 - DNA, 22 bp, Artificial Sequence
  Synthetic oligonucleotide; CTA chr11 5262930 5262951 5262935 5262930 -
ttgtgaatagtgccacaataaa

SEQ ID NO: 137509 - DNA, 22 bp, Artificial Sequence
  Synthetic oligonucleotide; TTG chr11 5262927 5262948 5262932 5262927 -
tgaatagtgccacaataaacat

SEQ ID NO: 137510 - DNA, 22 bp, Artificial Sequence
  Synthetic oligonucleotide; CTT chr11 5262888 5262909 5262893 5262888 -
tatagtagaatgatttctaatt

SEQ ID NO: 137511 - DNA, 22 bp, Artificial Sequence
  Synthetic oligonucleotide; TTT chr11 5262887 5262908 5262892 5262887 -
atagtagaatgatttctaattc

SEQ ID NO: 137512 - DNA, 22 bp, Artificial Sequence
  Synthetic oligonucleotide; TTA chr11 5262886 5262907 5262891 5262886 -
tagtagaatgatttctaattct

SEQ ID NO: 137513 - DNA, 22 bp, Artificial Sequence
  Synthetic oligonucleotide; TTT chr11 5262872 5262893 5262877 5262872 -
ctaattctttgggtatataccc

SEQ ID NO: 137514 - DNA, 22 bp, Artificial Sequence
  Synthetic oligonucleotide; TTC chr11 5262871 5262892 5262876 5262871 -
taattctttgggtatataccca

SEQ ID NO: 137515 - DNA, 22 bp, Artificial Sequence
  Synthetic oligonucleotide; CTA chr11 5262869 5262890 5262874 5262869 -
attctttgggtatatacccagt

SEQ ID NO: 137516 - DNA, 22 bp, Artificial Sequence
  Synthetic oligonucleotide; TTC chr11 5262865 5262886 5262870 5262865 -
tttgggtatatacccagtaatg

SEQ ID NO: 137517 - DNA, 22 bp, Artificial Sequence
  Synthetic oligonucleotide; CTT chr11 5262863 5262884 5262868 5262863 -
tgggtatatacccagtaatggg

SEQ ID NO: 137518 - DNA, 22 bp, Artificial Sequence
  Synthetic oligonucleotide; TTT chr11 5262862 5262883 5262867 5262862 -
gggtatatacccagtaatggga

SEQ ID NO: 137519 - DNA, 22 bp, Artificial Sequence
  Synthetic oligonucleotide; TTG chr11 5262861 5262882 5262866 5262861 -
ggtatatacccagtaatgggat

SEQ ID NO: 137520 - DNA, 22 bp, Artificial Sequence
  Synthetic oligonucleotide; TTG chr11 5262837 5262858 5262842 5262837 -
ctgggtcaaacagtatttctgg

SEQ ID NO: 137521 - DNA, 22 bp, Artificial Sequence
  Synthetic oligonucleotide; CTG chr11 5262834 5262855 5262839 5262834 -
ggtcaaacagtatttctggttc

SEQ ID NO: 137522 - DNA, 22 bp, Artificial Sequence
  Synthetic oligonucleotide; TTT chr11 5262819 5262840 5262824 5262819 -
ctggttctagatccttgaggaa

SEQ ID NO: 137523 - DNA, 22 bp, Artificial Sequence
  Synthetic oligonucleotide; TTC chr11 5262818 5262839 5262823 5262818 -
tggttctagatccttgaggaat

SEQ ID NO: 137524 - DNA, 22 bp, Artificial Sequence
  Synthetic oligonucleotide; CTG chr11 5262816 5262837 5262821 5262816 -
gttctagatccttgaggaatcg

SEQ ID NO: 137525 - DNA, 22 bp, Artificial Sequence
  Synthetic oligonucleotide; TTC chr11 5262812 5262833 5262817 5262812 -
tagatccttgaggaatcgccac

SEQ ID NO: 137526 - DNA, 22 bp, Artificial Sequence
  Synthetic oligonucleotide; CTA chr11 5262810 5262831 5262815 5262810 -
gatccttgaggaatcgccacac

SEQ ID NO: 137527 - DNA, 22 bp, Artificial Sequence
  Synthetic oligonucleotide; CTT chr11 5262803 5262824 5262808 5262803 -
gaggaatcgccacactgtcttc

SEQ ID NO: 137528 - DNA, 22 bp, Artificial Sequence
  Synthetic oligonucleotide; TTG chr11 5262802 5262823 5262807 5262802 -
aggaatcgccacactgtcttcc

SEQ ID NO: 137529 - DNA, 22 bp, Artificial Sequence
  Synthetic oligonucleotide; CTG chr11 5262786 5262807 5262791 5262786 -
tcttccacaatggttgaactaa

SEQ ID NO: 137530 - DNA, 22 bp, Artificial Sequence
  Synthetic oligonucleotide; CTT chr11 5262782 5262803 5262787 5262782 -
ccacaatggttgaactaattta

SEQ ID NO: 137531 - DNA, 22 bp, Artificial Sequence
  Synthetic oligonucleotide; TTC chr11 5262781 5262802 5262786 5262781 -
cacaatggttgaactaatttac

SEQ ID NO: 137532 - DNA, 22 bp, Artificial Sequence
  Synthetic oligonucleotide; TTG chr11 5262770 5262791 5262775 5262770 -
aactaatttacacacccatcaa

SEQ ID NO: 137533 - DNA, 22 bp, Artificial Sequence
  Synthetic oligonucleotide; CTA chr11 5262765 5262786 5262770 5262765 -
atttacacacccatcaacagtg

SEQ ID NO: 137534 - DNA, 22 bp, Artificial Sequence
  Synthetic oligonucleotide; TTT chr11 5262761 5262782 5262766 5262761 -
acacacccatcaacagtgtaaa

SEQ ID NO: 137535 - DNA, 22 bp, Artificial Sequence
  Synthetic oligonucleotide; TTA chr11 5262760 5262781 5262765 5262760 -
cacacccatcaacagtgtaaaa

SEQ ID NO: 137536 - DNA, 22 bp, Artificial Sequence
  Synthetic oligonucleotide; TTT chr11 5262735 5262756 5262740 5262735 -
ttcctattcttccacatcctct

SEQ ID NO: 137537 - DNA, 22 bp, Artificial Sequence
  Synthetic oligonucleotide; TTT chr11 5262734 5262755 5262739 5262734 -
tcctattcttccacatcctctc

SEQ ID NO: 137538 - DNA, 22 bp, Artificial Sequence
  Synthetic oligonucleotide; TTT chr11 5262733 5262754 5262738 5262733 -
cctattcttccacatcctctcc

SEQ ID NO: 137539 - DNA, 22 bp, Artificial Sequence
  Synthetic oligonucleotide; TTC chr11 5262732 5262753 5262737 5262732 -
ctattcttccacatcctctcca

SEQ ID NO: 137540 - DNA, 22 bp, Artificial Sequence
  Synthetic oligonucleotide; CTA chr11 5262729 5262750 5262734 5262729 -
ttcttccacatcctctccagca

SEQ ID NO: 137541 - DNA, 22 bp, Artificial Sequence
  Synthetic oligonucleotide; TTC chr11 5262726 5262747 5262731 5262726 -
ttccacatcctctccagcacct

SEQ ID NO: 137542 - DNA, 22 bp, Artificial Sequence
  Synthetic oligonucleotide; CTT chr11 5262724 5262745 5262729 5262724 -
ccacatcctctccagcaccttt

SEQ ID NO: 137543 - DNA, 22 bp, Artificial Sequence
  Synthetic oligonucleotide; TTC chr11 5262723 5262744 5262728 5262723 -
cacatcctctccagcacctttt

SEQ ID NO: 137544 - DNA, 22 bp, Artificial Sequence
  Synthetic oligonucleotide; CTC chr11 5262714 5262735 5262719 5262714 -
tccagcaccttttgtttcctga

SEQ ID NO: 137545 - DNA, 22 bp, Artificial Sequence
  Synthetic oligonucleotide; CTC chr11 5262712 5262733 5262717 5262712 -
cagcaccttttgtttcctgact

SEQ ID NO: 137546 - DNA, 22 bp, Artificial Sequence
  Synthetic oligonucleotide; CTT chr11 5262703 5262724 5262708 5262703 -
ttgtttcctgactttttaataa

SEQ ID NO: 137547 - DNA, 22 bp, Artificial Sequence
  Synthetic oligonucleotide; TTT chr11 5262702 5262723 5262707 5262702 -
tgtttcctgactttttaataat

SEQ ID NO: 137548 - DNA, 22 bp, Artificial Sequence
  Synthetic oligonucleotide; TTT chr11 5262701 5262722 5262706 5262701 -
gtttcctgactttttaataatt

SEQ ID NO: 137549 - DNA, 22 bp, Artificial Sequence
  Synthetic oligonucleotide; TTG chr11 5262700 5262721 5262705 5262700 -
tttcctgactttttaataattg

SEQ ID NO: 137550 - DNA, 22 bp, Artificial Sequence
  Synthetic oligonucleotide; TTT chr11 5262697 5262718 5262702 5262697 -
cctgactttttaataattgcca

SEQ ID NO: 137551 - DNA, 22 bp, Artificial Sequence
  Synthetic oligonucleotide; TTC chr11 5262696 5262717 5262701 5262696 -
ctgactttttaataattgccat

SEQ ID NO: 137552 - DNA, 22 bp, Artificial Sequence
  Synthetic oligonucleotide; CTG chr11 5262693 5262714 5262698 5262693 -
actttttaataattgccattct

SEQ ID NO: 137553 - DNA, 22 bp, Artificial Sequence
  Synthetic oligonucleotide; CTT chr11 5262689 5262710 5262694 5262689 -
tttaataattgccattctaact

SEQ ID NO: 137554 - DNA, 22 bp, Artificial Sequence
  Synthetic oligonucleotide; TTT chr11 5262688 5262709 5262693 5262688 -
ttaataattgccattctaactg

SEQ ID NO: 137555 - DNA, 22 bp, Artificial Sequence
  Synthetic oligonucleotide; TTT chr11 5262687 5262708 5262692 5262687 -
taataattgccattctaactgg

SEQ ID NO: 137556 - DNA, 22 bp, Artificial Sequence
  Synthetic oligonucleotide; TTT chr11 5262686 5262707 5262691 5262686 -
aataattgccattctaactggc

SEQ ID NO: 137557 - DNA, 22 bp, Artificial Sequence
  Synthetic oligonucleotide; TTA chr11 5262685 5262706 5262690 5262685 -
ataattgccattctaactggca

SEQ ID NO: 137558 - DNA, 22 bp, Artificial Sequence
  Synthetic oligonucleotide; TTG chr11 5262678 5262699 5262683 5262678 -
ccattctaactggcatgagatg

SEQ ID NO: 137559 - DNA, 22 bp, Artificial Sequence
  Synthetic oligonucleotide; TTC chr11 5262672 5262693 5262677 5262672 -
taactggcatgagatggtatct

SEQ ID NO: 137560 - DNA, 22 bp, Artificial Sequence
  Synthetic oligonucleotide; CTA chr11 5262670 5262691 5262675 5262670 -
actggcatgagatggtatctca

SEQ ID NO: 137561 - DNA, 22 bp, Artificial Sequence
  Synthetic oligonucleotide; CTG chr11 5262666 5262687 5262671 5262666 -
gcatgagatggtatctcattgt

SEQ ID NO: 137562 - DNA, 22 bp, Artificial Sequence
  Synthetic oligonucleotide; CTC chr11 5262649 5262670 5262654 5262649 -
attgtggttttgatttgcattt

SEQ ID NO: 137563 - DNA, 22 bp, Artificial Sequence
  Synthetic oligonucleotide; TTG chr11 5262645 5262666 5262650 5262645 -
tggttttgatttgcatttctct

SEQ ID NO: 137564 - DNA, 22 bp, Artificial Sequence
  Synthetic oligonucleotide; TTT chr11 5262639 5262660 5262644 5262639 -
tgatttgcatttctctaatgac

SEQ ID NO: 137565 - DNA, 22 bp, Artificial Sequence
  Synthetic oligonucleotide; TTT chr11 5262638 5262659 5262643 5262638 -
gatttgcatttctctaatgacc

SEQ ID NO: 137566 - DNA, 22 bp, Artificial Sequence
  Synthetic oligonucleotide; TTG chr11 5262637 5262658 5262642 5262637 -
atttgcatttctctaatgacca

SEQ ID NO: 137567 - DNA, 22 bp, Artificial Sequence
  Synthetic oligonucleotide; TTT chr11 5262633 5262654 5262638 5262633 -
gcatttctctaatgaccagtga

SEQ ID NO: 137568 - DNA, 22 bp, Artificial Sequence
  Synthetic oligonucleotide; TTG chr11 5262632 5262653 5262637 5262632 -
catttctctaatgaccagtgat

SEQ ID NO: 137569 - DNA, 22 bp, Artificial Sequence
  Synthetic oligonucleotide; TTT chr11 5262627 5262648 5262632 5262627 -
ctctaatgaccagtgatgatga

SEQ ID NO: 137570 - DNA, 22 bp, Artificial Sequence
  Synthetic oligonucleotide; TTC chr11 5262626 5262647 5262631 5262626 -
tctaatgaccagtgatgatgag

SEQ ID NO: 137571 - DNA, 22 bp, Artificial Sequence
  Synthetic oligonucleotide; CTC chr11 5262624 5262645 5262629 5262624 -
taatgaccagtgatgatgagct

SEQ ID NO: 137572 - DNA, 22 bp, Artificial Sequence
  Synthetic oligonucleotide; CTA chr11 5262622 5262643 5262627 5262622 -
atgaccagtgatgatgagcttc

SEQ ID NO: 137573 - DNA, 22 bp, Artificial Sequence
  Synthetic oligonucleotide; CTT chr11 5262601 5262622 5262606 5262601 -
cttttcatgtgtttcttggcca

SEQ ID NO: 137574 - DNA, 22 bp, Artificial Sequence
  Synthetic oligonucleotide; TTC chr11 5262600 5262621 5262605 5262600 -
ttttcatgtgtttcttggccac

SEQ ID NO: 137575 - DNA, 22 bp, Artificial Sequence
  Synthetic oligonucleotide; CTT chr11 5262598 5262619 5262603 5262598 -
ttcatgtgtttcttggccacat

SEQ ID NO: 137576 - DNA, 22 bp, Artificial Sequence
  Synthetic oligonucleotide; TTT chr11 5262597 5262618 5262602 5262597 -
tcatgtgtttcttggccacata

SEQ ID NO: 137577 - DNA, 22 bp, Artificial Sequence
  Synthetic oligonucleotide; TTT chr11 5262596 5262617 5262601 5262596 -
catgtgtttcttggccacataa

SEQ ID NO: 137578 - DNA, 22 bp, Artificial Sequence
  Synthetic oligonucleotide; TTC chr11 5262595 5262616 5262600 5262595 -
atgtgtttcttggccacataaa

SEQ ID NO: 137579 - DNA, 22 bp, Artificial Sequence
  Synthetic oligonucleotide; TTT chr11 5262587 5262608 5262592 5262587 -
cttggccacataaatgacttct

SEQ ID NO: 137580 - DNA, 22 bp, Artificial Sequence
  Synthetic oligonucleotide; TTC chr11 5262586 5262607 5262591 5262586 -
ttggccacataaatgacttctt

SEQ ID NO: 137581 - DNA, 22 bp, Artificial Sequence
  Synthetic oligonucleotide; CTT chr11 5262584 5262605 5262589 5262584 -
ggccacataaatgacttcttta

SEQ ID NO: 137582 - DNA, 22 bp, Artificial Sequence
  Synthetic oligonucleotide; TTG chr11 5262583 5262604 5262588 5262583 -
gccacataaatgacttctttag

SEQ ID NO: 137583 - DNA, 22 bp, Artificial Sequence
  Synthetic oligonucleotide; CTT chr11 5262567 5262588 5262572 5262567 -
ctttagagaagcatctgttcat

SEQ ID NO: 137584 - DNA, 22 bp, Artificial Sequence
  Synthetic oligonucleotide; TTC chr11 5262566 5262587 5262571 5262566 -
tttagagaagcatctgttcata

SEQ ID NO: 137585 - DNA, 22 bp, Artificial Sequence
  Synthetic oligonucleotide; CTT chr11 5262564 5262585 5262569 5262564 -
tagagaagcatctgttcatatc

SEQ ID NO: 137586 - DNA, 22 bp, Artificial Sequence
  Synthetic oligonucleotide; TTT chr11 5262563 5262584 5262568 5262563 -
agagaagcatctgttcatatcc

SEQ ID NO: 137587 - DNA, 22 bp, Artificial Sequence
  Synthetic oligonucleotide; TTA chr11 5262562 5262583 5262567 5262562 -
gagaagcatctgttcatatcct

SEQ ID NO: 137588 - DNA, 22 bp, Artificial Sequence
  Synthetic oligonucleotide; CTG chr11 5262550 5262571 5262555 5262550 -
ttcatatcctttgtccactttt

SEQ ID NO: 137589 - DNA, 22 bp, Artificial Sequence
  Synthetic oligonucleotide; TTC chr11 5262547 5262568 5262552 5262547 -
atatcctttgtccactttttga

SEQ ID NO: 137590 - DNA, 22 bp, Artificial Sequence
  Synthetic oligonucleotide; CTT chr11 5262539 5262560 5262544 5262539 -
tgtccactttttgatggggtcg

SEQ ID NO: 137591 - DNA, 22 bp, Artificial Sequence
  Synthetic oligonucleotide; TTT chr11 5262538 5262559 5262543 5262538 -
gtccactttttgatggggtcgt

SEQ ID NO: 137592 - DNA, 22 bp, Artificial Sequence
  Synthetic oligonucleotide; TTG chr11 5262537 5262558 5262542 5262537 -
tccactttttgatggggtcgtt

SEQ ID NO: 137593 - DNA, 22 bp, Artificial Sequence
  Synthetic oligonucleotide; CTT chr11 5262530 5262551 5262535 5262530 -
tttgatggggtcgttaggtttt

SEQ ID NO: 137594 - DNA, 22 bp, Artificial Sequence
  Synthetic oligonucleotide; TTT chr11 5262529 5262550 5262534 5262529 -
ttgatggggtcgttaggttttt

SEQ ID NO: 137595 - DNA, 22 bp, Artificial Sequence
  Synthetic oligonucleotide; TTT chr11 5262528 5262549 5262533 5262528 -
tgatggggtcgttaggtttttt

SEQ ID NO: 137596 - DNA, 22 bp, Artificial Sequence
  Synthetic oligonucleotide; TTT chr11 5262527 5262548 5262532 5262527 -
gatggggtcgttaggttttttc

SEQ ID NO: 137597 - DNA, 22 bp, Artificial Sequence
  Synthetic oligonucleotide; TTG chr11 5262526 5262547 5262531 5262526 -
atggggtcgttaggttttttct

SEQ ID NO: 137598 - DNA, 22 bp, Artificial Sequence
  Synthetic oligonucleotide; TTA chr11 5262514 5262535 5262519 5262514 -
ggttttttcttgtaaatttgtt

SEQ ID NO: 137599 - DNA, 22 bp, Artificial Sequence
  Synthetic oligonucleotide; TTT chr11 5262509 5262530 5262514 5262509 -
tttcttgtaaatttgttgaagt

SEQ ID NO: 137600 - DNA, 22 bp, Artificial Sequence
  Synthetic oligonucleotide; TTT chr11 5262508 5262529 5262513 5262508 -
ttcttgtaaatttgttgaagtt

SEQ ID NO: 137601 - DNA, 22 bp, Artificial Sequence
  Synthetic oligonucleotide; TTT chr11 5262507 5262528 5262512 5262507 -
tcttgtaaatttgttgaagttc

SEQ ID NO: 137602 - DNA, 22 bp, Artificial Sequence
  Synthetic oligonucleotide; TTT chr11 5262506 5262527 5262511 5262506 -
cttgtaaatttgttgaagttct

SEQ ID NO: 137603 - DNA, 22 bp, Artificial Sequence
  Synthetic oligonucleotide; TTC chr11 5262505 5262526 5262510 5262505 -
ttgtaaatttgttgaagttctt

SEQ ID NO: 137604 - DNA, 22 bp, Artificial Sequence
  Synthetic oligonucleotide; CTT chr11 5262503 5262524 5262508 5262503 -
gtaaatttgttgaagttctttg

SEQ ID NO: 137605 - DNA, 22 bp, Artificial Sequence
  Synthetic oligonucleotide; TTG chr11 5262502 5262523 5262507 5262502 -
taaatttgttgaagttctttgt

SEQ ID NO: 137606 - DNA, 22 bp, Artificial Sequence
  Synthetic oligonucleotide; TTT chr11 5262495 5262516 5262500 5262495 -
gttgaagttctttgtagatttt

SEQ ID NO: 137607 - DNA, 22 bp, Artificial Sequence
  Synthetic oligonucleotide; TTG chr11 5262494 5262515 5262499 5262494 -
ttgaagttctttgtagattttg

SEQ ID NO: 137608 - DNA, 22 bp, Artificial Sequence
  Synthetic oligonucleotide; TTG chr11 5262491 5262512 5262496 5262491 -
aagttctttgtagattttggat

SEQ ID NO: 137609 - DNA, 22 bp, Artificial Sequence
  Synthetic oligonucleotide; TTC chr11 5262485 5262506 5262490 5262485 -
tttgtagattttggatgttagc

SEQ ID NO: 137610 - DNA, 22 bp, Artificial Sequence
  Synthetic oligonucleotide; CTT chr11 5262483 5262504 5262488 5262483 -
tgtagattttggatgttagccc

SEQ ID NO: 137611 - DNA, 22 bp, Artificial Sequence
  Synthetic oligonucleotide; TTT chr11 5262482 5262503 5262487 5262482 -
gtagattttggatgttagccct

SEQ ID NO: 137612 - DNA, 22 bp, Artificial Sequence
  Synthetic oligonucleotide; TTG chr11 5262481 5262502 5262486 5262481 -
tagattttggatgttagccctt

SEQ ID NO: 137613 - DNA, 22 bp, Artificial Sequence
  Synthetic oligonucleotide; TTT chr11 5262474 5262495 5262479 5262474 -
tggatgttagccctttgtcaga

SEQ ID NO: 137614 - DNA, 22 bp, Artificial Sequence
  Synthetic oligonucleotide; TTT chr11 5262473 5262494 5262478 5262473 -
ggatgttagccctttgtcagat

SEQ ID NO: 137615 - DNA, 22 bp, Artificial Sequence
  Synthetic oligonucleotide; TTG chr11 5262472 5262493 5262477 5262472 -
gatgttagccctttgtcagatg

SEQ ID NO: 137616 - DNA, 22 bp, Artificial Sequence
  Synthetic oligonucleotide; TTA chr11 5262465 5262486 5262470 5262465 -
gccctttgtcagatggatagat

SEQ ID NO: 137617 - DNA, 22 bp, Artificial Sequence
  Synthetic oligonucleotide; CTT chr11 5262459 5262480 5262464 5262459 -
tgtcagatggatagattgcaaa

SEQ ID NO: 137618 - DNA, 22 bp, Artificial Sequence
  Synthetic oligonucleotide; TTT chr11 5262458 5262479 5262463 5262458 -
gtcagatggatagattgcaaaa

SEQ ID NO: 137619 - DNA, 22 bp, Artificial Sequence
  Synthetic oligonucleotide; TTG chr11 5262457 5262478 5262462 5262457 -
tcagatggatagattgcaaaaa

SEQ ID NO: 137620 - DNA, 22 bp, Artificial Sequence
  Synthetic oligonucleotide; TTG chr11 5262441 5262462 5262446 5262441 -
caaaaattttctcccattctgt

SEQ ID NO: 137621 - DNA, 22 bp, Artificial Sequence
  Synthetic oligonucleotide; TTT chr11 5262432 5262453 5262437 5262432 -
tctcccattctgtaggttgcct

SEQ ID NO: 137622 - DNA, 22 bp, Artificial Sequence
  Synthetic oligonucleotide; TTT chr11 5262431 5262452 5262436 5262431 -
ctcccattctgtaggttgcctg

SEQ ID NO: 137623 - DNA, 22 bp, Artificial Sequence
  Synthetic oligonucleotide; TTC chr11 5262430 5262451 5262435 5262430 -
tcccattctgtaggttgcctgt

SEQ ID NO: 137624 - DNA, 22 bp, Artificial Sequence
  Synthetic oligonucleotide; CTC chr11 5262428 5262449 5262433 5262428 -
ccattctgtaggttgcctgttc

SEQ ID NO: 137625 - DNA, 22 bp, Artificial Sequence
  Synthetic oligonucleotide; TTC chr11 5262422 5262443 5262427 5262422 -
tgtaggttgcctgttcactctg

SEQ ID NO: 137626 - DNA, 22 bp, Artificial Sequence
  Synthetic oligonucleotide; CTG chr11 5262420 5262441 5262425 5262420 -
taggttgcctgttcactctgat

SEQ ID NO: 137627 - DNA, 22 bp, Artificial Sequence
  Synthetic oligonucleotide; TTG chr11 5262413 5262434 5262418 5262413 -
cctgttcactctgatgatagtc

SEQ ID NO: 137628 - DNA, 22 bp, Artificial Sequence
  Synthetic oligonucleotide; CTG chr11 5262409 5262430 5262414 5262409 -
ttcactctgatgatagtctttt

SEQ ID NO: 137629 - DNA, 22 bp, Artificial Sequence
  Synthetic oligonucleotide; TTC chr11 5262406 5262427 5262411 5262406 -
actctgatgatagtcttttgct

SEQ ID NO: 137630 - DNA, 22 bp, Artificial Sequence
  Synthetic oligonucleotide; CTC chr11 5262402 5262423 5262407 5262402 -
tgatgatagtcttttgctgtgc

SEQ ID NO: 137631 - DNA, 22 bp, Artificial Sequence
  Synthetic oligonucleotide; CTG chr11 5262400 5262421 5262405 5262400 -
atgatagtcttttgctgtgcag

SEQ ID NO: 137632 - DNA, 22 bp, Artificial Sequence
  Synthetic oligonucleotide; CTT chr11 5262389 5262410 5262394 5262389 -
ttgctgtgcagaagctctttag

SEQ ID NO: 137633 - DNA, 22 bp, Artificial Sequence
  Synthetic oligonucleotide; TTT chr11 5262388 5262409 5262393 5262388 -
tgctgtgcagaagctctttagt

SEQ ID NO: 137634 - DNA, 22 bp, Artificial Sequence
  Synthetic oligonucleotide; TTT chr11 5262387 5262408 5262392 5262387 -
gctgtgcagaagctctttagtt

SEQ ID NO: 137635 - DNA, 22 bp, Artificial Sequence
  Synthetic oligonucleotide; TTG chr11 5262386 5262407 5262391 5262386 -
ctgtgcagaagctctttagttt

SEQ ID NO: 137636 - DNA, 22 bp, Artificial Sequence
  Synthetic oligonucleotide; CTG chr11 5262383 5262404 5262388 5262383 -
tgcagaagctctttagtttaat

SEQ ID NO: 137637 - DNA, 22 bp, Artificial Sequence
  Synthetic oligonucleotide; CTC chr11 5262372 5262393 5262377 5262372 -
tttagtttaattagatcccata

SEQ ID NO: 137638 - DNA, 22 bp, Artificial Sequence
  Synthetic oligonucleotide; CTT chr11 5262370 5262391 5262375 5262370 -
tagtttaattagatcccatatg

SEQ ID NO: 137639 - DNA, 22 bp, Artificial Sequence
  Synthetic oligonucleotide; TTT chr11 5262369 5262390 5262374 5262369 -
agtttaattagatcccatatgt

SEQ ID NO: 137640 - DNA, 22 bp, Artificial Sequence
  Synthetic oligonucleotide; TTA chr11 5262368 5262389 5262373 5262368 -
gtttaattagatcccatatgtc

SEQ ID NO: 137641 - DNA, 22 bp, Artificial Sequence
  Synthetic oligonucleotide; TTT chr11 5262364 5262385 5262369 5262364 -
aattagatcccatatgtcaatt

SEQ ID NO: 137642 - DNA, 22 bp, Artificial Sequence
  Synthetic oligonucleotide; TTA chr11 5262363 5262384 5262368 5262363 -
attagatcccatatgtcaattt

SEQ ID NO: 137643 - DNA, 22 bp, Artificial Sequence
  Synthetic oligonucleotide; TTA chr11 5262359 5262380 5262364 5262359 -
gatcccatatgtcaattttggc

SEQ ID NO: 137644 - DNA, 22 bp, Artificial Sequence
  Synthetic oligonucleotide; TTT chr11 5262341 5262362 5262346 5262341 -
tggcctttgttgtcattgcttt

SEQ ID NO: 137645 - DNA, 22 bp, Artificial Sequence
  Synthetic oligonucleotide; TTT chr11 5262340 5262361 5262345 5262340 -
ggcctttgttgtcattgctttt

SEQ ID NO: 137646 - DNA, 22 bp, Artificial Sequence
  Synthetic oligonucleotide; TTG chr11 5262339 5262360 5262344 5262339 -
gcctttgttgtcattgcttttg

SEQ ID NO: 137647 - DNA, 22 bp, Artificial Sequence
  Synthetic oligonucleotide; CTT chr11 5262334 5262355 5262339 5262334 -
tgttgtcattgcttttgatgtt

SEQ ID NO: 137648 - DNA, 22 bp, Artificial Sequence
  Synthetic oligonucleotide; TTT chr11 5262333 5262354 5262338 5262333 -
gttgtcattgcttttgatgttt

SEQ ID NO: 137649 - DNA, 22 bp, Artificial Sequence
  Synthetic oligonucleotide; TTG chr11 5262332 5262353 5262337 5262332 -
ttgtcattgcttttgatgtttt

SEQ ID NO: 137650 - DNA, 22 bp, Artificial Sequence
  Synthetic oligonucleotide; TTG chr11 5262329 5262350 5262334 5262329 -
tcattgcttttgatgttttagt

SEQ ID NO: 137651 - DNA, 22 bp, Artificial Sequence
  Synthetic oligonucleotide; TTG chr11 5262323 5262344 5262328 5262323 -
cttttgatgttttagtcgtgaa

SEQ ID NO: 137652 - DNA, 22 bp, Artificial Sequence
  Synthetic oligonucleotide; CTT chr11 5262320 5262341 5262325 5262320 -
ttgatgttttagtcgtgaattt

SEQ ID NO: 137653 - DNA, 22 bp, Artificial Sequence
  Synthetic oligonucleotide; TTT chr11 5262319 5262340 5262324 5262319 -
tgatgttttagtcgtgaatttt

SEQ ID NO: 137654 - DNA, 22 bp, Artificial Sequence
  Synthetic oligonucleotide; TTT chr11 5262318 5262339 5262323 5262318 -
gatgttttagtcgtgaattttt

SEQ ID NO: 137655 - DNA, 22 bp, Artificial Sequence
  Synthetic oligonucleotide; TTG chr11 5262317 5262338 5262322 5262317 -
atgttttagtcgtgaatttttg

SEQ ID NO: 137656 - DNA, 22 bp, Artificial Sequence
  Synthetic oligonucleotide; TTT chr11 5262311 5262332 5262316 5262311 -
tagtcgtgaatttttgcccatg

SEQ ID NO: 137657 - DNA, 22 bp, Artificial Sequence
  Synthetic oligonucleotide; TTT chr11 5262310 5262331 5262315 5262310 -
agtcgtgaatttttgcccatgc

SEQ ID NO: 137658 - DNA, 22 bp, Artificial Sequence
  Synthetic oligonucleotide; TTA chr11 5262309 5262330 5262314 5262309 -
gtcgtgaatttttgcccatgcc

SEQ ID NO: 137659 - DNA, 22 bp, Artificial Sequence
  Synthetic oligonucleotide; TTT chr11 5262298 5262319 5262303 5262298 -
ttgcccatgcctatgtcctgaa

SEQ ID NO: 137660 - DNA, 22 bp, Artificial Sequence
  Synthetic oligonucleotide; TTT chr11 5262297 5262318 5262302 5262297 -
tgcccatgcctatgtcctgaat

SEQ ID NO: 137661 - DNA, 22 bp, Artificial Sequence
  Synthetic oligonucleotide; TTT chr11 5262296 5262317 5262301 5262296 -
gcccatgcctatgtcctgaatg

SEQ ID NO: 137662 - DNA, 22 bp, Artificial Sequence
  Synthetic oligonucleotide; TTG chr11 5262295 5262316 5262300 5262295 -
cccatgcctatgtcctgaatgg

SEQ ID NO: 137663 - DNA, 22 bp, Artificial Sequence
  Synthetic oligonucleotide; CTA chr11 5262285 5262306 5262290 5262285 -
tgtcctgaatggtattgcctag

SEQ ID NO: 137664 - DNA, 22 bp, Artificial Sequence
  Synthetic oligonucleotide; CTG chr11 5262278 5262299 5262283 5262278 -
aatggtattgcctaggttatct

SEQ ID NO: 137665 - DNA, 22 bp, Artificial Sequence
  Synthetic oligonucleotide; TTG chr11 5262268 5262289 5262273 5262268 -
cctaggttatcttctaggattt

SEQ ID NO: 137666 - DNA, 22 bp, Artificial Sequence
  Synthetic oligonucleotide; CTA chr11 5262264 5262285 5262269 5262264 -
ggttatcttctaggatttttat

SEQ ID NO: 137667 - DNA, 22 bp, Artificial Sequence
  Synthetic oligonucleotide; TTA chr11 5262259 5262280 5262264 5262259 -
tcttctaggatttttatggttt

SEQ ID NO: 137668 - DNA, 22 bp, Artificial Sequence
  Synthetic oligonucleotide; CTT chr11 5262255 5262276 5262260 5262255 -
ctaggatttttatggttttagg

SEQ ID NO: 137669 - DNA, 22 bp, Artificial Sequence
  Synthetic oligonucleotide; TTC chr11 5262254 5262275 5262259 5262254 -
taggatttttatggttttaggt

SEQ ID NO: 137670 - DNA, 22 bp, Artificial Sequence
  Synthetic oligonucleotide; CTA chr11 5262252 5262273 5262257 5262252 -
ggatttttatggttttaggttg

SEQ ID NO: 137671 - DNA, 22 bp, Artificial Sequence
  Synthetic oligonucleotide; TTT chr11 5262246 5262267 5262251 5262246 -
ttatggttttaggttgcacatt

SEQ ID NO: 137672 - DNA, 22 bp, Artificial Sequence
  Synthetic oligonucleotide; TTT chr11 5262245 5262266 5262250 5262245 -
tatggttttaggttgcacattt

SEQ ID NO: 137673 - DNA, 22 bp, Artificial Sequence
  Synthetic oligonucleotide; TTT chr11 5262244 5262265 5262249 5262244 -
atggttttaggttgcacattta

SEQ ID NO: 137674 - DNA, 22 bp, Artificial Sequence
  Synthetic oligonucleotide; TTA chr11 5262243 5262264 5262248 5262243 -
tggttttaggttgcacatttaa

SEQ ID NO: 137675 - DNA, 22 bp, Artificial Sequence
  Synthetic oligonucleotide; TTT chr11 5262237 5262258 5262242 5262237 -
taggttgcacatttaagtcttt

SEQ ID NO: 137676 - DNA, 22 bp, Artificial Sequence
  Synthetic oligonucleotide; TTT chr11 5262236 5262257 5262241 5262236 -
aggttgcacatttaagtcttta

SEQ ID NO: 137677 - DNA, 22 bp, Artificial Sequence
  Synthetic oligonucleotide; TTA chr11 5262235 5262256 5262240 5262235 -
ggttgcacatttaagtctttaa

SEQ ID NO: 137678 - DNA, 22 bp, Artificial Sequence
  Synthetic oligonucleotide; TTG chr11 5262230 5262251 5262235 5262230 -
cacatttaagtctttaatccac

SEQ ID NO: 137679 - DNA, 22 bp, Artificial Sequence
  Synthetic oligonucleotide; TTT chr11 5262223 5262244 5262228 5262223 -
aagtctttaatccaccttgagt

SEQ ID NO: 137680 - DNA, 22 bp, Artificial Sequence
  Synthetic oligonucleotide; TTA chr11 5262222 5262243 5262227 5262222 -
agtctttaatccaccttgagtt

SEQ ID NO: 137681 - DNA, 22 bp, Artificial Sequence
  Synthetic oligonucleotide; CTT chr11 5262216 5262237 5262221 5262216 -
taatccaccttgagttaatttt

SEQ ID NO: 137682 - DNA, 22 bp, Artificial Sequence
  Synthetic oligonucleotide; TTT chr11 5262215 5262236 5262220 5262215 -
aatccaccttgagttaattttt

SEQ ID NO: 137683 - DNA, 22 bp, Artificial Sequence
  Synthetic oligonucleotide; TTA chr11 5262214 5262235 5262219 5262214 -
atccaccttgagttaatttttg

SEQ ID NO: 137684 - DNA, 22 bp, Artificial Sequence
  Synthetic oligonucleotide; CTT chr11 5262205 5262226 5262210 5262205 -
gagttaatttttgtataaggtg

SEQ ID NO: 137685 - DNA, 22 bp, Artificial Sequence
  Synthetic oligonucleotide; TTG chr11 5262204 5262225 5262209 5262204 -
agttaatttttgtataaggtgt

SEQ ID NO: 137686 - DNA, 22 bp, Artificial Sequence
  Synthetic oligonucleotide; TTA chr11 5262199 5262220 5262204 5262199 -
atttttgtataaggtgtaagga

SEQ ID NO: 137687 - DNA, 22 bp, Artificial Sequence
  Synthetic oligonucleotide; TTT chr11 5262195 5262216 5262200 5262195 -
ttgtataaggtgtaaggaaggg

SEQ ID NO: 137688 - DNA, 22 bp, Artificial Sequence
  Synthetic oligonucleotide; TTT chr11 5262194 5262215 5262199 5262194 -
tgtataaggtgtaaggaagggg

SEQ ID NO: 137689 - DNA, 22 bp, Artificial Sequence
  Synthetic oligonucleotide; TTT chr11 5262193 5262214 5262198 5262193 -
gtataaggtgtaaggaaggggt

SEQ ID NO: 137690 - DNA, 22 bp, Artificial Sequence
  Synthetic oligonucleotide; TTG chr11 5262192 5262213 5262197 5262192 -
tataaggtgtaaggaaggggta

SEQ ID NO: 137691 - DNA, 22 bp, Artificial Sequence
  Synthetic oligonucleotide; TTT chr11 5262164 5262185 5262169 5262164 -
cagttttatgcatattgctagc

SEQ ID NO: 137692 - DNA, 22 bp, Artificial Sequence
  Synthetic oligonucleotide; TTC chr11 5262163 5262184 5262168 5262163 -
agttttatgcatattgctagcc

SEQ ID NO: 137693 - DNA, 22 bp, Artificial Sequence
  Synthetic oligonucleotide; TTT chr11 5262158 5262179 5262163 5262158 -
tatgcatattgctagccagttt

SEQ ID NO: 137694 - DNA, 22 bp, Artificial Sequence
  Synthetic oligonucleotide; TTT chr11 5262157 5262178 5262162 5262157 -
atgcatattgctagccagtttt

SEQ ID NO: 137695 - DNA, 22 bp, Artificial Sequence
  Synthetic oligonucleotide; TTA chr11 5262156 5262177 5262161 5262156 -
tgcatattgctagccagttttt

SEQ ID NO: 137696 - DNA, 22 bp, Artificial Sequence
  Synthetic oligonucleotide; TTG chr11 5262147 5262168 5262152 5262147 -
ctagccagtttttccagcacca

SEQ ID NO: 137697 - DNA, 22 bp, Artificial Sequence
  Synthetic oligonucleotide; CTA chr11 5262144 5262165 5262149 5262144 -
gccagtttttccagcaccattt

SEQ ID NO: 137698 - DNA, 22 bp, Artificial Sequence
  Synthetic oligonucleotide; TTT chr11 5262136 5262157 5262141 5262136 -
ttccagcaccatttattaaata

SEQ ID NO: 137699 - DNA, 22 bp, Artificial Sequence
  Synthetic oligonucleotide; TTT chr11 5262135 5262156 5262140 5262135 -
tccagcaccatttattaaatag

SEQ ID NO: 137700 - DNA, 22 bp, Artificial Sequence
  Synthetic oligonucleotide; TTT chr11 5262134 5262155 5262139 5262134 -
ccagcaccatttattaaatagg

SEQ ID NO: 137701 - DNA, 22 bp, Artificial Sequence
  Synthetic oligonucleotide; TTC chr11 5262133 5262154 5262138 5262133 -
cagcaccatttattaaataggg

SEQ ID NO: 137702 - DNA, 22 bp, Artificial Sequence
  Synthetic oligonucleotide; TTT chr11 5262122 5262143 5262127 5262122 -
attaaatagggaattctttctc

SEQ ID NO: 137703 - DNA, 22 bp, Artificial Sequence
  Synthetic oligonucleotide; TTA chr11 5262121 5262142 5262126 5262121 -
ttaaatagggaattctttctcc

SEQ ID NO: 137704 - DNA, 22 bp, Artificial Sequence
  Synthetic oligonucleotide; TTA chr11 5262118 5262139 5262123 5262118 -
aatagggaattctttctccatt

SEQ ID NO: 137705 - DNA, 22 bp, Artificial Sequence
  Synthetic oligonucleotide; TTC chr11 5262106 5262127 5262111 5262106 -
tttctccattgcttttgtgatg

SEQ ID NO: 137706 - DNA, 22 bp, Artificial Sequence
  Synthetic oligonucleotide; CTT chr11 5262104 5262125 5262109 5262104 -
tctccattgcttttgtgatgtt

SEQ ID NO: 137707 - DNA, 22 bp, Artificial Sequence
  Synthetic oligonucleotide; TTT chr11 5262103 5262124 5262108 5262103 -
ctccattgcttttgtgatgttt

SEQ ID NO: 137708 - DNA, 22 bp, Artificial Sequence
  Synthetic oligonucleotide; TTC chr11 5262102 5262123 5262107 5262102 -
tccattgcttttgtgatgtttg

SEQ ID NO: 137709 - DNA, 22 bp, Artificial Sequence
  Synthetic oligonucleotide; CTC chr11 5262100 5262121 5262105 5262100 -
cattgcttttgtgatgtttgtc

SEQ ID NO: 137710 - DNA, 22 bp, Artificial Sequence
  Synthetic oligonucleotide; TTG chr11 5262095 5262116 5262100 5262095 -
cttttgtgatgtttgtcaaaga

SEQ ID NO: 137711 - DNA, 22 bp, Artificial Sequence
  Synthetic oligonucleotide; CTT chr11 5262092 5262113 5262097 5262092 -
ttgtgatgtttgtcaaagatca

SEQ ID NO: 137712 - DNA, 22 bp, Artificial Sequence
  Synthetic oligonucleotide; TTT chr11 5262091 5262112 5262096 5262091 -
tgtgatgtttgtcaaagatcag

SEQ ID NO: 137713 - DNA, 22 bp, Artificial Sequence
  Synthetic oligonucleotide; TTT chr11 5262090 5262111 5262095 5262090 -
gtgatgtttgtcaaagatcaga

SEQ ID NO: 137714 - DNA, 22 bp, Artificial Sequence
  Synthetic oligonucleotide; TTG chr11 5262089 5262110 5262094 5262089 -
tgatgtttgtcaaagatcagat

SEQ ID NO: 137715 - DNA, 22 bp, Artificial Sequence
  Synthetic oligonucleotide; TTT chr11 5262081 5262102 5262086 5262081 -
gtcaaagatcagatggtcgtag

SEQ ID NO: 137716 - DNA, 22 bp, Artificial Sequence
  Synthetic oligonucleotide; TTG chr11 5262080 5262101 5262085 5262080 -
tcaaagatcagatggtcgtaga

SEQ ID NO: 137717 - DNA, 22 bp, Artificial Sequence
  Synthetic oligonucleotide; TTA chr11 5262046 5262067 5262051 5262046 -
tttctgaggcttctgttctgtt

SEQ ID NO: 137718 - DNA, 22 bp, Artificial Sequence
  Synthetic oligonucleotide; TTT chr11 5262043 5262064 5262048 5262043 -
ctgaggcttctgttctgttcca

SEQ ID NO: 137719 - DNA, 22 bp, Artificial Sequence
  Synthetic oligonucleotide; TTC chr11 5262042 5262063 5262047 5262042 -
tgaggcttctgttctgttccac

SEQ ID NO: 137720 - DNA, 22 bp, Artificial Sequence
  Synthetic oligonucleotide; CTG chr11 5262040 5262061 5262045 5262040 -
aggcttctgttctgttccactg

SEQ ID NO: 137721 - DNA, 22 bp, Artificial Sequence
  Synthetic oligonucleotide; CTT chr11 5262034 5262055 5262039 5262034 -
ctgttctgttccactggtctat

SEQ ID NO: 137722 - DNA, 22 bp, Artificial Sequence
  Synthetic oligonucleotide; TTC chr11 5262033 5262054 5262038 5262033 -
tgttctgttccactggtctata

SEQ ID NO: 137723 - DNA, 22 bp, Artificial Sequence
  Synthetic oligonucleotide; CTG chr11 5262031 5262052 5262036 5262031 -
ttctgttccactggtctatata

SEQ ID NO: 137724 - DNA, 22 bp, Artificial Sequence
  Synthetic oligonucleotide; TTC chr11 5262028 5262049 5262033 5262028 -
tgttccactggtctatatatct

SEQ ID NO: 137725 - DNA, 22 bp, Artificial Sequence
  Synthetic oligonucleotide; CTG chr11 5262026 5262047 5262031 5262026 -
ttccactggtctatatatctgt

SEQ ID NO: 137726 - DNA, 22 bp, Artificial Sequence
  Synthetic oligonucleotide; TTC chr11 5262023 5262044 5262028 5262023 -
cactggtctatatatctgtttt

SEQ ID NO: 137727 - DNA, 22 bp, Artificial Sequence
  Synthetic oligonucleotide; CTG chr11 5262018 5262039 5262023 5262018 -
gtctatatatctgttttggtac

SEQ ID NO: 137728 - DNA, 22 bp, Artificial Sequence
  Synthetic oligonucleotide; CTA chr11 5262013 5262034 5262018 5262013 -
tatatctgttttggtaccagta

SEQ ID NO: 137729 - DNA, 22 bp, Artificial Sequence
  Synthetic oligonucleotide; CTG chr11 5262005 5262026 5262010 5262005 -
ttttggtaccagtaccatgctg

SEQ ID NO: 137730 - DNA, 22 bp, Artificial Sequence
  Synthetic oligonucleotide; TTT chr11 5262002 5262023 5262007 5262002 -
tggtaccagtaccatgctgttt

SEQ ID NO: 137731 - DNA, 22 bp, Artificial Sequence
  Synthetic oligonucleotide; TTT chr11 5262001 5262022 5262006 5262001 -
ggtaccagtaccatgctgtttt

SEQ ID NO: 137732 - DNA, 22 bp, Artificial Sequence
  Synthetic oligonucleotide; TTG chr11 5262000 5262021 5262005 5262000 -
gtaccagtaccatgctgttttt

SEQ ID NO: 137733 - DNA, 22 bp, Artificial Sequence
  Synthetic oligonucleotide; CTG chr11 5261983 5262004 5261988 5261983 -
tttttgttactgtagccttgta

SEQ ID NO: 137734 - DNA, 22 bp, Artificial Sequence
  Synthetic oligonucleotide; TTT chr11 5261980 5262001 5261985 5261980 -
ttgttactgtagccttgtagta

SEQ ID NO: 137735 - DNA, 22 bp, Artificial Sequence
  Synthetic oligonucleotide; TTT chr11 5261979 5262000 5261984 5261979 -
tgttactgtagccttgtagtat

SEQ ID NO: 137736 - DNA, 22 bp, Artificial Sequence
  Synthetic oligonucleotide; TTT chr11 5261978 5261999 5261983 5261978 -
gttactgtagccttgtagtata

SEQ ID NO: 137737 - DNA, 22 bp, Artificial Sequence
  Synthetic oligonucleotide; TTG chr11 5261977 5261998 5261982 5261977 -
ttactgtagccttgtagtatag

SEQ ID NO: 137738 - DNA, 22 bp, Artificial Sequence
  Synthetic oligonucleotide; TTA chr11 5261974 5261995 5261979 5261974 -
ctgtagccttgtagtatagttt

SEQ ID NO: 137739 - DNA, 22 bp, Artificial Sequence
  Synthetic oligonucleotide; CTG chr11 5261971 5261992 5261976 5261971 -
tagccttgtagtatagtttgaa

SEQ ID NO: 137740 - DNA, 22 bp, Artificial Sequence
  Synthetic oligonucleotide; CTT chr11 5261964 5261985 5261969 5261964 -
gtagtatagtttgaagtcaggt

SEQ ID NO: 137741 - DNA, 22 bp, Artificial Sequence
  Synthetic oligonucleotide; TTG chr11 5261963 5261984 5261968 5261963 -
tagtatagtttgaagtcaggta

SEQ ID NO: 137742 - DNA, 22 bp, Artificial Sequence
  Synthetic oligonucleotide; TTT chr11 5261952 5261973 5261957 5261952 -
gaagtcaggtagcatcatgcct

SEQ ID NO: 137743 - DNA, 22 bp, Artificial Sequence
  Synthetic oligonucleotide; TTG chr11 5261951 5261972 5261956 5261951 -
aagtcaggtagcatcatgcctc

SEQ ID NO: 137744 - DNA, 22 bp, Artificial Sequence
  Synthetic oligonucleotide; CTC chr11 5261929 5261950 5261934 5261929 -
cagctttgttctttttgtttag

SEQ ID NO: 137745 - DNA, 22 bp, Artificial Sequence
  Synthetic oligonucleotide; CTT chr11 5261923 5261944 5261928 5261923 -
tgttctttttgtttaggattgt

SEQ ID NO: 137746 - DNA, 22 bp, Artificial Sequence
  Synthetic oligonucleotide; TTT chr11 5261922 5261943 5261927 5261922 -
gttctttttgtttaggattgtc

SEQ ID NO: 137747 - DNA, 22 bp, Artificial Sequence
  Synthetic oligonucleotide; TTG chr11 5261921 5261942 5261926 5261921 -
ttctttttgtttaggattgtct

SEQ ID NO: 137748 - DNA, 22 bp, Artificial Sequence
  Synthetic oligonucleotide; TTC chr11 5261918 5261939 5261923 5261918 -
tttttgtttaggattgtcttgg

SEQ ID NO: 137749 - DNA, 22 bp, Artificial Sequence
  Synthetic oligonucleotide; CTT chr11 5261916 5261937 5261921 5261916 -
tttgtttaggattgtcttggct

SEQ ID NO: 137750 - DNA, 22 bp, Artificial Sequence
  Synthetic oligonucleotide; TTT chr11 5261915 5261936 5261920 5261915 -
ttgtttaggattgtcttggcta

SEQ ID NO: 137751 - DNA, 22 bp, Artificial Sequence
  Synthetic oligonucleotide; TTT chr11 5261914 5261935 5261919 5261914 -
tgtttaggattgtcttggctat

SEQ ID NO: 137752 - DNA, 22 bp, Artificial Sequence
  Synthetic oligonucleotide; TTT chr11 5261913 5261934 5261918 5261913 -
gtttaggattgtcttggctata

SEQ ID NO: 137753 - DNA, 22 bp, Artificial Sequence
  Synthetic oligonucleotide; TTG chr11 5261912 5261933 5261917 5261912 -
tttaggattgtcttggctatat

SEQ ID NO: 137754 - DNA, 22 bp, Artificial Sequence
  Synthetic oligonucleotide; TTT chr11 5261909 5261930 5261914 5261909 -
aggattgtcttggctatatggg

SEQ ID NO: 137755 - DNA, 22 bp, Artificial Sequence
  Synthetic oligonucleotide; TTA chr11 5261908 5261929 5261913 5261908 -
ggattgtcttggctatatgggc

SEQ ID NO: 137756 - DNA, 22 bp, Artificial Sequence
  Synthetic oligonucleotide; TTG chr11 5261902 5261923 5261907 5261902 -
tcttggctatatgggctctttt

SEQ ID NO: 137757 - DNA, 22 bp, Artificial Sequence
  Synthetic oligonucleotide; CTT chr11 5261898 5261919 5261903 5261898 -
ggctatatgggctcttttttga

SEQ ID NO: 137758 - DNA, 22 bp, Artificial Sequence
  Synthetic oligonucleotide; TTG chr11 5261897 5261918 5261902 5261897 -
gctatatgggctcttttttgat

SEQ ID NO: 137759 - DNA, 22 bp, Artificial Sequence
  Synthetic oligonucleotide; CTA chr11 5261893 5261914 5261898 5261893 -
tatgggctcttttttgattcca

SEQ ID NO: 137760 - DNA, 22 bp, Artificial Sequence
  Synthetic oligonucleotide; CTC chr11 5261884 5261905 5261889 5261884 -
ttttttgattccatatgacatt

SEQ ID NO: 137761 - DNA, 22 bp, Artificial Sequence
  Synthetic oligonucleotide; CTT chr11 5261882 5261903 5261887 5261882 -
ttttgattccatatgacattta

SEQ ID NO: 137762 - DNA, 22 bp, Artificial Sequence
  Synthetic oligonucleotide; TTT chr11 5261881 5261902 5261886 5261881 -
tttgattccatatgacatttaa

SEQ ID NO: 137763 - DNA, 22 bp, Artificial Sequence
  Synthetic oligonucleotide; TTT chr11 5261880 5261901 5261885 5261880 -
ttgattccatatgacatttaaa

SEQ ID NO: 137764 - DNA, 22 bp, Artificial Sequence
  Synthetic oligonucleotide; TTT chr11 5261879 5261900 5261884 5261879 -
tgattccatatgacatttaaag

SEQ ID NO: 137765 - DNA, 22 bp, Artificial Sequence
  Synthetic oligonucleotide; TTT chr11 5261878 5261899 5261883 5261878 -
gattccatatgacatttaaagt

SEQ ID NO: 137766 - DNA, 22 bp, Artificial Sequence
  Synthetic oligonucleotide; TTG chr11 5261877 5261898 5261882 5261877 -
attccatatgacatttaaagta

SEQ ID NO: 137767 - DNA, 22 bp, Artificial Sequence
  Synthetic oligonucleotide; TTC chr11 5261873 5261894 5261878 5261873 -
catatgacatttaaagtagttt

SEQ ID NO: 137768 - DNA, 22 bp, Artificial Sequence
  Synthetic oligonucleotide; TTT chr11 5261861 5261882 5261866 5261861 -
aaagtagttttttctaattctt

SEQ ID NO: 137769 - DNA, 22 bp, Artificial Sequence
  Synthetic oligonucleotide; TTA chr11 5261860 5261881 5261865 5261860 -
aagtagttttttctaattcttt

SEQ ID NO: 137770 - DNA, 22 bp, Artificial Sequence
  Synthetic oligonucleotide; TTT chr11 5261851 5261872 5261856 5261851 -
tttctaattctttgaaaaaagt

SEQ ID NO: 137771 - DNA, 22 bp, Artificial Sequence
  Synthetic oligonucleotide; TTT chr11 5261850 5261871 5261855 5261850 -
ttctaattctttgaaaaaagtc

SEQ ID NO: 137772 - DNA, 22 bp, Artificial Sequence
  Synthetic oligonucleotide; TTT chr11 5261849 5261870 5261854 5261849 -
tctaattctttgaaaaaagtca

SEQ ID NO: 137773 - DNA, 22 bp, Artificial Sequence
  Synthetic oligonucleotide; TTT chr11 5261848 5261869 5261853 5261848 -
ctaattctttgaaaaaagtcag

SEQ ID NO: 137774 - DNA, 22 bp, Artificial Sequence
  Synthetic oligonucleotide; TTC chr11 5261847 5261868 5261852 5261847 -
taattctttgaaaaaagtcagt

SEQ ID NO: 137775 - DNA, 22 bp, Artificial Sequence
  Synthetic oligonucleotide; CTA chr11 5261845 5261866 5261850 5261845 -
attctttgaaaaaagtcagtgg

SEQ ID NO: 137776 - DNA, 22 bp, Artificial Sequence
  Synthetic oligonucleotide; TTC chr11 5261841 5261862 5261846 5261841 -
tttgaaaaaagtcagtggtagc

SEQ ID NO: 137777 - DNA, 22 bp, Artificial Sequence
  Synthetic oligonucleotide; CTT chr11 5261839 5261860 5261844 5261839 -
tgaaaaaagtcagtggtagctt

SEQ ID NO: 137778 - DNA, 22 bp, Artificial Sequence
  Synthetic oligonucleotide; TTT chr11 5261838 5261859 5261843 5261838 -
gaaaaaagtcagtggtagcttg

SEQ ID NO: 137779 - DNA, 22 bp, Artificial Sequence
  Synthetic oligonucleotide; TTG chr11 5261837 5261858 5261842 5261837 -
aaaaaagtcagtggtagcttga

SEQ ID NO: 137780 - DNA, 22 bp, Artificial Sequence
  Synthetic oligonucleotide; CTT chr11 5261817 5261838 5261822 5261817 -
gatggggatagcattgaatcta

SEQ ID NO: 137781 - DNA, 22 bp, Artificial Sequence
  Synthetic oligonucleotide; TTG chr11 5261816 5261837 5261821 5261816 -
atggggatagcattgaatctat

SEQ ID NO: 137782 - DNA, 22 bp, Artificial Sequence
  Synthetic oligonucleotide; TTG chr11 5261801 5261822 5261806 5261801 -
aatctataaattactttgggca

SEQ ID NO: 137783 - DNA, 22 bp, Artificial Sequence
  Synthetic oligonucleotide; CTA chr11 5261795 5261816 5261800 5261795 -
taaattactttgggcagtatgg

SEQ ID NO: 137784 - DNA, 22 bp, Artificial Sequence
  Synthetic oligonucleotide; TTA chr11 5261788 5261809 5261793 5261788 -
ctttgggcagtatggccatttt

SEQ ID NO: 137785 - DNA, 22 bp, Artificial Sequence
  Synthetic oligonucleotide; CTT chr11 5261785 5261806 5261790 5261785 -
tgggcagtatggccattttaaa

SEQ ID NO: 137786 - DNA, 22 bp, Artificial Sequence
  Synthetic oligonucleotide; TTT chr11 5261784 5261805 5261789 5261784 -
gggcagtatggccattttaaag

SEQ ID NO: 137787 - DNA, 22 bp, Artificial Sequence
  Synthetic oligonucleotide; TTG chr11 5261783 5261804 5261788 5261783 -
ggcagtatggccattttaaaga

SEQ ID NO: 137788 - DNA, 22 bp, Artificial Sequence
  Synthetic oligonucleotide; TTT chr11 5261767 5261788 5261772 5261767 -
taaagatattgattctttctat

SEQ ID NO: 137789 - DNA, 22 bp, Artificial Sequence
  Synthetic oligonucleotide; TTT chr11 5261766 5261787 5261771 5261766 -
aaagatattgattctttctatc

SEQ ID NO: 137790 - DNA, 22 bp, Artificial Sequence
  Synthetic oligonucleotide; TTA chr11 5261765 5261786 5261770 5261765 -
aagatattgattctttctatct

SEQ ID NO: 137791 - DNA, 22 bp, Artificial Sequence
  Synthetic oligonucleotide; TTG chr11 5261756 5261777 5261761 5261756 -
attctttctatctatgagcatg

SEQ ID NO: 137792 - DNA, 22 bp, Artificial Sequence
  Synthetic oligonucleotide; TTC chr11 5261752 5261773 5261757 5261752 -
tttctatctatgagcatggaat

SEQ ID NO: 137793 - DNA, 22 bp, Artificial Sequence
  Synthetic oligonucleotide; CTT chr11 5261750 5261771 5261755 5261750 -
tctatctatgagcatggaatgt

SEQ ID NO: 137794 - DNA, 22 bp, Artificial Sequence
  Synthetic oligonucleotide; TTT chr11 5261749 5261770 5261754 5261749 -
ctatctatgagcatggaatgtt

SEQ ID NO: 137795 - DNA, 22 bp, Artificial Sequence
  Synthetic oligonucleotide; TTC chr11 5261748 5261769 5261753 5261748 -
tatctatgagcatggaatgttt

SEQ ID NO: 137796 - DNA, 22 bp, Artificial Sequence
  Synthetic oligonucleotide; CTA chr11 5261746 5261767 5261751 5261746 -
tctatgagcatggaatgttttt

SEQ ID NO: 137797 - DNA, 22 bp, Artificial Sequence
  Synthetic oligonucleotide; CTA chr11 5261742 5261763 5261747 5261742 -
tgagcatggaatgtttttccat

SEQ ID NO: 137798 - DNA, 22 bp, Artificial Sequence
  Synthetic oligonucleotide; TTT chr11 5261726 5261747 5261731 5261726 -
ttccatttgtttgtgtcctctc

SEQ ID NO: 137799 - DNA, 22 bp, Artificial Sequence
  Synthetic oligonucleotide; TTT chr11 5261725 5261746 5261730 5261725 -
tccatttgtttgtgtcctctct

SEQ ID NO: 137800 - DNA, 22 bp, Artificial Sequence
  Synthetic oligonucleotide; TTT chr11 5261724 5261745 5261729 5261724 -
ccatttgtttgtgtcctctctt

SEQ ID NO: 137801 - DNA, 22 bp, Artificial Sequence
  Synthetic oligonucleotide; TTC chr11 5261723 5261744 5261728 5261723 -
catttgtttgtgtcctctctta

SEQ ID NO: 137802 - DNA, 22 bp, Artificial Sequence
  Synthetic oligonucleotide; TTT chr11 5261718 5261739 5261723 5261718 -
gtttgtgtcctctcttatttcc

SEQ ID NO: 137803 - DNA, 22 bp, Artificial Sequence
  Synthetic oligonucleotide; TTG chr11 5261717 5261738 5261722 5261717 -
tttgtgtcctctcttatttcct

SEQ ID NO: 137804 - DNA, 22 bp, Artificial Sequence
  Synthetic oligonucleotide; TTT chr11 5261714 5261735 5261719 5261714 -
gtgtcctctcttatttccttga

SEQ ID NO: 137805 - DNA, 22 bp, Artificial Sequence
  Synthetic oligonucleotide; TTG chr11 5261713 5261734 5261718 5261713 -
tgtcctctcttatttccttgag

SEQ ID NO: 137806 - DNA, 22 bp, Artificial Sequence
  Synthetic oligonucleotide; CTC chr11 5261706 5261727 5261711 5261706 -
tcttatttccttgagcagtgag

SEQ ID NO: 137807 - DNA, 22 bp, Artificial Sequence
  Synthetic oligonucleotide; CTC chr11 5261704 5261725 5261709 5261704 -
ttatttccttgagcagtgagtg

SEQ ID NO: 137808 - DNA, 22 bp, Artificial Sequence
  Synthetic oligonucleotide; CTT chr11 5261702 5261723 5261707 5261702 -
atttccttgagcagtgagtggt

SEQ ID NO: 137809 - DNA, 22 bp, Artificial Sequence
  Synthetic oligonucleotide; TTA chr11 5261701 5261722 5261706 5261701 -
tttccttgagcagtgagtggtt

SEQ ID NO: 137810 - DNA, 22 bp, Artificial Sequence
  Synthetic oligonucleotide; TTT chr11 5261698 5261719 5261703 5261698 -
ccttgagcagtgagtggtttgt

SEQ ID NO: 137811 - DNA, 22 bp, Artificial Sequence
  Synthetic oligonucleotide; TTC chr11 5261697 5261718 5261702 5261697 -
cttgagcagtgagtggtttgta

SEQ ID NO: 137812 - DNA, 22 bp, Artificial Sequence
  Synthetic oligonucleotide; CTT chr11 5261694 5261715 5261699 5261694 -
gagcagtgagtggtttgtagct

SEQ ID NO: 137813 - DNA, 22 bp, Artificial Sequence
  Synthetic oligonucleotide; TTG chr11 5261693 5261714 5261698 5261693 -
agcagtgagtggtttgtagctc

SEQ ID NO: 137814 - DNA, 22 bp, Artificial Sequence
  Synthetic oligonucleotide; TTT chr11 5261678 5261699 5261683 5261678 -
gtagctctccttgaagaggttc

SEQ ID NO: 137815 - DNA, 22 bp, Artificial Sequence
  Synthetic oligonucleotide; TTG chr11 5261677 5261698 5261682 5261677 -
tagctctccttgaagaggttct

SEQ ID NO: 137816 - DNA, 22 bp, Artificial Sequence
  Synthetic oligonucleotide; CTC chr11 5261671 5261692 5261676 5261671 -
tccttgaagaggttcttcacat

SEQ ID NO: 137817 - DNA, 22 bp, Artificial Sequence
  Synthetic oligonucleotide; CTC chr11 5261669 5261690 5261674 5261669 -
cttgaagaggttcttcacatcc

SEQ ID NO: 137818 - DNA, 22 bp, Artificial Sequence
  Synthetic oligonucleotide; CTT chr11 5261666 5261687 5261671 5261666 -
gaagaggttcttcacatccctt

SEQ ID NO: 137819 - DNA, 22 bp, Artificial Sequence
  Synthetic oligonucleotide; TTG chr11 5261665 5261686 5261670 5261665 -
aagaggttcttcacatccctta

SEQ ID NO: 137820 - DNA, 22 bp, Artificial Sequence
  Synthetic oligonucleotide; TTC chr11 5261656 5261677 5261661 5261656 -
ttcacatcccttagaagttgta

SEQ ID NO: 137821 - DNA, 22 bp, Artificial Sequence
  Synthetic oligonucleotide; CTT chr11 5261654 5261675 5261659 5261654 -
cacatcccttagaagttgtatt

SEQ ID NO: 137822 - DNA, 22 bp, Artificial Sequence
  Synthetic oligonucleotide; TTC chr11 5261653 5261674 5261658 5261653 -
acatcccttagaagttgtattt

SEQ ID NO: 137823 - DNA, 22 bp, Artificial Sequence
  Synthetic oligonucleotide; CTT chr11 5261644 5261665 5261649 5261644 -
agaagttgtatttctaggtatt

SEQ ID NO: 137824 - DNA, 22 bp, Artificial Sequence
  Synthetic oligonucleotide; TTA chr11 5261643 5261664 5261648 5261643 -
gaagttgtatttctaggtattt

SEQ ID NO: 137825 - DNA, 22 bp, Artificial Sequence
  Synthetic oligonucleotide; TTG chr11 5261636 5261657 5261641 5261636 -
tatttctaggtattttatttta

SEQ ID NO: 137826 - DNA, 22 bp, Artificial Sequence
  Synthetic oligonucleotide; TTT chr11 5261631 5261652 5261636 5261631 -
ctaggtattttattttattctc

SEQ ID NO: 137827 - DNA, 22 bp, Artificial Sequence
  Synthetic oligonucleotide; TTC chr11 5261630 5261651 5261635 5261630 -
taggtattttattttattctct

SEQ ID NO: 137828 - DNA, 22 bp, Artificial Sequence
  Synthetic oligonucleotide; CTA chr11 5261628 5261649 5261633 5261628 -
ggtattttattttattctcttt

SEQ ID NO: 137829 - DNA, 22 bp, Artificial Sequence
  Synthetic oligonucleotide; TTT chr11 5261621 5261642 5261626 5261621 -
tattttattctctttgcagcaa

SEQ ID NO: 137830 - DNA, 22 bp, Artificial Sequence
  Synthetic oligonucleotide; TTT chr11 5261620 5261641 5261625 5261620 -
attttattctctttgcagcaat

SEQ ID NO: 137831 - DNA, 22 bp, Artificial Sequence
  Synthetic oligonucleotide; TTA chr11 5261619 5261640 5261624 5261619 -
ttttattctctttgcagcaatt

SEQ ID NO: 137832 - DNA, 22 bp, Artificial Sequence
  Synthetic oligonucleotide; TTT chr11 5261616 5261637 5261621 5261616 -
tattctctttgcagcaattgtg

SEQ ID NO: 137833 - DNA, 22 bp, Artificial Sequence
  Synthetic oligonucleotide; TTT chr11 5261615 5261636 5261620 5261615 -
attctctttgcagcaattgtga

SEQ ID NO: 137834 - DNA, 22 bp, Artificial Sequence
  Synthetic oligonucleotide; TTA chr11 5261614 5261635 5261619 5261614 -
ttctctttgcagcaattgtgaa

SEQ ID NO: 137835 - DNA, 22 bp, Artificial Sequence
  Synthetic oligonucleotide; TTC chr11 5261611 5261632 5261616 5261611 -
tctttgcagcaattgtgaatgg

SEQ ID NO: 137836 - DNA, 22 bp, Artificial Sequence
  Synthetic oligonucleotide; CTC chr11 5261609 5261630 5261614 5261609 -
tttgcagcaattgtgaatggga

SEQ ID NO: 137837 - DNA, 22 bp, Artificial Sequence
  Synthetic oligonucleotide; CTT chr11 5261607 5261628 5261612 5261607 -
tgcagcaattgtgaatgggagt

SEQ ID NO: 137838 - DNA, 22 bp, Artificial Sequence
  Synthetic oligonucleotide; TTT chr11 5261606 5261627 5261611 5261606 -
gcagcaattgtgaatgggagtt

SEQ ID NO: 137839 - DNA, 22 bp, Artificial Sequence
  Synthetic oligonucleotide; TTG chr11 5261605 5261626 5261610 5261605 -
cagcaattgtgaatgggagttc

SEQ ID NO: 137840 - DNA, 22 bp, Artificial Sequence
  Synthetic oligonucleotide; TTG chr11 5261596 5261617 5261601 5261596 -
tgaatgggagttcacccatgat

SEQ ID NO: 137841 - DNA, 22 bp, Artificial Sequence
  Synthetic oligonucleotide; TTC chr11 5261583 5261604 5261588 5261583 -
acccatgatttggctctctgct

SEQ ID NO: 137842 - DNA, 22 bp, Artificial Sequence
  Synthetic oligonucleotide; TTT chr11 5261572 5261593 5261577 5261572 -
ggctctctgcttgtctattatt

SEQ ID NO: 137843 - DNA, 22 bp, Artificial Sequence
  Synthetic oligonucleotide; TTG chr11 5261571 5261592 5261576 5261571 -
gctctctgcttgtctattattg

SEQ ID NO: 137844 - DNA, 22 bp, Artificial Sequence
  Synthetic oligonucleotide; CTC chr11 5261567 5261588 5261572 5261567 -
tctgcttgtctattattggtgt

SEQ ID NO: 137845 - DNA, 22 bp, Artificial Sequence
  Synthetic oligonucleotide; CTC chr11 5261565 5261586 5261570 5261565 -
tgcttgtctattattggtgtat

SEQ ID NO: 137846 - DNA, 22 bp, Artificial Sequence
  Synthetic oligonucleotide; CTG chr11 5261563 5261584 5261568 5261563 -
cttgtctattattggtgtatag

SEQ ID NO: 137847 - DNA, 22 bp, Artificial Sequence
  Synthetic oligonucleotide; CTT chr11 5261560 5261581 5261565 5261560 -
gtctattattggtgtataggaa

SEQ ID NO: 137848 - DNA, 22 bp, Artificial Sequence
  Synthetic oligonucleotide; TTG chr11 5261559 5261580 5261564 5261559 -
tctattattggtgtataggaac

SEQ ID NO: 137849 - DNA, 22 bp, Artificial Sequence
  Synthetic oligonucleotide; CTA chr11 5261555 5261576 5261560 5261555 -
ttattggtgtataggaacgctt

SEQ ID NO: 137850 - DNA, 22 bp, Artificial Sequence
  Synthetic oligonucleotide; TTA chr11 5261552 5261573 5261557 5261552 -
ttggtgtataggaacgcttgtg

SEQ ID NO: 137851 - DNA, 22 bp, Artificial Sequence
  Synthetic oligonucleotide; TTG chr11 5261549 5261570 5261554 5261549 -
gtgtataggaacgcttgtgatt

SEQ ID NO: 137852 - DNA, 22 bp, Artificial Sequence
  Synthetic oligonucleotide; CTT chr11 5261533 5261554 5261538 5261533 -
gtgatttctgcacactgatttt

SEQ ID NO: 137853 - DNA, 22 bp, Artificial Sequence
  Synthetic oligonucleotide; TTG chr11 5261532 5261553 5261537 5261532 -
tgatttctgcacactgattttg

SEQ ID NO: 137854 - DNA, 22 bp, Artificial Sequence
  Synthetic oligonucleotide; TTT chr11 5261526 5261547 5261531 5261526 -
ctgcacactgattttgtatctt

SEQ ID NO: 137855 - DNA, 22 bp, Artificial Sequence
  Synthetic oligonucleotide; TTC chr11 5261525 5261546 5261530 5261525 -
tgcacactgattttgtatcttg

SEQ ID NO: 137856 - DNA, 22 bp, Artificial Sequence
  Synthetic oligonucleotide; CTG chr11 5261523 5261544 5261528 5261523 -
cacactgattttgtatcttgag

SEQ ID NO: 137857 - DNA, 22 bp, Artificial Sequence
  Synthetic oligonucleotide; CTG chr11 5261516 5261537 5261521 5261516 -
attttgtatcttgagactttgc

SEQ ID NO: 137858 - DNA, 22 bp, Artificial Sequence
  Synthetic oligonucleotide; TTT chr11 5261512 5261533 5261517 5261512 -
tgtatcttgagactttgctgaa

SEQ ID NO: 137859 - DNA, 22 bp, Artificial Sequence
  Synthetic oligonucleotide; TTT chr11 5261511 5261532 5261516 5261511 -
gtatcttgagactttgctgaag

SEQ ID NO: 137860 - DNA, 22 bp, Artificial Sequence
  Synthetic oligonucleotide; TTG chr11 5261510 5261531 5261515 5261510 -
tatcttgagactttgctgaagc

SEQ ID NO: 137861 - DNA, 22 bp, Artificial Sequence
  Synthetic oligonucleotide; CTT chr11 5261504 5261525 5261509 5261504 -
gagactttgctgaagctgttta

SEQ ID NO: 137862 - DNA, 22 bp, Artificial Sequence
  Synthetic oligonucleotide; TTG chr11 5261503 5261524 5261508 5261503 -
agactttgctgaagctgtttat

SEQ ID NO: 137863 - DNA, 22 bp, Artificial Sequence
  Synthetic oligonucleotide; CTT chr11 5261497 5261518 5261502 5261497 -
tgctgaagctgtttatcagctt

SEQ ID NO: 137864 - DNA, 22 bp, Artificial Sequence
  Synthetic oligonucleotide; TTT chr11 5261496 5261517 5261501 5261496 -
gctgaagctgtttatcagctta

SEQ ID NO: 137865 - DNA, 22 bp, Artificial Sequence
  Synthetic oligonucleotide; TTG chr11 5261495 5261516 5261500 5261495 -
ctgaagctgtttatcagcttaa

SEQ ID NO: 137866 - DNA, 22 bp, Artificial Sequence
  Synthetic oligonucleotide; CTG chr11 5261492 5261513 5261497 5261492 -
aagctgtttatcagcttaagat

SEQ ID NO: 137867 - DNA, 22 bp, Artificial Sequence
  Synthetic oligonucleotide; CTG chr11 5261486 5261507 5261491 5261486 -
tttatcagcttaagattttggg

SEQ ID NO: 137868 - DNA, 22 bp, Artificial Sequence
  Synthetic oligonucleotide; TTT chr11 5261483 5261504 5261488 5261483 -
atcagcttaagattttgggctg

SEQ ID NO: 137869 - DNA, 22 bp, Artificial Sequence
  Synthetic oligonucleotide; TTA chr11 5261482 5261503 5261487 5261482 -
tcagcttaagattttgggctga

SEQ ID NO: 137870 - DNA, 22 bp, Artificial Sequence
  Synthetic oligonucleotide; CTT chr11 5261475 5261496 5261480 5261475 -
aagattttgggctgagatgaca

SEQ ID NO: 137871 - DNA, 22 bp, Artificial Sequence
  Synthetic oligonucleotide; TTA chr11 5261474 5261495 5261479 5261474 -
agattttgggctgagatgacag

SEQ ID NO: 137872 - DNA, 22 bp, Artificial Sequence
  Synthetic oligonucleotide; TTT chr11 5261468 5261489 5261473 5261468 -
tgggctgagatgacagggtctt

SEQ ID NO: 137873 - DNA, 22 bp, Artificial Sequence
  Synthetic oligonucleotide; TTT chr11 5261467 5261488 5261472 5261467 -
gggctgagatgacagggtcttc

SEQ ID NO: 137874 - DNA, 22 bp, Artificial Sequence
  Synthetic oligonucleotide; TTG chr11 5261466 5261487 5261471 5261466 -
ggctgagatgacagggtcttct

SEQ ID NO: 137875 - DNA, 22 bp, Artificial Sequence
  Synthetic oligonucleotide; CTG chr11 5261461 5261482 5261466 5261461 -
agatgacagggtcttctaaata

SEQ ID NO: 137876 - DNA, 22 bp, Artificial Sequence
  Synthetic oligonucleotide; CTT chr11 5261446 5261467 5261451 5261446 -
ctaaatatacaatcatgtcatc

SEQ ID NO: 137877 - DNA, 22 bp, Artificial Sequence
  Synthetic oligonucleotide; TTC chr11 5261445 5261466 5261450 5261445 -
taaatatacaatcatgtcatct

SEQ ID NO: 137878 - DNA, 22 bp, Artificial Sequence
  Synthetic oligonucleotide; CTA chr11 5261443 5261464 5261448 5261443 -
aatatacaatcatgtcatctgc

SEQ ID NO: 137879 - DNA, 22 bp, Artificial Sequence
  Synthetic oligonucleotide; CTG chr11 5261422 5261443 5261427 5261422 -
caaacagagacaatttgacttc

SEQ ID NO: 137880 - DNA, 22 bp, Artificial Sequence
  Synthetic oligonucleotide; TTT chr11 5261406 5261427 5261411 5261406 -
gacttcctctcttcctatttga

SEQ ID NO: 137881 - DNA, 22 bp, Artificial Sequence
  Synthetic oligonucleotide; TTG chr11 5261405 5261426 5261410 5261405 -
acttcctctcttcctatttgaa

SEQ ID NO: 137882 - DNA, 22 bp, Artificial Sequence
  Synthetic oligonucleotide; CTT chr11 5261401 5261422 5261406 5261401 -
cctctcttcctatttgaatatg

SEQ ID NO: 137883 - DNA, 22 bp, Artificial Sequence
  Synthetic oligonucleotide; TTC chr11 5261400 5261421 5261405 5261400 -
ctctcttcctatttgaatatgc

SEQ ID NO: 137884 - DNA, 22 bp, Artificial Sequence
  Synthetic oligonucleotide; CTC chr11 5261397 5261418 5261402 5261397 -
tcttcctatttgaatatgcttt

SEQ ID NO: 137885 - DNA, 22 bp, Artificial Sequence
  Synthetic oligonucleotide; CTC chr11 5261395 5261416 5261400 5261395 -
ttcctatttgaatatgctttat

SEQ ID NO: 137886 - DNA, 22 bp, Artificial Sequence
  Synthetic oligonucleotide; CTT chr11 5261393 5261414 5261398 5261393 -
cctatttgaatatgctttattt

SEQ ID NO: 137887 - DNA, 22 bp, Artificial Sequence
  Synthetic oligonucleotide; TTC chr11 5261392 5261413 5261397 5261392 -
ctatttgaatatgctttatttc

SEQ ID NO: 137888 - DNA, 22 bp, Artificial Sequence
  Synthetic oligonucleotide; CTA chr11 5261389 5261410 5261394 5261389 -
tttgaatatgctttatttcttt

SEQ ID NO: 137889 - DNA, 22 bp, Artificial Sequence
  Synthetic oligonucleotide; TTT chr11 5261386 5261407 5261391 5261386 -
gaatatgctttatttctttctc

SEQ ID NO: 137890 - DNA, 22 bp, Artificial Sequence
  Synthetic oligonucleotide; TTG chr11 5261385 5261406 5261390 5261385 -
aatatgctttatttctttctct

SEQ ID NO: 137891 - DNA, 22 bp, Artificial Sequence
  Synthetic oligonucleotide; CTT chr11 5261376 5261397 5261381 5261376 -
tatttctttctcttgcctgatt

SEQ ID NO: 137892 - DNA, 22 bp, Artificial Sequence
  Synthetic oligonucleotide; TTT chr11 5261375 5261396 5261380 5261375 -
atttctttctcttgcctgattg

SEQ ID NO: 137893 - DNA, 22 bp, Artificial Sequence
  Synthetic oligonucleotide; TTA chr11 5261374 5261395 5261379 5261374 -
tttctttctcttgcctgattgt

SEQ ID NO: 137894 - DNA, 22 bp, Artificial Sequence
  Synthetic oligonucleotide; TTT chr11 5261371 5261392 5261376 5261371 -
ctttctcttgcctgattgtcct

SEQ ID NO: 137895 - DNA, 22 bp, Artificial Sequence
  Synthetic oligonucleotide; TTC chr11 5261370 5261391 5261375 5261370 -
tttctcttgcctgattgtcctg

SEQ ID NO: 137896 - DNA, 22 bp, Artificial Sequence
  Synthetic oligonucleotide; CTT chr11 5261368 5261389 5261373 5261368 -
tctcttgcctgattgtcctggc

SEQ ID NO: 137897 - DNA, 22 bp, Artificial Sequence
  Synthetic oligonucleotide; TTT chr11 5261367 5261388 5261372 5261367 -
ctcttgcctgattgtcctggcg

SEQ ID NO: 137898 - DNA, 22 bp, Artificial Sequence
  Synthetic oligonucleotide; TTC chr11 5261366 5261387 5261371 5261366 -
tcttgcctgattgtcctggcga

SEQ ID NO: 137899 - DNA, 22 bp, Artificial Sequence
  Synthetic oligonucleotide; CTC chr11 5261364 5261385 5261369 5261364 -
ttgcctgattgtcctggcgaga

SEQ ID NO: 137900 - DNA, 22 bp, Artificial Sequence
  Synthetic oligonucleotide; CTT chr11 5261362 5261383 5261367 5261362 -
gcctgattgtcctggcgagaac

SEQ ID NO: 137901 - DNA, 22 bp, Artificial Sequence
  Synthetic oligonucleotide; TTG chr11 5261361 5261382 5261366 5261361 -
cctgattgtcctggcgagaact

SEQ ID NO: 137902 - DNA, 22 bp, Artificial Sequence
  Synthetic oligonucleotide; CTG chr11 5261357 5261378 5261362 5261357 -
attgtcctggcgagaacttcca

SEQ ID NO: 137903 - DNA, 22 bp, Artificial Sequence
  Synthetic oligonucleotide; TTG chr11 5261353 5261374 5261358 5261353 -
tcctggcgagaacttccaatac

SEQ ID NO: 137904 - DNA, 22 bp, Artificial Sequence
  Synthetic oligonucleotide; CTG chr11 5261348 5261369 5261353 5261348 -
gcgagaacttccaatactatgt

SEQ ID NO: 137905 - DNA, 22 bp, Artificial Sequence
  Synthetic oligonucleotide; CTT chr11 5261338 5261359 5261343 5261338 -
ccaatactatgttgagtaagag

SEQ ID NO: 137906 - DNA, 22 bp, Artificial Sequence
  Synthetic oligonucleotide; TTC chr11 5261337 5261358 5261342 5261337 -
caatactatgttgagtaagagt

SEQ ID NO: 137907 - DNA, 22 bp, Artificial Sequence
  Synthetic oligonucleotide; CTA chr11 5261329 5261350 5261334 5261329 -
tgttgagtaagagtggcgagag

SEQ ID NO: 137908 - DNA, 22 bp, Artificial Sequence
  Synthetic oligonucleotide; TTG chr11 5261324 5261345 5261329 5261324 -
agtaagagtggcgagagggcat

SEQ ID NO: 137909 - DNA, 22 bp, Artificial Sequence
  Synthetic oligonucleotide; CTT chr11 5261298 5261319 5261303 5261298 -
gtcttgtgccggttttcaaagc

SEQ ID NO: 137910 - DNA, 22 bp, Artificial Sequence
  Synthetic oligonucleotide; TTG chr11 5261297 5261318 5261302 5261297 -
tcttgtgccggttttcaaagca

SEQ ID NO: 137911 - DNA, 22 bp, Artificial Sequence
  Synthetic oligonucleotide; CTT chr11 5261293 5261314 5261298 5261293 -
gtgccggttttcaaagcaaatg

SEQ ID NO: 137912 - DNA, 22 bp, Artificial Sequence
  Synthetic oligonucleotide; TTG chr11 5261292 5261313 5261297 5261292 -
tgccggttttcaaagcaaatga

SEQ ID NO: 137913 - DNA, 22 bp, Artificial Sequence
  Synthetic oligonucleotide; TTT chr11 5261283 5261304 5261288 5261283 -
tcaaagcaaatgatttttaaat

SEQ ID NO: 137914 - DNA, 22 bp, Artificial Sequence
  Synthetic oligonucleotide; TTT chr11 5261282 5261303 5261287 5261282 -
caaagcaaatgatttttaaatt

SEQ ID NO: 137915 - DNA, 22 bp, Artificial Sequence
  Synthetic oligonucleotide; TTC chr11 5261281 5261302 5261286 5261281 -
aaagcaaatgatttttaaattt

SEQ ID NO: 137916 - DNA, 22 bp, Artificial Sequence
  Synthetic oligonucleotide; TTT chr11 5261267 5261288 5261272 5261267 -
ttaaatttccatcttgatttca

SEQ ID NO: 137917 - DNA, 22 bp, Artificial Sequence
  Synthetic oligonucleotide; TTT chr11 5261266 5261287 5261271 5261266 -
taaatttccatcttgatttcat

SEQ ID NO: 137918 - DNA, 22 bp, Artificial Sequence
  Synthetic oligonucleotide; TTT chr11 5261265 5261286 5261270 5261265 -
aaatttccatcttgatttcatt

SEQ ID NO: 137919 - DNA, 22 bp, Artificial Sequence
  Synthetic oligonucleotide; TTA chr11 5261264 5261285 5261269 5261264 -
aatttccatcttgatttcattg

SEQ ID NO: 137920 - DNA, 22 bp, Artificial Sequence
  Synthetic oligonucleotide; TTT chr11 5261259 5261280 5261264 5261259 -
ccatcttgatttcattgttgac

SEQ ID NO: 137921 - DNA, 22 bp, Artificial Sequence
  Synthetic oligonucleotide; TTC chr11 5261258 5261279 5261263 5261258 -
catcttgatttcattgttgacc

SEQ ID NO: 137922 - DNA, 22 bp, Artificial Sequence
  Synthetic oligonucleotide; CTT chr11 5261252 5261273 5261257 5261252 -
gatttcattgttgacccaatga

SEQ ID NO: 137923 - DNA, 22 bp, Artificial Sequence
  Synthetic oligonucleotide; TTG chr11 5261251 5261272 5261256 5261251 -
atttcattgttgacccaatgat

SEQ ID NO: 137924 - DNA, 22 bp, Artificial Sequence
  Synthetic oligonucleotide; TTT chr11 5261247 5261268 5261252 5261247 -
cattgttgacccaatgatcatt

SEQ ID NO: 137925 - DNA, 22 bp, Artificial Sequence
  Synthetic oligonucleotide; TTC chr11 5261246 5261267 5261251 5261246 -
attgttgacccaatgatcattc

SEQ ID NO: 137926 - DNA, 22 bp, Artificial Sequence
  Synthetic oligonucleotide; TTG chr11 5261242 5261263 5261247 5261242 -
ttgacccaatgatcattcagga

SEQ ID NO: 137927 - DNA, 22 bp, Artificial Sequence
  Synthetic oligonucleotide; TTG chr11 5261239 5261260 5261244 5261239 -
acccaatgatcattcaggagca

SEQ ID NO: 137928 - DNA, 22 bp, Artificial Sequence
  Synthetic oligonucleotide; TTC chr11 5261224 5261245 5261229 5261224 -
aggagcaggttatttaatttcc

SEQ ID NO: 137929 - DNA, 22 bp, Artificial Sequence
  Synthetic oligonucleotide; TTA chr11 5261212 5261233 5261217 5261212 -
tttaatttccctgtatttgcat

SEQ ID NO: 137930 - DNA, 22 bp, Artificial Sequence
  Synthetic oligonucleotide; TTT chr11 5261209 5261230 5261214 5261209 -
aatttccctgtatttgcatggt

SEQ ID NO: 137931 - DNA, 22 bp, Artificial Sequence
  Synthetic oligonucleotide; TTA chr11 5261208 5261229 5261213 5261208 -
atttccctgtatttgcatggtt

SEQ ID NO: 137932 - DNA, 22 bp, Artificial Sequence
  Synthetic oligonucleotide; TTT chr11 5261204 5261225 5261209 5261204 -
ccctgtatttgcatggttttga

SEQ ID NO: 137933 - DNA, 22 bp, Artificial Sequence
  Synthetic oligonucleotide; TTC chr11 5261203 5261224 5261208 5261203 -
cctgtatttgcatggttttgaa

SEQ ID NO: 137934 - DNA, 22 bp, Artificial Sequence
  Synthetic oligonucleotide; CTG chr11 5261199 5261220 5261204 5261199 -
tatttgcatggttttgaaggtt

SEQ ID NO: 137935 - DNA, 22 bp, Artificial Sequence
  Synthetic oligonucleotide; TTT chr11 5261194 5261215 5261199 5261194 -
gcatggttttgaaggttccttt

SEQ ID NO: 137936 - DNA, 22 bp, Artificial Sequence
  Synthetic oligonucleotide; TTG chr11 5261193 5261214 5261198 5261193 -
catggttttgaaggttcctttt

SEQ ID NO: 137937 - DNA, 22 bp, Artificial Sequence
  Synthetic oligonucleotide; TTT chr11 5261185 5261206 5261190 5261185 -
tgaaggttccttttgtagttga

SEQ ID NO: 137938 - DNA, 22 bp, Artificial Sequence
  Synthetic oligonucleotide; TTT chr11 5261184 5261205 5261189 5261184 -
gaaggttccttttgtagttgat

SEQ ID NO: 137939 - DNA, 22 bp, Artificial Sequence
  Synthetic oligonucleotide; TTG chr11 5261183 5261204 5261188 5261183 -
aaggttccttttgtagttgatt

SEQ ID NO: 137940 - DNA, 22 bp, Artificial Sequence
  Synthetic oligonucleotide; TTC chr11 5261176 5261197 5261181 5261176 -
cttttgtagttgatttccaatt

SEQ ID NO: 137941 - DNA, 22 bp, Artificial Sequence
  Synthetic oligonucleotide; CTT chr11 5261173 5261194 5261178 5261173 -
ttgtagttgatttccaatttta

SEQ ID NO: 137942 - DNA, 22 bp, Artificial Sequence
  Synthetic oligonucleotide; TTT chr11 5261172 5261193 5261177 5261172 -
tgtagttgatttccaattttat

SEQ ID NO: 137943 - DNA, 22 bp, Artificial Sequence
  Synthetic oligonucleotide; TTT chr11 5261171 5261192 5261176 5261171 -
gtagttgatttccaattttatt

SEQ ID NO: 137944 - DNA, 22 bp, Artificial Sequence
  Synthetic oligonucleotide; TTG chr11 5261170 5261191 5261175 5261170 -
tagttgatttccaattttattc

SEQ ID NO: 137945 - DNA, 22 bp, Artificial Sequence
  Synthetic oligonucleotide; TTG chr11 5261164 5261185 5261169 5261164 -
atttccaattttattctactgt

SEQ ID NO: 137946 - DNA, 22 bp, Artificial Sequence
  Synthetic oligonucleotide; TTT chr11 5261160 5261181 5261165 5261160 -
ccaattttattctactgtggtc

SEQ ID NO: 137947 - DNA, 22 bp, Artificial Sequence
  Synthetic oligonucleotide; TTC chr11 5261159 5261180 5261164 5261159 -
caattttattctactgtggtct

SEQ ID NO: 137948 - DNA, 22 bp, Artificial Sequence
  Synthetic oligonucleotide; TTT chr11 5261153 5261174 5261158 5261153 -
tattctactgtggtctgagaga

SEQ ID NO: 137949 - DNA, 22 bp, Artificial Sequence
  Synthetic oligonucleotide; TTT chr11 5261152 5261173 5261157 5261152 -
attctactgtggtctgagagag

SEQ ID NO: 137950 - DNA, 22 bp, Artificial Sequence
  Synthetic oligonucleotide; TTA chr11 5261151 5261172 5261156 5261151 -
ttctactgtggtctgagagagt

SEQ ID NO: 137951 - DNA, 22 bp, Artificial Sequence
  Synthetic oligonucleotide; TTC chr11 5261148 5261169 5261153 5261148 -
tactgtggtctgagagagtgct

SEQ ID NO: 137952 - DNA, 22 bp, Artificial Sequence
  Synthetic oligonucleotide; CTA chr11 5261146 5261167 5261151 5261146 -
ctgtggtctgagagagtgcttg

SEQ ID NO: 137953 - DNA, 22 bp, Artificial Sequence
  Synthetic oligonucleotide; CTG chr11 5261143 5261164 5261148 5261143 -
tggtctgagagagtgcttgata

SEQ ID NO: 137954 - DNA, 22 bp, Artificial Sequence
  Synthetic oligonucleotide; CTG chr11 5261136 5261157 5261141 5261136 -
agagagtgcttgatataatttc

SEQ ID NO: 137955 - DNA, 22 bp, Artificial Sequence
  Synthetic oligonucleotide; CTT chr11 5261125 5261146 5261130 5261125 -
gatataatttcaatttttaaaa

SEQ ID NO: 137956 - DNA, 22 bp, Artificial Sequence
  Synthetic oligonucleotide; TTG chr11 5261124 5261145 5261129 5261124 -
atataatttcaatttttaaaaa

SEQ ID NO: 137957 - DNA, 22 bp, Artificial Sequence
  Synthetic oligonucleotide; TTT chr11 5261115 5261136 5261120 5261115 -
caatttttaaaaatttattgag

SEQ ID NO: 137958 - DNA, 22 bp, Artificial Sequence
  Synthetic oligonucleotide; TTC chr11 5261114 5261135 5261119 5261114 -
aatttttaaaaatttattgagg

SEQ ID NO: 137959 - DNA, 22 bp, Artificial Sequence
  Synthetic oligonucleotide; TTT chr11 5261109 5261130 5261114 5261109 -
ttaaaaatttattgaggcttgt

SEQ ID NO: 137960 - DNA, 22 bp, Artificial Sequence
  Synthetic oligonucleotide; TTT chr11 5261108 5261129 5261113 5261108 -
taaaaatttattgaggcttgtt

SEQ ID NO: 137961 - DNA, 22 bp, Artificial Sequence
  Synthetic oligonucleotide; TTT chr11 5261107 5261128 5261112 5261107 -
aaaaatttattgaggcttgttt

SEQ ID NO: 137962 - DNA, 22 bp, Artificial Sequence
  Synthetic oligonucleotide; TTA chr11 5261106 5261127 5261111 5261106 -
aaaatttattgaggcttgtttt

SEQ ID NO: 137963 - DNA, 22 bp, Artificial Sequence
  Synthetic oligonucleotide; TTT chr11 5261099 5261120 5261104 5261099 -
attgaggcttgttttgtggcat

SEQ ID NO: 137964 - DNA, 22 bp, Artificial Sequence
  Synthetic oligonucleotide; TTA chr11 5261098 5261119 5261103 5261098 -
ttgaggcttgttttgtggcata

SEQ ID NO: 137965 - DNA, 22 bp, Artificial Sequence
  Synthetic oligonucleotide; TTG chr11 5261095 5261116 5261100 5261095 -
aggcttgttttgtggcatatca

SEQ ID NO: 137966 - DNA, 22 bp, Artificial Sequence
  Synthetic oligonucleotide; CTT chr11 5261089 5261110 5261094 5261089 -
gttttgtggcatatcatatggc

SEQ ID NO: 137967 - DNA, 22 bp, Artificial Sequence
  Synthetic oligonucleotide; TTG chr11 5261088 5261109 5261093 5261088 -
ttttgtggcatatcatatggcc

SEQ ID NO: 137968 - DNA, 22 bp, Artificial Sequence
  Synthetic oligonucleotide; TTT chr11 5261085 5261106 5261090 5261085 -
tgtggcatatcatatggcctat

SEQ ID NO: 137969 - DNA, 22 bp, Artificial Sequence
  Synthetic oligonucleotide; TTT chr11 5261084 5261105 5261089 5261084 -
gtggcatatcatatggcctatc

SEQ ID NO: 137970 - DNA, 22 bp, Artificial Sequence
  Synthetic oligonucleotide; TTG chr11 5261083 5261104 5261088 5261083 -
tggcatatcatatggcctatct

SEQ ID NO: 137971 - DNA, 22 bp, Artificial Sequence
  Synthetic oligonucleotide; CTA chr11 5261064 5261085 5261069 5261064 -
tcttggagaaagttccatgtgc

SEQ ID NO: 137972 - DNA, 22 bp, Artificial Sequence
  Synthetic oligonucleotide; CTT chr11 5261060 5261081 5261065 5261060 -
ggagaaagttccatgtgctgat

SEQ ID NO: 137973 - DNA, 22 bp, Artificial Sequence
  Synthetic oligonucleotide; TTG chr11 5261059 5261080 5261064 5261059 -
gagaaagttccatgtgctgatg

SEQ ID NO: 137974 - DNA, 22 bp, Artificial Sequence
  Synthetic oligonucleotide; TTC chr11 5261049 5261070 5261054 5261049 -
catgtgctgatgaatagaatgt

SEQ ID NO: 137975 - DNA, 22 bp, Artificial Sequence
  Synthetic oligonucleotide; CTG chr11 5261040 5261061 5261045 5261040 -
atgaatagaatgtgtattctgc

SEQ ID NO: 137976 - DNA, 22 bp, Artificial Sequence
  Synthetic oligonucleotide; TTC chr11 5261021 5261042 5261026 5261021 -
tgcagttgttgggtagaatgtc

SEQ ID NO: 137977 - DNA, 22 bp, Artificial Sequence
  Synthetic oligonucleotide; CTG chr11 5261019 5261040 5261024 5261019 -
cagttgttgggtagaatgtcct

SEQ ID NO: 137978 - DNA, 22 bp, Artificial Sequence
  Synthetic oligonucleotide; TTG chr11 5261013 5261034 5261018 5261013 -
ttgggtagaatgtcctgtaaat

SEQ ID NO: 137979 - DNA, 22 bp, Artificial Sequence
  Synthetic oligonucleotide; TTG chr11 5261010 5261031 5261015 5261010 -
ggtagaatgtcctgtaaatatc

SEQ ID NO: 137980 - DNA, 22 bp, Artificial Sequence
  Synthetic oligonucleotide; CTG chr11 5260996 5261017 5261001 5260996 -
taaatatctgttaagtccattt

SEQ ID NO: 137981 - DNA, 22 bp, Artificial Sequence
  Synthetic oligonucleotide; CTG chr11 5260986 5261007 5260991 5260986 -
ttaagtccatttgttctttaaa

SEQ ID NO: 137982 - DNA, 22 bp, Artificial Sequence
  Synthetic oligonucleotide; TTA chr11 5260983 5261004 5260988 5260983 -
agtccatttgttctttaaatcc

SEQ ID NO: 137983 - DNA, 22 bp, Artificial Sequence
  Synthetic oligonucleotide; TTT chr11 5260974 5260995 5260979 5260974 -
gttctttaaatccattgtttct

SEQ ID NO: 137984 - DNA, 22 bp, Artificial Sequence
  Synthetic oligonucleotide; TTG chr11 5260973 5260994 5260978 5260973 -
ttctttaaatccattgtttctt

SEQ ID NO: 137985 - DNA, 22 bp, Artificial Sequence
  Synthetic oligonucleotide; TTC chr11 5260970 5260991 5260975 5260970 -
tttaaatccattgtttctttgt

SEQ ID NO: 137986 - DNA, 22 bp, Artificial Sequence
  Synthetic oligonucleotide; CTT chr11 5260968 5260989 5260973 5260968 -
taaatccattgtttctttgtag

SEQ ID NO: 137987 - DNA, 22 bp, Artificial Sequence
  Synthetic oligonucleotide; TTT chr11 5260967 5260988 5260972 5260967 -
aaatccattgtttctttgtaga

SEQ ID NO: 137988 - DNA, 22 bp, Artificial Sequence
  Synthetic oligonucleotide; TTA chr11 5260966 5260987 5260971 5260966 -
aatccattgtttctttgtagac

SEQ ID NO: 137989 - DNA, 22 bp, Artificial Sequence
  Synthetic oligonucleotide; TTG chr11 5260957 5260978 5260962 5260957 -
tttctttgtagactgtcttgat

SEQ ID NO: 137990 - DNA, 22 bp, Artificial Sequence
  Synthetic oligonucleotide; TTT chr11 5260954 5260975 5260959 5260954 -
ctttgtagactgtcttgatgac

SEQ ID NO: 137991 - DNA, 22 bp, Artificial Sequence
  Synthetic oligonucleotide; TTC chr11 5260953 5260974 5260958 5260953 -
tttgtagactgtcttgatgacc

SEQ ID NO: 137992 - DNA, 22 bp, Artificial Sequence
  Synthetic oligonucleotide; CTT chr11 5260951 5260972 5260956 5260951 -
tgtagactgtcttgatgacctg

SEQ ID NO: 137993 - DNA, 22 bp, Artificial Sequence
  Synthetic oligonucleotide; TTT chr11 5260950 5260971 5260955 5260950 -
gtagactgtcttgatgacctgc

SEQ ID NO: 137994 - DNA, 22 bp, Artificial Sequence
  Synthetic oligonucleotide; TTG chr11 5260949 5260970 5260954 5260949 -
tagactgtcttgatgacctgcc

SEQ ID NO: 137995 - DNA, 22 bp, Artificial Sequence
  Synthetic oligonucleotide; CTG chr11 5260942 5260963 5260947 5260942 -
tcttgatgacctgcctagtgca

SEQ ID NO: 137996 - DNA, 22 bp, Artificial Sequence
  Synthetic oligonucleotide; CTT chr11 5260938 5260959 5260943 5260938 -
gatgacctgcctagtgcagtca

SEQ ID NO: 137997 - DNA, 22 bp, Artificial Sequence
  Synthetic oligonucleotide; TTG chr11 5260937 5260958 5260942 5260937 -
atgacctgcctagtgcagtcag

SEQ ID NO: 137998 - DNA, 22 bp, Artificial Sequence
  Synthetic oligonucleotide; CTG chr11 5260929 5260950 5260934 5260929 -
cctagtgcagtcagtggagtat

SEQ ID NO: 137999 - DNA, 22 bp, Artificial Sequence
  Synthetic oligonucleotide; CTA chr11 5260925 5260946 5260930 5260925 -
gtgcagtcagtggagtattgaa

SEQ ID NO: 138000 - DNA, 22 bp, Artificial Sequence
  Synthetic oligonucleotide; TTG chr11 5260905 5260926 5260910 5260905 -
aagtcccccactattattatgt

SEQ ID NO: 138001 - DNA, 22 bp, Artificial Sequence
  Synthetic oligonucleotide; CTA chr11 5260892 5260913 5260897 5260892 -
ttattatgttgctgtctagtct

SEQ ID NO: 138002 - DNA, 22 bp, Artificial Sequence
  Synthetic oligonucleotide; TTA chr11 5260889 5260910 5260894 5260889 -
ttatgttgctgtctagtctagt

SEQ ID NO: 138003 - DNA, 22 bp, Artificial Sequence
  Synthetic oligonucleotide; TTA chr11 5260886 5260907 5260891 5260886 -
tgttgctgtctagtctagtagt

SEQ ID NO: 138004 - DNA, 22 bp, Artificial Sequence
  Synthetic oligonucleotide; TTG chr11 5260881 5260902 5260886 5260881 -
ctgtctagtctagtagtaattg

SEQ ID NO: 138005 - DNA, 22 bp, Artificial Sequence
  Synthetic oligonucleotide; CTG chr11 5260878 5260899 5260883 5260878 -
tctagtctagtagtaattgttt

SEQ ID NO: 138006 - DNA, 22 bp, Artificial Sequence
  Synthetic oligonucleotide; CTA chr11 5260874 5260895 5260879 5260874 -
gtctagtagtaattgttttata

SEQ ID NO: 138007 - DNA, 22 bp, Artificial Sequence
  Synthetic oligonucleotide; CTA chr11 5260869 5260890 5260874 5260869 -
gtagtaattgttttataaattt

SEQ ID NO: 138008 - DNA, 22 bp, Artificial Sequence
  Synthetic oligonucleotide; TTG chr11 5260859 5260880 5260864 5260859 -
ttttataaatttgggatctcca

SEQ ID NO: 138009 - DNA, 22 bp, Artificial Sequence
  Synthetic oligonucleotide; TTT chr11 5260856 5260877 5260861 5260856 -
tataaatttgggatctccagta

SEQ ID NO: 138010 - DNA, 22 bp, Artificial Sequence
  Synthetic oligonucleotide; TTT chr11 5260855 5260876 5260860 5260855 -
ataaatttgggatctccagtat

SEQ ID NO: 138011 - DNA, 22 bp, Artificial Sequence
  Synthetic oligonucleotide; TTA chr11 5260854 5260875 5260859 5260854 -
taaatttgggatctccagtatt

SEQ ID NO: 138012 - DNA, 22 bp, Artificial Sequence
  Synthetic oligonucleotide; TTT chr11 5260847 5260868 5260852 5260847 -
gggatctccagtattagatgca

SEQ ID NO: 138013 - DNA, 22 bp, Artificial Sequence
  Synthetic oligonucleotide; TTG chr11 5260846 5260867 5260851 5260846 -
ggatctccagtattagatgcat

SEQ ID NO: 138014 - DNA, 22 bp, Artificial Sequence
  Synthetic oligonucleotide; CTC chr11 5260839 5260860 5260844 5260839 -
cagtattagatgcatatatatt

SEQ ID NO: 138015 - DNA, 22 bp, Artificial Sequence
  Synthetic oligonucleotide; TTA chr11 5260831 5260852 5260836 5260831 -
gatgcatatatattaagaattg

SEQ ID NO: 138016 - DNA, 22 bp, Artificial Sequence
  Synthetic oligonucleotide; TTA chr11 5260816 5260837 5260821 5260816 -
agaattgtaatattctcccatt

SEQ ID NO: 138017 - DNA, 22 bp, Artificial Sequence
  Synthetic oligonucleotide; TTG chr11 5260809 5260830 5260814 5260809 -
taatattctcccattggacaag

SEQ ID NO: 138018 - DNA, 22 bp, Artificial Sequence
  Synthetic oligonucleotide; TTC chr11 5260801 5260822 5260806 5260801 -
tcccattggacaagggctttta

SEQ ID NO: 138019 - DNA, 22 bp, Artificial Sequence
  Synthetic oligonucleotide; CTC chr11 5260799 5260820 5260804 5260799 -
ccattggacaagggcttttatc

SEQ ID NO: 138020 - DNA, 22 bp, Artificial Sequence
  Synthetic oligonucleotide; TTG chr11 5260793 5260814 5260798 5260793 -
gacaagggcttttatcattata

SEQ ID NO: 138021 - DNA, 22 bp, Artificial Sequence
  Synthetic oligonucleotide; CTT chr11 5260782 5260803 5260787 5260782 -
ttatcattatatgatgtccctc

SEQ ID NO: 138022 - DNA, 22 bp, Artificial Sequence
  Synthetic oligonucleotide; TTT chr11 5260781 5260802 5260786 5260781 -
tatcattatatgatgtccctct

SEQ ID NO: 138023 - DNA, 22 bp, Artificial Sequence
  Synthetic oligonucleotide; TTT chr11 5260780 5260801 5260785 5260780 -
atcattatatgatgtccctctt

SEQ ID NO: 138024 - DNA, 22 bp, Artificial Sequence
  Synthetic oligonucleotide; TTA chr11 5260779 5260800 5260784 5260779 -
tcattatatgatgtccctcttt

SEQ ID NO: 138025 - DNA, 22 bp, Artificial Sequence
  Synthetic oligonucleotide; TTA chr11 5260773 5260794 5260778 5260773 -
tatgatgtccctctttgtcttt

SEQ ID NO: 138026 - DNA, 22 bp, Artificial Sequence
  Synthetic oligonucleotide; CTC chr11 5260760 5260781 5260765 5260760 -
tttgtcttttttaactgctgtt

SEQ ID NO: 138027 - DNA, 22 bp, Artificial Sequence
  Synthetic oligonucleotide; CTT chr11 5260758 5260779 5260763 5260758 -
tgtcttttttaactgctgtttc

SEQ ID NO: 138028 - DNA, 22 bp, Artificial Sequence
  Synthetic oligonucleotide; TTT chr11 5260757 5260778 5260762 5260757 -
gtcttttttaactgctgtttct

SEQ ID NO: 138029 - DNA, 22 bp, Artificial Sequence
  Synthetic oligonucleotide; TTG chr11 5260756 5260777 5260761 5260756 -
tcttttttaactgctgtttctt

SEQ ID NO: 138030 - DNA, 22 bp, Artificial Sequence
  Synthetic oligonucleotide; CTT chr11 5260752 5260773 5260757 5260752 -
ttttaactgctgtttctttaaa

SEQ ID NO: 138031 - DNA, 22 bp, Artificial Sequence
  Synthetic oligonucleotide; TTT chr11 5260751 5260772 5260756 5260751 -
tttaactgctgtttctttaaag

SEQ ID NO: 138032 - DNA, 22 bp, Artificial Sequence
  Synthetic oligonucleotide; TTT chr11 5260750 5260771 5260755 5260750 -
ttaactgctgtttctttaaagt

SEQ ID NO: 138033 - DNA, 22 bp, Artificial Sequence
  Synthetic oligonucleotide; TTT chr11 5260749 5260770 5260754 5260749 -
taactgctgtttctttaaagtt

SEQ ID NO: 138034 - DNA, 22 bp, Artificial Sequence
  Synthetic oligonucleotide; TTT chr11 5260748 5260769 5260753 5260748 -
aactgctgtttctttaaagttt

SEQ ID NO: 138035 - DNA, 22 bp, Artificial Sequence
  Synthetic oligonucleotide; TTA chr11 5260747 5260768 5260752 5260747 -
actgctgtttctttaaagtttg

SEQ ID NO: 138036 - DNA, 22 bp, Artificial Sequence
  Synthetic oligonucleotide; CTG chr11 5260743 5260764 5260748 5260743 -
ctgtttctttaaagtttgtttt

SEQ ID NO: 138037 - DNA, 22 bp, Artificial Sequence
  Synthetic oligonucleotide; CTG chr11 5260740 5260761 5260745 5260740 -
tttctttaaagtttgttttgtc

SEQ ID NO: 138038 - DNA, 22 bp, Artificial Sequence
  Synthetic oligonucleotide; TTT chr11 5260737 5260758 5260742 5260737 -
ctttaaagtttgttttgtctga

SEQ ID NO: 138039 - DNA, 22 bp, Artificial Sequence
  Synthetic oligonucleotide; TTC chr11 5260736 5260757 5260741 5260736 -
tttaaagtttgttttgtctgac

SEQ ID NO: 138040 - DNA, 22 bp, Artificial Sequence
  Synthetic oligonucleotide; CTT chr11 5260734 5260755 5260739 5260734 -
taaagtttgttttgtctgacat

SEQ ID NO: 138041 - DNA, 22 bp, Artificial Sequence
  Synthetic oligonucleotide; TTT chr11 5260733 5260754 5260738 5260733 -
aaagtttgttttgtctgacata

SEQ ID NO: 138042 - DNA, 22 bp, Artificial Sequence
  Synthetic oligonucleotide; TTA chr11 5260732 5260753 5260737 5260732 -
aagtttgttttgtctgacataa

SEQ ID NO: 138043 - DNA, 22 bp, Artificial Sequence
  Synthetic oligonucleotide; TTT chr11 5260726 5260747 5260731 5260726 -
gttttgtctgacataagaatag

SEQ ID NO: 138044 - DNA, 22 bp, Artificial Sequence
  Synthetic oligonucleotide; TTG chr11 5260725 5260746 5260730 5260725 -
ttttgtctgacataagaatagc

SEQ ID NO: 138045 - DNA, 22 bp, Artificial Sequence
  Synthetic oligonucleotide; TTT chr11 5260722 5260743 5260727 5260722 -
tgtctgacataagaatagctgc

SEQ ID NO: 138046 - DNA, 22 bp, Artificial Sequence
  Synthetic oligonucleotide; TTT chr11 5260721 5260742 5260726 5260721 -
gtctgacataagaatagctgct

SEQ ID NO: 138047 - DNA, 22 bp, Artificial Sequence
  Synthetic oligonucleotide; TTG chr11 5260720 5260741 5260725 5260720 -
tctgacataagaatagctgctt

SEQ ID NO: 138048 - DNA, 22 bp, Artificial Sequence
  Synthetic oligonucleotide; CTG chr11 5260716 5260737 5260721 5260716 -
acataagaatagctgctttggc

SEQ ID NO: 138049 - DNA, 22 bp, Artificial Sequence
  Synthetic oligonucleotide; CTG chr11 5260701 5260722 5260706 5260701 -
ctttggctcgcttttggtgtcc

SEQ ID NO: 138050 - DNA, 22 bp, Artificial Sequence
  Synthetic oligonucleotide; CTT chr11 5260698 5260719 5260703 5260698 -
tggctcgcttttggtgtccatt

SEQ ID NO: 138051 - DNA, 22 bp, Artificial Sequence
  Synthetic oligonucleotide; TTT chr11 5260697 5260718 5260702 5260697 -
ggctcgcttttggtgtccattt

SEQ ID NO: 138052 - DNA, 22 bp, Artificial Sequence
  Synthetic oligonucleotide; TTG chr11 5260696 5260717 5260701 5260696 -
gctcgcttttggtgtccatttg

SEQ ID NO: 138053 - DNA, 22 bp, Artificial Sequence
  Synthetic oligonucleotide; CTC chr11 5260692 5260713 5260697 5260692 -
gcttttggtgtccatttgtgtg

SEQ ID NO: 138054 - DNA, 22 bp, Artificial Sequence
  Synthetic oligonucleotide; CTT chr11 5260688 5260709 5260693 5260688 -
ttggtgtccatttgtgtggaat

SEQ ID NO: 138055 - DNA, 22 bp, Artificial Sequence
  Synthetic oligonucleotide; TTT chr11 5260687 5260708 5260692 5260687 -
tggtgtccatttgtgtggaatg

SEQ ID NO: 138056 - DNA, 22 bp, Artificial Sequence
  Synthetic oligonucleotide; TTT chr11 5260686 5260707 5260691 5260686 -
ggtgtccatttgtgtggaatgt

SEQ ID NO: 138057 - DNA, 22 bp, Artificial Sequence
  Synthetic oligonucleotide; TTG chr11 5260685 5260706 5260690 5260685 -
gtgtccatttgtgtggaatgtc

SEQ ID NO: 138058 - DNA, 22 bp, Artificial Sequence
  Synthetic oligonucleotide; TTT chr11 5260675 5260696 5260680 5260675 -
gtgtggaatgtcattttccacc

SEQ ID NO: 138059 - DNA, 22 bp, Artificial Sequence
  Synthetic oligonucleotide; TTG chr11 5260674 5260695 5260679 5260674 -
tgtggaatgtcattttccaccc

SEQ ID NO: 138060 - DNA, 22 bp, Artificial Sequence
  Synthetic oligonucleotide; TTT chr11 5260659 5260680 5260664 5260659 -
tccacccctttaccttaagttt

SEQ ID NO: 138061 - DNA, 22 bp, Artificial Sequence
  Synthetic oligonucleotide; TTT chr11 5260658 5260679 5260663 5260658 -
ccacccctttaccttaagttta

SEQ ID NO: 138062 - DNA, 22 bp, Artificial Sequence
  Synthetic oligonucleotide; TTC chr11 5260657 5260678 5260662 5260657 -
cacccctttaccttaagtttat

SEQ ID NO: 138063 - DNA, 22 bp, Artificial Sequence
  Synthetic oligonucleotide; CTT chr11 5260649 5260670 5260654 5260649 -
taccttaagtttatgtgagtcc

SEQ ID NO: 138064 - DNA, 22 bp, Artificial Sequence
  Synthetic oligonucleotide; TTT chr11 5260648 5260669 5260653 5260648 -
accttaagtttatgtgagtcct

SEQ ID NO: 138065 - DNA, 22 bp, Artificial Sequence
  Synthetic oligonucleotide; TTA chr11 5260647 5260668 5260652 5260647 -
ccttaagtttatgtgagtcctt

SEQ ID NO: 138066 - DNA, 22 bp, Artificial Sequence
  Synthetic oligonucleotide; CTT chr11 5260643 5260664 5260648 5260643 -
aagtttatgtgagtccttatgt

SEQ ID NO: 138067 - DNA, 22 bp, Artificial Sequence
  Synthetic oligonucleotide; TTA chr11 5260642 5260663 5260647 5260642 -
agtttatgtgagtccttatgtg

SEQ ID NO: 138068 - DNA, 22 bp, Artificial Sequence
  Synthetic oligonucleotide; TTT chr11 5260637 5260658 5260642 5260637 -
atgtgagtccttatgtgttagg

SEQ ID NO: 138069 - DNA, 22 bp, Artificial Sequence
  Synthetic oligonucleotide; TTA chr11 5260636 5260657 5260641 5260636 -
tgtgagtccttatgtgttaggt

SEQ ID NO: 138070 - DNA, 22 bp, Artificial Sequence
  Synthetic oligonucleotide; CTT chr11 5260625 5260646 5260630 5260625 -
atgtgttaggtgagtctcctga

SEQ ID NO: 138071 - DNA, 22 bp, Artificial Sequence
  Synthetic oligonucleotide; TTA chr11 5260624 5260645 5260629 5260624 -
tgtgttaggtgagtctcctgaa

SEQ ID NO: 138072 - DNA, 22 bp, Artificial Sequence
  Synthetic oligonucleotide; TTA chr11 5260617 5260638 5260622 5260617 -
ggtgagtctcctgaaggcggca

SEQ ID NO: 138073 - DNA, 22 bp, Artificial Sequence
  Synthetic oligonucleotide; CTC chr11 5260607 5260628 5260612 5260607 -
ctgaaggcggcagataactggt

SEQ ID NO: 138074 - DNA, 22 bp, Artificial Sequence
  Synthetic oligonucleotide; CTG chr11 5260604 5260625 5260609 5260604 -
aaggcggcagataactggttgg

SEQ ID NO: 138075 - DNA, 22 bp, Artificial Sequence
  Synthetic oligonucleotide; CTG chr11 5260587 5260608 5260592 5260587 -
gttggtgaattcttattcattc

SEQ ID NO: 138076 - DNA, 22 bp, Artificial Sequence
  Synthetic oligonucleotide; TTG chr11 5260583 5260604 5260588 5260583 -
gtgaattcttattcattctgca

SEQ ID NO: 138077 - DNA, 22 bp, Artificial Sequence
  Synthetic oligonucleotide; TTC chr11 5260575 5260596 5260580 5260575 -
ttattcattctgcaattctgta

SEQ ID NO: 138078 - DNA, 22 bp, Artificial Sequence
  Synthetic oligonucleotide; CTT chr11 5260573 5260594 5260578 5260573 -
attcattctgcaattctgtatc

SEQ ID NO: 138079 - DNA, 22 bp, Artificial Sequence
  Synthetic oligonucleotide; TTA chr11 5260572 5260593 5260577 5260572 -
ttcattctgcaattctgtatct

SEQ ID NO: 138080 - DNA, 22 bp, Artificial Sequence
  Synthetic oligonucleotide; TTC chr11 5260569 5260590 5260574 5260569 -
attctgcaattctgtatctttt

SEQ ID NO: 138081 - DNA, 22 bp, Artificial Sequence
  Synthetic oligonucleotide; TTC chr11 5260565 5260586 5260570 5260565 -
tgcaattctgtatcttttaagt

SEQ ID NO: 138082 - DNA, 22 bp, Artificial Sequence
  Synthetic oligonucleotide; CTG chr11 5260563 5260584 5260568 5260563 -
caattctgtatcttttaagtgg

SEQ ID NO: 138083 - DNA, 22 bp, Artificial Sequence
  Synthetic oligonucleotide; TTC chr11 5260557 5260578 5260562 5260557 -
tgtatcttttaagtggagcatt

SEQ ID NO: 138084 - DNA, 22 bp, Artificial Sequence
  Synthetic oligonucleotide; CTG chr11 5260555 5260576 5260560 5260555 -
tatcttttaagtggagcattta

SEQ ID NO: 138085 - DNA, 22 bp, Artificial Sequence
  Synthetic oligonucleotide; CTT chr11 5260549 5260570 5260554 5260549 -
ttaagtggagcatttagtccat

SEQ ID NO: 138086 - DNA, 22 bp, Artificial Sequence
  Synthetic oligonucleotide; TTT chr11 5260548 5260569 5260553 5260548 -
taagtggagcatttagtccatt

SEQ ID NO: 138087 - DNA, 22 bp, Artificial Sequence
  Synthetic oligonucleotide; TTT chr11 5260547 5260568 5260552 5260547 -
aagtggagcatttagtccattt

SEQ ID NO: 138088 - DNA, 22 bp, Artificial Sequence
  Synthetic oligonucleotide; TTA chr11 5260546 5260567 5260551 5260546 -
agtggagcatttagtccattta

SEQ ID NO: 138089 - DNA, 22 bp, Artificial Sequence
  Synthetic oligonucleotide; TTT chr11 5260534 5260555 5260539 5260534 -
agtccatttacattcaacatca

SEQ ID NO: 138090 - DNA, 22 bp, Artificial Sequence
  Synthetic oligonucleotide; TTA chr11 5260533 5260554 5260538 5260533 -
gtccatttacattcaacatcag

SEQ ID NO: 138091 - DNA, 22 bp, Artificial Sequence
  Synthetic oligonucleotide; TTT chr11 5260525 5260546 5260530 5260525 -
acattcaacatcagtattgagg

SEQ ID NO: 138092 - DNA, 22 bp, Artificial Sequence
  Synthetic oligonucleotide; TTA chr11 5260524 5260545 5260529 5260524 -
cattcaacatcagtattgaggt

SEQ ID NO: 138093 - DNA, 22 bp, Artificial Sequence
  Synthetic oligonucleotide; TTC chr11 5260519 5260540 5260524 5260519 -
aacatcagtattgaggtgtgag

SEQ ID NO: 138094 - DNA, 22 bp, Artificial Sequence
  Synthetic oligonucleotide; TTG chr11 5260506 5260527 5260511 5260506 -
aggtgtgaggtactattccatt

SEQ ID NO: 138095 - DNA, 22 bp, Artificial Sequence
  Synthetic oligonucleotide; CTA chr11 5260491 5260512 5260496 5260491 -
ttccattcttcgtggtatttgt

SEQ ID NO: 138096 - DNA, 22 bp, Artificial Sequence
  Synthetic oligonucleotide; TTC chr11 5260488 5260509 5260493 5260488 -
cattcttcgtggtatttgttgc

SEQ ID NO: 138097 - DNA, 22 bp, Artificial Sequence
  Synthetic oligonucleotide; TTC chr11 5260483 5260504 5260488 5260483 -
ttcgtggtatttgttgcctgtg

SEQ ID NO: 138098 - DNA, 22 bp, Artificial Sequence
  Synthetic oligonucleotide; CTT chr11 5260481 5260502 5260486 5260481 -
cgtggtatttgttgcctgtgta

SEQ ID NO: 138099 - DNA, 22 bp, Artificial Sequence
  Synthetic oligonucleotide; TTC chr11 5260480 5260501 5260485 5260480 -
gtggtatttgttgcctgtgtat

SEQ ID NO: 138100 - DNA, 22 bp, Artificial Sequence
  Synthetic oligonucleotide; TTT chr11 5260471 5260492 5260476 5260471 -
gttgcctgtgtatctttttatc

SEQ ID NO: 138101 - DNA, 22 bp, Artificial Sequence
  Synthetic oligonucleotide; TTG chr11 5260470 5260491 5260475 5260470 -
ttgcctgtgtatctttttatct

SEQ ID NO: 138102 - DNA, 22 bp, Artificial Sequence
  Synthetic oligonucleotide; TTG chr11 5260467 5260488 5260472 5260467 -
cctgtgtatctttttatctgta

SEQ ID NO: 138103 - DNA, 22 bp, Artificial Sequence
  Synthetic oligonucleotide; CTG chr11 5260463 5260484 5260468 5260463 -
tgtatctttttatctgtatttt

SEQ ID NO: 138104 - DNA, 22 bp, Artificial Sequence
  Synthetic oligonucleotide; CTT chr11 5260455 5260476 5260460 5260455 -
tttatctgtatttttgttgtat

SEQ ID NO: 138105 - DNA, 22 bp, Artificial Sequence
  Synthetic oligonucleotide; TTT chr11 5260454 5260475 5260459 5260454 -
ttatctgtatttttgttgtata

SEQ ID NO: 138106 - DNA, 22 bp, Artificial Sequence
  Synthetic oligonucleotide; TTT chr11 5260453 5260474 5260458 5260453 -
tatctgtatttttgttgtatat

SEQ ID NO: 138107 - DNA, 22 bp, Artificial Sequence
  Synthetic oligonucleotide; TTT chr11 5260452 5260473 5260457 5260452 -
atctgtatttttgttgtatatg

SEQ ID NO: 138108 - DNA, 22 bp, Artificial Sequence
  Synthetic oligonucleotide; TTA chr11 5260451 5260472 5260456 5260451 -
tctgtatttttgttgtatatgt

SEQ ID NO: 138109 - DNA, 22 bp, Artificial Sequence
  Synthetic oligonucleotide; CTG chr11 5260447 5260468 5260452 5260447 -
tatttttgttgtatatgtccta

SEQ ID NO: 138110 - DNA, 22 bp, Artificial Sequence
  Synthetic oligonucleotide; TTT chr11 5260442 5260463 5260447 5260442 -
ttgttgtatatgtcctatggga

SEQ ID NO: 138111 - DNA, 22 bp, Artificial Sequence
  Synthetic oligonucleotide; TTT chr11 5260441 5260462 5260446 5260441 -
tgttgtatatgtcctatgggat

SEQ ID NO: 138112 - DNA, 22 bp, Artificial Sequence
  Synthetic oligonucleotide; TTT chr11 5260440 5260461 5260445 5260440 -
gttgtatatgtcctatgggatt

SEQ ID NO: 138113 - DNA, 22 bp, Artificial Sequence
  Synthetic oligonucleotide; TTG chr11 5260439 5260460 5260444 5260439 -
ttgtatatgtcctatgggattt

SEQ ID NO: 138114 - DNA, 22 bp, Artificial Sequence
  Synthetic oligonucleotide; TTG chr11 5260436 5260457 5260441 5260436 -
tatatgtcctatgggatttatg

SEQ ID NO: 138115 - DNA, 22 bp, Artificial Sequence
  Synthetic oligonucleotide; CTA chr11 5260425 5260446 5260430 5260425 -
tgggatttatgctttaaagagg

SEQ ID NO: 138116 - DNA, 22 bp, Artificial Sequence
  Synthetic oligonucleotide; TTT chr11 5260417 5260438 5260422 5260417 -
atgctttaaagaggttctgttt

SEQ ID NO: 138117 - DNA, 22 bp, Artificial Sequence
  Synthetic oligonucleotide; TTA chr11 5260416 5260437 5260421 5260416 -
tgctttaaagaggttctgtttt

SEQ ID NO: 138118 - DNA, 22 bp, Artificial Sequence
  Synthetic oligonucleotide; CTT chr11 5260411 5260432 5260416 5260411 -
taaagaggttctgttttgatgt

SEQ ID NO: 138119 - DNA, 22 bp, Artificial Sequence
  Synthetic oligonucleotide; TTT chr11 5260410 5260431 5260415 5260410 -
aaagaggttctgttttgatgtg

SEQ ID NO: 138120 - DNA, 22 bp, Artificial Sequence
  Synthetic oligonucleotide; TTA chr11 5260409 5260430 5260414 5260409 -
aagaggttctgttttgatgtgc

SEQ ID NO: 138121 - DNA, 22 bp, Artificial Sequence
  Synthetic oligonucleotide; TTC chr11 5260400 5260421 5260405 5260400 -
tgttttgatgtgcttccagggt

SEQ ID NO: 138122 - DNA, 22 bp, Artificial Sequence
  Synthetic oligonucleotide; CTG chr11 5260398 5260419 5260403 5260398 -
ttttgatgtgcttccagggttt

SEQ ID NO: 138123 - DNA, 22 bp, Artificial Sequence
  Synthetic oligonucleotide; TTT chr11 5260395 5260416 5260400 5260395 -
tgatgtgcttccagggtttatt

SEQ ID NO: 138124 - DNA, 22 bp, Artificial Sequence
  Synthetic oligonucleotide; TTT chr11 5260394 5260415 5260399 5260394 -
gatgtgcttccagggtttattt

SEQ ID NO: 138125 - DNA, 22 bp, Artificial Sequence
  Synthetic oligonucleotide; TTG chr11 5260393 5260414 5260398 5260393 -
atgtgcttccagggtttatttc

SEQ ID NO: 138126 - DNA, 22 bp, Artificial Sequence
  Synthetic oligonucleotide; CTT chr11 5260385 5260406 5260390 5260385 -
ccagggtttatttcaagattta

SEQ ID NO: 138127 - DNA, 22 bp, Artificial Sequence
  Synthetic oligonucleotide; TTC chr11 5260384 5260405 5260389 5260384 -
cagggtttatttcaagatttag

SEQ ID NO: 138128 - DNA, 22 bp, Artificial Sequence
  Synthetic oligonucleotide; TTT chr11 5260376 5260397 5260381 5260376 -
atttcaagatttagagctcctt

SEQ ID NO: 138129 - DNA, 22 bp, Artificial Sequence
  Synthetic oligonucleotide; TTA chr11 5260375 5260396 5260380 5260375 -
tttcaagatttagagctccttt

SEQ ID NO: 138130 - DNA, 22 bp, Artificial Sequence
  Synthetic oligonucleotide; TTT chr11 5260372 5260393 5260377 5260372 -
caagatttagagctccttttat

SEQ ID NO: 138131 - DNA, 22 bp, Artificial Sequence
  Synthetic oligonucleotide; TTC chr11 5260371 5260392 5260376 5260371 -
aagatttagagctccttttatc

SEQ ID NO: 138132 - DNA, 22 bp, Artificial Sequence
  Synthetic oligonucleotide; TTT chr11 5260364 5260385 5260369 5260364 -
agagctccttttatcagttctt

SEQ ID NO: 138133 - DNA, 22 bp, Artificial Sequence
  Synthetic oligonucleotide; TTA chr11 5260363 5260384 5260368 5260363 -
gagctccttttatcagttcttg

SEQ ID NO: 138134 - DNA, 22 bp, Artificial Sequence
  Synthetic oligonucleotide; CTC chr11 5260357 5260378 5260362 5260357 -
cttttatcagttcttgtagtgt

SEQ ID NO: 138135 - DNA, 22 bp, Artificial Sequence
  Synthetic oligonucleotide; CTT chr11 5260354 5260375 5260359 5260354 -
ttatcagttcttgtagtgttgg

SEQ ID NO: 138136 - DNA, 22 bp, Artificial Sequence
  Synthetic oligonucleotide; TTT chr11 5260353 5260374 5260358 5260353 -
tatcagttcttgtagtgttggc

SEQ ID NO: 138137 - DNA, 22 bp, Artificial Sequence
  Synthetic oligonucleotide; TTT chr11 5260352 5260373 5260357 5260352 -
atcagttcttgtagtgttggct

SEQ ID NO: 138138 - DNA, 22 bp, Artificial Sequence
  Synthetic oligonucleotide; TTA chr11 5260351 5260372 5260356 5260351 -
tcagttcttgtagtgttggctt

SEQ ID NO: 138139 - DNA, 22 bp, Artificial Sequence
  Synthetic oligonucleotide; TTC chr11 5260344 5260365 5260349 5260344 -
ttgtagtgttggcttggtagtg

SEQ ID NO: 138140 - DNA, 22 bp, Artificial Sequence
  Synthetic oligonucleotide; CTT chr11 5260342 5260363 5260347 5260342 -
gtagtgttggcttggtagtgcc

SEQ ID NO: 138141 - DNA, 22 bp, Artificial Sequence
  Synthetic oligonucleotide; TTG chr11 5260341 5260362 5260346 5260341 -
tagtgttggcttggtagtgccg

SEQ ID NO: 138142 - DNA, 22 bp, Artificial Sequence
  Synthetic oligonucleotide; TTG chr11 5260333 5260354 5260338 5260333 -
gcttggtagtgccgaattctct

SEQ ID NO: 138143 - DNA, 22 bp, Artificial Sequence
  Synthetic oligonucleotide; CTT chr11 5260329 5260350 5260334 5260329 -
ggtagtgccgaattctctcagc

SEQ ID NO: 138144 - DNA, 22 bp, Artificial Sequence
  Synthetic oligonucleotide; TTG chr11 5260328 5260349 5260333 5260328 -
gtagtgccgaattctctcagca

SEQ ID NO: 138145 - DNA, 22 bp, Artificial Sequence
  Synthetic oligonucleotide; TTC chr11 5260314 5260335 5260319 5260314 -
tctcagcatttgtttttctgaa

SEQ ID NO: 138146 - DNA, 22 bp, Artificial Sequence
  Synthetic oligonucleotide; CTC chr11 5260312 5260333 5260317 5260312 -
tcagcatttgtttttctgaaaa

SEQ ID NO: 138147 - DNA, 22 bp, Artificial Sequence
  Synthetic oligonucleotide; CTC chr11 5260310 5260331 5260315 5260310 -
agcatttgtttttctgaaaaac

SEQ ID NO: 138148 - DNA, 22 bp, Artificial Sequence
  Synthetic oligonucleotide; TTT chr11 5260303 5260324 5260308 5260303 -
gtttttctgaaaaacactgtgt

SEQ ID NO: 138149 - DNA, 22 bp, Artificial Sequence
  Synthetic oligonucleotide; TTG chr11 5260302 5260323 5260307 5260302 -
tttttctgaaaaacactgtgta

SEQ ID NO: 138150 - DNA, 22 bp, Artificial Sequence
  Synthetic oligonucleotide; TTT chr11 5260299 5260320 5260304 5260299 -
ttctgaaaaacactgtgtattt

SEQ ID NO: 138151 - DNA, 22 bp, Artificial Sequence
  Synthetic oligonucleotide; TTT chr11 5260298 5260319 5260303 5260298 -
tctgaaaaacactgtgtatttt

SEQ ID NO: 138152 - DNA, 22 bp, Artificial Sequence
  Synthetic oligonucleotide; TTT chr11 5260297 5260318 5260302 5260297 -
ctgaaaaacactgtgtattttc

SEQ ID NO: 138153 - DNA, 22 bp, Artificial Sequence
  Synthetic oligonucleotide; TTC chr11 5260296 5260317 5260301 5260296 -
tgaaaaacactgtgtattttct

SEQ ID NO: 138154 - DNA, 22 bp, Artificial Sequence
  Synthetic oligonucleotide; CTG chr11 5260294 5260315 5260299 5260294 -
aaaaacactgtgtattttcttc

SEQ ID NO: 138155 - DNA, 22 bp, Artificial Sequence
  Synthetic oligonucleotide; CTG chr11 5260284 5260305 5260289 5260284 -
tgtattttcttcatttgtgaag

SEQ ID NO: 138156 - DNA, 22 bp, Artificial Sequence
  Synthetic oligonucleotide; TTT chr11 5260277 5260298 5260282 5260277 -
tcttcatttgtgaagcttagtt

SEQ ID NO: 138157 - DNA, 22 bp, Artificial Sequence
  Synthetic oligonucleotide; TTT chr11 5260276 5260297 5260281 5260276 -
cttcatttgtgaagcttagttt

SEQ ID NO: 138158 - DNA, 22 bp, Artificial Sequence
  Synthetic oligonucleotide; TTC chr11 5260275 5260296 5260280 5260275 -
ttcatttgtgaagcttagtttc

SEQ ID NO: 138159 - DNA, 22 bp, Artificial Sequence
  Synthetic oligonucleotide; CTT chr11 5260273 5260294 5260278 5260273 -
catttgtgaagcttagtttcac

SEQ ID NO: 138160 - DNA, 22 bp, Artificial Sequence
  Synthetic oligonucleotide; TTC chr11 5260272 5260293 5260277 5260272 -
atttgtgaagcttagtttcact

SEQ ID NO: 138161 - DNA, 22 bp, Artificial Sequence
  Synthetic oligonucleotide; TTT chr11 5260268 5260289 5260273 5260268 -
gtgaagcttagtttcactggat

SEQ ID NO: 138162 - DNA, 22 bp, Artificial Sequence
  Synthetic oligonucleotide; TTG chr11 5260267 5260288 5260272 5260267 -
tgaagcttagtttcactggata

SEQ ID NO: 138163 - DNA, 22 bp, Artificial Sequence
  Synthetic oligonucleotide; CTT chr11 5260259 5260280 5260264 5260259 -
agtttcactggatataaaattc

SEQ ID NO: 138164 - DNA, 22 bp, Artificial Sequence
  Synthetic oligonucleotide; TTA chr11 5260258 5260279 5260263 5260258 -
gtttcactggatataaaattct

SEQ ID NO: 138165 - DNA, 22 bp, Artificial Sequence
  Synthetic oligonucleotide; TTT chr11 5260254 5260275 5260259 5260254 -
cactggatataaaattcttggc

SEQ ID NO: 138166 - DNA, 22 bp, Artificial Sequence
  Synthetic oligonucleotide; TTC chr11 5260253 5260274 5260258 5260253 -
actggatataaaattcttggct

SEQ ID NO: 138167 - DNA, 22 bp, Artificial Sequence
  Synthetic oligonucleotide; CTG chr11 5260249 5260270 5260254 5260249 -
gatataaaattcttggctgata

SEQ ID NO: 138168 - DNA, 22 bp, Artificial Sequence
  Synthetic oligonucleotide; TTC chr11 5260237 5260258 5260242 5260237 -
ttggctgataattgttttgttt

SEQ ID NO: 138169 - DNA, 22 bp, Artificial Sequence
  Synthetic oligonucleotide; CTT chr11 5260235 5260256 5260240 5260235 -
ggctgataattgttttgtttaa

SEQ ID NO: 138170 - DNA, 22 bp, Artificial Sequence
  Synthetic oligonucleotide; TTG chr11 5260234 5260255 5260239 5260234 -
gctgataattgttttgtttaag

SEQ ID NO: 138171 - DNA, 22 bp, Artificial Sequence
  Synthetic oligonucleotide; CTG chr11 5260230 5260251 5260235 5260230 -
ataattgttttgtttaagaagg

SEQ ID NO: 138172 - DNA, 22 bp, Artificial Sequence
  Synthetic oligonucleotide; TTG chr11 5260223 5260244 5260228 5260223 -
ttttgtttaagaaggctgaaga

SEQ ID NO: 138173 - DNA, 22 bp, Artificial Sequence
  Synthetic oligonucleotide; TTT chr11 5260220 5260241 5260225 5260220 -
tgtttaagaaggctgaagatag

SEQ ID NO: 138174 - DNA, 22 bp, Artificial Sequence
  Synthetic oligonucleotide; TTT chr11 5260219 5260240 5260224 5260219 -
gtttaagaaggctgaagatagg

SEQ ID NO: 138175 - DNA, 22 bp, Artificial Sequence
  Synthetic oligonucleotide; TTG chr11 5260218 5260239 5260223 5260218 -
tttaagaaggctgaagataggg

SEQ ID NO: 138176 - DNA, 22 bp, Artificial Sequence
  Synthetic oligonucleotide; TTT chr11 5260215 5260236 5260220 5260215 -
aagaaggctgaagatagggcca

SEQ ID NO: 138177 - DNA, 22 bp, Artificial Sequence
  Synthetic oligonucleotide; TTA chr11 5260214 5260235 5260219 5260214 -
agaaggctgaagatagggccat

SEQ ID NO: 138178 - DNA, 22 bp, Artificial Sequence
  Synthetic oligonucleotide; CTG chr11 5260205 5260226 5260210 5260205 -
aagatagggccatattcacttc

SEQ ID NO: 138179 - DNA, 22 bp, Artificial Sequence
  Synthetic oligonucleotide; TTC chr11 5260188 5260209 5260193 5260188 -
acttctagcttttacggtttct

SEQ ID NO: 138180 - DNA, 22 bp, Artificial Sequence
  Synthetic oligonucleotide; CTT chr11 5260184 5260205 5260189 5260184 -
ctagcttttacggtttctgctg

SEQ ID NO: 138181 - DNA, 22 bp, Artificial Sequence
  Synthetic oligonucleotide; TTC chr11 5260183 5260204 5260188 5260183 -
tagcttttacggtttctgctga

SEQ ID NO: 138182 - DNA, 22 bp, Artificial Sequence
  Synthetic oligonucleotide; CTA chr11 5260181 5260202 5260186 5260181 -
gcttttacggtttctgctgaga

SEQ ID NO: 138183 - DNA, 22 bp, Artificial Sequence
  Synthetic oligonucleotide; CTT chr11 5260177 5260198 5260182 5260177 -
ttacggtttctgctgagaaatc

SEQ ID NO: 138184 - DNA, 22 bp, Artificial Sequence
  Synthetic oligonucleotide; TTT chr11 5260176 5260197 5260181 5260176 -
tacggtttctgctgagaaatct

SEQ ID NO: 138185 - DNA, 22 bp, Artificial Sequence
  Synthetic oligonucleotide; TTT chr11 5260175 5260196 5260180 5260175 -
acggtttctgctgagaaatctg

SEQ ID NO: 138186 - DNA, 22 bp, Artificial Sequence
  Synthetic oligonucleotide; TTA chr11 5260174 5260195 5260179 5260174 -
cggtttctgctgagaaatctgc

SEQ ID NO: 138187 - DNA, 22 bp, Artificial Sequence
  Synthetic oligonucleotide; TTT chr11 5260168 5260189 5260173 5260168 -
ctgctgagaaatctgctgttaa

SEQ ID NO: 138188 - DNA, 22 bp, Artificial Sequence
  Synthetic oligonucleotide; TTC chr11 5260167 5260188 5260172 5260167 -
tgctgagaaatctgctgttaat

SEQ ID NO: 138189 - DNA, 22 bp, Artificial Sequence
  Synthetic oligonucleotide; CTG chr11 5260165 5260186 5260170 5260165 -
ctgagaaatctgctgttaatct

SEQ ID NO: 138190 - DNA, 22 bp, Artificial Sequence
  Synthetic oligonucleotide; CTG chr11 5260162 5260183 5260167 5260162 -
agaaatctgctgttaatctgat

SEQ ID NO: 138191 - DNA, 22 bp, Artificial Sequence
  Synthetic oligonucleotide; CTG chr11 5260153 5260174 5260158 5260153 -
ctgttaatctgataggttttct

SEQ ID NO: 138192 - DNA, 22 bp, Artificial Sequence
  Synthetic oligonucleotide; CTG chr11 5260150 5260171 5260155 5260150 -
ttaatctgataggttttctttc

SEQ ID NO: 138193 - DNA, 22 bp, Artificial Sequence
  Synthetic oligonucleotide; TTA chr11 5260147 5260168 5260152 5260147 -
atctgataggttttctttcata

SEQ ID NO: 138194 - DNA, 22 bp, Artificial Sequence
  Synthetic oligonucleotide; CTG chr11 5260142 5260163 5260147 5260142 -
ataggttttctttcataggtta

SEQ ID NO: 138195 - DNA, 22 bp, Artificial Sequence
  Synthetic oligonucleotide; TTT chr11 5260134 5260155 5260139 5260134 -
tctttcataggttacctggtag

SEQ ID NO: 138196 - DNA, 22 bp, Artificial Sequence
  Synthetic oligonucleotide; TTT chr11 5260133 5260154 5260138 5260133 -
ctttcataggttacctggtagt

SEQ ID NO: 138197 - DNA, 22 bp, Artificial Sequence
  Synthetic oligonucleotide; TTC chr11 5260132 5260153 5260137 5260132 -
tttcataggttacctggtagtt

SEQ ID NO: 138198 - DNA, 22 bp, Artificial Sequence
  Synthetic oligonucleotide; CTT chr11 5260130 5260151 5260135 5260130 -
tcataggttacctggtagtttc

SEQ ID NO: 138199 - DNA, 22 bp, Artificial Sequence
  Synthetic oligonucleotide; TTT chr11 5260129 5260150 5260134 5260129 -
cataggttacctggtagtttca

SEQ ID NO: 138200 - DNA, 22 bp, Artificial Sequence
  Synthetic oligonucleotide; TTC chr11 5260128 5260149 5260133 5260128 -
ataggttacctggtagtttcac

SEQ ID NO: 138201 - DNA, 22 bp, Artificial Sequence
  Synthetic oligonucleotide; TTA chr11 5260120 5260141 5260125 5260120 -
cctggtagtttcacctcacagc

SEQ ID NO: 138202 - DNA, 22 bp, Artificial Sequence
  Synthetic oligonucleotide; CTG chr11 5260116 5260137 5260121 5260116 -
gtagtttcacctcacagctctt

SEQ ID NO: 138203 - DNA, 22 bp, Artificial Sequence
  Synthetic oligonucleotide; TTT chr11 5260109 5260130 5260114 5260109 -
cacctcacagctcttaagattc

SEQ ID NO: 138204 - DNA, 22 bp, Artificial Sequence
  Synthetic oligonucleotide; TTC chr11 5260108 5260129 5260113 5260108 -
acctcacagctcttaagattct

SEQ ID NO: 138205 - DNA, 22 bp, Artificial Sequence
  Synthetic oligonucleotide; CTC chr11 5260103 5260124 5260108 5260103 -
acagctcttaagattctctttg

SEQ ID NO: 138206 - DNA, 22 bp, Artificial Sequence
  Synthetic oligonucleotide; CTC chr11 5260096 5260117 5260101 5260096 -
ttaagattctctttgtctttag

SEQ ID NO: 138207 - DNA, 22 bp, Artificial Sequence
  Synthetic oligonucleotide; CTT chr11 5260094 5260115 5260099 5260094 -
aagattctctttgtctttagat

SEQ ID NO: 138208 - DNA, 22 bp, Artificial Sequence
  Synthetic oligonucleotide; TTA chr11 5260093 5260114 5260098 5260093 -
agattctctttgtctttagata

SEQ ID NO: 138209 - DNA, 22 bp, Artificial Sequence
  Synthetic oligonucleotide; TTC chr11 5260087 5260108 5260092 5260087 -
tctttgtctttagataactttg

SEQ ID NO: 138210 - DNA, 22 bp, Artificial Sequence
  Synthetic oligonucleotide; CTC chr11 5260085 5260106 5260090 5260085 -
tttgtctttagataactttgga

SEQ ID NO: 138211 - DNA, 22 bp, Artificial Sequence
  Synthetic oligonucleotide; CTT chr11 5260083 5260104 5260088 5260083 -
tgtctttagataactttggata

SEQ ID NO: 138212 - DNA, 22 bp, Artificial Sequence
  Synthetic oligonucleotide; TTT chr11 5260082 5260103 5260087 5260082 -
gtctttagataactttggatac

SEQ ID NO: 138213 - DNA, 22 bp, Artificial Sequence
  Synthetic oligonucleotide; TTG chr11 5260081 5260102 5260086 5260081 -
tctttagataactttggatact

SEQ ID NO: 138214 - DNA, 22 bp, Artificial Sequence
  Synthetic oligonucleotide; CTT chr11 5260077 5260098 5260082 5260077 -
tagataactttggatactctga

SEQ ID NO: 138215 - DNA, 22 bp, Artificial Sequence
  Synthetic oligonucleotide; TTT chr11 5260076 5260097 5260081 5260076 -
agataactttggatactctgat

SEQ ID NO: 138216 - DNA, 22 bp, Artificial Sequence
  Synthetic oligonucleotide; TTA chr11 5260075 5260096 5260080 5260075 -
gataactttggatactctgatg

SEQ ID NO: 138217 - DNA, 22 bp, Artificial Sequence
  Synthetic oligonucleotide; CTT chr11 5260067 5260088 5260072 5260067 -
tggatactctgatgacaatgta

SEQ ID NO: 138218 - DNA, 22 bp, Artificial Sequence
  Synthetic oligonucleotide; TTT chr11 5260066 5260087 5260071 5260066 -
ggatactctgatgacaatgtac

SEQ ID NO: 138219 - DNA, 22 bp, Artificial Sequence
  Synthetic oligonucleotide; TTG chr11 5260065 5260086 5260070 5260065 -
gatactctgatgacaatgtacc

SEQ ID NO: 138220 - DNA, 22 bp, Artificial Sequence
  Synthetic oligonucleotide; CTC chr11 5260058 5260079 5260063 5260058 -
tgatgacaatgtacctaggcaa

SEQ ID NO: 138221 - DNA, 22 bp, Artificial Sequence
  Synthetic oligonucleotide; CTG chr11 5260056 5260077 5260061 5260056 -
atgacaatgtacctaggcaatg

SEQ ID NO: 138222 - DNA, 22 bp, Artificial Sequence
  Synthetic oligonucleotide; CTA chr11 5260041 5260062 5260046 5260041 -
ggcaatgatatttttgcaatga

SEQ ID NO: 138223 - DNA, 22 bp, Artificial Sequence
  Synthetic oligonucleotide; TTT chr11 5260028 5260049 5260033 5260028 -
ttgcaatgaatttcccaggtgt

SEQ ID NO: 138224 - DNA, 22 bp, Artificial Sequence
  Synthetic oligonucleotide; TTT chr11 5260027 5260048 5260032 5260027 -
tgcaatgaatttcccaggtgtt

SEQ ID NO: 138225 - DNA, 22 bp, Artificial Sequence
  Synthetic oligonucleotide; TTT chr11 5260026 5260047 5260031 5260026 -
gcaatgaatttcccaggtgttt

SEQ ID NO: 138226 - DNA, 22 bp, Artificial Sequence
  Synthetic oligonucleotide; TTG chr11 5260025 5260046 5260030 5260025 -
caatgaatttcccaggtgttta

SEQ ID NO: 138227 - DNA, 22 bp, Artificial Sequence
  Synthetic oligonucleotide; TTT chr11 5260015 5260036 5260020 5260015 -
cccaggtgtttattgagcttct

SEQ ID NO: 138228 - DNA, 22 bp, Artificial Sequence
  Synthetic oligonucleotide; TTC chr11 5260014 5260035 5260019 5260014 -
ccaggtgtttattgagcttctt

SEQ ID NO: 138229 - DNA, 22 bp, Artificial Sequence
  Synthetic oligonucleotide; TTT chr11 5260004 5260025 5260009 5260004 -
attgagcttcttgtatttggat

SEQ ID NO: 138230 - DNA, 22 bp, Artificial Sequence
  Synthetic oligonucleotide; TTA chr11 5260003 5260024 5260008 5260003 -
ttgagcttcttgtatttggata

SEQ ID NO: 138231 - DNA, 22 bp, Artificial Sequence
  Synthetic oligonucleotide; TTG chr11 5260000 5260021 5260005 5260000 -
agcttcttgtatttggatatct

SEQ ID NO: 138232 - DNA, 22 bp, Artificial Sequence
  Synthetic oligonucleotide; CTT chr11 5259995 5260016 5260000 5259995 -
cttgtatttggatatctaggtc

SEQ ID NO: 138233 - DNA, 22 bp, Artificial Sequence
  Synthetic oligonucleotide; TTC chr11 5259994 5260015 5259999 5259994 -
ttgtatttggatatctaggtct

SEQ ID NO: 138234 - DNA, 22 bp, Artificial Sequence
  Synthetic oligonucleotide; CTT chr11 5259992 5260013 5259997 5259992 -
gtatttggatatctaggtctct

SEQ ID NO: 138235 - DNA, 22 bp, Artificial Sequence
  Synthetic oligonucleotide; TTG chr11 5259991 5260012 5259996 5259991 -
tatttggatatctaggtctcta

SEQ ID NO: 138236 - DNA, 22 bp, Artificial Sequence
  Synthetic oligonucleotide; TTT chr11 5259986 5260007 5259991 5259986 -
ggatatctaggtctctagcaag

SEQ ID NO: 138237 - DNA, 22 bp, Artificial Sequence
  Synthetic oligonucleotide; TTG chr11 5259985 5260006 5259990 5259985 -
gatatctaggtctctagcaagg

SEQ ID NO: 138238 - DNA, 22 bp, Artificial Sequence
  Synthetic oligonucleotide; CTA chr11 5259977 5259998 5259982 5259977 -
ggtctctagcaaggtgggggaa

SEQ ID NO: 138239 - DNA, 22 bp, Artificial Sequence
  Synthetic oligonucleotide; CTC chr11 5259971 5259992 5259976 5259971 -
tagcaaggtgggggaagttttc

SEQ ID NO: 138240 - DNA, 22 bp, Artificial Sequence
  Synthetic oligonucleotide; CTA chr11 5259969 5259990 5259974 5259969 -
gcaaggtgggggaagttttcct

SEQ ID NO: 138241 - DNA, 22 bp, Artificial Sequence
  Synthetic oligonucleotide; TTT chr11 5259951 5259972 5259956 5259951 -
tccttgattatttccctggata

SEQ ID NO: 138242 - DNA, 22 bp, Artificial Sequence
  Synthetic oligonucleotide; TTT chr11 5259950 5259971 5259955 5259950 -
ccttgattatttccctggataa

SEQ ID NO: 138243 - DNA, 22 bp, Artificial Sequence
  Synthetic oligonucleotide; TTC chr11 5259949 5259970 5259954 5259949 -
cttgattatttccctggataag

SEQ ID NO: 138244 - DNA, 22 bp, Artificial Sequence
  Synthetic oligonucleotide; CTT chr11 5259946 5259967 5259951 5259946 -
gattatttccctggataagttt

SEQ ID NO: 138245 - DNA, 22 bp, Artificial Sequence
  Synthetic oligonucleotide; TTG chr11 5259945 5259966 5259950 5259945 -
attatttccctggataagtttt

SEQ ID NO: 138246 - DNA, 22 bp, Artificial Sequence
  Synthetic oligonucleotide; TTA chr11 5259941 5259962 5259946 5259941 -
tttccctggataagttttccaa

SEQ ID NO: 138247 - DNA, 22 bp, Artificial Sequence
  Synthetic oligonucleotide; TTT chr11 5259938 5259959 5259943 5259938 -
ccctggataagttttccaaact

SEQ ID NO: 138248 - DNA, 22 bp, Artificial Sequence
  Synthetic oligonucleotide; TTC chr11 5259937 5259958 5259942 5259937 -
cctggataagttttccaaactt

SEQ ID NO: 138249 - DNA, 22 bp, Artificial Sequence
  Synthetic oligonucleotide; CTG chr11 5259933 5259954 5259938 5259933 -
gataagttttccaaacttttag

SEQ ID NO: 138250 - DNA, 22 bp, Artificial Sequence
  Synthetic oligonucleotide; TTT chr11 5259924 5259945 5259929 5259924 -
tccaaacttttagatttctctt

SEQ ID NO: 138251 - DNA, 22 bp, Artificial Sequence
  Synthetic oligonucleotide; TTT chr11 5259923 5259944 5259928 5259923 -
ccaaacttttagatttctcttc

SEQ ID NO: 138252 - DNA, 22 bp, Artificial Sequence
  Synthetic oligonucleotide; TTC chr11 5259922 5259943 5259927 5259922 -
caaacttttagatttctcttct

SEQ ID NO: 138253 - DNA, 22 bp, Artificial Sequence
  Synthetic oligonucleotide; CTT chr11 5259915 5259936 5259920 5259915 -
ttagatttctcttctttctcag

SEQ ID NO: 138254 - DNA, 22 bp, Artificial Sequence
  Synthetic oligonucleotide; TTT chr11 5259914 5259935 5259919 5259914 -
tagatttctcttctttctcagg

SEQ ID NO: 138255 - DNA, 22 bp, Artificial Sequence
  Synthetic oligonucleotide; TTT chr11 5259913 5259934 5259918 5259913 -
agatttctcttctttctcagga

SEQ ID NO: 138256 - DNA, 22 bp, Artificial Sequence
  Synthetic oligonucleotide; TTA chr11 5259912 5259933 5259917 5259912 -
gatttctcttctttctcaggaa

SEQ ID NO: 138257 - DNA, 22 bp, Artificial Sequence
  Synthetic oligonucleotide; TTT chr11 5259907 5259928 5259912 5259907 -
ctcttctttctcaggaatgctg

SEQ ID NO: 138258 - DNA, 22 bp, Artificial Sequence
  Synthetic oligonucleotide; TTC chr11 5259906 5259927 5259911 5259906 -
tcttctttctcaggaatgctga

SEQ ID NO: 138259 - DNA, 22 bp, Artificial Sequence
  Synthetic oligonucleotide; CTC chr11 5259904 5259925 5259909 5259904 -
ttctttctcaggaatgctgatt

SEQ ID NO: 138260 - DNA, 22 bp, Artificial Sequence
  Synthetic oligonucleotide; CTT chr11 5259902 5259923 5259907 5259902 -
ctttctcaggaatgctgattat

SEQ ID NO: 138261 - DNA, 22 bp, Artificial Sequence
  Synthetic oligonucleotide; TTC chr11 5259901 5259922 5259906 5259901 -
tttctcaggaatgctgattatt

SEQ ID NO: 138262 - DNA, 22 bp, Artificial Sequence
  Synthetic oligonucleotide; CTT chr11 5259899 5259920 5259904 5259899 -
tctcaggaatgctgattattct

SEQ ID NO: 138263 - DNA, 22 bp, Artificial Sequence
  Synthetic oligonucleotide; TTT chr11 5259898 5259919 5259903 5259898 -
ctcaggaatgctgattattctt

SEQ ID NO: 138264 - DNA, 22 bp, Artificial Sequence
  Synthetic oligonucleotide; TTC chr11 5259897 5259918 5259902 5259897 -
tcaggaatgctgattattctta

SEQ ID NO: 138265 - DNA, 22 bp, Artificial Sequence
  Synthetic oligonucleotide; CTC chr11 5259895 5259916 5259900 5259895 -
aggaatgctgattattcttagg

SEQ ID NO: 138266 - DNA, 22 bp, Artificial Sequence
  Synthetic oligonucleotide; CTG chr11 5259885 5259906 5259890 5259885 -
attattcttaggtttgattgtt

SEQ ID NO: 138267 - DNA, 22 bp, Artificial Sequence
  Synthetic oligonucleotide; TTA chr11 5259881 5259902 5259886 5259881 -
ttcttaggtttgattgtttaac

SEQ ID NO: 138268 - DNA, 22 bp, Artificial Sequence
  Synthetic oligonucleotide; TTC chr11 5259878 5259899 5259883 5259878 -
ttaggtttgattgtttaacata

SEQ ID NO: 138269 - DNA, 22 bp, Artificial Sequence
  Synthetic oligonucleotide; CTT chr11 5259876 5259897 5259881 5259876 -
aggtttgattgtttaacataat

SEQ ID NO: 138270 - DNA, 22 bp, Artificial Sequence
  Synthetic oligonucleotide; TTA chr11 5259875 5259896 5259880 5259875 -
ggtttgattgtttaacataatc

SEQ ID NO: 138271 - DNA, 22 bp, Artificial Sequence
  Synthetic oligonucleotide; TTT chr11 5259870 5259891 5259875 5259870 -
gattgtttaacataatcccaga

SEQ ID NO: 138272 - DNA, 22 bp, Artificial Sequence
  Synthetic oligonucleotide; TTG chr11 5259869 5259890 5259874 5259869 -
attgtttaacataatcccagat

SEQ ID NO: 138273 - DNA, 22 bp, Artificial Sequence
  Synthetic oligonucleotide; TTG chr11 5259865 5259886 5259870 5259865 -
tttaacataatcccagatttct

SEQ ID NO: 138274 - DNA, 22 bp, Artificial Sequence
  Synthetic oligonucleotide; TTT chr11 5259862 5259883 5259867 5259862 -
aacataatcccagatttcttgg

SEQ ID NO: 138275 - DNA, 22 bp, Artificial Sequence
  Synthetic oligonucleotide; TTA chr11 5259861 5259882 5259866 5259861 -
acataatcccagatttcttgga

SEQ ID NO: 138276 - DNA, 22 bp, Artificial Sequence
  Synthetic oligonucleotide; TTT chr11 5259845 5259866 5259850 5259845 -
cttggaggctttgttcatattt

SEQ ID NO: 138277 - DNA, 22 bp, Artificial Sequence
  Synthetic oligonucleotide; TTC chr11 5259844 5259865 5259849 5259844 -
ttggaggctttgttcatatttt

SEQ ID NO: 138278 - DNA, 22 bp, Artificial Sequence
  Synthetic oligonucleotide; CTT chr11 5259842 5259863 5259847 5259842 -
ggaggctttgttcatattttct

SEQ ID NO: 138279 - DNA, 22 bp, Artificial Sequence
  Synthetic oligonucleotide; TTG chr11 5259841 5259862 5259846 5259841 -
gaggctttgttcatattttctt

SEQ ID NO: 138280 - DNA, 22 bp, Artificial Sequence
  Synthetic oligonucleotide; CTT chr11 5259834 5259855 5259839 5259834 -
tgttcatattttcttattcttt

SEQ ID NO: 138281 - DNA, 22 bp, Artificial Sequence
  Synthetic oligonucleotide; TTT chr11 5259833 5259854 5259838 5259833 -
gttcatattttcttattctttt

SEQ ID NO: 138282 - DNA, 22 bp, Artificial Sequence
  Synthetic oligonucleotide; TTG chr11 5259832 5259853 5259837 5259832 -
ttcatattttcttattcttttt

SEQ ID NO: 138283 - DNA, 22 bp, Artificial Sequence
  Synthetic oligonucleotide; TTC chr11 5259829 5259850 5259834 5259829 -
atattttcttattcttttttct

SEQ ID NO: 138284 - DNA, 22 bp, Artificial Sequence
  Synthetic oligonucleotide; TTT chr11 5259823 5259844 5259828 5259823 -
tcttattcttttttctttgtct

SEQ ID NO: 138285 - DNA, 22 bp, Artificial Sequence
  Synthetic oligonucleotide; TTT chr11 5259822 5259843 5259827 5259822 -
cttattcttttttctttgtctt

SEQ ID NO: 138286 - DNA, 22 bp, Artificial Sequence
  Synthetic oligonucleotide; TTC chr11 5259821 5259842 5259826 5259821 -
ttattcttttttctttgtcttt

SEQ ID NO: 138287 - DNA, 22 bp, Artificial Sequence
  Synthetic oligonucleotide; CTT chr11 5259819 5259840 5259824 5259819 -
attcttttttctttgtctttgt

SEQ ID NO: 138288 - DNA, 22 bp, Artificial Sequence
  Synthetic oligonucleotide; TTA chr11 5259818 5259839 5259823 5259818 -
ttcttttttctttgtctttgtt

SEQ ID NO: 138289 - DNA, 22 bp, Artificial Sequence
  Synthetic oligonucleotide; TTC chr11 5259815 5259836 5259820 5259815 -
ttttttctttgtctttgttgga

SEQ ID NO: 138290 - DNA, 22 bp, Artificial Sequence
  Synthetic oligonucleotide; CTT chr11 5259813 5259834 5259818 5259813 -
ttttctttgtctttgttggatt

SEQ ID NO: 138291 - DNA, 22 bp, Artificial Sequence
  Synthetic oligonucleotide; TTT chr11 5259812 5259833 5259817 5259812 -
tttctttgtctttgttggattg

SEQ ID NO: 138292 - DNA, 22 bp, Artificial Sequence
  Synthetic oligonucleotide; TTT chr11 5259811 5259832 5259816 5259811 -
ttctttgtctttgttggattgg

SEQ ID NO: 138293 - DNA, 22 bp, Artificial Sequence
  Synthetic oligonucleotide; TTT chr11 5259810 5259831 5259815 5259810 -
tctttgtctttgttggattggg

SEQ ID NO: 138294 - DNA, 22 bp, Artificial Sequence
  Synthetic oligonucleotide; TTT chr11 5259809 5259830 5259814 5259809 -
ctttgtctttgttggattgggt

SEQ ID NO: 138295 - DNA, 22 bp, Artificial Sequence
  Synthetic oligonucleotide; TTC chr11 5259808 5259829 5259813 5259808 -
tttgtctttgttggattgggtt

SEQ ID NO: 138296 - DNA, 22 bp, Artificial Sequence
  Synthetic oligonucleotide; CTT chr11 5259806 5259827 5259811 5259806 -
tgtctttgttggattgggttaa

SEQ ID NO: 138297 - DNA, 22 bp, Artificial Sequence
  Synthetic oligonucleotide; TTT chr11 5259805 5259826 5259810 5259805 -
gtctttgttggattgggttaat

SEQ ID NO: 138298 - DNA, 22 bp, Artificial Sequence
  Synthetic oligonucleotide; TTG chr11 5259804 5259825 5259809 5259804 -
tctttgttggattgggttaatt

SEQ ID NO: 138299 - DNA, 22 bp, Artificial Sequence
  Synthetic oligonucleotide; CTT chr11 5259800 5259821 5259805 5259800 -
tgttggattgggttaattcaaa

SEQ ID NO: 138300 - DNA, 22 bp, Artificial Sequence
  Synthetic oligonucleotide; TTT chr11 5259799 5259820 5259804 5259799 -
gttggattgggttaattcaaaa

SEQ ID NO: 138301 - DNA, 22 bp, Artificial Sequence
  Synthetic oligonucleotide; TTG chr11 5259798 5259819 5259803 5259798 -
ttggattgggttaattcaaaaa

SEQ ID NO: 138302 - DNA, 22 bp, Artificial Sequence
  Synthetic oligonucleotide; TTG chr11 5259795 5259816 5259800 5259795 -
gattgggttaattcaaaaactt

SEQ ID NO: 138303 - DNA, 22 bp, Artificial Sequence
  Synthetic oligonucleotide; TTG chr11 5259790 5259811 5259795 5259790 -
ggttaattcaaaaactttgtct

SEQ ID NO: 138304 - DNA, 22 bp, Artificial Sequence
  Synthetic oligonucleotide; TTA chr11 5259785 5259806 5259790 5259785 -
attcaaaaactttgtcttcaag

SEQ ID NO: 138305 - DNA, 22 bp, Artificial Sequence
  Synthetic oligonucleotide; TTC chr11 5259781 5259802 5259786 5259781 -
aaaaactttgtcttcaagctct

SEQ ID NO: 138306 - DNA, 22 bp, Artificial Sequence
  Synthetic oligonucleotide; CTT chr11 5259773 5259794 5259778 5259773 -
tgtcttcaagctctgaatttct

SEQ ID NO: 138307 - DNA, 22 bp, Artificial Sequence
  Synthetic oligonucleotide; TTT chr11 5259772 5259793 5259777 5259772 -
gtcttcaagctctgaatttctt

SEQ ID NO: 138308 - DNA, 22 bp, Artificial Sequence
  Synthetic oligonucleotide; TTG chr11 5259771 5259792 5259776 5259771 -
tcttcaagctctgaatttcttc

SEQ ID NO: 138309 - DNA, 22 bp, Artificial Sequence
  Synthetic oligonucleotide; CTT chr11 5259767 5259788 5259772 5259767 -
caagctctgaatttcttctgct

SEQ ID NO: 138310 - DNA, 22 bp, Artificial Sequence
  Synthetic oligonucleotide; TTC chr11 5259766 5259787 5259771 5259766 -
aagctctgaatttcttctgctt

SEQ ID NO: 138311 - DNA, 22 bp, Artificial Sequence
  Synthetic oligonucleotide; CTC chr11 5259760 5259781 5259765 5259760 -
tgaatttcttctgcttggattc

SEQ ID NO: 138312 - DNA, 22 bp, Artificial Sequence
  Synthetic oligonucleotide; CTG chr11 5259758 5259779 5259763 5259758 -
aatttcttctgcttggattcta

SEQ ID NO: 138313 - DNA, 22 bp, Artificial Sequence
  Synthetic oligonucleotide; TTT chr11 5259753 5259774 5259758 5259753 -
cttctgcttggattctattgct

SEQ ID NO: 138314 - DNA, 22 bp, Artificial Sequence
  Synthetic oligonucleotide; TTC chr11 5259752 5259773 5259757 5259752 -
ttctgcttggattctattgctg

SEQ ID NO: 138315 - DNA, 22 bp, Artificial Sequence
  Synthetic oligonucleotide; CTT chr11 5259750 5259771 5259755 5259750 -
ctgcttggattctattgctgag

SEQ ID NO: 138316 - DNA, 22 bp, Artificial Sequence
  Synthetic oligonucleotide; TTC chr11 5259749 5259770 5259754 5259749 -
tgcttggattctattgctgaga

SEQ ID NO: 138317 - DNA, 22 bp, Artificial Sequence
  Synthetic oligonucleotide; CTG chr11 5259747 5259768 5259752 5259747 -
cttggattctattgctgagact

SEQ ID NO: 138318 - DNA, 22 bp, Artificial Sequence
  Synthetic oligonucleotide; CTT chr11 5259744 5259765 5259749 5259744 -
ggattctattgctgagactttc

SEQ ID NO: 138319 - DNA, 22 bp, Artificial Sequence
  Synthetic oligonucleotide; TTG chr11 5259743 5259764 5259748 5259743 -
gattctattgctgagactttct

SEQ ID NO: 138320 - DNA, 22 bp, Artificial Sequence
  Synthetic oligonucleotide; TTC chr11 5259738 5259759 5259743 5259738 -
tattgctgagactttctagagc

SEQ ID NO: 138321 - DNA, 22 bp, Artificial Sequence
  Synthetic oligonucleotide; CTA chr11 5259736 5259757 5259741 5259736 -
ttgctgagactttctagagcat

SEQ ID NO: 138322 - DNA, 22 bp, Artificial Sequence
  Synthetic oligonucleotide; TTG chr11 5259733 5259754 5259738 5259733 -
ctgagactttctagagcatttt

SEQ ID NO: 138323 - DNA, 22 bp, Artificial Sequence
  Synthetic oligonucleotide; CTG chr11 5259730 5259751 5259735 5259730 -
agactttctagagcattttgca

SEQ ID NO: 138324 - DNA, 22 bp, Artificial Sequence
  Synthetic oligonucleotide; CTT chr11 5259724 5259745 5259729 5259724 -
tctagagcattttgcatttcta

SEQ ID NO: 138325 - DNA, 22 bp, Artificial Sequence
  Synthetic oligonucleotide; TTT chr11 5259723 5259744 5259728 5259723 -
ctagagcattttgcatttctat

SEQ ID NO: 138326 - DNA, 22 bp, Artificial Sequence
  Synthetic oligonucleotide; TTC chr11 5259722 5259743 5259727 5259722 -
tagagcattttgcatttctata

SEQ ID NO: 138327 - DNA, 22 bp, Artificial Sequence
  Synthetic oligonucleotide; CTA chr11 5259720 5259741 5259725 5259720 -
gagcattttgcatttctataag

SEQ ID NO: 138328 - DNA, 22 bp, Artificial Sequence
  Synthetic oligonucleotide; TTT chr11 5259712 5259733 5259717 5259712 -
tgcatttctataagtgcatcca

SEQ ID NO: 138329 - DNA, 22 bp, Artificial Sequence
  Synthetic oligonucleotide; TTT chr11 5259711 5259732 5259716 5259711 -
gcatttctataagtgcatccat

SEQ ID NO: 138330 - DNA, 22 bp, Artificial Sequence
  Synthetic oligonucleotide; TTG chr11 5259710 5259731 5259715 5259710 -
catttctataagtgcatccatt

SEQ ID NO: 138331 - DNA, 22 bp, Artificial Sequence
  Synthetic oligonucleotide; TTT chr11 5259705 5259726 5259710 5259705 -
ctataagtgcatccattcatcc

SEQ ID NO: 138332 - DNA, 22 bp, Artificial Sequence
  Synthetic oligonucleotide; TTC chr11 5259704 5259725 5259709 5259704 -
tataagtgcatccattcatcca

SEQ ID NO: 138333 - DNA, 22 bp, Artificial Sequence
  Synthetic oligonucleotide; CTA chr11 5259702 5259723 5259707 5259702 -
taagtgcatccattcatccatt

SEQ ID NO: 138334 - DNA, 22 bp, Artificial Sequence
  Synthetic oligonucleotide; TTC chr11 5259687 5259708 5259692 5259687 -
atccattgtttcctgaagtttt

SEQ ID NO: 138335 - DNA, 22 bp, Artificial Sequence
  Synthetic oligonucleotide; TTG chr11 5259679 5259700 5259684 5259679 -
tttcctgaagttttgaatgttt

SEQ ID NO: 138336 - DNA, 22 bp, Artificial Sequence
  Synthetic oligonucleotide; TTT chr11 5259676 5259697 5259681 5259676 -
cctgaagttttgaatgtttttt

SEQ ID NO: 138337 - DNA, 22 bp, Artificial Sequence
  Synthetic oligonucleotide; TTC chr11 5259675 5259696 5259680 5259675 -
ctgaagttttgaatgtttttta

SEQ ID NO: 138338 - DNA, 22 bp, Artificial Sequence
  Synthetic oligonucleotide; CTG chr11 5259672 5259693 5259677 5259672 -
aagttttgaatgttttttattt

SEQ ID NO: 138339 - DNA, 22 bp, Artificial Sequence
  Synthetic oligonucleotide; TTT chr11 5259666 5259687 5259671 5259666 -
tgaatgttttttatttatgcta

SEQ ID NO: 138340 - DNA, 22 bp, Artificial Sequence
  Synthetic oligonucleotide; TTT chr11 5259665 5259686 5259670 5259665 -
gaatgttttttatttatgctat

SEQ ID NO: 138341 - DNA, 22 bp, Artificial Sequence
  Synthetic oligonucleotide; TTG chr11 5259664 5259685 5259669 5259664 -
aatgttttttatttatgctatc

SEQ ID NO: 138342 - DNA, 22 bp, Artificial Sequence
  Synthetic oligonucleotide; TTT chr11 5259657 5259678 5259662 5259657 -
tttatttatgctatctctttaa

SEQ ID NO: 138343 - DNA, 22 bp, Artificial Sequence
  Synthetic oligonucleotide; TTT chr11 5259656 5259677 5259661 5259656 -
ttatttatgctatctctttaac

SEQ ID NO: 138344 - DNA, 22 bp, Artificial Sequence
  Synthetic oligonucleotide; TTT chr11 5259655 5259676 5259660 5259655 -
tatttatgctatctctttaact

SEQ ID NO: 138345 - DNA, 22 bp, Artificial Sequence
  Synthetic oligonucleotide; TTT chr11 5259654 5259675 5259659 5259654 -
atttatgctatctctttaactg

SEQ ID NO: 138346 - DNA, 22 bp, Artificial Sequence
  Synthetic oligonucleotide; TTA chr11 5259653 5259674 5259658 5259653 -
tttatgctatctctttaactga

SEQ ID NO: 138347 - DNA, 22 bp, Artificial Sequence
  Synthetic oligonucleotide; TTT chr11 5259650 5259671 5259655 5259650 -
atgctatctctttaactgaaga

SEQ ID NO: 138348 - DNA, 22 bp, Artificial Sequence
  Synthetic oligonucleotide; TTA chr11 5259649 5259670 5259654 5259649 -
tgctatctctttaactgaagat

SEQ ID NO: 138349 - DNA, 22 bp, Artificial Sequence
  Synthetic oligonucleotide; CTA chr11 5259644 5259665 5259649 5259644 -
tctctttaactgaagatttctc

SEQ ID NO: 138350 - DNA, 22 bp, Artificial Sequence
  Synthetic oligonucleotide; CTC chr11 5259640 5259661 5259645 5259640 -
tttaactgaagatttctcccct

SEQ ID NO: 138351 - DNA, 22 bp, Artificial Sequence
  Synthetic oligonucleotide; CTT chr11 5259638 5259659 5259643 5259638 -
taactgaagatttctcccctca

SEQ ID NO: 138352 - DNA, 22 bp, Artificial Sequence
  Synthetic oligonucleotide; TTT chr11 5259637 5259658 5259642 5259637 -
aactgaagatttctcccctcat

SEQ ID NO: 138353 - DNA, 22 bp, Artificial Sequence
  Synthetic oligonucleotide; TTA chr11 5259636 5259657 5259641 5259636 -
actgaagatttctcccctcatt

SEQ ID NO: 138354 - DNA, 22 bp, Artificial Sequence
  Synthetic oligonucleotide; CTG chr11 5259632 5259653 5259637 5259632 -
aagatttctcccctcatttctt

SEQ ID NO: 138355 - DNA, 22 bp, Artificial Sequence
  Synthetic oligonucleotide; TTT chr11 5259625 5259646 5259630 5259625 -
ctcccctcatttcttgtatcat

SEQ ID NO: 138356 - DNA, 22 bp, Artificial Sequence
  Synthetic oligonucleotide; TTC chr11 5259624 5259645 5259629 5259624 -
tcccctcatttcttgtatcata

SEQ ID NO: 138357 - DNA, 22 bp, Artificial Sequence
  Synthetic oligonucleotide; CTC chr11 5259622 5259643 5259627 5259622 -
ccctcatttcttgtatcatatt

SEQ ID NO: 138358 - DNA, 22 bp, Artificial Sequence
  Synthetic oligonucleotide; CTC chr11 5259617 5259638 5259622 5259617 -
atttcttgtatcatatttttgg

SEQ ID NO: 138359 - DNA, 22 bp, Artificial Sequence
  Synthetic oligonucleotide; TTT chr11 5259613 5259634 5259618 5259613 -
cttgtatcatatttttggtttt

SEQ ID NO: 138360 - DNA, 22 bp, Artificial Sequence
  Synthetic oligonucleotide; TTC chr11 5259612 5259633 5259617 5259612 -
ttgtatcatatttttggttttt

SEQ ID NO: 138361 - DNA, 22 bp, Artificial Sequence
  Synthetic oligonucleotide; CTT chr11 5259610 5259631 5259615 5259610 -
gtatcatatttttggttttttt

SEQ ID NO: 138362 - DNA, 22 bp, Artificial Sequence
  Synthetic oligonucleotide; TTG chr11 5259609 5259630 5259614 5259609 -
tatcatatttttggttttttta

SEQ ID NO: 138363 - DNA, 22 bp, Artificial Sequence
  Synthetic oligonucleotide; TTT chr11 5259599 5259620 5259604 5259599 -
ttggtttttttaaaattggact

SEQ ID NO: 138364 - DNA, 22 bp, Artificial Sequence
  Synthetic oligonucleotide; TTT chr11 5259598 5259619 5259603 5259598 -
tggtttttttaaaattggactt

SEQ ID NO: 138365 - DNA, 22 bp, Artificial Sequence
  Synthetic oligonucleotide; TTT chr11 5259597 5259618 5259602 5259597 -
ggtttttttaaaattggacttc

SEQ ID NO: 138366 - DNA, 22 bp, Artificial Sequence
  Synthetic oligonucleotide; TTG chr11 5259596 5259617 5259601 5259596 -
gtttttttaaaattggacttca

SEQ ID NO: 138367 - DNA, 22 bp, Artificial Sequence
  Synthetic oligonucleotide; TTT chr11 5259592 5259613 5259597 5259592 -
ttttaaaattggacttcacctt

SEQ ID NO: 138368 - DNA, 22 bp, Artificial Sequence
  Synthetic oligonucleotide; TTT chr11 5259591 5259612 5259596 5259591 -
tttaaaattggacttcaccttc

SEQ ID NO: 138369 - DNA, 22 bp, Artificial Sequence
  Synthetic oligonucleotide; TTT chr11 5259590 5259611 5259595 5259590 -
ttaaaattggacttcaccttcc

SEQ ID NO: 138370 - DNA, 22 bp, Artificial Sequence
  Synthetic oligonucleotide; TTT chr11 5259589 5259610 5259594 5259589 -
taaaattggacttcaccttcct

SEQ ID NO: 138371 - DNA, 22 bp, Artificial Sequence
  Synthetic oligonucleotide; TTT chr11 5259588 5259609 5259593 5259588 -
aaaattggacttcaccttcctc

SEQ ID NO: 138372 - DNA, 22 bp, Artificial Sequence
  Synthetic oligonucleotide; TTA chr11 5259587 5259608 5259592 5259587 -
aaattggacttcaccttcctcg

SEQ ID NO: 138373 - DNA, 22 bp, Artificial Sequence
  Synthetic oligonucleotide; TTG chr11 5259581 5259602 5259586 5259581 -
gacttcaccttcctcggatgcc

SEQ ID NO: 138374 - DNA, 22 bp, Artificial Sequence
  Synthetic oligonucleotide; CTT chr11 5259576 5259597 5259581 5259576 -
caccttcctcggatgcctcctt

SEQ ID NO: 138375 - DNA, 22 bp, Artificial Sequence
  Synthetic oligonucleotide; TTC chr11 5259575 5259596 5259580 5259575 -
accttcctcggatgcctccttg

SEQ ID NO: 138376 - DNA, 22 bp, Artificial Sequence
  Synthetic oligonucleotide; CTT chr11 5259570 5259591 5259575 5259570 -
cctcggatgcctccttgattag

SEQ ID NO: 138377 - DNA, 22 bp, Artificial Sequence
  Synthetic oligonucleotide; TTC chr11 5259569 5259590 5259574 5259569 -
ctcggatgcctccttgattagc

SEQ ID NO: 138378 - DNA, 22 bp, Artificial Sequence
  Synthetic oligonucleotide; CTC chr11 5259566 5259587 5259571 5259566 -
ggatgcctccttgattagctta

SEQ ID NO: 138379 - DNA, 22 bp, Artificial Sequence
  Synthetic oligonucleotide; CTC chr11 5259557 5259578 5259562 5259557 -
cttgattagcttaataactgac

SEQ ID NO: 138380 - DNA, 22 bp, Artificial Sequence
  Synthetic oligonucleotide; CTT chr11 5259554 5259575 5259559 5259554 -
gattagcttaataactgacctt

SEQ ID NO: 138381 - DNA, 22 bp, Artificial Sequence
  Synthetic oligonucleotide; TTG chr11 5259553 5259574 5259558 5259553 -
attagcttaataactgaccttc

SEQ ID NO: 138382 - DNA, 22 bp, Artificial Sequence
  Synthetic oligonucleotide; TTA chr11 5259549 5259570 5259554 5259549 -
gcttaataactgaccttctgaa

SEQ ID NO: 138383 - DNA, 22 bp, Artificial Sequence
  Synthetic oligonucleotide; CTT chr11 5259545 5259566 5259550 5259545 -
aataactgaccttctgaattat

SEQ ID NO: 138384 - DNA, 22 bp, Artificial Sequence
  Synthetic oligonucleotide; TTA chr11 5259544 5259565 5259549 5259544 -
ataactgaccttctgaattatt

SEQ ID NO: 138385 - DNA, 22 bp, Artificial Sequence
  Synthetic oligonucleotide; CTG chr11 5259537 5259558 5259542 5259537 -
accttctgaattatttttcagg

SEQ ID NO: 138386 - DNA, 22 bp, Artificial Sequence
  Synthetic oligonucleotide; CTT chr11 5259532 5259553 5259537 5259532 -
ctgaattatttttcaggtaaat

SEQ ID NO: 138387 - DNA, 22 bp, Artificial Sequence
  Synthetic oligonucleotide; TTC chr11 5259531 5259552 5259536 5259531 -
tgaattatttttcaggtaaatc

SEQ ID NO: 138388 - DNA, 22 bp, Artificial Sequence
  Synthetic oligonucleotide; CTG chr11 5259529 5259550 5259534 5259529 -
aattatttttcaggtaaatcag

SEQ ID NO: 138389 - DNA, 22 bp, Artificial Sequence
  Synthetic oligonucleotide; TTA chr11 5259524 5259545 5259529 5259524 -
tttttcaggtaaatcagggatt

SEQ ID NO: 138390 - DNA, 22 bp, Artificial Sequence
  Synthetic oligonucleotide; TTT chr11 5259521 5259542 5259526 5259521 -
ttcaggtaaatcagggatttct

SEQ ID NO: 138391 - DNA, 22 bp, Artificial Sequence
  Synthetic oligonucleotide; TTT chr11 5259520 5259541 5259525 5259520 -
tcaggtaaatcagggatttctt

SEQ ID NO: 138392 - DNA, 22 bp, Artificial Sequence
  Synthetic oligonucleotide; TTT chr11 5259519 5259540 5259524 5259519 -
caggtaaatcagggatttcttc

SEQ ID NO: 138393 - DNA, 22 bp, Artificial Sequence
  Synthetic oligonucleotide; TTC chr11 5259518 5259539 5259523 5259518 -
aggtaaatcagggatttcttct

SEQ ID NO: 138394 - DNA, 22 bp, Artificial Sequence
  Synthetic oligonucleotide; TTT chr11 5259501 5259522 5259506 5259501 -
cttcttggtttggatgcattgc

SEQ ID NO: 138395 - DNA, 22 bp, Artificial Sequence
  Synthetic oligonucleotide; TTC chr11 5259500 5259521 5259505 5259500 -
ttcttggtttggatgcattgct

SEQ ID NO: 138396 - DNA, 22 bp, Artificial Sequence
  Synthetic oligonucleotide; CTT chr11 5259498 5259519 5259503 5259498 -
cttggtttggatgcattgctgg

SEQ ID NO: 138397 - DNA, 22 bp, Artificial Sequence
  Synthetic oligonucleotide; TTC chr11 5259497 5259518 5259502 5259497 -
ttggtttggatgcattgctggt

SEQ ID NO: 138398 - DNA, 22 bp, Artificial Sequence
  Synthetic oligonucleotide; CTT chr11 5259495 5259516 5259500 5259495 -
ggtttggatgcattgctggtga

SEQ ID NO: 138399 - DNA, 22 bp, Artificial Sequence
  Synthetic oligonucleotide; TTG chr11 5259494 5259515 5259499 5259494 -
gtttggatgcattgctggtgag

SEQ ID NO: 138400 - DNA, 22 bp, Artificial Sequence
  Synthetic oligonucleotide; TTT chr11 5259490 5259511 5259495 5259490 -
ggatgcattgctggtgagctag

SEQ ID NO: 138401 - DNA, 22 bp, Artificial Sequence
  Synthetic oligonucleotide; TTG chr11 5259489 5259510 5259494 5259489 -
gatgcattgctggtgagctagt

SEQ ID NO: 138402 - DNA, 22 bp, Artificial Sequence
  Synthetic oligonucleotide; TTG chr11 5259480 5259501 5259485 5259480 -
ctggtgagctagtatgattttt

SEQ ID NO: 138403 - DNA, 22 bp, Artificial Sequence
  Synthetic oligonucleotide; CTG chr11 5259477 5259498 5259482 5259477 -
gtgagctagtatgattttttgg

SEQ ID NO: 138404 - DNA, 22 bp, Artificial Sequence
  Synthetic oligonucleotide; CTA chr11 5259469 5259490 5259474 5259469 -
gtatgattttttggggggtgtt

SEQ ID NO: 138405 - DNA, 22 bp, Artificial Sequence
  Synthetic oligonucleotide; TTT chr11 5259460 5259481 5259465 5259460 -
tttggggggtgttaaagaacct

SEQ ID NO: 138406 - DNA, 22 bp, Artificial Sequence
  Synthetic oligonucleotide; TTT chr11 5259459 5259480 5259464 5259459 -
ttggggggtgttaaagaacctt

SEQ ID NO: 138407 - DNA, 22 bp, Artificial Sequence
  Synthetic oligonucleotide; TTT chr11 5259458 5259479 5259463 5259458 -
tggggggtgttaaagaaccttg

SEQ ID NO: 138408 - DNA, 22 bp, Artificial Sequence
  Synthetic oligonucleotide; TTT chr11 5259457 5259478 5259462 5259457 -
ggggggtgttaaagaaccttgt

SEQ ID NO: 138409 - DNA, 22 bp, Artificial Sequence
  Synthetic oligonucleotide; TTG chr11 5259456 5259477 5259461 5259456 -
gggggtgttaaagaaccttgtt

SEQ ID NO: 138410 - DNA, 22 bp, Artificial Sequence
  Synthetic oligonucleotide; TTA chr11 5259446 5259467 5259451 5259446 -
aagaaccttgtttttcatatta

SEQ ID NO: 138411 - DNA, 22 bp, Artificial Sequence
  Synthetic oligonucleotide; CTT chr11 5259437 5259458 5259442 5259437 -
gtttttcatattaccagagtta

SEQ ID NO: 138412 - DNA, 22 bp, Artificial Sequence
  Synthetic oligonucleotide; TTG chr11 5259436 5259457 5259441 5259436 -
tttttcatattaccagagttag

SEQ ID NO: 138413 - DNA, 22 bp, Artificial Sequence
  Synthetic oligonucleotide; TTT chr11 5259433 5259454 5259438 5259433 -
ttcatattaccagagttagttt

SEQ ID NO: 138414 - DNA, 22 bp, Artificial Sequence
  Synthetic oligonucleotide; TTT chr11 5259432 5259453 5259437 5259432 -
tcatattaccagagttagtttt

SEQ ID NO: 138415 - DNA, 22 bp, Artificial Sequence
  Synthetic oligonucleotide; TTT chr11 5259431 5259452 5259436 5259431 -
catattaccagagttagttttc

SEQ ID NO: 138416 - DNA, 22 bp, Artificial Sequence
  Synthetic oligonucleotide; TTC chr11 5259430 5259451 5259435 5259430 -
atattaccagagttagttttct

SEQ ID NO: 138417 - DNA, 22 bp, Artificial Sequence
  Synthetic oligonucleotide; TTA chr11 5259424 5259445 5259429 5259424 -
ccagagttagttttctggttcc

SEQ ID NO: 138418 - DNA, 22 bp, Artificial Sequence
  Synthetic oligonucleotide; TTA chr11 5259415 5259436 5259420 5259415 -
gttttctggttccttctcactt

SEQ ID NO: 138419 - DNA, 22 bp, Artificial Sequence
  Synthetic oligonucleotide; TTT chr11 5259411 5259432 5259416 5259411 -
tctggttccttctcacttgggt

SEQ ID NO: 138420 - DNA, 22 bp, Artificial Sequence
  Synthetic oligonucleotide; TTT chr11 5259410 5259431 5259415 5259410 -
ctggttccttctcacttgggta

SEQ ID NO: 138421 - DNA, 22 bp, Artificial Sequence
  Synthetic oligonucleotide; TTC chr11 5259409 5259430 5259414 5259409 -
tggttccttctcacttgggtag

SEQ ID NO: 138422 - DNA, 22 bp, Artificial Sequence
  Synthetic oligonucleotide; CTG chr11 5259407 5259428 5259412 5259407 -
gttccttctcacttgggtaggc

SEQ ID NO: 138423 - DNA, 22 bp, Artificial Sequence
  Synthetic oligonucleotide; TTC chr11 5259403 5259424 5259408 5259403 -
cttctcacttgggtaggctctg

SEQ ID NO: 138424 - DNA, 22 bp, Artificial Sequence
  Synthetic oligonucleotide; CTT chr11 5259400 5259421 5259405 5259400 -
ctcacttgggtaggctctgtca

SEQ ID NO: 138425 - DNA, 22 bp, Artificial Sequence
  Synthetic oligonucleotide; TTC chr11 5259399 5259420 5259404 5259399 -
tcacttgggtaggctctgtcag

SEQ ID NO: 138426 - DNA, 22 bp, Artificial Sequence
  Synthetic oligonucleotide; CTC chr11 5259397 5259418 5259402 5259397 -
acttgggtaggctctgtcagag

SEQ ID NO: 138427 - DNA, 22 bp, Artificial Sequence
  Synthetic oligonucleotide; CTT chr11 5259393 5259414 5259398 5259393 -
gggtaggctctgtcagagggaa

SEQ ID NO: 138428 - DNA, 22 bp, Artificial Sequence
  Synthetic oligonucleotide; TTG chr11 5259392 5259413 5259397 5259392 -
ggtaggctctgtcagagggaaa

SEQ ID NO: 138429 - DNA, 22 bp, Artificial Sequence
  Synthetic oligonucleotide; CTC chr11 5259383 5259404 5259388 5259383 -
tgtcagagggaaagtctaggcc

SEQ ID NO: 138430 - DNA, 22 bp, Artificial Sequence
  Synthetic oligonucleotide; CTG chr11 5259381 5259402 5259386 5259381 -
tcagagggaaagtctaggcctc

SEQ ID NO: 138431 - DNA, 22 bp, Artificial Sequence
  Synthetic oligonucleotide; CTA chr11 5259365 5259386 5259370 5259365 -
ggcctcaaggctgagacttttg

SEQ ID NO: 138432 - DNA, 22 bp, Artificial Sequence
  Synthetic oligonucleotide; CTC chr11 5259359 5259380 5259364 5259359 -
aaggctgagacttttgtcccat

SEQ ID NO: 138433 - DNA, 22 bp, Artificial Sequence
  Synthetic oligonucleotide; CTG chr11 5259352 5259373 5259357 5259352 -
agacttttgtcccatgaggtgt

SEQ ID NO: 138434 - DNA, 22 bp, Artificial Sequence
  Synthetic oligonucleotide; CTT chr11 5259346 5259367 5259351 5259346 -
ttgtcccatgaggtgttccctt

SEQ ID NO: 138435 - DNA, 22 bp, Artificial Sequence
  Synthetic oligonucleotide; TTT chr11 5259345 5259366 5259350 5259345 -
tgtcccatgaggtgttcccttg

SEQ ID NO: 138436 - DNA, 22 bp, Artificial Sequence
  Synthetic oligonucleotide; TTT chr11 5259344 5259365 5259349 5259344 -
gtcccatgaggtgttcccttga

SEQ ID NO: 138437 - DNA, 22 bp, Artificial Sequence
  Synthetic oligonucleotide; TTG chr11 5259343 5259364 5259348 5259343 -
tcccatgaggtgttcccttgat

SEQ ID NO: 138438 - DNA, 22 bp, Artificial Sequence
  Synthetic oligonucleotide; TTC chr11 5259328 5259349 5259333 5259328 -
ccttgatgtagcacagtccccc

SEQ ID NO: 138439 - DNA, 22 bp, Artificial Sequence
  Synthetic oligonucleotide; CTT chr11 5259324 5259345 5259329 5259324 -
gatgtagcacagtccccctttt

SEQ ID NO: 138440 - DNA, 22 bp, Artificial Sequence
  Synthetic oligonucleotide; TTG chr11 5259323 5259344 5259328 5259323 -
atgtagcacagtcccccttttc

SEQ ID NO: 138441 - DNA, 22 bp, Artificial Sequence
  Synthetic oligonucleotide; CTT chr11 5259304 5259325 5259309 5259304 -
ttcctaggcgtggggcttcctg

SEQ ID NO: 138442 - DNA, 22 bp, Artificial Sequence
  Synthetic oligonucleotide; TTT chr11 5259303 5259324 5259308 5259303 -
tcctaggcgtggggcttcctga

SEQ ID NO: 138443 - DNA, 22 bp, Artificial Sequence
  Synthetic oligonucleotide; TTT chr11 5259302 5259323 5259307 5259302 -
cctaggcgtggggcttcctgag

SEQ ID NO: 138444 - DNA, 22 bp, Artificial Sequence
  Synthetic oligonucleotide; TTC chr11 5259301 5259322 5259306 5259301 -
ctaggcgtggggcttcctgaga

SEQ ID NO: 138445 - DNA, 22 bp, Artificial Sequence
  Synthetic oligonucleotide; CTA chr11 5259298 5259319 5259303 5259298 -
ggcgtggggcttcctgagagcc

SEQ ID NO: 138446 - DNA, 22 bp, Artificial Sequence
  Synthetic oligonucleotide; CTT chr11 5259286 5259307 5259291 5259286 -
cctgagagccgaactgtagtga

SEQ ID NO: 138447 - DNA, 22 bp, Artificial Sequence
  Synthetic oligonucleotide; TTC chr11 5259285 5259306 5259290 5259285 -
ctgagagccgaactgtagtgat

SEQ ID NO: 138448 - DNA, 22 bp, Artificial Sequence
  Synthetic oligonucleotide; CTG chr11 5259282 5259303 5259287 5259282 -
agagccgaactgtagtgattgt

SEQ ID NO: 138449 - DNA, 22 bp, Artificial Sequence
  Synthetic oligonucleotide; CTG chr11 5259270 5259291 5259275 5259270 -
tagtgattgttatctctcttct

SEQ ID NO: 138450 - DNA, 22 bp, Artificial Sequence
  Synthetic oligonucleotide; TTG chr11 5259261 5259282 5259266 5259261 -
ttatctctcttctggatctagc

SEQ ID NO: 138451 - DNA, 22 bp, Artificial Sequence
  Synthetic oligonucleotide; TTA chr11 5259258 5259279 5259263 5259258 -
tctctcttctggatctagccac

SEQ ID NO: 138452 - DNA, 22 bp, Artificial Sequence
  Synthetic oligonucleotide; CTC chr11 5259254 5259275 5259259 5259254 -
tcttctggatctagccacccat

SEQ ID NO: 138453 - DNA, 22 bp, Artificial Sequence
  Synthetic oligonucleotide; CTC chr11 5259252 5259273 5259257 5259252 -
ttctggatctagccacccatca

SEQ ID NO: 138454 - DNA, 22 bp, Artificial Sequence
  Synthetic oligonucleotide; CTT chr11 5259250 5259271 5259255 5259250 -
ctggatctagccacccatcagg

SEQ ID NO: 138455 - DNA, 22 bp, Artificial Sequence
  Synthetic oligonucleotide; TTC chr11 5259249 5259270 5259254 5259249 -
tggatctagccacccatcaggt

SEQ ID NO: 138456 - DNA, 22 bp, Artificial Sequence
  Synthetic oligonucleotide; CTG chr11 5259247 5259268 5259252 5259247 -
gatctagccacccatcaggtct

SEQ ID NO: 138457 - DNA, 22 bp, Artificial Sequence
  Synthetic oligonucleotide; CTA chr11 5259241 5259262 5259246 5259241 -
gccacccatcaggtctaccaga

SEQ ID NO: 138458 - DNA, 22 bp, Artificial Sequence
  Synthetic oligonucleotide; CTA chr11 5259224 5259245 5259229 5259224 -
ccagactccaggctggtactgg

SEQ ID NO: 138459 - DNA, 22 bp, Artificial Sequence
  Synthetic oligonucleotide; CTC chr11 5259216 5259237 5259221 5259216 -
caggctggtactggggtttgtc

SEQ ID NO: 138460 - DNA, 22 bp, Artificial Sequence
  Synthetic oligonucleotide; CTG chr11 5259209 5259230 5259214 5259209 -
gtactggggtttgtctgcacag

SEQ ID NO: 138461 - DNA, 22 bp, Artificial Sequence
  Synthetic oligonucleotide; CTG chr11 5259203 5259224 5259208 5259203 -
gggtttgtctgcacagagtctt

SEQ ID NO: 138462 - DNA, 22 bp, Artificial Sequence
  Synthetic oligonucleotide; TTT chr11 5259197 5259218 5259202 5259197 -
gtctgcacagagtcttgtgacg

SEQ ID NO: 138463 - DNA, 22 bp, Artificial Sequence
  Synthetic oligonucleotide; TTG chr11 5259196 5259217 5259201 5259196 -
tctgcacagagtcttgtgacgt

SEQ ID NO: 138464 - DNA, 22 bp, Artificial Sequence
  Synthetic oligonucleotide; CTG chr11 5259192 5259213 5259197 5259192 -
cacagagtcttgtgacgtgaac

SEQ ID NO: 138465 - DNA, 22 bp, Artificial Sequence
  Synthetic oligonucleotide; CTT chr11 5259181 5259202 5259186 5259181 -
gtgacgtgaaccatctgtgggt

SEQ ID NO: 138466 - DNA, 22 bp, Artificial Sequence
  Synthetic oligonucleotide; TTG chr11 5259180 5259201 5259185 5259180 -
tgacgtgaaccatctgtgggtc

SEQ ID NO: 138467 - DNA, 22 bp, Artificial Sequence
  Synthetic oligonucleotide; CTG chr11 5259164 5259185 5259169 5259164 -
tgggtctctcagccatagatac

SEQ ID NO: 138468 - DNA, 22 bp, Artificial Sequence
  Synthetic oligonucleotide; CTC chr11 5259156 5259177 5259161 5259156 -
tcagccatagatacaaccacct

SEQ ID NO: 138469 - DNA, 22 bp, Artificial Sequence
  Synthetic oligonucleotide; CTC chr11 5259154 5259175 5259159 5259154 -
agccatagatacaaccacctgc

SEQ ID NO: 138470 - DNA, 22 bp, Artificial Sequence
  Synthetic oligonucleotide; CTG chr11 5259133 5259154 5259138 5259133 -
ctccaatggaggtggcagagga

SEQ ID NO: 138471 - DNA, 22 bp, Artificial Sequence
  Synthetic oligonucleotide; CTC chr11 5259130 5259151 5259135 5259130 -
caatggaggtggcagaggatga

SEQ ID NO: 138472 - DNA, 22 bp, Artificial Sequence
  Synthetic oligonucleotide; CTC chr11 5259099 5259120 5259104 5259099 -
tgtgagggtccttacttttggt

SEQ ID NO: 138473 - DNA, 22 bp, Artificial Sequence
  Synthetic oligonucleotide; CTG chr11 5259097 5259118 5259102 5259097 -
tgagggtccttacttttggttg

SEQ ID NO: 138474 - DNA, 22 bp, Artificial Sequence
  Synthetic oligonucleotide; CTT chr11 5259086 5259107 5259091 5259086 -
acttttggttgttcaatgcact

SEQ ID NO: 138475 - DNA, 22 bp, Artificial Sequence
  Synthetic oligonucleotide; TTA chr11 5259085 5259106 5259090 5259085 -
cttttggttgttcaatgcacta

SEQ ID NO: 138476 - DNA, 22 bp, Artificial Sequence
  Synthetic oligonucleotide; CTT chr11 5259082 5259103 5259087 5259082 -
ttggttgttcaatgcactattt

SEQ ID NO: 138477 - DNA, 22 bp, Artificial Sequence
  Synthetic oligonucleotide; TTT chr11 5259081 5259102 5259086 5259081 -
tggttgttcaatgcactatttt

SEQ ID NO: 138478 - DNA, 22 bp, Artificial Sequence
  Synthetic oligonucleotide; TTT chr11 5259080 5259101 5259085 5259080 -
ggttgttcaatgcactattttt

SEQ ID NO: 138479 - DNA, 22 bp, Artificial Sequence
  Synthetic oligonucleotide; TTG chr11 5259079 5259100 5259084 5259079 -
gttgttcaatgcactatttttg

SEQ ID NO: 138480 - DNA, 22 bp, Artificial Sequence
  Synthetic oligonucleotide; TTG chr11 5259075 5259096 5259080 5259075 -
ttcaatgcactatttttgtgct

SEQ ID NO: 138481 - DNA, 22 bp, Artificial Sequence
  Synthetic oligonucleotide; TTC chr11 5259072 5259093 5259077 5259072 -
aatgcactatttttgtgctggt

SEQ ID NO: 138482 - DNA, 22 bp, Artificial Sequence
  Synthetic oligonucleotide; CTA chr11 5259063 5259084 5259068 5259063 -
tttttgtgctggttggcctcct

SEQ ID NO: 138483 - DNA, 22 bp, Artificial Sequence
  Synthetic oligonucleotide; TTT chr11 5259060 5259081 5259065 5259060 -
ttgtgctggttggcctcctgcc

SEQ ID NO: 138484 - DNA, 22 bp, Artificial Sequence
  Synthetic oligonucleotide; TTT chr11 5259059 5259080 5259064 5259059 -
tgtgctggttggcctcctgcca

SEQ ID NO: 138485 - DNA, 22 bp, Artificial Sequence
  Synthetic oligonucleotide; TTT chr11 5259058 5259079 5259063 5259058 -
gtgctggttggcctcctgccag

SEQ ID NO: 138486 - DNA, 22 bp, Artificial Sequence
  Synthetic oligonucleotide; TTG chr11 5259057 5259078 5259062 5259057 -
tgctggttggcctcctgccagg

SEQ ID NO: 138487 - DNA, 22 bp, Artificial Sequence
  Synthetic oligonucleotide; CTG chr11 5259052 5259073 5259057 5259052 -
gttggcctcctgccaggaggtg

SEQ ID NO: 138488 - DNA, 22 bp, Artificial Sequence
  Synthetic oligonucleotide; TTG chr11 5259048 5259069 5259053 5259048 -
gcctcctgccaggaggtggcac

SEQ ID NO: 138489 - DNA, 22 bp, Artificial Sequence
  Synthetic oligonucleotide; CTC chr11 5259043 5259064 5259048 5259043 -
ctgccaggaggtggcactttct

SEQ ID NO: 138490 - DNA, 22 bp, Artificial Sequence
  Synthetic oligonucleotide; CTG chr11 5259040 5259061 5259045 5259040 -
ccaggaggtggcactttctaga

SEQ ID NO: 138491 - DNA, 22 bp, Artificial Sequence
  Synthetic oligonucleotide; CTT chr11 5259024 5259045 5259029 5259024 -
tctagaaagcatcagcagaggc

SEQ ID NO: 138492 - DNA, 22 bp, Artificial Sequence
  Synthetic oligonucleotide; TTT chr11 5259023 5259044 5259028 5259023 -
ctagaaagcatcagcagaggca

SEQ ID NO: 138493 - DNA, 22 bp, Artificial Sequence
  Synthetic oligonucleotide; TTC chr11 5259022 5259043 5259027 5259022 -
tagaaagcatcagcagaggcag

SEQ ID NO: 138494 - DNA, 22 bp, Artificial Sequence
  Synthetic oligonucleotide; CTA chr11 5259020 5259041 5259025 5259020 -
gaaagcatcagcagaggcagtc

SEQ ID NO: 138495 - DNA, 22 bp, Artificial Sequence
  Synthetic oligonucleotide; CTG chr11 5258983 5259004 5258988 5258983 -
ggggggctggggcaccctagaa

SEQ ID NO: 138496 - DNA, 22 bp, Artificial Sequence
  Synthetic oligonucleotide; CTG chr11 5258974 5258995 5258979 5258974 -
gggcaccctagaactcccaaga

SEQ ID NO: 138497 - DNA, 22 bp, Artificial Sequence
  Synthetic oligonucleotide; CTA chr11 5258964 5258985 5258969 5258964 -
gaactcccaagaatatatgccc

SEQ ID NO: 138498 - DNA, 22 bp, Artificial Sequence
  Synthetic oligonucleotide; CTC chr11 5258958 5258979 5258963 5258958 -
ccaagaatatatgccctttgtc

SEQ ID NO: 138499 - DNA, 22 bp, Artificial Sequence
  Synthetic oligonucleotide; CTT chr11 5258940 5258961 5258945 5258940 -
tgtcttcagctaccagggtgag

SEQ ID NO: 138500 - DNA, 22 bp, Artificial Sequence
  Synthetic oligonucleotide; TTT chr11 5258939 5258960 5258944 5258939 -
gtcttcagctaccagggtgagt

SEQ ID NO: 138501 - DNA, 22 bp, Artificial Sequence
  Synthetic oligonucleotide; TTG chr11 5258938 5258959 5258943 5258938 -
tcttcagctaccagggtgagta

SEQ ID NO: 138502 - DNA, 22 bp, Artificial Sequence
  Synthetic oligonucleotide; CTT chr11 5258934 5258955 5258939 5258934 -
cagctaccagggtgagtaagga

SEQ ID NO: 138503 - DNA, 22 bp, Artificial Sequence
  Synthetic oligonucleotide; TTC chr11 5258933 5258954 5258938 5258933 -
agctaccagggtgagtaaggaa

SEQ ID NO: 138504 - DNA, 22 bp, Artificial Sequence
  Synthetic oligonucleotide; CTA chr11 5258928 5258949 5258933 5258928 -
ccagggtgagtaaggaaggacc

SEQ ID NO: 138505 - DNA, 22 bp, Artificial Sequence
  Synthetic oligonucleotide; CTA chr11 5258886 5258907 5258891 5258886 -
gtcgtgtctgagctcagagtct

SEQ ID NO: 138506 - DNA, 22 bp, Artificial Sequence
  Synthetic oligonucleotide; CTG chr11 5258876 5258897 5258881 5258876 -
agctcagagtctccttgggcag

SEQ ID NO: 138507 - DNA, 22 bp, Artificial Sequence
  Synthetic oligonucleotide; CTC chr11 5258871 5258892 5258876 5258871 -
agagtctccttgggcaggtctt

SEQ ID NO: 138508 - DNA, 22 bp, Artificial Sequence
  Synthetic oligonucleotide; CTC chr11 5258863 5258884 5258868 5258863 -
cttgggcaggtctttctgtggc

SEQ ID NO: 138509 - DNA, 22 bp, Artificial Sequence
  Synthetic oligonucleotide; CTT chr11 5258860 5258881 5258865 5258860 -
gggcaggtctttctgtggctac

SEQ ID NO: 138510 - DNA, 22 bp, Artificial Sequence
  Synthetic oligonucleotide; TTG chr11 5258859 5258880 5258864 5258859 -
ggcaggtctttctgtggctact

SEQ ID NO: 138511 - DNA, 22 bp, Artificial Sequence
  Synthetic oligonucleotide; CTT chr11 5258849 5258870 5258854 5258849 -
tctgtggctactgtgggaggat

SEQ ID NO: 138512 - DNA, 22 bp, Artificial Sequence
  Synthetic oligonucleotide; TTT chr11 5258848 5258869 5258853 5258848 -
ctgtggctactgtgggaggatg

SEQ ID NO: 138513 - DNA, 22 bp, Artificial Sequence
  Synthetic oligonucleotide; TTC chr11 5258847 5258868 5258852 5258847 -
tgtggctactgtgggaggatgg

SEQ ID NO: 138514 - DNA, 22 bp, Artificial Sequence
  Synthetic oligonucleotide; CTG chr11 5258845 5258866 5258850 5258845 -
tggctactgtgggaggatgggg

SEQ ID NO: 138515 - DNA, 22 bp, Artificial Sequence
  Synthetic oligonucleotide; CTA chr11 5258839 5258860 5258844 5258839 -
ctgtgggaggatgggggtgtag

SEQ ID NO: 138516 - DNA, 22 bp, Artificial Sequence
  Synthetic oligonucleotide; CTG chr11 5258836 5258857 5258841 5258836 -
tgggaggatgggggtgtagttt

SEQ ID NO: 138517 - DNA, 22 bp, Artificial Sequence
  Synthetic oligonucleotide; TTT chr11 5258814 5258835 5258819 5258814 -
ccaggtcaatggatttatgttc

SEQ ID NO: 138518 - DNA, 22 bp, Artificial Sequence
  Synthetic oligonucleotide; TTC chr11 5258813 5258834 5258818 5258813 -
caggtcaatggatttatgttcc

SEQ ID NO: 138519 - DNA, 22 bp, Artificial Sequence
  Synthetic oligonucleotide; TTT chr11 5258798 5258819 5258803 5258798 -
atgttcctaggacaattatggc

SEQ ID NO: 138520 - DNA, 22 bp, Artificial Sequence
  Synthetic oligonucleotide; TTA chr11 5258797 5258818 5258802 5258797 -
tgttcctaggacaattatggct

SEQ ID NO: 138521 - DNA, 22 bp, Artificial Sequence
  Synthetic oligonucleotide; TTC chr11 5258792 5258813 5258797 5258792 -
ctaggacaattatggctgcctc

SEQ ID NO: 138522 - DNA, 22 bp, Artificial Sequence
  Synthetic oligonucleotide; CTA chr11 5258789 5258810 5258794 5258789 -
ggacaattatggctgcctctgc

SEQ ID NO: 138523 - DNA, 22 bp, Artificial Sequence
  Synthetic oligonucleotide; TTA chr11 5258780 5258801 5258785 5258780 -
tggctgcctctgctgtgtcatg

SEQ ID NO: 138524 - DNA, 22 bp, Artificial Sequence
  Synthetic oligonucleotide; CTG chr11 5258774 5258795 5258779 5258774 -
cctctgctgtgtcatgcaggtc

SEQ ID NO: 138525 - DNA, 22 bp, Artificial Sequence
  Synthetic oligonucleotide; CTC chr11 5258770 5258791 5258775 5258770 -
tgctgtgtcatgcaggtcatca

SEQ ID NO: 138526 - DNA, 22 bp, Artificial Sequence
  Synthetic oligonucleotide; CTG chr11 5258768 5258789 5258773 5258768 -
ctgtgtcatgcaggtcatcagg

SEQ ID NO: 138527 - DNA, 22 bp, Artificial Sequence
  Synthetic oligonucleotide; CTG chr11 5258765 5258786 5258770 5258765 -
tgtcatgcaggtcatcaggaaa

SEQ ID NO: 138528 - DNA, 22 bp, Artificial Sequence
  Synthetic oligonucleotide; CTT chr11 5258714 5258735 5258719 5258714 -
gcccagctcccatgcaactcaa

SEQ ID NO: 138529 - DNA, 22 bp, Artificial Sequence
  Synthetic oligonucleotide; TTG chr11 5258713 5258734 5258718 5258713 -
cccagctcccatgcaactcaaa

SEQ ID NO: 138530 - DNA, 22 bp, Artificial Sequence
  Synthetic oligonucleotide; CTC chr11 5258705 5258726 5258710 5258705 -
ccatgcaactcaaaaggttggt

SEQ ID NO: 138531 - DNA, 22 bp, Artificial Sequence
  Synthetic oligonucleotide; CTC chr11 5258694 5258715 5258699 5258694 -
aaaaggttggtctcacttccag

SEQ ID NO: 138532 - DNA, 22 bp, Artificial Sequence
  Synthetic oligonucleotide; TTG chr11 5258685 5258706 5258690 5258685 -
gtctcacttccagcgtgcaccc

SEQ ID NO: 138533 - DNA, 22 bp, Artificial Sequence
  Synthetic oligonucleotide; CTC chr11 5258680 5258701 5258685 5258680 -
acttccagcgtgcaccctcccc

SEQ ID NO: 138534 - DNA, 22 bp, Artificial Sequence
  Synthetic oligonucleotide; CTT chr11 5258676 5258697 5258681 5258676 -
ccagcgtgcaccctcccccgca

SEQ ID NO: 138535 - DNA, 22 bp, Artificial Sequence
  Synthetic oligonucleotide; TTC chr11 5258675 5258696 5258680 5258675 -
cagcgtgcaccctcccccgcaa

SEQ ID NO: 138536 - DNA, 22 bp, Artificial Sequence
  Synthetic oligonucleotide; CTC chr11 5258661 5258682 5258666 5258661 -
ccccgcaacagcaccgaatctg

SEQ ID NO: 138537 - DNA, 22 bp, Artificial Sequence
  Synthetic oligonucleotide; CTG chr11 5258639 5258660 5258644 5258639 -
tttccatgcagtcagtgagcaa

SEQ ID NO: 138538 - DNA, 22 bp, Artificial Sequence
  Synthetic oligonucleotide; TTT chr11 5258636 5258657 5258641 5258636 -
ccatgcagtcagtgagcaaggc

SEQ ID NO: 138539 - DNA, 22 bp, Artificial Sequence
  Synthetic oligonucleotide; TTC chr11 5258635 5258656 5258640 5258635 -
catgcagtcagtgagcaaggct

SEQ ID NO: 138540 - DNA, 22 bp, Artificial Sequence
  Synthetic oligonucleotide; CTG chr11 5258612 5258633 5258617 5258612 -
agaacttgccccaggctaccag

SEQ ID NO: 138541 - DNA, 22 bp, Artificial Sequence
  Synthetic oligonucleotide; CTT chr11 5258605 5258626 5258610 5258605 -
gccccaggctaccagctgcgaa

SEQ ID NO: 138542 - DNA, 22 bp, Artificial Sequence
  Synthetic oligonucleotide; TTG chr11 5258604 5258625 5258609 5258604 -
ccccaggctaccagctgcgaaa

SEQ ID NO: 138543 - DNA, 22 bp, Artificial Sequence
  Synthetic oligonucleotide; CTA chr11 5258594 5258615 5258599 5258594 -
ccagctgcgaaaccaagtaggg

SEQ ID NO: 138544 - DNA, 22 bp, Artificial Sequence
  Synthetic oligonucleotide; CTG chr11 5258587 5258608 5258592 5258587 -
cgaaaccaagtagggctgtcct

SEQ ID NO: 138545 - DNA, 22 bp, Artificial Sequence
  Synthetic oligonucleotide; CTG chr11 5258569 5258590 5258574 5258569 -
tcctacttccctgccagtggag

SEQ ID NO: 138546 - DNA, 22 bp, Artificial Sequence
  Synthetic oligonucleotide; CTA chr11 5258564 5258585 5258569 5258564 -
cttccctgccagtggagtctgc

SEQ ID NO: 138547 - DNA, 22 bp, Artificial Sequence
  Synthetic oligonucleotide; CTT chr11 5258561 5258582 5258566 5258561 -
ccctgccagtggagtctgcaca

SEQ ID NO: 138548 - DNA, 22 bp, Artificial Sequence
  Synthetic oligonucleotide; TTC chr11 5258560 5258581 5258565 5258560 -
cctgccagtggagtctgcacac

SEQ ID NO: 138549 - DNA, 22 bp, Artificial Sequence
  Synthetic oligonucleotide; CTG chr11 5258556 5258577 5258561 5258556 -
ccagtggagtctgcacaccaaa

SEQ ID NO: 138550 - DNA, 22 bp, Artificial Sequence
  Synthetic oligonucleotide; CTG chr11 5258543 5258564 5258548 5258543 -
cacaccaaattcatgtcccccc

SEQ ID NO: 138551 - DNA, 22 bp, Artificial Sequence
  Synthetic oligonucleotide; TTC chr11 5258531 5258552 5258536 5258531 -
atgtccccccaccaaccccccc

SEQ ID NO: 138552 - DNA, 22 bp, Artificial Sequence
  Synthetic oligonucleotide; CTG chr11 5258505 5258526 5258510 5258505 -
cccagcccctagatctggccag

SEQ ID NO: 138553 - DNA, 22 bp, Artificial Sequence
  Synthetic oligonucleotide; CTA chr11 5258494 5258515 5258499 5258494 -
gatctggccaggtggagatttt

SEQ ID NO: 138554 - DNA, 22 bp, Artificial Sequence
  Synthetic oligonucleotide; CTG chr11 5258488 5258509 5258493 5258488 -
gccaggtggagattttcttttt

SEQ ID NO: 138555 - DNA, 22 bp, Artificial Sequence
  Synthetic oligonucleotide; TTT chr11 5258473 5258494 5258478 5258473 -
tctttttcctgtcatcttttcc

SEQ ID NO: 138556 - DNA, 22 bp, Artificial Sequence
  Synthetic oligonucleotide; TTT chr11 5258472 5258493 5258477 5258472 -
ctttttcctgtcatcttttccc

SEQ ID NO: 138557 - DNA, 22 bp, Artificial Sequence
  Synthetic oligonucleotide; TTC chr11 5258471 5258492 5258476 5258471 -
tttttcctgtcatcttttccca

SEQ ID NO: 138558 - DNA, 22 bp, Artificial Sequence
  Synthetic oligonucleotide; CTT chr11 5258469 5258490 5258474 5258469 -
tttcctgtcatcttttcccagt

SEQ ID NO: 138559 - DNA, 22 bp, Artificial Sequence
  Synthetic oligonucleotide; TTT chr11 5258468 5258489 5258473 5258468 -
ttcctgtcatcttttcccagtt

SEQ ID NO: 138560 - DNA, 22 bp, Artificial Sequence
  Synthetic oligonucleotide; TTT chr11 5258467 5258488 5258472 5258467 -
tcctgtcatcttttcccagttc

SEQ ID NO: 138561 - DNA, 22 bp, Artificial Sequence
  Synthetic oligonucleotide; TTT chr11 5258466 5258487 5258471 5258466 -
cctgtcatcttttcccagttcc

SEQ ID NO: 138562 - DNA, 22 bp, Artificial Sequence
  Synthetic oligonucleotide; TTC chr11 5258465 5258486 5258470 5258465 -
ctgtcatcttttcccagttcct

SEQ ID NO: 138563 - DNA, 22 bp, Artificial Sequence
  Synthetic oligonucleotide; CTG chr11 5258462 5258483 5258467 5258462 -
tcatcttttcccagttcctctg

SEQ ID NO: 138564 - DNA, 22 bp, Artificial Sequence
  Synthetic oligonucleotide; CTT chr11 5258455 5258476 5258460 5258455 -
ttcccagttcctctggcagccc

SEQ ID NO: 138565 - DNA, 22 bp, Artificial Sequence
  Synthetic oligonucleotide; TTT chr11 5258454 5258475 5258459 5258454 -
tcccagttcctctggcagccct

SEQ ID NO: 138566 - DNA, 22 bp, Artificial Sequence
  Synthetic oligonucleotide; TTT chr11 5258453 5258474 5258458 5258453 -
cccagttcctctggcagccctc

SEQ ID NO: 138567 - DNA, 22 bp, Artificial Sequence
  Synthetic oligonucleotide; TTC chr11 5258452 5258473 5258457 5258452 -
ccagttcctctggcagccctcc

SEQ ID NO: 138568 - DNA, 22 bp, Artificial Sequence
  Synthetic oligonucleotide; TTC chr11 5258445 5258466 5258450 5258445 -
ctctggcagccctcccaaatga

SEQ ID NO: 138569 - DNA, 22 bp, Artificial Sequence
  Synthetic oligonucleotide; CTC chr11 5258442 5258463 5258447 5258442 -
tggcagccctcccaaatgaccc

SEQ ID NO: 138570 - DNA, 22 bp, Artificial Sequence
  Synthetic oligonucleotide; CTG chr11 5258440 5258461 5258445 5258440 -
gcagccctcccaaatgacccct

SEQ ID NO: 138571 - DNA, 22 bp, Artificial Sequence
  Synthetic oligonucleotide; CTC chr11 5258431 5258452 5258436 5258431 -
ccaaatgacccctgtgaggcaa

SEQ ID NO: 138572 - DNA, 22 bp, Artificial Sequence
  Synthetic oligonucleotide; CTG chr11 5258417 5258438 5258422 5258417 -
tgaggcaaggcagaaatggctt

SEQ ID NO: 138573 - DNA, 22 bp, Artificial Sequence
  Synthetic oligonucleotide; CTT chr11 5258395 5258416 5258400 5258395 -
cctaggggacccagagagccca

SEQ ID NO: 138574 - DNA, 22 bp, Artificial Sequence
  Synthetic oligonucleotide; TTC chr11 5258394 5258415 5258399 5258394 -
ctaggggacccagagagcccac

SEQ ID NO: 138575 - DNA, 22 bp, Artificial Sequence
  Synthetic oligonucleotide; CTA chr11 5258391 5258412 5258396 5258391 -
ggggacccagagagcccacagg

SEQ ID NO: 138576 - DNA, 22 bp, Artificial Sequence
  Synthetic oligonucleotide; CTT chr11 5258365 5258386 5258370 5258365 -
ttcccgctgcttcctctacccc

SEQ ID NO: 138577 - DNA, 22 bp, Artificial Sequence
  Synthetic oligonucleotide; TTT chr11 5258364 5258385 5258369 5258364 -
tcccgctgcttcctctacccct

SEQ ID NO: 138578 - DNA, 22 bp, Artificial Sequence
  Synthetic oligonucleotide; TTT chr11 5258363 5258384 5258368 5258363 -
cccgctgcttcctctacccctg

SEQ ID NO: 138579 - DNA, 22 bp, Artificial Sequence
  Synthetic oligonucleotide; TTC chr11 5258362 5258383 5258367 5258362 -
ccgctgcttcctctacccctgt

SEQ ID NO: 138580 - DNA, 22 bp, Artificial Sequence
  Synthetic oligonucleotide; CTG chr11 5258356 5258377 5258361 5258356 -
cttcctctacccctgtattttg

SEQ ID NO: 138581 - DNA, 22 bp, Artificial Sequence
  Synthetic oligonucleotide; CTT chr11 5258353 5258374 5258358 5258353 -
cctctacccctgtattttgctt

SEQ ID NO: 138582 - DNA, 22 bp, Artificial Sequence
  Synthetic oligonucleotide; TTC chr11 5258352 5258373 5258357 5258352 -
ctctacccctgtattttgcttg

SEQ ID NO: 138583 - DNA, 22 bp, Artificial Sequence
  Synthetic oligonucleotide; CTC chr11 5258349 5258370 5258354 5258349 -
tacccctgtattttgcttggcc

SEQ ID NO: 138584 - DNA, 22 bp, Artificial Sequence
  Synthetic oligonucleotide; CTA chr11 5258347 5258368 5258352 5258347 -
cccctgtattttgcttggccct

SEQ ID NO: 138585 - DNA, 22 bp, Artificial Sequence
  Synthetic oligonucleotide; CTG chr11 5258341 5258362 5258346 5258341 -
tattttgcttggccctctaaat

SEQ ID NO: 138586 - DNA, 22 bp, Artificial Sequence
  Synthetic oligonucleotide; TTT chr11 5258336 5258357 5258341 5258336 -
tgcttggccctctaaattgact

SEQ ID NO: 138587 - DNA, 22 bp, Artificial Sequence
  Synthetic oligonucleotide; TTT chr11 5258335 5258356 5258340 5258335 -
gcttggccctctaaattgactc

SEQ ID NO: 138588 - DNA, 22 bp, Artificial Sequence
  Synthetic oligonucleotide; TTG chr11 5258334 5258355 5258339 5258334 -
cttggccctctaaattgactca

SEQ ID NO: 138589 - DNA, 22 bp, Artificial Sequence
  Synthetic oligonucleotide; CTT chr11 5258331 5258352 5258336 5258331 -
ggccctctaaattgactcagct

SEQ ID NO: 138590 - DNA, 22 bp, Artificial Sequence
  Synthetic oligonucleotide; TTG chr11 5258330 5258351 5258335 5258330 -
gccctctaaattgactcagctc

SEQ ID NO: 138591 - DNA, 22 bp, Artificial Sequence
  Synthetic oligonucleotide; CTC chr11 5258324 5258345 5258329 5258324 -
taaattgactcagctccaggta

SEQ ID NO: 138592 - DNA, 22 bp, Artificial Sequence
  Synthetic oligonucleotide; CTA chr11 5258322 5258343 5258327 5258322 -
aattgactcagctccaggtaag

SEQ ID NO: 138593 - DNA, 22 bp, Artificial Sequence
  Synthetic oligonucleotide; TTG chr11 5258317 5258338 5258322 5258317 -
actcagctccaggtaaggtcag

SEQ ID NO: 138594 - DNA, 22 bp, Artificial Sequence
  Synthetic oligonucleotide; CTC chr11 5258313 5258334 5258318 5258313 -
agctccaggtaaggtcagaatc

SEQ ID NO: 138595 - DNA, 22 bp, Artificial Sequence
  Synthetic oligonucleotide; CTC chr11 5258308 5258329 5258313 5258308 -
caggtaaggtcagaatcttctc

SEQ ID NO: 138596 - DNA, 22 bp, Artificial Sequence
  Synthetic oligonucleotide; CTT chr11 5258289 5258310 5258294 5258289 -
ctcctgtggtctagatcttcag

SEQ ID NO: 138597 - DNA, 22 bp, Artificial Sequence
  Synthetic oligonucleotide; TTC chr11 5258288 5258309 5258293 5258288 -
tcctgtggtctagatcttcagg

SEQ ID NO: 138598 - DNA, 22 bp, Artificial Sequence
  Synthetic oligonucleotide; CTC chr11 5258286 5258307 5258291 5258286 -
ctgtggtctagatcttcaggtt

SEQ ID NO: 138599 - DNA, 22 bp, Artificial Sequence
  Synthetic oligonucleotide; CTG chr11 5258283 5258304 5258288 5258283 -
tggtctagatcttcaggttccc

SEQ ID NO: 138600 - DNA, 22 bp, Artificial Sequence
  Synthetic oligonucleotide; CTA chr11 5258276 5258297 5258281 5258276 -
gatcttcaggttccccagtgag

SEQ ID NO: 138601 - DNA, 22 bp, Artificial Sequence
  Synthetic oligonucleotide; CTT chr11 5258270 5258291 5258275 5258270 -
caggttccccagtgaggatgtg

SEQ ID NO: 138602 - DNA, 22 bp, Artificial Sequence
  Synthetic oligonucleotide; TTC chr11 5258269 5258290 5258274 5258269 -
aggttccccagtgaggatgtgt

SEQ ID NO: 138603 - DNA, 22 bp, Artificial Sequence
  Synthetic oligonucleotide; TTC chr11 5258263 5258284 5258268 5258263 -
cccagtgaggatgtgtgtttgg

SEQ ID NO: 138604 - DNA, 22 bp, Artificial Sequence
  Synthetic oligonucleotide; TTT chr11 5258243 5258264 5258248 5258243 -
gggggtagacggtccccctttt

SEQ ID NO: 138605 - DNA, 22 bp, Artificial Sequence
  Synthetic oligonucleotide; TTG chr11 5258242 5258263 5258247 5258242 -
ggggtagacggtcccccttttc

SEQ ID NO: 138606 - DNA, 22 bp, Artificial Sequence
  Synthetic oligonucleotide; CTT chr11 5258223 5258244 5258228 5258223 -
ttccacttccacagtttgggca

SEQ ID NO: 138607 - DNA, 22 bp, Artificial Sequence
  Synthetic oligonucleotide; TTT chr11 5258222 5258243 5258227 5258222 -
tccacttccacagtttgggcac

SEQ ID NO: 138608 - DNA, 22 bp, Artificial Sequence
  Synthetic oligonucleotide; TTT chr11 5258221 5258242 5258226 5258221 -
ccacttccacagtttgggcact

SEQ ID NO: 138609 - DNA, 22 bp, Artificial Sequence
  Synthetic oligonucleotide; TTC chr11 5258220 5258241 5258225 5258220 -
cacttccacagtttgggcactc

SEQ ID NO: 138610 - DNA, 22 bp, Artificial Sequence
  Synthetic oligonucleotide; CTT chr11 5258215 5258236 5258220 5258215 -
ccacagtttgggcactcacaat

SEQ ID NO: 138611 - DNA, 22 bp, Artificial Sequence
  Synthetic oligonucleotide; TTC chr11 5258214 5258235 5258219 5258214 -
cacagtttgggcactcacaata

SEQ ID NO: 138612 - DNA, 22 bp, Artificial Sequence
  Synthetic oligonucleotide; TTT chr11 5258206 5258227 5258211 5258206 -
gggcactcacaatatttggggt

SEQ ID NO: 138613 - DNA, 22 bp, Artificial Sequence
  Synthetic oligonucleotide; TTG chr11 5258205 5258226 5258210 5258205 -
ggcactcacaatatttggggtg

SEQ ID NO: 138614 - DNA, 22 bp, Artificial Sequence
  Synthetic oligonucleotide; CTC chr11 5258198 5258219 5258203 5258198 -
acaatatttggggtgtttcccg

SEQ ID NO: 138615 - DNA, 22 bp, Artificial Sequence
  Synthetic oligonucleotide; TTT chr11 5258189 5258210 5258194 5258189 -
ggggtgtttcccgggtcctgca

SEQ ID NO: 138616 - DNA, 22 bp, Artificial Sequence
  Synthetic oligonucleotide; TTG chr11 5258188 5258209 5258193 5258188 -
gggtgtttcccgggtcctgcag

SEQ ID NO: 138617 - DNA, 22 bp, Artificial Sequence
  Synthetic oligonucleotide; TTT chr11 5258180 5258201 5258185 5258180 -
cccgggtcctgcaggagcaatc

SEQ ID NO: 138618 - DNA, 22 bp, Artificial Sequence
  Synthetic oligonucleotide; TTC chr11 5258179 5258200 5258184 5258179 -
ccgggtcctgcaggagcaatct

SEQ ID NO: 138619 - DNA, 22 bp, Artificial Sequence
  Synthetic oligonucleotide; CTG chr11 5258169 5258190 5258174 5258169 -
caggagcaatctgcttctttca

SEQ ID NO: 138620 - DNA, 22 bp, Artificial Sequence
  Synthetic oligonucleotide; CTG chr11 5258156 5258177 5258161 5258156 -
cttctttcagagggtgtgtgcg

SEQ ID NO: 138621 - DNA, 22 bp, Artificial Sequence
  Synthetic oligonucleotide; CTT chr11 5258153 5258174 5258158 5258153 -
ctttcagagggtgtgtgcgttc

SEQ ID NO: 138622 - DNA, 22 bp, Artificial Sequence
  Synthetic oligonucleotide; TTC chr11 5258152 5258173 5258157 5258152 -
tttcagagggtgtgtgcgttct

SEQ ID NO: 138623 - DNA, 22 bp, Artificial Sequence
  Synthetic oligonucleotide; CTT chr11 5258150 5258171 5258155 5258150 -
tcagagggtgtgtgcgttctct

SEQ ID NO: 138624 - DNA, 22 bp, Artificial Sequence
  Synthetic oligonucleotide; TTT chr11 5258149 5258170 5258154 5258149 -
cagagggtgtgtgcgttctctc

SEQ ID NO: 138625 - DNA, 22 bp, Artificial Sequence
  Synthetic oligonucleotide; TTC chr11 5258148 5258169 5258153 5258148 -
agagggtgtgtgcgttctctca

SEQ ID NO: 138626 - DNA, 22 bp, Artificial Sequence
  Synthetic oligonucleotide; TTC chr11 5258131 5258152 5258136 5258131 -
tctcagctttcttgatttattt

SEQ ID NO: 138627 - DNA, 22 bp, Artificial Sequence
  Synthetic oligonucleotide; CTC chr11 5258129 5258150 5258134 5258129 -
tcagctttcttgatttatttct

SEQ ID NO: 138628 - DNA, 22 bp, Artificial Sequence
  Synthetic oligonucleotide; CTC chr11 5258127 5258148 5258132 5258127 -
agctttcttgatttatttctgc

SEQ ID NO: 138629 - DNA, 22 bp, Artificial Sequence
  Synthetic oligonucleotide; CTT chr11 5258122 5258143 5258127 5258122 -
tcttgatttatttctgcaggtg

SEQ ID NO: 138630 - DNA, 22 bp, Artificial Sequence
  Synthetic oligonucleotide; TTT chr11 5258121 5258142 5258126 5258121 -
cttgatttatttctgcaggtgg

SEQ ID NO: 138631 - DNA, 22 bp, Artificial Sequence
  Synthetic oligonucleotide; TTC chr11 5258120 5258141 5258125 5258120 -
ttgatttatttctgcaggtggt

SEQ ID NO: 138632 - DNA, 22 bp, Artificial Sequence
  Synthetic oligonucleotide; CTT chr11 5258118 5258139 5258123 5258118 -
gatttatttctgcaggtggttc

SEQ ID NO: 138633 - DNA, 22 bp, Artificial Sequence
  Synthetic oligonucleotide; TTG chr11 5258117 5258138 5258122 5258117 -
atttatttctgcaggtggttct

SEQ ID NO: 138634 - DNA, 22 bp, Artificial Sequence
  Synthetic oligonucleotide; TTT chr11 5258113 5258134 5258118 5258113 -
atttctgcaggtggttctgcaa

SEQ ID NO: 138635 - DNA, 22 bp, Artificial Sequence
  Synthetic oligonucleotide; TTA chr11 5258112 5258133 5258117 5258112 -
tttctgcaggtggttctgcaaa

SEQ ID NO: 138636 - DNA, 22 bp, Artificial Sequence
  Synthetic oligonucleotide; TTT chr11 5258109 5258130 5258114 5258109 -
ctgcaggtggttctgcaaaaaa

SEQ ID NO: 138637 - DNA, 22 bp, Artificial Sequence
  Synthetic oligonucleotide; TTC chr11 5258108 5258129 5258113 5258108 -
tgcaggtggttctgcaaaaaaa

SEQ ID NO: 138638 - DNA, 22 bp, Artificial Sequence
  Synthetic oligonucleotide; CTG chr11 5258106 5258127 5258111 5258106 -
caggtggttctgcaaaaaaaat

SEQ ID NO: 138639 - DNA, 22 bp, Artificial Sequence
  Synthetic oligonucleotide; TTC chr11 5258096 5258117 5258101 5258096 -
tgcaaaaaaaattcctgatggg

SEQ ID NO: 138640 - DNA, 22 bp, Artificial Sequence
  Synthetic oligonucleotide; CTG chr11 5258094 5258115 5258099 5258094 -
caaaaaaaattcctgatgggag

SEQ ID NO: 138641 - DNA, 22 bp, Artificial Sequence
  Synthetic oligonucleotide; TTC chr11 5258082 5258103 5258087 5258082 -
ctgatgggagacttcacatgct

SEQ ID NO: 138642 - DNA, 22 bp, Artificial Sequence
  Synthetic oligonucleotide; CTG chr11 5258079 5258100 5258084 5258079 -
atgggagacttcacatgctgct

SEQ ID NO: 138643 - DNA, 22 bp, Artificial Sequence
  Synthetic oligonucleotide; CTT chr11 5258068 5258089 5258073 5258068 -
cacatgctgctctgtgcatccg

SEQ ID NO: 138644 - DNA, 22 bp, Artificial Sequence
  Synthetic oligonucleotide; TTC chr11 5258067 5258088 5258072 5258067 -
acatgctgctctgtgcatccga

SEQ ID NO: 138645 - DNA, 22 bp, Artificial Sequence
  Synthetic oligonucleotide; CTG chr11 5258059 5258080 5258064 5258059 -
ctctgtgcatccgagtgggagc

SEQ ID NO: 138646 - DNA, 22 bp, Artificial Sequence
  Synthetic oligonucleotide; CTC chr11 5258056 5258077 5258061 5258056 -
tgtgcatccgagtgggagctgc

SEQ ID NO: 138647 - DNA, 22 bp, Artificial Sequence
  Synthetic oligonucleotide; CTG chr11 5258054 5258075 5258059 5258054 -
tgcatccgagtgggagctgcaa

SEQ ID NO: 138648 - DNA, 22 bp, Artificial Sequence
  Synthetic oligonucleotide; CTG chr11 5258035 5258056 5258040 5258035 -
caatgtacttctgctgcctccc

SEQ ID NO: 138649 - DNA, 22 bp, Artificial Sequence
  Synthetic oligonucleotide; CTT chr11 5258025 5258046 5258030 5258025 -
ctgctgcctcccatctgccatc

SEQ ID NO: 138650 - DNA, 22 bp, Artificial Sequence
  Synthetic oligonucleotide; TTC chr11 5258024 5258045 5258029 5258024 -
tgctgcctcccatctgccatca

SEQ ID NO: 138651 - DNA, 22 bp, Artificial Sequence
  Synthetic oligonucleotide; CTG chr11 5258022 5258043 5258027 5258022 -
ctgcctcccatctgccatcacc

SEQ ID NO: 138652 - DNA, 22 bp, Artificial Sequence
  Synthetic oligonucleotide; CTG chr11 5258019 5258040 5258024 5258019 -
cctcccatctgccatcaccctc

SEQ ID NO: 138653 - DNA, 22 bp, Artificial Sequence
  Synthetic oligonucleotide; CTC chr11 5258015 5258036 5258020 5258015 -
ccatctgccatcaccctctaat

SEQ ID NO: 138654 - DNA, 22 bp, Artificial Sequence
  Synthetic oligonucleotide; CTG chr11 5258008 5258029 5258013 5258008 -
ccatcaccctctaatttgtcgg

SEQ ID NO: 138655 - DNA, 22 bp, Artificial Sequence
  Synthetic oligonucleotide; CTC chr11 5257997 5258018 5258002 5257997 -
taatttgtcggtaatatgcatt

SEQ ID NO: 138656 - DNA, 22 bp, Artificial Sequence
  Synthetic oligonucleotide; CTA chr11 5257995 5258016 5258000 5257995 -
atttgtcggtaatatgcatttt

SEQ ID NO: 138657 - DNA, 22 bp, Artificial Sequence
  Synthetic oligonucleotide; TTT chr11 5257991 5258012 5257996 5257991 -
gtcggtaatatgcatttttaat

SEQ ID NO: 138658 - DNA, 22 bp, Artificial Sequence
  Synthetic oligonucleotide; TTG chr11 5257990 5258011 5257995 5257990 -
tcggtaatatgcatttttaatc

SEQ ID NO: 138659 - DNA, 22 bp, Artificial Sequence
  Synthetic oligonucleotide; TTT chr11 5257974 5257995 5257979 5257974 -
ttaatcaatctttttttctctc

SEQ ID NO: 138660 - DNA, 22 bp, Artificial Sequence
  Synthetic oligonucleotide; TTT chr11 5257973 5257994 5257978 5257973 -
taatcaatctttttttctctct

SEQ ID NO: 138661 - DNA, 22 bp, Artificial Sequence
  Synthetic oligonucleotide; TTT chr11 5257972 5257993 5257977 5257972 -
aatcaatctttttttctctctc

SEQ ID NO: 138662 - DNA, 22 bp, Artificial Sequence
  Synthetic oligonucleotide; TTA chr11 5257971 5257992 5257976 5257971 -
atcaatctttttttctctctct

SEQ ID NO: 138663 - DNA, 22 bp, Artificial Sequence
  Synthetic oligonucleotide; CTT chr11 5257962 5257983 5257967 5257962 -
tttttctctctctctctttttc

SEQ ID NO: 138664 - DNA, 22 bp, Artificial Sequence
  Synthetic oligonucleotide; TTT chr11 5257961 5257982 5257966 5257961 -
ttttctctctctctctttttct

SEQ ID NO: 138665 - DNA, 22 bp, Artificial Sequence
  Synthetic oligonucleotide; TTT chr11 5257960 5257981 5257965 5257960 -
tttctctctctctctttttctt

SEQ ID NO: 138666 - DNA, 22 bp, Artificial Sequence
  Synthetic oligonucleotide; TTT chr11 5257959 5257980 5257964 5257959 -
ttctctctctctctttttcttc

SEQ ID NO: 138667 - DNA, 22 bp, Artificial Sequence
  Synthetic oligonucleotide; TTT chr11 5257958 5257979 5257963 5257958 -
tctctctctctctttttcttct

SEQ ID NO: 138668 - DNA, 22 bp, Artificial Sequence
  Synthetic oligonucleotide; TTT chr11 5257957 5257978 5257962 5257957 -
ctctctctctctttttcttctc

SEQ ID NO: 138669 - DNA, 22 bp, Artificial Sequence
  Synthetic oligonucleotide; TTC chr11 5257956 5257977 5257961 5257956 -
tctctctctctttttcttctcc

SEQ ID NO: 138670 - DNA, 22 bp, Artificial Sequence
  Synthetic oligonucleotide; CTC chr11 5257954 5257975 5257959 5257954 -
tctctctctttttcttctcccc

SEQ ID NO: 138671 - DNA, 22 bp, Artificial Sequence
  Synthetic oligonucleotide; CTC chr11 5257952 5257973 5257957 5257952 -
tctctctttttcttctccccca

SEQ ID NO: 138672 - DNA, 22 bp, Artificial Sequence
  Synthetic oligonucleotide; CTC chr11 5257950 5257971 5257955 5257950 -
tctctttttcttctcccccaaa

SEQ ID NO: 138673 - DNA, 22 bp, Artificial Sequence
  Synthetic oligonucleotide; CTC chr11 5257948 5257969 5257953 5257948 -
tctttttcttctcccccaaaac

SEQ ID NO: 138674 - DNA, 22 bp, Artificial Sequence
  Synthetic oligonucleotide; CTC chr11 5257946 5257967 5257951 5257946 -
tttttcttctcccccaaaacta

SEQ ID NO: 138675 - DNA, 22 bp, Artificial Sequence
  Synthetic oligonucleotide; CTT chr11 5257944 5257965 5257949 5257944 -
tttcttctcccccaaaactata

SEQ ID NO: 138676 - DNA, 22 bp, Artificial Sequence
  Synthetic oligonucleotide; TTT chr11 5257943 5257964 5257948 5257943 -
ttcttctcccccaaaactatac

SEQ ID NO: 138677 - DNA, 22 bp, Artificial Sequence
  Synthetic oligonucleotide; TTT chr11 5257942 5257963 5257947 5257942 -
tcttctcccccaaaactatact

SEQ ID NO: 138678 - DNA, 22 bp, Artificial Sequence
  Synthetic oligonucleotide; TTT chr11 5257941 5257962 5257946 5257941 -
cttctcccccaaaactatactg

SEQ ID NO: 138679 - DNA, 22 bp, Artificial Sequence
  Synthetic oligonucleotide; TTC chr11 5257940 5257961 5257945 5257940 -
ttctcccccaaaactatactgc

SEQ ID NO: 138680 - DNA, 22 bp, Artificial Sequence
  Synthetic oligonucleotide; CTT chr11 5257938 5257959 5257943 5257938 -
ctcccccaaaactatactgccc

SEQ ID NO: 138681 - DNA, 22 bp, Artificial Sequence
  Synthetic oligonucleotide; TTC chr11 5257937 5257958 5257942 5257937 -
tcccccaaaactatactgccct

SEQ ID NO: 138682 - DNA, 22 bp, Artificial Sequence
  Synthetic oligonucleotide; CTC chr11 5257935 5257956 5257940 5257935 -
ccccaaaactatactgcccttt

SEQ ID NO: 138683 - DNA, 22 bp, Artificial Sequence
  Synthetic oligonucleotide; CTA chr11 5257924 5257945 5257929 5257924 -
tactgccctttgatatcaagga

SEQ ID NO: 138684 - DNA, 22 bp, Artificial Sequence
  Synthetic oligonucleotide; CTG chr11 5257919 5257940 5257924 5257919 -
ccctttgatatcaaggaatcaa

SEQ ID NO: 138685 - DNA, 22 bp, Artificial Sequence
  Synthetic oligonucleotide; CTT chr11 5257914 5257935 5257919 5257914 -
tgatatcaaggaatcaaggacg

SEQ ID NO: 138686 - DNA, 22 bp, Artificial Sequence
  Synthetic oligonucleotide; TTT chr11 5257913 5257934 5257918 5257913 -
gatatcaaggaatcaaggacgt

SEQ ID NO: 138687 - DNA, 22 bp, Artificial Sequence
  Synthetic oligonucleotide; TTG chr11 5257912 5257933 5257917 5257912 -
atatcaaggaatcaaggacgtg

SEQ ID NO: 138688 - DNA, 22 bp, Artificial Sequence
  Synthetic oligonucleotide; TTG chr11 5257884 5257905 5257889 5257884 -
aggggtgggcagtggatacact

SEQ ID NO: 138689 - DNA, 22 bp, Artificial Sequence
  Synthetic oligonucleotide; CTC chr11 5257861 5257882 5257866 5257861 -
tttaccccttagggagctatat

SEQ ID NO: 138690 - DNA, 22 bp, Artificial Sequence
  Synthetic oligonucleotide; CTT chr11 5257859 5257880 5257864 5257859 -
taccccttagggagctatatct

SEQ ID NO: 138691 - DNA, 22 bp, Artificial Sequence
  Synthetic oligonucleotide; TTT chr11 5257858 5257879 5257863 5257858 -
accccttagggagctatatcta

SEQ ID NO: 138692 - DNA, 22 bp, Artificial Sequence
  Synthetic oligonucleotide; TTA chr11 5257857 5257878 5257862 5257857 -
ccccttagggagctatatctag

SEQ ID NO: 138693 - DNA, 22 bp, Artificial Sequence
  Synthetic oligonucleotide; CTT chr11 5257851 5257872 5257856 5257851 -
agggagctatatctagatttag

SEQ ID NO: 138694 - DNA, 22 bp, Artificial Sequence
  Synthetic oligonucleotide; TTA chr11 5257850 5257871 5257855 5257850 -
gggagctatatctagatttaga

SEQ ID NO: 138695 - DNA, 22 bp, Artificial Sequence
  Synthetic oligonucleotide; CTA chr11 5257842 5257863 5257847 5257842 -
tatctagatttagatattgcca

SEQ ID NO: 138696 - DNA, 22 bp, Artificial Sequence
  Synthetic oligonucleotide; CTA chr11 5257836 5257857 5257841 5257836 -
gatttagatattgccaattcaa

SEQ ID NO: 138697 - DNA, 22 bp, Artificial Sequence
  Synthetic oligonucleotide; TTT chr11 5257831 5257852 5257836 5257831 -
agatattgccaattcaagataa

SEQ ID NO: 138698 - DNA, 22 bp, Artificial Sequence
  Synthetic oligonucleotide; TTA chr11 5257830 5257851 5257835 5257830 -
gatattgccaattcaagataac

SEQ ID NO: 138699 - DNA, 22 bp, Artificial Sequence
  Synthetic oligonucleotide; TTG chr11 5257823 5257844 5257828 5257823 -
ccaattcaagataacttaattg

SEQ ID NO: 138700 - DNA, 22 bp, Artificial Sequence
  Synthetic oligonucleotide; TTC chr11 5257816 5257837 5257821 5257816 -
aagataacttaattgaaagcaa

SEQ ID NO: 138701 - DNA, 22 bp, Artificial Sequence
  Synthetic oligonucleotide; CTT chr11 5257806 5257827 5257811 5257806 -
aattgaaagcaaattcataatg

SEQ ID NO: 138702 - DNA, 22 bp, Artificial Sequence
  Synthetic oligonucleotide; TTA chr11 5257805 5257826 5257810 5257805 -
attgaaagcaaattcataatga

SEQ ID NO: 138703 - DNA, 22 bp, Artificial Sequence
  Synthetic oligonucleotide; TTG chr11 5257801 5257822 5257806 5257801 -
aaagcaaattcataatgaatac

SEQ ID NO: 138704 - DNA, 22 bp, Artificial Sequence
  Synthetic oligonucleotide; TTC chr11 5257790 5257811 5257795 5257790 -
ataatgaatacacacacacaca

SEQ ID NO: 138705 - DNA, 22 bp, Artificial Sequence
  Synthetic oligonucleotide; CTG chr11 5257758 5257779 5257763 5257758 -
catgacaagatttttaatagtt

SEQ ID NO: 138706 - DNA, 22 bp, Artificial Sequence
  Synthetic oligonucleotide; TTT chr11 5257745 5257766 5257750 5257745 -
ttaatagttgaaagaataacta

SEQ ID NO: 138707 - DNA, 22 bp, Artificial Sequence
  Synthetic oligonucleotide; TTT chr11 5257744 5257765 5257749 5257744 -
taatagttgaaagaataactaa

SEQ ID NO: 138708 - DNA, 22 bp, Artificial Sequence
  Synthetic oligonucleotide; TTT chr11 5257743 5257764 5257748 5257743 -
aatagttgaaagaataactaat

SEQ ID NO: 138709 - DNA, 22 bp, Artificial Sequence
  Synthetic oligonucleotide; TTA chr11 5257742 5257763 5257747 5257742 -
atagttgaaagaataactaata

SEQ ID NO: 138710 - DNA, 22 bp, Artificial Sequence
  Synthetic oligonucleotide; TTG chr11 5257735 5257756 5257740 5257735 -
aaagaataactaataattgtcc

SEQ ID NO: 138711 - DNA, 22 bp, Artificial Sequence
  Synthetic oligonucleotide; CTA chr11 5257723 5257744 5257728 5257723 -
ataattgtccacaggcaataag

SEQ ID NO: 138712 - DNA, 22 bp, Artificial Sequence
  Synthetic oligonucleotide; TTG chr11 5257716 5257737 5257721 5257716 -
tccacaggcaataagggctttt

SEQ ID NO: 138713 - DNA, 22 bp, Artificial Sequence
  Synthetic oligonucleotide; CTT chr11 5257696 5257717 5257701 5257696 -
tttaagcaaaacagttgtgata

SEQ ID NO: 138714 - DNA, 22 bp, Artificial Sequence
  Synthetic oligonucleotide; TTT chr11 5257695 5257716 5257700 5257695 -
ttaagcaaaacagttgtgataa

SEQ ID NO: 138715 - DNA, 22 bp, Artificial Sequence
  Synthetic oligonucleotide; TTT chr11 5257694 5257715 5257699 5257694 -
taagcaaaacagttgtgataaa

SEQ ID NO: 138716 - DNA, 22 bp, Artificial Sequence
  Synthetic oligonucleotide; TTT chr11 5257693 5257714 5257698 5257693 -
aagcaaaacagttgtgataaac

SEQ ID NO: 138717 - DNA, 22 bp, Artificial Sequence
  Synthetic oligonucleotide; TTA chr11 5257692 5257713 5257697 5257692 -
agcaaaacagttgtgataaaca

SEQ ID NO: 138718 - DNA, 22 bp, Artificial Sequence
  Synthetic oligonucleotide; TTG chr11 5257679 5257700 5257684 5257679 -
tgataaacaggtcattcttaga

SEQ ID NO: 138719 - DNA, 22 bp, Artificial Sequence
  Synthetic oligonucleotide; TTC chr11 5257662 5257683 5257667 5257662 -
ttagaatagtaatccagccaat

SEQ ID NO: 138720 - DNA, 22 bp, Artificial Sequence
  Synthetic oligonucleotide; CTT chr11 5257660 5257681 5257665 5257660 -
agaatagtaatccagccaatag

SEQ ID NO: 138721 - DNA, 22 bp, Artificial Sequence
  Synthetic oligonucleotide; TTA chr11 5257659 5257680 5257664 5257659 -
gaatagtaatccagccaatagt

SEQ ID NO: 138722 - DNA, 22 bp, Artificial Sequence
  Synthetic oligonucleotide; TTG chr11 5257629 5257650 5257634 5257629 -
cttagagattatgtcattacca

SEQ ID NO: 138723 - DNA, 22 bp, Artificial Sequence
  Synthetic oligonucleotide; CTT chr11 5257626 5257647 5257631 5257626 -
agagattatgtcattaccagag

SEQ ID NO: 138724 - DNA, 22 bp, Artificial Sequence
  Synthetic oligonucleotide; TTA chr11 5257625 5257646 5257630 5257625 -
gagattatgtcattaccagagt

SEQ ID NO: 138725 - DNA, 22 bp, Artificial Sequence
  Synthetic oligonucleotide; TTA chr11 5257618 5257639 5257623 5257618 -
tgtcattaccagagttaaaatt

SEQ ID NO: 138726 - DNA, 22 bp, Artificial Sequence
  Synthetic oligonucleotide; TTA chr11 5257610 5257631 5257615 5257610 -
ccagagttaaaattctataatg

SEQ ID NO: 138727 - DNA, 22 bp, Artificial Sequence
  Synthetic oligonucleotide; TTA chr11 5257601 5257622 5257606 5257601 -
aaattctataatggcttctcac

SEQ ID NO: 138728 - DNA, 22 bp, Artificial Sequence
  Synthetic oligonucleotide; TTC chr11 5257595 5257616 5257600 5257595 -
tataatggcttctcactcccta

SEQ ID NO: 138729 - DNA, 22 bp, Artificial Sequence
  Synthetic oligonucleotide; CTA chr11 5257593 5257614 5257598 5257593 -
taatggcttctcactccctacc

SEQ ID NO: 138730 - DNA, 22 bp, Artificial Sequence
  Synthetic oligonucleotide; CTT chr11 5257584 5257605 5257589 5257584 -
ctcactccctaccactgaggac

SEQ ID NO: 138731 - DNA, 22 bp, Artificial Sequence
  Synthetic oligonucleotide; TTC chr11 5257583 5257604 5257588 5257583 -
tcactccctaccactgaggaca

SEQ ID NO: 138732 - DNA, 22 bp, Artificial Sequence
  Synthetic oligonucleotide; CTC chr11 5257581 5257602 5257586 5257581 -
actccctaccactgaggacaag

SEQ ID NO: 138733 - DNA, 22 bp, Artificial Sequence
  Synthetic oligonucleotide; CTC chr11 5257577 5257598 5257582 5257577 -
cctaccactgaggacaagttta

SEQ ID NO: 138734 - DNA, 22 bp, Artificial Sequence
  Synthetic oligonucleotide; CTA chr11 5257573 5257594 5257578 5257573 -
ccactgaggacaagtttatgtc

SEQ ID NO: 138735 - DNA, 22 bp, Artificial Sequence
  Synthetic oligonucleotide; CTG chr11 5257567 5257588 5257572 5257567 -
aggacaagtttatgtccttagg

SEQ ID NO: 138736 - DNA, 22 bp, Artificial Sequence
  Synthetic oligonucleotide; TTT chr11 5257556 5257577 5257561 5257556 -
atgtccttaggtttatgcttcc

SEQ ID NO: 138737 - DNA, 22 bp, Artificial Sequence
  Synthetic oligonucleotide; TTA chr11 5257555 5257576 5257560 5257555 -
tgtccttaggtttatgcttccc

SEQ ID NO: 138738 - DNA, 22 bp, Artificial Sequence
  Synthetic oligonucleotide; CTT chr11 5257548 5257569 5257553 5257548 -
aggtttatgcttccctgaaaca

SEQ ID NO: 138739 - DNA, 22 bp, Artificial Sequence
  Synthetic oligonucleotide; TTA chr11 5257547 5257568 5257552 5257547 -
ggtttatgcttccctgaaacaa

SEQ ID NO: 138740 - DNA, 22 bp, Artificial Sequence
  Synthetic oligonucleotide; TTT chr11 5257542 5257563 5257547 5257542 -
atgcttccctgaaacaatacca

SEQ ID NO: 138741 - DNA, 22 bp, Artificial Sequence
  Synthetic oligonucleotide; TTA chr11 5257541 5257562 5257546 5257541 -
tgcttccctgaaacaataccac

SEQ ID NO: 138742 - DNA, 22 bp, Artificial Sequence
  Synthetic oligonucleotide; CTT chr11 5257536 5257557 5257541 5257536 -
ccctgaaacaataccacctgct

SEQ ID NO: 138743 - DNA, 22 bp, Artificial Sequence
  Synthetic oligonucleotide; TTC chr11 5257535 5257556 5257540 5257535 -
cctgaaacaataccacctgcta

SEQ ID NO: 138744 - DNA, 22 bp, Artificial Sequence
  Synthetic oligonucleotide; CTG chr11 5257531 5257552 5257536 5257531 -
aaacaataccacctgctattct

SEQ ID NO: 138745 - DNA, 22 bp, Artificial Sequence
  Synthetic oligonucleotide; CTG chr11 5257516 5257537 5257521 5257516 -
ctattctccactttacatatca

SEQ ID NO: 138746 - DNA, 22 bp, Artificial Sequence
  Synthetic oligonucleotide; CTA chr11 5257513 5257534 5257518 5257513 -
ttctccactttacatatcaacg

SEQ ID NO: 138747 - DNA, 22 bp, Artificial Sequence
  Synthetic oligonucleotide; TTC chr11 5257510 5257531 5257515 5257510 -
tccactttacatatcaacggca

SEQ ID NO: 138748 - DNA, 22 bp, Artificial Sequence
  Synthetic oligonucleotide; CTC chr11 5257508 5257529 5257513 5257508 -
cactttacatatcaacggcact

SEQ ID NO: 138749 - DNA, 22 bp, Artificial Sequence
  Synthetic oligonucleotide; CTT chr11 5257503 5257524 5257508 5257503 -
tacatatcaacggcactggttc

SEQ ID NO: 138750 - DNA, 22 bp, Artificial Sequence
  Synthetic oligonucleotide; TTT chr11 5257502 5257523 5257507 5257502 -
acatatcaacggcactggttct

SEQ ID NO: 138751 - DNA, 22 bp, Artificial Sequence
  Synthetic oligonucleotide; TTA chr11 5257501 5257522 5257506 5257501 -
catatcaacggcactggttctt

SEQ ID NO: 138752 - DNA, 22 bp, Artificial Sequence
  Synthetic oligonucleotide; CTG chr11 5257485 5257506 5257490 5257485 -
gttctttatctaactctctggc

SEQ ID NO: 138753 - DNA, 22 bp, Artificial Sequence
  Synthetic oligonucleotide; TTC chr11 5257481 5257502 5257486 5257481 -
tttatctaactctctggcacag

SEQ ID NO: 138754 - DNA, 22 bp, Artificial Sequence
  Synthetic oligonucleotide; CTT chr11 5257479 5257500 5257484 5257479 -
tatctaactctctggcacagca

SEQ ID NO: 138755 - DNA, 22 bp, Artificial Sequence
  Synthetic oligonucleotide; TTT chr11 5257478 5257499 5257483 5257478 -
atctaactctctggcacagcag

SEQ ID NO: 138756 - DNA, 22 bp, Artificial Sequence
  Synthetic oligonucleotide; TTA chr11 5257477 5257498 5257482 5257477 -
tctaactctctggcacagcagg

SEQ ID NO: 138757 - DNA, 22 bp, Artificial Sequence
  Synthetic oligonucleotide; CTA chr11 5257473 5257494 5257478 5257473 -
actctctggcacagcaggagtt

SEQ ID NO: 138758 - DNA, 22 bp, Artificial Sequence
  Synthetic oligonucleotide; CTC chr11 5257469 5257490 5257474 5257469 -
tctggcacagcaggagtttgtt

SEQ ID NO: 138759 - DNA, 22 bp, Artificial Sequence
  Synthetic oligonucleotide; CTC chr11 5257467 5257488 5257472 5257467 -
tggcacagcaggagtttgtttt

SEQ ID NO: 138760 - DNA, 22 bp, Artificial Sequence
  Synthetic oligonucleotide; CTG chr11 5257465 5257486 5257470 5257465 -
gcacagcaggagtttgttttct

SEQ ID NO: 138761 - DNA, 22 bp, Artificial Sequence
  Synthetic oligonucleotide; TTT chr11 5257450 5257471 5257455 5257450 -
gttttcttctgcttcagagctt

SEQ ID NO: 138762 - DNA, 22 bp, Artificial Sequence
  Synthetic oligonucleotide; TTG chr11 5257449 5257470 5257454 5257449 -
ttttcttctgcttcagagcttt

SEQ ID NO: 138763 - DNA, 22 bp, Artificial Sequence
  Synthetic oligonucleotide; TTT chr11 5257446 5257467 5257451 5257446 -
tcttctgcttcagagctttgaa

SEQ ID NO: 138764 - DNA, 22 bp, Artificial Sequence
  Synthetic oligonucleotide; TTT chr11 5257445 5257466 5257450 5257445 -
cttctgcttcagagctttgaat

SEQ ID NO: 138765 - DNA, 22 bp, Artificial Sequence
  Synthetic oligonucleotide; TTC chr11 5257444 5257465 5257449 5257444 -
ttctgcttcagagctttgaatt

SEQ ID NO: 138766 - DNA, 22 bp, Artificial Sequence
  Synthetic oligonucleotide; CTT chr11 5257442 5257463 5257447 5257442 -
ctgcttcagagctttgaattta

SEQ ID NO: 138767 - DNA, 22 bp, Artificial Sequence
  Synthetic oligonucleotide; TTC chr11 5257441 5257462 5257446 5257441 -
tgcttcagagctttgaatttac

SEQ ID NO: 138768 - DNA, 22 bp, Artificial Sequence
  Synthetic oligonucleotide; CTG chr11 5257439 5257460 5257444 5257439 -
cttcagagctttgaatttacta

SEQ ID NO: 138769 - DNA, 22 bp, Artificial Sequence
  Synthetic oligonucleotide; CTT chr11 5257436 5257457 5257441 5257436 -
cagagctttgaatttactattt

SEQ ID NO: 138770 - DNA, 22 bp, Artificial Sequence
  Synthetic oligonucleotide; TTC chr11 5257435 5257456 5257440 5257435 -
agagctttgaatttactatttc

SEQ ID NO: 138771 - DNA, 22 bp, Artificial Sequence
  Synthetic oligonucleotide; CTT chr11 5257428 5257449 5257433 5257428 -
tgaatttactatttcagcttct

SEQ ID NO: 138772 - DNA, 22 bp, Artificial Sequence
  Synthetic oligonucleotide; TTT chr11 5257427 5257448 5257432 5257427 -
gaatttactatttcagcttcta

SEQ ID NO: 138773 - DNA, 22 bp, Artificial Sequence
  Synthetic oligonucleotide; TTG chr11 5257426 5257447 5257431 5257426 -
aatttactatttcagcttctaa

SEQ ID NO: 138774 - DNA, 22 bp, Artificial Sequence
  Synthetic oligonucleotide; TTT chr11 5257421 5257442 5257426 5257421 -
actatttcagcttctaaacttt

SEQ ID NO: 138775 - DNA, 22 bp, Artificial Sequence
  Synthetic oligonucleotide; TTA chr11 5257420 5257441 5257425 5257420 -
ctatttcagcttctaaacttta

SEQ ID NO: 138776 - DNA, 22 bp, Artificial Sequence
  Synthetic oligonucleotide; CTA chr11 5257417 5257438 5257422 5257417 -
tttcagcttctaaactttattt

SEQ ID NO: 138777 - DNA, 22 bp, Artificial Sequence
  Synthetic oligonucleotide; TTT chr11 5257414 5257435 5257419 5257414 -
cagcttctaaactttatttggc

SEQ ID NO: 138778 - DNA, 22 bp, Artificial Sequence
  Synthetic oligonucleotide; TTC chr11 5257413 5257434 5257418 5257413 -
agcttctaaactttatttggca

SEQ ID NO: 138779 - DNA, 22 bp, Artificial Sequence
  Synthetic oligonucleotide; CTT chr11 5257408 5257429 5257413 5257408 -
ctaaactttatttggcaatgcc

SEQ ID NO: 138780 - DNA, 22 bp, Artificial Sequence
  Synthetic oligonucleotide; TTC chr11 5257407 5257428 5257412 5257407 -
taaactttatttggcaatgcct

SEQ ID NO: 138781 - DNA, 22 bp, Artificial Sequence
  Synthetic oligonucleotide; CTA chr11 5257405 5257426 5257410 5257405 -
aactttatttggcaatgccttc

SEQ ID NO: 138782 - DNA, 22 bp, Artificial Sequence
  Synthetic oligonucleotide; CTT chr11 5257400 5257421 5257405 5257400 -
tatttggcaatgccttcccatg

SEQ ID NO: 138783 - DNA, 22 bp, Artificial Sequence
  Synthetic oligonucleotide; TTT chr11 5257399 5257420 5257404 5257399 -
atttggcaatgccttcccatgg

SEQ ID NO: 138784 - DNA, 22 bp, Artificial Sequence
  Synthetic oligonucleotide; TTA chr11 5257398 5257419 5257403 5257398 -
tttggcaatgccttcccatggc

SEQ ID NO: 138785 - DNA, 22 bp, Artificial Sequence
  Synthetic oligonucleotide; TTT chr11 5257395 5257416 5257400 5257395 -
ggcaatgccttcccatggcaga

SEQ ID NO: 138786 - DNA, 22 bp, Artificial Sequence
  Synthetic oligonucleotide; TTG chr11 5257394 5257415 5257399 5257394 -
gcaatgccttcccatggcagat

SEQ ID NO: 138787 - DNA, 22 bp, Artificial Sequence
  Synthetic oligonucleotide; CTT chr11 5257384 5257405 5257389 5257384 -
cccatggcagattccttctgtc

SEQ ID NO: 138788 - DNA, 22 bp, Artificial Sequence
  Synthetic oligonucleotide; TTC chr11 5257383 5257404 5257388 5257383 -
ccatggcagattccttctgtca

SEQ ID NO: 138789 - DNA, 22 bp, Artificial Sequence
  Synthetic oligonucleotide; TTC chr11 5257370 5257391 5257375 5257370 -
cttctgtcattttgcctctgtt

SEQ ID NO: 138790 - DNA, 22 bp, Artificial Sequence
  Synthetic oligonucleotide; CTT chr11 5257367 5257388 5257372 5257367 -
ctgtcattttgcctctgttcga

SEQ ID NO: 138791 - DNA, 22 bp, Artificial Sequence
  Synthetic oligonucleotide; TTC chr11 5257366 5257387 5257371 5257366 -
tgtcattttgcctctgttcgaa

SEQ ID NO: 138792 - DNA, 22 bp, Artificial Sequence
  Synthetic oligonucleotide; CTG chr11 5257364 5257385 5257369 5257364 -
tcattttgcctctgttcgaata

SEQ ID NO: 138793 - DNA, 22 bp, Artificial Sequence
  Synthetic oligonucleotide; TTT chr11 5257358 5257379 5257363 5257358 -
tgcctctgttcgaatactttct

SEQ ID NO: 138794 - DNA, 22 bp, Artificial Sequence
  Synthetic oligonucleotide; TTT chr11 5257357 5257378 5257362 5257357 -
gcctctgttcgaatactttctc

SEQ ID NO: 138795 - DNA, 22 bp, Artificial Sequence
  Synthetic oligonucleotide; TTG chr11 5257356 5257377 5257361 5257356 -
cctctgttcgaatactttctcc

SEQ ID NO: 138796 - DNA, 22 bp, Artificial Sequence
  Synthetic oligonucleotide; CTC chr11 5257352 5257373 5257357 5257352 -
tgttcgaatactttctccttaa

SEQ ID NO: 138797 - DNA, 22 bp, Artificial Sequence
  Synthetic oligonucleotide; CTG chr11 5257350 5257371 5257355 5257350 -
ttcgaatactttctccttaatt

SEQ ID NO: 138798 - DNA, 22 bp, Artificial Sequence
  Synthetic oligonucleotide; TTC chr11 5257347 5257368 5257352 5257347 -
gaatactttctccttaatttca

SEQ ID NO: 138799 - DNA, 22 bp, Artificial Sequence
  Synthetic oligonucleotide; CTT chr11 5257339 5257360 5257344 5257339 -
tctccttaatttcattcttagt

SEQ ID NO: 138800 - DNA, 22 bp, Artificial Sequence
  Synthetic oligonucleotide; TTT chr11 5257338 5257359 5257343 5257338 -
ctccttaatttcattcttagtt

SEQ ID NO: 138801 - DNA, 22 bp, Artificial Sequence
  Synthetic oligonucleotide; TTC chr11 5257337 5257358 5257342 5257337 -
tccttaatttcattcttagtta

SEQ ID NO: 138802 - DNA, 22 bp, Artificial Sequence
  Synthetic oligonucleotide; CTC chr11 5257335 5257356 5257340 5257335 -
cttaatttcattcttagttaat

SEQ ID NO: 138803 - DNA, 22 bp, Artificial Sequence
  Synthetic oligonucleotide; CTT chr11 5257332 5257353 5257337 5257332 -
aatttcattcttagttaataat

SEQ ID NO: 138804 - DNA, 22 bp, Artificial Sequence
  Synthetic oligonucleotide; TTA chr11 5257331 5257352 5257336 5257331 -
atttcattcttagttaataata

SEQ ID NO: 138805 - DNA, 22 bp, Artificial Sequence
  Synthetic oligonucleotide; TTT chr11 5257327 5257348 5257332 5257327 -
cattcttagttaataatatctg

SEQ ID NO: 138806 - DNA, 22 bp, Artificial Sequence
  Synthetic oligonucleotide; TTC chr11 5257326 5257347 5257331 5257326 -
attcttagttaataatatctga

SEQ ID NO: 138807 - DNA, 22 bp, Artificial Sequence
  Synthetic oligonucleotide; TTC chr11 5257322 5257343 5257327 5257322 -
ttagttaataatatctgaaatt

SEQ ID NO: 138808 - DNA, 22 bp, Artificial Sequence
  Synthetic oligonucleotide; CTT chr11 5257320 5257341 5257325 5257320 -
agttaataatatctgaaattat

SEQ ID NO: 138809 - DNA, 22 bp, Artificial Sequence
  Synthetic oligonucleotide; TTA chr11 5257319 5257340 5257324 5257319 -
gttaataatatctgaaattatt

SEQ ID NO: 138810 - DNA, 22 bp, Artificial Sequence
  Synthetic oligonucleotide; TTA chr11 5257315 5257336 5257320 5257315 -
ataatatctgaaattattttgt

SEQ ID NO: 138811 - DNA, 22 bp, Artificial Sequence
  Synthetic oligonucleotide; CTG chr11 5257305 5257326 5257310 5257305 -
aaattattttgttgtttaactt

SEQ ID NO: 138812 - DNA, 22 bp, Artificial Sequence
  Synthetic oligonucleotide; TTA chr11 5257299 5257320 5257304 5257299 -
ttttgttgtttaacttaattat

SEQ ID NO: 138813 - DNA, 22 bp, Artificial Sequence
  Synthetic oligonucleotide; TTT chr11 5257296 5257317 5257301 5257296 -
tgttgtttaacttaattattaa

SEQ ID NO: 138814 - DNA, 22 bp, Artificial Sequence
  Synthetic oligonucleotide; TTT chr11 5257295 5257316 5257300 5257295 -
gttgtttaacttaattattaat

SEQ ID NO: 138815 - DNA, 22 bp, Artificial Sequence
  Synthetic oligonucleotide; TTG chr11 5257294 5257315 5257299 5257294 -
ttgtttaacttaattattaatt

SEQ ID NO: 138816 - DNA, 22 bp, Artificial Sequence
  Synthetic oligonucleotide; TTG chr11 5257291 5257312 5257296 5257291 -
tttaacttaattattaatttta

SEQ ID NO: 138817 - DNA, 22 bp, Artificial Sequence
  Synthetic oligonucleotide; TTT chr11 5257288 5257309 5257293 5257288 -
aacttaattattaattttatgt

SEQ ID NO: 138818 - DNA, 22 bp, Artificial Sequence
  Synthetic oligonucleotide; TTA chr11 5257287 5257308 5257292 5257287 -
acttaattattaattttatgta

SEQ ID NO: 138819 - DNA, 22 bp, Artificial Sequence
  Synthetic oligonucleotide; CTT chr11 5257283 5257304 5257288 5257283 -
aattattaattttatgtatgtt

SEQ ID NO: 138820 - DNA, 22 bp, Artificial Sequence
  Synthetic oligonucleotide; TTA chr11 5257282 5257303 5257287 5257282 -
attattaattttatgtatgttc

SEQ ID NO: 138821 - DNA, 22 bp, Artificial Sequence
  Synthetic oligonucleotide; TTA chr11 5257278 5257299 5257283 5257278 -
ttaattttatgtatgttctacc

SEQ ID NO: 138822 - DNA, 22 bp, Artificial Sequence
  Synthetic oligonucleotide; TTA chr11 5257275 5257296 5257280 5257275 -
attttatgtatgttctacctag

SEQ ID NO: 138823 - DNA, 22 bp, Artificial Sequence
  Synthetic oligonucleotide; TTT chr11 5257271 5257292 5257276 5257271 -
tatgtatgttctacctagatta

SEQ ID NO: 138824 - DNA, 22 bp, Artificial Sequence
  Synthetic oligonucleotide; TTT chr11 5257270 5257291 5257275 5257270 -
atgtatgttctacctagattat

SEQ ID NO: 138825 - DNA, 22 bp, Artificial Sequence
  Synthetic oligonucleotide; TTA chr11 5257269 5257290 5257274 5257269 -
tgtatgttctacctagattata

SEQ ID NO: 138826 - DNA, 22 bp, Artificial Sequence
  Synthetic oligonucleotide; TTC chr11 5257260 5257281 5257265 5257260 -
tacctagattataatcttcaga

SEQ ID NO: 138827 - DNA, 22 bp, Artificial Sequence
  Synthetic oligonucleotide; CTA chr11 5257258 5257279 5257263 5257258 -
cctagattataatcttcagagg

SEQ ID NO: 138828 - DNA, 22 bp, Artificial Sequence
  Synthetic oligonucleotide; CTA chr11 5257254 5257275 5257259 5257254 -
gattataatcttcagaggaaag

SEQ ID NO: 138829 - DNA, 22 bp, Artificial Sequence
  Synthetic oligonucleotide; TTA chr11 5257249 5257270 5257254 5257249 -
taatcttcagaggaaagtttta

SEQ ID NO: 138830 - DNA, 22 bp, Artificial Sequence
  Synthetic oligonucleotide; CTT chr11 5257242 5257263 5257247 5257242 -
cagaggaaagttttattctctg

SEQ ID NO: 138831 - DNA, 22 bp, Artificial Sequence
  Synthetic oligonucleotide; TTC chr11 5257241 5257262 5257246 5257241 -
agaggaaagttttattctctga

SEQ ID NO: 138832 - DNA, 22 bp, Artificial Sequence
  Synthetic oligonucleotide; TTT chr11 5257229 5257250 5257234 5257229 -
tattctctgacttatttaactt

SEQ ID NO: 138833 - DNA, 22 bp, Artificial Sequence
  Synthetic oligonucleotide; TTT chr11 5257228 5257249 5257233 5257228 -
attctctgacttatttaactta

SEQ ID NO: 138834 - DNA, 22 bp, Artificial Sequence
  Synthetic oligonucleotide; TTA chr11 5257227 5257248 5257232 5257227 -
ttctctgacttatttaacttaa

SEQ ID NO: 138835 - DNA, 22 bp, Artificial Sequence
  Synthetic oligonucleotide; TTC chr11 5257224 5257245 5257229 5257224 -
tctgacttatttaacttaaatg

SEQ ID NO: 138836 - DNA, 22 bp, Artificial Sequence
  Synthetic oligonucleotide; CTC chr11 5257222 5257243 5257227 5257222 -
tgacttatttaacttaaatgcc

SEQ ID NO: 138837 - DNA, 22 bp, Artificial Sequence
  Synthetic oligonucleotide; CTG chr11 5257220 5257241 5257225 5257220 -
acttatttaacttaaatgccca

SEQ ID NO: 138838 - DNA, 22 bp, Artificial Sequence
  Synthetic oligonucleotide; CTT chr11 5257216 5257237 5257221 5257216 -
atttaacttaaatgcccactac

SEQ ID NO: 138839 - DNA, 22 bp, Artificial Sequence
  Synthetic oligonucleotide; TTA chr11 5257215 5257236 5257220 5257215 -
tttaacttaaatgcccactact

SEQ ID NO: 138840 - DNA, 22 bp, Artificial Sequence
  Synthetic oligonucleotide; TTT chr11 5257212 5257233 5257217 5257212 -
aacttaaatgcccactacttta

SEQ ID NO: 138841 - DNA, 22 bp, Artificial Sequence
  Synthetic oligonucleotide; TTA chr11 5257211 5257232 5257216 5257211 -
acttaaatgcccactactttaa

SEQ ID NO: 138842 - DNA, 22 bp, Artificial Sequence
  Synthetic oligonucleotide; CTT chr11 5257207 5257228 5257212 5257207 -
aaatgcccactactttaaaaat

SEQ ID NO: 138843 - DNA, 22 bp, Artificial Sequence
  Synthetic oligonucleotide; TTA chr11 5257206 5257227 5257211 5257206 -
aatgcccactactttaaaaatt

SEQ ID NO: 138844 - DNA, 22 bp, Artificial Sequence
  Synthetic oligonucleotide; CTA chr11 5257195 5257216 5257200 5257195 -
ctttaaaaattatgacatttat

SEQ ID NO: 138845 - DNA, 22 bp, Artificial Sequence
  Synthetic oligonucleotide; CTT chr11 5257192 5257213 5257197 5257192 -
taaaaattatgacatttattta

SEQ ID NO: 138846 - DNA, 22 bp, Artificial Sequence
  Synthetic oligonucleotide; TTT chr11 5257191 5257212 5257196 5257191 -
aaaaattatgacatttatttaa

SEQ ID NO: 138847 - DNA, 22 bp, Artificial Sequence
  Synthetic oligonucleotide; TTA chr11 5257190 5257211 5257195 5257190 -
aaaattatgacatttatttaac

SEQ ID NO: 138848 - DNA, 22 bp, Artificial Sequence
  Synthetic oligonucleotide; TTA chr11 5257183 5257204 5257188 5257183 -
tgacatttatttaacagatatt

SEQ ID NO: 138849 - DNA, 22 bp, Artificial Sequence
  Synthetic oligonucleotide; TTT chr11 5257175 5257196 5257180 5257175 -
atttaacagatatttgctgaac

SEQ ID NO: 138850 - DNA, 22 bp, Artificial Sequence
  Synthetic oligonucleotide; TTA chr11 5257174 5257195 5257179 5257174 -
tttaacagatatttgctgaaca

SEQ ID NO: 138851 - DNA, 22 bp, Artificial Sequence
  Synthetic oligonucleotide; TTT chr11 5257171 5257192 5257176 5257171 -
aacagatatttgctgaacaaat

SEQ ID NO: 138852 - DNA, 22 bp, Artificial Sequence
  Synthetic oligonucleotide; TTA chr11 5257170 5257191 5257175 5257170 -
acagatatttgctgaacaaatg

SEQ ID NO: 138853 - DNA, 22 bp, Artificial Sequence
  Synthetic oligonucleotide; TTT chr11 5257160 5257181 5257165 5257160 -
gctgaacaaatgtttgaaaata

SEQ ID NO: 138854 - DNA, 22 bp, Artificial Sequence
  Synthetic oligonucleotide; TTG chr11 5257159 5257180 5257164 5257159 -
ctgaacaaatgtttgaaaatac

SEQ ID NO: 138855 - DNA, 22 bp, Artificial Sequence
  Synthetic oligonucleotide; CTG chr11 5257156 5257177 5257161 5257156 -
aacaaatgtttgaaaatacatg

SEQ ID NO: 138856 - DNA, 22 bp, Artificial Sequence
  Synthetic oligonucleotide; TTT chr11 5257145 5257166 5257150 5257145 -
gaaaatacatgggaaagaatgc

SEQ ID NO: 138857 - DNA, 22 bp, Artificial Sequence
  Synthetic oligonucleotide; TTG chr11 5257144 5257165 5257149 5257144 -
aaaatacatgggaaagaatgct

SEQ ID NO: 138858 - DNA, 22 bp, Artificial Sequence
  Synthetic oligonucleotide; CTT chr11 5257121 5257142 5257126 5257121 -
gaaaacacttgaaattgcttgt

SEQ ID NO: 138859 - DNA, 22 bp, Artificial Sequence
  Synthetic oligonucleotide; TTG chr11 5257120 5257141 5257125 5257120 -
aaaacacttgaaattgcttgtg

SEQ ID NO: 138860 - DNA, 22 bp, Artificial Sequence
  Synthetic oligonucleotide; CTT chr11 5257111 5257132 5257116 5257111 -
gaaattgcttgtgtaaagaaac

SEQ ID NO: 138861 - DNA, 22 bp, Artificial Sequence
  Synthetic oligonucleotide; TTG chr11 5257110 5257131 5257115 5257110 -
aaattgcttgtgtaaagaaaca

SEQ ID NO: 138862 - DNA, 22 bp, Artificial Sequence
  Synthetic oligonucleotide; TTG chr11 5257104 5257125 5257109 5257104 -
cttgtgtaaagaaacagtttta

SEQ ID NO: 138863 - DNA, 22 bp, Artificial Sequence
  Synthetic oligonucleotide; CTT chr11 5257101 5257122 5257106 5257101 -
gtgtaaagaaacagttttatca

SEQ ID NO: 138864 - DNA, 22 bp, Artificial Sequence
  Synthetic oligonucleotide; TTG chr11 5257100 5257121 5257105 5257100 -
tgtaaagaaacagttttatcag

SEQ ID NO: 138865 - DNA, 22 bp, Artificial Sequence
  Synthetic oligonucleotide; TTT chr11 5257084 5257105 5257089 5257084 -
tatcagttaggatttaatcaat

SEQ ID NO: 138866 - DNA, 22 bp, Artificial Sequence
  Synthetic oligonucleotide; TTT chr11 5257083 5257104 5257088 5257083 -
atcagttaggatttaatcaatg

SEQ ID NO: 138867 - DNA, 22 bp, Artificial Sequence
  Synthetic oligonucleotide; TTA chr11 5257082 5257103 5257087 5257082 -
tcagttaggatttaatcaatgt

SEQ ID NO: 138868 - DNA, 22 bp, Artificial Sequence
  Synthetic oligonucleotide; TTA chr11 5257075 5257096 5257080 5257075 -
ggatttaatcaatgtcagaagc

SEQ ID NO: 138869 - DNA, 22 bp, Artificial Sequence
  Synthetic oligonucleotide; TTT chr11 5257069 5257090 5257074 5257069 -
aatcaatgtcagaagcaatgat

SEQ ID NO: 138870 - DNA, 22 bp, Artificial Sequence
  Synthetic oligonucleotide; TTA chr11 5257068 5257089 5257073 5257068 -
atcaatgtcagaagcaatgata

SEQ ID NO: 138871 - DNA, 22 bp, Artificial Sequence
  Synthetic oligonucleotide; TTA chr11 5257018 5257039 5257023 5257018 -
tggataaggagaaatcaacaaa

SEQ ID NO: 138872 - DNA, 22 bp, Artificial Sequence
  Synthetic oligonucleotide; CTC chr11 5256993 5257014 5256998 5256993 -
ttaaaagatattgcctcaaaag

SEQ ID NO: 138873 - DNA, 22 bp, Artificial Sequence
  Synthetic oligonucleotide; CTT chr11 5256991 5257012 5256996 5256991 -
aaaagatattgcctcaaaagca

SEQ ID NO: 138874 - DNA, 22 bp, Artificial Sequence
  Synthetic oligonucleotide; TTA chr11 5256990 5257011 5256995 5256990 -
aaagatattgcctcaaaagcat

SEQ ID NO: 138875 - DNA, 22 bp, Artificial Sequence
  Synthetic oligonucleotide; TTG chr11 5256980 5257001 5256985 5256980 -
cctcaaaagcataagaggaaat

SEQ ID NO: 138876 - DNA, 22 bp, Artificial Sequence
  Synthetic oligonucleotide; CTC chr11 5256976 5256997 5256981 5256976 -
aaaagcataagaggaaataagg

SEQ ID NO: 138877 - DNA, 22 bp, Artificial Sequence
  Synthetic oligonucleotide; TTT chr11 5256950 5256971 5256955 5256950 -
atacatgacttttagaacactg

SEQ ID NO: 138878 - DNA, 22 bp, Artificial Sequence
  Synthetic oligonucleotide; TTA chr11 5256949 5256970 5256954 5256949 -
tacatgacttttagaacactgc

SEQ ID NO: 138879 - DNA, 22 bp, Artificial Sequence
  Synthetic oligonucleotide; CTT chr11 5256939 5256960 5256944 5256939 -
ttagaacactgccttggttttt

SEQ ID NO: 138880 - DNA, 22 bp, Artificial Sequence
  Synthetic oligonucleotide; TTT chr11 5256938 5256959 5256943 5256938 -
tagaacactgccttggtttttg

SEQ ID NO: 138881 - DNA, 22 bp, Artificial Sequence
  Synthetic oligonucleotide; TTT chr11 5256937 5256958 5256942 5256937 -
agaacactgccttggtttttgg

SEQ ID NO: 138882 - DNA, 22 bp, Artificial Sequence
  Synthetic oligonucleotide; TTA chr11 5256936 5256957 5256941 5256936 -
gaacactgccttggtttttgga

SEQ ID NO: 138883 - DNA, 22 bp, Artificial Sequence
  Synthetic oligonucleotide; CTG chr11 5256928 5256949 5256933 5256928 -
ccttggtttttggataaatggg

SEQ ID NO: 138884 - DNA, 22 bp, Artificial Sequence
  Synthetic oligonucleotide; CTT chr11 5256924 5256945 5256929 5256924 -
ggtttttggataaatggggaag

SEQ ID NO: 138885 - DNA, 22 bp, Artificial Sequence
  Synthetic oligonucleotide; TTG chr11 5256923 5256944 5256928 5256923 -
gtttttggataaatggggaagt

SEQ ID NO: 138886 - DNA, 22 bp, Artificial Sequence
  Synthetic oligonucleotide; TTT chr11 5256919 5256940 5256924 5256919 -
ttggataaatggggaagttgtt

SEQ ID NO: 138887 - DNA, 22 bp, Artificial Sequence
  Synthetic oligonucleotide; TTT chr11 5256918 5256939 5256923 5256918 -
tggataaatggggaagttgttt

SEQ ID NO: 138888 - DNA, 22 bp, Artificial Sequence
  Synthetic oligonucleotide; TTT chr11 5256917 5256938 5256922 5256917 -
ggataaatggggaagttgtttg

SEQ ID NO: 138889 - DNA, 22 bp, Artificial Sequence
  Synthetic oligonucleotide; TTG chr11 5256916 5256937 5256921 5256916 -
gataaatggggaagttgtttga

SEQ ID NO: 138890 - DNA, 22 bp, Artificial Sequence
  Synthetic oligonucleotide; TTG chr11 5256899 5256920 5256904 5256899 -
tttgaaaacaggagggatccta

SEQ ID NO: 138891 - DNA, 22 bp, Artificial Sequence
  Synthetic oligonucleotide; TTT chr11 5256896 5256917 5256901 5256896 -
gaaaacaggagggatcctagat

SEQ ID NO: 138892 - DNA, 22 bp, Artificial Sequence
  Synthetic oligonucleotide; TTG chr11 5256895 5256916 5256900 5256895 -
aaaacaggagggatcctagata

SEQ ID NO: 138893 - DNA, 22 bp, Artificial Sequence
  Synthetic oligonucleotide; CTA chr11 5256877 5256898 5256882 5256877 -
gatattccttagtctgaggagg

SEQ ID NO: 138894 - DNA, 22 bp, Artificial Sequence
  Synthetic oligonucleotide; TTC chr11 5256870 5256891 5256875 5256870 -
cttagtctgaggaggagcaatt

SEQ ID NO: 138895 - DNA, 22 bp, Artificial Sequence
  Synthetic oligonucleotide; CTT chr11 5256867 5256888 5256872 5256867 -
agtctgaggaggagcaattaag

SEQ ID NO: 138896 - DNA, 22 bp, Artificial Sequence
  Synthetic oligonucleotide; TTA chr11 5256866 5256887 5256871 5256866 -
gtctgaggaggagcaattaaga

SEQ ID NO: 138897 - DNA, 22 bp, Artificial Sequence
  Synthetic oligonucleotide; CTG chr11 5256861 5256882 5256866 5256861 -
aggaggagcaattaagattcac

SEQ ID NO: 138898 - DNA, 22 bp, Artificial Sequence
  Synthetic oligonucleotide; TTA chr11 5256847 5256868 5256852 5256847 -
agattcacttgtttagaggctg

SEQ ID NO: 138899 - DNA, 22 bp, Artificial Sequence
  Synthetic oligonucleotide; TTC chr11 5256841 5256862 5256846 5256841 -
acttgtttagaggctgggagtg

SEQ ID NO: 138900 - DNA, 22 bp, Artificial Sequence
  Synthetic oligonucleotide; CTT chr11 5256837 5256858 5256842 5256837 -
gtttagaggctgggagtggtgg

SEQ ID NO: 138901 - DNA, 22 bp, Artificial Sequence
  Synthetic oligonucleotide; TTG chr11 5256836 5256857 5256841 5256836 -
tttagaggctgggagtggtggc

SEQ ID NO: 138902 - DNA, 22 bp, Artificial Sequence
  Synthetic oligonucleotide; TTT chr11 5256833 5256854 5256838 5256833 -
agaggctgggagtggtggctca

SEQ ID NO: 138903 - DNA, 22 bp, Artificial Sequence
  Synthetic oligonucleotide; TTA chr11 5256832 5256853 5256837 5256832 -
gaggctgggagtggtggctcac

SEQ ID NO: 138904 - DNA, 22 bp, Artificial Sequence
  Synthetic oligonucleotide; CTG chr11 5256825 5256846 5256830 5256825 -
ggagtggtggctcacgcctgta

SEQ ID NO: 138905 - DNA, 22 bp, Artificial Sequence
  Synthetic oligonucleotide; CTC chr11 5256812 5256833 5256817 5256812 -
acgcctgtaatcccagaatttt

SEQ ID NO: 138906 - DNA, 22 bp, Artificial Sequence
  Synthetic oligonucleotide; CTG chr11 5256805 5256826 5256810 5256805 -
taatcccagaattttgggaggc

SEQ ID NO: 138907 - DNA, 22 bp, Artificial Sequence
  Synthetic oligonucleotide; TTT chr11 5256791 5256812 5256796 5256791 -
tgggaggccaaggcaggcagat

SEQ ID NO: 138908 - DNA, 22 bp, Artificial Sequence
  Synthetic oligonucleotide; TTT chr11 5256790 5256811 5256795 5256790 -
gggaggccaaggcaggcagatc

SEQ ID NO: 138909 - DNA, 22 bp, Artificial Sequence
  Synthetic oligonucleotide; TTG chr11 5256789 5256810 5256794 5256789 -
ggaggccaaggcaggcagatca

SEQ ID NO: 138910 - DNA, 22 bp, Artificial Sequence
  Synthetic oligonucleotide; CTG chr11 5256763 5256784 5256768 5256763 -
aggtcaagagttcaagaccaac

SEQ ID NO: 138911 - DNA, 22 bp, Artificial Sequence
  Synthetic oligonucleotide; TTC chr11 5256750 5256771 5256755 5256750 -
aagaccaacctggccaacatgg

SEQ ID NO: 138912 - DNA, 22 bp, Artificial Sequence
  Synthetic oligonucleotide; CTG chr11 5256738 5256759 5256743 5256738 -
gccaacatggtgaaatcccatc

SEQ ID NO: 138913 - DNA, 22 bp, Artificial Sequence
  Synthetic oligonucleotide; CTC chr11 5256714 5256735 5256719 5256714 -
tacaaaaatacaaaaattagac

SEQ ID NO: 138914 - DNA, 22 bp, Artificial Sequence
  Synthetic oligonucleotide; CTA chr11 5256712 5256733 5256717 5256712 -
caaaaatacaaaaattagacag

SEQ ID NO: 138915 - DNA, 22 bp, Artificial Sequence
  Synthetic oligonucleotide; TTA chr11 5256695 5256716 5256700 5256695 -
gacaggcatgatggcaagtgcc

SEQ ID NO: 138916 - DNA, 22 bp, Artificial Sequence
  Synthetic oligonucleotide; CTG chr11 5256671 5256692 5256676 5256671 -
taatcccagctacttgggaggc

SEQ ID NO: 138917 - DNA, 22 bp, Artificial Sequence
  Synthetic oligonucleotide; CTA chr11 5256659 5256680 5256664 5256659 -
cttgggaggctgaggaaggaga

SEQ ID NO: 138918 - DNA, 22 bp, Artificial Sequence
  Synthetic oligonucleotide; CTT chr11 5256656 5256677 5256661 5256656 -
gggaggctgaggaaggagaatt

SEQ ID NO: 138919 - DNA, 22 bp, Artificial Sequence
  Synthetic oligonucleotide; TTG chr11 5256655 5256676 5256660 5256655 -
ggaggctgaggaaggagaattg

SEQ ID NO: 138920 - DNA, 22 bp, Artificial Sequence
  Synthetic oligonucleotide; CTG chr11 5256647 5256668 5256652 5256647 -
aggaaggagaattgcttgaacc

SEQ ID NO: 138921 - DNA, 22 bp, Artificial Sequence
  Synthetic oligonucleotide; TTG chr11 5256633 5256654 5256638 5256633 -
cttgaacctggaaggcaggagt

SEQ ID NO: 138922 - DNA, 22 bp, Artificial Sequence
  Synthetic oligonucleotide; CTT chr11 5256630 5256651 5256635 5256630 -
gaacctggaaggcaggagttgc

SEQ ID NO: 138923 - DNA, 22 bp, Artificial Sequence
  Synthetic oligonucleotide; TTG chr11 5256629 5256650 5256634 5256629 -
aacctggaaggcaggagttgca

SEQ ID NO: 138924 - DNA, 22 bp, Artificial Sequence
  Synthetic oligonucleotide; CTG chr11 5256623 5256644 5256628 5256623 -
gaaggcaggagttgcagtgagc

SEQ ID NO: 138925 - DNA, 22 bp, Artificial Sequence
  Synthetic oligonucleotide; TTG chr11 5256609 5256630 5256614 5256609 -
cagtgagccgagatcataccac

SEQ ID NO: 138926 - DNA, 22 bp, Artificial Sequence
  Synthetic oligonucleotide; CTG chr11 5256585 5256606 5256590 5256585 -
cactccagcctgggtgacagaa

SEQ ID NO: 138927 - DNA, 22 bp, Artificial Sequence
  Synthetic oligonucleotide; CTC chr11 5256580 5256601 5256585 5256580 -
cagcctgggtgacagaacaaga

SEQ ID NO: 138928 - DNA, 22 bp, Artificial Sequence
  Synthetic oligonucleotide; CTG chr11 5256573 5256594 5256578 5256573 -
ggtgacagaacaagactctgtc

SEQ ID NO: 138929 - DNA, 22 bp, Artificial Sequence
  Synthetic oligonucleotide; CTC chr11 5256555 5256576 5256560 5256555 -
tgtctcaaaaaaaaaaaagaga

SEQ ID NO: 138930 - DNA, 22 bp, Artificial Sequence
  Synthetic oligonucleotide; CTG chr11 5256553 5256574 5256558 5256553 -
tctcaaaaaaaaaaaagagaga

SEQ ID NO: 138931 - DNA, 22 bp, Artificial Sequence
  Synthetic oligonucleotide; CTC chr11 5256549 5256570 5256554 5256549 -
aaaaaaaaaaaagagagattca

SEQ ID NO: 138932 - DNA, 22 bp, Artificial Sequence
  Synthetic oligonucleotide; TTC chr11 5256528 5256549 5256533 5256528 -
aaaagattcacttgtttaggcc

SEQ ID NO: 138933 - DNA, 22 bp, Artificial Sequence
  Synthetic oligonucleotide; TTC chr11 5256519 5256540 5256524 5256519 -
acttgtttaggccttagcgggc

SEQ ID NO: 138934 - DNA, 22 bp, Artificial Sequence
  Synthetic oligonucleotide; CTT chr11 5256515 5256536 5256520 5256515 -
gtttaggccttagcgggcttag

SEQ ID NO: 138935 - DNA, 22 bp, Artificial Sequence
  Synthetic oligonucleotide; TTG chr11 5256514 5256535 5256519 5256514 -
tttaggccttagcgggcttaga

SEQ ID NO: 138936 - DNA, 22 bp, Artificial Sequence
  Synthetic oligonucleotide; TTT chr11 5256511 5256532 5256516 5256511 -
aggccttagcgggcttagacac

SEQ ID NO: 138937 - DNA, 22 bp, Artificial Sequence
  Synthetic oligonucleotide; TTA chr11 5256510 5256531 5256515 5256510 -
ggccttagcgggcttagacacc

SEQ ID NO: 138938 - DNA, 22 bp, Artificial Sequence
  Synthetic oligonucleotide; CTT chr11 5256504 5256525 5256509 5256504 -
agcgggcttagacaccagtctc

SEQ ID NO: 138939 - DNA, 22 bp, Artificial Sequence
  Synthetic oligonucleotide; TTA chr11 5256503 5256524 5256508 5256503 -
gcgggcttagacaccagtctct

SEQ ID NO: 138940 - DNA, 22 bp, Artificial Sequence
  Synthetic oligonucleotide; CTT chr11 5256495 5256516 5256500 5256495 -
agacaccagtctctgacacatt

SEQ ID NO: 138941 - DNA, 22 bp, Artificial Sequence
  Synthetic oligonucleotide; TTA chr11 5256494 5256515 5256499 5256494 -
gacaccagtctctgacacattc

SEQ ID NO: 138942 - DNA, 22 bp, Artificial Sequence
  Synthetic oligonucleotide; CTC chr11 5256482 5256503 5256487 5256482 -
tgacacattcttaaaggtcagg

SEQ ID NO: 138943 - DNA, 22 bp, Artificial Sequence
  Synthetic oligonucleotide; CTG chr11 5256480 5256501 5256485 5256480 -
acacattcttaaaggtcaggct

SEQ ID NO: 138944 - DNA, 22 bp, Artificial Sequence
  Synthetic oligonucleotide; TTC chr11 5256472 5256493 5256477 5256472 -
ttaaaggtcaggctctacaaat

SEQ ID NO: 138945 - DNA, 22 bp, Artificial Sequence
  Synthetic oligonucleotide; CTT chr11 5256470 5256491 5256475 5256470 -
aaaggtcaggctctacaaatgg

SEQ ID NO: 138946 - DNA, 22 bp, Artificial Sequence
  Synthetic oligonucleotide; TTA chr11 5256469 5256490 5256474 5256469 -
aaggtcaggctctacaaatgga

SEQ ID NO: 138947 - DNA, 22 bp, Artificial Sequence
  Synthetic oligonucleotide; CTC chr11 5256457 5256478 5256462 5256457 -
tacaaatggaacccaaccagac

SEQ ID NO: 138948 - DNA, 22 bp, Artificial Sequence
  Synthetic oligonucleotide; CTA chr11 5256455 5256476 5256460 5256455 -
caaatggaacccaaccagactc

SEQ ID NO: 138949 - DNA, 22 bp, Artificial Sequence
  Synthetic oligonucleotide; CTC chr11 5256433 5256454 5256438 5256433 -
tcagatatggccaaagatctat

SEQ ID NO: 138950 - DNA, 22 bp, Artificial Sequence
  Synthetic oligonucleotide; CTC chr11 5256431 5256452 5256436 5256431 -
agatatggccaaagatctatac

SEQ ID NO: 138951 - DNA, 22 bp, Artificial Sequence
  Synthetic oligonucleotide; CTA chr11 5256412 5256433 5256417 5256412 -
tacacacccatctcacagatcc

SEQ ID NO: 138952 - DNA, 22 bp, Artificial Sequence
  Synthetic oligonucleotide; CTC chr11 5256398 5256419 5256403 5256398 -
acagatcccctatcttaaagag

SEQ ID NO: 138953 - DNA, 22 bp, Artificial Sequence
  Synthetic oligonucleotide; CTA chr11 5256386 5256407 5256391 5256386 -
tcttaaagagaccctaatttgg

SEQ ID NO: 138954 - DNA, 22 bp, Artificial Sequence
  Synthetic oligonucleotide; CTT chr11 5256382 5256403 5256387 5256382 -
aaagagaccctaatttgggttc

SEQ ID NO: 138955 - DNA, 22 bp, Artificial Sequence
  Synthetic oligonucleotide; TTA chr11 5256381 5256402 5256386 5256381 -
aagagaccctaatttgggttca

SEQ ID NO: 138956 - DNA, 22 bp, Artificial Sequence
  Synthetic oligonucleotide; CTA chr11 5256370 5256391 5256375 5256370 -
atttgggttcacctcagtctct

SEQ ID NO: 138957 - DNA, 22 bp, Artificial Sequence
  Synthetic oligonucleotide; TTT chr11 5256366 5256387 5256371 5256366 -
gggttcacctcagtctctataa

SEQ ID NO: 138958 - DNA, 22 bp, Artificial Sequence
  Synthetic oligonucleotide; TTG chr11 5256365 5256386 5256370 5256365 -
ggttcacctcagtctctataat

SEQ ID NO: 138959 - DNA, 22 bp, Artificial Sequence
  Synthetic oligonucleotide; TTC chr11 5256360 5256381 5256365 5256360 -
acctcagtctctataatctgta

SEQ ID NO: 138960 - DNA, 22 bp, Artificial Sequence
  Synthetic oligonucleotide; CTC chr11 5256355 5256376 5256360 5256355 -
agtctctataatctgtaccagc

SEQ ID NO: 138961 - DNA, 22 bp, Artificial Sequence
  Synthetic oligonucleotide; CTC chr11 5256349 5256370 5256354 5256349 -
tataatctgtaccagcatacca

SEQ ID NO: 138962 - DNA, 22 bp, Artificial Sequence
  Synthetic oligonucleotide; CTA chr11 5256347 5256368 5256352 5256347 -
taatctgtaccagcataccaat

SEQ ID NO: 138963 - DNA, 22 bp, Artificial Sequence
  Synthetic oligonucleotide; CTG chr11 5256340 5256361 5256345 5256340 -
taccagcataccaataaaaatc

SEQ ID NO: 138964 - DNA, 22 bp, Artificial Sequence
  Synthetic oligonucleotide; CTT chr11 5256316 5256337 5256321 5256316 -
tctcacccatccttagattgag

SEQ ID NO: 138965 - DNA, 22 bp, Artificial Sequence
  Synthetic oligonucleotide; TTT chr11 5256315 5256336 5256320 5256315 -
ctcacccatccttagattgaga

SEQ ID NO: 138966 - DNA, 22 bp, Artificial Sequence
  Synthetic oligonucleotide; TTC chr11 5256314 5256335 5256319 5256314 -
tcacccatccttagattgagag

SEQ ID NO: 138967 - DNA, 22 bp, Artificial Sequence
  Synthetic oligonucleotide; CTC chr11 5256312 5256333 5256317 5256312 -
acccatccttagattgagagaa

SEQ ID NO: 138968 - DNA, 22 bp, Artificial Sequence
  Synthetic oligonucleotide; CTT chr11 5256302 5256323 5256307 5256302 -
agattgagagaagtcacttatt

SEQ ID NO: 138969 - DNA, 22 bp, Artificial Sequence
  Synthetic oligonucleotide; TTA chr11 5256301 5256322 5256306 5256301 -
gattgagagaagtcacttatta

SEQ ID NO: 138970 - DNA, 22 bp, Artificial Sequence
  Synthetic oligonucleotide; TTG chr11 5256296 5256317 5256301 5256296 -
agagaagtcacttattattatg

SEQ ID NO: 138971 - DNA, 22 bp, Artificial Sequence
  Synthetic oligonucleotide; CTT chr11 5256283 5256304 5256288 5256283 -
attattatgtgagtaactggaa

SEQ ID NO: 138972 - DNA, 22 bp, Artificial Sequence
  Synthetic oligonucleotide; TTA chr11 5256282 5256303 5256287 5256282 -
ttattatgtgagtaactggaag

SEQ ID NO: 138973 - DNA, 22 bp, Artificial Sequence
  Synthetic oligonucleotide; TTA chr11 5256279 5256300 5256284 5256279 -
ttatgtgagtaactggaagata

SEQ ID NO: 138974 - DNA, 22 bp, Artificial Sequence
  Synthetic oligonucleotide; TTA chr11 5256276 5256297 5256281 5256276 -
tgtgagtaactggaagatactg

SEQ ID NO: 138975 - DNA, 22 bp, Artificial Sequence
  Synthetic oligonucleotide; CTG chr11 5256264 5256285 5256269 5256264 -
gaagatactgataagttgacaa

SEQ ID NO: 138976 - DNA, 22 bp, Artificial Sequence
  Synthetic oligonucleotide; CTG chr11 5256254 5256275 5256259 5256254 -
ataagttgacaaatctttttct

SEQ ID NO: 138977 - DNA, 22 bp, Artificial Sequence
  Synthetic oligonucleotide; TTG chr11 5256246 5256267 5256251 5256246 -
acaaatctttttctttcctttc

SEQ ID NO: 138978 - DNA, 22 bp, Artificial Sequence
  Synthetic oligonucleotide; CTT chr11 5256237 5256258 5256242 5256237 -
tttctttcctttcttattcaac

SEQ ID NO: 138979 - DNA, 22 bp, Artificial Sequence
  Synthetic oligonucleotide; TTT chr11 5256236 5256257 5256241 5256236 -
ttctttcctttcttattcaact

SEQ ID NO: 138980 - DNA, 22 bp, Artificial Sequence
  Synthetic oligonucleotide; TTT chr11 5256235 5256256 5256240 5256235 -
tctttcctttcttattcaactt

SEQ ID NO: 138981 - DNA, 22 bp, Artificial Sequence
  Synthetic oligonucleotide; TTT chr11 5256234 5256255 5256239 5256234 -
ctttcctttcttattcaacttt

SEQ ID NO: 138982 - DNA, 22 bp, Artificial Sequence
  Synthetic oligonucleotide; TTC chr11 5256233 5256254 5256238 5256233 -
tttcctttcttattcaactttt

SEQ ID NO: 138983 - DNA, 22 bp, Artificial Sequence
  Synthetic oligonucleotide; CTT chr11 5256231 5256252 5256236 5256231 -
tcctttcttattcaacttttat

SEQ ID NO: 138984 - DNA, 22 bp, Artificial Sequence
  Synthetic oligonucleotide; TTT chr11 5256230 5256251 5256235 5256230 -
cctttcttattcaacttttatt

SEQ ID NO: 138985 - DNA, 22 bp, Artificial Sequence
  Synthetic oligonucleotide; TTC chr11 5256229 5256250 5256234 5256229 -
ctttcttattcaacttttattt

SEQ ID NO: 138986 - DNA, 22 bp, Artificial Sequence
  Synthetic oligonucleotide; CTT chr11 5256226 5256247 5256231 5256226 -
tcttattcaacttttattttaa

SEQ ID NO: 138987 - DNA, 22 bp, Artificial Sequence
  Synthetic oligonucleotide; TTT chr11 5256225 5256246 5256230 5256225 -
cttattcaacttttattttaac

SEQ ID NO: 138988 - DNA, 22 bp, Artificial Sequence
  Synthetic oligonucleotide; TTC chr11 5256224 5256245 5256229 5256224 -
ttattcaacttttattttaact

SEQ ID NO: 138989 - DNA, 22 bp, Artificial Sequence
  Synthetic oligonucleotide; CTT chr11 5256222 5256243 5256227 5256222 -
attcaacttttattttaacttc

SEQ ID NO: 138990 - DNA, 22 bp, Artificial Sequence
  Synthetic oligonucleotide; TTA chr11 5256221 5256242 5256226 5256221 -
ttcaacttttattttaacttcc

SEQ ID NO: 138991 - DNA, 22 bp, Artificial Sequence
  Synthetic oligonucleotide; TTC chr11 5256218 5256239 5256223 5256218 -
aacttttattttaacttccaaa

SEQ ID NO: 138992 - DNA, 22 bp, Artificial Sequence
  Synthetic oligonucleotide; CTT chr11 5256213 5256234 5256218 5256213 -
ttattttaacttccaaagaaca

SEQ ID NO: 138993 - DNA, 22 bp, Artificial Sequence
  Synthetic oligonucleotide; TTT chr11 5256212 5256233 5256217 5256212 -
tattttaacttccaaagaacaa

SEQ ID NO: 138994 - DNA, 22 bp, Artificial Sequence
  Synthetic oligonucleotide; TTT chr11 5256211 5256232 5256216 5256211 -
attttaacttccaaagaacaag

SEQ ID NO: 138995 - DNA, 22 bp, Artificial Sequence
  Synthetic oligonucleotide; TTA chr11 5256210 5256231 5256215 5256210 -
ttttaacttccaaagaacaagt

SEQ ID NO: 138996 - DNA, 22 bp, Artificial Sequence
  Synthetic oligonucleotide; TTT chr11 5256207 5256228 5256212 5256207 -
taacttccaaagaacaagtgca

SEQ ID NO: 138997 - DNA, 22 bp, Artificial Sequence
  Synthetic oligonucleotide; TTT chr11 5256206 5256227 5256211 5256206 -
aacttccaaagaacaagtgcaa

SEQ ID NO: 138998 - DNA, 22 bp, Artificial Sequence
  Synthetic oligonucleotide; TTA chr11 5256205 5256226 5256210 5256205 -
acttccaaagaacaagtgcaat

SEQ ID NO: 138999 - DNA, 22 bp, Artificial Sequence
  Synthetic oligonucleotide; CTT chr11 5256201 5256222 5256206 5256201 -
ccaaagaacaagtgcaatatgt

SEQ ID NO: 139000 - DNA, 22 bp, Artificial Sequence
  Synthetic oligonucleotide; TTC chr11 5256200 5256221 5256205 5256200 -
caaagaacaagtgcaatatgtg

SEQ ID NO: 139001 - DNA, 22 bp, Artificial Sequence
  Synthetic oligonucleotide; CTT chr11 5256172 5256193 5256177 5256172 -
tgttgcgcaggtcaacatgtat

SEQ ID NO: 139002 - DNA, 22 bp, Artificial Sequence
  Synthetic oligonucleotide; TTT chr11 5256171 5256192 5256176 5256171 -
gttgcgcaggtcaacatgtatc

SEQ ID NO: 139003 - DNA, 22 bp, Artificial Sequence
  Synthetic oligonucleotide; TTG chr11 5256170 5256191 5256175 5256170 -
ttgcgcaggtcaacatgtatct

SEQ ID NO: 139004 - DNA, 22 bp, Artificial Sequence
  Synthetic oligonucleotide; TTG chr11 5256167 5256188 5256172 5256167 -
cgcaggtcaacatgtatctttc

SEQ ID NO: 139005 - DNA, 22 bp, Artificial Sequence
  Synthetic oligonucleotide; CTT chr11 5256147 5256168 5256152 5256147 -
tctggtcttttagccgcctaac

SEQ ID NO: 139006 - DNA, 22 bp, Artificial Sequence
  Synthetic oligonucleotide; TTT chr11 5256146 5256167 5256151 5256146 -
ctggtcttttagccgcctaaca

SEQ ID NO: 139007 - DNA, 22 bp, Artificial Sequence
  Synthetic oligonucleotide; TTC chr11 5256145 5256166 5256150 5256145 -
tggtcttttagccgcctaacac

SEQ ID NO: 139008 - DNA, 22 bp, Artificial Sequence
  Synthetic oligonucleotide; CTG chr11 5256143 5256164 5256148 5256143 -
gtcttttagccgcctaacactt

SEQ ID NO: 139009 - DNA, 22 bp, Artificial Sequence
  Synthetic oligonucleotide; CTT chr11 5256138 5256159 5256143 5256138 -
ttagccgcctaacactttgagc

SEQ ID NO: 139010 - DNA, 22 bp, Artificial Sequence
  Synthetic oligonucleotide; TTT chr11 5256137 5256158 5256142 5256137 -
tagccgcctaacactttgagca

SEQ ID NO: 139011 - DNA, 22 bp, Artificial Sequence
  Synthetic oligonucleotide; TTT chr11 5256136 5256157 5256141 5256136 -
agccgcctaacactttgagcag

SEQ ID NO: 139012 - DNA, 22 bp, Artificial Sequence
  Synthetic oligonucleotide; TTA chr11 5256135 5256156 5256140 5256135 -
gccgcctaacactttgagcaga

SEQ ID NO: 139013 - DNA, 22 bp, Artificial Sequence
  Synthetic oligonucleotide; CTA chr11 5256127 5256148 5256132 5256127 -
acactttgagcagatataagcc

SEQ ID NO: 139014 - DNA, 22 bp, Artificial Sequence
  Synthetic oligonucleotide; CTT chr11 5256121 5256142 5256126 5256121 -
tgagcagatataagccttacac

SEQ ID NO: 139015 - DNA, 22 bp, Artificial Sequence
  Synthetic oligonucleotide; TTT chr11 5256120 5256141 5256125 5256120 -
gagcagatataagccttacaca

SEQ ID NO: 139016 - DNA, 22 bp, Artificial Sequence
  Synthetic oligonucleotide; TTG chr11 5256119 5256140 5256124 5256119 -
agcagatataagccttacacag

SEQ ID NO: 139017 - DNA, 22 bp, Artificial Sequence
  Synthetic oligonucleotide; CTT chr11 5256103 5256124 5256108 5256103 -
acacaggattatgaagtctgaa

SEQ ID NO: 139018 - DNA, 22 bp, Artificial Sequence
  Synthetic oligonucleotide; TTA chr11 5256102 5256123 5256107 5256102 -
cacaggattatgaagtctgaaa

SEQ ID NO: 139019 - DNA, 22 bp, Artificial Sequence
  Synthetic oligonucleotide; TTA chr11 5256092 5256113 5256097 5256092 -
tgaagtctgaaaggattccacc

SEQ ID NO: 139020 - DNA, 22 bp, Artificial Sequence
  Synthetic oligonucleotide; CTG chr11 5256083 5256104 5256088 5256083 -
aaaggattccaccaatattatt

SEQ ID NO: 139021 - DNA, 22 bp, Artificial Sequence
  Synthetic oligonucleotide; TTC chr11 5256074 5256095 5256079 5256074 -
caccaatattattataattcct

SEQ ID NO: 139022 - DNA, 22 bp, Artificial Sequence
  Synthetic oligonucleotide; TTA chr11 5256063 5256084 5256068 5256063 -
ttataattcctatcaacctgat

SEQ ID NO: 139023 - DNA, 22 bp, Artificial Sequence
  Synthetic oligonucleotide; TTA chr11 5256060 5256081 5256065 5256060 -
taattcctatcaacctgatagg

SEQ ID NO: 139024 - DNA, 22 bp, Artificial Sequence
  Synthetic oligonucleotide; TTC chr11 5256054 5256075 5256059 5256054 -
ctatcaacctgataggttaggg

SEQ ID NO: 139025 - DNA, 22 bp, Artificial Sequence
  Synthetic oligonucleotide; CTA chr11 5256051 5256072 5256056 5256051 -
tcaacctgataggttaggggaa

SEQ ID NO: 139026 - DNA, 22 bp, Artificial Sequence
  Synthetic oligonucleotide; CTG chr11 5256043 5256064 5256048 5256043 -
ataggttaggggaaggtagagc

SEQ ID NO: 139027 - DNA, 22 bp, Artificial Sequence
  Synthetic oligonucleotide; TTA chr11 5256035 5256056 5256040 5256035 -
ggggaaggtagagctctcctcc

SEQ ID NO: 139028 - DNA, 22 bp, Artificial Sequence
  Synthetic oligonucleotide; CTC chr11 5256019 5256040 5256024 5256019 -
tcctccaataagccagatttcc

SEQ ID NO: 139029 - DNA, 22 bp, Artificial Sequence
  Synthetic oligonucleotide; CTC chr11 5256017 5256038 5256022 5256017 -
ctccaataagccagatttccag

SEQ ID NO: 139030 - DNA, 22 bp, Artificial Sequence
  Synthetic oligonucleotide; CTC chr11 5256014 5256035 5256019 5256014 -
caataagccagatttccagagt

SEQ ID NO: 139031 - DNA, 22 bp, Artificial Sequence
  Synthetic oligonucleotide; TTT chr11 5255999 5256020 5256004 5255999 -
ccagagtttctgacgtcataat

SEQ ID NO: 139032 - DNA, 22 bp, Artificial Sequence
  Synthetic oligonucleotide; TTC chr11 5255998 5256019 5256003 5255998 -
cagagtttctgacgtcataatc

SEQ ID NO: 139033 - DNA, 22 bp, Artificial Sequence
  Synthetic oligonucleotide; TTT chr11 5255990 5256011 5255995 5255990 -
ctgacgtcataatctaccaagg

SEQ ID NO: 139034 - DNA, 22 bp, Artificial Sequence
  Synthetic oligonucleotide; TTC chr11 5255989 5256010 5255994 5255989 -
tgacgtcataatctaccaaggt

SEQ ID NO: 139035 - DNA, 22 bp, Artificial Sequence
  Synthetic oligonucleotide; CTG chr11 5255987 5256008 5255992 5255987 -
acgtcataatctaccaaggtca

SEQ ID NO: 139036 - DNA, 22 bp, Artificial Sequence
  Synthetic oligonucleotide; CTA chr11 5255974 5255995 5255979 5255974 -
ccaaggtcatggatcgagttca

SEQ ID NO: 139037 - DNA, 22 bp, Artificial Sequence
  Synthetic oligonucleotide; TTC chr11 5255953 5255974 5255958 5255953 -
agagaaaaaacaaaagcaaaac

SEQ ID NO: 139038 - DNA, 22 bp, Artificial Sequence
  Synthetic oligonucleotide; CTA chr11 5255923 5255944 5255928 5255923 -
ccaaaaaataaaaatcccaaag

SEQ ID NO: 139039 - DNA, 22 bp, Artificial Sequence
  Synthetic oligonucleotide; CTT chr11 5255869 5255890 5255874 5255869 -
cctgccatgttaagtggccaat

SEQ ID NO: 139040 - DNA, 22 bp, Artificial Sequence
  Synthetic oligonucleotide; TTC chr11 5255868 5255889 5255873 5255868 -
ctgccatgttaagtggccaata

SEQ ID NO: 139041 - DNA, 22 bp, Artificial Sequence
  Synthetic oligonucleotide; CTG chr11 5255865 5255886 5255870 5255865 -
ccatgttaagtggccaatatgt

SEQ ID NO: 139042 - DNA, 22 bp, Artificial Sequence
  Synthetic oligonucleotide; TTA chr11 5255857 5255878 5255862 5255857 -
agtggccaatatgtcagaaaca

SEQ ID NO: 139043 - DNA, 22 bp, Artificial Sequence
  Synthetic oligonucleotide; CTG chr11 5255829 5255850 5255834 5255829 -
agttacagataaagatgtctaa

SEQ ID NO: 139044 - DNA, 22 bp, Artificial Sequence
  Synthetic oligonucleotide; TTA chr11 5255824 5255845 5255829 5255824 -
cagataaagatgtctaaactac

SEQ ID NO: 139045 - DNA, 22 bp, Artificial Sequence
  Synthetic oligonucleotide; CTA chr11 5255808 5255829 5255813 5255808 -
aactacagtgacatcccagctg

SEQ ID NO: 139046 - DNA, 22 bp, Artificial Sequence
  Synthetic oligonucleotide; CTA chr11 5255803 5255824 5255808 5255803 -
cagtgacatcccagctgtcaca

SEQ ID NO: 139047 - DNA, 22 bp, Artificial Sequence
  Synthetic oligonucleotide; CTG chr11 5255786 5255807 5255791 5255786 -
tcacagtgtgtggactattagt

SEQ ID NO: 139048 - DNA, 22 bp, Artificial Sequence
  Synthetic oligonucleotide; CTA chr11 5255769 5255790 5255774 5255769 -
ttagtcaataaaacagtccctg

SEQ ID NO: 139049 - DNA, 22 bp, Artificial Sequence
  Synthetic oligonucleotide; TTA chr11 5255766 5255787 5255771 5255766 -
gtcaataaaacagtccctgcct

SEQ ID NO: 139050 - DNA, 22 bp, Artificial Sequence
  Synthetic oligonucleotide; CTG chr11 5255747 5255768 5255752 5255747 -
cctcttaagagttgttttccat

SEQ ID NO: 139051 - DNA, 22 bp, Artificial Sequence
  Synthetic oligonucleotide; CTC chr11 5255743 5255764 5255748 5255743 -
ttaagagttgttttccatgcaa

SEQ ID NO: 139052 - DNA, 22 bp, Artificial Sequence
  Synthetic oligonucleotide; CTT chr11 5255741 5255762 5255746 5255741 -
aagagttgttttccatgcaaat

SEQ ID NO: 139053 - DNA, 22 bp, Artificial Sequence
  Synthetic oligonucleotide; TTA chr11 5255740 5255761 5255745 5255740 -
agagttgttttccatgcaaata

SEQ ID NO: 139054 - DNA, 22 bp, Artificial Sequence
  Synthetic oligonucleotide; TTG chr11 5255733 5255754 5255738 5255733 -
ttttccatgcaaatacatgtct

SEQ ID NO: 139055 - DNA, 22 bp, Artificial Sequence
  Synthetic oligonucleotide; TTT chr11 5255730 5255751 5255735 5255730 -
tccatgcaaatacatgtcttat

SEQ ID NO: 139056 - DNA, 22 bp, Artificial Sequence
  Synthetic oligonucleotide; TTT chr11 5255729 5255750 5255734 5255729 -
ccatgcaaatacatgtcttatg

SEQ ID NO: 139057 - DNA, 22 bp, Artificial Sequence
  Synthetic oligonucleotide; TTC chr11 5255728 5255749 5255733 5255728 -
catgcaaatacatgtcttatgt

SEQ ID NO: 139058 - DNA, 22 bp, Artificial Sequence
  Synthetic oligonucleotide; CTT chr11 5255710 5255731 5255715 5255710 -
atgtcttagaataagattccct

SEQ ID NO: 139059 - DNA, 22 bp, Artificial Sequence
  Synthetic oligonucleotide; TTA chr11 5255709 5255730 5255714 5255709 -
tgtcttagaataagattcccta

SEQ ID NO: 139060 - DNA, 22 bp, Artificial Sequence
  Synthetic oligonucleotide; CTT chr11 5255703 5255724 5255708 5255703 -
agaataagattccctaagaagt

SEQ ID NO: 139061 - DNA, 22 bp, Artificial Sequence
  Synthetic oligonucleotide; TTA chr11 5255702 5255723 5255707 5255702 -
gaataagattccctaagaagtg

SEQ ID NO: 139062 - DNA, 22 bp, Artificial Sequence
  Synthetic oligonucleotide; TTC chr11 5255691 5255712 5255696 5255691 -
cctaagaagtgaacctagcatt

SEQ ID NO: 139063 - DNA, 22 bp, Artificial Sequence
  Synthetic oligonucleotide; CTA chr11 5255687 5255708 5255692 5255687 -
agaagtgaacctagcatttata

SEQ ID NO: 139064 - DNA, 22 bp, Artificial Sequence
  Synthetic oligonucleotide; CTA chr11 5255674 5255695 5255679 5255674 -
gcatttatacaagataattaat

SEQ ID NO: 139065 - DNA, 22 bp, Artificial Sequence
  Synthetic oligonucleotide; TTT chr11 5255668 5255689 5255673 5255668 -
atacaagataattaattctaat

SEQ ID NO: 139066 - DNA, 22 bp, Artificial Sequence
  Synthetic oligonucleotide; TTA chr11 5255667 5255688 5255672 5255667 -
tacaagataattaattctaatc

SEQ ID NO: 139067 - DNA, 22 bp, Artificial Sequence
  Synthetic oligonucleotide; TTA chr11 5255654 5255675 5255659 5255654 -
attctaatccatagtatctggt

SEQ ID NO: 139068 - DNA, 22 bp, Artificial Sequence
  Synthetic oligonucleotide; TTC chr11 5255650 5255671 5255655 5255650 -
taatccatagtatctggtaaag

SEQ ID NO: 139069 - DNA, 22 bp, Artificial Sequence
  Synthetic oligonucleotide; CTA chr11 5255648 5255669 5255653 5255648 -
atccatagtatctggtaaagag

SEQ ID NO: 139070 - DNA, 22 bp, Artificial Sequence
  Synthetic oligonucleotide; CTG chr11 5255634 5255655 5255639 5255634 -
gtaaagagcattctaccatcat

SEQ ID NO: 139071 - DNA, 22 bp, Artificial Sequence
  Synthetic oligonucleotide; TTC chr11 5255621 5255642 5255626 5255621 -
taccatcatctttaccgagcat

SEQ ID NO: 139072 - DNA, 22 bp, Artificial Sequence
  Synthetic oligonucleotide; CTA chr11 5255619 5255640 5255624 5255619 -
ccatcatctttaccgagcatag

SEQ ID NO: 139073 - DNA, 22 bp, Artificial Sequence
  Synthetic oligonucleotide; CTT chr11 5255609 5255630 5255614 5255609 -
taccgagcatagaagagctaca

SEQ ID NO: 139074 - DNA, 22 bp, Artificial Sequence
  Synthetic oligonucleotide; TTT chr11 5255608 5255629 5255613 5255608 -
accgagcatagaagagctacac

SEQ ID NO: 139075 - DNA, 22 bp, Artificial Sequence
  Synthetic oligonucleotide; TTA chr11 5255607 5255628 5255612 5255607 -
ccgagcatagaagagctacacc

SEQ ID NO: 139076 - DNA, 22 bp, Artificial Sequence
  Synthetic oligonucleotide; CTA chr11 5255589 5255610 5255594 5255589 -
caccaaaaccctgggtcatcag

SEQ ID NO: 139077 - DNA, 22 bp, Artificial Sequence
  Synthetic oligonucleotide; CTG chr11 5255576 5255597 5255581 5255576 -
ggtcatcagccagcacatacac

SEQ ID NO: 139078 - DNA, 22 bp, Artificial Sequence
  Synthetic oligonucleotide; CTT chr11 5255552 5255573 5255557 5255552 -
atccagtgataaatacacatca

SEQ ID NO: 139079 - DNA, 22 bp, Artificial Sequence
  Synthetic oligonucleotide; TTA chr11 5255551 5255572 5255556 5255551 -
tccagtgataaatacacatcat

SEQ ID NO: 139080 - DNA, 22 bp, Artificial Sequence
  Synthetic oligonucleotide; CTA chr11 5255519 5255540 5255524 5255519 -
catacatacctgaatataaaaa

SEQ ID NO: 139081 - DNA, 22 bp, Artificial Sequence
  Synthetic oligonucleotide; CTG chr11 5255507 5255528 5255512 5255507 -
aatataaaaaaaatacttttgc

SEQ ID NO: 139082 - DNA, 22 bp, Artificial Sequence
  Synthetic oligonucleotide; CTT chr11 5255489 5255510 5255494 5255489 -
ttgctgagatgaaacaggcgtg

SEQ ID NO: 139083 - DNA, 22 bp, Artificial Sequence
  Synthetic oligonucleotide; TTT chr11 5255488 5255509 5255493 5255488 -
tgctgagatgaaacaggcgtga

SEQ ID NO: 139084 - DNA, 22 bp, Artificial Sequence
  Synthetic oligonucleotide; TTT chr11 5255487 5255508 5255492 5255487 -
gctgagatgaaacaggcgtgat

SEQ ID NO: 139085 - DNA, 22 bp, Artificial Sequence
  Synthetic oligonucleotide; TTG chr11 5255486 5255507 5255491 5255486 -
ctgagatgaaacaggcgtgatt

SEQ ID NO: 139086 - DNA, 22 bp, Artificial Sequence
  Synthetic oligonucleotide; CTG chr11 5255483 5255504 5255488 5255483 -
agatgaaacaggcgtgatttat

SEQ ID NO: 139087 - DNA, 22 bp, Artificial Sequence
  Synthetic oligonucleotide; TTT chr11 5255463 5255484 5255468 5255463 -
atttcaaataggtacggataag

SEQ ID NO: 139088 - DNA, 22 bp, Artificial Sequence
  Synthetic oligonucleotide; TTA chr11 5255462 5255483 5255467 5255462 -
tttcaaataggtacggataagt

SEQ ID NO: 139089 - DNA, 22 bp, Artificial Sequence
  Synthetic oligonucleotide; TTT chr11 5255459 5255480 5255464 5255459 -
caaataggtacggataagtaga

SEQ ID NO: 139090 - DNA, 22 bp, Artificial Sequence
  Synthetic oligonucleotide; TTC chr11 5255458 5255479 5255463 5255458 -
aaataggtacggataagtagat

SEQ ID NO: 139091 - DNA, 22 bp, Artificial Sequence
  Synthetic oligonucleotide; TTG chr11 5255432 5255453 5255437 5255432 -
aagtaaggattcagtcttatat

SEQ ID NO: 139092 - DNA, 22 bp, Artificial Sequence
  Synthetic oligonucleotide; TTC chr11 5255420 5255441 5255425 5255420 -
agtcttatattatattacataa

SEQ ID NO: 139093 - DNA, 22 bp, Artificial Sequence
  Synthetic oligonucleotide; CTT chr11 5255414 5255435 5255419 5255414 -
atattatattacataacattaa

SEQ ID NO: 139094 - DNA, 22 bp, Artificial Sequence
  Synthetic oligonucleotide; TTA chr11 5255413 5255434 5255418 5255413 -
tattatattacataacattaat

SEQ ID NO: 139095 - DNA, 22 bp, Artificial Sequence
  Synthetic oligonucleotide; TTA chr11 5255408 5255429 5255413 5255408 -
tattacataacattaatctatt

SEQ ID NO: 139096 - DNA, 22 bp, Artificial Sequence
  Synthetic oligonucleotide; TTA chr11 5255403 5255424 5255408 5255403 -
cataacattaatctattcctgc

SEQ ID NO: 139097 - DNA, 22 bp, Artificial Sequence
  Synthetic oligonucleotide; TTA chr11 5255393 5255414 5255398 5255393 -
atctattcctgcactgaaactg

SEQ ID NO: 139098 - DNA, 22 bp, Artificial Sequence
  Synthetic oligonucleotide; CTA chr11 5255388 5255409 5255393 5255388 -
ttcctgcactgaaactgttgct

SEQ ID NO: 139099 - DNA, 22 bp, Artificial Sequence
  Synthetic oligonucleotide; TTC chr11 5255385 5255406 5255390 5255385 -
ctgcactgaaactgttgcttta

SEQ ID NO: 139100 - DNA, 22 bp, Artificial Sequence
  Synthetic oligonucleotide; CTG chr11 5255382 5255403 5255387 5255382 -
cactgaaactgttgctttatag

SEQ ID NO: 139101 - DNA, 22 bp, Artificial Sequence
  Synthetic oligonucleotide; CTG chr11 5255377 5255398 5255382 5255377 -
aaactgttgctttataggattt

SEQ ID NO: 139102 - DNA, 22 bp, Artificial Sequence
  Synthetic oligonucleotide; CTG chr11 5255371 5255392 5255376 5255371 -
ttgctttataggatttttcact

SEQ ID NO: 139103 - DNA, 22 bp, Artificial Sequence
  Synthetic oligonucleotide; TTG chr11 5255368 5255389 5255373 5255368 -
ctttataggatttttcactaca

SEQ ID NO: 139104 - DNA, 22 bp, Artificial Sequence
  Synthetic oligonucleotide; CTT chr11 5255365 5255386 5255370 5255365 -
tataggatttttcactacacta

SEQ ID NO: 139105 - DNA, 22 bp, Artificial Sequence
  Synthetic oligonucleotide; TTT chr11 5255364 5255385 5255369 5255364 -
ataggatttttcactacactaa

SEQ ID NO: 139106 - DNA, 22 bp, Artificial Sequence
  Synthetic oligonucleotide; TTA chr11 5255363 5255384 5255368 5255363 -
taggatttttcactacactaat

SEQ ID NO: 139107 - DNA, 22 bp, Artificial Sequence
  Synthetic oligonucleotide; TTT chr11 5255355 5255376 5255360 5255355 -
ttcactacactaatgagaactt

SEQ ID NO: 139108 - DNA, 22 bp, Artificial Sequence
  Synthetic oligonucleotide; TTT chr11 5255354 5255375 5255359 5255354 -
tcactacactaatgagaactta

SEQ ID NO: 139109 - DNA, 22 bp, Artificial Sequence
  Synthetic oligonucleotide; TTT chr11 5255353 5255374 5255358 5255353 -
cactacactaatgagaacttaa

SEQ ID NO: 139110 - DNA, 22 bp, Artificial Sequence
  Synthetic oligonucleotide; TTC chr11 5255352 5255373 5255357 5255352 -
actacactaatgagaacttaag

SEQ ID NO: 139111 - DNA, 22 bp, Artificial Sequence
  Synthetic oligonucleotide; CTA chr11 5255348 5255369 5255353 5255348 -
cactaatgagaacttaagagat

SEQ ID NO: 139112 - DNA, 22 bp, Artificial Sequence
  Synthetic oligonucleotide; CTA chr11 5255343 5255364 5255348 5255343 -
atgagaacttaagagataatgg

SEQ ID NO: 139113 - DNA, 22 bp, Artificial Sequence
  Synthetic oligonucleotide; CTT chr11 5255333 5255354 5255338 5255333 -
aagagataatggcctaaaacca

SEQ ID NO: 139114 - DNA, 22 bp, Artificial Sequence
  Synthetic oligonucleotide; TTA chr11 5255332 5255353 5255337 5255332 -
agagataatggcctaaaaccac

SEQ ID NO: 139115 - DNA, 22 bp, Artificial Sequence
  Synthetic oligonucleotide; CTA chr11 5255317 5255338 5255322 5255317 -
aaaccacagagagtatattcaa

SEQ ID NO: 139116 - DNA, 22 bp, Artificial Sequence
  Synthetic oligonucleotide; TTC chr11 5255297 5255318 5255302 5255297 -
aaagataagtatagcacttctt

SEQ ID NO: 139117 - DNA, 22 bp, Artificial Sequence
  Synthetic oligonucleotide; CTT chr11 5255278 5255299 5255283 5255278 -
cttatttggaaaccaatgctta

SEQ ID NO: 139118 - DNA, 22 bp, Artificial Sequence
  Synthetic oligonucleotide; TTC chr11 5255277 5255298 5255282 5255277 -
ttatttggaaaccaatgcttac

SEQ ID NO: 139119 - DNA, 22 bp, Artificial Sequence
  Synthetic oligonucleotide; CTT chr11 5255275 5255296 5255280 5255275 -
atttggaaaccaatgcttacta

SEQ ID NO: 139120 - DNA, 22 bp, Artificial Sequence
  Synthetic oligonucleotide; TTA chr11 5255274 5255295 5255279 5255274 -
tttggaaaccaatgcttactaa

SEQ ID NO: 139121 - DNA, 22 bp, Artificial Sequence
  Synthetic oligonucleotide; TTT chr11 5255271 5255292 5255276 5255271 -
ggaaaccaatgcttactaaatg

SEQ ID NO: 139122 - DNA, 22 bp, Artificial Sequence
  Synthetic oligonucleotide; TTG chr11 5255270 5255291 5255275 5255270 -
gaaaccaatgcttactaaatga

SEQ ID NO: 139123 - DNA, 22 bp, Artificial Sequence
  Synthetic oligonucleotide; CTT chr11 5255257 5255278 5255262 5255257 -
actaaatgagactaagacgtgt

SEQ ID NO: 139124 - DNA, 22 bp, Artificial Sequence
  Synthetic oligonucleotide; TTA chr11 5255256 5255277 5255261 5255256 -
ctaaatgagactaagacgtgtc

SEQ ID NO: 139125 - DNA, 22 bp, Artificial Sequence
  Synthetic oligonucleotide; CTA chr11 5255253 5255274 5255258 5255253 -
aatgagactaagacgtgtccca

SEQ ID NO: 139126 - DNA, 22 bp, Artificial Sequence
  Synthetic oligonucleotide; CTA chr11 5255243 5255264 5255248 5255243 -
agacgtgtcccatcaaaaatcc

SEQ ID NO: 139127 - DNA, 22 bp, Artificial Sequence
  Synthetic oligonucleotide; CTG chr11 5255219 5255240 5255224 5255219 -
gacctatgcctaaaacacattt

SEQ ID NO: 139128 - DNA, 22 bp, Artificial Sequence
  Synthetic oligonucleotide; CTA chr11 5255213 5255234 5255218 5255213 -
tgcctaaaacacatttcacaat

SEQ ID NO: 139129 - DNA, 22 bp, Artificial Sequence
  Synthetic oligonucleotide; CTA chr11 5255207 5255228 5255212 5255207 -
aaacacatttcacaatccctga

SEQ ID NO: 139130 - DNA, 22 bp, Artificial Sequence
  Synthetic oligonucleotide; TTT chr11 5255197 5255218 5255202 5255197 -
cacaatccctgaacttttcaaa

SEQ ID NO: 139131 - DNA, 22 bp, Artificial Sequence
  Synthetic oligonucleotide; TTC chr11 5255196 5255217 5255201 5255196 -
acaatccctgaacttttcaaaa

SEQ ID NO: 139132 - DNA, 22 bp, Artificial Sequence
  Synthetic oligonucleotide; CTG chr11 5255186 5255207 5255191 5255186 -
aacttttcaaaaattggtacat

SEQ ID NO: 139133 - DNA, 22 bp, Artificial Sequence
  Synthetic oligonucleotide; CTT chr11 5255181 5255202 5255186 5255181 -
ttcaaaaattggtacatgcttt

SEQ ID NO: 139134 - DNA, 22 bp, Artificial Sequence
  Synthetic oligonucleotide; TTT chr11 5255180 5255201 5255185 5255180 -
tcaaaaattggtacatgcttta

SEQ ID NO: 139135 - DNA, 22 bp, Artificial Sequence
  Synthetic oligonucleotide; TTT chr11 5255179 5255200 5255184 5255179 -
caaaaattggtacatgctttaa

SEQ ID NO: 139136 - DNA, 22 bp, Artificial Sequence
  Synthetic oligonucleotide; TTC chr11 5255178 5255199 5255183 5255178 -
aaaaattggtacatgctttaac

SEQ ID NO: 139137 - DNA, 22 bp, Artificial Sequence
  Synthetic oligonucleotide; TTG chr11 5255170 5255191 5255175 5255170 -
gtacatgctttaactttaaact

SEQ ID NO: 139138 - DNA, 22 bp, Artificial Sequence
  Synthetic oligonucleotide; CTT chr11 5255160 5255181 5255165 5255160 -
taactttaaactacaggcctca

SEQ ID NO: 139139 - DNA, 22 bp, Artificial Sequence
  Synthetic oligonucleotide; TTT chr11 5255159 5255180 5255164 5255159 -
aactttaaactacaggcctcac

SEQ ID NO: 139140 - DNA, 22 bp, Artificial Sequence
  Synthetic oligonucleotide; TTA chr11 5255158 5255179 5255163 5255158 -
actttaaactacaggcctcact

SEQ ID NO: 139141 - DNA, 22 bp, Artificial Sequence
  Synthetic oligonucleotide; CTT chr11 5255154 5255175 5255159 5255154 -
taaactacaggcctcactggag

SEQ ID NO: 139142 - DNA, 22 bp, Artificial Sequence
  Synthetic oligonucleotide; TTT chr11 5255153 5255174 5255158 5255153 -
aaactacaggcctcactggagc

SEQ ID NO: 139143 - DNA, 22 bp, Artificial Sequence
  Synthetic oligonucleotide; TTA chr11 5255152 5255173 5255157 5255152 -
aactacaggcctcactggagct

SEQ ID NO: 139144 - DNA, 22 bp, Artificial Sequence
  Synthetic oligonucleotide; CTA chr11 5255147 5255168 5255152 5255147 -
caggcctcactggagctacaga

SEQ ID NO: 139145 - DNA, 22 bp, Artificial Sequence
  Synthetic oligonucleotide; CTC chr11 5255139 5255160 5255144 5255139 -
actggagctacagacaagaagg

SEQ ID NO: 139146 - DNA, 22 bp, Artificial Sequence
  Synthetic oligonucleotide; CTG chr11 5255135 5255156 5255140 5255135 -
gagctacagacaagaaggtgaa

SEQ ID NO: 139147 - DNA, 22 bp, Artificial Sequence
  Synthetic oligonucleotide; CTA chr11 5255129 5255150 5255134 5255129 -
cagacaagaaggtgaaaaacgg

SEQ ID NO: 139148 - DNA, 22 bp, Artificial Sequence
  Synthetic oligonucleotide; CTG chr11 5255104 5255125 5255109 5255104 -
acaaaagaagtcctggtatctt

SEQ ID NO: 139149 - DNA, 22 bp, Artificial Sequence
  Synthetic oligonucleotide; CTG chr11 5255089 5255110 5255094 5255089 -
gtatcttctatggtgggagaag

SEQ ID NO: 139150 - DNA, 22 bp, Artificial Sequence
  Synthetic oligonucleotide; CTT chr11 5255082 5255103 5255087 5255082 -
ctatggtgggagaagaaaacta

SEQ ID NO: 139151 - DNA, 22 bp, Artificial Sequence
  Synthetic oligonucleotide; TTC chr11 5255081 5255102 5255086 5255081 -
tatggtgggagaagaaaactag

SEQ ID NO: 139152 - DNA, 22 bp, Artificial Sequence
  Synthetic oligonucleotide; CTA chr11 5255079 5255100 5255084 5255079 -
tggtgggagaagaaaactagct

SEQ ID NO: 139153 - DNA, 22 bp, Artificial Sequence
  Synthetic oligonucleotide; CTA chr11 5255060 5255081 5255065 5255060 -
gctaaagggaagaataaattag

SEQ ID NO: 139154 - DNA, 22 bp, Artificial Sequence
  Synthetic oligonucleotide; CTA chr11 5255056 5255077 5255061 5255056 -
aagggaagaataaattagagaa

SEQ ID NO: 139155 - DNA, 22 bp, Artificial Sequence
  Synthetic oligonucleotide; TTA chr11 5255039 5255060 5255044 5255039 -
gagaaaaattggaatgactgaa

SEQ ID NO: 139156 - DNA, 22 bp, Artificial Sequence
  Synthetic oligonucleotide; TTG chr11 5255028 5255049 5255033 5255028 -
gaatgactgaatcggaacaagg

SEQ ID NO: 139157 - DNA, 22 bp, Artificial Sequence
  Synthetic oligonucleotide; CTG chr11 5255019 5255040 5255024 5255019 -
aatcggaacaaggcaaaggcta

SEQ ID NO: 139158 - DNA, 22 bp, Artificial Sequence
  Synthetic oligonucleotide; CTA chr11 5254997 5255018 5255002 5254997 -
taaaaaaaattaagcagcagta

SEQ ID NO: 139159 - DNA, 22 bp, Artificial Sequence
  Synthetic oligonucleotide; TTA chr11 5254985 5255006 5254990 5254985 -
agcagcagtatcctcttggggg

SEQ ID NO: 139160 - DNA, 22 bp, Artificial Sequence
  Synthetic oligonucleotide; CTC chr11 5254970 5254991 5254975 5254970 -
ttgggggccccttccccacact

SEQ ID NO: 139161 - DNA, 22 bp, Artificial Sequence
  Synthetic oligonucleotide; CTT chr11 5254968 5254989 5254973 5254968 -
gggggccccttccccacactat

SEQ ID NO: 139162 - DNA, 22 bp, Artificial Sequence
  Synthetic oligonucleotide; TTG chr11 5254967 5254988 5254972 5254967 -
ggggccccttccccacactatc

SEQ ID NO: 139163 - DNA, 22 bp, Artificial Sequence
  Synthetic oligonucleotide; CTT chr11 5254957 5254978 5254962 5254957 -
ccccacactatctcaatgcaaa

SEQ ID NO: 139164 - DNA, 22 bp, Artificial Sequence
  Synthetic oligonucleotide; TTC chr11 5254956 5254977 5254961 5254956 -
cccacactatctcaatgcaaat

SEQ ID NO: 139165 - DNA, 22 bp, Artificial Sequence
  Synthetic oligonucleotide; CTA chr11 5254947 5254968 5254952 5254947 -
tctcaatgcaaatatctgtctg

SEQ ID NO: 139166 - DNA, 22 bp, Artificial Sequence
  Synthetic oligonucleotide; CTC chr11 5254943 5254964 5254948 5254943 -
aatgcaaatatctgtctgaaac

SEQ ID NO: 139167 - DNA, 22 bp, Artificial Sequence
  Synthetic oligonucleotide; CTG chr11 5254929 5254950 5254934 5254929 -
tctgaaacggtccctggctaaa

SEQ ID NO: 139168 - DNA, 22 bp, Artificial Sequence
  Synthetic oligonucleotide; CTG chr11 5254925 5254946 5254930 5254925 -
aaacggtccctggctaaactcc

SEQ ID NO: 139169 - DNA, 22 bp, Artificial Sequence
  Synthetic oligonucleotide; CTG chr11 5254913 5254934 5254918 5254913 -
gctaaactccacccatgggttg

SEQ ID NO: 139170 - DNA, 22 bp, Artificial Sequence
  Synthetic oligonucleotide; CTA chr11 5254909 5254930 5254914 5254909 -
aactccacccatgggttggcca

SEQ ID NO: 139171 - DNA, 22 bp, Artificial Sequence
  Synthetic oligonucleotide; CTC chr11 5254904 5254925 5254909 5254904 -
cacccatgggttggccagcctt

SEQ ID NO: 139172 - DNA, 22 bp, Artificial Sequence
  Synthetic oligonucleotide; TTG chr11 5254891 5254912 5254896 5254891 -
gccagccttgccttgaccaata

SEQ ID NO: 139173 - DNA, 22 bp, Artificial Sequence
  Synthetic oligonucleotide; CTT chr11 5254882 5254903 5254887 5254882 -
gccttgaccaatagccttgaca

SEQ ID NO: 139174 - DNA, 22 bp, Artificial Sequence
  Synthetic oligonucleotide; TTG chr11 5254881 5254902 5254886 5254881 -
ccttgaccaatagccttgacaa

SEQ ID NO: 139175 - DNA, 22 bp, Artificial Sequence
  Synthetic oligonucleotide; CTT chr11 5254877 5254898 5254882 5254877 -
gaccaatagccttgacaaggca

SEQ ID NO: 139176 - DNA, 22 bp, Artificial Sequence
  Synthetic oligonucleotide; TTG chr11 5254876 5254897 5254881 5254876 -
accaatagccttgacaaggcaa

SEQ ID NO: 139177 - DNA, 22 bp, Artificial Sequence
  Synthetic oligonucleotide; CTT chr11 5254864 5254885 5254869 5254864 -
gacaaggcaaacttgaccaata

SEQ ID NO: 139178 - DNA, 22 bp, Artificial Sequence
  Synthetic oligonucleotide; TTG chr11 5254863 5254884 5254868 5254863 -
acaaggcaaacttgaccaatag

SEQ ID NO: 139179 - DNA, 22 bp, Artificial Sequence
  Synthetic oligonucleotide; CTT chr11 5254850 5254871 5254855 5254850 -
gaccaatagtcttagagtatcc

SEQ ID NO: 139180 - DNA, 22 bp, Artificial Sequence
  Synthetic oligonucleotide; TTG chr11 5254849 5254870 5254854 5254849 -
accaatagtcttagagtatcca

SEQ ID NO: 139181 - DNA, 22 bp, Artificial Sequence
  Synthetic oligonucleotide; CTT chr11 5254837 5254858 5254842 5254837 -
agagtatccagtgaggccaggg

SEQ ID NO: 139182 - DNA, 22 bp, Artificial Sequence
  Synthetic oligonucleotide; TTA chr11 5254836 5254857 5254841 5254836 -
gagtatccagtgaggccagggg

SEQ ID NO: 139183 - DNA, 22 bp, Artificial Sequence
  Synthetic oligonucleotide; CTG chr11 5254804 5254825 5254809 5254804 -
gctagggatgaagaataaaagg

SEQ ID NO: 139184 - DNA, 22 bp, Artificial Sequence
  Synthetic oligonucleotide; CTA chr11 5254800 5254821 5254805 5254800 -
gggatgaagaataaaaggaagc

SEQ ID NO: 139185 - DNA, 22 bp, Artificial Sequence
  Synthetic oligonucleotide; CTT chr11 5254772 5254793 5254777 5254772 -
cagcagttccacacactcgctt

SEQ ID NO: 139186 - DNA, 22 bp, Artificial Sequence
  Synthetic oligonucleotide; TTC chr11 5254771 5254792 5254776 5254771 -
agcagttccacacactcgcttc

SEQ ID NO: 139187 - DNA, 22 bp, Artificial Sequence
  Synthetic oligonucleotide; TTC chr11 5254763 5254784 5254768 5254763 -
cacacactcgcttctggaacgt

SEQ ID NO: 139188 - DNA, 22 bp, Artificial Sequence
  Synthetic oligonucleotide; CTC chr11 5254754 5254775 5254759 5254754 -
gcttctggaacgtctgaggtta

SEQ ID NO: 139189 - DNA, 22 bp, Artificial Sequence
  Synthetic oligonucleotide; CTT chr11 5254750 5254771 5254755 5254750 -
ctggaacgtctgaggttatcaa

SEQ ID NO: 139190 - DNA, 22 bp, Artificial Sequence
  Synthetic oligonucleotide; TTC chr11 5254749 5254770 5254754 5254749 -
tggaacgtctgaggttatcaat

SEQ ID NO: 139191 - DNA, 22 bp, Artificial Sequence
  Synthetic oligonucleotide; CTG chr11 5254747 5254768 5254752 5254747 -
gaacgtctgaggttatcaataa

SEQ ID NO: 139192 - DNA, 22 bp, Artificial Sequence
  Synthetic oligonucleotide; CTG chr11 5254738 5254759 5254743 5254738 -
aggttatcaataagctcctagt

SEQ ID NO: 139193 - DNA, 22 bp, Artificial Sequence
  Synthetic oligonucleotide; TTA chr11 5254732 5254753 5254737 5254732 -
tcaataagctcctagtccagac

SEQ ID NO: 139194 - DNA, 22 bp, Artificial Sequence
  Synthetic oligonucleotide; CTC chr11 5254721 5254742 5254726 5254721 -
ctagtccagacgccatgggtca

SEQ ID NO: 139195 - DNA, 22 bp, Artificial Sequence
  Synthetic oligonucleotide; CTA chr11 5254718 5254739 5254723 5254718 -
gtccagacgccatgggtcattt

SEQ ID NO: 139196 - DNA, 22 bp, Artificial Sequence
  Synthetic oligonucleotide; TTT chr11 5254696 5254717 5254701 5254696 -
cacagaggaggacaaggctact

SEQ ID NO: 139197 - DNA, 22 bp, Artificial Sequence
  Synthetic oligonucleotide; TTC chr11 5254695 5254716 5254700 5254695 -
acagaggaggacaaggctacta

SEQ ID NO: 139198 - DNA, 22 bp, Artificial Sequence
  Synthetic oligonucleotide; CTA chr11 5254676 5254697 5254681 5254676 -
ctatcacaagcctgtggggcaa

SEQ ID NO: 139199 - DNA, 22 bp, Artificial Sequence
  Synthetic oligonucleotide; CTA chr11 5254673 5254694 5254678 5254673 -
tcacaagcctgtggggcaaggt

SEQ ID NO: 139200 - DNA, 22 bp, Artificial Sequence
  Synthetic oligonucleotide; CTG chr11 5254662 5254683 5254667 5254662 -
tggggcaaggtgaatgtggaag

SEQ ID NO: 139201 - DNA, 22 bp, Artificial Sequence
  Synthetic oligonucleotide; CTG chr11 5254634 5254655 5254639 5254634 -
gaggagaaaccctgggaaggta

SEQ ID NO: 139202 - DNA, 22 bp, Artificial Sequence
  Synthetic oligonucleotide; CTG chr11 5254620 5254641 5254625 5254620 -
ggaaggtaggctctggtgacca

SEQ ID NO: 139203 - DNA, 22 bp, Artificial Sequence
  Synthetic oligonucleotide; CTC chr11 5254607 5254628 5254612 5254607 -
tggtgaccaggacaagggaggg

SEQ ID NO: 139204 - DNA, 22 bp, Artificial Sequence
  Synthetic oligonucleotide; CTG chr11 5254605 5254626 5254610 5254605 -
gtgaccaggacaagggagggaa

SEQ ID NO: 139205 - DNA, 22 bp, Artificial Sequence
  Synthetic oligonucleotide; CTG chr11 5254571 5254592 5254576 5254571 -
tgcctggcaaaagtccaggtcg

SEQ ID NO: 139206 - DNA, 22 bp, Artificial Sequence
  Synthetic oligonucleotide; CTG chr11 5254565 5254586 5254570 5254565 -
gcaaaagtccaggtcgcttctc

SEQ ID NO: 139207 - DNA, 22 bp, Artificial Sequence
  Synthetic oligonucleotide; CTT chr11 5254546 5254567 5254551 5254546 -
ctcaggatttgtggcaccttct

SEQ ID NO: 139208 - DNA, 22 bp, Artificial Sequence
  Synthetic oligonucleotide; TTC chr11 5254545 5254566 5254550 5254545 -
tcaggatttgtggcaccttctg

SEQ ID NO: 139209 - DNA, 22 bp, Artificial Sequence
  Synthetic oligonucleotide; CTC chr11 5254543 5254564 5254548 5254543 -
aggatttgtggcaccttctgac

SEQ ID NO: 139210 - DNA, 22 bp, Artificial Sequence
  Synthetic oligonucleotide; TTT chr11 5254536 5254557 5254541 5254536 -
gtggcaccttctgactgtcaaa

SEQ ID NO: 139211 - DNA, 22 bp, Artificial Sequence
  Synthetic oligonucleotide; TTG chr11 5254535 5254556 5254540 5254535 -
tggcaccttctgactgtcaaac

SEQ ID NO: 139212 - DNA, 22 bp, Artificial Sequence
  Synthetic oligonucleotide; CTT chr11 5254526 5254547 5254531 5254526 -
ctgactgtcaaactgttcttgt

SEQ ID NO: 139213 - DNA, 22 bp, Artificial Sequence
  Synthetic oligonucleotide; TTC chr11 5254525 5254546 5254530 5254525 -
tgactgtcaaactgttcttgtc

SEQ ID NO: 139214 - DNA, 22 bp, Artificial Sequence
  Synthetic oligonucleotide; CTG chr11 5254523 5254544 5254528 5254523 -
actgtcaaactgttcttgtcaa

SEQ ID NO: 139215 - DNA, 22 bp, Artificial Sequence
  Synthetic oligonucleotide; CTG chr11 5254519 5254540 5254524 5254519 -
tcaaactgttcttgtcaatctc

SEQ ID NO: 139216 - DNA, 22 bp, Artificial Sequence
  Synthetic oligonucleotide; CTG chr11 5254511 5254532 5254516 5254511 -
ttcttgtcaatctcacaggctc

SEQ ID NO: 139217 - DNA, 22 bp, Artificial Sequence
  Synthetic oligonucleotide; TTC chr11 5254508 5254529 5254513 5254508 -
ttgtcaatctcacaggctcctg

SEQ ID NO: 139218 - DNA, 22 bp, Artificial Sequence
  Synthetic oligonucleotide; CTT chr11 5254506 5254527 5254511 5254506 -
gtcaatctcacaggctcctggt

SEQ ID NO: 139219 - DNA, 22 bp, Artificial Sequence
  Synthetic oligonucleotide; TTG chr11 5254505 5254526 5254510 5254505 -
tcaatctcacaggctcctggtt

SEQ ID NO: 139220 - DNA, 22 bp, Artificial Sequence
  Synthetic oligonucleotide; CTC chr11 5254497 5254518 5254502 5254497 -
acaggctcctggttgtctaccc

SEQ ID NO: 139221 - DNA, 22 bp, Artificial Sequence
  Synthetic oligonucleotide; CTC chr11 5254489 5254510 5254494 5254489 -
ctggttgtctacccatggaccc

SEQ ID NO: 139222 - DNA, 22 bp, Artificial Sequence
  Synthetic oligonucleotide; CTG chr11 5254486 5254507 5254491 5254486 -
gttgtctacccatggacccaga

SEQ ID NO: 139223 - DNA, 22 bp, Artificial Sequence
  Synthetic oligonucleotide; TTG chr11 5254482 5254503 5254487 5254482 -
tctacccatggacccagaggtt

SEQ ID NO: 139224 - DNA, 22 bp, Artificial Sequence
  Synthetic oligonucleotide; CTA chr11 5254478 5254499 5254483 5254478 -
cccatggacccagaggttcttt

SEQ ID NO: 139225 - DNA, 22 bp, Artificial Sequence
  Synthetic oligonucleotide; TTC chr11 5254459 5254480 5254464 5254459 -
tttgacagctttggcaacctgt

SEQ ID NO: 139226 - DNA, 22 bp, Artificial Sequence
  Synthetic oligonucleotide; CTT chr11 5254457 5254478 5254462 5254457 -
tgacagctttggcaacctgtcc

SEQ ID NO: 139227 - DNA, 22 bp, Artificial Sequence
  Synthetic oligonucleotide; TTT chr11 5254456 5254477 5254461 5254456 -
gacagctttggcaacctgtcct

SEQ ID NO: 139228 - DNA, 22 bp, Artificial Sequence
  Synthetic oligonucleotide; TTG chr11 5254455 5254476 5254460 5254455 -
acagctttggcaacctgtcctc

SEQ ID NO: 139229 - DNA, 22 bp, Artificial Sequence
  Synthetic oligonucleotide; CTT chr11 5254448 5254469 5254453 5254448 -
tggcaacctgtcctctgcctct

SEQ ID NO: 139230 - DNA, 22 bp, Artificial Sequence
  Synthetic oligonucleotide; TTT chr11 5254447 5254468 5254452 5254447 -
ggcaacctgtcctctgcctctg

SEQ ID NO: 139231 - DNA, 22 bp, Artificial Sequence
  Synthetic oligonucleotide; TTG chr11 5254446 5254467 5254451 5254446 -
gcaacctgtcctctgcctctgc

SEQ ID NO: 139232 - DNA, 22 bp, Artificial Sequence
  Synthetic oligonucleotide; CTG chr11 5254438 5254459 5254443 5254438 -
tcctctgcctctgccatcatgg

SEQ ID NO: 139233 - DNA, 22 bp, Artificial Sequence
  Synthetic oligonucleotide; CTC chr11 5254433 5254454 5254438 5254433 -
tgcctctgccatcatgggcaac

SEQ ID NO: 139234 - DNA, 22 bp, Artificial Sequence
  Synthetic oligonucleotide; CTG chr11 5254431 5254452 5254436 5254431 -
cctctgccatcatgggcaaccc

SEQ ID NO: 139235 - DNA, 22 bp, Artificial Sequence
  Synthetic oligonucleotide; CTC chr11 5254427 5254448 5254432 5254427 -
tgccatcatgggcaaccccaaa

SEQ ID NO: 139236 - DNA, 22 bp, Artificial Sequence
  Synthetic oligonucleotide; CTG chr11 5254425 5254446 5254430 5254425 -
ccatcatgggcaaccccaaagt

SEQ ID NO: 139237 - DNA, 22 bp, Artificial Sequence
  Synthetic oligonucleotide; CTG chr11 5254378 5254399 5254383 5254378 -
acttccttgggagatgccataa

SEQ ID NO: 139238 - DNA, 22 bp, Artificial Sequence
  Synthetic oligonucleotide; CTT chr11 5254374 5254395 5254379 5254374 -
ccttgggagatgccataaagca

SEQ ID NO: 139239 - DNA, 22 bp, Artificial Sequence
  Synthetic oligonucleotide; TTC chr11 5254373 5254394 5254378 5254373 -
cttgggagatgccataaagcac

SEQ ID NO: 139240 - DNA, 22 bp, Artificial Sequence
  Synthetic oligonucleotide; CTT chr11 5254370 5254391 5254375 5254370 -
gggagatgccataaagcacctg

SEQ ID NO: 139241 - DNA, 22 bp, Artificial Sequence
  Synthetic oligonucleotide; TTG chr11 5254369 5254390 5254374 5254369 -
ggagatgccataaagcacctgg

SEQ ID NO: 139242 - DNA, 22 bp, Artificial Sequence
  Synthetic oligonucleotide; CTG chr11 5254348 5254369 5254353 5254348 -
gatgatctcaagggcacctttg

SEQ ID NO: 139243 - DNA, 22 bp, Artificial Sequence
  Synthetic oligonucleotide; CTC chr11 5254339 5254360 5254344 5254339 -
aagggcacctttgcccagctga

SEQ ID NO: 139244 - DNA, 22 bp, Artificial Sequence
  Synthetic oligonucleotide; CTT chr11 5254328 5254349 5254333 5254328 -
tgcccagctgagtgaactgcac

SEQ ID NO: 139245 - DNA, 22 bp, Artificial Sequence
  Synthetic oligonucleotide; TTT chr11 5254327 5254348 5254332 5254327 -
gcccagctgagtgaactgcact

SEQ ID NO: 139246 - DNA, 22 bp, Artificial Sequence
  Synthetic oligonucleotide; TTG chr11 5254326 5254347 5254331 5254326 -
cccagctgagtgaactgcactg

SEQ ID NO: 139247 - DNA, 22 bp, Artificial Sequence
  Synthetic oligonucleotide; CTG chr11 5254318 5254339 5254323 5254318 -
agtgaactgcactgtgacaagc

SEQ ID NO: 139248 - DNA, 22 bp, Artificial Sequence
  Synthetic oligonucleotide; CTG chr11 5254309 5254330 5254314 5254309 -
cactgtgacaagctgcatgtgg

SEQ ID NO: 139249 - DNA, 22 bp, Artificial Sequence
  Synthetic oligonucleotide; CTG chr11 5254304 5254325 5254309 5254304 -
tgacaagctgcatgtggatcct

SEQ ID NO: 139250 - DNA, 22 bp, Artificial Sequence
  Synthetic oligonucleotide; CTG chr11 5254294 5254315 5254299 5254294 -
catgtggatcctgagaacttca

SEQ ID NO: 139251 - DNA, 22 bp, Artificial Sequence
  Synthetic oligonucleotide; CTG chr11 5254281 5254302 5254286 5254281 -
agaacttcaaggtgagtccagg

SEQ ID NO: 139252 - DNA, 22 bp, Artificial Sequence
  Synthetic oligonucleotide; CTT chr11 5254274 5254295 5254279 5254274 -
caaggtgagtccaggagatgtt

SEQ ID NO: 139253 - DNA, 22 bp, Artificial Sequence
  Synthetic oligonucleotide; TTC chr11 5254273 5254294 5254278 5254273 -
aaggtgagtccaggagatgttt

SEQ ID NO: 139254 - DNA, 22 bp, Artificial Sequence
  Synthetic oligonucleotide; TTT chr11 5254251 5254272 5254256 5254251 -
cagcactgttgcctttagtctc

SEQ ID NO: 139255 - DNA, 22 bp, Artificial Sequence
  Synthetic oligonucleotide; TTC chr11 5254250 5254271 5254255 5254250 -
agcactgttgcctttagtctcg

SEQ ID NO: 139256 - DNA, 22 bp, Artificial Sequence
  Synthetic oligonucleotide; CTG chr11 5254243 5254264 5254248 5254243 -
ttgcctttagtctcgaggcaac

SEQ ID NO: 139257 - DNA, 22 bp, Artificial Sequence
  Synthetic oligonucleotide; TTG chr11 5254240 5254261 5254245 5254240 -
cctttagtctcgaggcaactta

SEQ ID NO: 139258 - DNA, 22 bp, Artificial Sequence
  Synthetic oligonucleotide; CTT chr11 5254236 5254257 5254241 5254236 -
tagtctcgaggcaacttagaca

SEQ ID NO: 139259 - DNA, 22 bp, Artificial Sequence
  Synthetic oligonucleotide; TTT chr11 5254235 5254256 5254240 5254235 -
agtctcgaggcaacttagacaa

SEQ ID NO: 139260 - DNA, 22 bp, Artificial Sequence
  Synthetic oligonucleotide; TTA chr11 5254234 5254255 5254239 5254234 -
gtctcgaggcaacttagacaac

SEQ ID NO: 139261 - DNA, 22 bp, Artificial Sequence
  Synthetic oligonucleotide; CTC chr11 5254229 5254250 5254234 5254229 -
gaggcaacttagacaactgagt

SEQ ID NO: 139262 - DNA, 22 bp, Artificial Sequence
  Synthetic oligonucleotide; CTT chr11 5254219 5254240 5254224 5254219 -
agacaactgagtattgatctga

SEQ ID NO: 139263 - DNA, 22 bp, Artificial Sequence
  Synthetic oligonucleotide; TTA chr11 5254218 5254239 5254223 5254218 -
gacaactgagtattgatctgag

SEQ ID NO: 139264 - DNA, 22 bp, Artificial Sequence
  Synthetic oligonucleotide; CTG chr11 5254210 5254231 5254215 5254210 -
agtattgatctgagcacagcag

SEQ ID NO: 139265 - DNA, 22 bp, Artificial Sequence
  Synthetic oligonucleotide; TTG chr11 5254203 5254224 5254208 5254203 -
atctgagcacagcagggtgtga

SEQ ID NO: 139266 - DNA, 22 bp, Artificial Sequence
  Synthetic oligonucleotide; CTG chr11 5254198 5254219 5254203 5254198 -
agcacagcagggtgtgagctgt

SEQ ID NO: 139267 - DNA, 22 bp, Artificial Sequence
  Synthetic oligonucleotide; CTG chr11 5254177 5254198 5254182 5254177 -
tttgaagatactggggttggga

SEQ ID NO: 139268 - DNA, 22 bp, Artificial Sequence
  Synthetic oligonucleotide; TTT chr11 5254174 5254195 5254179 5254174 -
gaagatactggggttgggagtg

SEQ ID NO: 139269 - DNA, 22 bp, Artificial Sequence
  Synthetic oligonucleotide; TTG chr11 5254173 5254194 5254178 5254173 -
aagatactggggttgggagtga

SEQ ID NO: 139270 - DNA, 22 bp, Artificial Sequence
  Synthetic oligonucleotide; CTG chr11 5254164 5254185 5254169 5254164 -
gggttgggagtgaagaaactgc

SEQ ID NO: 139271 - DNA, 22 bp, Artificial Sequence
  Synthetic oligonucleotide; TTG chr11 5254158 5254179 5254163 5254158 -
ggagtgaagaaactgcagagga

SEQ ID NO: 139272 - DNA, 22 bp, Artificial Sequence
  Synthetic oligonucleotide; CTG chr11 5254143 5254164 5254148 5254143 -
cagaggactaactgggctgaga

SEQ ID NO: 139273 - DNA, 22 bp, Artificial Sequence
  Synthetic oligonucleotide; CTA chr11 5254133 5254154 5254138 5254133 -
actgggctgagacccagtggca

SEQ ID NO: 139274 - DNA, 22 bp, Artificial Sequence
  Synthetic oligonucleotide; CTG chr11 5254129 5254150 5254134 5254129 -
ggctgagacccagtggcaatgt

SEQ ID NO: 139275 - DNA, 22 bp, Artificial Sequence
  Synthetic oligonucleotide; CTG chr11 5254124 5254145 5254129 5254124 -
agacccagtggcaatgttttag

SEQ ID NO: 139276 - DNA, 22 bp, Artificial Sequence
  Synthetic oligonucleotide; TTT chr11 5254105 5254126 5254110 5254105 -
tagggcctaaggagtgcctctg

SEQ ID NO: 139277 - DNA, 22 bp, Artificial Sequence
  Synthetic oligonucleotide; TTT chr11 5254104 5254125 5254109 5254104 -
agggcctaaggagtgcctctga

SEQ ID NO: 139278 - DNA, 22 bp, Artificial Sequence
  Synthetic oligonucleotide; TTA chr11 5254103 5254124 5254108 5254103 -
gggcctaaggagtgcctctgaa

SEQ ID NO: 139279 - DNA, 22 bp, Artificial Sequence
  Synthetic oligonucleotide; CTA chr11 5254096 5254117 5254101 5254096 -
aggagtgcctctgaaaatctag

SEQ ID NO: 139280 - DNA, 22 bp, Artificial Sequence
  Synthetic oligonucleotide; CTC chr11 5254085 5254106 5254090 5254085 -
tgaaaatctagatggacaactt

SEQ ID NO: 139281 - DNA, 22 bp, Artificial Sequence
  Synthetic oligonucleotide; CTG chr11 5254083 5254104 5254088 5254083 -
aaaatctagatggacaactttg

SEQ ID NO: 139282 - DNA, 22 bp, Artificial Sequence
  Synthetic oligonucleotide; CTA chr11 5254075 5254096 5254080 5254075 -
gatggacaactttgactttgag

SEQ ID NO: 139283 - DNA, 22 bp, Artificial Sequence
  Synthetic oligonucleotide; CTT chr11 5254063 5254084 5254068 5254063 -
tgactttgagaaaagagaggtg

SEQ ID NO: 139284 - DNA, 22 bp, Artificial Sequence
  Synthetic oligonucleotide; TTT chr11 5254062 5254083 5254067 5254062 -
gactttgagaaaagagaggtgg

SEQ ID NO: 139285 - DNA, 22 bp, Artificial Sequence
  Synthetic oligonucleotide; TTG chr11 5254061 5254082 5254066 5254061 -
actttgagaaaagagaggtgga

SEQ ID NO: 139286 - DNA, 22 bp, Artificial Sequence
  Synthetic oligonucleotide; CTT chr11 5254057 5254078 5254062 5254057 -
tgagaaaagagaggtggaaatg

SEQ ID NO: 139287 - DNA, 22 bp, Artificial Sequence
  Synthetic oligonucleotide; TTT chr11 5254056 5254077 5254061 5254056 -
gagaaaagagaggtggaaatga

SEQ ID NO: 139288 - DNA, 22 bp, Artificial Sequence
  Synthetic oligonucleotide; TTG chr11 5254055 5254076 5254060 5254055 -
agaaaagagaggtggaaatgag

SEQ ID NO: 139289 - DNA, 22 bp, Artificial Sequence
  Synthetic oligonucleotide; CTT chr11 5254022 5254043 5254027 5254022 -
ttctttattagatttcggtaga

SEQ ID NO: 139290 - DNA, 22 bp, Artificial Sequence
  Synthetic oligonucleotide; TTT chr11 5254021 5254042 5254026 5254021 -
tctttattagatttcggtagaa

SEQ ID NO: 139291 - DNA, 22 bp, Artificial Sequence
  Synthetic oligonucleotide; TTT chr11 5254020 5254041 5254025 5254020 -
ctttattagatttcggtagaaa

SEQ ID NO: 139292 - DNA, 22 bp, Artificial Sequence
  Synthetic oligonucleotide; TTC chr11 5254019 5254040 5254024 5254019 -
tttattagatttcggtagaaag

SEQ ID NO: 139293 - DNA, 22 bp, Artificial Sequence
  Synthetic oligonucleotide; CTT chr11 5254017 5254038 5254022 5254017 -
tattagatttcggtagaaagaa

SEQ ID NO: 139294 - DNA, 22 bp, Artificial Sequence
  Synthetic oligonucleotide; TTT chr11 5254016 5254037 5254021 5254016 -
attagatttcggtagaaagaac

SEQ ID NO: 139295 - DNA, 22 bp, Artificial Sequence
  Synthetic oligonucleotide; TTA chr11 5254015 5254036 5254020 5254015 -
ttagatttcggtagaaagaact

SEQ ID NO: 139296 - DNA, 22 bp, Artificial Sequence
  Synthetic oligonucleotide; TTA chr11 5254012 5254033 5254017 5254012 -
gatttcggtagaaagaactttc

SEQ ID NO: 139297 - DNA, 22 bp, Artificial Sequence
  Synthetic oligonucleotide; TTT chr11 5254007 5254028 5254012 5254007 -
cggtagaaagaactttcacctt

SEQ ID NO: 139298 - DNA, 22 bp, Artificial Sequence
  Synthetic oligonucleotide; TTC chr11 5254006 5254027 5254011 5254006 -
ggtagaaagaactttcaccttt

SEQ ID NO: 139299 - DNA, 22 bp, Artificial Sequence
  Synthetic oligonucleotide; CTT chr11 5253992 5254013 5253997 5253992 -
tcacctttcccctatttttgtt

SEQ ID NO: 139300 - DNA, 22 bp, Artificial Sequence
  Synthetic oligonucleotide; TTT chr11 5253991 5254012 5253996 5253991 -
cacctttcccctatttttgtta

SEQ ID NO: 139301 - DNA, 22 bp, Artificial Sequence
  Synthetic oligonucleotide; TTC chr11 5253990 5254011 5253995 5253990 -
acctttcccctatttttgttat

SEQ ID NO: 139302 - DNA, 22 bp, Artificial Sequence
  Synthetic oligonucleotide; CTT chr11 5253985 5254006 5253990 5253985 -
tcccctatttttgttattcgtt

SEQ ID NO: 139303 - DNA, 22 bp, Artificial Sequence
  Synthetic oligonucleotide; TTT chr11 5253984 5254005 5253989 5253984 -
cccctatttttgttattcgttt

SEQ ID NO: 139304 - DNA, 22 bp, Artificial Sequence
  Synthetic oligonucleotide; TTC chr11 5253983 5254004 5253988 5253983 -
ccctatttttgttattcgtttt

SEQ ID NO: 139305 - DNA, 22 bp, Artificial Sequence
  Synthetic oligonucleotide; CTA chr11 5253978 5253999 5253983 5253978 -
tttttgttattcgttttaaaac

SEQ ID NO: 139306 - DNA, 22 bp, Artificial Sequence
  Synthetic oligonucleotide; TTT chr11 5253975 5253996 5253980 5253975 -
ttgttattcgttttaaaacatc

SEQ ID NO: 139307 - DNA, 22 bp, Artificial Sequence
  Synthetic oligonucleotide; TTT chr11 5253974 5253995 5253979 5253974 -
tgttattcgttttaaaacatct

SEQ ID NO: 139308 - DNA, 22 bp, Artificial Sequence
  Synthetic oligonucleotide; TTT chr11 5253973 5253994 5253978 5253973 -
gttattcgttttaaaacatcta

SEQ ID NO: 139309 - DNA, 22 bp, Artificial Sequence
  Synthetic oligonucleotide; TTG chr11 5253972 5253993 5253977 5253972 -
ttattcgttttaaaacatctat

SEQ ID NO: 139310 - DNA, 22 bp, Artificial Sequence
  Synthetic oligonucleotide; TTA chr11 5253969 5253990 5253974 5253969 -
ttcgttttaaaacatctatctg

SEQ ID NO: 139311 - DNA, 22 bp, Artificial Sequence
  Synthetic oligonucleotide; TTC chr11 5253966 5253987 5253971 5253966 -
gttttaaaacatctatctggag

SEQ ID NO: 139312 - DNA, 22 bp, Artificial Sequence
  Synthetic oligonucleotide; TTT chr11 5253962 5253983 5253967 5253962 -
taaaacatctatctggaggcag

SEQ ID NO: 139313 - DNA, 22 bp, Artificial Sequence
  Synthetic oligonucleotide; TTT chr11 5253961 5253982 5253966 5253961 -
aaaacatctatctggaggcagg

SEQ ID NO: 139314 - DNA, 22 bp, Artificial Sequence
  Synthetic oligonucleotide; TTA chr11 5253960 5253981 5253965 5253960 -
aaacatctatctggaggcagga

SEQ ID NO: 139315 - DNA, 22 bp, Artificial Sequence
  Synthetic oligonucleotide; CTA chr11 5253951 5253972 5253956 5253951 -
tctggaggcaggacaagtatgg

SEQ ID NO: 139316 - DNA, 22 bp, Artificial Sequence
  Synthetic oligonucleotide; CTG chr11 5253947 5253968 5253952 5253947 -
gaggcaggacaagtatggtcat

SEQ ID NO: 139317 - DNA, 22 bp, Artificial Sequence
  Synthetic oligonucleotide; TTA chr11 5253923 5253944 5253928 5253923 -
aaaagatgcaggcagaaggcat

SEQ ID NO: 139318 - DNA, 22 bp, Artificial Sequence
  Synthetic oligonucleotide; TTG chr11 5253895 5253916 5253900 5253895 -
gctcagtcaaagtggggaactt

SEQ ID NO: 139319 - DNA, 22 bp, Artificial Sequence
  Synthetic oligonucleotide; CTC chr11 5253891 5253912 5253896 5253891 -
agtcaaagtggggaactttggt

SEQ ID NO: 139320 - DNA, 22 bp, Artificial Sequence
  Synthetic oligonucleotide; CTT chr11 5253873 5253894 5253878 5253873 -
tggtggccaaacatacattgct

SEQ ID NO: 139321 - DNA, 22 bp, Artificial Sequence
  Synthetic oligonucleotide; TTT chr11 5253872 5253893 5253877 5253872 -
ggtggccaaacatacattgcta

SEQ ID NO: 139322 - DNA, 22 bp, Artificial Sequence
  Synthetic oligonucleotide; TTG chr11 5253871 5253892 5253876 5253871 -
gtggccaaacatacattgctaa

SEQ ID NO: 139323 - DNA, 22 bp, Artificial Sequence
  Synthetic oligonucleotide; TTG chr11 5253853 5253874 5253858 5253853 -
ctaaggctattcctatatcagc

SEQ ID NO: 139324 - DNA, 22 bp, Artificial Sequence
  Synthetic oligonucleotide; CTA chr11 5253850 5253871 5253855 5253850 -
aggctattcctatatcagctgg

SEQ ID NO: 139325 - DNA, 22 bp, Artificial Sequence
  Synthetic oligonucleotide; CTA chr11 5253844 5253865 5253849 5253844 -
ttcctatatcagctggacacat

SEQ ID NO: 139326 - DNA, 22 bp, Artificial Sequence
  Synthetic oligonucleotide; TTC chr11 5253841 5253862 5253846 5253841 -
ctatatcagctggacacatata

SEQ ID NO: 139327 - DNA, 22 bp, Artificial Sequence
  Synthetic oligonucleotide; CTA chr11 5253838 5253859 5253843 5253838 -
tatcagctggacacatataaaa

SEQ ID NO: 139328 - DNA, 22 bp, Artificial Sequence
  Synthetic oligonucleotide; CTG chr11 5253829 5253850 5253834 5253829 -
gacacatataaaatgctgctaa

SEQ ID NO: 139329 - DNA, 22 bp, Artificial Sequence
  Synthetic oligonucleotide; CTG chr11 5253811 5253832 5253816 5253811 -
ctaatgcttcattacaaactta

SEQ ID NO: 139330 - DNA, 22 bp, Artificial Sequence
  Synthetic oligonucleotide; CTA chr11 5253808 5253829 5253813 5253808 -
atgcttcattacaaacttatat

SEQ ID NO: 139331 - DNA, 22 bp, Artificial Sequence
  Synthetic oligonucleotide; CTT chr11 5253802 5253823 5253807 5253802 -
cattacaaacttatatccttta

SEQ ID NO: 139332 - DNA, 22 bp, Artificial Sequence
  Synthetic oligonucleotide; TTC chr11 5253801 5253822 5253806 5253801 -
attacaaacttatatcctttaa

SEQ ID NO: 139333 - DNA, 22 bp, Artificial Sequence
  Synthetic oligonucleotide; TTA chr11 5253797 5253818 5253802 5253797 -
caaacttatatcctttaattcc

SEQ ID NO: 139334 - DNA, 22 bp, Artificial Sequence
  Synthetic oligonucleotide; CTT chr11 5253790 5253811 5253795 5253790 -
atatcctttaattccagatggg

SEQ ID NO: 139335 - DNA, 22 bp, Artificial Sequence
  Synthetic oligonucleotide; TTA chr11 5253789 5253810 5253794 5253789 -
tatcctttaattccagatgggg

SEQ ID NO: 139336 - DNA, 22 bp, Artificial Sequence
  Synthetic oligonucleotide; CTT chr11 5253782 5253803 5253787 5253782 -
taattccagatgggggcaaagt

SEQ ID NO: 139337 - DNA, 22 bp, Artificial Sequence
  Synthetic oligonucleotide; TTT chr11 5253781 5253802 5253786 5253781 -
aattccagatgggggcaaagta

SEQ ID NO: 139338 - DNA, 22 bp, Artificial Sequence
  Synthetic oligonucleotide; TTA chr11 5253780 5253801 5253785 5253780 -
attccagatgggggcaaagtat

SEQ ID NO: 139339 - DNA, 22 bp, Artificial Sequence
  Synthetic oligonucleotide; TTC chr11 5253776 5253797 5253781 5253776 -
cagatgggggcaaagtatgtcc

SEQ ID NO: 139340 - DNA, 22 bp, Artificial Sequence
  Synthetic oligonucleotide; TTG chr11 5253736 5253757 5253741 5253736 -
aaacatttgggctggagtagat

SEQ ID NO: 139341 - DNA, 22 bp, Artificial Sequence
  Synthetic oligonucleotide; TTT chr11 5253728 5253749 5253733 5253728 -
gggctggagtagattttgaaag

SEQ ID NO: 139342 - DNA, 22 bp, Artificial Sequence
  Synthetic oligonucleotide; TTG chr11 5253727 5253748 5253732 5253727 -
ggctggagtagattttgaaagt

SEQ ID NO: 139343 - DNA, 22 bp, Artificial Sequence
  Synthetic oligonucleotide; CTG chr11 5253722 5253743 5253727 5253722 -
gagtagattttgaaagtcagct

SEQ ID NO: 139344 - DNA, 22 bp, Artificial Sequence
  Synthetic oligonucleotide; TTT chr11 5253712 5253733 5253717 5253712 -
tgaaagtcagctctgtgtgtgt

SEQ ID NO: 139345 - DNA, 22 bp, Artificial Sequence
  Synthetic oligonucleotide; TTT chr11 5253711 5253732 5253716 5253711 -
gaaagtcagctctgtgtgtgtg

SEQ ID NO: 139346 - DNA, 22 bp, Artificial Sequence
  Synthetic oligonucleotide; TTG chr11 5253710 5253731 5253715 5253710 -
aaagtcagctctgtgtgtgtgt

SEQ ID NO: 139347 - DNA, 22 bp, Artificial Sequence
  Synthetic oligonucleotide; CTC chr11 5253699 5253720 5253704 5253699 -
tgtgtgtgtgtgtgtgtgtgtg

SEQ ID NO: 139348 - DNA, 22 bp, Artificial Sequence
  Synthetic oligonucleotide; CTG chr11 5253697 5253718 5253702 5253697 -
tgtgtgtgtgtgtgtgtgtgcg

SEQ ID NO: 139349 - DNA, 22 bp, Artificial Sequence
  Synthetic oligonucleotide; TTT chr11 5253664 5253685 5253669 5253664 -
gtgtgtgtgtgagagcgtgtgt

SEQ ID NO: 139350 - DNA, 22 bp, Artificial Sequence
  Synthetic oligonucleotide; TTG chr11 5253663 5253684 5253668 5253663 -
tgtgtgtgtgagagcgtgtgtt

SEQ ID NO: 139351 - DNA, 22 bp, Artificial Sequence
  Synthetic oligonucleotide; TTT chr11 5253640 5253661 5253645 5253640 -
cttttaacgttttcagcctaca

SEQ ID NO: 139352 - DNA, 22 bp, Artificial Sequence
  Synthetic oligonucleotide; TTC chr11 5253639 5253660 5253644 5253639 -
ttttaacgttttcagcctacag

SEQ ID NO: 139353 - DNA, 22 bp, Artificial Sequence
  Synthetic oligonucleotide; CTT chr11 5253637 5253658 5253642 5253637 -
ttaacgttttcagcctacagca

SEQ ID NO: 139354 - DNA, 22 bp, Artificial Sequence
  Synthetic oligonucleotide; TTT chr11 5253636 5253657 5253641 5253636 -
taacgttttcagcctacagcat

SEQ ID NO: 139355 - DNA, 22 bp, Artificial Sequence
  Synthetic oligonucleotide; TTT chr11 5253635 5253656 5253640 5253635 -
aacgttttcagcctacagcata

SEQ ID NO: 139356 - DNA, 22 bp, Artificial Sequence
  Synthetic oligonucleotide; TTA chr11 5253634 5253655 5253639 5253634 -
acgttttcagcctacagcatac

SEQ ID NO: 139357 - DNA, 22 bp, Artificial Sequence
  Synthetic oligonucleotide; TTT chr11 5253628 5253649 5253633 5253628 -
tcagcctacagcatacagggtt

SEQ ID NO: 139358 - DNA, 22 bp, Artificial Sequence
  Synthetic oligonucleotide; TTT chr11 5253627 5253648 5253632 5253627 -
cagcctacagcatacagggttc

SEQ ID NO: 139359 - DNA, 22 bp, Artificial Sequence
  Synthetic oligonucleotide; TTC chr11 5253626 5253647 5253631 5253626 -
agcctacagcatacagggttca

SEQ ID NO: 139360 - DNA, 22 bp, Artificial Sequence
  Synthetic oligonucleotide; CTA chr11 5253620 5253641 5253625 5253620 -
cagcatacagggttcatggtgg

SEQ ID NO: 139361 - DNA, 22 bp, Artificial Sequence
  Synthetic oligonucleotide; TTC chr11 5253605 5253626 5253610 5253605 -
atggtggcaagaagataacaag

SEQ ID NO: 139362 - DNA, 22 bp, Artificial Sequence
  Synthetic oligonucleotide; TTT chr11 5253579 5253600 5253584 5253579 -
aaattatggccagtgactagtg

SEQ ID NO: 139363 - DNA, 22 bp, Artificial Sequence
  Synthetic oligonucleotide; TTA chr11 5253578 5253599 5253583 5253578 -
aattatggccagtgactagtgc

SEQ ID NO: 139364 - DNA, 22 bp, Artificial Sequence
  Synthetic oligonucleotide; TTA chr11 5253573 5253594 5253578 5253573 -
tggccagtgactagtgctgcaa

SEQ ID NO: 139365 - DNA, 22 bp, Artificial Sequence
  Synthetic oligonucleotide; CTA chr11 5253560 5253581 5253565 5253560 -
gtgctgcaagaagaacaactac

SEQ ID NO: 139366 - DNA, 22 bp, Artificial Sequence
  Synthetic oligonucleotide; CTG chr11 5253554 5253575 5253559 5253554 -
caagaagaacaactacctgcat

SEQ ID NO: 139367 - DNA, 22 bp, Artificial Sequence
  Synthetic oligonucleotide; CTA chr11 5253539 5253560 5253544 5253539 -
cctgcatttaatgggaaagcaa

SEQ ID NO: 139368 - DNA, 22 bp, Artificial Sequence
  Synthetic oligonucleotide; CTG chr11 5253535 5253556 5253540 5253535 -
catttaatgggaaagcaaaatc

SEQ ID NO: 139369 - DNA, 22 bp, Artificial Sequence
  Synthetic oligonucleotide; TTT chr11 5253530 5253551 5253535 5253530 -
aatgggaaagcaaaatctcagg

SEQ ID NO: 139370 - DNA, 22 bp, Artificial Sequence
  Synthetic oligonucleotide; TTA chr11 5253529 5253550 5253534 5253529 -
atgggaaagcaaaatctcaggc

SEQ ID NO: 139371 - DNA, 22 bp, Artificial Sequence
  Synthetic oligonucleotide; CTC chr11 5253511 5253532 5253516 5253511 -
aggctttgagggaagttaacat

SEQ ID NO: 139372 - DNA, 22 bp, Artificial Sequence
  Synthetic oligonucleotide; CTT chr11 5253505 5253526 5253510 5253505 -
tgagggaagttaacataggctt

SEQ ID NO: 139373 - DNA, 22 bp, Artificial Sequence
  Synthetic oligonucleotide; TTT chr11 5253504 5253525 5253509 5253504 -
gagggaagttaacataggcttg

SEQ ID NO: 139374 - DNA, 22 bp, Artificial Sequence
  Synthetic oligonucleotide; TTG chr11 5253503 5253524 5253508 5253503 -
agggaagttaacataggcttga

SEQ ID NO: 139375 - DNA, 22 bp, Artificial Sequence
  Synthetic oligonucleotide; TTA chr11 5253493 5253514 5253498 5253493 -
acataggcttgattctgggtgg

SEQ ID NO: 139376 - DNA, 22 bp, Artificial Sequence
  Synthetic oligonucleotide; CTT chr11 5253483 5253504 5253488 5253483 -
gattctgggtggaagcttggtg

SEQ ID NO: 139377 - DNA, 22 bp, Artificial Sequence
  Synthetic oligonucleotide; TTG chr11 5253482 5253503 5253487 5253482 -
attctgggtggaagcttggtgt

SEQ ID NO: 139378 - DNA, 22 bp, Artificial Sequence
  Synthetic oligonucleotide; TTC chr11 5253478 5253499 5253483 5253478 -
tgggtggaagcttggtgtgtag

SEQ ID NO: 139379 - DNA, 22 bp, Artificial Sequence
  Synthetic oligonucleotide; CTG chr11 5253476 5253497 5253481 5253476 -
ggtggaagcttggtgtgtagtt

SEQ ID NO: 139380 - DNA, 22 bp, Artificial Sequence
  Synthetic oligonucleotide; CTT chr11 5253465 5253486 5253470 5253465 -
ggtgtgtagttatctggaggcc

SEQ ID NO: 139381 - DNA, 22 bp, Artificial Sequence
  Synthetic oligonucleotide; TTG chr11 5253464 5253485 5253469 5253464 -
gtgtgtagttatctggaggcca

SEQ ID NO: 139382 - DNA, 22 bp, Artificial Sequence
  Synthetic oligonucleotide; TTA chr11 5253453 5253474 5253458 5253453 -
tctggaggccaggctggagctc

SEQ ID NO: 139383 - DNA, 22 bp, Artificial Sequence
  Synthetic oligonucleotide; CTG chr11 5253449 5253470 5253454 5253449 -
gaggccaggctggagctctcag

SEQ ID NO: 139384 - DNA, 22 bp, Artificial Sequence
  Synthetic oligonucleotide; CTG chr11 5253437 5253458 5253442 5253437 -
gagctctcagctcactatgggt

SEQ ID NO: 139385 - DNA, 22 bp, Artificial Sequence
  Synthetic oligonucleotide; CTC chr11 5253431 5253452 5253436 5253431 -
tcagctcactatgggttcatct

SEQ ID NO: 139386 - DNA, 22 bp, Artificial Sequence
  Synthetic oligonucleotide; CTC chr11 5253429 5253450 5253434 5253429 -
agctcactatgggttcatcttt

SEQ ID NO: 139387 - DNA, 22 bp, Artificial Sequence
  Synthetic oligonucleotide; CTC chr11 5253424 5253445 5253429 5253424 -
actatgggttcatctttattgt

SEQ ID NO: 139388 - DNA, 22 bp, Artificial Sequence
  Synthetic oligonucleotide; CTA chr11 5253420 5253441 5253425 5253420 -
tgggttcatctttattgtctcc

SEQ ID NO: 139389 - DNA, 22 bp, Artificial Sequence
  Synthetic oligonucleotide; TTC chr11 5253413 5253434 5253418 5253413 -
atctttattgtctcctttcatc

SEQ ID NO: 139390 - DNA, 22 bp, Artificial Sequence
  Synthetic oligonucleotide; CTT chr11 5253408 5253429 5253413 5253408 -
tattgtctcctttcatctcaac

SEQ ID NO: 139391 - DNA, 22 bp, Artificial Sequence
  Synthetic oligonucleotide; TTT chr11 5253407 5253428 5253412 5253407 -
attgtctcctttcatctcaaca

SEQ ID NO: 139392 - DNA, 22 bp, Artificial Sequence
  Synthetic oligonucleotide; TTA chr11 5253406 5253427 5253411 5253406 -
ttgtctcctttcatctcaacag

SEQ ID NO: 139393 - DNA, 22 bp, Artificial Sequence
  Synthetic oligonucleotide; TTG chr11 5253403 5253424 5253408 5253403 -
tctcctttcatctcaacagctc

SEQ ID NO: 139394 - DNA, 22 bp, Artificial Sequence
  Synthetic oligonucleotide; CTC chr11 5253399 5253420 5253404 5253399 -
ctttcatctcaacagctcctgg

SEQ ID NO: 139395 - DNA, 22 bp, Artificial Sequence
  Synthetic oligonucleotide; CTT chr11 5253396 5253417 5253401 5253396 -
tcatctcaacagctcctgggaa

SEQ ID NO: 139396 - DNA, 22 bp, Artificial Sequence
  Synthetic oligonucleotide; TTT chr11 5253395 5253416 5253400 5253395 -
catctcaacagctcctgggaaa

SEQ ID NO: 139397 - DNA, 22 bp, Artificial Sequence
  Synthetic oligonucleotide; TTC chr11 5253394 5253415 5253399 5253394 -
atctcaacagctcctgggaaat

SEQ ID NO: 139398 - DNA, 22 bp, Artificial Sequence
  Synthetic oligonucleotide; CTC chr11 5253389 5253410 5253394 5253389 -
aacagctcctgggaaatgtgct

SEQ ID NO: 139399 - DNA, 22 bp, Artificial Sequence
  Synthetic oligonucleotide; CTC chr11 5253381 5253402 5253386 5253381 -
ctgggaaatgtgctggtgaccg

SEQ ID NO: 139400 - DNA, 22 bp, Artificial Sequence
  Synthetic oligonucleotide; CTG chr11 5253378 5253399 5253383 5253378 -
ggaaatgtgctggtgaccgttt

SEQ ID NO: 139401 - DNA, 22 bp, Artificial Sequence
  Synthetic oligonucleotide; CTG chr11 5253366 5253387 5253371 5253366 -
gtgaccgttttggcaatccatt

SEQ ID NO: 139402 - DNA, 22 bp, Artificial Sequence
  Synthetic oligonucleotide; TTT chr11 5253356 5253377 5253361 5253356 -
tggcaatccatttcggcaaaga

SEQ ID NO: 139403 - DNA, 22 bp, Artificial Sequence
  Synthetic oligonucleotide; TTT chr11 5253355 5253376 5253360 5253355 -
ggcaatccatttcggcaaagaa

SEQ ID NO: 139404 - DNA, 22 bp, Artificial Sequence
  Synthetic oligonucleotide; TTG chr11 5253354 5253375 5253359 5253354 -
gcaatccatttcggcaaagaat

SEQ ID NO: 139405 - DNA, 22 bp, Artificial Sequence
  Synthetic oligonucleotide; TTT chr11 5253343 5253364 5253348 5253343 -
cggcaaagaattcacccctgag

SEQ ID NO: 139406 - DNA, 22 bp, Artificial Sequence
  Synthetic oligonucleotide; TTC chr11 5253342 5253363 5253347 5253342 -
ggcaaagaattcacccctgagg

SEQ ID NO: 139407 - DNA, 22 bp, Artificial Sequence
  Synthetic oligonucleotide; TTC chr11 5253330 5253351 5253335 5253330 -
acccctgaggtgcaggcttcct

SEQ ID NO: 139408 - DNA, 22 bp, Artificial Sequence
  Synthetic oligonucleotide; CTG chr11 5253323 5253344 5253328 5253323 -
aggtgcaggcttcctggcagaa

SEQ ID NO: 139409 - DNA, 22 bp, Artificial Sequence
  Synthetic oligonucleotide; CTT chr11 5253311 5253332 5253316 5253311 -
cctggcagaagatggtgactgg

SEQ ID NO: 139410 - DNA, 22 bp, Artificial Sequence
  Synthetic oligonucleotide; TTC chr11 5253310 5253331 5253315 5253310 -
ctggcagaagatggtgactgga

SEQ ID NO: 139411 - DNA, 22 bp, Artificial Sequence
  Synthetic oligonucleotide; CTG chr11 5253307 5253328 5253312 5253307 -
gcagaagatggtgactggagtg

SEQ ID NO: 139412 - DNA, 22 bp, Artificial Sequence
  Synthetic oligonucleotide; CTG chr11 5253290 5253311 5253295 5253290 -
gagtggccagtgccctgtcctc

SEQ ID NO: 139413 - DNA, 22 bp, Artificial Sequence
  Synthetic oligonucleotide; CTG chr11 5253273 5253294 5253278 5253273 -
tcctccagataccactgagctc

SEQ ID NO: 139414 - DNA, 22 bp, Artificial Sequence
  Synthetic oligonucleotide; CTC chr11 5253268 5253289 5253273 5253268 -
cagataccactgagctcactgc

SEQ ID NO: 139415 - DNA, 22 bp, Artificial Sequence
  Synthetic oligonucleotide; CTG chr11 5253256 5253277 5253261 5253256 -
agctcactgcccatgatgcaga

SEQ ID NO: 139416 - DNA, 22 bp, Artificial Sequence
  Synthetic oligonucleotide; CTC chr11 5253251 5253272 5253256 5253251 -
actgcccatgatgcagagcttt

SEQ ID NO: 139417 - DNA, 22 bp, Artificial Sequence
  Synthetic oligonucleotide; CTG chr11 5253247 5253268 5253252 5253247 -
cccatgatgcagagctttcaag

SEQ ID NO: 139418 - DNA, 22 bp, Artificial Sequence
  Synthetic oligonucleotide; CTT chr11 5253230 5253251 5253235 5253230 -
tcaaggataggctttattctgc

SEQ ID NO: 139419 - DNA, 22 bp, Artificial Sequence
  Synthetic oligonucleotide; TTT chr11 5253229 5253250 5253234 5253229 -
caaggataggctttattctgca

SEQ ID NO: 139420 - DNA, 22 bp, Artificial Sequence
  Synthetic oligonucleotide; TTC chr11 5253228 5253249 5253233 5253228 -
aaggataggctttattctgcaa

SEQ ID NO: 139421 - DNA, 22 bp, Artificial Sequence
  Synthetic oligonucleotide; CTT chr11 5253216 5253237 5253221 5253216 -
tattctgcaagcaatcaaataa

SEQ ID NO: 139422 - DNA, 22 bp, Artificial Sequence
  Synthetic oligonucleotide; TTT chr11 5253215 5253236 5253220 5253215 -
attctgcaagcaatcaaataat

SEQ ID NO: 139423 - DNA, 22 bp, Artificial Sequence
  Synthetic oligonucleotide; TTA chr11 5253214 5253235 5253219 5253214 -
ttctgcaagcaatcaaataata

SEQ ID NO: 139424 - DNA, 22 bp, Artificial Sequence
  Synthetic oligonucleotide; TTC chr11 5253211 5253232 5253216 5253211 -
tgcaagcaatcaaataataaat

SEQ ID NO: 139425 - DNA, 22 bp, Artificial Sequence
  Synthetic oligonucleotide; CTG chr11 5253209 5253230 5253214 5253209 -
caagcaatcaaataataaatct

SEQ ID NO: 139426 - DNA, 22 bp, Artificial Sequence
  Synthetic oligonucleotide; CTA chr11 5253186 5253207 5253191 5253186 -
ttctgctaagagatcacacatg

SEQ ID NO: 139427 - DNA, 22 bp, Artificial Sequence
  Synthetic oligonucleotide; TTC chr11 5253183 5253204 5253188 5253183 -
tgctaagagatcacacatggtt

SEQ ID NO: 139428 - DNA, 22 bp, Artificial Sequence
  Synthetic oligonucleotide; CTG chr11 5253181 5253202 5253186 5253181 -
ctaagagatcacacatggttgt

SEQ ID NO: 139429 - DNA, 22 bp, Artificial Sequence
  Synthetic oligonucleotide; CTA chr11 5253178 5253199 5253183 5253178 -
agagatcacacatggttgtctt

SEQ ID NO: 139430 - DNA, 22 bp, Artificial Sequence
  Synthetic oligonucleotide; TTG chr11 5253160 5253181 5253165 5253160 -
tcttcagttctttttttatgtc

SEQ ID NO: 139431 - DNA, 22 bp, Artificial Sequence
  Synthetic oligonucleotide; CTT chr11 5253156 5253177 5253161 5253156 -
cagttctttttttatgtctttt

SEQ ID NO: 139432 - DNA, 22 bp, Artificial Sequence
  Synthetic oligonucleotide; TTC chr11 5253155 5253176 5253160 5253155 -
agttctttttttatgtcttttt

SEQ ID NO: 139433 - DNA, 22 bp, Artificial Sequence
  Synthetic oligonucleotide; TTC chr11 5253150 5253171 5253155 5253150 -
tttttttatgtctttttaaata

SEQ ID NO: 139434 - DNA, 22 bp, Artificial Sequence
  Synthetic oligonucleotide; CTT chr11 5253148 5253169 5253153 5253148 -
tttttatgtctttttaaatata

SEQ ID NO: 139435 - DNA, 22 bp, Artificial Sequence
  Synthetic oligonucleotide; TTT chr11 5253147 5253168 5253152 5253147 -
ttttatgtctttttaaatatat

SEQ ID NO: 139436 - DNA, 22 bp, Artificial Sequence
  Synthetic oligonucleotide; TTT chr11 5253146 5253167 5253151 5253146 -
tttatgtctttttaaatatatg

SEQ ID NO: 139437 - DNA, 22 bp, Artificial Sequence
  Synthetic oligonucleotide; TTT chr11 5253145 5253166 5253150 5253145 -
ttatgtctttttaaatatatga

SEQ ID NO: 139438 - DNA, 22 bp, Artificial Sequence
  Synthetic oligonucleotide; TTT chr11 5253144 5253165 5253149 5253144 -
tatgtctttttaaatatatgag

SEQ ID NO: 139439 - DNA, 22 bp, Artificial Sequence
  Synthetic oligonucleotide; TTT chr11 5253143 5253164 5253148 5253143 -
atgtctttttaaatatatgagc

SEQ ID NO: 139440 - DNA, 22 bp, Artificial Sequence
  Synthetic oligonucleotide; TTA chr11 5253142 5253163 5253147 5253142 -
tgtctttttaaatatatgagcc

SEQ ID NO: 139441 - DNA, 22 bp, Artificial Sequence
  Synthetic oligonucleotide; CTT chr11 5253136 5253157 5253141 5253136 -
tttaaatatatgagccacaaag

SEQ ID NO: 139442 - DNA, 22 bp, Artificial Sequence
  Synthetic oligonucleotide; TTT chr11 5253135 5253156 5253140 5253135 -
ttaaatatatgagccacaaagg

SEQ ID NO: 139443 - DNA, 22 bp, Artificial Sequence
  Synthetic oligonucleotide; TTT chr11 5253134 5253155 5253139 5253134 -
taaatatatgagccacaaaggg

SEQ ID NO: 139444 - DNA, 22 bp, Artificial Sequence
  Synthetic oligonucleotide; TTT chr11 5253133 5253154 5253138 5253133 -
aaatatatgagccacaaagggt

SEQ ID NO: 139445 - DNA, 22 bp, Artificial Sequence
  Synthetic oligonucleotide; TTA chr11 5253132 5253153 5253137 5253132 -
aatatatgagccacaaagggtt

SEQ ID NO: 139446 - DNA, 22 bp, Artificial Sequence
  Synthetic oligonucleotide; TTT chr11 5253109 5253130 5253114 5253109 -
tatgttgagggatgtgtttatg

SEQ ID NO: 139447 - DNA, 22 bp, Artificial Sequence
  Synthetic oligonucleotide; TTT chr11 5253108 5253129 5253113 5253108 -
atgttgagggatgtgtttatgt

SEQ ID NO: 139448 - DNA, 22 bp, Artificial Sequence
  Synthetic oligonucleotide; TTA chr11 5253107 5253128 5253112 5253107 -
tgttgagggatgtgtttatgtg

SEQ ID NO: 139449 - DNA, 22 bp, Artificial Sequence
  Synthetic oligonucleotide; TTG chr11 5253102 5253123 5253107 5253102 -
agggatgtgtttatgtgtattt

SEQ ID NO: 139450 - DNA, 22 bp, Artificial Sequence
  Synthetic oligonucleotide; TTT chr11 5253090 5253111 5253095 5253090 -
atgtgtatttatacatggctat

SEQ ID NO: 139451 - DNA, 22 bp, Artificial Sequence
  Synthetic oligonucleotide; TTA chr11 5253089 5253110 5253094 5253089 -
tgtgtatttatacatggctatg

SEQ ID NO: 139452 - DNA, 22 bp, Artificial Sequence
  Synthetic oligonucleotide; TTT chr11 5253080 5253101 5253085 5253080 -
atacatggctatgtgtgtttgt

SEQ ID NO: 139453 - DNA, 22 bp, Artificial Sequence
  Synthetic oligonucleotide; TTA chr11 5253079 5253100 5253084 5253079 -
tacatggctatgtgtgtttgtg

SEQ ID NO: 139454 - DNA, 22 bp, Artificial Sequence
  Synthetic oligonucleotide; CTA chr11 5253069 5253090 5253074 5253069 -
tgtgtgtttgtgtcatgtgcac

SEQ ID NO: 139455 - DNA, 22 bp, Artificial Sequence
  Synthetic oligonucleotide; TTT chr11 5253060 5253081 5253065 5253060 -
gtgtcatgtgcacactccacac

SEQ ID NO: 139456 - DNA, 22 bp, Artificial Sequence
  Synthetic oligonucleotide; TTG chr11 5253059 5253080 5253064 5253059 -
tgtcatgtgcacactccacact

SEQ ID NO: 139457 - DNA, 22 bp, Artificial Sequence
  Synthetic oligonucleotide; CTC chr11 5253043 5253064 5253048 5253043 -
cacacttttttgtttacgttag

SEQ ID NO: 139458 - DNA, 22 bp, Artificial Sequence
  Synthetic oligonucleotide; CTT chr11 5253036 5253057 5253041 5253036 -
ttttgtttacgttagatgtggg

SEQ ID NO: 139459 - DNA, 22 bp, Artificial Sequence
  Synthetic oligonucleotide; TTT chr11 5253035 5253056 5253040 5253035 -
tttgtttacgttagatgtgggt

SEQ ID NO: 139460 - DNA, 22 bp, Artificial Sequence
  Synthetic oligonucleotide; TTT chr11 5253034 5253055 5253039 5253034 -
ttgtttacgttagatgtgggtt

SEQ ID NO: 139461 - DNA, 22 bp, Artificial Sequence
  Synthetic oligonucleotide; TTT chr11 5253033 5253054 5253038 5253033 -
tgtttacgttagatgtgggttt

SEQ ID NO: 139462 - DNA, 22 bp, Artificial Sequence
  Synthetic oligonucleotide; TTT chr11 5253032 5253053 5253037 5253032 -
gtttacgttagatgtgggtttt

SEQ ID NO: 139463 - DNA, 22 bp, Artificial Sequence
  Synthetic oligonucleotide; TTG chr11 5253031 5253052 5253036 5253031 -
tttacgttagatgtgggttttg

SEQ ID NO: 139464 - DNA, 22 bp, Artificial Sequence
  Synthetic oligonucleotide; TTT chr11 5253028 5253049 5253033 5253028 -
acgttagatgtgggttttgatg

SEQ ID NO: 139465 - DNA, 22 bp, Artificial Sequence
  Synthetic oligonucleotide; TTA chr11 5253027 5253048 5253032 5253027 -
cgttagatgtgggttttgatga

SEQ ID NO: 139466 - DNA, 22 bp, Artificial Sequence
  Synthetic oligonucleotide; TTA chr11 5253022 5253043 5253027 5253022 -
gatgtgggttttgatgagcaaa

SEQ ID NO: 139467 - DNA, 22 bp, Artificial Sequence
  Synthetic oligonucleotide; TTT chr11 5253011 5253032 5253016 5253011 -
tgatgagcaaataaaagaacta

SEQ ID NO: 139468 - DNA, 22 bp, Artificial Sequence
  Synthetic oligonucleotide; TTT chr11 5253010 5253031 5253015 5253010 -
gatgagcaaataaaagaactag

SEQ ID NO: 139469 - DNA, 22 bp, Artificial Sequence
  Synthetic oligonucleotide; TTG chr11 5253009 5253030 5253014 5253009 -
atgagcaaataaaagaactagg

SEQ ID NO: 139470 - DNA, 22 bp, Artificial Sequence
  Synthetic oligonucleotide; CTA chr11 5252989 5253010 5252994 5252989 -
ggcaataaagaaacttgtacat

SEQ ID NO: 139471 - DNA, 22 bp, Artificial Sequence
  Synthetic oligonucleotide; CTT chr11 5252973 5252994 5252978 5252973 -
gtacatgggagttctgcaagtg

SEQ ID NO: 139472 - DNA, 22 bp, Artificial Sequence
  Synthetic oligonucleotide; TTG chr11 5252972 5252993 5252977 5252972 -
tacatgggagttctgcaagtgg

SEQ ID NO: 139473 - DNA, 22 bp, Artificial Sequence
  Synthetic oligonucleotide; TTC chr11 5252959 5252980 5252964 5252959 -
tgcaagtgggagtaaaaggtgc

SEQ ID NO: 139474 - DNA, 22 bp, Artificial Sequence
  Synthetic oligonucleotide; CTG chr11 5252957 5252978 5252962 5252957 -
caagtgggagtaaaaggtgcag

SEQ ID NO: 139475 - DNA, 22 bp, Artificial Sequence
  Synthetic oligonucleotide; CTG chr11 5252925 5252946 5252930 5252925 -
gttggaagaaagacctctatag

SEQ ID NO: 139476 - DNA, 22 bp, Artificial Sequence
  Synthetic oligonucleotide; TTG chr11 5252921 5252942 5252926 5252921 -
gaagaaagacctctataggaca

SEQ ID NO: 139477 - DNA, 22 bp, Artificial Sequence
  Synthetic oligonucleotide; CTC chr11 5252908 5252929 5252913 5252908 -
tataggacaggactcctcagaa

SEQ ID NO: 139478 - DNA, 22 bp, Artificial Sequence
  Synthetic oligonucleotide; CTA chr11 5252906 5252927 5252911 5252906 -
taggacaggactcctcagaaac

SEQ ID NO: 139479 - DNA, 22 bp, Artificial Sequence
  Synthetic oligonucleotide; CTC chr11 5252893 5252914 5252898 5252893 -
ctcagaaacagatgttttggaa

SEQ ID NO: 139480 - DNA, 22 bp, Artificial Sequence
  Synthetic oligonucleotide; CTC chr11 5252890 5252911 5252895 5252890 -
agaaacagatgttttggaagag

SEQ ID NO: 139481 - DNA, 22 bp, Artificial Sequence
  Synthetic oligonucleotide; TTT chr11 5252876 5252897 5252881 5252876 -
tggaagagatggggaaaggttc

SEQ ID NO: 139482 - DNA, 22 bp, Artificial Sequence
  Synthetic oligonucleotide; TTT chr11 5252875 5252896 5252880 5252875 -
ggaagagatggggaaaggttca

SEQ ID NO: 139483 - DNA, 22 bp, Artificial Sequence
  Synthetic oligonucleotide; TTG chr11 5252874 5252895 5252879 5252874 -
gaagagatggggaaaggttcag

SEQ ID NO: 139484 - DNA, 22 bp, Artificial Sequence
  Synthetic oligonucleotide; TTC chr11 5252854 5252875 5252859 5252854 -
agtgaagggggctgaaccccct

SEQ ID NO: 139485 - DNA, 22 bp, Artificial Sequence
  Synthetic oligonucleotide; CTG chr11 5252840 5252861 5252845 5252840 -
aacccccttccctggattgcag

SEQ ID NO: 139486 - DNA, 22 bp, Artificial Sequence
  Synthetic oligonucleotide; CTT chr11 5252831 5252852 5252836 5252831 -
ccctggattgcagcacagcagc

SEQ ID NO: 139487 - DNA, 22 bp, Artificial Sequence
  Synthetic oligonucleotide; TTC chr11 5252830 5252851 5252835 5252830 -
cctggattgcagcacagcagcg

SEQ ID NO: 139488 - DNA, 22 bp, Artificial Sequence
  Synthetic oligonucleotide; CTG chr11 5252826 5252847 5252831 5252826 -
gattgcagcacagcagcgagga

SEQ ID NO: 139489 - DNA, 22 bp, Artificial Sequence
  Synthetic oligonucleotide; TTG chr11 5252821 5252842 5252826 5252821 -
cagcacagcagcgaggaagggg

SEQ ID NO: 139490 - DNA, 22 bp, Artificial Sequence
  Synthetic oligonucleotide; CTC chr11 5252796 5252817 5252801 5252796 -
aacgaagaaaaagtgttccaag

SEQ ID NO: 139491 - DNA, 22 bp, Artificial Sequence
  Synthetic oligonucleotide; TTC chr11 5252778 5252799 5252783 5252778 -
caagctttaggaagtcaaggtt

SEQ ID NO: 139492 - DNA, 22 bp, Artificial Sequence
  Synthetic oligonucleotide; CTT chr11 5252771 5252792 5252776 5252771 -
taggaagtcaaggtttaggcag

SEQ ID NO: 139493 - DNA, 22 bp, Artificial Sequence
  Synthetic oligonucleotide; TTT chr11 5252770 5252791 5252775 5252770 -
aggaagtcaaggtttaggcagg

SEQ ID NO: 139494 - DNA, 22 bp, Artificial Sequence
  Synthetic oligonucleotide; TTA chr11 5252769 5252790 5252774 5252769 -
ggaagtcaaggtttaggcaggg

SEQ ID NO: 139495 - DNA, 22 bp, Artificial Sequence
  Synthetic oligonucleotide; TTT chr11 5252755 5252776 5252760 5252755 -
aggcagggatagccattctatt

SEQ ID NO: 139496 - DNA, 22 bp, Artificial Sequence
  Synthetic oligonucleotide; TTA chr11 5252754 5252775 5252759 5252754 -
ggcagggatagccattctattt

SEQ ID NO: 139497 - DNA, 22 bp, Artificial Sequence
  Synthetic oligonucleotide; TTC chr11 5252737 5252758 5252742 5252737 -
tattttattaggggcaatacta

SEQ ID NO: 139498 - DNA, 22 bp, Artificial Sequence
  Synthetic oligonucleotide; CTA chr11 5252735 5252756 5252740 5252735 -
ttttattaggggcaatactatt

SEQ ID NO: 139499 - DNA, 22 bp, Artificial Sequence
  Synthetic oligonucleotide; TTT chr11 5252732 5252753 5252737 5252732 -
tattaggggcaatactatttcc

SEQ ID NO: 139500 - DNA, 22 bp, Artificial Sequence
  Synthetic oligonucleotide; TTT chr11 5252731 5252752 5252736 5252731 -
attaggggcaatactatttcca

SEQ ID NO: 139501 - DNA, 22 bp, Artificial Sequence
  Synthetic oligonucleotide; TTA chr11 5252730 5252751 5252735 5252730 -
ttaggggcaatactatttccaa

SEQ ID NO: 139502 - DNA, 22 bp, Artificial Sequence
  Synthetic oligonucleotide; TTA chr11 5252727 5252748 5252732 5252727 -
ggggcaatactatttccaacgg

SEQ ID NO: 139503 - DNA, 22 bp, Artificial Sequence
  Synthetic oligonucleotide; CTA chr11 5252715 5252736 5252720 5252715 -
tttccaacggcatctggctttt

SEQ ID NO: 139504 - DNA, 22 bp, Artificial Sequence
  Synthetic oligonucleotide; TTT chr11 5252712 5252733 5252717 5252712 -
ccaacggcatctggcttttctc

SEQ ID NO: 139505 - DNA, 22 bp, Artificial Sequence
  Synthetic oligonucleotide; TTC chr11 5252711 5252732 5252716 5252711 -
caacggcatctggcttttctca

SEQ ID NO: 139506 - DNA, 22 bp, Artificial Sequence
  Synthetic oligonucleotide; CTG chr11 5252699 5252720 5252704 5252699 -
gcttttctcagcccttgtgagg

SEQ ID NO: 139507 - DNA, 22 bp, Artificial Sequence
  Synthetic oligonucleotide; CTT chr11 5252695 5252716 5252700 5252695 -
ttctcagcccttgtgaggctct

SEQ ID NO: 139508 - DNA, 22 bp, Artificial Sequence
  Synthetic oligonucleotide; TTT chr11 5252694 5252715 5252699 5252694 -
tctcagcccttgtgaggctcta

SEQ ID NO: 139509 - DNA, 22 bp, Artificial Sequence
  Synthetic oligonucleotide; TTT chr11 5252693 5252714 5252698 5252693 -
ctcagcccttgtgaggctctac

SEQ ID NO: 139510 - DNA, 22 bp, Artificial Sequence
  Synthetic oligonucleotide; TTC chr11 5252692 5252713 5252697 5252692 -
tcagcccttgtgaggctctaca

SEQ ID NO: 139511 - DNA, 22 bp, Artificial Sequence
  Synthetic oligonucleotide; CTC chr11 5252690 5252711 5252695 5252690 -
agcccttgtgaggctctacagg

SEQ ID NO: 139512 - DNA, 22 bp, Artificial Sequence
  Synthetic oligonucleotide; CTT chr11 5252683 5252704 5252688 5252683 -
gtgaggctctacagggaggttg

SEQ ID NO: 139513 - DNA, 22 bp, Artificial Sequence
  Synthetic oligonucleotide; TTG chr11 5252682 5252703 5252687 5252682 -
tgaggctctacagggaggttga

SEQ ID NO: 139514 - DNA, 22 bp, Artificial Sequence
  Synthetic oligonucleotide; CTC chr11 5252674 5252695 5252679 5252674 -
tacagggaggttgaggtgttag

SEQ ID NO: 139515 - DNA, 22 bp, Artificial Sequence
  Synthetic oligonucleotide; CTA chr11 5252672 5252693 5252677 5252672 -
cagggaggttgaggtgttagag

SEQ ID NO: 139516 - DNA, 22 bp, Artificial Sequence
  Synthetic oligonucleotide; TTG chr11 5252661 5252682 5252666 5252661 -
aggtgttagagatcagagcagg

SEQ ID NO: 139517 - DNA, 22 bp, Artificial Sequence
  Synthetic oligonucleotide; TTA chr11 5252653 5252674 5252658 5252653 -
gagatcagagcaggaaacaggt

SEQ ID NO: 139518 - DNA, 22 bp, Artificial Sequence
  Synthetic oligonucleotide; TTT chr11 5252629 5252650 5252634 5252629 -
ttctttccacggtaactacaat

SEQ ID NO: 139519 - DNA, 22 bp, Artificial Sequence
  Synthetic oligonucleotide; TTT chr11 5252628 5252649 5252633 5252628 -
tctttccacggtaactacaatg

SEQ ID NO: 139520 - DNA, 22 bp, Artificial Sequence
  Synthetic oligonucleotide; TTT chr11 5252627 5252648 5252632 5252627 -
ctttccacggtaactacaatga

SEQ ID NO: 139521 - DNA, 22 bp, Artificial Sequence
  Synthetic oligonucleotide; TTC chr11 5252626 5252647 5252631 5252626 -
tttccacggtaactacaatgaa

SEQ ID NO: 139522 - DNA, 22 bp, Artificial Sequence
  Synthetic oligonucleotide; CTT chr11 5252624 5252645 5252629 5252624 -
tccacggtaactacaatgaagt

SEQ ID NO: 139523 - DNA, 22 bp, Artificial Sequence
  Synthetic oligonucleotide; TTT chr11 5252623 5252644 5252628 5252623 -
ccacggtaactacaatgaagtg

SEQ ID NO: 139524 - DNA, 22 bp, Artificial Sequence
  Synthetic oligonucleotide; TTC chr11 5252622 5252643 5252627 5252622 -
cacggtaactacaatgaagtga

SEQ ID NO: 139525 - DNA, 22 bp, Artificial Sequence
  Synthetic oligonucleotide; CTA chr11 5252611 5252632 5252616 5252611 -
caatgaagtgatccttacttta

SEQ ID NO: 139526 - DNA, 22 bp, Artificial Sequence
  Synthetic oligonucleotide; CTT chr11 5252595 5252616 5252600 5252595 -
actttactaaggaacttttcat

SEQ ID NO: 139527 - DNA, 22 bp, Artificial Sequence
  Synthetic oligonucleotide; TTA chr11 5252594 5252615 5252599 5252594 -
ctttactaaggaacttttcatt

SEQ ID NO: 139528 - DNA, 22 bp, Artificial Sequence
  Synthetic oligonucleotide; CTT chr11 5252591 5252612 5252596 5252591 -
tactaaggaacttttcatttta

SEQ ID NO: 139529 - DNA, 22 bp, Artificial Sequence
  Synthetic oligonucleotide; TTT chr11 5252590 5252611 5252595 5252590 -
actaaggaacttttcattttaa

SEQ ID NO: 139530 - DNA, 22 bp, Artificial Sequence
  Synthetic oligonucleotide; TTA chr11 5252589 5252610 5252594 5252589 -
ctaaggaacttttcattttaag

SEQ ID NO: 139531 - DNA, 22 bp, Artificial Sequence
  Synthetic oligonucleotide; CTA chr11 5252586 5252607 5252591 5252586 -
aggaacttttcattttaagtgt

SEQ ID NO: 139532 - DNA, 22 bp, Artificial Sequence
  Synthetic oligonucleotide; CTT chr11 5252578 5252599 5252583 5252578 -
ttcattttaagtgttgacgcat

SEQ ID NO: 139533 - DNA, 22 bp, Artificial Sequence
  Synthetic oligonucleotide; TTT chr11 5252577 5252598 5252582 5252577 -
tcattttaagtgttgacgcatg

SEQ ID NO: 139534 - DNA, 22 bp, Artificial Sequence
  Synthetic oligonucleotide; TTT chr11 5252576 5252597 5252581 5252576 -
cattttaagtgttgacgcatgc

SEQ ID NO: 139535 - DNA, 22 bp, Artificial Sequence
  Synthetic oligonucleotide; TTC chr11 5252575 5252596 5252580 5252575 -
attttaagtgttgacgcatgcc

SEQ ID NO: 139536 - DNA, 22 bp, Artificial Sequence
  Synthetic oligonucleotide; TTT chr11 5252571 5252592 5252576 5252571 -
taagtgttgacgcatgcctaaa

SEQ ID NO: 139537 - DNA, 22 bp, Artificial Sequence
  Synthetic oligonucleotide; TTT chr11 5252570 5252591 5252575 5252570 -
aagtgttgacgcatgcctaaag

SEQ ID NO: 139538 - DNA, 22 bp, Artificial Sequence
  Synthetic oligonucleotide; TTA chr11 5252569 5252590 5252574 5252569 -
agtgttgacgcatgcctaaaga

SEQ ID NO: 139539 - DNA, 22 bp, Artificial Sequence
  Synthetic oligonucleotide; TTG chr11 5252562 5252583 5252567 5252562 -
acgcatgcctaaagaggtgaaa

SEQ ID NO: 139540 - DNA, 22 bp, Artificial Sequence
  Synthetic oligonucleotide; CTA chr11 5252551 5252572 5252556 5252551 -
aagaggtgaaattaatcccata

SEQ ID NO: 139541 - DNA, 22 bp, Artificial Sequence
  Synthetic oligonucleotide; TTA chr11 5252537 5252558 5252542 5252537 -
atcccatacccttaagtctaca

SEQ ID NO: 139542 - DNA, 22 bp, Artificial Sequence
  Synthetic oligonucleotide; CTT chr11 5252524 5252545 5252529 5252524 -
aagtctacagactggtcacagc

SEQ ID NO: 139543 - DNA, 22 bp, Artificial Sequence
  Synthetic oligonucleotide; TTA chr11 5252523 5252544 5252528 5252523 -
agtctacagactggtcacagca

SEQ ID NO: 139544 - DNA, 22 bp, Artificial Sequence
  Synthetic oligonucleotide; CTA chr11 5252517 5252538 5252522 5252517 -
cagactggtcacagcatttcaa

SEQ ID NO: 139545 - DNA, 22 bp, Artificial Sequence
  Synthetic oligonucleotide; CTG chr11 5252510 5252531 5252515 5252510 -
gtcacagcatttcaaggaggag

SEQ ID NO: 139546 - DNA, 22 bp, Artificial Sequence
  Synthetic oligonucleotide; TTT chr11 5252498 5252519 5252503 5252498 -
caaggaggagacctcattgtaa

SEQ ID NO: 139547 - DNA, 22 bp, Artificial Sequence
  Synthetic oligonucleotide; TTC chr11 5252497 5252518 5252502 5252497 -
aaggaggagacctcattgtaag

SEQ ID NO: 139548 - DNA, 22 bp, Artificial Sequence
  Synthetic oligonucleotide; CTC chr11 5252483 5252504 5252488 5252483 -
attgtaagcttctagggaggtg

SEQ ID NO: 139549 - DNA, 22 bp, Artificial Sequence
  Synthetic oligonucleotide; TTG chr11 5252479 5252500 5252484 5252479 -
taagcttctagggaggtgggga

SEQ ID NO: 139550 - DNA, 22 bp, Artificial Sequence
  Synthetic oligonucleotide; CTT chr11 5252472 5252493 5252477 5252472 -
ctagggaggtggggacttaggt

SEQ ID NO: 139551 - DNA, 22 bp, Artificial Sequence
  Synthetic oligonucleotide; TTC chr11 5252471 5252492 5252476 5252471 -
tagggaggtggggacttaggtg

SEQ ID NO: 139552 - DNA, 22 bp, Artificial Sequence
  Synthetic oligonucleotide; CTA chr11 5252469 5252490 5252474 5252469 -
gggaggtggggacttaggtgaa

SEQ ID NO: 139553 - DNA, 22 bp, Artificial Sequence
  Synthetic oligonucleotide; CTT chr11 5252454 5252475 5252459 5252454 -
aggtgaaggaaatgagccagca

SEQ ID NO: 139554 - DNA, 22 bp, Artificial Sequence
  Synthetic oligonucleotide; TTA chr11 5252453 5252474 5252458 5252453 -
ggtgaaggaaatgagccagcag

SEQ ID NO: 139555 - DNA, 22 bp, Artificial Sequence
  Synthetic oligonucleotide; CTC chr11 5252425 5252446 5252430 5252425 -
acaagtcagcatcagcgtgtca

SEQ ID NO: 139556 - DNA, 22 bp, Artificial Sequence
  Synthetic oligonucleotide; CTC chr11 5252397 5252418 5252402 5252397 -
agcagcagaacagcacggtcag

SEQ ID NO: 139557 - DNA, 22 bp, Artificial Sequence
  Synthetic oligonucleotide; TTT chr11 5252351 5252372 5252356 5252351 -
gtataacattaattgagaaggc

SEQ ID NO: 139558 - DNA, 22 bp, Artificial Sequence
  Synthetic oligonucleotide; TTG chr11 5252350 5252371 5252355 5252350 -
tataacattaattgagaaggca

SEQ ID NO: 139559 - DNA, 22 bp, Artificial Sequence
  Synthetic oligonucleotide; TTA chr11 5252340 5252361 5252345 5252340 -
attgagaaggcagattcactgg

SEQ ID NO: 139560 - DNA, 22 bp, Artificial Sequence
  Synthetic oligonucleotide; TTG chr11 5252336 5252357 5252341 5252336 -
agaaggcagattcactggagtt

SEQ ID NO: 139561 - DNA, 22 bp, Artificial Sequence
  Synthetic oligonucleotide; TTC chr11 5252323 5252344 5252328 5252323 -
actggagttcttatataattga

SEQ ID NO: 139562 - DNA, 22 bp, Artificial Sequence
  Synthetic oligonucleotide; CTG chr11 5252319 5252340 5252324 5252319 -
gagttcttatataattgaaagt

SEQ ID NO: 139563 - DNA, 22 bp, Artificial Sequence
  Synthetic oligonucleotide; TTC chr11 5252313 5252334 5252318 5252313 -
ttatataattgaaagttaatgc

SEQ ID NO: 139564 - DNA, 22 bp, Artificial Sequence
  Synthetic oligonucleotide; CTT chr11 5252311 5252332 5252316 5252311 -
atataattgaaagttaatgcac

SEQ ID NO: 139565 - DNA, 22 bp, Artificial Sequence
  Synthetic oligonucleotide; TTA chr11 5252310 5252331 5252315 5252310 -
tataattgaaagttaatgcacg

SEQ ID NO: 139566 - DNA, 22 bp, Artificial Sequence
  Synthetic oligonucleotide; TTG chr11 5252302 5252323 5252307 5252302 -
aaagttaatgcacgttaataag

SEQ ID NO: 139567 - DNA, 22 bp, Artificial Sequence
  Synthetic oligonucleotide; TTA chr11 5252295 5252316 5252300 5252295 -
atgcacgttaataagcaagagt

SEQ ID NO: 139568 - DNA, 22 bp, Artificial Sequence
  Synthetic oligonucleotide; TTA chr11 5252285 5252306 5252290 5252285 -
ataagcaagagtttagtttaat

SEQ ID NO: 139569 - DNA, 22 bp, Artificial Sequence
  Synthetic oligonucleotide; TTT chr11 5252271 5252292 5252276 5252271 -
agtttaatgtgatggtgttatg

SEQ ID NO: 139570 - DNA, 22 bp, Artificial Sequence
  Synthetic oligonucleotide; TTA chr11 5252270 5252291 5252275 5252270 -
gtttaatgtgatggtgttatga

SEQ ID NO: 139571 - DNA, 22 bp, Artificial Sequence
  Synthetic oligonucleotide; TTT chr11 5252266 5252287 5252271 5252266 -
aatgtgatggtgttatgaactt

SEQ ID NO: 139572 - DNA, 22 bp, Artificial Sequence
  Synthetic oligonucleotide; TTA chr11 5252265 5252286 5252270 5252265 -
atgtgatggtgttatgaactta

SEQ ID NO: 139573 - DNA, 22 bp, Artificial Sequence
  Synthetic oligonucleotide; TTA chr11 5252251 5252272 5252256 5252251 -
tgaacttaacgcttgtgtctcc

SEQ ID NO: 139574 - DNA, 22 bp, Artificial Sequence
  Synthetic oligonucleotide; CTT chr11 5252244 5252265 5252249 5252244 -
aacgcttgtgtctccagaaaat

SEQ ID NO: 139575 - DNA, 22 bp, Artificial Sequence
  Synthetic oligonucleotide; TTA chr11 5252243 5252264 5252248 5252243 -
acgcttgtgtctccagaaaatt

SEQ ID NO: 139576 - DNA, 22 bp, Artificial Sequence
  Synthetic oligonucleotide; CTT chr11 5252237 5252258 5252242 5252237 -
gtgtctccagaaaattcacatg

SEQ ID NO: 139577 - DNA, 22 bp, Artificial Sequence
  Synthetic oligonucleotide; TTG chr11 5252236 5252257 5252241 5252236 -
tgtctccagaaaattcacatgc

SEQ ID NO: 139578 - DNA, 22 bp, Artificial Sequence
  Synthetic oligonucleotide; CTC chr11 5252230 5252251 5252235 5252230 -
cagaaaattcacatgctgaatc

SEQ ID NO: 139579 - DNA, 22 bp, Artificial Sequence
  Synthetic oligonucleotide; TTC chr11 5252220 5252241 5252225 5252220 -
acatgctgaatccccaactccc

SEQ ID NO: 139580 - DNA, 22 bp, Artificial Sequence
  Synthetic oligonucleotide; CTG chr11 5252212 5252233 5252217 5252212 -
aatccccaactcccaattggct

SEQ ID NO: 139581 - DNA, 22 bp, Artificial Sequence
  Synthetic oligonucleotide; CTC chr11 5252200 5252221 5252205 5252200 -
ccaattggctccatttgtgggg

SEQ ID NO: 139582 - DNA, 22 bp, Artificial Sequence
  Synthetic oligonucleotide; TTG chr11 5252193 5252214 5252198 5252193 -
gctccatttgtgggggaggctt

SEQ ID NO: 139583 - DNA, 22 bp, Artificial Sequence
  Synthetic oligonucleotide; CTC chr11 5252189 5252210 5252194 5252189 -
catttgtgggggaggctttgga

SEQ ID NO: 139584 - DNA, 22 bp, Artificial Sequence
  Synthetic oligonucleotide; TTT chr11 5252184 5252205 5252189 5252184 -
gtgggggaggctttggaaaagt

SEQ ID NO: 139585 - DNA, 22 bp, Artificial Sequence
  Synthetic oligonucleotide; TTG chr11 5252183 5252204 5252188 5252183 -
tgggggaggctttggaaaagta

SEQ ID NO: 139586 - DNA, 22 bp, Artificial Sequence
  Synthetic oligonucleotide; CTT chr11 5252171 5252192 5252176 5252171 -
tggaaaagtaatcaggtttaga

SEQ ID NO: 139587 - DNA, 22 bp, Artificial Sequence
  Synthetic oligonucleotide; TTT chr11 5252170 5252191 5252175 5252170 -
ggaaaagtaatcaggtttagag

SEQ ID NO: 139588 - DNA, 22 bp, Artificial Sequence
  Synthetic oligonucleotide; TTG chr11 5252169 5252190 5252174 5252169 -
gaaaagtaatcaggtttagagg

SEQ ID NO: 139589 - DNA, 22 bp, Artificial Sequence
  Synthetic oligonucleotide; TTT chr11 5252152 5252173 5252157 5252152 -
agaggagctcatgagagcagat

SEQ ID NO: 139590 - DNA, 22 bp, Artificial Sequence
  Synthetic oligonucleotide; TTA chr11 5252151 5252172 5252156 5252151 -
gaggagctcatgagagcagatc

SEQ ID NO: 139591 - DNA, 22 bp, Artificial Sequence
  Synthetic oligonucleotide; CTC chr11 5252142 5252163 5252147 5252142 -
atgagagcagatccccatcata

SEQ ID NO: 139592 - DNA, 22 bp, Artificial Sequence
  Synthetic oligonucleotide; TTA chr11 5252114 5252135 5252119 5252114 -
ttttcctcatcagaagcagaga

SEQ ID NO: 139593 - DNA, 22 bp, Artificial Sequence
  Synthetic oligonucleotide; TTT chr11 5252111 5252132 5252116 5252111 -
tcctcatcagaagcagagagat

SEQ ID NO: 139594 - DNA, 22 bp, Artificial Sequence
  Synthetic oligonucleotide; TTT chr11 5252110 5252131 5252115 5252110 -
cctcatcagaagcagagagatt

SEQ ID NO: 139595 - DNA, 22 bp, Artificial Sequence
  Synthetic oligonucleotide; TTC chr11 5252109 5252130 5252114 5252109 -
ctcatcagaagcagagagatta

SEQ ID NO: 139596 - DNA, 22 bp, Artificial Sequence
  Synthetic oligonucleotide; CTC chr11 5252106 5252127 5252111 5252106 -
atcagaagcagagagattagcc

SEQ ID NO: 139597 - DNA, 22 bp, Artificial Sequence
  Synthetic oligonucleotide; TTA chr11 5252087 5252108 5252092 5252087 -
gccatttctcttccttctggtg

SEQ ID NO: 139598 - DNA, 22 bp, Artificial Sequence
  Synthetic oligonucleotide; TTT chr11 5252080 5252101 5252085 5252080 -
ctcttccttctggtgaggacac

SEQ ID NO: 139599 - DNA, 22 bp, Artificial Sequence
  Synthetic oligonucleotide; TTC chr11 5252079 5252100 5252084 5252079 -
tcttccttctggtgaggacaca

SEQ ID NO: 139600 - DNA, 22 bp, Artificial Sequence
  Synthetic oligonucleotide; CTC chr11 5252077 5252098 5252082 5252077 -
ttccttctggtgaggacacagt

SEQ ID NO: 139601 - DNA, 22 bp, Artificial Sequence
  Synthetic oligonucleotide; CTT chr11 5252075 5252096 5252080 5252075 -
ccttctggtgaggacacagtgg

SEQ ID NO: 139602 - DNA, 22 bp, Artificial Sequence
  Synthetic oligonucleotide; TTC chr11 5252074 5252095 5252079 5252074 -
cttctggtgaggacacagtggg

SEQ ID NO: 139603 - DNA, 22 bp, Artificial Sequence
  Synthetic oligonucleotide; CTT chr11 5252071 5252092 5252076 5252071 -
ctggtgaggacacagtgggaag

SEQ ID NO: 139604 - DNA, 22 bp, Artificial Sequence
  Synthetic oligonucleotide; TTC chr11 5252070 5252091 5252075 5252070 -
tggtgaggacacagtgggaagt

SEQ ID NO: 139605 - DNA, 22 bp, Artificial Sequence
  Synthetic oligonucleotide; CTG chr11 5252068 5252089 5252073 5252068 -
gtgaggacacagtgggaagtca

SEQ ID NO: 139606 - DNA, 22 bp, Artificial Sequence
  Synthetic oligonucleotide; CTG chr11 5252038 5252059 5252043 5252038 -
caacccaggaagagagccctga

SEQ ID NO: 139607 - DNA, 22 bp, Artificial Sequence
  Synthetic oligonucleotide; CTG chr11 5252017 5252038 5252022 5252017 -
accaggaaccagcagaaaagtg

SEQ ID NO: 139608 - DNA, 22 bp, Artificial Sequence
  Synthetic oligonucleotide; CTG chr11 5251982 5252003 5251987 5251982 -
ttgttgaagtcacccagtctat

SEQ ID NO: 139609 - DNA, 22 bp, Artificial Sequence
  Synthetic oligonucleotide; TTG chr11 5251979 5252000 5251984 5251979 -
ttgaagtcacccagtctatgct

SEQ ID NO: 139610 - DNA, 22 bp, Artificial Sequence
  Synthetic oligonucleotide; TTG chr11 5251976 5251997 5251981 5251976 -
aagtcacccagtctatgctatt

SEQ ID NO: 139611 - DNA, 22 bp, Artificial Sequence
  Synthetic oligonucleotide; CTA chr11 5251961 5251982 5251966 5251961 -
tgctattttgttatagcacctt

SEQ ID NO: 139612 - DNA, 22 bp, Artificial Sequence
  Synthetic oligonucleotide; CTA chr11 5251956 5251977 5251961 5251956 -
ttttgttatagcaccttgcact

SEQ ID NO: 139613 - DNA, 22 bp, Artificial Sequence
  Synthetic oligonucleotide; TTT chr11 5251953 5251974 5251958 5251953 -
tgttatagcaccttgcactaag

SEQ ID NO: 139614 - DNA, 22 bp, Artificial Sequence
  Synthetic oligonucleotide; TTT chr11 5251952 5251973 5251957 5251952 -
gttatagcaccttgcactaagt

SEQ ID NO: 139615 - DNA, 22 bp, Artificial Sequence
  Synthetic oligonucleotide; TTG chr11 5251951 5251972 5251956 5251951 -
ttatagcaccttgcactaagta

SEQ ID NO: 139616 - DNA, 22 bp, Artificial Sequence
  Synthetic oligonucleotide; TTA chr11 5251948 5251969 5251953 5251948 -
tagcaccttgcactaagtaagg

SEQ ID NO: 139617 - DNA, 22 bp, Artificial Sequence
  Synthetic oligonucleotide; CTT chr11 5251939 5251960 5251944 5251939 -
gcactaagtaaggcagatgaag

SEQ ID NO: 139618 - DNA, 22 bp, Artificial Sequence
  Synthetic oligonucleotide; TTG chr11 5251938 5251959 5251943 5251938 -
cactaagtaaggcagatgaaga

SEQ ID NO: 139619 - DNA, 22 bp, Artificial Sequence
  Synthetic oligonucleotide; CTA chr11 5251933 5251954 5251938 5251933 -
agtaaggcagatgaagaaagag

SEQ ID NO: 139620 - DNA, 22 bp, Artificial Sequence
  Synthetic oligonucleotide; CTT chr11 5251897 5251918 5251902 5251897 -
cggtgttcagtggattagaaac

SEQ ID NO: 139621 - DNA, 22 bp, Artificial Sequence
  Synthetic oligonucleotide; TTC chr11 5251896 5251917 5251901 5251896 -
ggtgttcagtggattagaaacc

SEQ ID NO: 139622 - DNA, 22 bp, Artificial Sequence
  Synthetic oligonucleotide; TTC chr11 5251889 5251910 5251894 5251889 -
agtggattagaaaccatgttta

SEQ ID NO: 139623 - DNA, 22 bp, Artificial Sequence
  Synthetic oligonucleotide; TTA chr11 5251880 5251901 5251885 5251880 -
gaaaccatgtttatctcaggtt

SEQ ID NO: 139624 - DNA, 22 bp, Artificial Sequence
  Synthetic oligonucleotide; TTT chr11 5251868 5251889 5251873 5251868 -
atctcaggtttacaaatctcca

SEQ ID NO: 139625 - DNA, 22 bp, Artificial Sequence
  Synthetic oligonucleotide; TTA chr11 5251867 5251888 5251872 5251867 -
tctcaggtttacaaatctccac

SEQ ID NO: 139626 - DNA, 22 bp, Artificial Sequence
  Synthetic oligonucleotide; CTC chr11 5251863 5251884 5251868 5251863 -
aggtttacaaatctccacttgt

SEQ ID NO: 139627 - DNA, 22 bp, Artificial Sequence
  Synthetic oligonucleotide; TTT chr11 5251857 5251878 5251862 5251857 -
acaaatctccacttgtcctctg

SEQ ID NO: 139628 - DNA, 22 bp, Artificial Sequence
  Synthetic oligonucleotide; TTA chr11 5251856 5251877 5251861 5251856 -
caaatctccacttgtcctctgt

SEQ ID NO: 139629 - DNA, 22 bp, Artificial Sequence
  Synthetic oligonucleotide; CTC chr11 5251848 5251869 5251853 5251848 -
cacttgtcctctgtgtttcaga

SEQ ID NO: 139630 - DNA, 22 bp, Artificial Sequence
  Synthetic oligonucleotide; CTT chr11 5251843 5251864 5251848 5251843 -
gtcctctgtgtttcagaataaa

SEQ ID NO: 139631 - DNA, 22 bp, Artificial Sequence
  Synthetic oligonucleotide; TTG chr11 5251842 5251863 5251847 5251842 -
tcctctgtgtttcagaataaaa

SEQ ID NO: 139632 - DNA, 22 bp, Artificial Sequence
  Synthetic oligonucleotide; CTC chr11 5251837 5251858 5251842 5251837 -
tgtgtttcagaataaaatacca

SEQ ID NO: 139633 - DNA, 22 bp, Artificial Sequence
  Synthetic oligonucleotide; CTG chr11 5251835 5251856 5251840 5251835 -
tgtttcagaataaaataccaac

SEQ ID NO: 139634 - DNA, 22 bp, Artificial Sequence
  Synthetic oligonucleotide; TTT chr11 5251830 5251851 5251835 5251830 -
cagaataaaataccaactctac

SEQ ID NO: 139635 - DNA, 22 bp, Artificial Sequence
  Synthetic oligonucleotide; TTC chr11 5251829 5251850 5251834 5251829 -
agaataaaataccaactctact

SEQ ID NO: 139636 - DNA, 22 bp, Artificial Sequence
  Synthetic oligonucleotide; CTC chr11 5251811 5251832 5251816 5251811 -
tactactctcatctgtaagatg

SEQ ID NO: 139637 - DNA, 22 bp, Artificial Sequence
  Synthetic oligonucleotide; CTA chr11 5251809 5251830 5251814 5251809 -
ctactctcatctgtaagatgca

SEQ ID NO: 139638 - DNA, 22 bp, Artificial Sequence
  Synthetic oligonucleotide; CTA chr11 5251806 5251827 5251811 5251806 -
ctctcatctgtaagatgcaaat

SEQ ID NO: 139639 - DNA, 22 bp, Artificial Sequence
  Synthetic oligonucleotide; CTC chr11 5251803 5251824 5251808 5251803 -
tcatctgtaagatgcaaatagt

SEQ ID NO: 139640 - DNA, 22 bp, Artificial Sequence
  Synthetic oligonucleotide; CTC chr11 5251801 5251822 5251806 5251801 -
atctgtaagatgcaaatagtaa

SEQ ID NO: 139641 - DNA, 22 bp, Artificial Sequence
  Synthetic oligonucleotide; CTG chr11 5251796 5251817 5251801 5251796 -
taagatgcaaatagtaagcctg

SEQ ID NO: 139642 - DNA, 22 bp, Artificial Sequence
  Synthetic oligonucleotide; CTG chr11 5251774 5251795 5251779 5251774 -
agcccttctgtctaactttgaa

SEQ ID NO: 139643 - DNA, 22 bp, Artificial Sequence
  Synthetic oligonucleotide; CTT chr11 5251767 5251788 5251772 5251767 -
ctgtctaactttgaattctatt

SEQ ID NO: 139644 - DNA, 22 bp, Artificial Sequence
  Synthetic oligonucleotide; TTC chr11 5251766 5251787 5251771 5251766 -
tgtctaactttgaattctattt

SEQ ID NO: 139645 - DNA, 22 bp, Artificial Sequence
  Synthetic oligonucleotide; CTG chr11 5251764 5251785 5251769 5251764 -
tctaactttgaattctattttt

SEQ ID NO: 139646 - DNA, 22 bp, Artificial Sequence
  Synthetic oligonucleotide; CTA chr11 5251760 5251781 5251765 5251760 -
actttgaattctattttttctt

SEQ ID NO: 139647 - DNA, 22 bp, Artificial Sequence
  Synthetic oligonucleotide; CTT chr11 5251756 5251777 5251761 5251756 -
tgaattctattttttcttcaac

SEQ ID NO: 139648 - DNA, 22 bp, Artificial Sequence
  Synthetic oligonucleotide; TTT chr11 5251755 5251776 5251760 5251755 -
gaattctattttttcttcaacg

SEQ ID NO: 139649 - DNA, 22 bp, Artificial Sequence
  Synthetic oligonucleotide; TTG chr11 5251754 5251775 5251759 5251754 -
aattctattttttcttcaacgt

SEQ ID NO: 139650 - DNA, 22 bp, Artificial Sequence
  Synthetic oligonucleotide; TTC chr11 5251749 5251770 5251754 5251749 -
tattttttcttcaacgtacttt

SEQ ID NO: 139651 - DNA, 22 bp, Artificial Sequence
  Synthetic oligonucleotide; CTA chr11 5251747 5251768 5251752 5251747 -
ttttttcttcaacgtactttag

SEQ ID NO: 139652 - DNA, 22 bp, Artificial Sequence
  Synthetic oligonucleotide; TTT chr11 5251744 5251765 5251749 5251744 -
tttcttcaacgtactttaggct

SEQ ID NO: 139653 - DNA, 22 bp, Artificial Sequence
  Synthetic oligonucleotide; TTT chr11 5251743 5251764 5251748 5251743 -
ttcttcaacgtactttaggctt

SEQ ID NO: 139654 - DNA, 22 bp, Artificial Sequence
  Synthetic oligonucleotide; TTT chr11 5251742 5251763 5251747 5251742 -
tcttcaacgtactttaggcttg

SEQ ID NO: 139655 - DNA, 22 bp, Artificial Sequence
  Synthetic oligonucleotide; TTT chr11 5251741 5251762 5251746 5251741 -
cttcaacgtactttaggcttgt

SEQ ID NO: 139656 - DNA, 22 bp, Artificial Sequence
  Synthetic oligonucleotide; TTC chr11 5251740 5251761 5251745 5251740 -
ttcaacgtactttaggcttgta

SEQ ID NO: 139657 - DNA, 22 bp, Artificial Sequence
  Synthetic oligonucleotide; CTT chr11 5251738 5251759 5251743 5251738 -
caacgtactttaggcttgtaat

SEQ ID NO: 139658 - DNA, 22 bp, Artificial Sequence
  Synthetic oligonucleotide; TTC chr11 5251737 5251758 5251742 5251737 -
aacgtactttaggcttgtaatg

SEQ ID NO: 139659 - DNA, 22 bp, Artificial Sequence
  Synthetic oligonucleotide; CTT chr11 5251728 5251749 5251733 5251728 -
taggcttgtaatgtgtttatat

SEQ ID NO: 139660 - DNA, 22 bp, Artificial Sequence
  Synthetic oligonucleotide; TTT chr11 5251727 5251748 5251732 5251727 -
aggcttgtaatgtgtttatata

SEQ ID NO: 139661 - DNA, 22 bp, Artificial Sequence
  Synthetic oligonucleotide; TTA chr11 5251726 5251747 5251731 5251726 -
ggcttgtaatgtgtttatatac

SEQ ID NO: 139662 - DNA, 22 bp, Artificial Sequence
  Synthetic oligonucleotide; CTT chr11 5251721 5251742 5251726 5251721 -
gtaatgtgtttatatacagtga

SEQ ID NO: 139663 - DNA, 22 bp, Artificial Sequence
  Synthetic oligonucleotide; TTG chr11 5251720 5251741 5251725 5251720 -
taatgtgtttatatacagtgaa

SEQ ID NO: 139664 - DNA, 22 bp, Artificial Sequence
  Synthetic oligonucleotide; TTT chr11 5251710 5251731 5251715 5251710 -
atatacagtgaaatgtcaagtt

SEQ ID NO: 139665 - DNA, 22 bp, Artificial Sequence
  Synthetic oligonucleotide; TTA chr11 5251709 5251730 5251714 5251709 -
tatacagtgaaatgtcaagttc

SEQ ID NO: 139666 - DNA, 22 bp, Artificial Sequence
  Synthetic oligonucleotide; TTC chr11 5251687 5251708 5251692 5251687 -
tttctttatatttctttctttc

SEQ ID NO: 139667 - DNA, 22 bp, Artificial Sequence
  Synthetic oligonucleotide; CTT chr11 5251685 5251706 5251690 5251685 -
tctttatatttctttctttctt

SEQ ID NO: 139668 - DNA, 22 bp, Artificial Sequence
  Synthetic oligonucleotide; TTT chr11 5251684 5251705 5251689 5251684 -
ctttatatttctttctttcttt

SEQ ID NO: 139669 - DNA, 22 bp, Artificial Sequence
  Synthetic oligonucleotide; TTC chr11 5251683 5251704 5251688 5251683 -
tttatatttctttctttctttt

SEQ ID NO: 139670 - DNA, 22 bp, Artificial Sequence
  Synthetic oligonucleotide; CTT chr11 5251681 5251702 5251686 5251681 -
tatatttctttctttctttttt

SEQ ID NO: 139671 - DNA, 22 bp, Artificial Sequence
  Synthetic oligonucleotide; TTT chr11 5251680 5251701 5251685 5251680 -
atatttctttctttcttttttt

SEQ ID NO: 139672 - DNA, 22 bp, Artificial Sequence
  Synthetic oligonucleotide; TTA chr11 5251679 5251700 5251684 5251679 -
tatttctttctttctttttttt

SEQ ID NO: 139673 - DNA, 22 bp, Artificial Sequence
  Synthetic oligonucleotide; TTT chr11 5251674 5251695 5251679 5251674 -
ctttctttcttttttttcctca

SEQ ID NO: 139674 - DNA, 22 bp, Artificial Sequence
  Synthetic oligonucleotide; TTC chr11 5251673 5251694 5251678 5251673 -
tttctttcttttttttcctcag

SEQ ID NO: 139675 - DNA, 22 bp, Artificial Sequence
  Synthetic oligonucleotide; CTT chr11 5251671 5251692 5251676 5251671 -
tctttcttttttttcctcagcc

SEQ ID NO: 139676 - DNA, 22 bp, Artificial Sequence
  Synthetic oligonucleotide; TTT chr11 5251670 5251691 5251675 5251670 -
ctttcttttttttcctcagcct

SEQ ID NO: 139677 - DNA, 22 bp, Artificial Sequence
  Synthetic oligonucleotide; TTC chr11 5251669 5251690 5251674 5251669 -
tttcttttttttcctcagcctc

SEQ ID NO: 139678 - DNA, 22 bp, Artificial Sequence
  Synthetic oligonucleotide; CTT chr11 5251667 5251688 5251672 5251667 -
tcttttttttcctcagcctcag

SEQ ID NO: 139679 - DNA, 22 bp, Artificial Sequence
  Synthetic oligonucleotide; TTT chr11 5251666 5251687 5251671 5251666 -
cttttttttcctcagcctcaga

SEQ ID NO: 139680 - DNA, 22 bp, Artificial Sequence
  Synthetic oligonucleotide; TTC chr11 5251665 5251686 5251670 5251665 -
ttttttttcctcagcctcagag

SEQ ID NO: 139681 - DNA, 22 bp, Artificial Sequence
  Synthetic oligonucleotide; CTT chr11 5251663 5251684 5251668 5251663 -
ttttttcctcagcctcagagtt

SEQ ID NO: 139682 - DNA, 22 bp, Artificial Sequence
  Synthetic oligonucleotide; TTT chr11 5251662 5251683 5251667 5251662 -
tttttcctcagcctcagagttt

SEQ ID NO: 139683 - DNA, 22 bp, Artificial Sequence
  Synthetic oligonucleotide; TTT chr11 5251661 5251682 5251666 5251661 -
ttttcctcagcctcagagtttt

SEQ ID NO: 139684 - DNA, 22 bp, Artificial Sequence
  Synthetic oligonucleotide; TTT chr11 5251660 5251681 5251665 5251660 -
tttcctcagcctcagagttttc

SEQ ID NO: 139685 - DNA, 22 bp, Artificial Sequence
  Synthetic oligonucleotide; TTT chr11 5251659 5251680 5251664 5251659 -
ttcctcagcctcagagttttcc

SEQ ID NO: 139686 - DNA, 22 bp, Artificial Sequence
  Synthetic oligonucleotide; TTT chr11 5251658 5251679 5251663 5251658 -
tcctcagcctcagagttttcca

SEQ ID NO: 139687 - DNA, 22 bp, Artificial Sequence
  Synthetic oligonucleotide; TTT chr11 5251657 5251678 5251662 5251657 -
cctcagcctcagagttttccac

SEQ ID NO: 139688 - DNA, 22 bp, Artificial Sequence
  Synthetic oligonucleotide; TTC chr11 5251656 5251677 5251661 5251656 -
ctcagcctcagagttttccaca

SEQ ID NO: 139689 - DNA, 22 bp, Artificial Sequence
  Synthetic oligonucleotide; CTC chr11 5251653 5251674 5251658 5251653 -
agcctcagagttttccacatgc

SEQ ID NO: 139690 - DNA, 22 bp, Artificial Sequence
  Synthetic oligonucleotide; CTC chr11 5251647 5251668 5251652 5251647 -
agagttttccacatgcccttcc

SEQ ID NO: 139691 - DNA, 22 bp, Artificial Sequence
  Synthetic oligonucleotide; TTT chr11 5251640 5251661 5251645 5251640 -
tccacatgcccttcctactttc

SEQ ID NO: 139692 - DNA, 22 bp, Artificial Sequence
  Synthetic oligonucleotide; TTT chr11 5251639 5251660 5251644 5251639 -
ccacatgcccttcctactttca

SEQ ID NO: 139693 - DNA, 22 bp, Artificial Sequence
  Synthetic oligonucleotide; TTC chr11 5251638 5251659 5251643 5251638 -
cacatgcccttcctactttcag

SEQ ID NO: 139694 - DNA, 22 bp, Artificial Sequence
  Synthetic oligonucleotide; CTT chr11 5251627 5251648 5251632 5251627 -
cctactttcaggaacttctttc

SEQ ID NO: 139695 - DNA, 22 bp, Artificial Sequence
  Synthetic oligonucleotide; TTC chr11 5251626 5251647 5251631 5251626 -
ctactttcaggaacttctttct

SEQ ID NO: 139696 - DNA, 22 bp, Artificial Sequence
  Synthetic oligonucleotide; CTA chr11 5251623 5251644 5251628 5251623 -
ctttcaggaacttctttctcca

SEQ ID NO: 139697 - DNA, 22 bp, Artificial Sequence
  Synthetic oligonucleotide; CTT chr11 5251620 5251641 5251625 5251620 -
tcaggaacttctttctccaaac

SEQ ID NO: 139698 - DNA, 22 bp, Artificial Sequence
  Synthetic oligonucleotide; TTT chr11 5251619 5251640 5251624 5251619 -
caggaacttctttctccaaacg

SEQ ID NO: 139699 - DNA, 22 bp, Artificial Sequence
  Synthetic oligonucleotide; TTC chr11 5251618 5251639 5251623 5251618 -
aggaacttctttctccaaacgt

SEQ ID NO: 139700 - DNA, 22 bp, Artificial Sequence
  Synthetic oligonucleotide; CTT chr11 5251610 5251631 5251615 5251610 -
ctttctccaaacgtcttctgcc

SEQ ID NO: 139701 - DNA, 22 bp, Artificial Sequence
  Synthetic oligonucleotide; TTC chr11 5251609 5251630 5251614 5251609 -
tttctccaaacgtcttctgcct

SEQ ID NO: 139702 - DNA, 22 bp, Artificial Sequence
  Synthetic oligonucleotide; CTT chr11 5251607 5251628 5251612 5251607 -
tctccaaacgtcttctgcctgg

SEQ ID NO: 139703 - DNA, 22 bp, Artificial Sequence
  Synthetic oligonucleotide; TTT chr11 5251606 5251627 5251611 5251606 -
ctccaaacgtcttctgcctggc

SEQ ID NO: 139704 - DNA, 22 bp, Artificial Sequence
  Synthetic oligonucleotide; TTC chr11 5251605 5251626 5251610 5251605 -
tccaaacgtcttctgcctggct

SEQ ID NO: 139705 - DNA, 22 bp, Artificial Sequence
  Synthetic oligonucleotide; CTC chr11 5251603 5251624 5251608 5251603 -
caaacgtcttctgcctggctcc

SEQ ID NO: 139706 - DNA, 22 bp, Artificial Sequence
  Synthetic oligonucleotide; CTT chr11 5251593 5251614 5251598 5251593 -
ctgcctggctccatcaaatcat

SEQ ID NO: 139707 - DNA, 22 bp, Artificial Sequence
  Synthetic oligonucleotide; TTC chr11 5251592 5251613 5251597 5251592 -
tgcctggctccatcaaatcata

SEQ ID NO: 139708 - DNA, 22 bp, Artificial Sequence
  Synthetic oligonucleotide; CTG chr11 5251590 5251611 5251595 5251590 -
cctggctccatcaaatcataaa

SEQ ID NO: 139709 - DNA, 22 bp, Artificial Sequence
  Synthetic oligonucleotide; CTG chr11 5251586 5251607 5251591 5251586 -
gctccatcaaatcataaaggac

SEQ ID NO: 139710 - DNA, 22 bp, Artificial Sequence
  Synthetic oligonucleotide; CTC chr11 5251582 5251603 5251587 5251582 -
catcaaatcataaaggacccac

SEQ ID NO: 139711 - DNA, 22 bp, Artificial Sequence
  Synthetic oligonucleotide; CTT chr11 5251558 5251579 5251563 5251558 -
caaatgccatcactcactacca

SEQ ID NO: 139712 - DNA, 22 bp, Artificial Sequence
  Synthetic oligonucleotide; TTC chr11 5251557 5251578 5251562 5251557 -
aaatgccatcactcactaccat

SEQ ID NO: 139713 - DNA, 22 bp, Artificial Sequence
  Synthetic oligonucleotide; CTC chr11 5251543 5251564 5251548 5251543 -
actaccatttcacaattcgcac

SEQ ID NO: 139714 - DNA, 22 bp, Artificial Sequence
  Synthetic oligonucleotide; CTA chr11 5251539 5251560 5251544 5251539 -
ccatttcacaattcgcactttc

SEQ ID NO: 139715 - DNA, 22 bp, Artificial Sequence
  Synthetic oligonucleotide; TTT chr11 5251533 5251554 5251538 5251533 -
cacaattcgcactttctttctt

SEQ ID NO: 139716 - DNA, 22 bp, Artificial Sequence
  Synthetic oligonucleotide; TTC chr11 5251532 5251553 5251537 5251532 -
acaattcgcactttctttcttt

SEQ ID NO: 139717 - DNA, 22 bp, Artificial Sequence
  Synthetic oligonucleotide; TTC chr11 5251525 5251546 5251530 5251525 -
gcactttctttctttgtccttt

SEQ ID NO: 139718 - DNA, 22 bp, Artificial Sequence
  Synthetic oligonucleotide; CTT chr11 5251519 5251540 5251524 5251519 -
tctttctttgtccttttttttt

SEQ ID NO: 139719 - DNA, 22 bp, Artificial Sequence
  Synthetic oligonucleotide; TTT chr11 5251518 5251539 5251523 5251518 -
ctttctttgtcctttttttttt

SEQ ID NO: 139720 - DNA, 22 bp, Artificial Sequence
  Synthetic oligonucleotide; TTC chr11 5251517 5251538 5251522 5251517 -
tttctttgtccttttttttttt

SEQ ID NO: 139721 - DNA, 22 bp, Artificial Sequence
  Synthetic oligonucleotide; CTT chr11 5251515 5251536 5251520 5251515 -
tctttgtcctttttttttttag

SEQ ID NO: 139722 - DNA, 22 bp, Artificial Sequence
  Synthetic oligonucleotide; TTT chr11 5251514 5251535 5251519 5251514 -
ctttgtcctttttttttttagt

SEQ ID NO: 139723 - DNA, 22 bp, Artificial Sequence
  Synthetic oligonucleotide; TTC chr11 5251513 5251534 5251518 5251513 -
tttgtcctttttttttttagta

SEQ ID NO: 139724 - DNA, 22 bp, Artificial Sequence
  Synthetic oligonucleotide; CTT chr11 5251511 5251532 5251516 5251511 -
tgtcctttttttttttagtaaa

SEQ ID NO: 139725 - DNA, 22 bp, Artificial Sequence
  Synthetic oligonucleotide; TTT chr11 5251510 5251531 5251515 5251510 -
gtcctttttttttttagtaaaa

SEQ ID NO: 139726 - DNA, 22 bp, Artificial Sequence
  Synthetic oligonucleotide; TTG chr11 5251509 5251530 5251514 5251509 -
tcctttttttttttagtaaaac

SEQ ID NO: 139727 - DNA, 22 bp, Artificial Sequence
  Synthetic oligonucleotide; CTT chr11 5251504 5251525 5251509 5251504 -
tttttttttagtaaaacaagtt

SEQ ID NO: 139728 - DNA, 22 bp, Artificial Sequence
  Synthetic oligonucleotide; TTT chr11 5251503 5251524 5251508 5251503 -
ttttttttagtaaaacaagttt

SEQ ID NO: 139729 - DNA, 22 bp, Artificial Sequence
  Synthetic oligonucleotide; TTT chr11 5251502 5251523 5251507 5251502 -
tttttttagtaaaacaagttta

SEQ ID NO: 139730 - DNA, 22 bp, Artificial Sequence
  Synthetic oligonucleotide; TTT chr11 5251501 5251522 5251506 5251501 -
ttttttagtaaaacaagtttat

SEQ ID NO: 139731 - DNA, 22 bp, Artificial Sequence
  Synthetic oligonucleotide; TTT chr11 5251500 5251521 5251505 5251500 -
tttttagtaaaacaagtttata

SEQ ID NO: 139732 - DNA, 22 bp, Artificial Sequence
  Synthetic oligonucleotide; TTT chr11 5251499 5251520 5251504 5251499 -
ttttagtaaaacaagtttataa

SEQ ID NO: 139733 - DNA, 22 bp, Artificial Sequence
  Synthetic oligonucleotide; TTT chr11 5251498 5251519 5251503 5251498 -
tttagtaaaacaagtttataaa

SEQ ID NO: 139734 - DNA, 22 bp, Artificial Sequence
  Synthetic oligonucleotide; TTT chr11 5251497 5251518 5251502 5251497 -
ttagtaaaacaagtttataaaa

SEQ ID NO: 139735 - DNA, 22 bp, Artificial Sequence
  Synthetic oligonucleotide; TTT chr11 5251496 5251517 5251501 5251496 -
tagtaaaacaagtttataaaaa

SEQ ID NO: 139736 - DNA, 22 bp, Artificial Sequence
  Synthetic oligonucleotide; TTT chr11 5251495 5251516 5251500 5251495 -
agtaaaacaagtttataaaaaa

SEQ ID NO: 139737 - DNA, 22 bp, Artificial Sequence
  Synthetic oligonucleotide; TTA chr11 5251494 5251515 5251499 5251494 -
gtaaaacaagtttataaaaaat

SEQ ID NO: 139738 - DNA, 22 bp, Artificial Sequence
  Synthetic oligonucleotide; TTT chr11 5251481 5251502 5251486 5251481 -
ataaaaaattgaaggaataaat

SEQ ID NO: 139739 - DNA, 22 bp, Artificial Sequence
  Synthetic oligonucleotide; TTA chr11 5251480 5251501 5251485 5251480 -
taaaaaattgaaggaataaatg

SEQ ID NO: 139740 - DNA, 22 bp, Artificial Sequence
  Synthetic oligonucleotide; TTG chr11 5251470 5251491 5251475 5251470 -
aaggaataaatgaatggctact

SEQ ID NO: 139741 - DNA, 22 bp, Artificial Sequence
  Synthetic oligonucleotide; CTA chr11 5251450 5251471 5251455 5251450 -
cttcataggcagagtagacgca

SEQ ID NO: 139742 - DNA, 22 bp, Artificial Sequence
  Synthetic oligonucleotide; CTT chr11 5251447 5251468 5251452 5251447 -
cataggcagagtagacgcaagg

SEQ ID NO: 139743 - DNA, 22 bp, Artificial Sequence
  Synthetic oligonucleotide; TTC chr11 5251446 5251467 5251451 5251446 -
ataggcagagtagacgcaaggg

SEQ ID NO: 139744 - DNA, 22 bp, Artificial Sequence
  Synthetic oligonucleotide; CTA chr11 5251421 5251442 5251426 5251421 -
ctggttgccgatttttattgtt

SEQ ID NO: 139745 - DNA, 22 bp, Artificial Sequence
  Synthetic oligonucleotide; CTG chr11 5251418 5251439 5251423 5251418 -
gttgccgatttttattgttatt

SEQ ID NO: 139746 - DNA, 22 bp, Artificial Sequence
  Synthetic oligonucleotide; TTG chr11 5251414 5251435 5251419 5251414 -
ccgatttttattgttatttttc

SEQ ID NO: 139747 - DNA, 22 bp, Artificial Sequence
  Synthetic oligonucleotide; TTT chr11 5251407 5251428 5251412 5251407 -
ttattgttatttttcaatagta

SEQ ID NO: 139748 - DNA, 22 bp, Artificial Sequence
  Synthetic oligonucleotide; TTT chr11 5251406 5251427 5251411 5251406 -
tattgttatttttcaatagtat

SEQ ID NO: 139749 - DNA, 22 bp, Artificial Sequence
  Synthetic oligonucleotide; TTT chr11 5251405 5251426 5251410 5251405 -
attgttatttttcaatagtatg

SEQ ID NO: 139750 - DNA, 22 bp, Artificial Sequence
  Synthetic oligonucleotide; TTA chr11 5251404 5251425 5251409 5251404 -
ttgttatttttcaatagtatgc

SEQ ID NO: 139751 - DNA, 22 bp, Artificial Sequence
  Synthetic oligonucleotide; TTG chr11 5251401 5251422 5251406 5251401 -
ttatttttcaatagtatgctaa

SEQ ID NO: 139752 - DNA, 22 bp, Artificial Sequence
  Synthetic oligonucleotide; TTA chr11 5251398 5251419 5251403 5251398 -
tttttcaatagtatgctaaaca

SEQ ID NO: 139753 - DNA, 22 bp, Artificial Sequence
  Synthetic oligonucleotide; TTT chr11 5251395 5251416 5251400 5251395 -
ttcaatagtatgctaaacaagg

SEQ ID NO: 139754 - DNA, 22 bp, Artificial Sequence
  Synthetic oligonucleotide; TTT chr11 5251394 5251415 5251399 5251394 -
tcaatagtatgctaaacaaggg

SEQ ID NO: 139755 - DNA, 22 bp, Artificial Sequence
  Synthetic oligonucleotide; TTT chr11 5251393 5251414 5251398 5251393 -
caatagtatgctaaacaagggg

SEQ ID NO: 139756 - DNA, 22 bp, Artificial Sequence
  Synthetic oligonucleotide; TTC chr11 5251392 5251413 5251397 5251392 -
aatagtatgctaaacaaggggt

SEQ ID NO: 139757 - DNA, 22 bp, Artificial Sequence
  Synthetic oligonucleotide; CTA chr11 5251380 5251401 5251385 5251380 -
aacaaggggtagattatttatg

SEQ ID NO: 139758 - DNA, 22 bp, Artificial Sequence
  Synthetic oligonucleotide; TTA chr11 5251364 5251385 5251369 5251364 -
tttatgctgcccatttttagac

SEQ ID NO: 139759 - DNA, 22 bp, Artificial Sequence
  Synthetic oligonucleotide; TTT chr11 5251361 5251382 5251366 5251361 -
atgctgcccatttttagaccat

SEQ ID NO: 139760 - DNA, 22 bp, Artificial Sequence
  Synthetic oligonucleotide; TTA chr11 5251360 5251381 5251365 5251360 -
tgctgcccatttttagaccata

SEQ ID NO: 139761 - DNA, 22 bp, Artificial Sequence
  Synthetic oligonucleotide; CTG chr11 5251355 5251376 5251360 5251355 -
cccatttttagaccataaaaga

SEQ ID NO: 139762 - DNA, 22 bp, Artificial Sequence
  Synthetic oligonucleotide; TTT chr11 5251348 5251369 5251353 5251348 -
ttagaccataaaagataacttc

SEQ ID NO: 139763 - DNA, 22 bp, Artificial Sequence
  Synthetic oligonucleotide; TTT chr11 5251347 5251368 5251352 5251347 -
tagaccataaaagataacttcc

SEQ ID NO: 139764 - DNA, 22 bp, Artificial Sequence
  Synthetic oligonucleotide; TTT chr11 5251346 5251367 5251351 5251346 -
agaccataaaagataacttcct

SEQ ID NO: 139765 - DNA, 22 bp, Artificial Sequence
  Synthetic oligonucleotide; TTA chr11 5251345 5251366 5251350 5251345 -
gaccataaaagataacttcctg

SEQ ID NO: 139766 - DNA, 22 bp, Artificial Sequence
  Synthetic oligonucleotide; CTT chr11 5251327 5251348 5251332 5251327 -
cctgatgttgccatggcatttt

SEQ ID NO: 139767 - DNA, 22 bp, Artificial Sequence
  Synthetic oligonucleotide; TTC chr11 5251326 5251347 5251331 5251326 -
ctgatgttgccatggcattttt

SEQ ID NO: 139768 - DNA, 22 bp, Artificial Sequence
  Synthetic oligonucleotide; CTG chr11 5251323 5251344 5251328 5251323 -
atgttgccatggcatttttttc

SEQ ID NO: 139769 - DNA, 22 bp, Artificial Sequence
  Synthetic oligonucleotide; TTG chr11 5251317 5251338 5251322 5251317 -
ccatggcatttttttcctttta

SEQ ID NO: 139770 - DNA, 22 bp, Artificial Sequence
  Synthetic oligonucleotide; TTT chr11 5251306 5251327 5251311 5251306 -
ttttccttttaattttatttca

SEQ ID NO: 139771 - DNA, 22 bp, Artificial Sequence
  Synthetic oligonucleotide; TTT chr11 5251305 5251326 5251310 5251305 -
tttccttttaattttatttcat

SEQ ID NO: 139772 - DNA, 22 bp, Artificial Sequence
  Synthetic oligonucleotide; TTT chr11 5251304 5251325 5251309 5251304 -
ttccttttaattttatttcatt

SEQ ID NO: 139773 - DNA, 22 bp, Artificial Sequence
  Synthetic oligonucleotide; TTT chr11 5251303 5251324 5251308 5251303 -
tccttttaattttatttcattt

SEQ ID NO: 139774 - DNA, 22 bp, Artificial Sequence
  Synthetic oligonucleotide; TTT chr11 5251302 5251323 5251307 5251302 -
ccttttaattttatttcatttc

SEQ ID NO: 139775 - DNA, 22 bp, Artificial Sequence
  Synthetic oligonucleotide; TTC chr11 5251301 5251322 5251306 5251301 -
cttttaattttatttcatttca

SEQ ID NO: 139776 - DNA, 22 bp, Artificial Sequence
  Synthetic oligonucleotide; CTT chr11 5251298 5251319 5251303 5251298 -
ttaattttatttcatttcattt

SEQ ID NO: 139777 - DNA, 22 bp, Artificial Sequence
  Synthetic oligonucleotide; TTT chr11 5251297 5251318 5251302 5251297 -
taattttatttcatttcatttt

SEQ ID NO: 139778 - DNA, 22 bp, Artificial Sequence
  Synthetic oligonucleotide; TTT chr11 5251296 5251317 5251301 5251296 -
aattttatttcatttcatttta

SEQ ID NO: 139779 - DNA, 22 bp, Artificial Sequence
  Synthetic oligonucleotide; TTA chr11 5251295 5251316 5251300 5251295 -
attttatttcatttcattttaa

SEQ ID NO: 139780 - DNA, 22 bp, Artificial Sequence
  Synthetic oligonucleotide; TTT chr11 5251291 5251312 5251296 5251291 -
tatttcatttcattttaatttc

SEQ ID NO: 139781 - DNA, 22 bp, Artificial Sequence
  Synthetic oligonucleotide; TTT chr11 5251290 5251311 5251295 5251290 -
atttcatttcattttaatttcg

SEQ ID NO: 139782 - DNA, 22 bp, Artificial Sequence
  Synthetic oligonucleotide; TTA chr11 5251289 5251310 5251294 5251289 -
tttcatttcattttaatttcga

SEQ ID NO: 139783 - DNA, 22 bp, Artificial Sequence
  Synthetic oligonucleotide; TTT chr11 5251286 5251307 5251291 5251286 -
catttcattttaatttcgaagg

SEQ ID NO: 139784 - DNA, 22 bp, Artificial Sequence
  Synthetic oligonucleotide; TTC chr11 5251285 5251306 5251290 5251285 -
atttcattttaatttcgaaggt

SEQ ID NO: 139785 - DNA, 22 bp, Artificial Sequence
  Synthetic oligonucleotide; TTT chr11 5251281 5251302 5251286 5251281 -
cattttaatttcgaaggtacat

SEQ ID NO: 139786 - DNA, 22 bp, Artificial Sequence
  Synthetic oligonucleotide; TTC chr11 5251280 5251301 5251285 5251280 -
attttaatttcgaaggtacatg

SEQ ID NO: 139787 - DNA, 22 bp, Artificial Sequence
  Synthetic oligonucleotide; TTT chr11 5251276 5251297 5251281 5251276 -
taatttcgaaggtacatgtgca

SEQ ID NO: 139788 - DNA, 22 bp, Artificial Sequence
  Synthetic oligonucleotide; TTT chr11 5251275 5251296 5251280 5251275 -
aatttcgaaggtacatgtgcag

SEQ ID NO: 139789 - DNA, 22 bp, Artificial Sequence
  Synthetic oligonucleotide; TTA chr11 5251274 5251295 5251279 5251274 -
atttcgaaggtacatgtgcagg

SEQ ID NO: 139790 - DNA, 22 bp, Artificial Sequence
  Synthetic oligonucleotide; TTT chr11 5251270 5251291 5251275 5251270 -
cgaaggtacatgtgcaggatgt

SEQ ID NO: 139791 - DNA, 22 bp, Artificial Sequence
  Synthetic oligonucleotide; TTC chr11 5251269 5251290 5251274 5251269 -
gaaggtacatgtgcaggatgtg

SEQ ID NO: 139792 - DNA, 22 bp, Artificial Sequence
  Synthetic oligonucleotide; CTT chr11 5251240 5251261 5251245 5251240 -
gttacatgggtaaatgtgtgtc

SEQ ID NO: 139793 - DNA, 22 bp, Artificial Sequence
  Synthetic oligonucleotide; TTG chr11 5251239 5251260 5251244 5251239 -
ttacatgggtaaatgtgtgtct

SEQ ID NO: 139794 - DNA, 22 bp, Artificial Sequence
  Synthetic oligonucleotide; TTA chr11 5251236 5251257 5251241 5251236 -
catgggtaaatgtgtgtctttc

SEQ ID NO: 139795 - DNA, 22 bp, Artificial Sequence
  Synthetic oligonucleotide; CTT chr11 5251216 5251237 5251221 5251216 -
tctggccttttagccatctgta

SEQ ID NO: 139796 - DNA, 22 bp, Artificial Sequence
  Synthetic oligonucleotide; TTT chr11 5251215 5251236 5251220 5251215 -
ctggccttttagccatctgtat

SEQ ID NO: 139797 - DNA, 22 bp, Artificial Sequence
  Synthetic oligonucleotide; TTC chr11 5251214 5251235 5251219 5251214 -
tggccttttagccatctgtatc

SEQ ID NO: 139798 - DNA, 22 bp, Artificial Sequence
  Synthetic oligonucleotide; CTG chr11 5251212 5251233 5251217 5251212 -
gccttttagccatctgtatcaa

SEQ ID NO: 139799 - DNA, 22 bp, Artificial Sequence
  Synthetic oligonucleotide; CTT chr11 5251207 5251228 5251212 5251207 -
ttagccatctgtatcaatgagc

SEQ ID NO: 139800 - DNA, 22 bp, Artificial Sequence
  Synthetic oligonucleotide; TTT chr11 5251206 5251227 5251211 5251206 -
tagccatctgtatcaatgagca

SEQ ID NO: 139801 - DNA, 22 bp, Artificial Sequence
  Synthetic oligonucleotide; TTT chr11 5251205 5251226 5251210 5251205 -
agccatctgtatcaatgagcag

SEQ ID NO: 139802 - DNA, 22 bp, Artificial Sequence
  Synthetic oligonucleotide; TTA chr11 5251204 5251225 5251209 5251204 -
gccatctgtatcaatgagcaga

SEQ ID NO: 139803 - DNA, 22 bp, Artificial Sequence
  Synthetic oligonucleotide; CTG chr11 5251196 5251217 5251201 5251196 -
tatcaatgagcagatataagct

SEQ ID NO: 139804 - DNA, 22 bp, Artificial Sequence
  Synthetic oligonucleotide; CTT chr11 5251173 5251194 5251178 5251173 -
tacacaggatcatgaaggatga

SEQ ID NO: 139805 - DNA, 22 bp, Artificial Sequence
  Synthetic oligonucleotide; TTT chr11 5251172 5251193 5251177 5251172 -
acacaggatcatgaaggatgaa

SEQ ID NO: 139806 - DNA, 22 bp, Artificial Sequence
  Synthetic oligonucleotide; TTA chr11 5251171 5251192 5251176 5251171 -
cacaggatcatgaaggatgaaa

SEQ ID NO: 139807 - DNA, 22 bp, Artificial Sequence
  Synthetic oligonucleotide; TTT chr11 5251143 5251164 5251148 5251143 -
caccaatattataataatttca

SEQ ID NO: 139808 - DNA, 22 bp, Artificial Sequence
  Synthetic oligonucleotide; TTC chr11 5251142 5251163 5251147 5251142 -
accaatattataataatttcaa

SEQ ID NO: 139809 - DNA, 22 bp, Artificial Sequence
  Synthetic oligonucleotide; TTA chr11 5251132 5251153 5251137 5251132 -
taataatttcaatcaacctgat

SEQ ID NO: 139810 - DNA, 22 bp, Artificial Sequence
  Synthetic oligonucleotide; TTT chr11 5251123 5251144 5251128 5251123 -
caatcaacctgatagcttaggg

SEQ ID NO: 139811 - DNA, 22 bp, Artificial Sequence
  Synthetic oligonucleotide; TTC chr11 5251122 5251143 5251127 5251122 -
aatcaacctgatagcttagggg

SEQ ID NO: 139812 - DNA, 22 bp, Artificial Sequence
  Synthetic oligonucleotide; CTG chr11 5251112 5251133 5251117 5251112 -
atagcttaggggataaactaat

SEQ ID NO: 139813 - DNA, 22 bp, Artificial Sequence
  Synthetic oligonucleotide; CTT chr11 5251105 5251126 5251110 5251105 -
aggggataaactaatttgaaga

SEQ ID NO: 139814 - DNA, 22 bp, Artificial Sequence
  Synthetic oligonucleotide; TTA chr11 5251104 5251125 5251109 5251104 -
ggggataaactaatttgaagat

SEQ ID NO: 139815 - DNA, 22 bp, Artificial Sequence
  Synthetic oligonucleotide; CTA chr11 5251092 5251113 5251097 5251092 -
atttgaagatacagcttgcctc

SEQ ID NO: 139816 - DNA, 22 bp, Artificial Sequence
  Synthetic oligonucleotide; TTT chr11 5251088 5251109 5251093 5251088 -
gaagatacagcttgcctccgat

SEQ ID NO: 139817 - DNA, 22 bp, Artificial Sequence
  Synthetic oligonucleotide; TTG chr11 5251087 5251108 5251092 5251087 -
aagatacagcttgcctccgata

SEQ ID NO: 139818 - DNA, 22 bp, Artificial Sequence
  Synthetic oligonucleotide; CTT chr11 5251075 5251096 5251080 5251075 -
gcctccgataagccagaattcc

SEQ ID NO: 139819 - DNA, 22 bp, Artificial Sequence
  Synthetic oligonucleotide; TTG chr11 5251074 5251095 5251079 5251074 -
cctccgataagccagaattcca

SEQ ID NO: 139820 - DNA, 22 bp, Artificial Sequence
  Synthetic oligonucleotide; CTC chr11 5251070 5251091 5251075 5251070 -
cgataagccagaattccagagc

SEQ ID NO: 139821 - DNA, 22 bp, Artificial Sequence
  Synthetic oligonucleotide; TTC chr11 5251054 5251075 5251059 5251054 -
cagagcttctggcattataatc

SEQ ID NO: 139822 - DNA, 22 bp, Artificial Sequence
  Synthetic oligonucleotide; CTT chr11 5251046 5251067 5251051 5251046 -
ctggcattataatctagcaagg

SEQ ID NO: 139823 - DNA, 22 bp, Artificial Sequence
  Synthetic oligonucleotide; TTC chr11 5251045 5251066 5251050 5251045 -
tggcattataatctagcaaggt

SEQ ID NO: 139824 - DNA, 22 bp, Artificial Sequence
  Synthetic oligonucleotide; CTG chr11 5251043 5251064 5251048 5251043 -
gcattataatctagcaaggtta

SEQ ID NO: 139825 - DNA, 22 bp, Artificial Sequence
  Synthetic oligonucleotide; TTA chr11 5251037 5251058 5251042 5251037 -
taatctagcaaggttagagatc

SEQ ID NO: 139826 - DNA, 22 bp, Artificial Sequence
  Synthetic oligonucleotide; CTA chr11 5251030 5251051 5251035 5251030 -
gcaaggttagagatcatggatc

SEQ ID NO: 139827 - DNA, 22 bp, Artificial Sequence
  Synthetic oligonucleotide; TTA chr11 5251021 5251042 5251026 5251021 -
gagatcatggatcactttcaga

SEQ ID NO: 139828 - DNA, 22 bp, Artificial Sequence
  Synthetic oligonucleotide; CTT chr11 5251004 5251025 5251009 5251004 -
tcagagaaaaacaaaaacaaac

SEQ ID NO: 139829 - DNA, 22 bp, Artificial Sequence
  Synthetic oligonucleotide; TTT chr11 5251003 5251024 5251008 5251003 -
cagagaaaaacaaaaacaaact

SEQ ID NO: 139830 - DNA, 22 bp, Artificial Sequence
  Synthetic oligonucleotide; TTC chr11 5251002 5251023 5251007 5251002 -
agagaaaaacaaaaacaaacta

SEQ ID NO: 139831 - DNA, 22 bp, Artificial Sequence
  Synthetic oligonucleotide; CTA chr11 5250980 5251001 5250985 5250980 -
accaaaagcaaaacagaaccaa

SEQ ID NO: 139832 - DNA, 22 bp, Artificial Sequence
  Synthetic oligonucleotide; CTT chr11 5250939 5250960 5250944 5250939 -
cctaccctgttaatggtccaat

SEQ ID NO: 139833 - DNA, 22 bp, Artificial Sequence
  Synthetic oligonucleotide; TTC chr11 5250938 5250959 5250943 5250938 -
ctaccctgttaatggtccaata

SEQ ID NO: 139834 - DNA, 22 bp, Artificial Sequence
  Synthetic oligonucleotide; CTA chr11 5250935 5250956 5250940 5250935 -
ccctgttaatggtccaatatgt

SEQ ID NO: 139835 - DNA, 22 bp, Artificial Sequence
  Synthetic oligonucleotide; CTG chr11 5250930 5250951 5250935 5250930 -
ttaatggtccaatatgtcagaa

SEQ ID NO: 139836 - DNA, 22 bp, Artificial Sequence
  Synthetic oligonucleotide; TTA chr11 5250927 5250948 5250932 5250927 -
atggtccaatatgtcagaaaca

SEQ ID NO: 139837 - DNA, 22 bp, Artificial Sequence
  Synthetic oligonucleotide; CTG chr11 5250899 5250920 5250904 5250899 -
tgttagaaataaagctgtctaa

SEQ ID NO: 139838 - DNA, 22 bp, Artificial Sequence
  Synthetic oligonucleotide; TTA chr11 5250894 5250915 5250899 5250894 -
gaaataaagctgtctaaagtac

SEQ ID NO: 139839 - DNA, 22 bp, Artificial Sequence
  Synthetic oligonucleotide; CTG chr11 5250882 5250903 5250887 5250882 -
tctaaagtacactaatattcga

SEQ ID NO: 139840 - DNA, 22 bp, Artificial Sequence
  Synthetic oligonucleotide; CTA chr11 5250878 5250899 5250883 5250878 -
aagtacactaatattcgagtta

SEQ ID NO: 139841 - DNA, 22 bp, Artificial Sequence
  Synthetic oligonucleotide; CTA chr11 5250868 5250889 5250873 5250868 -
atattcgagttataatagtgtg

SEQ ID NO: 139842 - DNA, 22 bp, Artificial Sequence
  Synthetic oligonucleotide; TTC chr11 5250862 5250883 5250867 5250862 -
gagttataatagtgtgtggact

SEQ ID NO: 139843 - DNA, 22 bp, Artificial Sequence
  Synthetic oligonucleotide; TTA chr11 5250856 5250877 5250861 5250856 -
taatagtgtgtggactattagt

SEQ ID NO: 139844 - DNA, 22 bp, Artificial Sequence
  Synthetic oligonucleotide; CTA chr11 5250839 5250860 5250844 5250839 -
ttagtcaataaaaacaaccctt

SEQ ID NO: 139845 - DNA, 22 bp, Artificial Sequence
  Synthetic oligonucleotide; TTA chr11 5250836 5250857 5250841 5250836 -
gtcaataaaaacaacccttgcc

SEQ ID NO: 139846 - DNA, 22 bp, Artificial Sequence
  Synthetic oligonucleotide; CTT chr11 5250817 5250838 5250822 5250817 -
gcctctttagagttgttttcca

SEQ ID NO: 139847 - DNA, 22 bp, Artificial Sequence
  Synthetic oligonucleotide; TTG chr11 5250816 5250837 5250821 5250816 -
cctctttagagttgttttccat

SEQ ID NO: 139848 - DNA, 22 bp, Artificial Sequence
  Synthetic oligonucleotide; CTC chr11 5250812 5250833 5250817 5250812 -
tttagagttgttttccatgtac

SEQ ID NO: 139849 - DNA, 22 bp, Artificial Sequence
  Synthetic oligonucleotide; CTT chr11 5250810 5250831 5250815 5250810 -
tagagttgttttccatgtacac

SEQ ID NO: 139850 - DNA, 22 bp, Artificial Sequence
  Synthetic oligonucleotide; TTT chr11 5250809 5250830 5250814 5250809 -
agagttgttttccatgtacacg

SEQ ID NO: 139851 - DNA, 22 bp, Artificial Sequence
  Synthetic oligonucleotide; TTA chr11 5250808 5250829 5250813 5250808 -
gagttgttttccatgtacacgc

SEQ ID NO: 139852 - DNA, 22 bp, Artificial Sequence
  Synthetic oligonucleotide; TTG chr11 5250802 5250823 5250807 5250802 -
ttttccatgtacacgcacatct

SEQ ID NO: 139853 - DNA, 22 bp, Artificial Sequence
  Synthetic oligonucleotide; TTT chr11 5250799 5250820 5250804 5250799 -
tccatgtacacgcacatcttat

SEQ ID NO: 139854 - DNA, 22 bp, Artificial Sequence
  Synthetic oligonucleotide; TTT chr11 5250798 5250819 5250803 5250798 -
ccatgtacacgcacatcttatg

SEQ ID NO: 139855 - DNA, 22 bp, Artificial Sequence
  Synthetic oligonucleotide; TTC chr11 5250797 5250818 5250802 5250797 -
catgtacacgcacatcttatgt

SEQ ID NO: 139856 - DNA, 22 bp, Artificial Sequence
  Synthetic oligonucleotide; CTT chr11 5250779 5250800 5250784 5250779 -
atgtcttagagtaagattccct

SEQ ID NO: 139857 - DNA, 22 bp, Artificial Sequence
  Synthetic oligonucleotide; TTA chr11 5250778 5250799 5250783 5250778 -
tgtcttagagtaagattccctg

SEQ ID NO: 139858 - DNA, 22 bp, Artificial Sequence
  Synthetic oligonucleotide; CTT chr11 5250772 5250793 5250777 5250772 -
agagtaagattccctgagaagt

SEQ ID NO: 139859 - DNA, 22 bp, Artificial Sequence
  Synthetic oligonucleotide; TTA chr11 5250771 5250792 5250776 5250771 -
gagtaagattccctgagaagtg

SEQ ID NO: 139860 - DNA, 22 bp, Artificial Sequence
  Synthetic oligonucleotide; TTC chr11 5250760 5250781 5250765 5250760 -
cctgagaagtgaacctagcatt

SEQ ID NO: 139861 - DNA, 22 bp, Artificial Sequence
  Synthetic oligonucleotide; CTG chr11 5250756 5250777 5250761 5250756 -
agaagtgaacctagcatttata

SEQ ID NO: 139862 - DNA, 22 bp, Artificial Sequence
  Synthetic oligonucleotide; CTA chr11 5250743 5250764 5250748 5250743 -
gcatttatacaagataattaat

SEQ ID NO: 139863 - DNA, 22 bp, Artificial Sequence
  Synthetic oligonucleotide; TTT chr11 5250737 5250758 5250742 5250737 -
atacaagataattaattctaat

SEQ ID NO: 139864 - DNA, 22 bp, Artificial Sequence
  Synthetic oligonucleotide; TTA chr11 5250736 5250757 5250741 5250736 -
tacaagataattaattctaatc

SEQ ID NO: 139865 - DNA, 22 bp, Artificial Sequence
  Synthetic oligonucleotide; TTA chr11 5250723 5250744 5250728 5250723 -
attctaatccacagtacctgcc

SEQ ID NO: 139866 - DNA, 22 bp, Artificial Sequence
  Synthetic oligonucleotide; TTC chr11 5250719 5250740 5250724 5250719 -
taatccacagtacctgccaaag

SEQ ID NO: 139867 - DNA, 22 bp, Artificial Sequence
  Synthetic oligonucleotide; CTA chr11 5250717 5250738 5250722 5250717 -
atccacagtacctgccaaagaa

SEQ ID NO: 139868 - DNA, 22 bp, Artificial Sequence
  Synthetic oligonucleotide; CTG chr11 5250703 5250724 5250708 5250703 -
ccaaagaacattctaccatcat

SEQ ID NO: 139869 - DNA, 22 bp, Artificial Sequence
  Synthetic oligonucleotide; TTC chr11 5250690 5250711 5250695 5250690 -
taccatcatctttactgagcat

SEQ ID NO: 139870 - DNA, 22 bp, Artificial Sequence
  Synthetic oligonucleotide; CTA chr11 5250688 5250709 5250693 5250688 -
ccatcatctttactgagcatag

SEQ ID NO: 139871 - DNA, 22 bp, Artificial Sequence
  Synthetic oligonucleotide; CTT chr11 5250678 5250699 5250683 5250678 -
tactgagcatagaagagctacg

SEQ ID NO: 139872 - DNA, 22 bp, Artificial Sequence
  Synthetic oligonucleotide; TTT chr11 5250677 5250698 5250682 5250677 -
actgagcatagaagagctacgc

SEQ ID NO: 139873 - DNA, 22 bp, Artificial Sequence
  Synthetic oligonucleotide; TTA chr11 5250676 5250697 5250681 5250676 -
ctgagcatagaagagctacgcc

SEQ ID NO: 139874 - DNA, 22 bp, Artificial Sequence
  Synthetic oligonucleotide; CTG chr11 5250673 5250694 5250678 5250673 -
agcatagaagagctacgccaaa

SEQ ID NO: 139875 - DNA, 22 bp, Artificial Sequence
  Synthetic oligonucleotide; CTA chr11 5250658 5250679 5250663 5250658 -
cgccaaaaccctgggtcatcag

SEQ ID NO: 139876 - DNA, 22 bp, Artificial Sequence
  Synthetic oligonucleotide; CTG chr11 5250645 5250666 5250650 5250645 -
ggtcatcagccagcacacacac

SEQ ID NO: 139877 - DNA, 22 bp, Artificial Sequence
  Synthetic oligonucleotide; CTT chr11 5250621 5250642 5250626 5250621 -
atccagtggtaaatacacatca

SEQ ID NO: 139878 - DNA, 22 bp, Artificial Sequence
  Synthetic oligonucleotide; TTA chr11 5250620 5250641 5250625 5250620 -
tccagtggtaaatacacatcat

SEQ ID NO: 139879 - DNA, 22 bp, Artificial Sequence
  Synthetic oligonucleotide; CTG chr11 5250595 5250616 5250600 5250595 -
gtgtatacatacatacctgaat

SEQ ID NO: 139880 - DNA, 22 bp, Artificial Sequence
  Synthetic oligonucleotide; CTG chr11 5250576 5250597 5250581 5250576 -
aatatggaatcaaatatttttc

SEQ ID NO: 139881 - DNA, 22 bp, Artificial Sequence
  Synthetic oligonucleotide; TTT chr11 5250557 5250578 5250562 5250557 -
ttctaagatgaaacagtcatga

SEQ ID NO: 139882 - DNA, 22 bp, Artificial Sequence
  Synthetic oligonucleotide; TTT chr11 5250556 5250577 5250561 5250556 -
tctaagatgaaacagtcatgat

SEQ ID NO: 139883 - DNA, 22 bp, Artificial Sequence
  Synthetic oligonucleotide; TTT chr11 5250555 5250576 5250560 5250555 -
ctaagatgaaacagtcatgatt

SEQ ID NO: 139884 - DNA, 22 bp, Artificial Sequence
  Synthetic oligonucleotide; TTC chr11 5250554 5250575 5250559 5250554 -
taagatgaaacagtcatgattt

SEQ ID NO: 139885 - DNA, 22 bp, Artificial Sequence
  Synthetic oligonucleotide; CTA chr11 5250552 5250573 5250557 5250552 -
agatgaaacagtcatgatttat

SEQ ID NO: 139886 - DNA, 22 bp, Artificial Sequence
  Synthetic oligonucleotide; TTT chr11 5250532 5250553 5250537 5250532 -
atttcaaataggtacggataag

SEQ ID NO: 139887 - DNA, 22 bp, Artificial Sequence
  Synthetic oligonucleotide; TTA chr11 5250531 5250552 5250536 5250531 -
tttcaaataggtacggataagt

SEQ ID NO: 139888 - DNA, 22 bp, Artificial Sequence
  Synthetic oligonucleotide; TTT chr11 5250528 5250549 5250533 5250528 -
caaataggtacggataagtaga

SEQ ID NO: 139889 - DNA, 22 bp, Artificial Sequence
  Synthetic oligonucleotide; TTC chr11 5250527 5250548 5250532 5250527 -
aaataggtacggataagtagat

SEQ ID NO: 139890 - DNA, 22 bp, Artificial Sequence
  Synthetic oligonucleotide; TTG chr11 5250501 5250522 5250506 5250501 -
aggtaagcattaggtcttatat

SEQ ID NO: 139891 - DNA, 22 bp, Artificial Sequence
  Synthetic oligonucleotide; TTA chr11 5250489 5250510 5250494 5250489 -
ggtcttatattatgtaacacta

SEQ ID NO: 139892 - DNA, 22 bp, Artificial Sequence
  Synthetic oligonucleotide; CTT chr11 5250483 5250504 5250488 5250483 -
atattatgtaacactaatctat

SEQ ID NO: 139893 - DNA, 22 bp, Artificial Sequence
  Synthetic oligonucleotide; TTA chr11 5250482 5250503 5250487 5250482 -
tattatgtaacactaatctatt

SEQ ID NO: 139894 - DNA, 22 bp, Artificial Sequence
  Synthetic oligonucleotide; TTA chr11 5250477 5250498 5250482 5250477 -
tgtaacactaatctattactgc

SEQ ID NO: 139895 - DNA, 22 bp, Artificial Sequence
  Synthetic oligonucleotide; CTA chr11 5250467 5250488 5250472 5250467 -
atctattactgcgctgaaactg

SEQ ID NO: 139896 - DNA, 22 bp, Artificial Sequence
  Synthetic oligonucleotide; CTA chr11 5250462 5250483 5250467 5250462 -
ttactgcgctgaaactgtggct

SEQ ID NO: 139897 - DNA, 22 bp, Artificial Sequence
  Synthetic oligonucleotide; TTA chr11 5250459 5250480 5250464 5250459 -
ctgcgctgaaactgtggcttta

SEQ ID NO: 139898 - DNA, 22 bp, Artificial Sequence
  Synthetic oligonucleotide; CTG chr11 5250456 5250477 5250461 5250456 -
cgctgaaactgtggctttatag

SEQ ID NO: 139899 - DNA, 22 bp, Artificial Sequence
  Synthetic oligonucleotide; CTG chr11 5250451 5250472 5250456 5250451 -
aaactgtggctttatagaaatt

SEQ ID NO: 139900 - DNA, 22 bp, Artificial Sequence
  Synthetic oligonucleotide; CTG chr11 5250445 5250466 5250450 5250445 -
tggctttatagaaattgttttc

SEQ ID NO: 139901 - DNA, 22 bp, Artificial Sequence
  Synthetic oligonucleotide; CTT chr11 5250439 5250460 5250444 5250439 -
tatagaaattgttttcactgca

SEQ ID NO: 139902 - DNA, 22 bp, Artificial Sequence
  Synthetic oligonucleotide; TTT chr11 5250438 5250459 5250443 5250438 -
atagaaattgttttcactgcac

SEQ ID NO: 139903 - DNA, 22 bp, Artificial Sequence
  Synthetic oligonucleotide; TTA chr11 5250437 5250458 5250442 5250437 -
tagaaattgttttcactgcact

SEQ ID NO: 139904 - DNA, 22 bp, Artificial Sequence
  Synthetic oligonucleotide; TTG chr11 5250428 5250449 5250433 5250428 -
ttttcactgcactattgagaaa

SEQ ID NO: 139905 - DNA, 22 bp, Artificial Sequence
  Synthetic oligonucleotide; TTT chr11 5250425 5250446 5250430 5250425 -
tcactgcactattgagaaatta

SEQ ID NO: 139906 - DNA, 22 bp, Artificial Sequence
  Synthetic oligonucleotide; TTT chr11 5250424 5250445 5250429 5250424 -
cactgcactattgagaaattaa

SEQ ID NO: 139907 - DNA, 22 bp, Artificial Sequence
  Synthetic oligonucleotide; TTC chr11 5250423 5250444 5250428 5250423 -
actgcactattgagaaattaag

SEQ ID NO: 139908 - DNA, 22 bp, Artificial Sequence
  Synthetic oligonucleotide; CTG chr11 5250419 5250440 5250424 5250419 -
cactattgagaaattaagagat

SEQ ID NO: 139909 - DNA, 22 bp, Artificial Sequence
  Synthetic oligonucleotide; CTA chr11 5250414 5250435 5250419 5250414 -
ttgagaaattaagagataatgg

SEQ ID NO: 139910 - DNA, 22 bp, Artificial Sequence
  Synthetic oligonucleotide; TTG chr11 5250411 5250432 5250416 5250411 -
agaaattaagagataatggcaa

SEQ ID NO: 139911 - DNA, 22 bp, Artificial Sequence
  Synthetic oligonucleotide; TTA chr11 5250403 5250424 5250408 5250403 -
agagataatggcaaaagtcaca

SEQ ID NO: 139912 - DNA, 22 bp, Artificial Sequence
  Synthetic oligonucleotide; TTC chr11 5250369 5250390 5250374 5250369 -
aaaaagaagtatagcacttttt

SEQ ID NO: 139913 - DNA, 22 bp, Artificial Sequence
  Synthetic oligonucleotide; CTT chr11 5250350 5250371 5250355 5250350 -
tttccttagaaaccactgctaa

SEQ ID NO: 139914 - DNA, 22 bp, Artificial Sequence
  Synthetic oligonucleotide; TTT chr11 5250349 5250370 5250354 5250349 -
ttccttagaaaccactgctaac

SEQ ID NO: 139915 - DNA, 22 bp, Artificial Sequence
  Synthetic oligonucleotide; TTT chr11 5250348 5250369 5250353 5250348 -
tccttagaaaccactgctaact

SEQ ID NO: 139916 - DNA, 22 bp, Artificial Sequence
  Synthetic oligonucleotide; TTT chr11 5250347 5250368 5250352 5250347 -
ccttagaaaccactgctaactg

SEQ ID NO: 139917 - DNA, 22 bp, Artificial Sequence
  Synthetic oligonucleotide; TTC chr11 5250346 5250367 5250351 5250346 -
cttagaaaccactgctaactga

SEQ ID NO: 139918 - DNA, 22 bp, Artificial Sequence
  Synthetic oligonucleotide; CTT chr11 5250343 5250364 5250348 5250343 -
agaaaccactgctaactgaaag

SEQ ID NO: 139919 - DNA, 22 bp, Artificial Sequence
  Synthetic oligonucleotide; TTA chr11 5250342 5250363 5250347 5250342 -
gaaaccactgctaactgaaaga

SEQ ID NO: 139920 - DNA, 22 bp, Artificial Sequence
  Synthetic oligonucleotide; CTG chr11 5250332 5250353 5250337 5250332 -
ctaactgaaagagactaagatt

SEQ ID NO: 139921 - DNA, 22 bp, Artificial Sequence
  Synthetic oligonucleotide; CTA chr11 5250329 5250350 5250334 5250329 -
actgaaagagactaagatttgt

SEQ ID NO: 139922 - DNA, 22 bp, Artificial Sequence
  Synthetic oligonucleotide; CTG chr11 5250325 5250346 5250330 5250325 -
aaagagactaagatttgtcccg

SEQ ID NO: 139923 - DNA, 22 bp, Artificial Sequence
  Synthetic oligonucleotide; CTA chr11 5250315 5250336 5250320 5250315 -
agatttgtcccgtcaaaaatcc

SEQ ID NO: 139924 - DNA, 22 bp, Artificial Sequence
  Synthetic oligonucleotide; TTT chr11 5250309 5250330 5250314 5250309 -
gtcccgtcaaaaatcctggacc

SEQ ID NO: 139925 - DNA, 22 bp, Artificial Sequence
  Synthetic oligonucleotide; TTG chr11 5250308 5250329 5250313 5250308 -
tcccgtcaaaaatcctggacct

SEQ ID NO: 139926 - DNA, 22 bp, Artificial Sequence
  Synthetic oligonucleotide; CTG chr11 5250291 5250312 5250296 5250291 -
gacctatgcctaaaacacattt

SEQ ID NO: 139927 - DNA, 22 bp, Artificial Sequence
  Synthetic oligonucleotide; CTA chr11 5250285 5250306 5250290 5250285 -
tgcctaaaacacatttcacaat

SEQ ID NO: 139928 - DNA, 22 bp, Artificial Sequence
  Synthetic oligonucleotide; CTA chr11 5250279 5250300 5250284 5250279 -
aaacacatttcacaatccctga

SEQ ID NO: 139929 - DNA, 22 bp, Artificial Sequence
  Synthetic oligonucleotide; TTT chr11 5250269 5250290 5250274 5250269 -
cacaatccctgaacttttcaaa

SEQ ID NO: 139930 - DNA, 22 bp, Artificial Sequence
  Synthetic oligonucleotide; TTC chr11 5250268 5250289 5250273 5250268 -
acaatccctgaacttttcaaaa

SEQ ID NO: 139931 - DNA, 22 bp, Artificial Sequence
  Synthetic oligonucleotide; CTG chr11 5250258 5250279 5250263 5250258 -
aacttttcaaaaattggtacat

SEQ ID NO: 139932 - DNA, 22 bp, Artificial Sequence
  Synthetic oligonucleotide; CTT chr11 5250253 5250274 5250258 5250253 -
ttcaaaaattggtacatgcttt

SEQ ID NO: 139933 - DNA, 22 bp, Artificial Sequence
  Synthetic oligonucleotide; TTT chr11 5250252 5250273 5250257 5250252 -
tcaaaaattggtacatgcttta

SEQ ID NO: 139934 - DNA, 22 bp, Artificial Sequence
  Synthetic oligonucleotide; TTT chr11 5250251 5250272 5250256 5250251 -
caaaaattggtacatgctttag

SEQ ID NO: 139935 - DNA, 22 bp, Artificial Sequence
  Synthetic oligonucleotide; TTC chr11 5250250 5250271 5250255 5250250 -
aaaaattggtacatgctttagc

SEQ ID NO: 139936 - DNA, 22 bp, Artificial Sequence
  Synthetic oligonucleotide; TTG chr11 5250242 5250263 5250247 5250242 -
gtacatgctttagctttaaact

SEQ ID NO: 139937 - DNA, 22 bp, Artificial Sequence
  Synthetic oligonucleotide; CTT chr11 5250232 5250253 5250237 5250232 -
tagctttaaactacaggcctca

SEQ ID NO: 139938 - DNA, 22 bp, Artificial Sequence
  Synthetic oligonucleotide; TTT chr11 5250231 5250252 5250236 5250231 -
agctttaaactacaggcctcac

SEQ ID NO: 139939 - DNA, 22 bp, Artificial Sequence
  Synthetic oligonucleotide; TTA chr11 5250230 5250251 5250235 5250230 -
gctttaaactacaggcctcact

SEQ ID NO: 139940 - DNA, 22 bp, Artificial Sequence
  Synthetic oligonucleotide; CTT chr11 5250226 5250247 5250231 5250226 -
taaactacaggcctcactggag

SEQ ID NO: 139941 - DNA, 22 bp, Artificial Sequence
  Synthetic oligonucleotide; TTT chr11 5250225 5250246 5250230 5250225 -
aaactacaggcctcactggagc

SEQ ID NO: 139942 - DNA, 22 bp, Artificial Sequence
  Synthetic oligonucleotide; TTA chr11 5250224 5250245 5250229 5250224 -
aactacaggcctcactggagct

SEQ ID NO: 139943 - DNA, 22 bp, Artificial Sequence
  Synthetic oligonucleotide; CTA chr11 5250219 5250240 5250224 5250219 -
caggcctcactggagctagaga

SEQ ID NO: 139944 - DNA, 22 bp, Artificial Sequence
  Synthetic oligonucleotide; CTC chr11 5250211 5250232 5250216 5250211 -
actggagctagagacaagaagg

SEQ ID NO: 139945 - DNA, 22 bp, Artificial Sequence
  Synthetic oligonucleotide; CTG chr11 5250207 5250228 5250212 5250207 -
gagctagagacaagaaggtaaa

SEQ ID NO: 139946 - DNA, 22 bp, Artificial Sequence
  Synthetic oligonucleotide; CTA chr11 5250201 5250222 5250206 5250201 -
gagacaagaaggtaaaaaacgg

SEQ ID NO: 139947 - DNA, 22 bp, Artificial Sequence
  Synthetic oligonucleotide; CTG chr11 5250176 5250197 5250181 5250176 -
acaaaagaagtcctggtatcct

SEQ ID NO: 139948 - DNA, 22 bp, Artificial Sequence
  Synthetic oligonucleotide; CTG chr11 5250161 5250182 5250166 5250161 -
gtatcctctatgatgggagaag

SEQ ID NO: 139949 - DNA, 22 bp, Artificial Sequence
  Synthetic oligonucleotide; CTC chr11 5250153 5250174 5250158 5250153 -
tatgatgggagaaggaaactag

SEQ ID NO: 139950 - DNA, 22 bp, Artificial Sequence
  Synthetic oligonucleotide; CTA chr11 5250151 5250172 5250156 5250151 -
tgatgggagaaggaaactagct

SEQ ID NO: 139951 - DNA, 22 bp, Artificial Sequence
  Synthetic oligonucleotide; CTA chr11 5250132 5250153 5250137 5250132 -
gctaaagggaagaataaattag

SEQ ID NO: 139952 - DNA, 22 bp, Artificial Sequence
  Synthetic oligonucleotide; CTA chr11 5250128 5250149 5250133 5250128 -
aagggaagaataaattagagaa

SEQ ID NO: 139953 - DNA, 22 bp, Artificial Sequence
  Synthetic oligonucleotide; TTA chr11 5250111 5250132 5250116 5250111 -
gagaaaaactggaatgactgaa

SEQ ID NO: 139954 - DNA, 22 bp, Artificial Sequence
  Synthetic oligonucleotide; CTG chr11 5250100 5250121 5250105 5250100 -
gaatgactgaatcggaacaagg

SEQ ID NO: 139955 - DNA, 22 bp, Artificial Sequence
  Synthetic oligonucleotide; CTG chr11 5250091 5250112 5250096 5250091 -
aatcggaacaaggcaaaggcta

SEQ ID NO: 139956 - DNA, 22 bp, Artificial Sequence
  Synthetic oligonucleotide; CTA chr11 5250069 5250090 5250074 5250069 -
taaaaaaaattagcagtatcct

SEQ ID NO: 139957 - DNA, 22 bp, Artificial Sequence
  Synthetic oligonucleotide; TTA chr11 5250057 5250078 5250062 5250057 -
gcagtatcctcttgggggcccc

SEQ ID NO: 139958 - DNA, 22 bp, Artificial Sequence
  Synthetic oligonucleotide; CTC chr11 5250046 5250067 5250051 5250046 -
ttgggggccccttccccacact

SEQ ID NO: 139959 - DNA, 22 bp, Artificial Sequence
  Synthetic oligonucleotide; CTT chr11 5250044 5250065 5250049 5250044 -
gggggccccttccccacactat

SEQ ID NO: 139960 - DNA, 22 bp, Artificial Sequence
  Synthetic oligonucleotide; TTG chr11 5250043 5250064 5250048 5250043 -
ggggccccttccccacactatc

SEQ ID NO: 139961 - DNA, 22 bp, Artificial Sequence
  Synthetic oligonucleotide; CTT chr11 5250033 5250054 5250038 5250033 -
ccccacactatctcaatgcaaa

SEQ ID NO: 139962 - DNA, 22 bp, Artificial Sequence
  Synthetic oligonucleotide; TTC chr11 5250032 5250053 5250037 5250032 -
cccacactatctcaatgcaaat

SEQ ID NO: 139963 - DNA, 22 bp, Artificial Sequence
  Synthetic oligonucleotide; CTA chr11 5250023 5250044 5250028 5250023 -
tctcaatgcaaatatctgtctg

SEQ ID NO: 139964 - DNA, 22 bp, Artificial Sequence
  Synthetic oligonucleotide; CTC chr11 5250019 5250040 5250024 5250019 -
aatgcaaatatctgtctgaaac

SEQ ID NO: 139965 - DNA, 22 bp, Artificial Sequence
  Synthetic oligonucleotide; CTG chr11 5250005 5250026 5250010 5250005 -
tctgaaacggtccctggctaaa

SEQ ID NO: 139966 - DNA, 22 bp, Artificial Sequence
  Synthetic oligonucleotide; CTG chr11 5250001 5250022 5250006 5250001 -
aaacggtccctggctaaactcc

SEQ ID NO: 139967 - DNA, 22 bp, Artificial Sequence
  Synthetic oligonucleotide; CTG chr11 5249989 5250010 5249994 5249989 -
gctaaactccacccatgggttg

SEQ ID NO: 139968 - DNA, 22 bp, Artificial Sequence
  Synthetic oligonucleotide; CTA chr11 5249985 5250006 5249990 5249985 -
aactccacccatgggttggcca

SEQ ID NO: 139969 - DNA, 22 bp, Artificial Sequence
  Synthetic oligonucleotide; CTC chr11 5249980 5250001 5249985 5249980 -
cacccatgggttggccagcctt

SEQ ID NO: 139970 - DNA, 22 bp, Artificial Sequence
  Synthetic oligonucleotide; TTG chr11 5249967 5249988 5249972 5249967 -
gccagccttgccttgaccaata

SEQ ID NO: 139971 - DNA, 22 bp, Artificial Sequence
  Synthetic oligonucleotide; CTT chr11 5249958 5249979 5249963 5249958 -
gccttgaccaatagccttgaca

SEQ ID NO: 139972 - DNA, 22 bp, Artificial Sequence
  Synthetic oligonucleotide; TTG chr11 5249957 5249978 5249962 5249957 -
ccttgaccaatagccttgacaa

SEQ ID NO: 139973 - DNA, 22 bp, Artificial Sequence
  Synthetic oligonucleotide; CTT chr11 5249953 5249974 5249958 5249953 -
gaccaatagccttgacaaggca

SEQ ID NO: 139974 - DNA, 22 bp, Artificial Sequence
  Synthetic oligonucleotide; TTG chr11 5249952 5249973 5249957 5249952 -
accaatagccttgacaaggcaa

SEQ ID NO: 139975 - DNA, 22 bp, Artificial Sequence
  Synthetic oligonucleotide; CTT chr11 5249940 5249961 5249945 5249940 -
gacaaggcaaacttgaccaata

SEQ ID NO: 139976 - DNA, 22 bp, Artificial Sequence
  Synthetic oligonucleotide; TTG chr11 5249939 5249960 5249944 5249939 -
acaaggcaaacttgaccaatag

SEQ ID NO: 139977 - DNA, 22 bp, Artificial Sequence
  Synthetic oligonucleotide; CTT chr11 5249926 5249947 5249931 5249926 -
gaccaatagtcttagagtatcc

SEQ ID NO: 139978 - DNA, 22 bp, Artificial Sequence
  Synthetic oligonucleotide; TTG chr11 5249925 5249946 5249930 5249925 -
accaatagtcttagagtatcca

SEQ ID NO: 139979 - DNA, 22 bp, Artificial Sequence
  Synthetic oligonucleotide; CTT chr11 5249913 5249934 5249918 5249913 -
agagtatccagtgaggccaggg

SEQ ID NO: 139980 - DNA, 22 bp, Artificial Sequence
  Synthetic oligonucleotide; TTA chr11 5249912 5249933 5249917 5249912 -
gagtatccagtgaggccagggg

SEQ ID NO: 139981 - DNA, 22 bp, Artificial Sequence
  Synthetic oligonucleotide; CTG chr11 5249880 5249901 5249885 5249880 -
gctagggatgaagaataaaagg

SEQ ID NO: 139982 - DNA, 22 bp, Artificial Sequence
  Synthetic oligonucleotide; CTA chr11 5249876 5249897 5249881 5249876 -
gggatgaagaataaaaggaagc

SEQ ID NO: 139983 - DNA, 22 bp, Artificial Sequence
  Synthetic oligonucleotide; CTT chr11 5249848 5249869 5249853 5249848 -
cagcagttccacacactcgctt

SEQ ID NO: 139984 - DNA, 22 bp, Artificial Sequence
  Synthetic oligonucleotide; TTC chr11 5249847 5249868 5249852 5249847 -
agcagttccacacactcgcttc

SEQ ID NO: 139985 - DNA, 22 bp, Artificial Sequence
  Synthetic oligonucleotide; TTC chr11 5249839 5249860 5249844 5249839 -
cacacactcgcttctggaacgt

SEQ ID NO: 139986 - DNA, 22 bp, Artificial Sequence
  Synthetic oligonucleotide; CTC chr11 5249830 5249851 5249835 5249830 -
gcttctggaacgtctgaggtta

SEQ ID NO: 139987 - DNA, 22 bp, Artificial Sequence
  Synthetic oligonucleotide; CTT chr11 5249826 5249847 5249831 5249826 -
ctggaacgtctgaggttatcaa

SEQ ID NO: 139988 - DNA, 22 bp, Artificial Sequence
  Synthetic oligonucleotide; TTC chr11 5249825 5249846 5249830 5249825 -
tggaacgtctgaggttatcaat

SEQ ID NO: 139989 - DNA, 22 bp, Artificial Sequence
  Synthetic oligonucleotide; CTG chr11 5249823 5249844 5249828 5249823 -
gaacgtctgaggttatcaataa

SEQ ID NO: 139990 - DNA, 22 bp, Artificial Sequence
  Synthetic oligonucleotide; CTG chr11 5249814 5249835 5249819 5249814 -
aggttatcaataagctcctagt

SEQ ID NO: 139991 - DNA, 22 bp, Artificial Sequence
  Synthetic oligonucleotide; TTA chr11 5249808 5249829 5249813 5249808 -
tcaataagctcctagtccagac

SEQ ID NO: 139992 - DNA, 22 bp, Artificial Sequence
  Synthetic oligonucleotide; CTC chr11 5249797 5249818 5249802 5249797 -
ctagtccagacgccatgggtca

SEQ ID NO: 139993 - DNA, 22 bp, Artificial Sequence
  Synthetic oligonucleotide; CTA chr11 5249794 5249815 5249799 5249794 -
gtccagacgccatgggtcattt

SEQ ID NO: 139994 - DNA, 22 bp, Artificial Sequence
  Synthetic oligonucleotide; TTT chr11 5249772 5249793 5249777 5249772 -
cacagaggaggacaaggctact

SEQ ID NO: 139995 - DNA, 22 bp, Artificial Sequence
  Synthetic oligonucleotide; TTC chr11 5249771 5249792 5249776 5249771 -
acagaggaggacaaggctacta

SEQ ID NO: 139996 - DNA, 22 bp, Artificial Sequence
  Synthetic oligonucleotide; CTA chr11 5249752 5249773 5249757 5249752 -
ctatcacaagcctgtggggcaa

SEQ ID NO: 139997 - DNA, 22 bp, Artificial Sequence
  Synthetic oligonucleotide; CTA chr11 5249749 5249770 5249754 5249749 -
tcacaagcctgtggggcaaggt

SEQ ID NO: 139998 - DNA, 22 bp, Artificial Sequence
  Synthetic oligonucleotide; CTG chr11 5249738 5249759 5249743 5249738 -
tggggcaaggtgaatgtggaag

SEQ ID NO: 139999 - DNA, 22 bp, Artificial Sequence
  Synthetic oligonucleotide; CTG chr11 5249710 5249731 5249715 5249710 -
gaggagaaaccctgggaaggta

SEQ ID NO: 140000 - DNA, 22 bp, Artificial Sequence
  Synthetic oligonucleotide; CTG chr11 5249696 5249717 5249701 5249696 -
ggaaggtaggctctggtgacca

SEQ ID NO: 140001 - DNA, 22 bp, Artificial Sequence
  Synthetic oligonucleotide; CTC chr11 5249683 5249704 5249688 5249683 -
tggtgaccaggacaagggaggg

SEQ ID NO: 140002 - DNA, 22 bp, Artificial Sequence
  Synthetic oligonucleotide; CTG chr11 5249681 5249702 5249686 5249681 -
gtgaccaggacaagggagggaa

SEQ ID NO: 140003 - DNA, 22 bp, Artificial Sequence
  Synthetic oligonucleotide; CTG chr11 5249647 5249668 5249652 5249647 -
tgcctggcaaaagtccaggtcg

SEQ ID NO: 140004 - DNA, 22 bp, Artificial Sequence
  Synthetic oligonucleotide; CTG chr11 5249641 5249662 5249646 5249641 -
gcaaaagtccaggtcgcttctc

SEQ ID NO: 140005 - DNA, 22 bp, Artificial Sequence
  Synthetic oligonucleotide; CTT chr11 5249622 5249643 5249627 5249622 -
ctcaggatttgtggcaccttct

SEQ ID NO: 140006 - DNA, 22 bp, Artificial Sequence
  Synthetic oligonucleotide; TTC chr11 5249621 5249642 5249626 5249621 -
tcaggatttgtggcaccttctg

SEQ ID NO: 140007 - DNA, 22 bp, Artificial Sequence
  Synthetic oligonucleotide; CTC chr11 5249619 5249640 5249624 5249619 -
aggatttgtggcaccttctgac

SEQ ID NO: 140008 - DNA, 22 bp, Artificial Sequence
  Synthetic oligonucleotide; TTT chr11 5249612 5249633 5249617 5249612 -
gtggcaccttctgactgtcaaa

SEQ ID NO: 140009 - DNA, 22 bp, Artificial Sequence
  Synthetic oligonucleotide; TTG chr11 5249611 5249632 5249616 5249611 -
tggcaccttctgactgtcaaac

SEQ ID NO: 140010 - DNA, 22 bp, Artificial Sequence
  Synthetic oligonucleotide; CTT chr11 5249602 5249623 5249607 5249602 -
ctgactgtcaaactgttcttgt

SEQ ID NO: 140011 - DNA, 22 bp, Artificial Sequence
  Synthetic oligonucleotide; TTC chr11 5249601 5249622 5249606 5249601 -
tgactgtcaaactgttcttgtc

SEQ ID NO: 140012 - DNA, 22 bp, Artificial Sequence
  Synthetic oligonucleotide; CTG chr11 5249599 5249620 5249604 5249599 -
actgtcaaactgttcttgtcaa

SEQ ID NO: 140013 - DNA, 22 bp, Artificial Sequence
  Synthetic oligonucleotide; CTG chr11 5249595 5249616 5249600 5249595 -
tcaaactgttcttgtcaatctc

SEQ ID NO: 140014 - DNA, 22 bp, Artificial Sequence
  Synthetic oligonucleotide; CTG chr11 5249587 5249608 5249592 5249587 -
ttcttgtcaatctcacaggctc

SEQ ID NO: 140015 - DNA, 22 bp, Artificial Sequence
  Synthetic oligonucleotide; TTC chr11 5249584 5249605 5249589 5249584 -
ttgtcaatctcacaggctcctg

SEQ ID NO: 140016 - DNA, 22 bp, Artificial Sequence
  Synthetic oligonucleotide; CTT chr11 5249582 5249603 5249587 5249582 -
gtcaatctcacaggctcctggt

SEQ ID NO: 140017 - DNA, 22 bp, Artificial Sequence
  Synthetic oligonucleotide; TTG chr11 5249581 5249602 5249586 5249581 -
tcaatctcacaggctcctggtt

SEQ ID NO: 140018 - DNA, 22 bp, Artificial Sequence
  Synthetic oligonucleotide; CTC chr11 5249573 5249594 5249578 5249573 -
acaggctcctggttgtctaccc

SEQ ID NO: 140019 - DNA, 22 bp, Artificial Sequence
  Synthetic oligonucleotide; CTC chr11 5249565 5249586 5249570 5249565 -
ctggttgtctacccatggaccc

SEQ ID NO: 140020 - DNA, 22 bp, Artificial Sequence
  Synthetic oligonucleotide; CTG chr11 5249562 5249583 5249567 5249562 -
gttgtctacccatggacccaga

SEQ ID NO: 140021 - DNA, 22 bp, Artificial Sequence
  Synthetic oligonucleotide; TTG chr11 5249558 5249579 5249563 5249558 -
tctacccatggacccagaggtt

SEQ ID NO: 140022 - DNA, 22 bp, Artificial Sequence
  Synthetic oligonucleotide; CTA chr11 5249554 5249575 5249559 5249554 -
cccatggacccagaggttcttt

SEQ ID NO: 140023 - DNA, 22 bp, Artificial Sequence
  Synthetic oligonucleotide; TTC chr11 5249535 5249556 5249540 5249535 -
tttgacagctttggcaacctgt

SEQ ID NO: 140024 - DNA, 22 bp, Artificial Sequence
  Synthetic oligonucleotide; CTT chr11 5249533 5249554 5249538 5249533 -
tgacagctttggcaacctgtcc

SEQ ID NO: 140025 - DNA, 22 bp, Artificial Sequence
  Synthetic oligonucleotide; TTT chr11 5249532 5249553 5249537 5249532 -
gacagctttggcaacctgtcct

SEQ ID NO: 140026 - DNA, 22 bp, Artificial Sequence
  Synthetic oligonucleotide; TTG chr11 5249531 5249552 5249536 5249531 -
acagctttggcaacctgtcctc

SEQ ID NO: 140027 - DNA, 22 bp, Artificial Sequence
  Synthetic oligonucleotide; CTT chr11 5249524 5249545 5249529 5249524 -
tggcaacctgtcctctgcctct

SEQ ID NO: 140028 - DNA, 22 bp, Artificial Sequence
  Synthetic oligonucleotide; TTT chr11 5249523 5249544 5249528 5249523 -
ggcaacctgtcctctgcctctg

SEQ ID NO: 140029 - DNA, 22 bp, Artificial Sequence
  Synthetic oligonucleotide; TTG chr11 5249522 5249543 5249527 5249522 -
gcaacctgtcctctgcctctgc

SEQ ID NO: 140030 - DNA, 22 bp, Artificial Sequence
  Synthetic oligonucleotide; CTG chr11 5249514 5249535 5249519 5249514 -
tcctctgcctctgccatcatgg

SEQ ID NO: 140031 - DNA, 22 bp, Artificial Sequence
  Synthetic oligonucleotide; CTC chr11 5249509 5249530 5249514 5249509 -
tgcctctgccatcatgggcaac

SEQ ID NO: 140032 - DNA, 22 bp, Artificial Sequence
  Synthetic oligonucleotide; CTG chr11 5249507 5249528 5249512 5249507 -
cctctgccatcatgggcaaccc

SEQ ID NO: 140033 - DNA, 22 bp, Artificial Sequence
  Synthetic oligonucleotide; CTC chr11 5249503 5249524 5249508 5249503 -
tgccatcatgggcaaccccaaa

SEQ ID NO: 140034 - DNA, 22 bp, Artificial Sequence
  Synthetic oligonucleotide; CTG chr11 5249501 5249522 5249506 5249501 -
ccatcatgggcaaccccaaagt

SEQ ID NO: 140035 - DNA, 22 bp, Artificial Sequence
  Synthetic oligonucleotide; CTG chr11 5249454 5249475 5249459 5249454 -
acttccttgggagatgccacaa

SEQ ID NO: 140036 - DNA, 22 bp, Artificial Sequence
  Synthetic oligonucleotide; CTT chr11 5249450 5249471 5249455 5249450 -
ccttgggagatgccacaaagca

SEQ ID NO: 140037 - DNA, 22 bp, Artificial Sequence
  Synthetic oligonucleotide; TTC chr11 5249449 5249470 5249454 5249449 -
cttgggagatgccacaaagcac

SEQ ID NO: 140038 - DNA, 22 bp, Artificial Sequence
  Synthetic oligonucleotide; CTT chr11 5249446 5249467 5249451 5249446 -
gggagatgccacaaagcacctg

SEQ ID NO: 140039 - DNA, 22 bp, Artificial Sequence
  Synthetic oligonucleotide; TTG chr11 5249445 5249466 5249450 5249445 -
ggagatgccacaaagcacctgg

SEQ ID NO: 140040 - DNA, 22 bp, Artificial Sequence
  Synthetic oligonucleotide; CTG chr11 5249424 5249445 5249429 5249424 -
gatgatctcaagggcacctttg

SEQ ID NO: 140041 - DNA, 22 bp, Artificial Sequence
  Synthetic oligonucleotide; CTC chr11 5249415 5249436 5249420 5249415 -
aagggcacctttgcccagctga

SEQ ID NO: 140042 - DNA, 22 bp, Artificial Sequence
  Synthetic oligonucleotide; CTT chr11 5249404 5249425 5249409 5249404 -
tgcccagctgagtgaactgcac

SEQ ID NO: 140043 - DNA, 22 bp, Artificial Sequence
  Synthetic oligonucleotide; TTT chr11 5249403 5249424 5249408 5249403 -
gcccagctgagtgaactgcact

SEQ ID NO: 140044 - DNA, 22 bp, Artificial Sequence
  Synthetic oligonucleotide; TTG chr11 5249402 5249423 5249407 5249402 -
cccagctgagtgaactgcactg

SEQ ID NO: 140045 - DNA, 22 bp, Artificial Sequence
  Synthetic oligonucleotide; CTG chr11 5249394 5249415 5249399 5249394 -
agtgaactgcactgtgacaagc

SEQ ID NO: 140046 - DNA, 22 bp, Artificial Sequence
  Synthetic oligonucleotide; CTG chr11 5249385 5249406 5249390 5249385 -
cactgtgacaagctgcatgtgg

SEQ ID NO: 140047 - DNA, 22 bp, Artificial Sequence
  Synthetic oligonucleotide; CTG chr11 5249380 5249401 5249385 5249380 -
tgacaagctgcatgtggatcct

SEQ ID NO: 140048 - DNA, 22 bp, Artificial Sequence
  Synthetic oligonucleotide; CTG chr11 5249370 5249391 5249375 5249370 -
catgtggatcctgagaacttca

SEQ ID NO: 140049 - DNA, 22 bp, Artificial Sequence
  Synthetic oligonucleotide; CTG chr11 5249357 5249378 5249362 5249357 -
agaacttcaaggtgagtccagg

SEQ ID NO: 140050 - DNA, 22 bp, Artificial Sequence
  Synthetic oligonucleotide; CTT chr11 5249350 5249371 5249355 5249350 -
caaggtgagtccaggagatgtt

SEQ ID NO: 140051 - DNA, 22 bp, Artificial Sequence
  Synthetic oligonucleotide; TTC chr11 5249349 5249370 5249354 5249349 -
aaggtgagtccaggagatgttt

SEQ ID NO: 140052 - DNA, 22 bp, Artificial Sequence
  Synthetic oligonucleotide; TTT chr11 5249327 5249348 5249332 5249327 -
cagccctgttgcctttagtctc

SEQ ID NO: 140053 - DNA, 22 bp, Artificial Sequence
  Synthetic oligonucleotide; TTC chr11 5249326 5249347 5249331 5249326 -
agccctgttgcctttagtctcg

SEQ ID NO: 140054 - DNA, 22 bp, Artificial Sequence
  Synthetic oligonucleotide; CTG chr11 5249319 5249340 5249324 5249319 -
ttgcctttagtctcgaggcaac

SEQ ID NO: 140055 - DNA, 22 bp, Artificial Sequence
  Synthetic oligonucleotide; TTG chr11 5249316 5249337 5249321 5249316 -
cctttagtctcgaggcaactta

SEQ ID NO: 140056 - DNA, 22 bp, Artificial Sequence
  Synthetic oligonucleotide; CTT chr11 5249312 5249333 5249317 5249312 -
tagtctcgaggcaacttagaca

SEQ ID NO: 140057 - DNA, 22 bp, Artificial Sequence
  Synthetic oligonucleotide; TTT chr11 5249311 5249332 5249316 5249311 -
agtctcgaggcaacttagacaa

SEQ ID NO: 140058 - DNA, 22 bp, Artificial Sequence
  Synthetic oligonucleotide; TTA chr11 5249310 5249331 5249315 5249310 -
gtctcgaggcaacttagacaac

SEQ ID NO: 140059 - DNA, 22 bp, Artificial Sequence
  Synthetic oligonucleotide; CTC chr11 5249305 5249326 5249310 5249305 -
gaggcaacttagacaacggagt

SEQ ID NO: 140060 - DNA, 22 bp, Artificial Sequence
  Synthetic oligonucleotide; CTT chr11 5249295 5249316 5249300 5249295 -
agacaacggagtattgatctga

SEQ ID NO: 140061 - DNA, 22 bp, Artificial Sequence
  Synthetic oligonucleotide; TTA chr11 5249294 5249315 5249299 5249294 -
gacaacggagtattgatctgag

SEQ ID NO: 140062 - DNA, 22 bp, Artificial Sequence
  Synthetic oligonucleotide; TTG chr11 5249279 5249300 5249284 5249279 -
atctgagcacagcagggtgtga

SEQ ID NO: 140063 - DNA, 22 bp, Artificial Sequence
  Synthetic oligonucleotide; CTG chr11 5249274 5249295 5249279 5249274 -
agcacagcagggtgtgagctgt

SEQ ID NO: 140064 - DNA, 22 bp, Artificial Sequence
  Synthetic oligonucleotide; CTG chr11 5249253 5249274 5249258 5249253 -
tttgaagatactggggttgggg

SEQ ID NO: 140065 - DNA, 22 bp, Artificial Sequence
  Synthetic oligonucleotide; TTT chr11 5249250 5249271 5249255 5249250 -
gaagatactggggttgggggtg

SEQ ID NO: 140066 - DNA, 22 bp, Artificial Sequence
  Synthetic oligonucleotide; TTG chr11 5249249 5249270 5249254 5249249 -
aagatactggggttgggggtga

SEQ ID NO: 140067 - DNA, 22 bp, Artificial Sequence
  Synthetic oligonucleotide; CTG chr11 5249240 5249261 5249245 5249240 -
gggttgggggtgaagaaactgc

SEQ ID NO: 140068 - DNA, 22 bp, Artificial Sequence
  Synthetic oligonucleotide; TTG chr11 5249234 5249255 5249239 5249234 -
ggggtgaagaaactgcagagga

SEQ ID NO: 140069 - DNA, 22 bp, Artificial Sequence
  Synthetic oligonucleotide; CTG chr11 5249219 5249240 5249224 5249219 -
cagaggactaactgggctgaga

SEQ ID NO: 140070 - DNA, 22 bp, Artificial Sequence
  Synthetic oligonucleotide; CTA chr11 5249209 5249230 5249214 5249209 -
actgggctgagacccagtggta

SEQ ID NO: 140071 - DNA, 22 bp, Artificial Sequence
  Synthetic oligonucleotide; CTG chr11 5249205 5249226 5249210 5249205 -
ggctgagacccagtggtaatgt

SEQ ID NO: 140072 - DNA, 22 bp, Artificial Sequence
  Synthetic oligonucleotide; CTG chr11 5249200 5249221 5249205 5249200 -
agacccagtggtaatgttttag

SEQ ID NO: 140073 - DNA, 22 bp, Artificial Sequence
  Synthetic oligonucleotide; TTT chr11 5249181 5249202 5249186 5249181 -
tagggcctaaggagtgcctcta

SEQ ID NO: 140074 - DNA, 22 bp, Artificial Sequence
  Synthetic oligonucleotide; TTT chr11 5249180 5249201 5249185 5249180 -
agggcctaaggagtgcctctaa

SEQ ID NO: 140075 - DNA, 22 bp, Artificial Sequence
  Synthetic oligonucleotide; TTA chr11 5249179 5249200 5249184 5249179 -
gggcctaaggagtgcctctaaa

SEQ ID NO: 140076 - DNA, 22 bp, Artificial Sequence
  Synthetic oligonucleotide; CTA chr11 5249172 5249193 5249177 5249172 -
aggagtgcctctaaaaatctag

SEQ ID NO: 140077 - DNA, 22 bp, Artificial Sequence
  Synthetic oligonucleotide; CTC chr11 5249161 5249182 5249166 5249161 -
taaaaatctagatggacaattt

SEQ ID NO: 140078 - DNA, 22 bp, Artificial Sequence
  Synthetic oligonucleotide; CTA chr11 5249159 5249180 5249164 5249159 -
aaaatctagatggacaattttg

SEQ ID NO: 140079 - DNA, 22 bp, Artificial Sequence
  Synthetic oligonucleotide; CTA chr11 5249151 5249172 5249156 5249151 -
gatggacaattttgactttgag

SEQ ID NO: 140080 - DNA, 22 bp, Artificial Sequence
  Synthetic oligonucleotide; TTT chr11 5249139 5249160 5249144 5249139 -
tgactttgagaaaagagaggtg

SEQ ID NO: 140081 - DNA, 22 bp, Artificial Sequence
  Synthetic oligonucleotide; TTT chr11 5249138 5249159 5249143 5249138 -
gactttgagaaaagagaggtgg

SEQ ID NO: 140082 - DNA, 22 bp, Artificial Sequence
  Synthetic oligonucleotide; TTG chr11 5249137 5249158 5249142 5249137 -
actttgagaaaagagaggtgga

SEQ ID NO: 140083 - DNA, 22 bp, Artificial Sequence
  Synthetic oligonucleotide; CTT chr11 5249133 5249154 5249138 5249133 -
tgagaaaagagaggtggaaatg

SEQ ID NO: 140084 - DNA, 22 bp, Artificial Sequence
  Synthetic oligonucleotide; TTT chr11 5249132 5249153 5249137 5249132 -
gagaaaagagaggtggaaatga

SEQ ID NO: 140085 - DNA, 22 bp, Artificial Sequence
  Synthetic oligonucleotide; TTG chr11 5249131 5249152 5249136 5249131 -
agaaaagagaggtggaaatgag

SEQ ID NO: 140086 - DNA, 22 bp, Artificial Sequence
  Synthetic oligonucleotide; CTT chr11 5249098 5249119 5249103 5249098 -
ttctttattagattccagtaga

SEQ ID NO: 140087 - DNA, 22 bp, Artificial Sequence
  Synthetic oligonucleotide; TTT chr11 5249097 5249118 5249102 5249097 -
tctttattagattccagtagaa

SEQ ID NO: 140088 - DNA, 22 bp, Artificial Sequence
  Synthetic oligonucleotide; TTT chr11 5249096 5249117 5249101 5249096 -
ctttattagattccagtagaaa

SEQ ID NO: 140089 - DNA, 22 bp, Artificial Sequence
  Synthetic oligonucleotide; TTC chr11 5249095 5249116 5249100 5249095 -
tttattagattccagtagaaag

SEQ ID NO: 140090 - DNA, 22 bp, Artificial Sequence
  Synthetic oligonucleotide; CTT chr11 5249093 5249114 5249098 5249093 -
tattagattccagtagaaagaa

SEQ ID NO: 140091 - DNA, 22 bp, Artificial Sequence
  Synthetic oligonucleotide; TTT chr11 5249092 5249113 5249097 5249092 -
attagattccagtagaaagaac

SEQ ID NO: 140092 - DNA, 22 bp, Artificial Sequence
  Synthetic oligonucleotide; TTA chr11 5249091 5249112 5249096 5249091 -
ttagattccagtagaaagaact

SEQ ID NO: 140093 - DNA, 22 bp, Artificial Sequence
  Synthetic oligonucleotide; TTA chr11 5249088 5249109 5249093 5249088 -
gattccagtagaaagaactttc

SEQ ID NO: 140094 - DNA, 22 bp, Artificial Sequence
  Synthetic oligonucleotide; TTC chr11 5249083 5249104 5249088 5249083 -
cagtagaaagaactttcatctt

SEQ ID NO: 140095 - DNA, 22 bp, Artificial Sequence
  Synthetic oligonucleotide; CTT chr11 5249068 5249089 5249073 5249068 -
tcatctttccctcatttttgtt

SEQ ID NO: 140096 - DNA, 22 bp, Artificial Sequence
  Synthetic oligonucleotide; TTT chr11 5249067 5249088 5249072 5249067 -
catctttccctcatttttgttg

SEQ ID NO: 140097 - DNA, 22 bp, Artificial Sequence
  Synthetic oligonucleotide; TTC chr11 5249066 5249087 5249071 5249066 -
atctttccctcatttttgttgt

SEQ ID NO: 140098 - DNA, 22 bp, Artificial Sequence
  Synthetic oligonucleotide; CTT chr11 5249061 5249082 5249066 5249061 -
tccctcatttttgttgttttaa

SEQ ID NO: 140099 - DNA, 22 bp, Artificial Sequence
  Synthetic oligonucleotide; TTT chr11 5249060 5249081 5249065 5249060 -
ccctcatttttgttgttttaaa

SEQ ID NO: 140100 - DNA, 22 bp, Artificial Sequence
  Synthetic oligonucleotide; TTC chr11 5249059 5249080 5249064 5249059 -
cctcatttttgttgttttaaaa

SEQ ID NO: 140101 - DNA, 22 bp, Artificial Sequence
  Synthetic oligonucleotide; CTC chr11 5249055 5249076 5249060 5249055 -
atttttgttgttttaaaacatc

SEQ ID NO: 140102 - DNA, 22 bp, Artificial Sequence
  Synthetic oligonucleotide; TTT chr11 5249051 5249072 5249056 5249051 -
ttgttgttttaaaacatctatc

SEQ ID NO: 140103 - DNA, 22 bp, Artificial Sequence
  Synthetic oligonucleotide; TTT chr11 5249050 5249071 5249055 5249050 -
tgttgttttaaaacatctatct

SEQ ID NO: 140104 - DNA, 22 bp, Artificial Sequence
  Synthetic oligonucleotide; TTT chr11 5249049 5249070 5249054 5249049 -
gttgttttaaaacatctatctg

SEQ ID NO: 140105 - DNA, 22 bp, Artificial Sequence
  Synthetic oligonucleotide; TTG chr11 5249048 5249069 5249053 5249048 -
ttgttttaaaacatctatctgg

SEQ ID NO: 140106 - DNA, 22 bp, Artificial Sequence
  Synthetic oligonucleotide; TTG chr11 5249045 5249066 5249050 5249045 -
ttttaaaacatctatctggagg

SEQ ID NO: 140107 - DNA, 22 bp, Artificial Sequence
  Synthetic oligonucleotide; TTT chr11 5249042 5249063 5249047 5249042 -
taaaacatctatctggaggcag

SEQ ID NO: 140108 - DNA, 22 bp, Artificial Sequence
  Synthetic oligonucleotide; TTT chr11 5249041 5249062 5249046 5249041 -
aaaacatctatctggaggcagg

SEQ ID NO: 140109 - DNA, 22 bp, Artificial Sequence
  Synthetic oligonucleotide; TTA chr11 5249040 5249061 5249045 5249040 -
aaacatctatctggaggcagga

SEQ ID NO: 140110 - DNA, 22 bp, Artificial Sequence
  Synthetic oligonucleotide; CTA chr11 5249031 5249052 5249036 5249031 -
tctggaggcaggacaagtatgg

SEQ ID NO: 140111 - DNA, 22 bp, Artificial Sequence
  Synthetic oligonucleotide; CTG chr11 5249027 5249048 5249032 5249027 -
gaggcaggacaagtatggtcgt

SEQ ID NO: 140112 - DNA, 22 bp, Artificial Sequence
  Synthetic oligonucleotide; TTA chr11 5249003 5249024 5249008 5249003 -
aaaagatgcaggcagaaggcat

SEQ ID NO: 140113 - DNA, 22 bp, Artificial Sequence
  Synthetic oligonucleotide; TTG chr11 5248975 5248996 5248980 5248975 -
gctcagtcaaagtggggaactt

SEQ ID NO: 140114 - DNA, 22 bp, Artificial Sequence
  Synthetic oligonucleotide; CTC chr11 5248971 5248992 5248976 5248971 -
agtcaaagtggggaactttggt

SEQ ID NO: 140115 - DNA, 22 bp, Artificial Sequence
  Synthetic oligonucleotide; CTT chr11 5248953 5248974 5248958 5248953 -
tggtggccaaacatacattgct

SEQ ID NO: 140116 - DNA, 22 bp, Artificial Sequence
  Synthetic oligonucleotide; TTT chr11 5248952 5248973 5248957 5248952 -
ggtggccaaacatacattgcta

SEQ ID NO: 140117 - DNA, 22 bp, Artificial Sequence
  Synthetic oligonucleotide; TTG chr11 5248951 5248972 5248956 5248951 -
gtggccaaacatacattgctaa

SEQ ID NO: 140118 - DNA, 22 bp, Artificial Sequence
  Synthetic oligonucleotide; TTG chr11 5248933 5248954 5248938 5248933 -
ctaaggctattcctatatcagc

SEQ ID NO: 140119 - DNA, 22 bp, Artificial Sequence
  Synthetic oligonucleotide; CTA chr11 5248930 5248951 5248935 5248930 -
aggctattcctatatcagctgg

SEQ ID NO: 140120 - DNA, 22 bp, Artificial Sequence
  Synthetic oligonucleotide; CTA chr11 5248924 5248945 5248929 5248924 -
ttcctatatcagctggacacat

SEQ ID NO: 140121 - DNA, 22 bp, Artificial Sequence
  Synthetic oligonucleotide; TTC chr11 5248921 5248942 5248926 5248921 -
ctatatcagctggacacatata

SEQ ID NO: 140122 - DNA, 22 bp, Artificial Sequence
  Synthetic oligonucleotide; CTA chr11 5248918 5248939 5248923 5248918 -
tatcagctggacacatataaaa

SEQ ID NO: 140123 - DNA, 22 bp, Artificial Sequence
  Synthetic oligonucleotide; CTG chr11 5248909 5248930 5248914 5248909 -
gacacatataaaatgctgctaa

SEQ ID NO: 140124 - DNA, 22 bp, Artificial Sequence
  Synthetic oligonucleotide; CTG chr11 5248891 5248912 5248896 5248891 -
ctaatgcttcattacaaactta

SEQ ID NO: 140125 - DNA, 22 bp, Artificial Sequence
  Synthetic oligonucleotide; CTA chr11 5248888 5248909 5248893 5248888 -
atgcttcattacaaacttatat

SEQ ID NO: 140126 - DNA, 22 bp, Artificial Sequence
  Synthetic oligonucleotide; CTT chr11 5248882 5248903 5248887 5248882 -
cattacaaacttatatccttta

SEQ ID NO: 140127 - DNA, 22 bp, Artificial Sequence
  Synthetic oligonucleotide; TTC chr11 5248881 5248902 5248886 5248881 -
attacaaacttatatcctttaa

SEQ ID NO: 140128 - DNA, 22 bp, Artificial Sequence
  Synthetic oligonucleotide; TTA chr11 5248877 5248898 5248882 5248877 -
caaacttatatcctttaattcc

SEQ ID NO: 140129 - DNA, 22 bp, Artificial Sequence
  Synthetic oligonucleotide; CTT chr11 5248870 5248891 5248875 5248870 -
atatcctttaattccagatggg

SEQ ID NO: 140130 - DNA, 22 bp, Artificial Sequence
  Synthetic oligonucleotide; TTA chr11 5248869 5248890 5248874 5248869 -
tatcctttaattccagatgggg

SEQ ID NO: 140131 - DNA, 22 bp, Artificial Sequence
  Synthetic oligonucleotide; CTT chr11 5248862 5248883 5248867 5248862 -
taattccagatgggggcaaagt

SEQ ID NO: 140132 - DNA, 22 bp, Artificial Sequence
  Synthetic oligonucleotide; TTT chr11 5248861 5248882 5248866 5248861 -
aattccagatgggggcaaagta

SEQ ID NO: 140133 - DNA, 22 bp, Artificial Sequence
  Synthetic oligonucleotide; TTA chr11 5248860 5248881 5248865 5248860 -
attccagatgggggcaaagtat

SEQ ID NO: 140134 - DNA, 22 bp, Artificial Sequence
  Synthetic oligonucleotide; TTC chr11 5248856 5248877 5248861 5248856 -
cagatgggggcaaagtatgtcc

SEQ ID NO: 140135 - DNA, 22 bp, Artificial Sequence
  Synthetic oligonucleotide; TTG chr11 5248816 5248837 5248821 5248816 -
aaacatttgggctggagtagat

SEQ ID NO: 140136 - DNA, 22 bp, Artificial Sequence
  Synthetic oligonucleotide; TTT chr11 5248808 5248829 5248813 5248808 -
gggctggagtagattttgaaag

SEQ ID NO: 140137 - DNA, 22 bp, Artificial Sequence
  Synthetic oligonucleotide; TTG chr11 5248807 5248828 5248812 5248807 -
ggctggagtagattttgaaagt

SEQ ID NO: 140138 - DNA, 22 bp, Artificial Sequence
  Synthetic oligonucleotide; CTG chr11 5248802 5248823 5248807 5248802 -
gagtagattttgaaagtcagct

SEQ ID NO: 140139 - DNA, 22 bp, Artificial Sequence
  Synthetic oligonucleotide; TTT chr11 5248792 5248813 5248797 5248792 -
tgaaagtcagctctgtgtgtgt

SEQ ID NO: 140140 - DNA, 22 bp, Artificial Sequence
  Synthetic oligonucleotide; TTT chr11 5248791 5248812 5248796 5248791 -
gaaagtcagctctgtgtgtgtg

SEQ ID NO: 140141 - DNA, 22 bp, Artificial Sequence
  Synthetic oligonucleotide; TTG chr11 5248790 5248811 5248795 5248790 -
aaagtcagctctgtgtgtgtgt

SEQ ID NO: 140142 - DNA, 22 bp, Artificial Sequence
  Synthetic oligonucleotide; CTC chr11 5248779 5248800 5248784 5248779 -
tgtgtgtgtgtgtgtgtgtgcg

SEQ ID NO: 140143 - DNA, 22 bp, Artificial Sequence
  Synthetic oligonucleotide; CTG chr11 5248777 5248798 5248782 5248777 -
tgtgtgtgtgtgtgtgtgcgcg

SEQ ID NO: 140144 - DNA, 22 bp, Artificial Sequence
  Synthetic oligonucleotide; TTT chr11 5248722 5248743 5248727 5248722 -
cttttaacgtcttcagcctaca

SEQ ID NO: 140145 - DNA, 22 bp, Artificial Sequence
  Synthetic oligonucleotide; TTC chr11 5248721 5248742 5248726 5248721 -
ttttaacgtcttcagcctacaa

SEQ ID NO: 140146 - DNA, 22 bp, Artificial Sequence
  Synthetic oligonucleotide; CTT chr11 5248719 5248740 5248724 5248719 -
ttaacgtcttcagcctacaaca

SEQ ID NO: 140147 - DNA, 22 bp, Artificial Sequence
  Synthetic oligonucleotide; TTT chr11 5248718 5248739 5248723 5248718 -
taacgtcttcagcctacaacat

SEQ ID NO: 140148 - DNA, 22 bp, Artificial Sequence
  Synthetic oligonucleotide; TTT chr11 5248717 5248738 5248722 5248717 -
aacgtcttcagcctacaacata

SEQ ID NO: 140149 - DNA, 22 bp, Artificial Sequence
  Synthetic oligonucleotide; TTA chr11 5248716 5248737 5248721 5248716 -
acgtcttcagcctacaacatac

SEQ ID NO: 140150 - DNA, 22 bp, Artificial Sequence
  Synthetic oligonucleotide; CTT chr11 5248709 5248730 5248714 5248709 -
cagcctacaacatacagggttc

SEQ ID NO: 140151 - DNA, 22 bp, Artificial Sequence
  Synthetic oligonucleotide; TTC chr11 5248708 5248729 5248713 5248708 -
agcctacaacatacagggttca

SEQ ID NO: 140152 - DNA, 22 bp, Artificial Sequence
  Synthetic oligonucleotide; CTA chr11 5248702 5248723 5248707 5248702 -
caacatacagggttcatggtgg

SEQ ID NO: 140153 - DNA, 22 bp, Artificial Sequence
  Synthetic oligonucleotide; TTC chr11 5248687 5248708 5248692 5248687 -
atggtggcaagaagatagcaag

SEQ ID NO: 140154 - DNA, 22 bp, Artificial Sequence
  Synthetic oligonucleotide; TTT chr11 5248661 5248682 5248666 5248661 -
aaattatggccagtgactagtg

SEQ ID NO: 140155 - DNA, 22 bp, Artificial Sequence
  Synthetic oligonucleotide; TTA chr11 5248660 5248681 5248665 5248660 -
aattatggccagtgactagtgc

SEQ ID NO: 140156 - DNA, 22 bp, Artificial Sequence
  Synthetic oligonucleotide; TTA chr11 5248655 5248676 5248660 5248655 -
tggccagtgactagtgcttgaa

SEQ ID NO: 140157 - DNA, 22 bp, Artificial Sequence
  Synthetic oligonucleotide; CTA chr11 5248642 5248663 5248647 5248642 -
gtgcttgaaggggaacaactac

SEQ ID NO: 140158 - DNA, 22 bp, Artificial Sequence
  Synthetic oligonucleotide; CTT chr11 5248636 5248657 5248641 5248636 -
gaaggggaacaactacctgcat

SEQ ID NO: 140159 - DNA, 22 bp, Artificial Sequence
  Synthetic oligonucleotide; TTG chr11 5248635 5248656 5248640 5248635 -
aaggggaacaactacctgcatt

SEQ ID NO: 140160 - DNA, 22 bp, Artificial Sequence
  Synthetic oligonucleotide; CTA chr11 5248621 5248642 5248626 5248621 -
cctgcatttaatgggaaggcaa

SEQ ID NO: 140161 - DNA, 22 bp, Artificial Sequence
  Synthetic oligonucleotide; CTG chr11 5248617 5248638 5248622 5248617 -
catttaatgggaaggcaaaatc

SEQ ID NO: 140162 - DNA, 22 bp, Artificial Sequence
  Synthetic oligonucleotide; TTT chr11 5248612 5248633 5248617 5248612 -
aatgggaaggcaaaatctcagg

SEQ ID NO: 140163 - DNA, 22 bp, Artificial Sequence
  Synthetic oligonucleotide; TTA chr11 5248611 5248632 5248616 5248611 -
atgggaaggcaaaatctcaggc

SEQ ID NO: 140164 - DNA, 22 bp, Artificial Sequence
  Synthetic oligonucleotide; CTC chr11 5248593 5248614 5248598 5248593 -
aggctttgagggaagttaacat

SEQ ID NO: 140165 - DNA, 22 bp, Artificial Sequence
  Synthetic oligonucleotide; CTT chr11 5248587 5248608 5248592 5248587 -
tgagggaagttaacataggctt

SEQ ID NO: 140166 - DNA, 22 bp, Artificial Sequence
  Synthetic oligonucleotide; TTT chr11 5248586 5248607 5248591 5248586 -
gagggaagttaacataggcttg

SEQ ID NO: 140167 - DNA, 22 bp, Artificial Sequence
  Synthetic oligonucleotide; TTG chr11 5248585 5248606 5248590 5248585 -
agggaagttaacataggcttga

SEQ ID NO: 140168 - DNA, 22 bp, Artificial Sequence
  Synthetic oligonucleotide; TTA chr11 5248575 5248596 5248580 5248575 -
acataggcttgattctgggtgg

SEQ ID NO: 140169 - DNA, 22 bp, Artificial Sequence
  Synthetic oligonucleotide; CTT chr11 5248565 5248586 5248570 5248565 -
gattctgggtggaagcttggtg

SEQ ID NO: 140170 - DNA, 22 bp, Artificial Sequence
  Synthetic oligonucleotide; TTG chr11 5248564 5248585 5248569 5248564 -
attctgggtggaagcttggtgt

SEQ ID NO: 140171 - DNA, 22 bp, Artificial Sequence
  Synthetic oligonucleotide; TTC chr11 5248560 5248581 5248565 5248560 -
tgggtggaagcttggtgtgtag

SEQ ID NO: 140172 - DNA, 22 bp, Artificial Sequence
  Synthetic oligonucleotide; CTG chr11 5248558 5248579 5248563 5248558 -
ggtggaagcttggtgtgtagtt

SEQ ID NO: 140173 - DNA, 22 bp, Artificial Sequence
  Synthetic oligonucleotide; CTT chr11 5248547 5248568 5248552 5248547 -
ggtgtgtagttatctggaggcc

SEQ ID NO: 140174 - DNA, 22 bp, Artificial Sequence
  Synthetic oligonucleotide; TTG chr11 5248546 5248567 5248551 5248546 -
gtgtgtagttatctggaggcca

SEQ ID NO: 140175 - DNA, 22 bp, Artificial Sequence
  Synthetic oligonucleotide; TTA chr11 5248535 5248556 5248540 5248535 -
tctggaggccaggctggagctc

SEQ ID NO: 140176 - DNA, 22 bp, Artificial Sequence
  Synthetic oligonucleotide; CTG chr11 5248531 5248552 5248536 5248531 -
gaggccaggctggagctctcag

SEQ ID NO: 140177 - DNA, 22 bp, Artificial Sequence
  Synthetic oligonucleotide; CTG chr11 5248519 5248540 5248524 5248519 -
gagctctcagctcactatgggt

SEQ ID NO: 140178 - DNA, 22 bp, Artificial Sequence
  Synthetic oligonucleotide; CTC chr11 5248513 5248534 5248518 5248513 -
tcagctcactatgggttcatct

SEQ ID NO: 140179 - DNA, 22 bp, Artificial Sequence
  Synthetic oligonucleotide; CTC chr11 5248511 5248532 5248516 5248511 -
agctcactatgggttcatcttt

SEQ ID NO: 140180 - DNA, 22 bp, Artificial Sequence
  Synthetic oligonucleotide; CTC chr11 5248506 5248527 5248511 5248506 -
actatgggttcatctttattgt

SEQ ID NO: 140181 - DNA, 22 bp, Artificial Sequence
  Synthetic oligonucleotide; CTA chr11 5248502 5248523 5248507 5248502 -
tgggttcatctttattgtctcc

SEQ ID NO: 140182 - DNA, 22 bp, Artificial Sequence
  Synthetic oligonucleotide; TTC chr11 5248495 5248516 5248500 5248495 -
atctttattgtctcctttcatc

SEQ ID NO: 140183 - DNA, 22 bp, Artificial Sequence
  Synthetic oligonucleotide; CTT chr11 5248490 5248511 5248495 5248490 -
tattgtctcctttcatctcaac

SEQ ID NO: 140184 - DNA, 22 bp, Artificial Sequence
  Synthetic oligonucleotide; TTT chr11 5248489 5248510 5248494 5248489 -
attgtctcctttcatctcaaca

SEQ ID NO: 140185 - DNA, 22 bp, Artificial Sequence
  Synthetic oligonucleotide; TTA chr11 5248488 5248509 5248493 5248488 -
ttgtctcctttcatctcaacag

SEQ ID NO: 140186 - DNA, 22 bp, Artificial Sequence
  Synthetic oligonucleotide; TTG chr11 5248485 5248506 5248490 5248485 -
tctcctttcatctcaacagctc

SEQ ID NO: 140187 - DNA, 22 bp, Artificial Sequence
  Synthetic oligonucleotide; CTC chr11 5248481 5248502 5248486 5248481 -
ctttcatctcaacagctcctgg

SEQ ID NO: 140188 - DNA, 22 bp, Artificial Sequence
  Synthetic oligonucleotide; CTT chr11 5248478 5248499 5248483 5248478 -
tcatctcaacagctcctgggaa

SEQ ID NO: 140189 - DNA, 22 bp, Artificial Sequence
  Synthetic oligonucleotide; TTT chr11 5248477 5248498 5248482 5248477 -
catctcaacagctcctgggaaa

SEQ ID NO: 140190 - DNA, 22 bp, Artificial Sequence
  Synthetic oligonucleotide; TTC chr11 5248476 5248497 5248481 5248476 -
atctcaacagctcctgggaaat

SEQ ID NO: 140191 - DNA, 22 bp, Artificial Sequence
  Synthetic oligonucleotide; CTC chr11 5248471 5248492 5248476 5248471 -
aacagctcctgggaaatgtgct

SEQ ID NO: 140192 - DNA, 22 bp, Artificial Sequence
  Synthetic oligonucleotide; CTC chr11 5248463 5248484 5248468 5248463 -
ctgggaaatgtgctggtgaccg

SEQ ID NO: 140193 - DNA, 22 bp, Artificial Sequence
  Synthetic oligonucleotide; CTG chr11 5248460 5248481 5248465 5248460 -
ggaaatgtgctggtgaccgttt

SEQ ID NO: 140194 - DNA, 22 bp, Artificial Sequence
  Synthetic oligonucleotide; CTG chr11 5248448 5248469 5248453 5248448 -
gtgaccgttttggcaatccatt

SEQ ID NO: 140195 - DNA, 22 bp, Artificial Sequence
  Synthetic oligonucleotide; TTT chr11 5248438 5248459 5248443 5248438 -
tggcaatccatttcggcaaaga

SEQ ID NO: 140196 - DNA, 22 bp, Artificial Sequence
  Synthetic oligonucleotide; TTT chr11 5248437 5248458 5248442 5248437 -
ggcaatccatttcggcaaagaa

SEQ ID NO: 140197 - DNA, 22 bp, Artificial Sequence
  Synthetic oligonucleotide; TTG chr11 5248436 5248457 5248441 5248436 -
gcaatccatttcggcaaagaat

SEQ ID NO: 140198 - DNA, 22 bp, Artificial Sequence
  Synthetic oligonucleotide; TTT chr11 5248425 5248446 5248430 5248425 -
cggcaaagaattcacccctgag

SEQ ID NO: 140199 - DNA, 22 bp, Artificial Sequence
  Synthetic oligonucleotide; TTC chr11 5248424 5248445 5248429 5248424 -
ggcaaagaattcacccctgagg

SEQ ID NO: 140200 - DNA, 22 bp, Artificial Sequence
  Synthetic oligonucleotide; TTC chr11 5248412 5248433 5248417 5248412 -
acccctgaggtgcaggcttcct

SEQ ID NO: 140201 - DNA, 22 bp, Artificial Sequence
  Synthetic oligonucleotide; CTG chr11 5248405 5248426 5248410 5248405 -
aggtgcaggcttcctggcagaa

SEQ ID NO: 140202 - DNA, 22 bp, Artificial Sequence
  Synthetic oligonucleotide; CTT chr11 5248393 5248414 5248398 5248393 -
cctggcagaagatggtgactgc

SEQ ID NO: 140203 - DNA, 22 bp, Artificial Sequence
  Synthetic oligonucleotide; TTC chr11 5248392 5248413 5248397 5248392 -
ctggcagaagatggtgactgca

SEQ ID NO: 140204 - DNA, 22 bp, Artificial Sequence
  Synthetic oligonucleotide; CTG chr11 5248389 5248410 5248394 5248389 -
gcagaagatggtgactgcagtg

SEQ ID NO: 140205 - DNA, 22 bp, Artificial Sequence
  Synthetic oligonucleotide; CTG chr11 5248372 5248393 5248377 5248372 -
cagtggccagtgccctgtcctc

SEQ ID NO: 140206 - DNA, 22 bp, Artificial Sequence
  Synthetic oligonucleotide; CTG chr11 5248355 5248376 5248360 5248355 -
tcctccagataccactgagctc

SEQ ID NO: 140207 - DNA, 22 bp, Artificial Sequence
  Synthetic oligonucleotide; CTC chr11 5248350 5248371 5248355 5248350 -
cagataccactgagctcactgc

SEQ ID NO: 140208 - DNA, 22 bp, Artificial Sequence
  Synthetic oligonucleotide; CTG chr11 5248338 5248359 5248343 5248338 -
agctcactgcccatgattcaga

SEQ ID NO: 140209 - DNA, 22 bp, Artificial Sequence
  Synthetic oligonucleotide; CTC chr11 5248333 5248354 5248338 5248333 -
actgcccatgattcagagcttt

SEQ ID NO: 140210 - DNA, 22 bp, Artificial Sequence
  Synthetic oligonucleotide; CTG chr11 5248329 5248350 5248334 5248329 -
cccatgattcagagctttcaag

SEQ ID NO: 140211 - DNA, 22 bp, Artificial Sequence
  Synthetic oligonucleotide; TTC chr11 5248319 5248340 5248324 5248319 -
agagctttcaaggataggcttt

SEQ ID NO: 140212 - DNA, 22 bp, Artificial Sequence
  Synthetic oligonucleotide; CTT chr11 5248312 5248333 5248317 5248312 -
tcaaggataggctttattctgc

SEQ ID NO: 140213 - DNA, 22 bp, Artificial Sequence
  Synthetic oligonucleotide; TTT chr11 5248311 5248332 5248316 5248311 -
caaggataggctttattctgca

SEQ ID NO: 140214 - DNA, 22 bp, Artificial Sequence
  Synthetic oligonucleotide; TTC chr11 5248310 5248331 5248315 5248310 -
aaggataggctttattctgcaa

SEQ ID NO: 140215 - DNA, 22 bp, Artificial Sequence
  Synthetic oligonucleotide; CTT chr11 5248298 5248319 5248303 5248298 -
tattctgcaagcaatacaaata

SEQ ID NO: 140216 - DNA, 22 bp, Artificial Sequence
  Synthetic oligonucleotide; TTT chr11 5248297 5248318 5248302 5248297 -
attctgcaagcaatacaaataa

SEQ ID NO: 140217 - DNA, 22 bp, Artificial Sequence
  Synthetic oligonucleotide; TTA chr11 5248296 5248317 5248301 5248296 -
ttctgcaagcaatacaaataat

SEQ ID NO: 140218 - DNA, 22 bp, Artificial Sequence
  Synthetic oligonucleotide; TTC chr11 5248293 5248314 5248298 5248293 -
tgcaagcaatacaaataataaa

SEQ ID NO: 140219 - DNA, 22 bp, Artificial Sequence
  Synthetic oligonucleotide; CTG chr11 5248291 5248312 5248296 5248291 -
caagcaatacaaataataaatc

SEQ ID NO: 140220 - DNA, 22 bp, Artificial Sequence
  Synthetic oligonucleotide; CTA chr11 5248267 5248288 5248272 5248267 -
ttctgctgagagatcacacatg

SEQ ID NO: 140221 - DNA, 22 bp, Artificial Sequence
  Synthetic oligonucleotide; TTC chr11 5248264 5248285 5248269 5248264 -
tgctgagagatcacacatgatt

SEQ ID NO: 140222 - DNA, 22 bp, Artificial Sequence
  Synthetic oligonucleotide; CTG chr11 5248262 5248283 5248267 5248262 -
ctgagagatcacacatgatttt

SEQ ID NO: 140223 - DNA, 22 bp, Artificial Sequence
  Synthetic oligonucleotide; CTG chr11 5248259 5248280 5248264 5248259 -
agagatcacacatgattttctt

SEQ ID NO: 140224 - DNA, 22 bp, Artificial Sequence
  Synthetic oligonucleotide; TTT chr11 5248241 5248262 5248246 5248241 -
tcttcagctcttttttttacat

SEQ ID NO: 140225 - DNA, 22 bp, Artificial Sequence
  Synthetic oligonucleotide; TTT chr11 5248240 5248261 5248245 5248240 -
cttcagctcttttttttacatc

SEQ ID NO: 140226 - DNA, 22 bp, Artificial Sequence
  Synthetic oligonucleotide; TTC chr11 5248239 5248260 5248244 5248239 -
ttcagctcttttttttacatct

SEQ ID NO: 140227 - DNA, 22 bp, Artificial Sequence
  Synthetic oligonucleotide; CTT chr11 5248237 5248258 5248242 5248237 -
cagctcttttttttacatcttt

SEQ ID NO: 140228 - DNA, 22 bp, Artificial Sequence
  Synthetic oligonucleotide; TTC chr11 5248236 5248257 5248241 5248236 -
agctcttttttttacatctttt

SEQ ID NO: 140229 - DNA, 22 bp, Artificial Sequence
  Synthetic oligonucleotide; CTC chr11 5248231 5248252 5248236 5248231 -
ttttttttacatctttttaaat

SEQ ID NO: 140230 - DNA, 22 bp, Artificial Sequence
  Synthetic oligonucleotide; CTT chr11 5248229 5248250 5248234 5248229 -
ttttttacatctttttaaatat

SEQ ID NO: 140231 - DNA, 22 bp, Artificial Sequence
  Synthetic oligonucleotide; TTT chr11 5248228 5248249 5248233 5248228 -
tttttacatctttttaaatata

SEQ ID NO: 140232 - DNA, 22 bp, Artificial Sequence
  Synthetic oligonucleotide; TTT chr11 5248227 5248248 5248232 5248227 -
ttttacatctttttaaatatat

SEQ ID NO: 140233 - DNA, 22 bp, Artificial Sequence
  Synthetic oligonucleotide; TTT chr11 5248226 5248247 5248231 5248226 -
tttacatctttttaaatatatg

SEQ ID NO: 140234 - DNA, 22 bp, Artificial Sequence
  Synthetic oligonucleotide; TTT chr11 5248225 5248246 5248230 5248225 -
ttacatctttttaaatatatga

SEQ ID NO: 140235 - DNA, 22 bp, Artificial Sequence
  Synthetic oligonucleotide; TTT chr11 5248224 5248245 5248229 5248224 -
tacatctttttaaatatatgag

SEQ ID NO: 140236 - DNA, 22 bp, Artificial Sequence
  Synthetic oligonucleotide; TTT chr11 5248223 5248244 5248228 5248223 -
acatctttttaaatatatgagc

SEQ ID NO: 140237 - DNA, 22 bp, Artificial Sequence
  Synthetic oligonucleotide; TTA chr11 5248222 5248243 5248227 5248222 -
catctttttaaatatatgagcc

SEQ ID NO: 140238 - DNA, 22 bp, Artificial Sequence
  Synthetic oligonucleotide; CTT chr11 5248216 5248237 5248221 5248216 -
tttaaatatatgagccacaaag

SEQ ID NO: 140239 - DNA, 22 bp, Artificial Sequence
  Synthetic oligonucleotide; TTT chr11 5248215 5248236 5248220 5248215 -
ttaaatatatgagccacaaagg

SEQ ID NO: 140240 - DNA, 22 bp, Artificial Sequence
  Synthetic oligonucleotide; TTT chr11 5248214 5248235 5248219 5248214 -
taaatatatgagccacaaaggg

SEQ ID NO: 140241 - DNA, 22 bp, Artificial Sequence
  Synthetic oligonucleotide; TTT chr11 5248213 5248234 5248218 5248213 -
aaatatatgagccacaaagggt

SEQ ID NO: 140242 - DNA, 22 bp, Artificial Sequence
  Synthetic oligonucleotide; TTA chr11 5248212 5248233 5248217 5248212 -
aatatatgagccacaaagggtt

SEQ ID NO: 140243 - DNA, 22 bp, Artificial Sequence
  Synthetic oligonucleotide; TTT chr11 5248189 5248210 5248194 5248189 -
atattgagggaagtgtgtatgt

SEQ ID NO: 140244 - DNA, 22 bp, Artificial Sequence
  Synthetic oligonucleotide; TTA chr11 5248188 5248209 5248193 5248188 -
tattgagggaagtgtgtatgtg

SEQ ID NO: 140245 - DNA, 22 bp, Artificial Sequence
  Synthetic oligonucleotide; TTG chr11 5248183 5248204 5248188 5248183 -
agggaagtgtgtatgtgtattt

SEQ ID NO: 140246 - DNA, 22 bp, Artificial Sequence
  Synthetic oligonucleotide; TTT chr11 5248161 5248182 5248166 5248161 -
ctgcatgcctgtttgtgtttgt

SEQ ID NO: 140247 - DNA, 22 bp, Artificial Sequence
  Synthetic oligonucleotide; TTC chr11 5248160 5248181 5248165 5248160 -
tgcatgcctgtttgtgtttgtg

SEQ ID NO: 140248 - DNA, 22 bp, Artificial Sequence
  Synthetic oligonucleotide; CTG chr11 5248158 5248179 5248163 5248158 -
catgcctgtttgtgtttgtggt

SEQ ID NO: 140249 - DNA, 22 bp, Artificial Sequence
  Synthetic oligonucleotide; CTG chr11 5248150 5248171 5248155 5248150 -
tttgtgtttgtggtgtgtgcat

SEQ ID NO: 140250 - DNA, 22 bp, Artificial Sequence
  Synthetic oligonucleotide; TTT chr11 5248147 5248168 5248152 5248147 -
gtgtttgtggtgtgtgcatgct

SEQ ID NO: 140251 - DNA, 22 bp, Artificial Sequence
  Synthetic oligonucleotide; TTG chr11 5248146 5248167 5248151 5248146 -
tgtttgtggtgtgtgcatgctc

SEQ ID NO: 140252 - DNA, 22 bp, Artificial Sequence
  Synthetic oligonucleotide; TTT chr11 5248141 5248162 5248146 5248141 -
gtggtgtgtgcatgctcctcat

SEQ ID NO: 140253 - DNA, 22 bp, Artificial Sequence
  Synthetic oligonucleotide; TTG chr11 5248140 5248161 5248145 5248140 -
tggtgtgtgcatgctcctcatt

SEQ ID NO: 140254 - DNA, 22 bp, Artificial Sequence
  Synthetic oligonucleotide; CTC chr11 5248124 5248145 5248129 5248124 -
ctcatttatttttatatgagat

SEQ ID NO: 140255 - DNA, 22 bp, Artificial Sequence
  Synthetic oligonucleotide; CTC chr11 5248121 5248142 5248126 5248121 -
atttatttttatatgagatgtg

SEQ ID NO: 140256 - DNA, 22 bp, Artificial Sequence
  Synthetic oligonucleotide; TTT chr11 5248117 5248138 5248122 5248117 -
atttttatatgagatgtgcatt

SEQ ID NO: 140257 - DNA, 22 bp, Artificial Sequence
  Synthetic oligonucleotide; TTA chr11 5248116 5248137 5248121 5248116 -
tttttatatgagatgtgcattt

SEQ ID NO: 140258 - DNA, 22 bp, Artificial Sequence
  Synthetic oligonucleotide; TTT chr11 5248113 5248134 5248118 5248113 -
ttatatgagatgtgcattttga

SEQ ID NO: 140259 - DNA, 22 bp, Artificial Sequence
  Synthetic oligonucleotide; TTT chr11 5248112 5248133 5248117 5248112 -
tatatgagatgtgcattttgat

SEQ ID NO: 140260 - DNA, 22 bp, Artificial Sequence
  Synthetic oligonucleotide; TTT chr11 5248111 5248132 5248116 5248111 -
atatgagatgtgcattttgatg

SEQ ID NO: 140261 - DNA, 22 bp, Artificial Sequence
  Synthetic oligonucleotide; TTA chr11 5248110 5248131 5248115 5248110 -
tatgagatgtgcattttgatga

SEQ ID NO: 140262 - DNA, 22 bp, Artificial Sequence
  Synthetic oligonucleotide; TTT chr11 5248094 5248115 5248099 5248094 -
tgatgagcaaataaaagcagta

SEQ ID NO: 140263 - DNA, 22 bp, Artificial Sequence
  Synthetic oligonucleotide; TTT chr11 5248093 5248114 5248098 5248093 -
gatgagcaaataaaagcagtaa

SEQ ID NO: 140264 - DNA, 22 bp, Artificial Sequence
  Synthetic oligonucleotide; TTG chr11 5248092 5248113 5248097 5248092 -
atgagcaaataaaagcagtaaa

SEQ ID NO: 140265 - DNA, 22 bp, Artificial Sequence
  Synthetic oligonucleotide; CTT chr11 5248063 5248084 5248068 5248063 -
gtacacgggagttctgcaagtg

SEQ ID NO: 140266 - DNA, 22 bp, Artificial Sequence
  Synthetic oligonucleotide; TTG chr11 5248062 5248083 5248067 5248062 -
tacacgggagttctgcaagtgg

SEQ ID NO: 140267 - DNA, 22 bp, Artificial Sequence
  Synthetic oligonucleotide; TTC chr11 5248049 5248070 5248054 5248049 -
tgcaagtgggagtaaatggtgt

SEQ ID NO: 140268 - DNA, 22 bp, Artificial Sequence
  Synthetic oligonucleotide; CTG chr11 5248047 5248068 5248052 5248047 -
caagtgggagtaaatggtgtag

SEQ ID NO: 140269 - DNA, 22 bp, Artificial Sequence
  Synthetic oligonucleotide; CTC chr11 5247998 5248019 5248003 5247998 -
tataggacaggacttctcagaa

SEQ ID NO: 140270 - DNA, 22 bp, Artificial Sequence
  Synthetic oligonucleotide; CTA chr11 5247996 5248017 5248001 5247996 -
taggacaggacttctcagaaac

SEQ ID NO: 140271 - DNA, 22 bp, Artificial Sequence
  Synthetic oligonucleotide; CTT chr11 5247983 5248004 5247988 5247983 -
ctcagaaacagatgttttggaa

SEQ ID NO: 140272 - DNA, 22 bp, Artificial Sequence
  Synthetic oligonucleotide; TTC chr11 5247982 5248003 5247987 5247982 -
tcagaaacagatgttttggaag

SEQ ID NO: 140273 - DNA, 22 bp, Artificial Sequence
  Synthetic oligonucleotide; CTC chr11 5247980 5248001 5247985 5247980 -
agaaacagatgttttggaagag

SEQ ID NO: 140274 - DNA, 22 bp, Artificial Sequence
  Synthetic oligonucleotide; TTT chr11 5247966 5247987 5247971 5247966 -
tggaagagatgggaaaaggttc

SEQ ID NO: 140275 - DNA, 22 bp, Artificial Sequence
  Synthetic oligonucleotide; TTT chr11 5247965 5247986 5247970 5247965 -
ggaagagatgggaaaaggttca

SEQ ID NO: 140276 - DNA, 22 bp, Artificial Sequence
  Synthetic oligonucleotide; TTG chr11 5247964 5247985 5247969 5247964 -
gaagagatgggaaaaggttcag

SEQ ID NO: 140277 - DNA, 22 bp, Artificial Sequence
  Synthetic oligonucleotide; TTC chr11 5247944 5247965 5247949 5247944 -
agtgaagacctgggggctggat

SEQ ID NO: 140278 - DNA, 22 bp, Artificial Sequence
  Synthetic oligonucleotide; CTG chr11 5247932 5247953 5247937 5247932 -
ggggctggattgattgcagctg

SEQ ID NO: 140279 - DNA, 22 bp, Artificial Sequence
  Synthetic oligonucleotide; CTG chr11 5247925 5247946 5247930 5247925 -
gattgattgcagctgagtagca

SEQ ID NO: 140280 - DNA, 22 bp, Artificial Sequence
  Synthetic oligonucleotide; TTG chr11 5247920 5247941 5247925 5247920 -
attgcagctgagtagcaaggat

SEQ ID NO: 140281 - DNA, 22 bp, Artificial Sequence
  Synthetic oligonucleotide; TTG chr11 5247916 5247937 5247921 5247916 -
cagctgagtagcaaggatggtt

SEQ ID NO: 140282 - DNA, 22 bp, Artificial Sequence
  Synthetic oligonucleotide; CTG chr11 5247910 5247931 5247915 5247910 -
agtagcaaggatggttcttaag

SEQ ID NO: 140283 - DNA, 22 bp, Artificial Sequence
  Synthetic oligonucleotide; TTC chr11 5247893 5247914 5247898 5247893 -
ttaaggaagggaaagtgttcca

SEQ ID NO: 140284 - DNA, 22 bp, Artificial Sequence
  Synthetic oligonucleotide; CTT chr11 5247891 5247912 5247896 5247891 -
aaggaagggaaagtgttccaag

SEQ ID NO: 140285 - DNA, 22 bp, Artificial Sequence
  Synthetic oligonucleotide; TTA chr11 5247890 5247911 5247895 5247890 -
aggaagggaaagtgttccaagc

SEQ ID NO: 140286 - DNA, 22 bp, Artificial Sequence
  Synthetic oligonucleotide; TTC chr11 5247873 5247894 5247878 5247873 -
caagctttaggaattcaaggtt

SEQ ID NO: 140287 - DNA, 22 bp, Artificial Sequence
  Synthetic oligonucleotide; CTT chr11 5247866 5247887 5247871 5247866 -
taggaattcaaggtttagtcag

SEQ ID NO: 140288 - DNA, 22 bp, Artificial Sequence
  Synthetic oligonucleotide; TTT chr11 5247865 5247886 5247870 5247865 -
aggaattcaaggtttagtcagg

SEQ ID NO: 140289 - DNA, 22 bp, Artificial Sequence
  Synthetic oligonucleotide; TTA chr11 5247864 5247885 5247869 5247864 -
ggaattcaaggtttagtcaggt

SEQ ID NO: 140290 - DNA, 22 bp, Artificial Sequence
  Synthetic oligonucleotide; TTC chr11 5247857 5247878 5247862 5247857 -
aaggtttagtcaggtgtagcaa

SEQ ID NO: 140291 - DNA, 22 bp, Artificial Sequence
  Synthetic oligonucleotide; TTT chr11 5247850 5247871 5247855 5247850 -
agtcaggtgtagcaattctatt

SEQ ID NO: 140292 - DNA, 22 bp, Artificial Sequence
  Synthetic oligonucleotide; TTA chr11 5247849 5247870 5247854 5247849 -
gtcaggtgtagcaattctattt

SEQ ID NO: 140293 - DNA, 22 bp, Artificial Sequence
  Synthetic oligonucleotide; TTC chr11 5247832 5247853 5247837 5247832 -
tattttattaggaggaatacta

SEQ ID NO: 140294 - DNA, 22 bp, Artificial Sequence
  Synthetic oligonucleotide; CTA chr11 5247830 5247851 5247835 5247830 -
ttttattaggaggaatactatt

SEQ ID NO: 140295 - DNA, 22 bp, Artificial Sequence
  Synthetic oligonucleotide; TTT chr11 5247827 5247848 5247832 5247827 -
tattaggaggaatactatttct

SEQ ID NO: 140296 - DNA, 22 bp, Artificial Sequence
  Synthetic oligonucleotide; TTT chr11 5247826 5247847 5247831 5247826 -
attaggaggaatactatttcta

SEQ ID NO: 140297 - DNA, 22 bp, Artificial Sequence
  Synthetic oligonucleotide; TTA chr11 5247825 5247846 5247830 5247825 -
ttaggaggaatactatttctaa

SEQ ID NO: 140298 - DNA, 22 bp, Artificial Sequence
  Synthetic oligonucleotide; TTA chr11 5247822 5247843 5247827 5247822 -
ggaggaatactatttctaatgg

SEQ ID NO: 140299 - DNA, 22 bp, Artificial Sequence
  Synthetic oligonucleotide; CTA chr11 5247810 5247831 5247815 5247810 -
tttctaatggcacttagctttt

SEQ ID NO: 140300 - DNA, 22 bp, Artificial Sequence
  Synthetic oligonucleotide; TTT chr11 5247807 5247828 5247812 5247807 -
ctaatggcacttagcttttcac

SEQ ID NO: 140301 - DNA, 22 bp, Artificial Sequence
  Synthetic oligonucleotide; TTC chr11 5247806 5247827 5247811 5247806 -
taatggcacttagcttttcaca

SEQ ID NO: 140302 - DNA, 22 bp, Artificial Sequence
  Synthetic oligonucleotide; CTA chr11 5247804 5247825 5247809 5247804 -
atggcacttagcttttcacagc

SEQ ID NO: 140303 - DNA, 22 bp, Artificial Sequence
  Synthetic oligonucleotide; CTT chr11 5247795 5247816 5247800 5247795 -
agcttttcacagcccttgtgga

SEQ ID NO: 140304 - DNA, 22 bp, Artificial Sequence
  Synthetic oligonucleotide; TTA chr11 5247794 5247815 5247799 5247794 -
gcttttcacagcccttgtggat

SEQ ID NO: 140305 - DNA, 22 bp, Artificial Sequence
  Synthetic oligonucleotide; CTT chr11 5247790 5247811 5247795 5247790 -
ttcacagcccttgtggatgcct

SEQ ID NO: 140306 - DNA, 22 bp, Artificial Sequence
  Synthetic oligonucleotide; TTT chr11 5247789 5247810 5247794 5247789 -
tcacagcccttgtggatgccta

SEQ ID NO: 140307 - DNA, 22 bp, Artificial Sequence
  Synthetic oligonucleotide; TTT chr11 5247788 5247809 5247793 5247788 -
cacagcccttgtggatgcctaa

SEQ ID NO: 140308 - DNA, 22 bp, Artificial Sequence
  Synthetic oligonucleotide; TTC chr11 5247787 5247808 5247792 5247787 -
acagcccttgtggatgcctaag

SEQ ID NO: 140309 - DNA, 22 bp, Artificial Sequence
  Synthetic oligonucleotide; CTT chr11 5247778 5247799 5247783 5247778 -
gtggatgcctaagaaagtgaaa

SEQ ID NO: 140310 - DNA, 22 bp, Artificial Sequence
  Synthetic oligonucleotide; TTG chr11 5247777 5247798 5247782 5247777 -
tggatgcctaagaaagtgaaat

SEQ ID NO: 140311 - DNA, 22 bp, Artificial Sequence
  Synthetic oligonucleotide; CTA chr11 5247767 5247788 5247772 5247767 -
agaaagtgaaattaatcccatg

SEQ ID NO: 140312 - DNA, 22 bp, Artificial Sequence
  Synthetic oligonucleotide; TTA chr11 5247753 5247774 5247758 5247753 -
atcccatgccctcaagtgtgca

SEQ ID NO: 140313 - DNA, 22 bp, Artificial Sequence
  Synthetic oligonucleotide; CTC chr11 5247740 5247761 5247745 5247740 -
aagtgtgcagattggtcacagc

SEQ ID NO: 140314 - DNA, 22 bp, Artificial Sequence
  Synthetic oligonucleotide; TTG chr11 5247726 5247747 5247731 5247726 -
gtcacagcatttcaagggagag

SEQ ID NO: 140315 - DNA, 22 bp, Artificial Sequence
  Synthetic oligonucleotide; TTT chr11 5247714 5247735 5247719 5247714 -
caagggagagacctcattgtaa

SEQ ID NO: 140316 - DNA, 22 bp, Artificial Sequence
  Synthetic oligonucleotide; TTC chr11 5247713 5247734 5247718 5247713 -
aagggagagacctcattgtaag

SEQ ID NO: 140317 - DNA, 22 bp, Artificial Sequence
  Synthetic oligonucleotide; CTC chr11 5247699 5247720 5247704 5247699 -
attgtaagactctgggggaggt

SEQ ID NO: 140318 - DNA, 22 bp, Artificial Sequence
  Synthetic oligonucleotide; TTG chr11 5247695 5247716 5247700 5247695 -
taagactctgggggaggtgggg

SEQ ID NO: 140319 - DNA, 22 bp, Artificial Sequence
  Synthetic oligonucleotide; CTC chr11 5247687 5247708 5247692 5247687 -
tgggggaggtggggacttaggt

SEQ ID NO: 140320 - DNA, 22 bp, Artificial Sequence
  Synthetic oligonucleotide; CTG chr11 5247685 5247706 5247690 5247685 -
ggggaggtggggacttaggtgt

SEQ ID NO: 140321 - DNA, 22 bp, Artificial Sequence
  Synthetic oligonucleotide; CTT chr11 5247669 5247690 5247674 5247669 -
aggtgtaagaaatgaatcagca

SEQ ID NO: 140322 - DNA, 22 bp, Artificial Sequence
  Synthetic oligonucleotide; TTA chr11 5247668 5247689 5247673 5247668 -
ggtgtaagaaatgaatcagcag

SEQ ID NO: 140323 - DNA, 22 bp, Artificial Sequence
  Synthetic oligonucleotide; CTC chr11 5247640 5247661 5247645 5247640 -
acaagtcagcatgagcatgtta

SEQ ID NO: 140324 - DNA, 22 bp, Artificial Sequence
  Synthetic oligonucleotide; TTA chr11 5247618 5247639 5247623 5247618 -
tgtctgagaaacagaccagcac

SEQ ID NO: 140325 - DNA, 22 bp, Artificial Sequence
  Synthetic oligonucleotide; CTG chr11 5247612 5247633 5247617 5247612 -
agaaacagaccagcactgtgag

SEQ ID NO: 140326 - DNA, 22 bp, Artificial Sequence
  Synthetic oligonucleotide; CTG chr11 5247594 5247615 5247599 5247594 -
tgagatcaaaatgtagtgggaa

SEQ ID NO: 140327 - DNA, 22 bp, Artificial Sequence
  Synthetic oligonucleotide; TTT chr11 5247566 5247587 5247571 5247566 -
gtacaacattaattggaaggct

SEQ ID NO: 140328 - DNA, 22 bp, Artificial Sequence
  Synthetic oligonucleotide; TTG chr11 5247565 5247586 5247570 5247565 -
tacaacattaattggaaggctt

SEQ ID NO: 140329 - DNA, 22 bp, Artificial Sequence
  Synthetic oligonucleotide; TTA chr11 5247555 5247576 5247560 5247555 -
attggaaggcttacttaatgga

SEQ ID NO: 140330 - DNA, 22 bp, Artificial Sequence
  Synthetic oligonucleotide; TTG chr11 5247551 5247572 5247556 5247551 -
gaaggcttacttaatggaattt

SEQ ID NO: 140331 - DNA, 22 bp, Artificial Sequence
  Synthetic oligonucleotide; CTT chr11 5247543 5247564 5247548 5247543 -
acttaatggaatttttgtatag

SEQ ID NO: 140332 - DNA, 22 bp, Artificial Sequence
  Synthetic oligonucleotide; TTA chr11 5247542 5247563 5247547 5247542 -
cttaatggaatttttgtatagt

SEQ ID NO: 140333 - DNA, 22 bp, Artificial Sequence
  Synthetic oligonucleotide; CTT chr11 5247539 5247560 5247544 5247539 -
aatggaatttttgtatagttgg

SEQ ID NO: 140334 - DNA, 22 bp, Artificial Sequence
  Synthetic oligonucleotide; TTA chr11 5247538 5247559 5247543 5247538 -
atggaatttttgtatagttgga

SEQ ID NO: 140335 - DNA, 22 bp, Artificial Sequence
  Synthetic oligonucleotide; TTT chr11 5247529 5247550 5247534 5247529 -
ttgtatagttggatgttagtgc

SEQ ID NO: 140336 - DNA, 22 bp, Artificial Sequence
  Synthetic oligonucleotide; TTT chr11 5247528 5247549 5247533 5247528 -
tgtatagttggatgttagtgca

SEQ ID NO: 140337 - DNA, 22 bp, Artificial Sequence
  Synthetic oligonucleotide; TTT chr11 5247527 5247548 5247532 5247527 -
gtatagttggatgttagtgcat

SEQ ID NO: 140338 - DNA, 22 bp, Artificial Sequence
  Synthetic oligonucleotide; TTG chr11 5247526 5247547 5247531 5247526 -
tatagttggatgttagtgcatc

SEQ ID NO: 140339 - DNA, 22 bp, Artificial Sequence
  Synthetic oligonucleotide; TTG chr11 5247518 5247539 5247523 5247518 -
gatgttagtgcatctctataag

SEQ ID NO: 140340 - DNA, 22 bp, Artificial Sequence
  Synthetic oligonucleotide; TTA chr11 5247511 5247532 5247516 5247511 -
gtgcatctctataagtaagagt

SEQ ID NO: 140341 - DNA, 22 bp, Artificial Sequence
  Synthetic oligonucleotide; CTC chr11 5247502 5247523 5247507 5247502 -
tataagtaagagtttaatatga

SEQ ID NO: 140342 - DNA, 22 bp, Artificial Sequence
  Synthetic oligonucleotide; CTA chr11 5247500 5247521 5247505 5247500 -
taagtaagagtttaatatgatg

SEQ ID NO: 140343 - DNA, 22 bp, Artificial Sequence
  Synthetic oligonucleotide; TTT chr11 5247487 5247508 5247492 5247487 -
aatatgatggtgttacggacct

SEQ ID NO: 140344 - DNA, 22 bp, Artificial Sequence
  Synthetic oligonucleotide; TTA chr11 5247486 5247507 5247491 5247486 -
atatgatggtgttacggaccta

SEQ ID NO: 140345 - DNA, 22 bp, Artificial Sequence
  Synthetic oligonucleotide; TTA chr11 5247472 5247493 5247477 5247472 -
cggacctaatgtttgtgtctcc

SEQ ID NO: 140346 - DNA, 22 bp, Artificial Sequence
  Synthetic oligonucleotide; CTA chr11 5247464 5247485 5247469 5247464 -
atgtttgtgtctcctcaaaatt

SEQ ID NO: 140347 - DNA, 22 bp, Artificial Sequence
  Synthetic oligonucleotide; TTT chr11 5247458 5247479 5247463 5247458 -
gtgtctcctcaaaattcacatg

SEQ ID NO: 140348 - DNA, 22 bp, Artificial Sequence
  Synthetic oligonucleotide; TTG chr11 5247457 5247478 5247462 5247457 -
tgtctcctcaaaattcacatgc

SEQ ID NO: 140349 - DNA, 22 bp, Artificial Sequence
  Synthetic oligonucleotide; CTC chr11 5247451 5247472 5247456 5247451 -
ctcaaaattcacatgctgaatc

SEQ ID NO: 140350 - DNA, 22 bp, Artificial Sequence
  Synthetic oligonucleotide; CTC chr11 5247448 5247469 5247453 5247448 -
aaaattcacatgctgaatcccc

SEQ ID NO: 140351 - DNA, 22 bp, Artificial Sequence
  Synthetic oligonucleotide; TTC chr11 5247441 5247462 5247446 5247441 -
acatgctgaatccccaactccc

SEQ ID NO: 140352 - DNA, 22 bp, Artificial Sequence
  Synthetic oligonucleotide; CTG chr11 5247433 5247454 5247438 5247433 -
aatccccaactcccaactgacc

SEQ ID NO: 140353 - DNA, 22 bp, Artificial Sequence
  Synthetic oligonucleotide; CTC chr11 5247421 5247442 5247426 5247421 -
ccaactgaccttatctgtgggg

SEQ ID NO: 140354 - DNA, 22 bp, Artificial Sequence
  Synthetic oligonucleotide; CTG chr11 5247414 5247435 5247419 5247414 -
accttatctgtgggggaggctt

SEQ ID NO: 140355 - DNA, 22 bp, Artificial Sequence
  Synthetic oligonucleotide; CTT chr11 5247409 5247430 5247414 5247409 -
atctgtgggggaggcttttgaa

SEQ ID NO: 140356 - DNA, 22 bp, Artificial Sequence
  Synthetic oligonucleotide; TTA chr11 5247408 5247429 5247413 5247408 -
tctgtgggggaggcttttgaaa

SEQ ID NO: 140357 - DNA, 22 bp, Artificial Sequence
  Synthetic oligonucleotide; CTG chr11 5247404 5247425 5247409 5247404 -
tgggggaggcttttgaaaagta

SEQ ID NO: 140358 - DNA, 22 bp, Artificial Sequence
  Synthetic oligonucleotide; CTT chr11 5247392 5247413 5247397 5247392 -
ttgaaaagtaattaggtttaga

SEQ ID NO: 140359 - DNA, 22 bp, Artificial Sequence
  Synthetic oligonucleotide; TTT chr11 5247391 5247412 5247396 5247391 -
tgaaaagtaattaggtttagat

SEQ ID NO: 140360 - DNA, 22 bp, Artificial Sequence
  Synthetic oligonucleotide; TTT chr11 5247390 5247411 5247395 5247390 -
gaaaagtaattaggtttagatg

SEQ ID NO: 140361 - DNA, 22 bp, Artificial Sequence
  Synthetic oligonucleotide; TTG chr11 5247389 5247410 5247394 5247389 -
aaaagtaattaggtttagatga

SEQ ID NO: 140362 - DNA, 22 bp, Artificial Sequence
  Synthetic oligonucleotide; TTA chr11 5247378 5247399 5247383 5247378 -
ggtttagatgagctcataagag

SEQ ID NO: 140363 - DNA, 22 bp, Artificial Sequence
  Synthetic oligonucleotide; TTT chr11 5247373 5247394 5247378 5247373 -
agatgagctcataagagcagat

SEQ ID NO: 140364 - DNA, 22 bp, Artificial Sequence
  Synthetic oligonucleotide; TTA chr11 5247372 5247393 5247377 5247372 -
gatgagctcataagagcagatc

SEQ ID NO: 140365 - DNA, 22 bp, Artificial Sequence
  Synthetic oligonucleotide; CTC chr11 5247363 5247384 5247368 5247363 -
ataagagcagatccccatcata

SEQ ID NO: 140366 - DNA, 22 bp, Artificial Sequence
  Synthetic oligonucleotide; TTA chr11 5247335 5247356 5247340 5247335 -
ttttccttatcagaagcagaga

SEQ ID NO: 140367 - DNA, 22 bp, Artificial Sequence
  Synthetic oligonucleotide; TTT chr11 5247332 5247353 5247337 5247332 -
tccttatcagaagcagagagac

SEQ ID NO: 140368 - DNA, 22 bp, Artificial Sequence
  Synthetic oligonucleotide; TTT chr11 5247331 5247352 5247336 5247331 -
ccttatcagaagcagagagaca

SEQ ID NO: 140369 - DNA, 22 bp, Artificial Sequence
  Synthetic oligonucleotide; TTC chr11 5247330 5247351 5247335 5247330 -
cttatcagaagcagagagacaa

SEQ ID NO: 140370 - DNA, 22 bp, Artificial Sequence
  Synthetic oligonucleotide; CTT chr11 5247327 5247348 5247332 5247327 -
atcagaagcagagagacaagcc

SEQ ID NO: 140371 - DNA, 22 bp, Artificial Sequence
  Synthetic oligonucleotide; TTA chr11 5247326 5247347 5247331 5247326 -
tcagaagcagagagacaagcca

SEQ ID NO: 140372 - DNA, 22 bp, Artificial Sequence
  Synthetic oligonucleotide; TTT chr11 5247301 5247322 5247306 5247301 -
ctctttcctcccggtgaggaca

SEQ ID NO: 140373 - DNA, 22 bp, Artificial Sequence
  Synthetic oligonucleotide; TTC chr11 5247300 5247321 5247305 5247300 -
tctttcctcccggtgaggacac

SEQ ID NO: 140374 - DNA, 22 bp, Artificial Sequence
  Synthetic oligonucleotide; CTC chr11 5247298 5247319 5247303 5247298 -
tttcctcccggtgaggacacag

SEQ ID NO: 140375 - DNA, 22 bp, Artificial Sequence
  Synthetic oligonucleotide; CTT chr11 5247296 5247317 5247301 5247296 -
tcctcccggtgaggacacagtg

SEQ ID NO: 140376 - DNA, 22 bp, Artificial Sequence
  Synthetic oligonucleotide; TTT chr11 5247295 5247316 5247300 5247295 -
cctcccggtgaggacacagtga

SEQ ID NO: 140377 - DNA, 22 bp, Artificial Sequence
  Synthetic oligonucleotide; TTC chr11 5247294 5247315 5247299 5247294 -
ctcccggtgaggacacagtgag

SEQ ID NO: 140378 - DNA, 22 bp, Artificial Sequence
  Synthetic oligonucleotide; CTC chr11 5247291 5247312 5247296 5247291 -
ccggtgaggacacagtgagaag

SEQ ID NO: 140379 - DNA, 22 bp, Artificial Sequence
  Synthetic oligonucleotide; CTG chr11 5247258 5247279 5247263 5247258 -
caatccaggaagagaaccctga

SEQ ID NO: 140380 - DNA, 22 bp, Artificial Sequence
  Synthetic oligonucleotide; CTG chr11 5247237 5247258 5247242 5247237 -
accacgagtcagccttcagaaa

SEQ ID NO: 140381 - DNA, 22 bp, Artificial Sequence
  Synthetic oligonucleotide; CTT chr11 5247221 5247242 5247226 5247221 -
cagaaatgtgagaaaaaactct

SEQ ID NO: 140382 - DNA, 22 bp, Artificial Sequence
  Synthetic oligonucleotide; TTC chr11 5247220 5247241 5247225 5247220 -
agaaatgtgagaaaaaactctg

SEQ ID NO: 140383 - DNA, 22 bp, Artificial Sequence
  Synthetic oligonucleotide; CTC chr11 5247200 5247221 5247205 5247200 -
tgttgttgaagccacccagtct

SEQ ID NO: 140384 - DNA, 22 bp, Artificial Sequence
  Synthetic oligonucleotide; CTG chr11 5247198 5247219 5247203 5247198 -
ttgttgaagccacccagtcttt

SEQ ID NO: 140385 - DNA, 22 bp, Artificial Sequence
  Synthetic oligonucleotide; TTG chr11 5247195 5247216 5247200 5247195 -
ttgaagccacccagtcttttgt

SEQ ID NO: 140386 - DNA, 22 bp, Artificial Sequence
  Synthetic oligonucleotide; TTG chr11 5247192 5247213 5247197 5247192 -
aagccacccagtcttttgtatt

SEQ ID NO: 140387 - DNA, 22 bp, Artificial Sequence
  Synthetic oligonucleotide; CTT chr11 5247177 5247198 5247182 5247177 -
ttgtattttgttatagcacctt

SEQ ID NO: 140388 - DNA, 22 bp, Artificial Sequence
  Synthetic oligonucleotide; TTT chr11 5247176 5247197 5247181 5247176 -
tgtattttgttatagcaccttg

SEQ ID NO: 140389 - DNA, 22 bp, Artificial Sequence
  Synthetic oligonucleotide; TTT chr11 5247175 5247196 5247180 5247175 -
gtattttgttatagcaccttgc

SEQ ID NO: 140390 - DNA, 22 bp, Artificial Sequence
  Synthetic oligonucleotide; TTG chr11 5247174 5247195 5247179 5247174 -
tattttgttatagcaccttgca

SEQ ID NO: 140391 - DNA, 22 bp, Artificial Sequence
  Synthetic oligonucleotide; TTT chr11 5247169 5247190 5247174 5247169 -
tgttatagcaccttgcactgag

SEQ ID NO: 140392 - DNA, 22 bp, Artificial Sequence
  Synthetic oligonucleotide; TTT chr11 5247168 5247189 5247173 5247168 -
gttatagcaccttgcactgagt

SEQ ID NO: 140393 - DNA, 22 bp, Artificial Sequence
  Synthetic oligonucleotide; TTG chr11 5247167 5247188 5247172 5247167 -
ttatagcaccttgcactgagta

SEQ ID NO: 140394 - DNA, 22 bp, Artificial Sequence
  Synthetic oligonucleotide; TTA chr11 5247164 5247185 5247169 5247164 -
tagcaccttgcactgagtaagg

SEQ ID NO: 140395 - DNA, 22 bp, Artificial Sequence
  Synthetic oligonucleotide; CTT chr11 5247155 5247176 5247160 5247155 -
gcactgagtaaggcagatgaag

SEQ ID NO: 140396 - DNA, 22 bp, Artificial Sequence
  Synthetic oligonucleotide; TTG chr11 5247154 5247175 5247159 5247154 -
cactgagtaaggcagatgaaga

SEQ ID NO: 140397 - DNA, 22 bp, Artificial Sequence
  Synthetic oligonucleotide; CTG chr11 5247149 5247170 5247154 5247149 -
agtaaggcagatgaagaaggag

SEQ ID NO: 140398 - DNA, 22 bp, Artificial Sequence
  Synthetic oligonucleotide; CTT chr11 5247113 5247134 5247118 5247113 -
gggttttgagtggactacagac

SEQ ID NO: 140399 - DNA, 22 bp, Artificial Sequence
  Synthetic oligonucleotide; TTG chr11 5247112 5247133 5247117 5247112 -
ggttttgagtggactacagacc

SEQ ID NO: 140400 - DNA, 22 bp, Artificial Sequence
  Synthetic oligonucleotide; TTT chr11 5247107 5247128 5247112 5247107 -
tgagtggactacagaccatgtt

SEQ ID NO: 140401 - DNA, 22 bp, Artificial Sequence
  Synthetic oligonucleotide; TTT chr11 5247106 5247127 5247111 5247106 -
gagtggactacagaccatgttt

SEQ ID NO: 140402 - DNA, 22 bp, Artificial Sequence
  Synthetic oligonucleotide; TTG chr11 5247105 5247126 5247110 5247105 -
agtggactacagaccatgttta

SEQ ID NO: 140403 - DNA, 22 bp, Artificial Sequence
  Synthetic oligonucleotide; CTA chr11 5247096 5247117 5247101 5247096 -
cagaccatgtttatctcaggtt

SEQ ID NO: 140404 - DNA, 22 bp, Artificial Sequence
  Synthetic oligonucleotide; TTT chr11 5247084 5247105 5247089 5247084 -
atctcaggtttgcaaagctccc

SEQ ID NO: 140405 - DNA, 22 bp, Artificial Sequence
  Synthetic oligonucleotide; TTA chr11 5247083 5247104 5247088 5247083 -
tctcaggtttgcaaagctcccc

SEQ ID NO: 140406 - DNA, 22 bp, Artificial Sequence
  Synthetic oligonucleotide; CTC chr11 5247079 5247100 5247084 5247079 -
aggtttgcaaagctcccctcgt

SEQ ID NO: 140407 - DNA, 22 bp, Artificial Sequence
  Synthetic oligonucleotide; TTT chr11 5247073 5247094 5247078 5247073 -
gcaaagctcccctcgtccccta

SEQ ID NO: 140408 - DNA, 22 bp, Artificial Sequence
  Synthetic oligonucleotide; TTG chr11 5247072 5247093 5247077 5247072 -
caaagctcccctcgtcccctat

SEQ ID NO: 140409 - DNA, 22 bp, Artificial Sequence
  Synthetic oligonucleotide; CTC chr11 5247064 5247085 5247069 5247064 -
ccctcgtcccctatgtttcagt

SEQ ID NO: 140410 - DNA, 22 bp, Artificial Sequence
  Synthetic oligonucleotide; CTC chr11 5247059 5247080 5247064 5247059 -
gtcccctatgtttcagtataaa

SEQ ID NO: 140411 - DNA, 22 bp, Artificial Sequence
  Synthetic oligonucleotide; CTA chr11 5247051 5247072 5247056 5247051 -
tgtttcagtataaaatacctac

SEQ ID NO: 140412 - DNA, 22 bp, Artificial Sequence
  Synthetic oligonucleotide; TTT chr11 5247046 5247067 5247051 5247046 -
cagtataaaatacctactctac

SEQ ID NO: 140413 - DNA, 22 bp, Artificial Sequence
  Synthetic oligonucleotide; TTC chr11 5247045 5247066 5247050 5247045 -
agtataaaatacctactctact

SEQ ID NO: 140414 - DNA, 22 bp, Artificial Sequence
  Synthetic oligonucleotide; CTA chr11 5247030 5247051 5247035 5247030 -
ctctactactctcatctataag

SEQ ID NO: 140415 - DNA, 22 bp, Artificial Sequence
  Synthetic oligonucleotide; CTC chr11 5247027 5247048 5247032 5247027 -
tactactctcatctataagacc

SEQ ID NO: 140416 - DNA, 22 bp, Artificial Sequence
  Synthetic oligonucleotide; CTA chr11 5247025 5247046 5247030 5247025 -
ctactctcatctataagaccca

SEQ ID NO: 140417 - DNA, 22 bp, Artificial Sequence
  Synthetic oligonucleotide; CTA chr11 5247022 5247043 5247027 5247022 -
ctctcatctataagacccaaat

SEQ ID NO: 140418 - DNA, 22 bp, Artificial Sequence
  Synthetic oligonucleotide; CTC chr11 5247019 5247040 5247024 5247019 -
tcatctataagacccaaataat

SEQ ID NO: 140419 - DNA, 22 bp, Artificial Sequence
  Synthetic oligonucleotide; CTC chr11 5247017 5247038 5247022 5247017 -
atctataagacccaaataataa

SEQ ID NO: 140420 - DNA, 22 bp, Artificial Sequence
  Synthetic oligonucleotide; CTA chr11 5247012 5247033 5247017 5247012 -
taagacccaaataataagcctg

SEQ ID NO: 140421 - DNA, 22 bp, Artificial Sequence
  Synthetic oligonucleotide; CTG chr11 5246990 5247011 5246995 5246990 -
cgcccttctctctaactttgat

SEQ ID NO: 140422 - DNA, 22 bp, Artificial Sequence
  Synthetic oligonucleotide; CTT chr11 5246983 5247004 5246988 5246983 -
ctctctaactttgatttctcct

SEQ ID NO: 140423 - DNA, 22 bp, Artificial Sequence
  Synthetic oligonucleotide; TTC chr11 5246982 5247003 5246987 5246982 -
tctctaactttgatttctccta

SEQ ID NO: 140424 - DNA, 22 bp, Artificial Sequence
  Synthetic oligonucleotide; CTC chr11 5246980 5247001 5246985 5246980 -
tctaactttgatttctcctatt

SEQ ID NO: 140425 - DNA, 22 bp, Artificial Sequence
  Synthetic oligonucleotide; CTC chr11 5246978 5246999 5246983 5246978 -
taactttgatttctcctatttt

SEQ ID NO: 140426 - DNA, 22 bp, Artificial Sequence
  Synthetic oligonucleotide; CTA chr11 5246976 5246997 5246981 5246976 -
actttgatttctcctattttta

SEQ ID NO: 140427 - DNA, 22 bp, Artificial Sequence
  Synthetic oligonucleotide; CTT chr11 5246972 5246993 5246977 5246972 -
tgatttctcctatttttacttc

SEQ ID NO: 140428 - DNA, 22 bp, Artificial Sequence
  Synthetic oligonucleotide; TTT chr11 5246971 5246992 5246976 5246971 -
gatttctcctatttttacttca

SEQ ID NO: 140429 - DNA, 22 bp, Artificial Sequence
  Synthetic oligonucleotide; TTG chr11 5246970 5246991 5246975 5246970 -
atttctcctatttttacttcaa

SEQ ID NO: 140430 - DNA, 22 bp, Artificial Sequence
  Synthetic oligonucleotide; TTT chr11 5246966 5246987 5246971 5246966 -
ctcctatttttacttcaacatg

SEQ ID NO: 140431 - DNA, 22 bp, Artificial Sequence
  Synthetic oligonucleotide; TTC chr11 5246965 5246986 5246970 5246965 -
tcctatttttacttcaacatgc

SEQ ID NO: 140432 - DNA, 22 bp, Artificial Sequence
  Synthetic oligonucleotide; CTC chr11 5246963 5246984 5246968 5246963 -
ctatttttacttcaacatgctt

SEQ ID NO: 140433 - DNA, 22 bp, Artificial Sequence
  Synthetic oligonucleotide; CTA chr11 5246960 5246981 5246965 5246960 -
tttttacttcaacatgctttac

SEQ ID NO: 140434 - DNA, 22 bp, Artificial Sequence
  Synthetic oligonucleotide; TTT chr11 5246957 5246978 5246962 5246957 -
ttacttcaacatgctttactct

SEQ ID NO: 140435 - DNA, 22 bp, Artificial Sequence
  Synthetic oligonucleotide; TTT chr11 5246956 5246977 5246961 5246956 -
tacttcaacatgctttactcta

SEQ ID NO: 140436 - DNA, 22 bp, Artificial Sequence
  Synthetic oligonucleotide; TTT chr11 5246955 5246976 5246960 5246955 -
acttcaacatgctttactctag

SEQ ID NO: 140437 - DNA, 22 bp, Artificial Sequence
  Synthetic oligonucleotide; TTA chr11 5246954 5246975 5246959 5246954 -
cttcaacatgctttactctagc

SEQ ID NO: 140438 - DNA, 22 bp, Artificial Sequence
  Synthetic oligonucleotide; CTT chr11 5246951 5246972 5246956 5246951 -
caacatgctttactctagcctt

SEQ ID NO: 140439 - DNA, 22 bp, Artificial Sequence
  Synthetic oligonucleotide; TTC chr11 5246950 5246971 5246955 5246950 -
aacatgctttactctagccttg

SEQ ID NO: 140440 - DNA, 22 bp, Artificial Sequence
  Synthetic oligonucleotide; CTT chr11 5246941 5246962 5246946 5246941 -
tactctagccttgtaatgtctt

SEQ ID NO: 140441 - DNA, 22 bp, Artificial Sequence
  Synthetic oligonucleotide; TTT chr11 5246940 5246961 5246945 5246940 -
actctagccttgtaatgtcttt

SEQ ID NO: 140442 - DNA, 22 bp, Artificial Sequence
  Synthetic oligonucleotide; TTA chr11 5246939 5246960 5246944 5246939 -
ctctagccttgtaatgtcttta

SEQ ID NO: 140443 - DNA, 22 bp, Artificial Sequence
  Synthetic oligonucleotide; CTC chr11 5246936 5246957 5246941 5246936 -
tagccttgtaatgtctttacat

SEQ ID NO: 140444 - DNA, 22 bp, Artificial Sequence
  Synthetic oligonucleotide; CTA chr11 5246934 5246955 5246939 5246934 -
gccttgtaatgtctttacatac

SEQ ID NO: 140445 - DNA, 22 bp, Artificial Sequence
  Synthetic oligonucleotide; CTT chr11 5246929 5246950 5246934 5246929 -
gtaatgtctttacatacagtga

SEQ ID NO: 140446 - DNA, 22 bp, Artificial Sequence
  Synthetic oligonucleotide; TTG chr11 5246928 5246949 5246933 5246928 -
taatgtctttacatacagtgaa

SEQ ID NO: 140447 - DNA, 22 bp, Artificial Sequence
  Synthetic oligonucleotide; CTT chr11 5246919 5246940 5246924 5246919 -
tacatacagtgaaatgtaaagt

SEQ ID NO: 140448 - DNA, 22 bp, Artificial Sequence
  Synthetic oligonucleotide; TTT chr11 5246918 5246939 5246923 5246918 -
acatacagtgaaatgtaaagtt

SEQ ID NO: 140449 - DNA, 22 bp, Artificial Sequence
  Synthetic oligonucleotide; TTA chr11 5246917 5246938 5246922 5246917 -
catacagtgaaatgtaaagttc

SEQ ID NO: 140450 - DNA, 22 bp, Artificial Sequence
  Synthetic oligonucleotide; TTC chr11 5246895 5246916 5246900 5246895 -
tttattctttttttctttcttt

SEQ ID NO: 140451 - DNA, 22 bp, Artificial Sequence
  Synthetic oligonucleotide; CTT chr11 5246893 5246914 5246898 5246893 -
tattctttttttctttctttct

SEQ ID NO: 140452 - DNA, 22 bp, Artificial Sequence
  Synthetic oligonucleotide; TTT chr11 5246892 5246913 5246897 5246892 -
attctttttttctttctttctt

SEQ ID NO: 140453 - DNA, 22 bp, Artificial Sequence
  Synthetic oligonucleotide; TTA chr11 5246891 5246912 5246896 5246891 -
ttctttttttctttctttcttt

SEQ ID NO: 140454 - DNA, 22 bp, Artificial Sequence
  Synthetic oligonucleotide; TTC chr11 5246888 5246909 5246893 5246888 -
tttttttctttctttctttttt

SEQ ID NO: 140455 - DNA, 22 bp, Artificial Sequence
  Synthetic oligonucleotide; CTT chr11 5246886 5246907 5246891 5246886 -
tttttctttctttcttttttct

SEQ ID NO: 140456 - DNA, 22 bp, Artificial Sequence
  Synthetic oligonucleotide; TTT chr11 5246885 5246906 5246890 5246885 -
ttttctttctttcttttttctc

SEQ ID NO: 140457 - DNA, 22 bp, Artificial Sequence
  Synthetic oligonucleotide; TTT chr11 5246884 5246905 5246889 5246884 -
tttctttctttcttttttctcc

SEQ ID NO: 140458 - DNA, 22 bp, Artificial Sequence
  Synthetic oligonucleotide; TTT chr11 5246883 5246904 5246888 5246883 -
ttctttctttcttttttctcct

SEQ ID NO: 140459 - DNA, 22 bp, Artificial Sequence
  Synthetic oligonucleotide; TTT chr11 5246882 5246903 5246887 5246882 -
tctttctttcttttttctcctc

SEQ ID NO: 140460 - DNA, 22 bp, Artificial Sequence
  Synthetic oligonucleotide; TTT chr11 5246881 5246902 5246886 5246881 -
ctttctttcttttttctcctca

SEQ ID NO: 140461 - DNA, 22 bp, Artificial Sequence
  Synthetic oligonucleotide; TTC chr11 5246880 5246901 5246885 5246880 -
tttctttcttttttctcctcag

SEQ ID NO: 140462 - DNA, 22 bp, Artificial Sequence
  Synthetic oligonucleotide; CTT chr11 5246878 5246899 5246883 5246878 -
tctttcttttttctcctcagcc

SEQ ID NO: 140463 - DNA, 22 bp, Artificial Sequence
  Synthetic oligonucleotide; TTT chr11 5246877 5246898 5246882 5246877 -
ctttcttttttctcctcagcct

SEQ ID NO: 140464 - DNA, 22 bp, Artificial Sequence
  Synthetic oligonucleotide; TTC chr11 5246876 5246897 5246881 5246876 -
tttcttttttctcctcagcctc

SEQ ID NO: 140465 - DNA, 22 bp, Artificial Sequence
  Synthetic oligonucleotide; CTT chr11 5246874 5246895 5246879 5246874 -
tcttttttctcctcagcctcag

SEQ ID NO: 140466 - DNA, 22 bp, Artificial Sequence
  Synthetic oligonucleotide; TTT chr11 5246873 5246894 5246878 5246873 -
cttttttctcctcagcctcaga

SEQ ID NO: 140467 - DNA, 22 bp, Artificial Sequence
  Synthetic oligonucleotide; TTC chr11 5246872 5246893 5246877 5246872 -
ttttttctcctcagcctcagaa

SEQ ID NO: 140468 - DNA, 22 bp, Artificial Sequence
  Synthetic oligonucleotide; CTT chr11 5246870 5246891 5246875 5246870 -
ttttctcctcagcctcagaatt

SEQ ID NO: 140469 - DNA, 22 bp, Artificial Sequence
  Synthetic oligonucleotide; TTT chr11 5246869 5246890 5246874 5246869 -
tttctcctcagcctcagaattt

SEQ ID NO: 140470 - DNA, 22 bp, Artificial Sequence
  Synthetic oligonucleotide; TTT chr11 5246868 5246889 5246873 5246868 -
ttctcctcagcctcagaatttg

SEQ ID NO: 140471 - DNA, 22 bp, Artificial Sequence
  Synthetic oligonucleotide; TTT chr11 5246867 5246888 5246872 5246867 -
tctcctcagcctcagaatttgg

SEQ ID NO: 140472 - DNA, 22 bp, Artificial Sequence
  Synthetic oligonucleotide; TTT chr11 5246866 5246887 5246871 5246866 -
ctcctcagcctcagaatttggc

SEQ ID NO: 140473 - DNA, 22 bp, Artificial Sequence
  Synthetic oligonucleotide; TTC chr11 5246865 5246886 5246870 5246865 -
tcctcagcctcagaatttggca

SEQ ID NO: 140474 - DNA, 22 bp, Artificial Sequence
  Synthetic oligonucleotide; CTC chr11 5246863 5246884 5246868 5246863 -
ctcagcctcagaatttggcaca

SEQ ID NO: 140475 - DNA, 22 bp, Artificial Sequence
  Synthetic oligonucleotide; CTC chr11 5246860 5246881 5246865 5246860 -
agcctcagaatttggcacatgc

SEQ ID NO: 140476 - DNA, 22 bp, Artificial Sequence
  Synthetic oligonucleotide; CTC chr11 5246854 5246875 5246859 5246854 -
agaatttggcacatgcccttcc

SEQ ID NO: 140477 - DNA, 22 bp, Artificial Sequence
  Synthetic oligonucleotide; TTT chr11 5246847 5246868 5246852 5246847 -
ggcacatgcccttccttctttc

SEQ ID NO: 140478 - DNA, 22 bp, Artificial Sequence
  Synthetic oligonucleotide; TTG chr11 5246846 5246867 5246851 5246846 -
gcacatgcccttccttctttca

SEQ ID NO: 140479 - DNA, 22 bp, Artificial Sequence
  Synthetic oligonucleotide; CTT chr11 5246834 5246855 5246839 5246834 -
ccttctttcaggaacttctcca

SEQ ID NO: 140480 - DNA, 22 bp, Artificial Sequence
  Synthetic oligonucleotide; TTC chr11 5246833 5246854 5246838 5246833 -
cttctttcaggaacttctccaa

SEQ ID NO: 140481 - DNA, 22 bp, Artificial Sequence
  Synthetic oligonucleotide; CTT chr11 5246830 5246851 5246835 5246830 -
ctttcaggaacttctccaacat

SEQ ID NO: 140482 - DNA, 22 bp, Artificial Sequence
  Synthetic oligonucleotide; TTC chr11 5246829 5246850 5246834 5246829 -
tttcaggaacttctccaacatc

SEQ ID NO: 140483 - DNA, 22 bp, Artificial Sequence
  Synthetic oligonucleotide; CTT chr11 5246827 5246848 5246832 5246827 -
tcaggaacttctccaacatctc

SEQ ID NO: 140484 - DNA, 22 bp, Artificial Sequence
  Synthetic oligonucleotide; TTT chr11 5246826 5246847 5246831 5246826 -
caggaacttctccaacatctct

SEQ ID NO: 140485 - DNA, 22 bp, Artificial Sequence
  Synthetic oligonucleotide; TTC chr11 5246825 5246846 5246830 5246825 -
aggaacttctccaacatctctg

SEQ ID NO: 140486 - DNA, 22 bp, Artificial Sequence
  Synthetic oligonucleotide; CTT chr11 5246817 5246838 5246822 5246817 -
ctccaacatctctgcctggctc

SEQ ID NO: 140487 - DNA, 22 bp, Artificial Sequence
  Synthetic oligonucleotide; TTC chr11 5246816 5246837 5246821 5246816 -
tccaacatctctgcctggctcc

SEQ ID NO: 140488 - DNA, 22 bp, Artificial Sequence
  Synthetic oligonucleotide; CTC chr11 5246814 5246835 5246819 5246814 -
caacatctctgcctggctccat

SEQ ID NO: 140489 - DNA, 22 bp, Artificial Sequence
  Synthetic oligonucleotide; CTC chr11 5246805 5246826 5246810 5246805 -
tgcctggctccatcatatcata

SEQ ID NO: 140490 - DNA, 22 bp, Artificial Sequence
  Synthetic oligonucleotide; CTG chr11 5246803 5246824 5246808 5246803 -
cctggctccatcatatcataaa

SEQ ID NO: 140491 - DNA, 22 bp, Artificial Sequence
  Synthetic oligonucleotide; CTG chr11 5246799 5246820 5246804 5246799 -
gctccatcatatcataaaggtc

SEQ ID NO: 140492 - DNA, 22 bp, Artificial Sequence
  Synthetic oligonucleotide; CTC chr11 5246795 5246816 5246800 5246795 -
catcatatcataaaggtcccac

SEQ ID NO: 140493 - DNA, 22 bp, Artificial Sequence
  Synthetic oligonucleotide; CTT chr11 5246771 5246792 5246776 5246771 -
caaatgcagtcactaccgtttc

SEQ ID NO: 140494 - DNA, 22 bp, Artificial Sequence
  Synthetic oligonucleotide; TTC chr11 5246770 5246791 5246775 5246770 -
aaatgcagtcactaccgtttca

SEQ ID NO: 140495 - DNA, 22 bp, Artificial Sequence
  Synthetic oligonucleotide; CTA chr11 5246756 5246777 5246761 5246756 -
ccgtttcagaatatgcactttc

SEQ ID NO: 140496 - DNA, 22 bp, Artificial Sequence
  Synthetic oligonucleotide; TTT chr11 5246750 5246771 5246755 5246750 -
cagaatatgcactttctttctt

SEQ ID NO: 140497 - DNA, 22 bp, Artificial Sequence
  Synthetic oligonucleotide; TTC chr11 5246749 5246770 5246754 5246749 -
agaatatgcactttctttcttt

SEQ ID NO: 140498 - DNA, 22 bp, Artificial Sequence
  Synthetic oligonucleotide; CTT chr11 5246736 5246757 5246741 5246736 -
tctttcttttttgttttttgtt

SEQ ID NO: 140499 - DNA, 22 bp, Artificial Sequence
  Synthetic oligonucleotide; TTT chr11 5246735 5246756 5246740 5246735 -
ctttcttttttgttttttgttt

SEQ ID NO: 140500 - DNA, 22 bp, Artificial Sequence
  Synthetic oligonucleotide; TTC chr11 5246734 5246755 5246739 5246734 -
tttcttttttgttttttgtttt

SEQ ID NO: 140501 - DNA, 22 bp, Artificial Sequence
  Synthetic oligonucleotide; CTT chr11 5246732 5246753 5246737 5246732 -
tcttttttgttttttgtttttt

SEQ ID NO: 140502 - DNA, 22 bp, Artificial Sequence
  Synthetic oligonucleotide; TTT chr11 5246731 5246752 5246736 5246731 -
cttttttgttttttgttttttt

SEQ ID NO: 140503 - DNA, 22 bp, Artificial Sequence
  Synthetic oligonucleotide; TTC chr11 5246730 5246751 5246735 5246730 -
ttttttgttttttgtttttttt

SEQ ID NO: 140504 - DNA, 22 bp, Artificial Sequence
  Synthetic oligonucleotide; CTT chr11 5246728 5246749 5246733 5246728 -
ttttgttttttgttttttttaa

SEQ ID NO: 140505 - DNA, 22 bp, Artificial Sequence
  Synthetic oligonucleotide; TTT chr11 5246727 5246748 5246732 5246727 -
tttgttttttgttttttttaag

SEQ ID NO: 140506 - DNA, 22 bp, Artificial Sequence
  Synthetic oligonucleotide; TTT chr11 5246726 5246747 5246731 5246726 -
ttgttttttgttttttttaagt

SEQ ID NO: 140507 - DNA, 22 bp, Artificial Sequence
  Synthetic oligonucleotide; TTT chr11 5246725 5246746 5246730 5246725 -
tgttttttgttttttttaagtc

SEQ ID NO: 140508 - DNA, 22 bp, Artificial Sequence
  Synthetic oligonucleotide; TTT chr11 5246724 5246745 5246729 5246724 -
gttttttgttttttttaagtca

SEQ ID NO: 140509 - DNA, 22 bp, Artificial Sequence
  Synthetic oligonucleotide; TTG chr11 5246723 5246744 5246728 5246723 -
ttttttgttttttttaagtcaa

SEQ ID NO: 140510 - DNA, 22 bp, Artificial Sequence
  Synthetic oligonucleotide; TTT chr11 5246720 5246741 5246725 5246720 -
tttgttttttttaagtcaaagc

SEQ ID NO: 140511 - DNA, 22 bp, Artificial Sequence
  Synthetic oligonucleotide; TTT chr11 5246719 5246740 5246724 5246719 -
ttgttttttttaagtcaaagca

SEQ ID NO: 140512 - DNA, 22 bp, Artificial Sequence
  Synthetic oligonucleotide; TTT chr11 5246718 5246739 5246723 5246718 -
tgttttttttaagtcaaagcaa

SEQ ID NO: 140513 - DNA, 22 bp, Artificial Sequence
  Synthetic oligonucleotide; TTT chr11 5246717 5246738 5246722 5246717 -
gttttttttaagtcaaagcaaa

SEQ ID NO: 140514 - DNA, 22 bp, Artificial Sequence
  Synthetic oligonucleotide; TTG chr11 5246716 5246737 5246721 5246716 -
ttttttttaagtcaaagcaaat

SEQ ID NO: 140515 - DNA, 22 bp, Artificial Sequence
  Synthetic oligonucleotide; TTT chr11 5246713 5246734 5246718 5246713 -
tttttaagtcaaagcaaatttc

SEQ ID NO: 140516 - DNA, 22 bp, Artificial Sequence
  Synthetic oligonucleotide; TTT chr11 5246712 5246733 5246717 5246712 -
ttttaagtcaaagcaaatttct

SEQ ID NO: 140517 - DNA, 22 bp, Artificial Sequence
  Synthetic oligonucleotide; TTT chr11 5246711 5246732 5246716 5246711 -
tttaagtcaaagcaaatttctt

SEQ ID NO: 140518 - DNA, 22 bp, Artificial Sequence
  Synthetic oligonucleotide; TTT chr11 5246710 5246731 5246715 5246710 -
ttaagtcaaagcaaatttcttg

SEQ ID NO: 140519 - DNA, 22 bp, Artificial Sequence
  Synthetic oligonucleotide; TTT chr11 5246709 5246730 5246714 5246709 -
taagtcaaagcaaatttcttga

SEQ ID NO: 140520 - DNA, 22 bp, Artificial Sequence
  Synthetic oligonucleotide; TTT chr11 5246708 5246729 5246713 5246708 -
aagtcaaagcaaatttcttgag

SEQ ID NO: 140521 - DNA, 22 bp, Artificial Sequence
  Synthetic oligonucleotide; TTA chr11 5246707 5246728 5246712 5246707 -
agtcaaagcaaatttcttgaga

SEQ ID NO: 140522 - DNA, 22 bp, Artificial Sequence
  Synthetic oligonucleotide; TTT chr11 5246692 5246713 5246697 5246692 -
cttgagagagtaaagaaataaa

SEQ ID NO: 140523 - DNA, 22 bp, Artificial Sequence
  Synthetic oligonucleotide; TTC chr11 5246691 5246712 5246696 5246691 -
ttgagagagtaaagaaataaac

SEQ ID NO: 140524 - DNA, 22 bp, Artificial Sequence
  Synthetic oligonucleotide; CTT chr11 5246689 5246710 5246694 5246689 -
gagagagtaaagaaataaacga

SEQ ID NO: 140525 - DNA, 22 bp, Artificial Sequence
  Synthetic oligonucleotide; TTG chr11 5246688 5246709 5246693 5246688 -
agagagtaaagaaataaacgaa

SEQ ID NO: 140526 - DNA, 22 bp, Artificial Sequence
  Synthetic oligonucleotide; CTA chr11 5246660 5246681 5246665 5246660 -
ctgcataggcagagcagccccg

SEQ ID NO: 140527 - DNA, 22 bp, Artificial Sequence
  Synthetic oligonucleotide; CTG chr11 5246657 5246678 5246662 5246657 -
cataggcagagcagccccgagg

SEQ ID NO: 140528 - DNA, 22 bp, Artificial Sequence
  Synthetic oligonucleotide; CTG chr11 5246628 5246649 5246633 5246628 -
gttgttccttttatggttattt

SEQ ID NO: 140529 - DNA, 22 bp, Artificial Sequence
  Synthetic oligonucleotide; TTG chr11 5246624 5246645 5246629 5246624 -
ttccttttatggttatttcttg

SEQ ID NO: 140530 - DNA, 22 bp, Artificial Sequence
  Synthetic oligonucleotide; TTC chr11 5246621 5246642 5246626 5246621 -
cttttatggttatttcttgatg

SEQ ID NO: 140531 - DNA, 22 bp, Artificial Sequence
  Synthetic oligonucleotide; CTT chr11 5246618 5246639 5246623 5246618 -
ttatggttatttcttgatgata

SEQ ID NO: 140532 - DNA, 22 bp, Artificial Sequence
  Synthetic oligonucleotide; TTT chr11 5246617 5246638 5246622 5246617 -
tatggttatttcttgatgatat

SEQ ID NO: 140533 - DNA, 22 bp, Artificial Sequence
  Synthetic oligonucleotide; TTT chr11 5246616 5246637 5246621 5246616 -
atggttatttcttgatgatatg

SEQ ID NO: 140534 - DNA, 22 bp, Artificial Sequence
  Synthetic oligonucleotide; TTA chr11 5246615 5246636 5246620 5246615 -
tggttatttcttgatgatatgt

SEQ ID NO: 140535 - DNA, 22 bp, Artificial Sequence
  Synthetic oligonucleotide; TTA chr11 5246609 5246630 5246614 5246609 -
tttcttgatgatatgttaaaca

SEQ ID NO: 140536 - DNA, 22 bp, Artificial Sequence
  Synthetic oligonucleotide; TTT chr11 5246606 5246627 5246611 5246606 -
cttgatgatatgttaaacaagt

SEQ ID NO: 140537 - DNA, 22 bp, Artificial Sequence
  Synthetic oligonucleotide; TTC chr11 5246605 5246626 5246610 5246605 -
ttgatgatatgttaaacaagtt

SEQ ID NO: 140538 - DNA, 22 bp, Artificial Sequence
  Synthetic oligonucleotide; CTT chr11 5246603 5246624 5246608 5246603 -
gatgatatgttaaacaagtttt

SEQ ID NO: 140539 - DNA, 22 bp, Artificial Sequence
  Synthetic oligonucleotide; TTG chr11 5246602 5246623 5246607 5246602 -
atgatatgttaaacaagttttg

SEQ ID NO: 140540 - DNA, 22 bp, Artificial Sequence
  Synthetic oligonucleotide; TTA chr11 5246591 5246612 5246596 5246591 -
aacaagttttggattatttatg

SEQ ID NO: 140541 - DNA, 22 bp, Artificial Sequence
  Synthetic oligonucleotide; TTT chr11 5246582 5246603 5246587 5246582 -
tggattatttatgccttctctt

SEQ ID NO: 140542 - DNA, 22 bp, Artificial Sequence
  Synthetic oligonucleotide; TTT chr11 5246581 5246602 5246586 5246581 -
ggattatttatgccttctcttt

SEQ ID NO: 140543 - DNA, 22 bp, Artificial Sequence
  Synthetic oligonucleotide; TTG chr11 5246580 5246601 5246585 5246580 -
gattatttatgccttctctttt

SEQ ID NO: 140544 - DNA, 22 bp, Artificial Sequence
  Synthetic oligonucleotide; TTA chr11 5246575 5246596 5246580 5246575 -
tttatgccttctctttttaggc

SEQ ID NO: 140545 - DNA, 22 bp, Artificial Sequence
  Synthetic oligonucleotide; TTT chr11 5246572 5246593 5246577 5246572 -
atgccttctctttttaggccat

SEQ ID NO: 140546 - DNA, 22 bp, Artificial Sequence
  Synthetic oligonucleotide; TTA chr11 5246571 5246592 5246576 5246571 -
tgccttctctttttaggccata

SEQ ID NO: 140547 - DNA, 22 bp, Artificial Sequence
  Synthetic oligonucleotide; CTT chr11 5246565 5246586 5246570 5246565 -
ctctttttaggccatatagggt

SEQ ID NO: 140548 - DNA, 22 bp, Artificial Sequence
  Synthetic oligonucleotide; TTC chr11 5246564 5246585 5246569 5246564 -
tctttttaggccatatagggta

SEQ ID NO: 140549 - DNA, 22 bp, Artificial Sequence
  Synthetic oligonucleotide; CTC chr11 5246562 5246583 5246567 5246562 -
tttttaggccatatagggtaac

SEQ ID NO: 140550 - DNA, 22 bp, Artificial Sequence
  Synthetic oligonucleotide; CTT chr11 5246560 5246581 5246565 5246560 -
tttaggccatatagggtaactt

SEQ ID NO: 140551 - DNA, 22 bp, Artificial Sequence
  Synthetic oligonucleotide; TTT chr11 5246559 5246580 5246564 5246559 -
ttaggccatatagggtaacttt

SEQ ID NO: 140552 - DNA, 22 bp, Artificial Sequence
  Synthetic oligonucleotide; TTT chr11 5246558 5246579 5246563 5246558 -
taggccatatagggtaactttc

SEQ ID NO: 140553 - DNA, 22 bp, Artificial Sequence
  Synthetic oligonucleotide; TTT chr11 5246557 5246578 5246562 5246557 -
aggccatatagggtaactttct

SEQ ID NO: 140554 - DNA, 22 bp, Artificial Sequence
  Synthetic oligonucleotide; TTA chr11 5246556 5246577 5246561 5246556 -
ggccatatagggtaactttctg

SEQ ID NO: 140555 - DNA, 22 bp, Artificial Sequence
  Synthetic oligonucleotide; CTT chr11 5246538 5246559 5246543 5246538 -
tctgacattgccatggcatttt

SEQ ID NO: 140556 - DNA, 22 bp, Artificial Sequence
  Synthetic oligonucleotide; TTT chr11 5246537 5246558 5246542 5246537 -
ctgacattgccatggcattttt

SEQ ID NO: 140557 - DNA, 22 bp, Artificial Sequence
  Synthetic oligonucleotide; TTC chr11 5246536 5246557 5246541 5246536 -
tgacattgccatggcatttttc

SEQ ID NO: 140558 - DNA, 22 bp, Artificial Sequence
  Synthetic oligonucleotide; CTG chr11 5246534 5246555 5246539 5246534 -
acattgccatggcatttttctt

SEQ ID NO: 140559 - DNA, 22 bp, Artificial Sequence
  Synthetic oligonucleotide; TTG chr11 5246528 5246549 5246533 5246528 -
ccatggcatttttcttttaatt

SEQ ID NO: 140560 - DNA, 22 bp, Artificial Sequence
  Synthetic oligonucleotide; TTT chr11 5246517 5246538 5246522 5246517 -
ttcttttaatttaatttactgt

SEQ ID NO: 140561 - DNA, 22 bp, Artificial Sequence
  Synthetic oligonucleotide; TTT chr11 5246516 5246537 5246521 5246516 -
tcttttaatttaatttactgtt

SEQ ID NO: 140562 - DNA, 22 bp, Artificial Sequence
  Synthetic oligonucleotide; TTT chr11 5246515 5246536 5246520 5246515 -
cttttaatttaatttactgtta

SEQ ID NO: 140563 - DNA, 22 bp, Artificial Sequence
  Synthetic oligonucleotide; TTC chr11 5246514 5246535 5246519 5246514 -
ttttaatttaatttactgttac

SEQ ID NO: 140564 - DNA, 22 bp, Artificial Sequence
  Synthetic oligonucleotide; CTT chr11 5246512 5246533 5246517 5246512 -
ttaatttaatttactgttacct

SEQ ID NO: 140565 - DNA, 22 bp, Artificial Sequence
  Synthetic oligonucleotide; TTT chr11 5246511 5246532 5246516 5246511 -
taatttaatttactgttacctt

SEQ ID NO: 140566 - DNA, 22 bp, Artificial Sequence
  Synthetic oligonucleotide; TTT chr11 5246510 5246531 5246515 5246510 -
aatttaatttactgttacctta

SEQ ID NO: 140567 - DNA, 22 bp, Artificial Sequence
  Synthetic oligonucleotide; TTA chr11 5246509 5246530 5246514 5246509 -
atttaatttactgttaccttaa

SEQ ID NO: 140568 - DNA, 22 bp, Artificial Sequence
  Synthetic oligonucleotide; TTT chr11 5246505 5246526 5246510 5246505 -
aatttactgttaccttaaattc

SEQ ID NO: 140569 - DNA, 22 bp, Artificial Sequence
  Synthetic oligonucleotide; TTA chr11 5246504 5246525 5246509 5246504 -
atttactgttaccttaaattca

SEQ ID NO: 140570 - DNA, 22 bp, Artificial Sequence
  Synthetic oligonucleotide; TTT chr11 5246500 5246521 5246505 5246500 -
actgttaccttaaattcagggg

SEQ ID NO: 140571 - DNA, 22 bp, Artificial Sequence
  Synthetic oligonucleotide; TTA chr11 5246499 5246520 5246504 5246499 -
ctgttaccttaaattcaggggt

SEQ ID NO: 140572 - DNA, 22 bp, Artificial Sequence
  Synthetic oligonucleotide; CTG chr11 5246496 5246517 5246501 5246496 -
ttaccttaaattcaggggtaca

SEQ ID NO: 140573 - DNA, 22 bp, Artificial Sequence
  Synthetic oligonucleotide; TTA chr11 5246493 5246514 5246498 5246493 -
ccttaaattcaggggtacacgt

SEQ ID NO: 140574 - DNA, 22 bp, Artificial Sequence
  Synthetic oligonucleotide; CTT chr11 5246489 5246510 5246494 5246489 -
aaattcaggggtacacgtacag

SEQ ID NO: 140575 - DNA, 22 bp, Artificial Sequence
  Synthetic oligonucleotide; TTA chr11 5246488 5246509 5246493 5246488 -
aattcaggggtacacgtacagg

SEQ ID NO: 140576 - DNA, 22 bp, Artificial Sequence
  Synthetic oligonucleotide; TTC chr11 5246483 5246504 5246488 5246483 -
aggggtacacgtacaggatatg

SEQ ID NO: 140577 - DNA, 22 bp, Artificial Sequence
  Synthetic oligonucleotide; TTT chr11 5246454 5246475 5246459 5246454 -
gttttataggtaaaagtgtgcc

SEQ ID NO: 140578 - DNA, 22 bp, Artificial Sequence
  Synthetic oligonucleotide; TTG chr11 5246453 5246474 5246458 5246453 -
ttttataggtaaaagtgtgcca

SEQ ID NO: 140579 - DNA, 22 bp, Artificial Sequence
  Synthetic oligonucleotide; TTT chr11 5246450 5246471 5246455 5246450 -
tataggtaaaagtgtgccatgg

SEQ ID NO: 140580 - DNA, 22 bp, Artificial Sequence
  Synthetic oligonucleotide; TTT chr11 5246449 5246470 5246454 5246449 -
ataggtaaaagtgtgccatggt

SEQ ID NO: 140581 - DNA, 22 bp, Artificial Sequence
  Synthetic oligonucleotide; TTA chr11 5246448 5246469 5246453 5246448 -
taggtaaaagtgtgccatggtt

SEQ ID NO: 140582 - DNA, 22 bp, Artificial Sequence
  Synthetic oligonucleotide; TTT chr11 5246425 5246446 5246430 5246425 -
taatgggttttttttttcttgt

SEQ ID NO: 140583 - DNA, 22 bp, Artificial Sequence
  Synthetic oligonucleotide; TTT chr11 5246424 5246445 5246429 5246424 -
aatgggttttttttttcttgta

SEQ ID NO: 140584 - DNA, 22 bp, Artificial Sequence
  Synthetic oligonucleotide; TTA chr11 5246423 5246444 5246428 5246423 -
atgggttttttttttcttgtaa

SEQ ID NO: 140585 - DNA, 22 bp, Artificial Sequence
  Synthetic oligonucleotide; TTT chr11 5246415 5246436 5246420 5246415 -
tttttttcttgtaaagttgttt

SEQ ID NO: 140586 - DNA, 22 bp, Artificial Sequence
  Synthetic oligonucleotide; TTT chr11 5246414 5246435 5246419 5246414 -
ttttttcttgtaaagttgttta

SEQ ID NO: 140587 - DNA, 22 bp, Artificial Sequence
  Synthetic oligonucleotide; TTT chr11 5246413 5246434 5246418 5246413 -
tttttcttgtaaagttgtttaa

SEQ ID NO: 140588 - DNA, 22 bp, Artificial Sequence
  Synthetic oligonucleotide; TTT chr11 5246412 5246433 5246417 5246412 -
ttttcttgtaaagttgtttaag

SEQ ID NO: 140589 - DNA, 22 bp, Artificial Sequence
  Synthetic oligonucleotide; TTT chr11 5246411 5246432 5246416 5246411 -
tttcttgtaaagttgtttaagt

SEQ ID NO: 140590 - DNA, 22 bp, Artificial Sequence
  Synthetic oligonucleotide; TTT chr11 5246410 5246431 5246415 5246410 -
ttcttgtaaagttgtttaagtt

SEQ ID NO: 140591 - DNA, 22 bp, Artificial Sequence
  Synthetic oligonucleotide; TTT chr11 5246409 5246430 5246414 5246409 -
tcttgtaaagttgtttaagttt

SEQ ID NO: 140592 - DNA, 22 bp, Artificial Sequence
  Synthetic oligonucleotide; TTT chr11 5246408 5246429 5246413 5246408 -
cttgtaaagttgtttaagtttc

SEQ ID NO: 140593 - DNA, 22 bp, Artificial Sequence
  Synthetic oligonucleotide; TTC chr11 5246407 5246428 5246412 5246407 -
ttgtaaagttgtttaagtttct

SEQ ID NO: 140594 - DNA, 22 bp, Artificial Sequence
  Synthetic oligonucleotide; CTT chr11 5246405 5246426 5246410 5246405 -
gtaaagttgtttaagtttcttg

SEQ ID NO: 140595 - DNA, 22 bp, Artificial Sequence
  Synthetic oligonucleotide; TTG chr11 5246404 5246425 5246409 5246404 -
taaagttgtttaagtttcttgt

SEQ ID NO: 140596 - DNA, 22 bp, Artificial Sequence
  Synthetic oligonucleotide; TTG chr11 5246396 5246417 5246401 5246396 -
tttaagtttcttgtttactctg

SEQ ID NO: 140597 - DNA, 22 bp, Artificial Sequence
  Synthetic oligonucleotide; TTT chr11 5246393 5246414 5246398 5246393 -
aagtttcttgtttactctggat

SEQ ID NO: 140598 - DNA, 22 bp, Artificial Sequence
  Synthetic oligonucleotide; TTA chr11 5246392 5246413 5246397 5246392 -
agtttcttgtttactctggata

SEQ ID NO: 140599 - DNA, 22 bp, Artificial Sequence
  Synthetic oligonucleotide; TTT chr11 5246387 5246408 5246392 5246387 -
cttgtttactctggatattagg

SEQ ID NO: 140600 - DNA, 22 bp, Artificial Sequence
  Synthetic oligonucleotide; TTC chr11 5246386 5246407 5246391 5246386 -
ttgtttactctggatattaggc

SEQ ID NO: 140601 - DNA, 22 bp, Artificial Sequence
  Synthetic oligonucleotide; CTT chr11 5246384 5246405 5246389 5246384 -
gtttactctggatattaggcct

SEQ ID NO: 140602 - DNA, 22 bp, Artificial Sequence
  Synthetic oligonucleotide; TTG chr11 5246383 5246404 5246388 5246383 -
tttactctggatattaggcctt

SEQ ID NO: 140603 - DNA, 22 bp, Artificial Sequence
  Synthetic oligonucleotide; TTT chr11 5246380 5246401 5246385 5246380 -
actctggatattaggcctttgt

SEQ ID NO: 140604 - DNA, 22 bp, Artificial Sequence
  Synthetic oligonucleotide; TTA chr11 5246379 5246400 5246384 5246379 -
ctctggatattaggcctttgtc

SEQ ID NO: 140605 - DNA, 22 bp, Artificial Sequence
  Synthetic oligonucleotide; CTC chr11 5246376 5246397 5246381 5246376 -
tggatattaggcctttgtcaga

SEQ ID NO: 140606 - DNA, 22 bp, Artificial Sequence
  Synthetic oligonucleotide; CTG chr11 5246374 5246395 5246379 5246374 -
gatattaggcctttgtcagaag

SEQ ID NO: 140607 - DNA, 22 bp, Artificial Sequence
  Synthetic oligonucleotide; TTA chr11 5246367 5246388 5246372 5246367 -
ggcctttgtcagaagaatagat

SEQ ID NO: 140608 - DNA, 22 bp, Artificial Sequence
  Synthetic oligonucleotide; CTT chr11 5246361 5246382 5246366 5246361 -
tgtcagaagaatagattggaaa

SEQ ID NO: 140609 - DNA, 22 bp, Artificial Sequence
  Synthetic oligonucleotide; TTT chr11 5246360 5246381 5246365 5246360 -
gtcagaagaatagattggaaaa

SEQ ID NO: 140610 - DNA, 22 bp, Artificial Sequence
  Synthetic oligonucleotide; TTG chr11 5246359 5246380 5246364 5246359 -
tcagaagaatagattggaaaat

SEQ ID NO: 140611 - DNA, 22 bp, Artificial Sequence
  Synthetic oligonucleotide; TTG chr11 5246343 5246364 5246348 5246343 -
gaaaatctttttcccattctgt

SEQ ID NO: 140612 - DNA, 22 bp, Artificial Sequence
  Synthetic oligonucleotide; CTT chr11 5246334 5246355 5246339 5246334 -
tttcccattctgtagattgtct

SEQ ID NO: 140613 - DNA, 22 bp, Artificial Sequence
  Synthetic oligonucleotide; TTT chr11 5246333 5246354 5246338 5246333 -
ttcccattctgtagattgtctt

SEQ ID NO: 140614 - DNA, 22 bp, Artificial Sequence
  Synthetic oligonucleotide; TTT chr11 5246332 5246353 5246337 5246332 -
tcccattctgtagattgtcttt

SEQ ID NO: 140615 - DNA, 22 bp, Artificial Sequence
  Synthetic oligonucleotide; TTT chr11 5246331 5246352 5246336 5246331 -
cccattctgtagattgtctttc

SEQ ID NO: 140616 - DNA, 22 bp, Artificial Sequence
  Synthetic oligonucleotide; TTC chr11 5246330 5246351 5246335 5246330 -
ccattctgtagattgtctttcg

SEQ ID NO: 140617 - DNA, 22 bp, Artificial Sequence
  Synthetic oligonucleotide; TTC chr11 5246324 5246345 5246329 5246324 -
tgtagattgtctttcgctctga

SEQ ID NO: 140618 - DNA, 22 bp, Artificial Sequence
  Synthetic oligonucleotide; CTG chr11 5246322 5246343 5246327 5246322 -
tagattgtctttcgctctgatg

SEQ ID NO: 140619 - DNA, 22 bp, Artificial Sequence
  Synthetic oligonucleotide; TTG chr11 5246315 5246336 5246320 5246315 -
tctttcgctctgatggtagttt

SEQ ID NO: 140620 - DNA, 22 bp, Artificial Sequence
  Synthetic oligonucleotide; CTT chr11 5246311 5246332 5246316 5246311 -
tcgctctgatggtagtttcttt

SEQ ID NO: 140621 - DNA, 22 bp, Artificial Sequence
  Synthetic oligonucleotide; TTT chr11 5246310 5246331 5246315 5246310 -
cgctctgatggtagtttctttt

SEQ ID NO: 140622 - DNA, 22 bp, Artificial Sequence
  Synthetic oligonucleotide; TTC chr11 5246309 5246330 5246314 5246309 -
gctctgatggtagtttcttttg

SEQ ID NO: 140623 - DNA, 22 bp, Artificial Sequence
  Synthetic oligonucleotide; CTC chr11 5246305 5246326 5246310 5246305 -
tgatggtagtttcttttgctga

SEQ ID NO: 140624 - DNA, 22 bp, Artificial Sequence
  Synthetic oligonucleotide; CTG chr11 5246303 5246324 5246308 5246303 -
atggtagtttcttttgctgagc

SEQ ID NO: 140625 - DNA, 22 bp, Artificial Sequence
  Synthetic oligonucleotide; TTT chr11 5246293 5246314 5246298 5246293 -
cttttgctgagcaggagctctt

SEQ ID NO: 140626 - DNA, 22 bp, Artificial Sequence
  Synthetic oligonucleotide; TTC chr11 5246292 5246313 5246297 5246292 -
ttttgctgagcaggagctcttt

SEQ ID NO: 140627 - DNA, 22 bp, Artificial Sequence
  Synthetic oligonucleotide; CTT chr11 5246290 5246311 5246295 5246290 -
ttgctgagcaggagctctttag

SEQ ID NO: 140628 - DNA, 22 bp, Artificial Sequence
  Synthetic oligonucleotide; TTT chr11 5246289 5246310 5246294 5246289 -
tgctgagcaggagctctttagt

SEQ ID NO: 140629 - DNA, 22 bp, Artificial Sequence
  Synthetic oligonucleotide; TTT chr11 5246288 5246309 5246293 5246288 -
gctgagcaggagctctttagtt

SEQ ID NO: 140630 - DNA, 22 bp, Artificial Sequence
  Synthetic oligonucleotide; TTG chr11 5246287 5246308 5246292 5246287 -
ctgagcaggagctctttagttt

SEQ ID NO: 140631 - DNA, 22 bp, Artificial Sequence
  Synthetic oligonucleotide; CTG chr11 5246284 5246305 5246289 5246284 -
agcaggagctctttagtttaat

SEQ ID NO: 140632 - DNA, 22 bp, Artificial Sequence
  Synthetic oligonucleotide; CTC chr11 5246273 5246294 5246278 5246273 -
tttagtttaattagattccatt

SEQ ID NO: 140633 - DNA, 22 bp, Artificial Sequence
  Synthetic oligonucleotide; CTT chr11 5246271 5246292 5246276 5246271 -
tagtttaattagattccattgg

SEQ ID NO: 140634 - DNA, 22 bp, Artificial Sequence
  Synthetic oligonucleotide; TTT chr11 5246270 5246291 5246275 5246270 -
agtttaattagattccattggt

SEQ ID NO: 140635 - DNA, 22 bp, Artificial Sequence
  Synthetic oligonucleotide; TTA chr11 5246269 5246290 5246274 5246269 -
gtttaattagattccattggtc

SEQ ID NO: 140636 - DNA, 22 bp, Artificial Sequence
  Synthetic oligonucleotide; TTT chr11 5246265 5246286 5246270 5246265 -
aattagattccattggtcaatt

SEQ ID NO: 140637 - DNA, 22 bp, Artificial Sequence
  Synthetic oligonucleotide; TTA chr11 5246264 5246285 5246269 5246264 -
attagattccattggtcaattt

SEQ ID NO: 140638 - DNA, 22 bp, Artificial Sequence
  Synthetic oligonucleotide; TTA chr11 5246260 5246281 5246265 5246260 -
gattccattggtcaatttttgc

SEQ ID NO: 140639 - DNA, 22 bp, Artificial Sequence
  Synthetic oligonucleotide; TTC chr11 5246255 5246276 5246260 5246255 -
cattggtcaatttttgcttttg

SEQ ID NO: 140640 - DNA, 22 bp, Artificial Sequence
  Synthetic oligonucleotide; TTG chr11 5246250 5246271 5246255 5246250 -
gtcaatttttgcttttgctgca

SEQ ID NO: 140641 - DNA, 22 bp, Artificial Sequence
  Synthetic oligonucleotide; TTT chr11 5246242 5246263 5246247 5246242 -
ttgcttttgctgcaattgcttt

SEQ ID NO: 140642 - DNA, 22 bp, Artificial Sequence
  Synthetic oligonucleotide; TTT chr11 5246241 5246262 5246246 5246241 -
tgcttttgctgcaattgctttt

SEQ ID NO: 140643 - DNA, 22 bp, Artificial Sequence
  Synthetic oligonucleotide; TTT chr11 5246240 5246261 5246245 5246240 -
gcttttgctgcaattgcttttc

SEQ ID NO: 140644 - DNA, 22 bp, Artificial Sequence
  Synthetic oligonucleotide; TTG chr11 5246239 5246260 5246244 5246239 -
cttttgctgcaattgcttttca

SEQ ID NO: 140645 - DNA, 22 bp, Artificial Sequence
  Synthetic oligonucleotide; CTT chr11 5246236 5246257 5246241 5246236 -
ttgctgcaattgcttttcacgc

SEQ ID NO: 140646 - DNA, 22 bp, Artificial Sequence
  Synthetic oligonucleotide; TTT chr11 5246235 5246256 5246240 5246235 -
tgctgcaattgcttttcacgct

SEQ ID NO: 140647 - DNA, 22 bp, Artificial Sequence
  Synthetic oligonucleotide; TTT chr11 5246234 5246255 5246239 5246234 -
gctgcaattgcttttcacgctt

SEQ ID NO: 140648 - DNA, 22 bp, Artificial Sequence
  Synthetic oligonucleotide; TTG chr11 5246233 5246254 5246238 5246233 -
ctgcaattgcttttcacgcttt

SEQ ID NO: 140649 - DNA, 22 bp, Artificial Sequence
  Synthetic oligonucleotide; CTG chr11 5246230 5246251 5246235 5246230 -
caattgcttttcacgctttcat

SEQ ID NO: 140650 - DNA, 22 bp, Artificial Sequence
  Synthetic oligonucleotide; TTG chr11 5246224 5246245 5246229 5246224 -
cttttcacgctttcatcatgaa

SEQ ID NO: 140651 - DNA, 22 bp, Artificial Sequence
  Synthetic oligonucleotide; CTT chr11 5246221 5246242 5246226 5246221 -
ttcacgctttcatcatgaaatc

SEQ ID NO: 140652 - DNA, 22 bp, Artificial Sequence
  Synthetic oligonucleotide; TTT chr11 5246220 5246241 5246225 5246220 -
tcacgctttcatcatgaaatct

SEQ ID NO: 140653 - DNA, 22 bp, Artificial Sequence
  Synthetic oligonucleotide; TTT chr11 5246219 5246240 5246224 5246219 -
cacgctttcatcatgaaatctg

SEQ ID NO: 140654 - DNA, 22 bp, Artificial Sequence
  Synthetic oligonucleotide; TTC chr11 5246218 5246239 5246223 5246218 -
acgctttcatcatgaaatctgt

SEQ ID NO: 140655 - DNA, 22 bp, Artificial Sequence
  Synthetic oligonucleotide; CTT chr11 5246212 5246233 5246217 5246212 -
tcatcatgaaatctgtgcccgt

SEQ ID NO: 140656 - DNA, 22 bp, Artificial Sequence
  Synthetic oligonucleotide; TTT chr11 5246211 5246232 5246216 5246211 -
catcatgaaatctgtgcccgtg

SEQ ID NO: 140657 - DNA, 22 bp, Artificial Sequence
  Synthetic oligonucleotide; TTC chr11 5246210 5246231 5246215 5246210 -
atcatgaaatctgtgcccgtgt

SEQ ID NO: 140658 - DNA, 22 bp, Artificial Sequence
  Synthetic oligonucleotide; CTG chr11 5246197 5246218 5246202 5246197 -
tgcccgtgtttatatcatgaat

SEQ ID NO: 140659 - DNA, 22 bp, Artificial Sequence
  Synthetic oligonucleotide; TTT chr11 5246186 5246207 5246191 5246186 -
atatcatgaatagtattgcctt

SEQ ID NO: 140660 - DNA, 22 bp, Artificial Sequence
  Synthetic oligonucleotide; TTA chr11 5246185 5246206 5246190 5246185 -
tatcatgaatagtattgccttg

SEQ ID NO: 140661 - DNA, 22 bp, Artificial Sequence
  Synthetic oligonucleotide; TTG chr11 5246168 5246189 5246173 5246168 -
ccttgatttttttctaggcttt

SEQ ID NO: 140662 - DNA, 22 bp, Artificial Sequence
  Synthetic oligonucleotide; CTT chr11 5246164 5246185 5246169 5246164 -
gatttttttctaggctttttat

SEQ ID NO: 140663 - DNA, 22 bp, Artificial Sequence
  Synthetic oligonucleotide; TTG chr11 5246163 5246184 5246168 5246163 -
atttttttctaggctttttata

SEQ ID NO: 140664 - DNA, 22 bp, Artificial Sequence
  Synthetic oligonucleotide; TTT chr11 5246159 5246180 5246164 5246159 -
ttttctaggctttttatagttt

SEQ ID NO: 140665 - DNA, 22 bp, Artificial Sequence
  Synthetic oligonucleotide; TTT chr11 5246158 5246179 5246163 5246158 -
tttctaggctttttatagtttg

SEQ ID NO: 140666 - DNA, 22 bp, Artificial Sequence
  Synthetic oligonucleotide; TTT chr11 5246157 5246178 5246162 5246157 -
ttctaggctttttatagtttgg

SEQ ID NO: 140667 - DNA, 22 bp, Artificial Sequence
  Synthetic oligonucleotide; TTT chr11 5246156 5246177 5246161 5246156 -
tctaggctttttatagtttggg

SEQ ID NO: 140668 - DNA, 22 bp, Artificial Sequence
  Synthetic oligonucleotide; TTT chr11 5246155 5246176 5246160 5246155 -
ctaggctttttatagtttgggg

SEQ ID NO: 140669 - DNA, 22 bp, Artificial Sequence
  Synthetic oligonucleotide; TTC chr11 5246154 5246175 5246159 5246154 -
taggctttttatagtttggggt

SEQ ID NO: 140670 - DNA, 22 bp, Artificial Sequence
  Synthetic oligonucleotide; CTA chr11 5246152 5246173 5246157 5246152 -
ggctttttatagtttggggttt

SEQ ID NO: 140671 - DNA, 22 bp, Artificial Sequence
  Synthetic oligonucleotide; CTT chr11 5246147 5246168 5246152 5246147 -
tttatagtttggggtttttcat

SEQ ID NO: 140672 - DNA, 22 bp, Artificial Sequence
  Synthetic oligonucleotide; TTT chr11 5246146 5246167 5246151 5246146 -
ttatagtttggggtttttcatt

SEQ ID NO: 140673 - DNA, 22 bp, Artificial Sequence
  Synthetic oligonucleotide; TTT chr11 5246145 5246166 5246150 5246145 -
tatagtttggggtttttcattt

SEQ ID NO: 140674 - DNA, 22 bp, Artificial Sequence
  Synthetic oligonucleotide; TTT chr11 5246144 5246165 5246149 5246144 -
atagtttggggtttttcattta

SEQ ID NO: 140675 - DNA, 22 bp, Artificial Sequence
  Synthetic oligonucleotide; TTA chr11 5246143 5246164 5246148 5246143 -
tagtttggggtttttcatttaa

SEQ ID NO: 140676 - DNA, 22 bp, Artificial Sequence
  Synthetic oligonucleotide; TTT chr11 5246137 5246158 5246142 5246137 -
ggggtttttcatttaagtctct

SEQ ID NO: 140677 - DNA, 22 bp, Artificial Sequence
  Synthetic oligonucleotide; TTG chr11 5246136 5246157 5246141 5246136 -
gggtttttcatttaagtctcta

SEQ ID NO: 140678 - DNA, 22 bp, Artificial Sequence
  Synthetic oligonucleotide; TTT chr11 5246130 5246151 5246135 5246130 -
ttcatttaagtctctaatccat

SEQ ID NO: 140679 - DNA, 22 bp, Artificial Sequence
  Synthetic oligonucleotide; TTT chr11 5246129 5246150 5246134 5246129 -
tcatttaagtctctaatccatc

SEQ ID NO: 140680 - DNA, 22 bp, Artificial Sequence
  Synthetic oligonucleotide; TTT chr11 5246128 5246149 5246133 5246128 -
catttaagtctctaatccatct

SEQ ID NO: 140681 - DNA, 22 bp, Artificial Sequence
  Synthetic oligonucleotide; TTC chr11 5246127 5246148 5246132 5246127 -
atttaagtctctaatccatctg

SEQ ID NO: 140682 - DNA, 22 bp, Artificial Sequence
  Synthetic oligonucleotide; TTT chr11 5246123 5246144 5246128 5246123 -
aagtctctaatccatctggagt

SEQ ID NO: 140683 - DNA, 22 bp, Artificial Sequence
  Synthetic oligonucleotide; TTA chr11 5246122 5246143 5246127 5246122 -
agtctctaatccatctggagtt

SEQ ID NO: 140684 - DNA, 22 bp, Artificial Sequence
  Synthetic oligonucleotide; CTC chr11 5246116 5246137 5246121 5246116 -
taatccatctggagttaatttt

SEQ ID NO: 140685 - DNA, 22 bp, Artificial Sequence
  Synthetic oligonucleotide; CTA chr11 5246114 5246135 5246119 5246114 -
atccatctggagttaattttgg

SEQ ID NO: 140686 - DNA, 22 bp, Artificial Sequence
  Synthetic oligonucleotide; CTG chr11 5246105 5246126 5246110 5246105 -
gagttaattttggataaggtat

SEQ ID NO: 140687 - DNA, 22 bp, Artificial Sequence
  Synthetic oligonucleotide; TTA chr11 5246099 5246120 5246104 5246099 -
attttggataaggtataaggaa

SEQ ID NO: 140688 - DNA, 22 bp, Artificial Sequence
  Synthetic oligonucleotide; TTT chr11 5246095 5246116 5246100 5246095 -
tggataaggtataaggaaggag

SEQ ID NO: 140689 - DNA, 22 bp, Artificial Sequence
  Synthetic oligonucleotide; TTT chr11 5246094 5246115 5246099 5246094 -
ggataaggtataaggaaggagt

SEQ ID NO: 140690 - DNA, 22 bp, Artificial Sequence
  Synthetic oligonucleotide; TTG chr11 5246093 5246114 5246098 5246093 -
gataaggtataaggaaggagtc

SEQ ID NO: 140691 - DNA, 22 bp, Artificial Sequence
  Synthetic oligonucleotide; TTT chr11 5246065 5246086 5246070 5246065 -
catttttcagcatatggctagc

SEQ ID NO: 140692 - DNA, 22 bp, Artificial Sequence
  Synthetic oligonucleotide; TTC chr11 5246064 5246085 5246069 5246064 -
atttttcagcatatggctagcc

SEQ ID NO: 140693 - DNA, 22 bp, Artificial Sequence
  Synthetic oligonucleotide; TTT chr11 5246060 5246081 5246065 5246060 -
ttcagcatatggctagccagtt

SEQ ID NO: 140694 - DNA, 22 bp, Artificial Sequence
  Synthetic oligonucleotide; TTT chr11 5246059 5246080 5246064 5246059 -
tcagcatatggctagccagttc

SEQ ID NO: 140695 - DNA, 22 bp, Artificial Sequence
  Synthetic oligonucleotide; TTT chr11 5246058 5246079 5246063 5246058 -
cagcatatggctagccagttct

SEQ ID NO: 140696 - DNA, 22 bp, Artificial Sequence
  Synthetic oligonucleotide; TTC chr11 5246057 5246078 5246062 5246057 -
agcatatggctagccagttctc

SEQ ID NO: 140697 - DNA, 22 bp, Artificial Sequence
  Synthetic oligonucleotide; CTA chr11 5246045 5246066 5246050 5246045 -
gccagttctcccccatcattta

SEQ ID NO: 140698 - DNA, 22 bp, Artificial Sequence
  Synthetic oligonucleotide; TTC chr11 5246037 5246058 5246042 5246037 -
tcccccatcatttattaaattg

SEQ ID NO: 140699 - DNA, 22 bp, Artificial Sequence
  Synthetic oligonucleotide; CTC chr11 5246035 5246056 5246040 5246035 -
ccccatcatttattaaattgaa

SEQ ID NO: 140700 - DNA, 22 bp, Artificial Sequence
  Synthetic oligonucleotide; TTT chr11 5246024 5246045 5246029 5246024 -
attaaattgaaaatcctttccc

SEQ ID NO: 140701 - DNA, 22 bp, Artificial Sequence
  Synthetic oligonucleotide; TTA chr11 5246023 5246044 5246028 5246023 -
ttaaattgaaaatcctttcccc

SEQ ID NO: 140702 - DNA, 22 bp, Artificial Sequence
  Synthetic oligonucleotide; TTA chr11 5246020 5246041 5246025 5246020 -
aattgaaaatcctttccccatt

SEQ ID NO: 140703 - DNA, 22 bp, Artificial Sequence
  Synthetic oligonucleotide; TTG chr11 5246015 5246036 5246020 5246015 -
aaaatcctttccccattgcttg

SEQ ID NO: 140704 - DNA, 22 bp, Artificial Sequence
  Synthetic oligonucleotide; CTT chr11 5246006 5246027 5246011 5246006 -
tccccattgcttgcttttgtca

SEQ ID NO: 140705 - DNA, 22 bp, Artificial Sequence
  Synthetic oligonucleotide; TTT chr11 5246005 5246026 5246010 5246005 -
ccccattgcttgcttttgtcag

SEQ ID NO: 140706 - DNA, 22 bp, Artificial Sequence
  Synthetic oligonucleotide; TTC chr11 5246004 5246025 5246009 5246004 -
cccattgcttgcttttgtcagg

SEQ ID NO: 140707 - DNA, 22 bp, Artificial Sequence
  Synthetic oligonucleotide; TTG chr11 5245997 5246018 5246002 5245997 -
cttgcttttgtcaggtttctaa

SEQ ID NO: 140708 - DNA, 22 bp, Artificial Sequence
  Synthetic oligonucleotide; CTT chr11 5245994 5246015 5245999 5245994 -
gcttttgtcaggtttctaaaag

SEQ ID NO: 140709 - DNA, 22 bp, Artificial Sequence
  Synthetic oligonucleotide; TTG chr11 5245993 5246014 5245998 5245993 -
cttttgtcaggtttctaaaaga

SEQ ID NO: 140710 - DNA, 22 bp, Artificial Sequence
  Synthetic oligonucleotide; CTT chr11 5245990 5246011 5245995 5245990 -
ttgtcaggtttctaaaagacca

SEQ ID NO: 140711 - DNA, 22 bp, Artificial Sequence
  Synthetic oligonucleotide; TTT chr11 5245989 5246010 5245994 5245989 -
tgtcaggtttctaaaagaccag

SEQ ID NO: 140712 - DNA, 22 bp, Artificial Sequence
  Synthetic oligonucleotide; TTT chr11 5245988 5246009 5245993 5245988 -
gtcaggtttctaaaagaccaga

SEQ ID NO: 140713 - DNA, 22 bp, Artificial Sequence
  Synthetic oligonucleotide; TTG chr11 5245987 5246008 5245992 5245987 -
tcaggtttctaaaagaccagat

SEQ ID NO: 140714 - DNA, 22 bp, Artificial Sequence
  Synthetic oligonucleotide; TTT chr11 5245979 5246000 5245984 5245979 -
ctaaaagaccagatggttgtag

SEQ ID NO: 140715 - DNA, 22 bp, Artificial Sequence
  Synthetic oligonucleotide; TTC chr11 5245978 5245999 5245983 5245978 -
taaaagaccagatggttgtagg

SEQ ID NO: 140716 - DNA, 22 bp, Artificial Sequence
  Synthetic oligonucleotide; CTA chr11 5245976 5245997 5245981 5245976 -
aaagaccagatggttgtaggta

SEQ ID NO: 140717 - DNA, 22 bp, Artificial Sequence
  Synthetic oligonucleotide; TTG chr11 5245960 5245981 5245965 5245960 -
taggtacaatatgcagtttctt

SEQ ID NO: 140718 - DNA, 22 bp, Artificial Sequence
  Synthetic oligonucleotide; TTT chr11 5245941 5245962 5245946 5245941 -
cttcaagtcatataataccatc

SEQ ID NO: 140719 - DNA, 22 bp, Artificial Sequence
  Synthetic oligonucleotide; TTC chr11 5245940 5245961 5245945 5245940 -
ttcaagtcatataataccatct

SEQ ID NO: 140720 - DNA, 22 bp, Artificial Sequence
  Synthetic oligonucleotide; CTT chr11 5245938 5245959 5245943 5245938 -
caagtcatataataccatctga

SEQ ID NO: 140721 - DNA, 22 bp, Artificial Sequence
  Synthetic oligonucleotide; TTC chr11 5245937 5245958 5245942 5245937 -
aagtcatataataccatctgaa

SEQ ID NO: 140722 - DNA, 22 bp, Artificial Sequence
  Synthetic oligonucleotide; CTG chr11 5245917 5245938 5245922 5245917 -
aaatctcttattaattcatttc

SEQ ID NO: 140723 - DNA, 22 bp, Artificial Sequence
  Synthetic oligonucleotide; CTC chr11 5245910 5245931 5245915 5245910 -
ttattaattcatttcttttagt

SEQ ID NO: 140724 - DNA, 22 bp, Artificial Sequence
  Synthetic oligonucleotide; CTT chr11 5245908 5245929 5245913 5245908 -
attaattcatttcttttagtat

SEQ ID NO: 140725 - DNA, 22 bp, Artificial Sequence
  Synthetic oligonucleotide; TTA chr11 5245907 5245928 5245912 5245907 -
ttaattcatttcttttagtatg

SEQ ID NO: 140726 - DNA, 22 bp, Artificial Sequence
  Synthetic oligonucleotide; TTA chr11 5245904 5245925 5245909 5245904 -
attcatttcttttagtatgtat

SEQ ID NO: 140727 - DNA, 22 bp, Artificial Sequence
  Synthetic oligonucleotide; TTC chr11 5245900 5245921 5245905 5245900 -
atttcttttagtatgtatgctg

SEQ ID NO: 140728 - DNA, 22 bp, Artificial Sequence
  Synthetic oligonucleotide; TTT chr11 5245896 5245917 5245901 5245896 -
cttttagtatgtatgctggtct

SEQ ID NO: 140729 - DNA, 22 bp, Artificial Sequence
  Synthetic oligonucleotide; TTC chr11 5245895 5245916 5245900 5245895 -
ttttagtatgtatgctggtctc

SEQ ID NO: 140730 - DNA, 22 bp, Artificial Sequence
  Synthetic oligonucleotide; CTT chr11 5245893 5245914 5245898 5245893 -
ttagtatgtatgctggtctcct

SEQ ID NO: 140731 - DNA, 22 bp, Artificial Sequence
  Synthetic oligonucleotide; TTT chr11 5245892 5245913 5245897 5245892 -
tagtatgtatgctggtctcctc

SEQ ID NO: 140732 - DNA, 22 bp, Artificial Sequence
  Synthetic oligonucleotide; TTT chr11 5245891 5245912 5245896 5245891 -
agtatgtatgctggtctcctct

SEQ ID NO: 140733 - DNA, 22 bp, Artificial Sequence
  Synthetic oligonucleotide; TTA chr11 5245890 5245911 5245895 5245890 -
gtatgtatgctggtctcctctg

SEQ ID NO: 140734 - DNA, 22 bp, Artificial Sequence
  Synthetic oligonucleotide; CTG chr11 5245878 5245899 5245883 5245878 -
gtctcctctgctcactatagtg

SEQ ID NO: 140735 - DNA, 22 bp, Artificial Sequence
  Synthetic oligonucleotide; CTC chr11 5245873 5245894 5245878 5245873 -
ctctgctcactatagtgagggc

SEQ ID NO: 140736 - DNA, 22 bp, Artificial Sequence
  Synthetic oligonucleotide; CTC chr11 5245870 5245891 5245875 5245870 -
tgctcactatagtgagggcacc

SEQ ID NO: 140737 - DNA, 22 bp, Artificial Sequence
  Synthetic oligonucleotide; CTG chr11 5245868 5245889 5245873 5245868 -
ctcactatagtgagggcaccat

SEQ ID NO: 140738 - DNA, 22 bp, Artificial Sequence
  Synthetic oligonucleotide; CTC chr11 5245865 5245886 5245870 5245865 -
actatagtgagggcaccattag

SEQ ID NO: 140739 - DNA, 22 bp, Artificial Sequence
  Synthetic oligonucleotide; CTA chr11 5245861 5245882 5245866 5245861 -
tagtgagggcaccattagccag

SEQ ID NO: 140740 - DNA, 22 bp, Artificial Sequence
  Synthetic oligonucleotide; TTA chr11 5245844 5245865 5245849 5245844 -
gccagagaatctgtctgtctag

SEQ ID NO: 140741 - DNA, 22 bp, Artificial Sequence
  Synthetic oligonucleotide; CTG chr11 5245831 5245852 5245836 5245831 -
tctgtctagttcatgtaagatt

SEQ ID NO: 140742 - DNA, 22 bp, Artificial Sequence
  Synthetic oligonucleotide; CTG chr11 5245827 5245848 5245832 5245827 -
tctagttcatgtaagattctca

SEQ ID NO: 140743 - DNA, 22 bp, Artificial Sequence
  Synthetic oligonucleotide; CTA chr11 5245823 5245844 5245828 5245823 -
gttcatgtaagattctcagaat

SEQ ID NO: 140744 - DNA, 22 bp, Artificial Sequence
  Synthetic oligonucleotide; TTC chr11 5245819 5245840 5245824 5245819 -
atgtaagattctcagaattaag

SEQ ID NO: 140745 - DNA, 22 bp, Artificial Sequence
  Synthetic oligonucleotide; TTC chr11 5245808 5245829 5245813 5245808 -
tcagaattaagaaaaatggatg

SEQ ID NO: 140746 - DNA, 22 bp, Artificial Sequence
  Synthetic oligonucleotide; CTC chr11 5245806 5245827 5245811 5245806 -
agaattaagaaaaatggatggc

SEQ ID NO: 140747 - DNA, 22 bp, Artificial Sequence
  Synthetic oligonucleotide; TTA chr11 5245799 5245820 5245804 5245799 -
agaaaaatggatggcatatgaa

SEQ ID NO: 140748 - DNA, 22 bp, Artificial Sequence
  Synthetic oligonucleotide; CTT chr11 5245769 5245790 5245774 5245769 -
catggatgacatatggaatcta

SEQ ID NO: 140749 - DNA, 22 bp, Artificial Sequence
  Synthetic oligonucleotide; TTC chr11 5245768 5245789 5245773 5245768 -
atggatgacatatggaatctaa

SEQ ID NO: 140750 - DNA, 22 bp, Artificial Sequence
  Synthetic oligonucleotide; CTA chr11 5245747 5245768 5245752 5245747 -
atatgtatttgttgaattaatg

SEQ ID NO: 140751 - DNA, 22 bp, Artificial Sequence
  Synthetic oligonucleotide; TTT chr11 5245737 5245758 5245742 5245737 -
gttgaattaatgcataagatgc

SEQ ID NO: 140752 - DNA, 22 bp, Artificial Sequence
  Synthetic oligonucleotide; TTG chr11 5245736 5245757 5245741 5245736 -
ttgaattaatgcataagatgca

SEQ ID NO: 140753 - DNA, 22 bp, Artificial Sequence
  Synthetic oligonucleotide; TTG chr11 5245733 5245754 5245738 5245733 -
aattaatgcataagatgcaaca

SEQ ID NO: 140754 - DNA, 22 bp, Artificial Sequence
  Synthetic oligonucleotide; TTA chr11 5245728 5245749 5245733 5245728 -
atgcataagatgcaacagagag

SEQ ID NO: 140755 - DNA, 22 bp, Artificial Sequence
  Synthetic oligonucleotide; TTG chr11 5245700 5245721 5245705 5245700 -
acaactgcaatgataacctggt

SEQ ID NO: 140756 - DNA, 22 bp, Artificial Sequence
  Synthetic oligonucleotide; CTG chr11 5245693 5245714 5245698 5245693 -
caatgataacctggtattgatg

SEQ ID NO: 140757 - DNA, 22 bp, Artificial Sequence
  Synthetic oligonucleotide; CTG chr11 5245680 5245701 5245685 5245680 -
gtattgatgatataagagtcta

SEQ ID NO: 140758 - DNA, 22 bp, Artificial Sequence
  Synthetic oligonucleotide; TTG chr11 5245674 5245695 5245679 5245674 -
atgatataagagtctatagatc

SEQ ID NO: 140759 - DNA, 22 bp, Artificial Sequence
  Synthetic oligonucleotide; CTA chr11 5245658 5245679 5245663 5245658 -
tagatcacagtagaagcaataa

SEQ ID NO: 140760 - DNA, 22 bp, Artificial Sequence
  Synthetic oligonucleotide; TTG chr11 5245620 5245641 5245625 5245620 -
gaaatggggaacagccacaaac

SEQ ID NO: 140761 - DNA, 22 bp, Artificial Sequence
  Synthetic oligonucleotide; CTT chr11 5245580 5245601 5245585 5245580 -
ccaggaaagtgactgcaggtca

SEQ ID NO: 140762 - DNA, 22 bp, Artificial Sequence
  Synthetic oligonucleotide; TTC chr11 5245579 5245600 5245584 5245579 -
caggaaagtgactgcaggtcac

SEQ ID NO: 140763 - DNA, 22 bp, Artificial Sequence
  Synthetic oligonucleotide; CTG chr11 5245565 5245586 5245570 5245565 -
caggtcacttttcctggagcgg

SEQ ID NO: 140764 - DNA, 22 bp, Artificial Sequence
  Synthetic oligonucleotide; CTT chr11 5245555 5245576 5245560 5245555 -
ttcctggagcgggtgagagaaa

SEQ ID NO: 140765 - DNA, 22 bp, Artificial Sequence
  Synthetic oligonucleotide; TTT chr11 5245554 5245575 5245559 5245554 -
tcctggagcgggtgagagaaaa

SEQ ID NO: 140766 - DNA, 22 bp, Artificial Sequence
  Synthetic oligonucleotide; TTT chr11 5245553 5245574 5245558 5245553 -
cctggagcgggtgagagaaaag

SEQ ID NO: 140767 - DNA, 22 bp, Artificial Sequence
  Synthetic oligonucleotide; TTC chr11 5245552 5245573 5245557 5245552 -
ctggagcgggtgagagaaaagt

SEQ ID NO: 140768 - DNA, 22 bp, Artificial Sequence
  Synthetic oligonucleotide; CTG chr11 5245549 5245570 5245554 5245549 -
gagcgggtgagagaaaagtgga

SEQ ID NO: 140769 - DNA, 22 bp, Artificial Sequence
  Synthetic oligonucleotide; TTA chr11 5245522 5245543 5245527 5245522 -
gcagtaactgctgaattcctgg

SEQ ID NO: 140770 - DNA, 22 bp, Artificial Sequence
  Synthetic oligonucleotide; CTG chr11 5245512 5245533 5245517 5245512 -
ctgaattcctggttggctgatg

SEQ ID NO: 140771 - DNA, 22 bp, Artificial Sequence
  Synthetic oligonucleotide; CTG chr11 5245509 5245530 5245514 5245509 -
aattcctggttggctgatggaa

SEQ ID NO: 140772 - DNA, 22 bp, Artificial Sequence
  Synthetic oligonucleotide; TTC chr11 5245504 5245525 5245509 5245504 -
ctggttggctgatggaaagatg

SEQ ID NO: 140773 - DNA, 22 bp, Artificial Sequence
  Synthetic oligonucleotide; CTG chr11 5245501 5245522 5245506 5245501 -
gttggctgatggaaagatgggg

SEQ ID NO: 140774 - DNA, 22 bp, Artificial Sequence
  Synthetic oligonucleotide; TTG chr11 5245497 5245518 5245502 5245497 -
gctgatggaaagatggggcagc

SEQ ID NO: 140775 - DNA, 22 bp, Artificial Sequence
  Synthetic oligonucleotide; CTG chr11 5245493 5245514 5245498 5245493 -
atggaaagatggggcagctgtt

SEQ ID NO: 140776 - DNA, 22 bp, Artificial Sequence
  Synthetic oligonucleotide; CTG chr11 5245473 5245494 5245478 5245473 -
ttcactggtacgcagggtttta

SEQ ID NO: 140777 - DNA, 22 bp, Artificial Sequence
  Synthetic oligonucleotide; TTC chr11 5245470 5245491 5245475 5245470 -
actggtacgcagggttttagat

SEQ ID NO: 140778 - DNA, 22 bp, Artificial Sequence
  Synthetic oligonucleotide; CTG chr11 5245466 5245487 5245471 5245466 -
gtacgcagggttttagatgtat

SEQ ID NO: 140779 - DNA, 22 bp, Artificial Sequence
  Synthetic oligonucleotide; TTT chr11 5245453 5245474 5245458 5245453 -
tagatgtatgtacctaaggata

SEQ ID NO: 140780 - DNA, 22 bp, Artificial Sequence
  Synthetic oligonucleotide; TTT chr11 5245452 5245473 5245457 5245452 -
agatgtatgtacctaaggatat

SEQ ID NO: 140781 - DNA, 22 bp, Artificial Sequence
  Synthetic oligonucleotide; TTA chr11 5245451 5245472 5245456 5245451 -
gatgtatgtacctaaggatatg

SEQ ID NO: 140782 - DNA, 22 bp, Artificial Sequence
  Synthetic oligonucleotide; CTA chr11 5245437 5245458 5245442 5245437 -
aggatatgaggtatggcaatga

SEQ ID NO: 140783 - DNA, 22 bp, Artificial Sequence
  Synthetic oligonucleotide; TTC chr11 5245405 5245426 5245410 5245405 -
ttttgggaatgagttttagggc

SEQ ID NO: 140784 - DNA, 22 bp, Artificial Sequence
  Synthetic oligonucleotide; CTT chr11 5245403 5245424 5245408 5245403 -
ttgggaatgagttttagggcca

SEQ ID NO: 140785 - DNA, 22 bp, Artificial Sequence
  Synthetic oligonucleotide; TTT chr11 5245402 5245423 5245407 5245402 -
tgggaatgagttttagggccat

SEQ ID NO: 140786 - DNA, 22 bp, Artificial Sequence
  Synthetic oligonucleotide; TTT chr11 5245401 5245422 5245406 5245401 -
gggaatgagttttagggccatt

SEQ ID NO: 140787 - DNA, 22 bp, Artificial Sequence
  Synthetic oligonucleotide; TTG chr11 5245400 5245421 5245405 5245400 -
ggaatgagttttagggccatta

SEQ ID NO: 140788 - DNA, 22 bp, Artificial Sequence
  Synthetic oligonucleotide; TTT chr11 5245389 5245410 5245394 5245389 -
tagggccattaaaggacatgac

SEQ ID NO: 140789 - DNA, 22 bp, Artificial Sequence
  Synthetic oligonucleotide; TTT chr11 5245388 5245409 5245393 5245388 -
agggccattaaaggacatgacc

SEQ ID NO: 140790 - DNA, 22 bp, Artificial Sequence
  Synthetic oligonucleotide; TTA chr11 5245387 5245408 5245392 5245387 -
gggccattaaaggacatgacct

SEQ ID NO: 140791 - DNA, 22 bp, Artificial Sequence
  Synthetic oligonucleotide; TTA chr11 5245378 5245399 5245383 5245378 -
aaggacatgacctgaagtttcc

SEQ ID NO: 140792 - DNA, 22 bp, Artificial Sequence
  Synthetic oligonucleotide; CTG chr11 5245364 5245385 5245369 5245364 -
aagtttcctctgaggccagtcc

SEQ ID NO: 140793 - DNA, 22 bp, Artificial Sequence
  Synthetic oligonucleotide; TTT chr11 5245358 5245379 5245363 5245358 -
cctctgaggccagtccccacaa

SEQ ID NO: 140794 - DNA, 22 bp, Artificial Sequence
  Synthetic oligonucleotide; TTC chr11 5245357 5245378 5245362 5245357 -
ctctgaggccagtccccacaac

SEQ ID NO: 140795 - DNA, 22 bp, Artificial Sequence
  Synthetic oligonucleotide; CTC chr11 5245354 5245375 5245359 5245354 -
tgaggccagtccccacaactca

SEQ ID NO: 140796 - DNA, 22 bp, Artificial Sequence
  Synthetic oligonucleotide; CTG chr11 5245352 5245373 5245357 5245352 -
aggccagtccccacaactcaat

SEQ ID NO: 140797 - DNA, 22 bp, Artificial Sequence
  Synthetic oligonucleotide; CTC chr11 5245333 5245354 5245338 5245333 -
aatataaatgtgtttcctgcat

SEQ ID NO: 140798 - DNA, 22 bp, Artificial Sequence
  Synthetic oligonucleotide; TTT chr11 5245318 5245339 5245323 5245318 -
cctgcatatagtcaaagttgcc

SEQ ID NO: 140799 - DNA, 22 bp, Artificial Sequence
  Synthetic oligonucleotide; TTC chr11 5245317 5245338 5245322 5245317 -
ctgcatatagtcaaagttgcca

SEQ ID NO: 140800 - DNA, 22 bp, Artificial Sequence
  Synthetic oligonucleotide; CTG chr11 5245314 5245335 5245319 5245314 -
catatagtcaaagttgccactt

SEQ ID NO: 140801 - DNA, 22 bp, Artificial Sequence
  Synthetic oligonucleotide; TTG chr11 5245298 5245319 5245303 5245298 -
ccacttctttttcttcatatca

SEQ ID NO: 140802 - DNA, 22 bp, Artificial Sequence
  Synthetic oligonucleotide; CTT chr11 5245292 5245313 5245297 5245292 -
ctttttcttcatatcatcgatc

SEQ ID NO: 140803 - DNA, 22 bp, Artificial Sequence
  Synthetic oligonucleotide; TTC chr11 5245291 5245312 5245296 5245291 -
tttttcttcatatcatcgatct

SEQ ID NO: 140804 - DNA, 22 bp, Artificial Sequence
  Synthetic oligonucleotide; CTT chr11 5245289 5245310 5245294 5245289 -
tttcttcatatcatcgatctct

SEQ ID NO: 140805 - DNA, 22 bp, Artificial Sequence
  Synthetic oligonucleotide; TTT chr11 5245288 5245309 5245293 5245288 -
ttcttcatatcatcgatctctg

SEQ ID NO: 140806 - DNA, 22 bp, Artificial Sequence
  Synthetic oligonucleotide; TTT chr11 5245287 5245308 5245292 5245287 -
tcttcatatcatcgatctctgc

SEQ ID NO: 140807 - DNA, 22 bp, Artificial Sequence
  Synthetic oligonucleotide; TTT chr11 5245286 5245307 5245291 5245286 -
cttcatatcatcgatctctgct

SEQ ID NO: 140808 - DNA, 22 bp, Artificial Sequence
  Synthetic oligonucleotide; TTC chr11 5245285 5245306 5245290 5245285 -
ttcatatcatcgatctctgctc

SEQ ID NO: 140809 - DNA, 22 bp, Artificial Sequence
  Synthetic oligonucleotide; CTT chr11 5245283 5245304 5245288 5245283 -
catatcatcgatctctgctctt

SEQ ID NO: 140810 - DNA, 22 bp, Artificial Sequence
  Synthetic oligonucleotide; TTC chr11 5245282 5245303 5245287 5245282 -
atatcatcgatctctgctctta

SEQ ID NO: 140811 - DNA, 22 bp, Artificial Sequence
  Synthetic oligonucleotide; CTC chr11 5245268 5245289 5245273 5245268 -
tgctcttaaagataatcttggt

SEQ ID NO: 140812 - DNA, 22 bp, Artificial Sequence
  Synthetic oligonucleotide; CTG chr11 5245266 5245287 5245271 5245266 -
ctcttaaagataatcttggttt

SEQ ID NO: 140813 - DNA, 22 bp, Artificial Sequence
  Synthetic oligonucleotide; CTC chr11 5245263 5245284 5245268 5245263 -
ttaaagataatcttggttttgc

SEQ ID NO: 140814 - DNA, 22 bp, Artificial Sequence
  Synthetic oligonucleotide; CTT chr11 5245261 5245282 5245266 5245261 -
aaagataatcttggttttgcct

SEQ ID NO: 140815 - DNA, 22 bp, Artificial Sequence
  Synthetic oligonucleotide; TTA chr11 5245260 5245281 5245265 5245260 -
aagataatcttggttttgcctc

SEQ ID NO: 140816 - DNA, 22 bp, Artificial Sequence
  Synthetic oligonucleotide; CTT chr11 5245249 5245270 5245254 5245249 -
ggttttgcctcaaactgtttgt

SEQ ID NO: 140817 - DNA, 22 bp, Artificial Sequence
  Synthetic oligonucleotide; TTG chr11 5245248 5245269 5245253 5245248 -
gttttgcctcaaactgtttgtc

SEQ ID NO: 140818 - DNA, 22 bp, Artificial Sequence
  Synthetic oligonucleotide; TTT chr11 5245244 5245265 5245249 5245244 -
tgcctcaaactgtttgtcacta

SEQ ID NO: 140819 - DNA, 22 bp, Artificial Sequence
  Synthetic oligonucleotide; TTT chr11 5245243 5245264 5245248 5245243 -
gcctcaaactgtttgtcactac

SEQ ID NO: 140820 - DNA, 22 bp, Artificial Sequence
  Synthetic oligonucleotide; TTG chr11 5245242 5245263 5245247 5245242 -
cctcaaactgtttgtcactaca

SEQ ID NO: 140821 - DNA, 22 bp, Artificial Sequence
  Synthetic oligonucleotide; CTC chr11 5245238 5245259 5245243 5245238 -
aaactgtttgtcactacaaact

SEQ ID NO: 140822 - DNA, 22 bp, Artificial Sequence
  Synthetic oligonucleotide; CTG chr11 5245232 5245253 5245237 5245232 -
tttgtcactacaaactttcccc

SEQ ID NO: 140823 - DNA, 22 bp, Artificial Sequence
  Synthetic oligonucleotide; TTT chr11 5245229 5245250 5245234 5245229 -
gtcactacaaactttccccatg

SEQ ID NO: 140824 - DNA, 22 bp, Artificial Sequence
  Synthetic oligonucleotide; TTG chr11 5245228 5245249 5245233 5245228 -
tcactacaaactttccccatgt

SEQ ID NO: 140825 - DNA, 22 bp, Artificial Sequence
  Synthetic oligonucleotide; CTA chr11 5245222 5245243 5245227 5245222 -
caaactttccccatgttcctaa

SEQ ID NO: 140826 - DNA, 22 bp, Artificial Sequence
  Synthetic oligonucleotide; CTT chr11 5245215 5245236 5245220 5245215 -
tccccatgttcctaagtaaaac

SEQ ID NO: 140827 - DNA, 22 bp, Artificial Sequence
  Synthetic oligonucleotide; TTT chr11 5245214 5245235 5245219 5245214 -
ccccatgttcctaagtaaaaca

SEQ ID NO: 140828 - DNA, 22 bp, Artificial Sequence
  Synthetic oligonucleotide; TTC chr11 5245213 5245234 5245218 5245213 -
cccatgttcctaagtaaaacag

SEQ ID NO: 140829 - DNA, 22 bp, Artificial Sequence
  Synthetic oligonucleotide; TTC chr11 5245204 5245225 5245209 5245204 -
ctaagtaaaacaggtaactgcc

SEQ ID NO: 140830 - DNA, 22 bp, Artificial Sequence
  Synthetic oligonucleotide; CTA chr11 5245201 5245222 5245206 5245201 -
agtaaaacaggtaactgcctct

SEQ ID NO: 140831 - DNA, 22 bp, Artificial Sequence
  Synthetic oligonucleotide; CTG chr11 5245184 5245205 5245189 5245184 -
cctctcaactatatcaagtaga

SEQ ID NO: 140832 - DNA, 22 bp, Artificial Sequence
  Synthetic oligonucleotide; CTC chr11 5245180 5245201 5245185 5245180 -
tcaactatatcaagtagactaa

SEQ ID NO: 140833 - DNA, 22 bp, Artificial Sequence
  Synthetic oligonucleotide; CTC chr11 5245178 5245199 5245183 5245178 -
aactatatcaagtagactaaaa

SEQ ID NO: 140834 - DNA, 22 bp, Artificial Sequence
  Synthetic oligonucleotide; CTA chr11 5245173 5245194 5245178 5245173 -
tatcaagtagactaaaatattg

SEQ ID NO: 140835 - DNA, 22 bp, Artificial Sequence
  Synthetic oligonucleotide; CTA chr11 5245159 5245180 5245164 5245159 -
aaatattgtgtctctaatatca

SEQ ID NO: 140836 - DNA, 22 bp, Artificial Sequence
  Synthetic oligonucleotide; TTG chr11 5245151 5245172 5245156 5245151 -
tgtctctaatatcagaaattca

SEQ ID NO: 140837 - DNA, 22 bp, Artificial Sequence
  Synthetic oligonucleotide; CTC chr11 5245145 5245166 5245150 5245145 -
taatatcagaaattcagcttta

SEQ ID NO: 140838 - DNA, 22 bp, Artificial Sequence
  Synthetic oligonucleotide; CTA chr11 5245143 5245164 5245148 5245143 -
atatcagaaattcagctttaat

SEQ ID NO: 140839 - DNA, 22 bp, Artificial Sequence
  Synthetic oligonucleotide; TTC chr11 5245130 5245151 5245135 5245130 -
agctttaatatattgggtttaa

SEQ ID NO: 140840 - DNA, 22 bp, Artificial Sequence
  Synthetic oligonucleotide; CTT chr11 5245125 5245146 5245130 5245125 -
taatatattgggtttaactctt

SEQ ID NO: 140841 - DNA, 22 bp, Artificial Sequence
  Synthetic oligonucleotide; TTT chr11 5245124 5245145 5245129 5245124 -
aatatattgggtttaactcttt

SEQ ID NO: 140842 - DNA, 22 bp, Artificial Sequence
  Synthetic oligonucleotide; TTA chr11 5245123 5245144 5245128 5245123 -
atatattgggtttaactctttg

SEQ ID NO: 140843 - DNA, 22 bp, Artificial Sequence
  Synthetic oligonucleotide; TTG chr11 5245115 5245136 5245120 5245115 -
ggtttaactctttgaaatttag

SEQ ID NO: 140844 - DNA, 22 bp, Artificial Sequence
  Synthetic oligonucleotide; TTT chr11 5245110 5245131 5245115 5245110 -
aactctttgaaatttagagtct

SEQ ID NO: 140845 - DNA, 22 bp, Artificial Sequence
  Synthetic oligonucleotide; TTA chr11 5245109 5245130 5245114 5245109 -
actctttgaaatttagagtctc

SEQ ID NO: 140846 - DNA, 22 bp, Artificial Sequence
  Synthetic oligonucleotide; CTC chr11 5245105 5245126 5245110 5245105 -
tttgaaatttagagtctccttg

SEQ ID NO: 140847 - DNA, 22 bp, Artificial Sequence
  Synthetic oligonucleotide; CTT chr11 5245103 5245124 5245108 5245103 -
tgaaatttagagtctccttgaa

SEQ ID NO: 140848 - DNA, 22 bp, Artificial Sequence
  Synthetic oligonucleotide; TTT chr11 5245102 5245123 5245107 5245102 -
gaaatttagagtctccttgaaa

SEQ ID NO: 140849 - DNA, 22 bp, Artificial Sequence
  Synthetic oligonucleotide; TTG chr11 5245101 5245122 5245106 5245101 -
aaatttagagtctccttgaaat

SEQ ID NO: 140850 - DNA, 22 bp, Artificial Sequence
  Synthetic oligonucleotide; TTT chr11 5245095 5245116 5245100 5245095 -
agagtctccttgaaatacacat

SEQ ID NO: 140851 - DNA, 22 bp, Artificial Sequence
  Synthetic oligonucleotide; TTA chr11 5245094 5245115 5245099 5245094 -
gagtctccttgaaatacacatg

SEQ ID NO: 140852 - DNA, 22 bp, Artificial Sequence
  Synthetic oligonucleotide; CTC chr11 5245087 5245108 5245092 5245087 -
cttgaaatacacatgggggtga

SEQ ID NO: 140853 - DNA, 22 bp, Artificial Sequence
  Synthetic oligonucleotide; CTT chr11 5245084 5245105 5245089 5245084 -
gaaatacacatgggggtgattt

SEQ ID NO: 140854 - DNA, 22 bp, Artificial Sequence
  Synthetic oligonucleotide; TTG chr11 5245083 5245104 5245088 5245083 -
aaatacacatgggggtgatttc

SEQ ID NO: 140855 - DNA, 22 bp, Artificial Sequence
  Synthetic oligonucleotide; TTT chr11 5245062 5245083 5245067 5245062 -
cctaaactttatttcttgtaag

SEQ ID NO: 140856 - DNA, 22 bp, Artificial Sequence
  Synthetic oligonucleotide; TTC chr11 5245061 5245082 5245066 5245061 -
ctaaactttatttcttgtaagg

SEQ ID NO: 140857 - DNA, 22 bp, Artificial Sequence
  Synthetic oligonucleotide; CTA chr11 5245058 5245079 5245063 5245058 -
aactttatttcttgtaaggatt

SEQ ID NO: 140858 - DNA, 22 bp, Artificial Sequence
  Synthetic oligonucleotide; CTT chr11 5245053 5245074 5245058 5245053 -
tatttcttgtaaggatttatct

SEQ ID NO: 140859 - DNA, 22 bp, Artificial Sequence
  Synthetic oligonucleotide; TTT chr11 5245052 5245073 5245057 5245052 -
atttcttgtaaggatttatctc

SEQ ID NO: 140860 - DNA, 22 bp, Artificial Sequence
  Synthetic oligonucleotide; TTA chr11 5245051 5245072 5245056 5245051 -
tttcttgtaaggatttatctca

SEQ ID NO: 140861 - DNA, 22 bp, Artificial Sequence
  Synthetic oligonucleotide; TTT chr11 5245048 5245069 5245053 5245048 -
cttgtaaggatttatctcaggg

SEQ ID NO: 140862 - DNA, 22 bp, Artificial Sequence
  Synthetic oligonucleotide; TTC chr11 5245047 5245068 5245052 5245047 -
ttgtaaggatttatctcagggg

SEQ ID NO: 140863 - DNA, 22 bp, Artificial Sequence
  Synthetic oligonucleotide; CTT chr11 5245045 5245066 5245050 5245045 -
gtaaggatttatctcaggggta

SEQ ID NO: 140864 - DNA, 22 bp, Artificial Sequence
  Synthetic oligonucleotide; TTG chr11 5245044 5245065 5245049 5245044 -
taaggatttatctcaggggtaa

SEQ ID NO: 140865 - DNA, 22 bp, Artificial Sequence
  Synthetic oligonucleotide; TTT chr11 5245035 5245056 5245040 5245035 -
atctcaggggtaacacacaaac

SEQ ID NO: 140866 - DNA, 22 bp, Artificial Sequence
  Synthetic oligonucleotide; TTA chr11 5245034 5245055 5245039 5245034 -
tctcaggggtaacacacaaacc

SEQ ID NO: 140867 - DNA, 22 bp, Artificial Sequence
  Synthetic oligonucleotide; CTC chr11 5245030 5245051 5245035 5245030 -
aggggtaacacacaaaccagca

SEQ ID NO: 140868 - DNA, 22 bp, Artificial Sequence
  Synthetic oligonucleotide; CTG chr11 5245003 5245024 5245008 5245003 -
aacctctaagtatgaggacagt

SEQ ID NO: 140869 - DNA, 22 bp, Artificial Sequence
  Synthetic oligonucleotide; CTC chr11 5244997 5245018 5245002 5244997 -
taagtatgaggacagtaagcct

SEQ ID NO: 140870 - DNA, 22 bp, Artificial Sequence
  Synthetic oligonucleotide; CTA chr11 5244995 5245016 5245000 5244995 -
agtatgaggacagtaagcctta

SEQ ID NO: 140871 - DNA, 22 bp, Artificial Sequence
  Synthetic oligonucleotide; CTT chr11 5244974 5244995 5244979 5244974 -
aagaatataaaataaactgttc

SEQ ID NO: 140872 - DNA, 22 bp, Artificial Sequence
  Synthetic oligonucleotide; TTA chr11 5244973 5244994 5244978 5244973 -
agaatataaaataaactgttct

SEQ ID NO: 140873 - DNA, 22 bp, Artificial Sequence
  Synthetic oligonucleotide; CTG chr11 5244955 5244976 5244960 5244955 -
ttcttctctctgccggtggaag

SEQ ID NO: 140874 - DNA, 22 bp, Artificial Sequence
  Synthetic oligonucleotide; TTC chr11 5244952 5244973 5244957 5244952 -
ttctctctgccggtggaagtgt

SEQ ID NO: 140875 - DNA, 22 bp, Artificial Sequence
  Synthetic oligonucleotide; CTT chr11 5244950 5244971 5244955 5244950 -
ctctctgccggtggaagtgtgc

SEQ ID NO: 140876 - DNA, 22 bp, Artificial Sequence
  Synthetic oligonucleotide; TTC chr11 5244949 5244970 5244954 5244949 -
tctctgccggtggaagtgtgcc

SEQ ID NO: 140877 - DNA, 22 bp, Artificial Sequence
  Synthetic oligonucleotide; CTC chr11 5244947 5244968 5244952 5244947 -
tctgccggtggaagtgtgccct

SEQ ID NO: 140878 - DNA, 22 bp, Artificial Sequence
  Synthetic oligonucleotide; CTC chr11 5244945 5244966 5244950 5244945 -
tgccggtggaagtgtgccctgt

SEQ ID NO: 140879 - DNA, 22 bp, Artificial Sequence
  Synthetic oligonucleotide; CTG chr11 5244943 5244964 5244948 5244943 -
ccggtggaagtgtgccctgtct

SEQ ID NO: 140880 - DNA, 22 bp, Artificial Sequence
  Synthetic oligonucleotide; CTG chr11 5244924 5244945 5244929 5244924 -
tctattcctgaaattgcttgtt

SEQ ID NO: 140881 - DNA, 22 bp, Artificial Sequence
  Synthetic oligonucleotide; CTA chr11 5244920 5244941 5244925 5244920 -
ttcctgaaattgcttgtttgag

SEQ ID NO: 140882 - DNA, 22 bp, Artificial Sequence
  Synthetic oligonucleotide; TTC chr11 5244917 5244938 5244922 5244917 -
ctgaaattgcttgtttgagacg

SEQ ID NO: 140883 - DNA, 22 bp, Artificial Sequence
  Synthetic oligonucleotide; CTG chr11 5244914 5244935 5244919 5244914 -
aaattgcttgtttgagacgcat

SEQ ID NO: 140884 - DNA, 22 bp, Artificial Sequence
  Synthetic oligonucleotide; TTG chr11 5244908 5244929 5244913 5244908 -
cttgtttgagacgcatgagacg

SEQ ID NO: 140885 - DNA, 22 bp, Artificial Sequence
  Synthetic oligonucleotide; CTT chr11 5244905 5244926 5244910 5244905 -
gtttgagacgcatgagacgtgc

SEQ ID NO: 140886 - DNA, 22 bp, Artificial Sequence
  Synthetic oligonucleotide; TTG chr11 5244904 5244925 5244909 5244904 -
tttgagacgcatgagacgtgca

SEQ ID NO: 140887 - DNA, 22 bp, Artificial Sequence
  Synthetic oligonucleotide; TTT chr11 5244901 5244922 5244906 5244901 -
gagacgcatgagacgtgcagca

SEQ ID NO: 140888 - DNA, 22 bp, Artificial Sequence
  Synthetic oligonucleotide; TTG chr11 5244900 5244921 5244905 5244900 -
agacgcatgagacgtgcagcac

SEQ ID NO: 140889 - DNA, 22 bp, Artificial Sequence
  Synthetic oligonucleotide; CTG chr11 5244856 5244877 5244861 5244856 -
tggaatattgtcagtgaagaat

SEQ ID NO: 140890 - DNA, 22 bp, Artificial Sequence
  Synthetic oligonucleotide; TTG chr11 5244846 5244867 5244851 5244846 -
tcagtgaagaatgtctttgcct

SEQ ID NO: 140891 - DNA, 22 bp, Artificial Sequence
  Synthetic oligonucleotide; CTT chr11 5244829 5244850 5244834 5244829 -
tgcctgattagatataaagaca

SEQ ID NO: 140892 - DNA, 22 bp, Artificial Sequence
  Synthetic oligonucleotide; TTT chr11 5244828 5244849 5244833 5244828 -
gcctgattagatataaagacaa

SEQ ID NO: 140893 - DNA, 22 bp, Artificial Sequence
  Synthetic oligonucleotide; TTG chr11 5244827 5244848 5244832 5244827 -
cctgattagatataaagacaag

SEQ ID NO: 140894 - DNA, 22 bp, Artificial Sequence
  Synthetic oligonucleotide; CTG chr11 5244823 5244844 5244828 5244823 -
attagatataaagacaagttaa

SEQ ID NO: 140895 - DNA, 22 bp, Artificial Sequence
  Synthetic oligonucleotide; TTA chr11 5244819 5244840 5244824 5244819 -
gatataaagacaagttaaacac

SEQ ID NO: 140896 - DNA, 22 bp, Artificial Sequence
  Synthetic oligonucleotide; TTA chr11 5244802 5244823 5244807 5244802 -
aacacagcattagactatagat

SEQ ID NO: 140897 - DNA, 22 bp, Artificial Sequence
  Synthetic oligonucleotide; TTA chr11 5244790 5244811 5244795 5244790 -
gactatagatcaagcctgtgcc

SEQ ID NO: 140898 - DNA, 22 bp, Artificial Sequence
  Synthetic oligonucleotide; CTA chr11 5244785 5244806 5244790 5244785 -
tagatcaagcctgtgccagaca

SEQ ID NO: 140899 - DNA, 22 bp, Artificial Sequence
  Synthetic oligonucleotide; CTG chr11 5244772 5244793 5244777 5244772 -
tgccagacacaaatgacctaat

SEQ ID NO: 140900 - DNA, 22 bp, Artificial Sequence
  Synthetic oligonucleotide; CTA chr11 5244752 5244773 5244757 5244752 -
atgcccagcacgggccacggaa

SEQ ID NO: 140901 - DNA, 22 bp, Artificial Sequence
  Synthetic oligonucleotide; CTC chr11 5244726 5244747 5244731 5244726 -
ctatcctcttgcttgaacagag

SEQ ID NO: 140902 - DNA, 22 bp, Artificial Sequence
  Synthetic oligonucleotide; CTA chr11 5244723 5244744 5244728 5244723 -
tcctcttgcttgaacagagcag

SEQ ID NO: 140903 - DNA, 22 bp, Artificial Sequence
  Synthetic oligonucleotide; CTC chr11 5244718 5244739 5244723 5244718 -
ttgcttgaacagagcagcacac

SEQ ID NO: 140904 - DNA, 22 bp, Artificial Sequence
  Synthetic oligonucleotide; CTT chr11 5244716 5244737 5244721 5244716 -
gcttgaacagagcagcacactt

SEQ ID NO: 140905 - DNA, 22 bp, Artificial Sequence
  Synthetic oligonucleotide; TTG chr11 5244715 5244736 5244720 5244715 -
cttgaacagagcagcacacttc

SEQ ID NO: 140906 - DNA, 22 bp, Artificial Sequence
  Synthetic oligonucleotide; CTT chr11 5244712 5244733 5244717 5244712 -
gaacagagcagcacacttctcc

SEQ ID NO: 140907 - DNA, 22 bp, Artificial Sequence
  Synthetic oligonucleotide; TTG chr11 5244711 5244732 5244716 5244711 -
aacagagcagcacacttctccc

SEQ ID NO: 140908 - DNA, 22 bp, Artificial Sequence
  Synthetic oligonucleotide; CTT chr11 5244694 5244715 5244699 5244694 -
ctcccccaacactattagatgt

SEQ ID NO: 140909 - DNA, 22 bp, Artificial Sequence
  Synthetic oligonucleotide; TTC chr11 5244693 5244714 5244698 5244693 -
tcccccaacactattagatgtt

SEQ ID NO: 140910 - DNA, 22 bp, Artificial Sequence
  Synthetic oligonucleotide; CTC chr11 5244691 5244712 5244696 5244691 -
ccccaacactattagatgttct

SEQ ID NO: 140911 - DNA, 22 bp, Artificial Sequence
  Synthetic oligonucleotide; CTA chr11 5244680 5244701 5244685 5244680 -
ttagatgttctggcataatttt

SEQ ID NO: 140912 - DNA, 22 bp, Artificial Sequence
  Synthetic oligonucleotide; TTA chr11 5244677 5244698 5244682 5244677 -
gatgttctggcataattttgta

SEQ ID NO: 140913 - DNA, 22 bp, Artificial Sequence
  Synthetic oligonucleotide; TTC chr11 5244670 5244691 5244675 5244670 -
tggcataattttgtagatatgt

SEQ ID NO: 140914 - DNA, 22 bp, Artificial Sequence
  Synthetic oligonucleotide; CTG chr11 5244668 5244689 5244673 5244668 -
gcataattttgtagatatgtag

SEQ ID NO: 140915 - DNA, 22 bp, Artificial Sequence
  Synthetic oligonucleotide; TTT chr11 5244659 5244680 5244664 5244659 -
tgtagatatgtaggatttgaca

SEQ ID NO: 140916 - DNA, 22 bp, Artificial Sequence
  Synthetic oligonucleotide; TTT chr11 5244658 5244679 5244663 5244658 -
gtagatatgtaggatttgacat

SEQ ID NO: 140917 - DNA, 22 bp, Artificial Sequence
  Synthetic oligonucleotide; TTG chr11 5244657 5244678 5244662 5244657 -
tagatatgtaggatttgacatg

SEQ ID NO: 140918 - DNA, 22 bp, Artificial Sequence
  Synthetic oligonucleotide; TTT chr11 5244641 5244662 5244646 5244641 -
gacatggactattgttcaatga

SEQ ID NO: 140919 - DNA, 22 bp, Artificial Sequence
  Synthetic oligonucleotide; TTG chr11 5244640 5244661 5244645 5244640 -
acatggactattgttcaatgat

SEQ ID NO: 140920 - DNA, 22 bp, Artificial Sequence
  Synthetic oligonucleotide; CTA chr11 5244630 5244651 5244635 5244630 -
ttgttcaatgattcagaggaaa

SEQ ID NO: 140921 - DNA, 22 bp, Artificial Sequence
  Synthetic oligonucleotide; TTG chr11 5244627 5244648 5244632 5244627 -
ttcaatgattcagaggaaatct

SEQ ID NO: 140922 - DNA, 22 bp, Artificial Sequence
  Synthetic oligonucleotide; TTC chr11 5244624 5244645 5244629 5244624 -
aatgattcagaggaaatctcct

SEQ ID NO: 140923 - DNA, 22 bp, Artificial Sequence
  Synthetic oligonucleotide; TTC chr11 5244616 5244637 5244621 5244616 -
agaggaaatctcctttgttcag

SEQ ID NO: 140924 - DNA, 22 bp, Artificial Sequence
  Synthetic oligonucleotide; CTC chr11 5244604 5244625 5244609 5244604 -
ctttgttcagataagtacactg

SEQ ID NO: 140925 - DNA, 22 bp, Artificial Sequence
  Synthetic oligonucleotide; CTT chr11 5244601 5244622 5244606 5244601 -
tgttcagataagtacactgact

SEQ ID NO: 140926 - DNA, 22 bp, Artificial Sequence
  Synthetic oligonucleotide; TTT chr11 5244600 5244621 5244605 5244600 -
gttcagataagtacactgacta

SEQ ID NO: 140927 - DNA, 22 bp, Artificial Sequence
  Synthetic oligonucleotide; TTG chr11 5244599 5244620 5244604 5244599 -
ttcagataagtacactgactac

SEQ ID NO: 140928 - DNA, 22 bp, Artificial Sequence
  Synthetic oligonucleotide; TTC chr11 5244596 5244617 5244601 5244596 -
agataagtacactgactactaa

SEQ ID NO: 140929 - DNA, 22 bp, Artificial Sequence
  Synthetic oligonucleotide; CTG chr11 5244582 5244603 5244587 5244582 -
actactaaatggattaaaaaac

SEQ ID NO: 140930 - DNA, 22 bp, Artificial Sequence
  Synthetic oligonucleotide; CTA chr11 5244578 5244599 5244583 5244578 -
ctaaatggattaaaaaacacag

SEQ ID NO: 140931 - DNA, 22 bp, Artificial Sequence
  Synthetic oligonucleotide; CTA chr11 5244575 5244596 5244580 5244575 -
aatggattaaaaaacacagtaa

SEQ ID NO: 140932 - DNA, 22 bp, Artificial Sequence
  Synthetic oligonucleotide; TTA chr11 5244566 5244587 5244571 5244566 -
aaaaacacagtaataaaaccca

SEQ ID NO: 140933 - DNA, 22 bp, Artificial Sequence
  Synthetic oligonucleotide; TTT chr11 5244540 5244561 5244545 5244540 -
tccccttacttccctagtttgt

SEQ ID NO: 140934 - DNA, 22 bp, Artificial Sequence
  Synthetic oligonucleotide; TTT chr11 5244539 5244560 5244544 5244539 -
ccccttacttccctagtttgtt

SEQ ID NO: 140935 - DNA, 22 bp, Artificial Sequence
  Synthetic oligonucleotide; TTC chr11 5244538 5244559 5244543 5244538 -
cccttacttccctagtttgttt

SEQ ID NO: 140936 - DNA, 22 bp, Artificial Sequence
  Synthetic oligonucleotide; CTT chr11 5244533 5244554 5244538 5244533 -
acttccctagtttgtttcttat

SEQ ID NO: 140937 - DNA, 22 bp, Artificial Sequence
  Synthetic oligonucleotide; TTA chr11 5244532 5244553 5244537 5244532 -
cttccctagtttgtttcttatt

SEQ ID NO: 140938 - DNA, 22 bp, Artificial Sequence
  Synthetic oligonucleotide; CTT chr11 5244529 5244550 5244534 5244529 -
ccctagtttgtttcttattctg

SEQ ID NO: 140939 - DNA, 22 bp, Artificial Sequence
  Synthetic oligonucleotide; TTC chr11 5244528 5244549 5244533 5244528 -
cctagtttgtttcttattctgc

SEQ ID NO: 140940 - DNA, 22 bp, Artificial Sequence
  Synthetic oligonucleotide; CTA chr11 5244524 5244545 5244529 5244524 -
gtttgtttcttattctgctttc

SEQ ID NO: 140941 - DNA, 22 bp, Artificial Sequence
  Synthetic oligonucleotide; TTT chr11 5244520 5244541 5244525 5244520 -
gtttcttattctgctttcttcc

SEQ ID NO: 140942 - DNA, 22 bp, Artificial Sequence
  Synthetic oligonucleotide; TTG chr11 5244519 5244540 5244524 5244519 -
tttcttattctgctttcttcca

SEQ ID NO: 140943 - DNA, 22 bp, Artificial Sequence
  Synthetic oligonucleotide; TTT chr11 5244516 5244537 5244521 5244516 -
cttattctgctttcttccaagt

SEQ ID NO: 140944 - DNA, 22 bp, Artificial Sequence
  Synthetic oligonucleotide; TTC chr11 5244515 5244536 5244520 5244515 -
ttattctgctttcttccaagtt

SEQ ID NO: 140945 - DNA, 22 bp, Artificial Sequence
  Synthetic oligonucleotide; CTT chr11 5244513 5244534 5244518 5244513 -
attctgctttcttccaagttga

SEQ ID NO: 140946 - DNA, 22 bp, Artificial Sequence
  Synthetic oligonucleotide; TTA chr11 5244512 5244533 5244517 5244512 -
ttctgctttcttccaagttgat

SEQ ID NO: 140947 - DNA, 22 bp, Artificial Sequence
  Synthetic oligonucleotide; TTC chr11 5244509 5244530 5244514 5244509 -
tgctttcttccaagttgatgct

SEQ ID NO: 140948 - DNA, 22 bp, Artificial Sequence
  Synthetic oligonucleotide; CTG chr11 5244507 5244528 5244512 5244507 -
ctttcttccaagttgatgctgg

SEQ ID NO: 140949 - DNA, 22 bp, Artificial Sequence
  Synthetic oligonucleotide; CTT chr11 5244504 5244525 5244509 5244504 -
tcttccaagttgatgctggata

SEQ ID NO: 140950 - DNA, 22 bp, Artificial Sequence
  Synthetic oligonucleotide; TTT chr11 5244503 5244524 5244508 5244503 -
cttccaagttgatgctggatag

SEQ ID NO: 140951 - DNA, 22 bp, Artificial Sequence
  Synthetic oligonucleotide; TTC chr11 5244502 5244523 5244507 5244502 -
ttccaagttgatgctggataga

SEQ ID NO: 140952 - DNA, 22 bp, Artificial Sequence
  Synthetic oligonucleotide; CTT chr11 5244500 5244521 5244505 5244500 -
ccaagttgatgctggatagagg

SEQ ID NO: 140953 - DNA, 22 bp, Artificial Sequence
  Synthetic oligonucleotide; TTC chr11 5244499 5244520 5244504 5244499 -
caagttgatgctggatagaggt

SEQ ID NO: 140954 - DNA, 22 bp, Artificial Sequence
  Synthetic oligonucleotide; TTG chr11 5244492 5244513 5244497 5244492 -
atgctggatagaggtgtttatt

SEQ ID NO: 140955 - DNA, 22 bp, Artificial Sequence
  Synthetic oligonucleotide; CTG chr11 5244486 5244507 5244491 5244486 -
gatagaggtgtttatttctatt

SEQ ID NO: 140956 - DNA, 22 bp, Artificial Sequence
  Synthetic oligonucleotide; TTT chr11 5244473 5244494 5244478 5244473 -
atttctattctaaaaagtgatg

SEQ ID NO: 140957 - DNA, 22 bp, Artificial Sequence
  Synthetic oligonucleotide; TTA chr11 5244472 5244493 5244477 5244472 -
tttctattctaaaaagtgatga

SEQ ID NO: 140958 - DNA, 22 bp, Artificial Sequence
  Synthetic oligonucleotide; TTT chr11 5244469 5244490 5244474 5244469 -
ctattctaaaaagtgatgaaat

SEQ ID NO: 140959 - DNA, 22 bp, Artificial Sequence
  Synthetic oligonucleotide; TTC chr11 5244468 5244489 5244473 5244468 -
tattctaaaaagtgatgaaatt

SEQ ID NO: 140960 - DNA, 22 bp, Artificial Sequence
  Synthetic oligonucleotide; CTA chr11 5244466 5244487 5244471 5244466 -
ttctaaaaagtgatgaaattgg

SEQ ID NO: 140961 - DNA, 22 bp, Artificial Sequence
  Synthetic oligonucleotide; TTC chr11 5244463 5244484 5244468 5244463 -
taaaaagtgatgaaattggccg

SEQ ID NO: 140962 - DNA, 22 bp, Artificial Sequence
  Synthetic oligonucleotide; CTA chr11 5244461 5244482 5244466 5244461 -
aaaagtgatgaaattggccggg

SEQ ID NO: 140963 - DNA, 22 bp, Artificial Sequence
  Synthetic oligonucleotide; TTG chr11 5244445 5244466 5244450 5244445 -
gccgggcgcggtggctcacacc

SEQ ID NO: 140964 - DNA, 22 bp, Artificial Sequence
  Synthetic oligonucleotide; CTC chr11 5244428 5244449 5244433 5244428 -
acacctgtaatcccagcacttt

SEQ ID NO: 140965 - DNA, 22 bp, Artificial Sequence
  Synthetic oligonucleotide; CTG chr11 5244421 5244442 5244426 5244421 -
taatcccagcactttgggaggc

SEQ ID NO: 140966 - DNA, 22 bp, Artificial Sequence
  Synthetic oligonucleotide; CTT chr11 5244407 5244428 5244412 5244407 -
tgggaggctgaggtgggcggat

SEQ ID NO: 140967 - DNA, 22 bp, Artificial Sequence
  Synthetic oligonucleotide; TTT chr11 5244406 5244427 5244411 5244406 -
gggaggctgaggtgggcggatc

SEQ ID NO: 140968 - DNA, 22 bp, Artificial Sequence
  Synthetic oligonucleotide; TTG chr11 5244405 5244426 5244410 5244405 -
ggaggctgaggtgggcggatca

SEQ ID NO: 140969 - DNA, 22 bp, Artificial Sequence
  Synthetic oligonucleotide; CTG chr11 5244397 5244418 5244402 5244397 -
aggtgggcggatcacgaggtca

SEQ ID NO: 140970 - DNA, 22 bp, Artificial Sequence
  Synthetic oligonucleotide; CTG chr11 5244356 5244377 5244361 5244356 -
gctaacatggtgaaaccccatc

SEQ ID NO: 140971 - DNA, 22 bp, Artificial Sequence
  Synthetic oligonucleotide; CTA chr11 5244352 5244373 5244357 5244352 -
acatggtgaaaccccatctcta

SEQ ID NO: 140972 - DNA, 22 bp, Artificial Sequence
  Synthetic oligonucleotide; CTC chr11 5244332 5244353 5244337 5244332 -
tactaaaaatacaaaaaattag

SEQ ID NO: 140973 - DNA, 22 bp, Artificial Sequence
  Synthetic oligonucleotide; CTA chr11 5244330 5244351 5244335 5244330 -
ctaaaaatacaaaaaattagcc

SEQ ID NO: 140974 - DNA, 22 bp, Artificial Sequence
  Synthetic oligonucleotide; CTA chr11 5244327 5244348 5244332 5244327 -
aaaatacaaaaaattagccaga

SEQ ID NO: 140975 - DNA, 22 bp, Artificial Sequence
  Synthetic oligonucleotide; TTA chr11 5244311 5244332 5244316 5244311 -
gccagagacagtggcgggtgcc

SEQ ID NO: 140976 - DNA, 22 bp, Artificial Sequence
  Synthetic oligonucleotide; CTG chr11 5244287 5244308 5244292 5244287 -
tagtcccagctactcgggaggc

SEQ ID NO: 140977 - DNA, 22 bp, Artificial Sequence
  Synthetic oligonucleotide; CTA chr11 5244275 5244296 5244280 5244275 -
ctcgggaggctgaggcaggaga

SEQ ID NO: 140978 - DNA, 22 bp, Artificial Sequence
  Synthetic oligonucleotide; CTC chr11 5244272 5244293 5244277 5244272 -
gggaggctgaggcaggagaatg

SEQ ID NO: 140979 - DNA, 22 bp, Artificial Sequence
  Synthetic oligonucleotide; CTG chr11 5244263 5244284 5244268 5244263 -
aggcaggagaatggcgtgaacc

SEQ ID NO: 140980 - DNA, 22 bp, Artificial Sequence
  Synthetic oligonucleotide; CTG chr11 5244239 5244260 5244244 5244239 -
ggaggcagagcttgcggtgagc

SEQ ID NO: 140981 - DNA, 22 bp, Artificial Sequence
  Synthetic oligonucleotide; CTT chr11 5244226 5244247 5244231 5244226 -
gcggtgagcagagatcgcgcca

SEQ ID NO: 140982 - DNA, 22 bp, Artificial Sequence
  Synthetic oligonucleotide; TTG chr11 5244225 5244246 5244230 5244225 -
cggtgagcagagatcgcgccac

SEQ ID NO: 140983 - DNA, 22 bp, Artificial Sequence
  Synthetic oligonucleotide; CTG chr11 5244201 5244222 5244206 5244201 -
cacactccagcctgggtgacaa

SEQ ID NO: 140984 - DNA, 22 bp, Artificial Sequence
  Synthetic oligonucleotide; CTC chr11 5244194 5244215 5244199 5244194 -
cagcctgggtgacaaagcgaga

SEQ ID NO: 140985 - DNA, 22 bp, Artificial Sequence
  Synthetic oligonucleotide; CTG chr11 5244187 5244208 5244192 5244187 -
ggtgacaaagcgagactccatc

SEQ ID NO: 140986 - DNA, 22 bp, Artificial Sequence
  Synthetic oligonucleotide; CTC chr11 5244169 5244190 5244174 5244169 -
catctcaaaaaaaaaaaaaaaa

SEQ ID NO: 140987 - DNA, 22 bp, Artificial Sequence
  Synthetic oligonucleotide; CTC chr11 5244163 5244184 5244168 5244163 -
aaaaaaaaaaaaaaaaaaaaga

SEQ ID NO: 140988 - DNA, 22 bp, Artificial Sequence
  Synthetic oligonucleotide; CTG chr11 5244112 5244133 5244117 5244112 -
atgaaattgtgtattcaatgta

SEQ ID NO: 140989 - DNA, 22 bp, Artificial Sequence
  Synthetic oligonucleotide; TTG chr11 5244103 5244124 5244108 5244103 -
tgtattcaatgtagtctcaaga

SEQ ID NO: 140990 - DNA, 22 bp, Artificial Sequence
  Synthetic oligonucleotide; TTC chr11 5244096 5244117 5244101 5244096 -
aatgtagtctcaagagaattga

SEQ ID NO: 140991 - DNA, 22 bp, Artificial Sequence
  Synthetic oligonucleotide; CTC chr11 5244085 5244106 5244090 5244085 -
aagagaattgaaaaccaagaaa

SEQ ID NO: 140992 - DNA, 22 bp, Artificial Sequence
  Synthetic oligonucleotide; TTG chr11 5244075 5244096 5244080 5244075 -
aaaaccaagaaaggctgtggct

SEQ ID NO: 140993 - DNA, 22 bp, Artificial Sequence
  Synthetic oligonucleotide; CTG chr11 5244058 5244079 5244063 5244058 -
tggcttcttccacataaagcct

SEQ ID NO: 140994 - DNA, 22 bp, Artificial Sequence
  Synthetic oligonucleotide; CTT chr11 5244052 5244073 5244057 5244052 -
cttccacataaagcctggatga

SEQ ID NO: 140995 - DNA, 22 bp, Artificial Sequence
  Synthetic oligonucleotide; TTC chr11 5244051 5244072 5244056 5244051 -
ttccacataaagcctggatgaa

SEQ ID NO: 140996 - DNA, 22 bp, Artificial Sequence
  Synthetic oligonucleotide; CTT chr11 5244049 5244070 5244054 5244049 -
ccacataaagcctggatgaata

SEQ ID NO: 140997 - DNA, 22 bp, Artificial Sequence
  Synthetic oligonucleotide; TTC chr11 5244048 5244069 5244053 5244048 -
cacataaagcctggatgaataa

SEQ ID NO: 140998 - DNA, 22 bp, Artificial Sequence
  Synthetic oligonucleotide; CTG chr11 5244035 5244056 5244040 5244035 -
gatgaataacaggataacacgt

SEQ ID NO: 140999 - DNA, 22 bp, Artificial Sequence
  Synthetic oligonucleotide; TTG chr11 5244011 5244032 5244016 5244011 -
ttacattgtcacaactcctgat

SEQ ID NO: 141000 - DNA, 22 bp, Artificial Sequence
  Synthetic oligonucleotide; TTA chr11 5244008 5244029 5244013 5244008 -
cattgtcacaactcctgatcca

SEQ ID NO: 141001 - DNA, 22 bp, Artificial Sequence
  Synthetic oligonucleotide; TTG chr11 5244003 5244024 5244008 5244003 -
tcacaactcctgatccaggaat

SEQ ID NO: 141002 - DNA, 22 bp, Artificial Sequence
  Synthetic oligonucleotide; CTC chr11 5243994 5244015 5243999 5243994 -
ctgatccaggaattgatggcta

SEQ ID NO: 141003 - DNA, 22 bp, Artificial Sequence
  Synthetic oligonucleotide; CTG chr11 5243991 5244012 5243996 5243991 -
atccaggaattgatggctaaga

SEQ ID NO: 141004 - DNA, 22 bp, Artificial Sequence
  Synthetic oligonucleotide; TTG chr11 5243979 5244000 5243984 5243979 -
atggctaagatattcgtaattc

SEQ ID NO: 141005 - DNA, 22 bp, Artificial Sequence
  Synthetic oligonucleotide; CTA chr11 5243972 5243993 5243977 5243972 -
agatattcgtaattcttatcct

SEQ ID NO: 141006 - DNA, 22 bp, Artificial Sequence
  Synthetic oligonucleotide; TTC chr11 5243964 5243985 5243969 5243964 -
gtaattcttatccttttcagtt

SEQ ID NO: 141007 - DNA, 22 bp, Artificial Sequence
  Synthetic oligonucleotide; TTC chr11 5243957 5243978 5243962 5243957 -
ttatccttttcagttgtaactt

SEQ ID NO: 141008 - DNA, 22 bp, Artificial Sequence
  Synthetic oligonucleotide; CTT chr11 5243955 5243976 5243960 5243955 -
atccttttcagttgtaacttat

SEQ ID NO: 141009 - DNA, 22 bp, Artificial Sequence
  Synthetic oligonucleotide; TTA chr11 5243954 5243975 5243959 5243954 -
tccttttcagttgtaacttatt

SEQ ID NO: 141010 - DNA, 22 bp, Artificial Sequence
  Synthetic oligonucleotide; CTT chr11 5243949 5243970 5243954 5243949 -
ttcagttgtaacttattcctat

SEQ ID NO: 141011 - DNA, 22 bp, Artificial Sequence
  Synthetic oligonucleotide; TTT chr11 5243948 5243969 5243953 5243948 -
tcagttgtaacttattcctatt

SEQ ID NO: 141012 - DNA, 22 bp, Artificial Sequence
  Synthetic oligonucleotide; TTT chr11 5243947 5243968 5243952 5243947 -
cagttgtaacttattcctattt

SEQ ID NO: 141013 - DNA, 22 bp, Artificial Sequence
  Synthetic oligonucleotide; TTC chr11 5243946 5243967 5243951 5243946 -
agttgtaacttattcctatttg

SEQ ID NO: 141014 - DNA, 22 bp, Artificial Sequence
  Synthetic oligonucleotide; TTG chr11 5243941 5243962 5243946 5243941 -
taacttattcctatttgtcagc

SEQ ID NO: 141015 - DNA, 22 bp, Artificial Sequence
  Synthetic oligonucleotide; CTT chr11 5243935 5243956 5243940 5243935 -
attcctatttgtcagcattcag

SEQ ID NO: 141016 - DNA, 22 bp, Artificial Sequence
  Synthetic oligonucleotide; TTA chr11 5243934 5243955 5243939 5243934 -
ttcctatttgtcagcattcagg

SEQ ID NO: 141017 - DNA, 22 bp, Artificial Sequence
  Synthetic oligonucleotide; TTC chr11 5243931 5243952 5243936 5243931 -
ctatttgtcagcattcaggtta

SEQ ID NO: 141018 - DNA, 22 bp, Artificial Sequence
  Synthetic oligonucleotide; CTA chr11 5243928 5243949 5243933 5243928 -
tttgtcagcattcaggttatta

SEQ ID NO: 141019 - DNA, 22 bp, Artificial Sequence
  Synthetic oligonucleotide; TTT chr11 5243925 5243946 5243930 5243925 -
gtcagcattcaggttattagcg

SEQ ID NO: 141020 - DNA, 22 bp, Artificial Sequence
  Synthetic oligonucleotide; TTG chr11 5243924 5243945 5243929 5243924 -
tcagcattcaggttattagcgg

SEQ ID NO: 141021 - DNA, 22 bp, Artificial Sequence
  Synthetic oligonucleotide; TTC chr11 5243915 5243936 5243920 5243915 -
aggttattagcggctgctggcg

SEQ ID NO: 141022 - DNA, 22 bp, Artificial Sequence
  Synthetic oligonucleotide; TTA chr11 5243909 5243930 5243914 5243909 -
ttagcggctgctggcgaagtcc

SEQ ID NO: 141023 - DNA, 22 bp, Artificial Sequence
  Synthetic oligonucleotide; TTA chr11 5243906 5243927 5243911 5243906 -
gcggctgctggcgaagtccttg

SEQ ID NO: 141024 - DNA, 22 bp, Artificial Sequence
  Synthetic oligonucleotide; CTG chr11 5243899 5243920 5243904 5243899 -
ctggcgaagtccttgagaaata

SEQ ID NO: 141025 - DNA, 22 bp, Artificial Sequence
  Synthetic oligonucleotide; CTG chr11 5243896 5243917 5243901 5243896 -
gcgaagtccttgagaaataaac

SEQ ID NO: 141026 - DNA, 22 bp, Artificial Sequence
  Synthetic oligonucleotide; CTT chr11 5243885 5243906 5243890 5243885 -
gagaaataaactgcacactgga

SEQ ID NO: 141027 - DNA, 22 bp, Artificial Sequence
  Synthetic oligonucleotide; TTG chr11 5243884 5243905 5243889 5243884 -
agaaataaactgcacactggat

SEQ ID NO: 141028 - DNA, 22 bp, Artificial Sequence
  Synthetic oligonucleotide; CTG chr11 5243872 5243893 5243877 5243872 -
cacactggatggtgggggtagt

SEQ ID NO: 141029 - DNA, 22 bp, Artificial Sequence
  Synthetic oligonucleotide; CTG chr11 5243865 5243886 5243870 5243865 -
gatggtgggggtagtgtaggaa

SEQ ID NO: 141030 - DNA, 22 bp, Artificial Sequence
  Synthetic oligonucleotide; TTT chr11 5243818 5243839 5243823 5243818 -
caaattaagcctgaacagcaaa

SEQ ID NO: 141031 - DNA, 22 bp, Artificial Sequence
  Synthetic oligonucleotide; TTC chr11 5243817 5243838 5243822 5243817 -
aaattaagcctgaacagcaaag

SEQ ID NO: 141032 - DNA, 22 bp, Artificial Sequence
  Synthetic oligonucleotide; TTA chr11 5243811 5243832 5243816 5243811 -
agcctgaacagcaaagttcccc

SEQ ID NO: 141033 - DNA, 22 bp, Artificial Sequence
  Synthetic oligonucleotide; CTG chr11 5243805 5243826 5243810 5243805 -
aacagcaaagttcccctgagaa

SEQ ID NO: 141034 - DNA, 22 bp, Artificial Sequence
  Synthetic oligonucleotide; TTC chr11 5243792 5243813 5243797 5243792 -
ccctgagaaggccacctggatt

SEQ ID NO: 141035 - DNA, 22 bp, Artificial Sequence
  Synthetic oligonucleotide; CTG chr11 5243787 5243808 5243792 5243787 -
agaaggccacctggattctatc

SEQ ID NO: 141036 - DNA, 22 bp, Artificial Sequence
  Synthetic oligonucleotide; CTG chr11 5243774 5243795 5243779 5243774 -
gattctatcagaaactcgaatg

SEQ ID NO: 141037 - DNA, 22 bp, Artificial Sequence
  Synthetic oligonucleotide; TTC chr11 5243769 5243790 5243774 5243769 -
tatcagaaactcgaatgtccat

SEQ ID NO: 141038 - DNA, 22 bp, Artificial Sequence
  Synthetic oligonucleotide; CTA chr11 5243767 5243788 5243772 5243767 -
tcagaaactcgaatgtccatct

SEQ ID NO: 141039 - DNA, 22 bp, Artificial Sequence
  Synthetic oligonucleotide; CTC chr11 5243757 5243778 5243762 5243757 -
gaatgtccatcttgcaaaactt

SEQ ID NO: 141040 - DNA, 22 bp, Artificial Sequence
  Synthetic oligonucleotide; CTT chr11 5243744 5243765 5243749 5243744 -
gcaaaacttccttgcccaaacc

SEQ ID NO: 141041 - DNA, 22 bp, Artificial Sequence
  Synthetic oligonucleotide; TTG chr11 5243743 5243764 5243748 5243743 -
caaaacttccttgcccaaaccc

SEQ ID NO: 141042 - DNA, 22 bp, Artificial Sequence
  Synthetic oligonucleotide; CTT chr11 5243735 5243756 5243740 5243735 -
ccttgcccaaaccccacccctg

SEQ ID NO: 141043 - DNA, 22 bp, Artificial Sequence
  Synthetic oligonucleotide; TTC chr11 5243734 5243755 5243739 5243734 -
cttgcccaaaccccacccctgg

SEQ ID NO: 141044 - DNA, 22 bp, Artificial Sequence
  Synthetic oligonucleotide; CTT chr11 5243731 5243752 5243736 5243731 -
gcccaaaccccacccctggagt

SEQ ID NO: 141045 - DNA, 22 bp, Artificial Sequence
  Synthetic oligonucleotide; TTG chr11 5243730 5243751 5243735 5243730 -
cccaaaccccacccctggagtc

SEQ ID NO: 141046 - DNA, 22 bp, Artificial Sequence
  Synthetic oligonucleotide; CTG chr11 5243713 5243734 5243718 5243713 -
gagtcacaacccacccttgacc

SEQ ID NO: 141047 - DNA, 22 bp, Artificial Sequence
  Synthetic oligonucleotide; CTT chr11 5243695 5243716 5243700 5243695 -
gaccaatagattcattttactg

SEQ ID NO: 141048 - DNA, 22 bp, Artificial Sequence
  Synthetic oligonucleotide; TTG chr11 5243694 5243715 5243699 5243694 -
accaatagattcattttactga

SEQ ID NO: 141049 - DNA, 22 bp, Artificial Sequence
  Synthetic oligonucleotide; TTC chr11 5243682 5243703 5243687 5243682 -
attttactgagggaggcaaagg

SEQ ID NO: 141050 - DNA, 22 bp, Artificial Sequence
  Synthetic oligonucleotide; TTT chr11 5243678 5243699 5243683 5243678 -
tactgagggaggcaaagggctg

SEQ ID NO: 141051 - DNA, 22 bp, Artificial Sequence
  Synthetic oligonucleotide; TTT chr11 5243677 5243698 5243682 5243677 -
actgagggaggcaaagggctgg

SEQ ID NO: 141052 - DNA, 22 bp, Artificial Sequence
  Synthetic oligonucleotide; TTA chr11 5243676 5243697 5243681 5243676 -
ctgagggaggcaaagggctggt

SEQ ID NO: 141053 - DNA, 22 bp, Artificial Sequence
  Synthetic oligonucleotide; CTG chr11 5243673 5243694 5243678 5243673 -
agggaggcaaagggctggtcaa

SEQ ID NO: 141054 - DNA, 22 bp, Artificial Sequence
  Synthetic oligonucleotide; CTG chr11 5243656 5243677 5243661 5243656 -
gtcaatagattcatttcactgg

SEQ ID NO: 141055 - DNA, 22 bp, Artificial Sequence
  Synthetic oligonucleotide; TTC chr11 5243644 5243665 5243649 5243644 -
atttcactgggagaggcaaagg

SEQ ID NO: 141056 - DNA, 22 bp, Artificial Sequence
  Synthetic oligonucleotide; TTT chr11 5243640 5243661 5243645 5243640 -
cactgggagaggcaaagggctg

SEQ ID NO: 141057 - DNA, 22 bp, Artificial Sequence
  Synthetic oligonucleotide; TTC chr11 5243639 5243660 5243644 5243639 -
actgggagaggcaaagggctgg

SEQ ID NO: 141058 - DNA, 22 bp, Artificial Sequence
  Synthetic oligonucleotide; CTG chr11 5243635 5243656 5243640 5243635 -
ggagaggcaaagggctgggggc

SEQ ID NO: 141059 - DNA, 22 bp, Artificial Sequence
  Synthetic oligonucleotide; CTG chr11 5243618 5243639 5243623 5243618 -
ggggccagagaggagaagtaaa

SEQ ID NO: 141060 - DNA, 22 bp, Artificial Sequence
  Synthetic oligonucleotide; CTT chr11 5243562 5243583 5243567 5243562 -
ctggctcatctgtgatcaccag

SEQ ID NO: 141061 - DNA, 22 bp, Artificial Sequence
  Synthetic oligonucleotide; TTC chr11 5243561 5243582 5243566 5243561 -
tggctcatctgtgatcaccagg

SEQ ID NO: 141062 - DNA, 22 bp, Artificial Sequence
  Synthetic oligonucleotide; CTG chr11 5243559 5243580 5243564 5243559 -
gctcatctgtgatcaccaggaa

SEQ ID NO: 141063 - DNA, 22 bp, Artificial Sequence
  Synthetic oligonucleotide; CTC chr11 5243555 5243576 5243560 5243555 -
atctgtgatcaccaggaaactc

SEQ ID NO: 141064 - DNA, 22 bp, Artificial Sequence
  Synthetic oligonucleotide; CTG chr11 5243550 5243571 5243555 5243550 -
tgatcaccaggaaactcccaga

SEQ ID NO: 141065 - DNA, 22 bp, Artificial Sequence
  Synthetic oligonucleotide; CTC chr11 5243533 5243554 5243538 5243533 -
ccagatctgacactgtagtgca

SEQ ID NO: 141066 - DNA, 22 bp, Artificial Sequence
  Synthetic oligonucleotide; CTG chr11 5243524 5243545 5243529 5243524 -
acactgtagtgcatttcactgc

SEQ ID NO: 141067 - DNA, 22 bp, Artificial Sequence
  Synthetic oligonucleotide; CTG chr11 5243518 5243539 5243523 5243518 -
tagtgcatttcactgctgacaa

SEQ ID NO: 141068 - DNA, 22 bp, Artificial Sequence
  Synthetic oligonucleotide; TTT chr11 5243508 5243529 5243513 5243508 -
cactgctgacaagaaggctgct

SEQ ID NO: 141069 - DNA, 22 bp, Artificial Sequence
  Synthetic oligonucleotide; TTC chr11 5243507 5243528 5243512 5243507 -
actgctgacaagaaggctgctg

SEQ ID NO: 141070 - DNA, 22 bp, Artificial Sequence
  Synthetic oligonucleotide; CTG chr11 5243503 5243524 5243508 5243503 -
ctgacaagaaggctgctgccac

SEQ ID NO: 141071 - DNA, 22 bp, Artificial Sequence
  Synthetic oligonucleotide; CTG chr11 5243500 5243521 5243505 5243500 -
acaagaaggctgctgccaccag

SEQ ID NO: 141072 - DNA, 22 bp, Artificial Sequence
  Synthetic oligonucleotide; CTG chr11 5243488 5243509 5243493 5243488 -
ctgccaccagcctgtgaagcaa

SEQ ID NO: 141073 - DNA, 22 bp, Artificial Sequence
  Synthetic oligonucleotide; CTG chr11 5243485 5243506 5243490 5243485 -
ccaccagcctgtgaagcaaggt

SEQ ID NO: 141074 - DNA, 22 bp, Artificial Sequence
  Synthetic oligonucleotide; CTG chr11 5243474 5243495 5243479 5243474 -
tgaagcaaggttaaggtgagaa

SEQ ID NO: 141075 - DNA, 22 bp, Artificial Sequence
  Synthetic oligonucleotide; TTA chr11 5243461 5243482 5243466 5243461 -
aggtgagaaggctggaggtgag

SEQ ID NO: 141076 - DNA, 22 bp, Artificial Sequence
  Synthetic oligonucleotide; CTG chr11 5243447 5243468 5243452 5243447 -
gaggtgagattctgggcaggta

SEQ ID NO: 141077 - DNA, 22 bp, Artificial Sequence
  Synthetic oligonucleotide; TTC chr11 5243435 5243456 5243440 5243435 -
tgggcaggtaggtactggaagc

SEQ ID NO: 141078 - DNA, 22 bp, Artificial Sequence
  Synthetic oligonucleotide; CTG chr11 5243433 5243454 5243438 5243433 -
ggcaggtaggtactggaagccg

SEQ ID NO: 141079 - DNA, 22 bp, Artificial Sequence
  Synthetic oligonucleotide; CTG chr11 5243418 5243439 5243423 5243418 -
gaagccgggacaaggtgcagaa

SEQ ID NO: 141080 - DNA, 22 bp, Artificial Sequence
  Synthetic oligonucleotide; TTT chr11 5243381 5243402 5243386 5243381 -
ctgaaagagggattagcccgtt

SEQ ID NO: 141081 - DNA, 22 bp, Artificial Sequence
  Synthetic oligonucleotide; TTC chr11 5243380 5243401 5243385 5243380 -
tgaaagagggattagcccgttg

SEQ ID NO: 141082 - DNA, 22 bp, Artificial Sequence
  Synthetic oligonucleotide; CTG chr11 5243378 5243399 5243383 5243378 -
aaagagggattagcccgttgtc

SEQ ID NO: 141083 - DNA, 22 bp, Artificial Sequence
  Synthetic oligonucleotide; TTA chr11 5243366 5243387 5243371 5243366 -
gcccgttgtcttacatagtctg

SEQ ID NO: 141084 - DNA, 22 bp, Artificial Sequence
  Synthetic oligonucleotide; TTG chr11 5243358 5243379 5243363 5243358 -
tcttacatagtctgactttgca

SEQ ID NO: 141085 - DNA, 22 bp, Artificial Sequence
  Synthetic oligonucleotide; CTT chr11 5243354 5243375 5243359 5243354 -
acatagtctgactttgcacctg

SEQ ID NO: 141086 - DNA, 22 bp, Artificial Sequence
  Synthetic oligonucleotide; TTA chr11 5243353 5243374 5243358 5243353 -
catagtctgactttgcacctgc

SEQ ID NO: 141087 - DNA, 22 bp, Artificial Sequence
  Synthetic oligonucleotide; CTG chr11 5243344 5243365 5243349 5243344 -
actttgcacctgctctgtgatt

SEQ ID NO: 141088 - DNA, 22 bp, Artificial Sequence
  Synthetic oligonucleotide; CTT chr11 5243340 5243361 5243345 5243340 -
tgcacctgctctgtgattatga

SEQ ID NO: 141089 - DNA, 22 bp, Artificial Sequence
  Synthetic oligonucleotide; TTT chr11 5243339 5243360 5243344 5243339 -
gcacctgctctgtgattatgac

SEQ ID NO: 141090 - DNA, 22 bp, Artificial Sequence
  Synthetic oligonucleotide; TTG chr11 5243338 5243359 5243343 5243338 -
cacctgctctgtgattatgact

SEQ ID NO: 141091 - DNA, 22 bp, Artificial Sequence
  Synthetic oligonucleotide; CTG chr11 5243332 5243353 5243337 5243332 -
ctctgtgattatgactatccca

SEQ ID NO: 141092 - DNA, 22 bp, Artificial Sequence
  Synthetic oligonucleotide; CTC chr11 5243329 5243350 5243334 5243329 -
tgtgattatgactatcccacag

SEQ ID NO: 141093 - DNA, 22 bp, Artificial Sequence
  Synthetic oligonucleotide; CTG chr11 5243327 5243348 5243332 5243327 -
tgattatgactatcccacagtc

SEQ ID NO: 141094 - DNA, 22 bp, Artificial Sequence
  Synthetic oligonucleotide; TTA chr11 5243321 5243342 5243326 5243321 -
tgactatcccacagtctcctgg

SEQ ID NO: 141095 - DNA, 22 bp, Artificial Sequence
  Synthetic oligonucleotide; CTA chr11 5243315 5243336 5243320 5243315 -
tcccacagtctcctggttgtct

SEQ ID NO: 141096 - DNA, 22 bp, Artificial Sequence
  Synthetic oligonucleotide; CTC chr11 5243303 5243324 5243308 5243303 -
ctggttgtctacccatggacct

SEQ ID NO: 141097 - DNA, 22 bp, Artificial Sequence
  Synthetic oligonucleotide; CTG chr11 5243300 5243321 5243305 5243300 -
gttgtctacccatggacctaga

SEQ ID NO: 141098 - DNA, 22 bp, Artificial Sequence
  Synthetic oligonucleotide; TTG chr11 5243296 5243317 5243301 5243296 -
tctacccatggacctagaggta

SEQ ID NO: 141099 - DNA, 22 bp, Artificial Sequence
  Synthetic oligonucleotide; CTA chr11 5243292 5243313 5243297 5243292 -
cccatggacctagaggtacttt

SEQ ID NO: 141100 - DNA, 22 bp, Artificial Sequence
  Synthetic oligonucleotide; CTA chr11 5243280 5243301 5243285 5243280 -
gaggtactttgaaagttttgga

SEQ ID NO: 141101 - DNA, 22 bp, Artificial Sequence
  Synthetic oligonucleotide; CTT chr11 5243271 5243292 5243276 5243271 -
tgaaagttttggatatctgggc

SEQ ID NO: 141102 - DNA, 22 bp, Artificial Sequence
  Synthetic oligonucleotide; TTT chr11 5243270 5243291 5243275 5243270 -
gaaagttttggatatctgggct

SEQ ID NO: 141103 - DNA, 22 bp, Artificial Sequence
  Synthetic oligonucleotide; TTG chr11 5243269 5243290 5243274 5243269 -
aaagttttggatatctgggctc

SEQ ID NO: 141104 - DNA, 22 bp, Artificial Sequence
  Synthetic oligonucleotide; TTT chr11 5243262 5243283 5243267 5243262 -
tggatatctgggctctgactgt

SEQ ID NO: 141105 - DNA, 22 bp, Artificial Sequence
  Synthetic oligonucleotide; TTT chr11 5243261 5243282 5243266 5243261 -
ggatatctgggctctgactgtg

SEQ ID NO: 141106 - DNA, 22 bp, Artificial Sequence
  Synthetic oligonucleotide; TTG chr11 5243260 5243281 5243265 5243260 -
gatatctgggctctgactgtgc

SEQ ID NO: 141107 - DNA, 22 bp, Artificial Sequence
  Synthetic oligonucleotide; CTG chr11 5243252 5243273 5243257 5243252 -
ggctctgactgtgcaataatgg

SEQ ID NO: 141108 - DNA, 22 bp, Artificial Sequence
  Synthetic oligonucleotide; CTC chr11 5243247 5243268 5243252 5243247 -
tgactgtgcaataatgggcaac

SEQ ID NO: 141109 - DNA, 22 bp, Artificial Sequence
  Synthetic oligonucleotide; CTG chr11 5243245 5243266 5243250 5243245 -
actgtgcaataatgggcaaccc

SEQ ID NO: 141110 - DNA, 22 bp, Artificial Sequence
  Synthetic oligonucleotide; CTG chr11 5243241 5243262 5243246 5243241 -
tgcaataatgggcaaccccaaa

SEQ ID NO: 141111 - DNA, 22 bp, Artificial Sequence
  Synthetic oligonucleotide; CTG chr11 5243192 5243213 5243197 5243192 -
atctccttcggaaaagctgtta

SEQ ID NO: 141112 - DNA, 22 bp, Artificial Sequence
  Synthetic oligonucleotide; CTC chr11 5243187 5243208 5243192 5243187 -
cttcggaaaagctgttatgctc

SEQ ID NO: 141113 - DNA, 22 bp, Artificial Sequence
  Synthetic oligonucleotide; CTT chr11 5243184 5243205 5243189 5243184 -
cggaaaagctgttatgctcacg

SEQ ID NO: 141114 - DNA, 22 bp, Artificial Sequence
  Synthetic oligonucleotide; TTC chr11 5243183 5243204 5243188 5243183 -
ggaaaagctgttatgctcacgg

SEQ ID NO: 141115 - DNA, 22 bp, Artificial Sequence
  Synthetic oligonucleotide; CTG chr11 5243173 5243194 5243178 5243173 -
ttatgctcacggatgacctcaa

SEQ ID NO: 141116 - DNA, 22 bp, Artificial Sequence
  Synthetic oligonucleotide; TTA chr11 5243170 5243191 5243175 5243170 -
tgctcacggatgacctcaaagg

SEQ ID NO: 141117 - DNA, 22 bp, Artificial Sequence
  Synthetic oligonucleotide; CTC chr11 5243165 5243186 5243170 5243165 -
acggatgacctcaaaggcacct

SEQ ID NO: 141118 - DNA, 22 bp, Artificial Sequence
  Synthetic oligonucleotide; CTC chr11 5243153 5243174 5243158 5243153 -
aaaggcacctttgctacactga

SEQ ID NO: 141119 - DNA, 22 bp, Artificial Sequence
  Synthetic oligonucleotide; CTT chr11 5243142 5243163 5243147 5243142 -
tgctacactgagtgacctgcac

SEQ ID NO: 141120 - DNA, 22 bp, Artificial Sequence
  Synthetic oligonucleotide; TTT chr11 5243141 5243162 5243146 5243141 -
gctacactgagtgacctgcact

SEQ ID NO: 141121 - DNA, 22 bp, Artificial Sequence
  Synthetic oligonucleotide; TTG chr11 5243140 5243161 5243145 5243140 -
ctacactgagtgacctgcactg

SEQ ID NO: 141122 - DNA, 22 bp, Artificial Sequence
  Synthetic oligonucleotide; CTA chr11 5243137 5243158 5243142 5243137 -
cactgagtgacctgcactgtaa

SEQ ID NO: 141123 - DNA, 22 bp, Artificial Sequence
  Synthetic oligonucleotide; CTG chr11 5243132 5243153 5243137 5243132 -
agtgacctgcactgtaacaagc

SEQ ID NO: 141124 - DNA, 22 bp, Artificial Sequence
  Synthetic oligonucleotide; CTG chr11 5243123 5243144 5243128 5243123 -
cactgtaacaagctgcacgtgg

SEQ ID NO: 141125 - DNA, 22 bp, Artificial Sequence
  Synthetic oligonucleotide; CTG chr11 5243118 5243139 5243123 5243118 -
taacaagctgcacgtggaccct

SEQ ID NO: 141126 - DNA, 22 bp, Artificial Sequence
  Synthetic oligonucleotide; CTG chr11 5243108 5243129 5243113 5243108 -
cacgtggaccctgagaacttcc

SEQ ID NO: 141127 - DNA, 22 bp, Artificial Sequence
  Synthetic oligonucleotide; CTG chr11 5243095 5243116 5243100 5243095 -
agaacttcctggtgagtagtaa

SEQ ID NO: 141128 - DNA, 22 bp, Artificial Sequence
  Synthetic oligonucleotide; CTT chr11 5243088 5243109 5243093 5243088 -
cctggtgagtagtaagtacact

SEQ ID NO: 141129 - DNA, 22 bp, Artificial Sequence
  Synthetic oligonucleotide; TTC chr11 5243087 5243108 5243092 5243087 -
ctggtgagtagtaagtacactc

SEQ ID NO: 141130 - DNA, 22 bp, Artificial Sequence
  Synthetic oligonucleotide; CTG chr11 5243084 5243105 5243089 5243084 -
gtgagtagtaagtacactcacg

SEQ ID NO: 141131 - DNA, 22 bp, Artificial Sequence
  Synthetic oligonucleotide; CTC chr11 5243065 5243086 5243070 5243065 -
acgctttcttctttacccttag

SEQ ID NO: 141132 - DNA, 22 bp, Artificial Sequence
  Synthetic oligonucleotide; CTT chr11 5243059 5243080 5243064 5243059 -
tcttctttacccttagatattt

SEQ ID NO: 141133 - DNA, 22 bp, Artificial Sequence
  Synthetic oligonucleotide; TTT chr11 5243058 5243079 5243063 5243058 -
cttctttacccttagatatttg

SEQ ID NO: 141134 - DNA, 22 bp, Artificial Sequence
  Synthetic oligonucleotide; TTC chr11 5243057 5243078 5243062 5243057 -
ttctttacccttagatatttgc

SEQ ID NO: 141135 - DNA, 22 bp, Artificial Sequence
  Synthetic oligonucleotide; CTT chr11 5243055 5243076 5243060 5243055 -
ctttacccttagatatttgcac

SEQ ID NO: 141136 - DNA, 22 bp, Artificial Sequence
  Synthetic oligonucleotide; TTC chr11 5243054 5243075 5243059 5243054 -
tttacccttagatatttgcact

SEQ ID NO: 141137 - DNA, 22 bp, Artificial Sequence
  Synthetic oligonucleotide; CTT chr11 5243052 5243073 5243057 5243052 -
tacccttagatatttgcactat

SEQ ID NO: 141138 - DNA, 22 bp, Artificial Sequence
  Synthetic oligonucleotide; TTT chr11 5243051 5243072 5243056 5243051 -
acccttagatatttgcactatg

SEQ ID NO: 141139 - DNA, 22 bp, Artificial Sequence
  Synthetic oligonucleotide; TTA chr11 5243050 5243071 5243055 5243050 -
cccttagatatttgcactatgg

SEQ ID NO: 141140 - DNA, 22 bp, Artificial Sequence
  Synthetic oligonucleotide; CTT chr11 5243045 5243066 5243050 5243045 -
agatatttgcactatgggtact

SEQ ID NO: 141141 - DNA, 22 bp, Artificial Sequence
  Synthetic oligonucleotide; TTA chr11 5243044 5243065 5243049 5243044 -
gatatttgcactatgggtactt

SEQ ID NO: 141142 - DNA, 22 bp, Artificial Sequence
  Synthetic oligonucleotide; TTT chr11 5243037 5243058 5243042 5243037 -
gcactatgggtacttttgaaag

SEQ ID NO: 141143 - DNA, 22 bp, Artificial Sequence
  Synthetic oligonucleotide; TTG chr11 5243036 5243057 5243041 5243036 -
cactatgggtacttttgaaagc

SEQ ID NO: 141144 - DNA, 22 bp, Artificial Sequence
  Synthetic oligonucleotide; CTA chr11 5243031 5243052 5243036 5243031 -
tgggtacttttgaaagcagagg

SEQ ID NO: 141145 - DNA, 22 bp, Artificial Sequence
  Synthetic oligonucleotide; CTT chr11 5243022 5243043 5243027 5243022 -
ttgaaagcagaggtggctttct

SEQ ID NO: 141146 - DNA, 22 bp, Artificial Sequence
  Synthetic oligonucleotide; TTT chr11 5243021 5243042 5243026 5243021 -
tgaaagcagaggtggctttctc

SEQ ID NO: 141147 - DNA, 22 bp, Artificial Sequence
  Synthetic oligonucleotide; TTT chr11 5243020 5243041 5243025 5243020 -
gaaagcagaggtggctttctct

SEQ ID NO: 141148 - DNA, 22 bp, Artificial Sequence
  Synthetic oligonucleotide; TTG chr11 5243019 5243040 5243024 5243019 -
aaagcagaggtggctttctctt

SEQ ID NO: 141149 - DNA, 22 bp, Artificial Sequence
  Synthetic oligonucleotide; CTT chr11 5243003 5243024 5243008 5243003 -
tctcttgtgttatgagtcagct

SEQ ID NO: 141150 - DNA, 22 bp, Artificial Sequence
  Synthetic oligonucleotide; TTT chr11 5243002 5243023 5243007 5243002 -
ctcttgtgttatgagtcagcta

SEQ ID NO: 141151 - DNA, 22 bp, Artificial Sequence
  Synthetic oligonucleotide; TTC chr11 5243001 5243022 5243006 5243001 -
tcttgtgttatgagtcagctat

SEQ ID NO: 141152 - DNA, 22 bp, Artificial Sequence
  Synthetic oligonucleotide; CTC chr11 5242999 5243020 5243004 5242999 -
ttgtgttatgagtcagctatgg

SEQ ID NO: 141153 - DNA, 22 bp, Artificial Sequence
  Synthetic oligonucleotide; CTT chr11 5242997 5243018 5243002 5242997 -
gtgttatgagtcagctatggga

SEQ ID NO: 141154 - DNA, 22 bp, Artificial Sequence
  Synthetic oligonucleotide; TTG chr11 5242996 5243017 5243001 5242996 -
tgttatgagtcagctatgggat

SEQ ID NO: 141155 - DNA, 22 bp, Artificial Sequence
  Synthetic oligonucleotide; TTA chr11 5242991 5243012 5242996 5242991 -
tgagtcagctatgggatatgat

SEQ ID NO: 141156 - DNA, 22 bp, Artificial Sequence
  Synthetic oligonucleotide; CTA chr11 5242980 5243001 5242985 5242980 -
tgggatatgatatttcagcagt

SEQ ID NO: 141157 - DNA, 22 bp, Artificial Sequence
  Synthetic oligonucleotide; TTT chr11 5242965 5242986 5242970 5242965 -
cagcagtgggattttgagagtt

SEQ ID NO: 141158 - DNA, 22 bp, Artificial Sequence
  Synthetic oligonucleotide; TTC chr11 5242964 5242985 5242969 5242964 -
agcagtgggattttgagagtta

SEQ ID NO: 141159 - DNA, 22 bp, Artificial Sequence
  Synthetic oligonucleotide; TTT chr11 5242951 5242972 5242956 5242951 -
tgagagttatgttgctgtaaat

SEQ ID NO: 141160 - DNA, 22 bp, Artificial Sequence
  Synthetic oligonucleotide; TTT chr11 5242950 5242971 5242955 5242950 -
gagagttatgttgctgtaaata

SEQ ID NO: 141161 - DNA, 22 bp, Artificial Sequence
  Synthetic oligonucleotide; TTG chr11 5242949 5242970 5242954 5242949 -
agagttatgttgctgtaaataa

SEQ ID NO: 141162 - DNA, 22 bp, Artificial Sequence
  Synthetic oligonucleotide; TTA chr11 5242942 5242963 5242947 5242942 -
tgttgctgtaaataacataact

SEQ ID NO: 141163 - DNA, 22 bp, Artificial Sequence
  Synthetic oligonucleotide; TTG chr11 5242937 5242958 5242942 5242937 -
ctgtaaataacataactaaaat

SEQ ID NO: 141164 - DNA, 22 bp, Artificial Sequence
  Synthetic oligonucleotide; CTG chr11 5242934 5242955 5242939 5242934 -
taaataacataactaaaatttg

SEQ ID NO: 141165 - DNA, 22 bp, Artificial Sequence
  Synthetic oligonucleotide; CTA chr11 5242919 5242940 5242924 5242919 -
aaatttggtagagcaaggacta

SEQ ID NO: 141166 - DNA, 22 bp, Artificial Sequence
  Synthetic oligonucleotide; TTT chr11 5242913 5242934 5242918 5242913 -
ggtagagcaaggactatgaata

SEQ ID NO: 141167 - DNA, 22 bp, Artificial Sequence
  Synthetic oligonucleotide; TTG chr11 5242912 5242933 5242917 5242912 -
gtagagcaaggactatgaataa

SEQ ID NO: 141168 - DNA, 22 bp, Artificial Sequence
  Synthetic oligonucleotide; CTA chr11 5242897 5242918 5242902 5242897 -
tgaataatggaaggccacttac

SEQ ID NO: 141169 - DNA, 22 bp, Artificial Sequence
  Synthetic oligonucleotide; CTT chr11 5242877 5242898 5242882 5242877 -
accatttgatagctctgaaaaa

SEQ ID NO: 141170 - DNA, 22 bp, Artificial Sequence
  Synthetic oligonucleotide; TTA chr11 5242876 5242897 5242881 5242876 -
ccatttgatagctctgaaaaac

SEQ ID NO: 141171 - DNA, 22 bp, Artificial Sequence
  Synthetic oligonucleotide; TTT chr11 5242870 5242891 5242875 5242870 -
gatagctctgaaaaacacatct

SEQ ID NO: 141172 - DNA, 22 bp, Artificial Sequence
  Synthetic oligonucleotide; TTG chr11 5242869 5242890 5242874 5242869 -
atagctctgaaaaacacatctt

SEQ ID NO: 141173 - DNA, 22 bp, Artificial Sequence
  Synthetic oligonucleotide; CTC chr11 5242862 5242883 5242867 5242862 -
tgaaaaacacatcttataaaaa

SEQ ID NO: 141174 - DNA, 22 bp, Artificial Sequence
  Synthetic oligonucleotide; CTG chr11 5242860 5242881 5242865 5242860 -
aaaaacacatcttataaaaaat

SEQ ID NO: 141175 - DNA, 22 bp, Artificial Sequence
  Synthetic oligonucleotide; CTT chr11 5242847 5242868 5242852 5242847 -
ataaaaaattctggccaaaatc

SEQ ID NO: 141176 - DNA, 22 bp, Artificial Sequence
  Synthetic oligonucleotide; TTA chr11 5242846 5242867 5242851 5242846 -
taaaaaattctggccaaaatca

SEQ ID NO: 141177 - DNA, 22 bp, Artificial Sequence
  Synthetic oligonucleotide; TTC chr11 5242836 5242857 5242841 5242836 -
tggccaaaatcaaactgagtgt

SEQ ID NO: 141178 - DNA, 22 bp, Artificial Sequence
  Synthetic oligonucleotide; CTG chr11 5242834 5242855 5242839 5242834 -
gccaaaatcaaactgagtgttt

SEQ ID NO: 141179 - DNA, 22 bp, Artificial Sequence
  Synthetic oligonucleotide; CTG chr11 5242819 5242840 5242824 5242819 -
agtgtttttggatgagggaaca

SEQ ID NO: 141180 - DNA, 22 bp, Artificial Sequence
  Synthetic oligonucleotide; TTT chr11 5242812 5242833 5242817 5242812 -
ttggatgagggaacagaagttg

SEQ ID NO: 141181 - DNA, 22 bp, Artificial Sequence
  Synthetic oligonucleotide; TTT chr11 5242811 5242832 5242816 5242811 -
tggatgagggaacagaagttga

SEQ ID NO: 141182 - DNA, 22 bp, Artificial Sequence
  Synthetic oligonucleotide; TTT chr11 5242810 5242831 5242815 5242810 -
ggatgagggaacagaagttgag

SEQ ID NO: 141183 - DNA, 22 bp, Artificial Sequence
  Synthetic oligonucleotide; TTG chr11 5242809 5242830 5242814 5242809 -
gatgagggaacagaagttgaga

SEQ ID NO: 141184 - DNA, 22 bp, Artificial Sequence
  Synthetic oligonucleotide; TTG chr11 5242790 5242811 5242795 5242790 -
agatagagaaaataacatcttt

SEQ ID NO: 141185 - DNA, 22 bp, Artificial Sequence
  Synthetic oligonucleotide; CTT chr11 5242769 5242790 5242774 5242769 -
tcctttggtcagcgaaattttc

SEQ ID NO: 141186 - DNA, 22 bp, Artificial Sequence
  Synthetic oligonucleotide; TTT chr11 5242768 5242789 5242773 5242768 -
cctttggtcagcgaaattttct

SEQ ID NO: 141187 - DNA, 22 bp, Artificial Sequence
  Synthetic oligonucleotide; TTC chr11 5242767 5242788 5242772 5242767 -
ctttggtcagcgaaattttcta

SEQ ID NO: 141188 - DNA, 22 bp, Artificial Sequence
  Synthetic oligonucleotide; CTT chr11 5242764 5242785 5242769 5242764 -
tggtcagcgaaattttctataa

SEQ ID NO: 141189 - DNA, 22 bp, Artificial Sequence
  Synthetic oligonucleotide; TTT chr11 5242763 5242784 5242768 5242763 -
ggtcagcgaaattttctataaa

SEQ ID NO: 141190 - DNA, 22 bp, Artificial Sequence
  Synthetic oligonucleotide; TTG chr11 5242762 5242783 5242767 5242762 -
gtcagcgaaattttctataaaa

SEQ ID NO: 141191 - DNA, 22 bp, Artificial Sequence
  Synthetic oligonucleotide; TTT chr11 5242749 5242770 5242754 5242749 -
tctataaaaattaatagtcact

SEQ ID NO: 141192 - DNA, 22 bp, Artificial Sequence
  Synthetic oligonucleotide; TTT chr11 5242748 5242769 5242753 5242748 -
ctataaaaattaatagtcactt

SEQ ID NO: 141193 - DNA, 22 bp, Artificial Sequence
  Synthetic oligonucleotide; TTC chr11 5242747 5242768 5242752 5242747 -
tataaaaattaatagtcacttt

SEQ ID NO: 141194 - DNA, 22 bp, Artificial Sequence
  Synthetic oligonucleotide; CTA chr11 5242745 5242766 5242750 5242745 -
taaaaattaatagtcacttttc

SEQ ID NO: 141195 - DNA, 22 bp, Artificial Sequence
  Synthetic oligonucleotide; TTA chr11 5242736 5242757 5242741 5242736 -
atagtcacttttctgcatagtc

SEQ ID NO: 141196 - DNA, 22 bp, Artificial Sequence
  Synthetic oligonucleotide; CTT chr11 5242726 5242747 5242731 5242726 -
ttctgcatagtcctggaggtta

SEQ ID NO: 141197 - DNA, 22 bp, Artificial Sequence
  Synthetic oligonucleotide; TTT chr11 5242725 5242746 5242730 5242725 -
tctgcatagtcctggaggttag

SEQ ID NO: 141198 - DNA, 22 bp, Artificial Sequence
  Synthetic oligonucleotide; TTT chr11 5242724 5242745 5242729 5242724 -
ctgcatagtcctggaggttaga

SEQ ID NO: 141199 - DNA, 22 bp, Artificial Sequence
  Synthetic oligonucleotide; TTC chr11 5242723 5242744 5242728 5242723 -
tgcatagtcctggaggttagaa

SEQ ID NO: 141200 - DNA, 22 bp, Artificial Sequence
  Synthetic oligonucleotide; CTG chr11 5242721 5242742 5242726 5242721 -
catagtcctggaggttagaaaa

SEQ ID NO: 141201 - DNA, 22 bp, Artificial Sequence
  Synthetic oligonucleotide; CTG chr11 5242711 5242732 5242716 5242711 -
gaggttagaaaaagatcaactg

SEQ ID NO: 141202 - DNA, 22 bp, Artificial Sequence
  Synthetic oligonucleotide; TTA chr11 5242704 5242725 5242709 5242704 -
gaaaaagatcaactgaacaaag

SEQ ID NO: 141203 - DNA, 22 bp, Artificial Sequence
  Synthetic oligonucleotide; CTG chr11 5242689 5242710 5242694 5242689 -
aacaaagtagtgggaagctgtt

SEQ ID NO: 141204 - DNA, 22 bp, Artificial Sequence
  Synthetic oligonucleotide; CTG chr11 5242669 5242690 5242674 5242669 -
ttaaaaagaggattgtttccct

SEQ ID NO: 141205 - DNA, 22 bp, Artificial Sequence
  Synthetic oligonucleotide; TTA chr11 5242666 5242687 5242671 5242666 -
aaaagaggattgtttccctccg

SEQ ID NO: 141206 - DNA, 22 bp, Artificial Sequence
  Synthetic oligonucleotide; TTG chr11 5242654 5242675 5242659 5242654 -
tttccctccgaatgatgatggt

SEQ ID NO: 141207 - DNA, 22 bp, Artificial Sequence
  Synthetic oligonucleotide; TTT chr11 5242651 5242672 5242656 5242651 -
ccctccgaatgatgatggtata

SEQ ID NO: 141208 - DNA, 22 bp, Artificial Sequence
  Synthetic oligonucleotide; TTC chr11 5242650 5242671 5242655 5242650 -
cctccgaatgatgatggtatac

SEQ ID NO: 141209 - DNA, 22 bp, Artificial Sequence
  Synthetic oligonucleotide; CTC chr11 5242646 5242667 5242651 5242646 -
cgaatgatgatggtatactttt

SEQ ID NO: 141210 - DNA, 22 bp, Artificial Sequence
  Synthetic oligonucleotide; CTT chr11 5242626 5242647 5242631 5242626 -
ttgtacgcatggtacaggattc

SEQ ID NO: 141211 - DNA, 22 bp, Artificial Sequence
  Synthetic oligonucleotide; TTT chr11 5242625 5242646 5242630 5242625 -
tgtacgcatggtacaggattct

SEQ ID NO: 141212 - DNA, 22 bp, Artificial Sequence
  Synthetic oligonucleotide; TTT chr11 5242624 5242645 5242629 5242624 -
gtacgcatggtacaggattctt

SEQ ID NO: 141213 - DNA, 22 bp, Artificial Sequence
  Synthetic oligonucleotide; TTG chr11 5242623 5242644 5242628 5242623 -
tacgcatggtacaggattcttt

SEQ ID NO: 141214 - DNA, 22 bp, Artificial Sequence
  Synthetic oligonucleotide; TTC chr11 5242604 5242625 5242609 5242604 -
tttgttatgagtgtttgggaaa

SEQ ID NO: 141215 - DNA, 22 bp, Artificial Sequence
  Synthetic oligonucleotide; CTT chr11 5242602 5242623 5242607 5242602 -
tgttatgagtgtttgggaaaat

SEQ ID NO: 141216 - DNA, 22 bp, Artificial Sequence
  Synthetic oligonucleotide; TTT chr11 5242601 5242622 5242606 5242601 -
gttatgagtgtttgggaaaatt

SEQ ID NO: 141217 - DNA, 22 bp, Artificial Sequence
  Synthetic oligonucleotide; TTG chr11 5242600 5242621 5242605 5242600 -
ttatgagtgtttgggaaaattg

SEQ ID NO: 141218 - DNA, 22 bp, Artificial Sequence
  Synthetic oligonucleotide; TTA chr11 5242597 5242618 5242602 5242597 -
tgagtgtttgggaaaattgtat

SEQ ID NO: 141219 - DNA, 22 bp, Artificial Sequence
  Synthetic oligonucleotide; TTT chr11 5242588 5242609 5242593 5242588 -
gggaaaattgtatgtatgtatg

SEQ ID NO: 141220 - DNA, 22 bp, Artificial Sequence
  Synthetic oligonucleotide; TTG chr11 5242587 5242608 5242592 5242587 -
ggaaaattgtatgtatgtatgt

SEQ ID NO: 141221 - DNA, 22 bp, Artificial Sequence
  Synthetic oligonucleotide; TTG chr11 5242578 5242599 5242583 5242578 -
tatgtatgtatgtatgtatgta

SEQ ID NO: 141222 - DNA, 22 bp, Artificial Sequence
  Synthetic oligonucleotide; CTG chr11 5242545 5242566 5242550 5242545 -
gggacttatcctatccattact

SEQ ID NO: 141223 - DNA, 22 bp, Artificial Sequence
  Synthetic oligonucleotide; CTT chr11 5242538 5242559 5242543 5242538 -
atcctatccattactgttcctt

SEQ ID NO: 141224 - DNA, 22 bp, Artificial Sequence
  Synthetic oligonucleotide; TTA chr11 5242537 5242558 5242542 5242537 -
tcctatccattactgttccttg

SEQ ID NO: 141225 - DNA, 22 bp, Artificial Sequence
  Synthetic oligonucleotide; CTA chr11 5242532 5242553 5242537 5242532 -
tccattactgttccttgaagta

SEQ ID NO: 141226 - DNA, 22 bp, Artificial Sequence
  Synthetic oligonucleotide; TTA chr11 5242525 5242546 5242530 5242525 -
ctgttccttgaagtactattat

SEQ ID NO: 141227 - DNA, 22 bp, Artificial Sequence
  Synthetic oligonucleotide; CTG chr11 5242522 5242543 5242527 5242522 -
ttccttgaagtactattatcct

SEQ ID NO: 141228 - DNA, 22 bp, Artificial Sequence
  Synthetic oligonucleotide; TTC chr11 5242519 5242540 5242524 5242519 -
cttgaagtactattatcctact

SEQ ID NO: 141229 - DNA, 22 bp, Artificial Sequence
  Synthetic oligonucleotide; CTT chr11 5242516 5242537 5242521 5242516 -
gaagtactattatcctactttt

SEQ ID NO: 141230 - DNA, 22 bp, Artificial Sequence
  Synthetic oligonucleotide; TTG chr11 5242515 5242536 5242520 5242515 -
aagtactattatcctacttttt

SEQ ID NO: 141231 - DNA, 22 bp, Artificial Sequence
  Synthetic oligonucleotide; CTA chr11 5242507 5242528 5242512 5242507 -
ttatcctactttttaaaaggac

SEQ ID NO: 141232 - DNA, 22 bp, Artificial Sequence
  Synthetic oligonucleotide; TTA chr11 5242504 5242525 5242509 5242504 -
tcctactttttaaaaggacgaa

SEQ ID NO: 141233 - DNA, 22 bp, Artificial Sequence
  Synthetic oligonucleotide; CTA chr11 5242499 5242520 5242504 5242499 -
ctttttaaaaggacgaagtctc

SEQ ID NO: 141234 - DNA, 22 bp, Artificial Sequence
  Synthetic oligonucleotide; CTT chr11 5242496 5242517 5242501 5242496 -
tttaaaaggacgaagtctctaa

SEQ ID NO: 141235 - DNA, 22 bp, Artificial Sequence
  Synthetic oligonucleotide; TTT chr11 5242495 5242516 5242500 5242495 -
ttaaaaggacgaagtctctaaa

SEQ ID NO: 141236 - DNA, 22 bp, Artificial Sequence
  Synthetic oligonucleotide; TTT chr11 5242494 5242515 5242499 5242494 -
taaaaggacgaagtctctaaaa

SEQ ID NO: 141237 - DNA, 22 bp, Artificial Sequence
  Synthetic oligonucleotide; TTT chr11 5242493 5242514 5242498 5242493 -
aaaaggacgaagtctctaaaaa

SEQ ID NO: 141238 - DNA, 22 bp, Artificial Sequence
  Synthetic oligonucleotide; TTA chr11 5242492 5242513 5242497 5242492 -
aaaggacgaagtctctaaaaaa

SEQ ID NO: 141239 - DNA, 22 bp, Artificial Sequence
  Synthetic oligonucleotide; CTC chr11 5242477 5242498 5242482 5242477 -
taaaaaaaaaatgaaacaatca

SEQ ID NO: 141240 - DNA, 22 bp, Artificial Sequence
  Synthetic oligonucleotide; CTA chr11 5242475 5242496 5242480 5242475 -
aaaaaaaaatgaaacaatcaca

SEQ ID NO: 141241 - DNA, 22 bp, Artificial Sequence
  Synthetic oligonucleotide; TTG chr11 5242445 5242466 5242450 5242445 -
gggtagtgagttggcatagcaa

SEQ ID NO: 141242 - DNA, 22 bp, Artificial Sequence
  Synthetic oligonucleotide; TTG chr11 5242432 5242453 5242437 5242432 -
gcatagcaagtaagagaaggat

SEQ ID NO: 141243 - DNA, 22 bp, Artificial Sequence
  Synthetic oligonucleotide; CTG chr11 5242384 5242405 5242389 5242384 -
ccagtcatattgaagctgatat

SEQ ID NO: 141244 - DNA, 22 bp, Artificial Sequence
  Synthetic oligonucleotide; TTG chr11 5242372 5242393 5242377 5242372 -
aagctgatatctagcccataat

SEQ ID NO: 141245 - DNA, 22 bp, Artificial Sequence
  Synthetic oligonucleotide; CTG chr11 5242366 5242387 5242371 5242366 -
atatctagcccataatggtgag

SEQ ID NO: 141246 - DNA, 22 bp, Artificial Sequence
  Synthetic oligonucleotide; CTA chr11 5242359 5242380 5242364 5242359 -
gcccataatggtgagagttgct

SEQ ID NO: 141247 - DNA, 22 bp, Artificial Sequence
  Synthetic oligonucleotide; TTG chr11 5242339 5242360 5242344 5242339 -
ctcaaactctggtgaaaaagga

SEQ ID NO: 141248 - DNA, 22 bp, Artificial Sequence
  Synthetic oligonucleotide; CTC chr11 5242336 5242357 5242341 5242336 -
aaactctggtgaaaaaggatgt

SEQ ID NO: 141249 - DNA, 22 bp, Artificial Sequence
  Synthetic oligonucleotide; CTC chr11 5242330 5242351 5242335 5242330 -
tggtgaaaaaggatgtaagtgt

SEQ ID NO: 141250 - DNA, 22 bp, Artificial Sequence
  Synthetic oligonucleotide; CTG chr11 5242328 5242349 5242333 5242328 -
gtgaaaaaggatgtaagtgtta

SEQ ID NO: 141251 - DNA, 22 bp, Artificial Sequence
  Synthetic oligonucleotide; TTA chr11 5242306 5242327 5242311 5242306 -
tatctatttactgcaagtccag

SEQ ID NO: 141252 - DNA, 22 bp, Artificial Sequence
  Synthetic oligonucleotide; CTA chr11 5242300 5242321 5242305 5242300 -
tttactgcaagtccagcttgag

SEQ ID NO: 141253 - DNA, 22 bp, Artificial Sequence
  Synthetic oligonucleotide; TTT chr11 5242297 5242318 5242302 5242297 -
actgcaagtccagcttgaggcc

SEQ ID NO: 141254 - DNA, 22 bp, Artificial Sequence
  Synthetic oligonucleotide; TTA chr11 5242296 5242317 5242301 5242296 -
ctgcaagtccagcttgaggcct

SEQ ID NO: 141255 - DNA, 22 bp, Artificial Sequence
  Synthetic oligonucleotide; CTG chr11 5242293 5242314 5242298 5242293 -
caagtccagcttgaggccttct

SEQ ID NO: 141256 - DNA, 22 bp, Artificial Sequence
  Synthetic oligonucleotide; CTT chr11 5242281 5242302 5242286 5242281 -
gaggccttctattcactatgta

SEQ ID NO: 141257 - DNA, 22 bp, Artificial Sequence
  Synthetic oligonucleotide; TTG chr11 5242280 5242301 5242285 5242280 -
aggccttctattcactatgtac

SEQ ID NO: 141258 - DNA, 22 bp, Artificial Sequence
  Synthetic oligonucleotide; CTT chr11 5242273 5242294 5242278 5242273 -
ctattcactatgtaccattttc

SEQ ID NO: 141259 - DNA, 22 bp, Artificial Sequence
  Synthetic oligonucleotide; TTC chr11 5242272 5242293 5242277 5242272 -
tattcactatgtaccattttct

SEQ ID NO: 141260 - DNA, 22 bp, Artificial Sequence
  Synthetic oligonucleotide; CTA chr11 5242270 5242291 5242275 5242270 -
ttcactatgtaccattttcttt

SEQ ID NO: 141261 - DNA, 22 bp, Artificial Sequence
  Synthetic oligonucleotide; TTC chr11 5242267 5242288 5242272 5242267 -
actatgtaccattttctttttt

SEQ ID NO: 141262 - DNA, 22 bp, Artificial Sequence
  Synthetic oligonucleotide; CTA chr11 5242263 5242284 5242268 5242263 -
tgtaccattttcttttttatct

SEQ ID NO: 141263 - DNA, 22 bp, Artificial Sequence
  Synthetic oligonucleotide; TTT chr11 5242253 5242274 5242258 5242253 -
tcttttttatcttcactccctc

SEQ ID NO: 141264 - DNA, 22 bp, Artificial Sequence
  Synthetic oligonucleotide; TTT chr11 5242252 5242273 5242257 5242252 -
cttttttatcttcactccctcc

SEQ ID NO: 141265 - DNA, 22 bp, Artificial Sequence
  Synthetic oligonucleotide; TTC chr11 5242251 5242272 5242256 5242251 -
ttttttatcttcactccctccc

SEQ ID NO: 141266 - DNA, 22 bp, Artificial Sequence
  Synthetic oligonucleotide; CTT chr11 5242249 5242270 5242254 5242249 -
ttttatcttcactccctcccca

SEQ ID NO: 141267 - DNA, 22 bp, Artificial Sequence
  Synthetic oligonucleotide; TTT chr11 5242248 5242269 5242253 5242248 -
tttatcttcactccctccccag

SEQ ID NO: 141268 - DNA, 22 bp, Artificial Sequence
  Synthetic oligonucleotide; TTT chr11 5242247 5242268 5242252 5242247 -
ttatcttcactccctccccagc

SEQ ID NO: 141269 - DNA, 22 bp, Artificial Sequence
  Synthetic oligonucleotide; TTT chr11 5242246 5242267 5242251 5242246 -
tatcttcactccctccccagct

SEQ ID NO: 141270 - DNA, 22 bp, Artificial Sequence
  Synthetic oligonucleotide; TTT chr11 5242245 5242266 5242250 5242245 -
atcttcactccctccccagctc

SEQ ID NO: 141271 - DNA, 22 bp, Artificial Sequence
  Synthetic oligonucleotide; TTA chr11 5242244 5242265 5242249 5242244 -
tcttcactccctccccagctct

SEQ ID NO: 141272 - DNA, 22 bp, Artificial Sequence
  Synthetic oligonucleotide; CTT chr11 5242240 5242261 5242245 5242240 -
cactccctccccagctcttagg

SEQ ID NO: 141273 - DNA, 22 bp, Artificial Sequence
  Synthetic oligonucleotide; TTC chr11 5242239 5242260 5242244 5242239 -
actccctccccagctcttaggc

SEQ ID NO: 141274 - DNA, 22 bp, Artificial Sequence
  Synthetic oligonucleotide; CTC chr11 5242235 5242256 5242240 5242235 -
cctccccagctcttaggcaacg

SEQ ID NO: 141275 - DNA, 22 bp, Artificial Sequence
  Synthetic oligonucleotide; CTC chr11 5242231 5242252 5242236 5242231 -
cccagctcttaggcaacgtgat

SEQ ID NO: 141276 - DNA, 22 bp, Artificial Sequence
  Synthetic oligonucleotide; CTC chr11 5242223 5242244 5242228 5242223 -
ttaggcaacgtgatattgattg

SEQ ID NO: 141277 - DNA, 22 bp, Artificial Sequence
  Synthetic oligonucleotide; CTT chr11 5242221 5242242 5242226 5242221 -
aggcaacgtgatattgattgtt

SEQ ID NO: 141278 - DNA, 22 bp, Artificial Sequence
  Synthetic oligonucleotide; TTA chr11 5242220 5242241 5242225 5242220 -
ggcaacgtgatattgattgttt

SEQ ID NO: 141279 - DNA, 22 bp, Artificial Sequence
  Synthetic oligonucleotide; TTG chr11 5242205 5242226 5242210 5242205 -
attgttttggcaacccacttca

SEQ ID NO: 141280 - DNA, 22 bp, Artificial Sequence
  Synthetic oligonucleotide; TTG chr11 5242201 5242222 5242206 5242201 -
ttttggcaacccacttcagcga

SEQ ID NO: 141281 - DNA, 22 bp, Artificial Sequence
  Synthetic oligonucleotide; TTT chr11 5242198 5242219 5242203 5242198 -
tggcaacccacttcagcgagga

SEQ ID NO: 141282 - DNA, 22 bp, Artificial Sequence
  Synthetic oligonucleotide; TTT chr11 5242197 5242218 5242202 5242197 -
ggcaacccacttcagcgaggat

SEQ ID NO: 141283 - DNA, 22 bp, Artificial Sequence
  Synthetic oligonucleotide; TTG chr11 5242196 5242217 5242201 5242196 -
gcaacccacttcagcgaggatt

SEQ ID NO: 141284 - DNA, 22 bp, Artificial Sequence
  Synthetic oligonucleotide; CTT chr11 5242185 5242206 5242190 5242185 -
cagcgaggattttaccctacag

SEQ ID NO: 141285 - DNA, 22 bp, Artificial Sequence
  Synthetic oligonucleotide; TTC chr11 5242184 5242205 5242189 5242184 -
agcgaggattttaccctacaga

SEQ ID NO: 141286 - DNA, 22 bp, Artificial Sequence
  Synthetic oligonucleotide; TTT chr11 5242173 5242194 5242178 5242173 -
taccctacagatacaggcttct

SEQ ID NO: 141287 - DNA, 22 bp, Artificial Sequence
  Synthetic oligonucleotide; TTT chr11 5242172 5242193 5242177 5242172 -
accctacagatacaggcttctt

SEQ ID NO: 141288 - DNA, 22 bp, Artificial Sequence
  Synthetic oligonucleotide; TTA chr11 5242171 5242192 5242176 5242171 -
ccctacagatacaggcttcttg

SEQ ID NO: 141289 - DNA, 22 bp, Artificial Sequence
  Synthetic oligonucleotide; CTA chr11 5242166 5242187 5242171 5242166 -
cagatacaggcttcttggcagt

SEQ ID NO: 141290 - DNA, 22 bp, Artificial Sequence
  Synthetic oligonucleotide; CTT chr11 5242153 5242174 5242158 5242153 -
cttggcagtaactaacaaatgc

SEQ ID NO: 141291 - DNA, 22 bp, Artificial Sequence
  Synthetic oligonucleotide; TTC chr11 5242152 5242173 5242157 5242152 -
ttggcagtaactaacaaatgct

SEQ ID NO: 141292 - DNA, 22 bp, Artificial Sequence
  Synthetic oligonucleotide; CTT chr11 5242150 5242171 5242155 5242150 -
ggcagtaactaacaaatgctgt

SEQ ID NO: 141293 - DNA, 22 bp, Artificial Sequence
  Synthetic oligonucleotide; TTG chr11 5242149 5242170 5242154 5242149 -
gcagtaactaacaaatgctgtg

SEQ ID NO: 141294 - DNA, 22 bp, Artificial Sequence
  Synthetic oligonucleotide; CTA chr11 5242139 5242160 5242144 5242139 -
acaaatgctgtggttaatgctg

SEQ ID NO: 141295 - DNA, 22 bp, Artificial Sequence
  Synthetic oligonucleotide; CTG chr11 5242129 5242150 5242134 5242129 -
tggttaatgctgtagcccacaa

SEQ ID NO: 141296 - DNA, 22 bp, Artificial Sequence
  Synthetic oligonucleotide; TTA chr11 5242123 5242144 5242128 5242123 -
atgctgtagcccacaagaccac

SEQ ID NO: 141297 - DNA, 22 bp, Artificial Sequence
  Synthetic oligonucleotide; CTG chr11 5242117 5242138 5242122 5242117 -
tagcccacaagaccactgagtt

SEQ ID NO: 141298 - DNA, 22 bp, Artificial Sequence
  Synthetic oligonucleotide; CTG chr11 5242099 5242120 5242104 5242099 -
agttccctgtccactatgtttg

SEQ ID NO: 141299 - DNA, 22 bp, Artificial Sequence
  Synthetic oligonucleotide; TTC chr11 5242094 5242115 5242099 5242094 -
cctgtccactatgtttgtacct

SEQ ID NO: 141300 - DNA, 22 bp, Artificial Sequence
  Synthetic oligonucleotide; CTG chr11 5242090 5242111 5242095 5242090 -
tccactatgtttgtacctatgg

SEQ ID NO: 141301 - DNA, 22 bp, Artificial Sequence
  Synthetic oligonucleotide; CTA chr11 5242083 5242104 5242088 5242083 -
tgtttgtacctatggtccacta

SEQ ID NO: 141302 - DNA, 22 bp, Artificial Sequence
  Synthetic oligonucleotide; TTT chr11 5242078 5242099 5242083 5242078 -
gtacctatggtccactatgttt

SEQ ID NO: 141303 - DNA, 22 bp, Artificial Sequence
  Synthetic oligonucleotide; TTG chr11 5242077 5242098 5242082 5242077 -
tacctatggtccactatgtttg

SEQ ID NO: 141304 - DNA, 22 bp, Artificial Sequence
  Synthetic oligonucleotide; CTA chr11 5242071 5242092 5242076 5242071 -
tggtccactatgtttgtaccta

SEQ ID NO: 141305 - DNA, 22 bp, Artificial Sequence
  Synthetic oligonucleotide; CTA chr11 5242061 5242082 5242066 5242061 -
tgtttgtacctatgtcccaaaa

SEQ ID NO: 141306 - DNA, 22 bp, Artificial Sequence
  Synthetic oligonucleotide; TTT chr11 5242056 5242077 5242061 5242056 -
gtacctatgtcccaaaatctca

SEQ ID NO: 141307 - DNA, 22 bp, Artificial Sequence
  Synthetic oligonucleotide; TTG chr11 5242055 5242076 5242060 5242055 -
tacctatgtcccaaaatctcat

SEQ ID NO: 141308 - DNA, 22 bp, Artificial Sequence
  Synthetic oligonucleotide; CTA chr11 5242049 5242070 5242054 5242049 -
tgtcccaaaatctcatctcctt

SEQ ID NO: 141309 - DNA, 22 bp, Artificial Sequence
  Synthetic oligonucleotide; CTC chr11 5242035 5242056 5242040 5242035 -
atctcctttagatgggggaggt

SEQ ID NO: 141310 - DNA, 22 bp, Artificial Sequence
  Synthetic oligonucleotide; CTC chr11 5242030 5242051 5242035 5242030 -
ctttagatgggggaggttgggg

SEQ ID NO: 141311 - DNA, 22 bp, Artificial Sequence
  Synthetic oligonucleotide; CTT chr11 5242027 5242048 5242032 5242027 -
tagatgggggaggttggggaga

SEQ ID NO: 141312 - DNA, 22 bp, Artificial Sequence
  Synthetic oligonucleotide; TTT chr11 5242026 5242047 5242031 5242026 -
agatgggggaggttggggagaa

SEQ ID NO: 141313 - DNA, 22 bp, Artificial Sequence
  Synthetic oligonucleotide; TTA chr11 5242025 5242046 5242030 5242025 -
gatgggggaggttggggagaag

SEQ ID NO: 141314 - DNA, 22 bp, Artificial Sequence
  Synthetic oligonucleotide; TTG chr11 5242011 5242032 5242016 5242011 -
gggagaagagcagtatcctgcc

SEQ ID NO: 141315 - DNA, 22 bp, Artificial Sequence
  Synthetic oligonucleotide; CTG chr11 5241991 5242012 5241996 5241991 -
cctgctgattcagttcctgcat

SEQ ID NO: 141316 - DNA, 22 bp, Artificial Sequence
  Synthetic oligonucleotide; CTG chr11 5241987 5242008 5241992 5241987 -
ctgattcagttcctgcatgata

SEQ ID NO: 141317 - DNA, 22 bp, Artificial Sequence
  Synthetic oligonucleotide; CTG chr11 5241984 5242005 5241989 5241984 -
attcagttcctgcatgataaaa

SEQ ID NO: 141318 - DNA, 22 bp, Artificial Sequence
  Synthetic oligonucleotide; TTC chr11 5241980 5242001 5241985 5241980 -
agttcctgcatgataaaaatag

SEQ ID NO: 141319 - DNA, 22 bp, Artificial Sequence
  Synthetic oligonucleotide; TTC chr11 5241975 5241996 5241980 5241975 -
ctgcatgataaaaatagaataa

SEQ ID NO: 141320 - DNA, 22 bp, Artificial Sequence
  Synthetic oligonucleotide; CTG chr11 5241972 5241993 5241977 5241972 -
catgataaaaatagaataaaga

SEQ ID NO: 141321 - DNA, 22 bp, Artificial Sequence
  Synthetic oligonucleotide; CTC chr11 5241941 5241962 5241946 5241941 -
tctaagaaatatcattgtactc

SEQ ID NO: 141322 - DNA, 22 bp, Artificial Sequence
  Synthetic oligonucleotide; CTC chr11 5241939 5241960 5241944 5241939 -
taagaaatatcattgtactctt

SEQ ID NO: 141323 - DNA, 22 bp, Artificial Sequence
  Synthetic oligonucleotide; CTA chr11 5241937 5241958 5241942 5241937 -
agaaatatcattgtactctttt

SEQ ID NO: 141324 - DNA, 22 bp, Artificial Sequence
  Synthetic oligonucleotide; TTG chr11 5241924 5241945 5241929 5241924 -
tactctttttctgtctttatat

SEQ ID NO: 141325 - DNA, 22 bp, Artificial Sequence
  Synthetic oligonucleotide; CTC chr11 5241919 5241940 5241924 5241919 -
tttttctgtctttatattttac

SEQ ID NO: 141326 - DNA, 22 bp, Artificial Sequence
  Synthetic oligonucleotide; CTT chr11 5241917 5241938 5241922 5241917 -
tttctgtctttatattttaccc

SEQ ID NO: 141327 - DNA, 22 bp, Artificial Sequence
  Synthetic oligonucleotide; TTT chr11 5241916 5241937 5241921 5241916 -
ttctgtctttatattttaccct

SEQ ID NO: 141328 - DNA, 22 bp, Artificial Sequence
  Synthetic oligonucleotide; TTT chr11 5241915 5241936 5241920 5241915 -
tctgtctttatattttaccctg

SEQ ID NO: 141329 - DNA, 22 bp, Artificial Sequence
  Synthetic oligonucleotide; TTT chr11 5241914 5241935 5241919 5241914 -
ctgtctttatattttaccctga

SEQ ID NO: 141330 - DNA, 22 bp, Artificial Sequence
  Synthetic oligonucleotide; TTC chr11 5241913 5241934 5241918 5241913 -
tgtctttatattttaccctgat

SEQ ID NO: 141331 - DNA, 22 bp, Artificial Sequence
  Synthetic oligonucleotide; CTG chr11 5241911 5241932 5241916 5241911 -
tctttatattttaccctgattc

SEQ ID NO: 141332 - DNA, 22 bp, Artificial Sequence
  Synthetic oligonucleotide; CTT chr11 5241907 5241928 5241912 5241907 -
tatattttaccctgattcagcc

SEQ ID NO: 141333 - DNA, 22 bp, Artificial Sequence
  Synthetic oligonucleotide; TTT chr11 5241906 5241927 5241911 5241906 -
atattttaccctgattcagcca

SEQ ID NO: 141334 - DNA, 22 bp, Artificial Sequence
  Synthetic oligonucleotide; TTA chr11 5241905 5241926 5241910 5241905 -
tattttaccctgattcagccaa

SEQ ID NO: 141335 - DNA, 22 bp, Artificial Sequence
  Synthetic oligonucleotide; TTT chr11 5241900 5241921 5241905 5241900 -
taccctgattcagccaaaagga

SEQ ID NO: 141336 - DNA, 22 bp, Artificial Sequence
  Synthetic oligonucleotide; TTT chr11 5241899 5241920 5241904 5241899 -
accctgattcagccaaaaggac

SEQ ID NO: 141337 - DNA, 22 bp, Artificial Sequence
  Synthetic oligonucleotide; TTA chr11 5241898 5241919 5241903 5241898 -
ccctgattcagccaaaaggacg

SEQ ID NO: 141338 - DNA, 22 bp, Artificial Sequence
  Synthetic oligonucleotide; CTG chr11 5241893 5241914 5241898 5241893 -
attcagccaaaaggacgcacta

SEQ ID NO: 141339 - DNA, 22 bp, Artificial Sequence
  Synthetic oligonucleotide; TTC chr11 5241889 5241910 5241894 5241889 -
agccaaaaggacgcactatttc

SEQ ID NO: 141340 - DNA, 22 bp, Artificial Sequence
  Synthetic oligonucleotide; CTA chr11 5241871 5241892 5241876 5241871 -
tttctgatggaaatgagaatgt

SEQ ID NO: 141341 - DNA, 22 bp, Artificial Sequence
  Synthetic oligonucleotide; TTT chr11 5241868 5241889 5241873 5241868 -
ctgatggaaatgagaatgttgg

SEQ ID NO: 141342 - DNA, 22 bp, Artificial Sequence
  Synthetic oligonucleotide; TTC chr11 5241867 5241888 5241872 5241867 -
tgatggaaatgagaatgttgga

SEQ ID NO: 141343 - DNA, 22 bp, Artificial Sequence
  Synthetic oligonucleotide; CTG chr11 5241865 5241886 5241870 5241865 -
atggaaatgagaatgttggaga

SEQ ID NO: 141344 - DNA, 22 bp, Artificial Sequence
  Synthetic oligonucleotide; TTG chr11 5241847 5241868 5241852 5241847 -
gagaatgggagtttaaggacag

SEQ ID NO: 141345 - DNA, 22 bp, Artificial Sequence
  Synthetic oligonucleotide; TTT chr11 5241833 5241854 5241838 5241833 -
aaggacagagaagatactttct

SEQ ID NO: 141346 - DNA, 22 bp, Artificial Sequence
  Synthetic oligonucleotide; TTA chr11 5241832 5241853 5241837 5241832 -
aggacagagaagatactttctt

SEQ ID NO: 141347 - DNA, 22 bp, Artificial Sequence
  Synthetic oligonucleotide; CTT chr11 5241814 5241835 5241819 5241814 -
tcttgcaatcctgcaagaaaag

SEQ ID NO: 141348 - DNA, 22 bp, Artificial Sequence
  Synthetic oligonucleotide; TTT chr11 5241813 5241834 5241818 5241813 -
cttgcaatcctgcaagaaaaga

SEQ ID NO: 141349 - DNA, 22 bp, Artificial Sequence
  Synthetic oligonucleotide; TTC chr11 5241812 5241833 5241817 5241812 -
ttgcaatcctgcaagaaaagag

SEQ ID NO: 141350 - DNA, 22 bp, Artificial Sequence
  Synthetic oligonucleotide; CTT chr11 5241810 5241831 5241815 5241810 -
gcaatcctgcaagaaaagagag

SEQ ID NO: 141351 - DNA, 22 bp, Artificial Sequence
  Synthetic oligonucleotide; TTG chr11 5241809 5241830 5241814 5241809 -
caatcctgcaagaaaagagaga

SEQ ID NO: 141352 - DNA, 22 bp, Artificial Sequence
  Synthetic oligonucleotide; CTG chr11 5241801 5241822 5241806 5241801 -
caagaaaagagagaactcgtgg

SEQ ID NO: 141353 - DNA, 22 bp, Artificial Sequence
  Synthetic oligonucleotide; CTC chr11 5241783 5241804 5241788 5241783 -
gtgggtggatttagtggggtag

SEQ ID NO: 141354 - DNA, 22 bp, Artificial Sequence
  Synthetic oligonucleotide; TTT chr11 5241771 5241792 5241776 5241771 -
agtggggtagttactcctagga

SEQ ID NO: 141355 - DNA, 22 bp, Artificial Sequence
  Synthetic oligonucleotide; TTA chr11 5241770 5241791 5241775 5241770 -
gtggggtagttactcctaggaa

SEQ ID NO: 141356 - DNA, 22 bp, Artificial Sequence
  Synthetic oligonucleotide; TTA chr11 5241758 5241779 5241763 5241758 -
ctcctaggaaggggaaatcgtc

SEQ ID NO: 141357 - DNA, 22 bp, Artificial Sequence
  Synthetic oligonucleotide; CTC chr11 5241755 5241776 5241760 5241755 -
ctaggaaggggaaatcgtctct

SEQ ID NO: 141358 - DNA, 22 bp, Artificial Sequence
  Synthetic oligonucleotide; CTA chr11 5241752 5241773 5241757 5241752 -
ggaaggggaaatcgtctctaga

SEQ ID NO: 141359 - DNA, 22 bp, Artificial Sequence
  Synthetic oligonucleotide; CTC chr11 5241734 5241755 5241739 5241734 -
tagaataagacaatgtttttac

SEQ ID NO: 141360 - DNA, 22 bp, Artificial Sequence
  Synthetic oligonucleotide; CTA chr11 5241732 5241753 5241737 5241732 -
gaataagacaatgtttttacag

SEQ ID NO: 141361 - DNA, 22 bp, Artificial Sequence
  Synthetic oligonucleotide; TTT chr11 5241716 5241737 5241721 5241716 -
ttacagaaagggaggtcaatgg

SEQ ID NO: 141362 - DNA, 22 bp, Artificial Sequence
  Synthetic oligonucleotide; TTT chr11 5241715 5241736 5241720 5241715 -
tacagaaagggaggtcaatgga

SEQ ID NO: 141363 - DNA, 22 bp, Artificial Sequence
  Synthetic oligonucleotide; TTT chr11 5241714 5241735 5241719 5241714 -
acagaaagggaggtcaatggag

SEQ ID NO: 141364 - DNA, 22 bp, Artificial Sequence
  Synthetic oligonucleotide; TTA chr11 5241713 5241734 5241718 5241713 -
cagaaagggaggtcaatggagg

SEQ ID NO: 141365 - DNA, 22 bp, Artificial Sequence
  Synthetic oligonucleotide; CTC chr11 5241686 5241707 5241691 5241686 -
tttggaggtgtaagaggattgt

SEQ ID NO: 141366 - DNA, 22 bp, Artificial Sequence
  Synthetic oligonucleotide; CTT chr11 5241684 5241705 5241689 5241684 -
tggaggtgtaagaggattgttg

SEQ ID NO: 141367 - DNA, 22 bp, Artificial Sequence
  Synthetic oligonucleotide; TTT chr11 5241683 5241704 5241688 5241683 -
ggaggtgtaagaggattgttgg

SEQ ID NO: 141368 - DNA, 22 bp, Artificial Sequence
  Synthetic oligonucleotide; TTG chr11 5241682 5241703 5241687 5241682 -
gaggtgtaagaggattgttggt

SEQ ID NO: 141369 - DNA, 22 bp, Artificial Sequence
  Synthetic oligonucleotide; TTG chr11 5241665 5241686 5241670 5241665 -
ttggtagtgtgtagaggtatgt

SEQ ID NO: 141370 - DNA, 22 bp, Artificial Sequence
  Synthetic oligonucleotide; TTG chr11 5241662 5241683 5241667 5241662 -
gtagtgtgtagaggtatgttag

SEQ ID NO: 141371 - DNA, 22 bp, Artificial Sequence
  Synthetic oligonucleotide; TTA chr11 5241641 5241662 5241646 5241641 -
ggactcaaattagaagttctgt

SEQ ID NO: 141372 - DNA, 22 bp, Artificial Sequence
  Synthetic oligonucleotide; CTC chr11 5241635 5241656 5241640 5241635 -
aaattagaagttctgtataggc

SEQ ID NO: 141373 - DNA, 22 bp, Artificial Sequence
  Synthetic oligonucleotide; TTA chr11 5241629 5241650 5241634 5241629 -
gaagttctgtataggctattat

SEQ ID NO: 141374 - DNA, 22 bp, Artificial Sequence
  Synthetic oligonucleotide; TTC chr11 5241622 5241643 5241627 5241622 -
tgtataggctattatttgtatg

SEQ ID NO: 141375 - DNA, 22 bp, Artificial Sequence
  Synthetic oligonucleotide; CTG chr11 5241620 5241641 5241625 5241620 -
tataggctattatttgtatgaa

SEQ ID NO: 141376 - DNA, 22 bp, Artificial Sequence
  Synthetic oligonucleotide; CTA chr11 5241611 5241632 5241616 5241611 -
ttatttgtatgaaactcaggat

SEQ ID NO: 141377 - DNA, 22 bp, Artificial Sequence
  Synthetic oligonucleotide; TTA chr11 5241608 5241629 5241613 5241608 -
tttgtatgaaactcaggatata

SEQ ID NO: 141378 - DNA, 22 bp, Artificial Sequence
  Synthetic oligonucleotide; TTT chr11 5241605 5241626 5241610 5241605 -
gtatgaaactcaggatatagct

SEQ ID NO: 141379 - DNA, 22 bp, Artificial Sequence
  Synthetic oligonucleotide; TTG chr11 5241604 5241625 5241609 5241604 -
tatgaaactcaggatatagctc

SEQ ID NO: 141380 - DNA, 22 bp, Artificial Sequence
  Synthetic oligonucleotide; CTC chr11 5241594 5241615 5241599 5241594 -
aggatatagctcatttggtgac

SEQ ID NO: 141381 - DNA, 22 bp, Artificial Sequence
  Synthetic oligonucleotide; CTC chr11 5241582 5241603 5241587 5241582 -
atttggtgactgcagttcactt

SEQ ID NO: 141382 - DNA, 22 bp, Artificial Sequence
  Synthetic oligonucleotide; TTT chr11 5241578 5241599 5241583 5241578 -
ggtgactgcagttcacttctac

SEQ ID NO: 141383 - DNA, 22 bp, Artificial Sequence
  Synthetic oligonucleotide; TTG chr11 5241577 5241598 5241582 5241577 -
gtgactgcagttcacttctact

SEQ ID NO: 141384 - DNA, 22 bp, Artificial Sequence
  Synthetic oligonucleotide; CTG chr11 5241570 5241591 5241575 5241570 -
cagttcacttctacttatttta

SEQ ID NO: 141385 - DNA, 22 bp, Artificial Sequence
  Synthetic oligonucleotide; TTC chr11 5241564 5241585 5241569 5241564 -
acttctacttattttaaacaac

SEQ ID NO: 141386 - DNA, 22 bp, Artificial Sequence
  Synthetic oligonucleotide; CTT chr11 5241560 5241581 5241565 5241560 -
ctacttattttaaacaacatat

SEQ ID NO: 141387 - DNA, 22 bp, Artificial Sequence
  Synthetic oligonucleotide; TTC chr11 5241559 5241580 5241564 5241559 -
tacttattttaaacaacatatt

SEQ ID NO: 141388 - DNA, 22 bp, Artificial Sequence
  Synthetic oligonucleotide; CTA chr11 5241557 5241578 5241562 5241557 -
cttattttaaacaacatatttt

SEQ ID NO: 141389 - DNA, 22 bp, Artificial Sequence
  Synthetic oligonucleotide; CTT chr11 5241554 5241575 5241559 5241554 -
attttaaacaacatatttttta

SEQ ID NO: 141390 - DNA, 22 bp, Artificial Sequence
  Synthetic oligonucleotide; TTA chr11 5241553 5241574 5241558 5241553 -
ttttaaacaacatattttttat

SEQ ID NO: 141391 - DNA, 22 bp, Artificial Sequence
  Synthetic oligonucleotide; TTT chr11 5241550 5241571 5241555 5241550 -
taaacaacatattttttattat

SEQ ID NO: 141392 - DNA, 22 bp, Artificial Sequence
  Synthetic oligonucleotide; TTT chr11 5241549 5241570 5241554 5241549 -
aaacaacatattttttattatt

SEQ ID NO: 141393 - DNA, 22 bp, Artificial Sequence
  Synthetic oligonucleotide; TTA chr11 5241548 5241569 5241553 5241548 -
aacaacatattttttattattt

SEQ ID NO: 141394 - DNA, 22 bp, Artificial Sequence
  Synthetic oligonucleotide; TTT chr11 5241536 5241557 5241541 5241536 -
tttattatttataatgaagtgg

SEQ ID NO: 141395 - DNA, 22 bp, Artificial Sequence
  Synthetic oligonucleotide; TTT chr11 5241535 5241556 5241540 5241535 -
ttattatttataatgaagtggg

SEQ ID NO: 141396 - DNA, 22 bp, Artificial Sequence
  Synthetic oligonucleotide; TTT chr11 5241534 5241555 5241539 5241534 -
tattatttataatgaagtgggg

SEQ ID NO: 141397 - DNA, 22 bp, Artificial Sequence
  Synthetic oligonucleotide; TTT chr11 5241533 5241554 5241538 5241533 -
attatttataatgaagtgggga

SEQ ID NO: 141398 - DNA, 22 bp, Artificial Sequence
  Synthetic oligonucleotide; TTA chr11 5241532 5241553 5241537 5241532 -
ttatttataatgaagtggggat

SEQ ID NO: 141399 - DNA, 22 bp, Artificial Sequence
  Synthetic oligonucleotide; TTA chr11 5241529 5241550 5241534 5241529 -
tttataatgaagtggggatggg

SEQ ID NO: 141400 - DNA, 22 bp, Artificial Sequence
  Synthetic oligonucleotide; TTT chr11 5241526 5241547 5241531 5241526 -
ataatgaagtggggatggggct

SEQ ID NO: 141401 - DNA, 22 bp, Artificial Sequence
  Synthetic oligonucleotide; TTA chr11 5241525 5241546 5241530 5241525 -
taatgaagtggggatggggctt

SEQ ID NO: 141402 - DNA, 22 bp, Artificial Sequence
  Synthetic oligonucleotide; CTT chr11 5241503 5241524 5241508 5241503 -
cctagagaccaatcaagggcca

SEQ ID NO: 141403 - DNA, 22 bp, Artificial Sequence
  Synthetic oligonucleotide; TTC chr11 5241502 5241523 5241507 5241502 -
ctagagaccaatcaagggccaa

SEQ ID NO: 141404 - DNA, 22 bp, Artificial Sequence
  Synthetic oligonucleotide; CTA chr11 5241499 5241520 5241504 5241499 -
gagaccaatcaagggccaaacc

SEQ ID NO: 141405 - DNA, 22 bp, Artificial Sequence
  Synthetic oligonucleotide; CTT chr11 5241475 5241496 5241480 5241475 -
gaactttctcttaacgtcttca

SEQ ID NO: 141406 - DNA, 22 bp, Artificial Sequence
  Synthetic oligonucleotide; TTG chr11 5241474 5241495 5241479 5241474 -
aactttctcttaacgtcttcaa

SEQ ID NO: 141407 - DNA, 22 bp, Artificial Sequence
  Synthetic oligonucleotide; CTT chr11 5241469 5241490 5241474 5241469 -
tctcttaacgtcttcaatggta

SEQ ID NO: 141408 - DNA, 22 bp, Artificial Sequence
  Synthetic oligonucleotide; TTT chr11 5241468 5241489 5241473 5241468 -
ctcttaacgtcttcaatggtat

SEQ ID NO: 141409 - DNA, 22 bp, Artificial Sequence
  Synthetic oligonucleotide; TTC chr11 5241467 5241488 5241472 5241467 -
tcttaacgtcttcaatggtatt

SEQ ID NO: 141410 - DNA, 22 bp, Artificial Sequence
  Synthetic oligonucleotide; CTC chr11 5241465 5241486 5241470 5241465 -
ttaacgtcttcaatggtattaa

SEQ ID NO: 141411 - DNA, 22 bp, Artificial Sequence
  Synthetic oligonucleotide; CTT chr11 5241463 5241484 5241468 5241463 -
aacgtcttcaatggtattaata

SEQ ID NO: 141412 - DNA, 22 bp, Artificial Sequence
  Synthetic oligonucleotide; TTA chr11 5241462 5241483 5241467 5241462 -
acgtcttcaatggtattaatag

SEQ ID NO: 141413 - DNA, 22 bp, Artificial Sequence
  Synthetic oligonucleotide; CTT chr11 5241455 5241476 5241460 5241455 -
caatggtattaatagagaatta

SEQ ID NO: 141414 - DNA, 22 bp, Artificial Sequence
  Synthetic oligonucleotide; TTC chr11 5241454 5241475 5241459 5241454 -
aatggtattaatagagaattat

SEQ ID NO: 141415 - DNA, 22 bp, Artificial Sequence
  Synthetic oligonucleotide; TTA chr11 5241444 5241465 5241449 5241444 -
atagagaattatctctaaggca

SEQ ID NO: 141416 - DNA, 22 bp, Artificial Sequence
  Synthetic oligonucleotide; TTA chr11 5241433 5241454 5241438 5241433 -
tctctaaggcatgtgaactggc

SEQ ID NO: 141417 - DNA, 22 bp, Artificial Sequence
  Synthetic oligonucleotide; CTC chr11 5241429 5241450 5241434 5241429 -
taaggcatgtgaactggctgtc

SEQ ID NO: 141418 - DNA, 22 bp, Artificial Sequence
  Synthetic oligonucleotide; CTA chr11 5241427 5241448 5241432 5241427 -
aggcatgtgaactggctgtctt

SEQ ID NO: 141419 - DNA, 22 bp, Artificial Sequence
  Synthetic oligonucleotide; CTG chr11 5241413 5241434 5241418 5241413 -
gctgtcttggttttcatctgta

SEQ ID NO: 141420 - DNA, 22 bp, Artificial Sequence
  Synthetic oligonucleotide; CTG chr11 5241409 5241430 5241414 5241409 -
tcttggttttcatctgtacttc

SEQ ID NO: 141421 - DNA, 22 bp, Artificial Sequence
  Synthetic oligonucleotide; CTT chr11 5241405 5241426 5241410 5241405 -
ggttttcatctgtacttcatct

SEQ ID NO: 141422 - DNA, 22 bp, Artificial Sequence
  Synthetic oligonucleotide; TTG chr11 5241404 5241425 5241409 5241404 -
gttttcatctgtacttcatctg

SEQ ID NO: 141423 - DNA, 22 bp, Artificial Sequence
  Synthetic oligonucleotide; TTT chr11 5241400 5241421 5241405 5241400 -
tcatctgtacttcatctgctac

SEQ ID NO: 141424 - DNA, 22 bp, Artificial Sequence
  Synthetic oligonucleotide; TTT chr11 5241399 5241420 5241404 5241399 -
catctgtacttcatctgctacc

SEQ ID NO: 141425 - DNA, 22 bp, Artificial Sequence
  Synthetic oligonucleotide; TTC chr11 5241398 5241419 5241403 5241398 -
atctgtacttcatctgctacct

SEQ ID NO: 141426 - DNA, 22 bp, Artificial Sequence
  Synthetic oligonucleotide; CTG chr11 5241393 5241414 5241398 5241393 -
tacttcatctgctacctctgtg

SEQ ID NO: 141427 - DNA, 22 bp, Artificial Sequence
  Synthetic oligonucleotide; CTT chr11 5241388 5241409 5241393 5241388 -
catctgctacctctgtgacctg

SEQ ID NO: 141428 - DNA, 22 bp, Artificial Sequence
  Synthetic oligonucleotide; TTC chr11 5241387 5241408 5241392 5241387 -
atctgctacctctgtgacctga

SEQ ID NO: 141429 - DNA, 22 bp, Artificial Sequence
  Synthetic oligonucleotide; CTG chr11 5241382 5241403 5241387 5241382 -
ctacctctgtgacctgaaacat

SEQ ID NO: 141430 - DNA, 22 bp, Artificial Sequence
  Synthetic oligonucleotide; CTA chr11 5241379 5241400 5241384 5241379 -
cctctgtgacctgaaacatatt

SEQ ID NO: 141431 - DNA, 22 bp, Artificial Sequence
  Synthetic oligonucleotide; CTC chr11 5241375 5241396 5241380 5241375 -
tgtgacctgaaacatatttata

SEQ ID NO: 141432 - DNA, 22 bp, Artificial Sequence
  Synthetic oligonucleotide; CTG chr11 5241373 5241394 5241378 5241373 -
tgacctgaaacatatttataat

SEQ ID NO: 141433 - DNA, 22 bp, Artificial Sequence
  Synthetic oligonucleotide; CTG chr11 5241366 5241387 5241371 5241366 -
aaacatatttataattccatta

SEQ ID NO: 141434 - DNA, 22 bp, Artificial Sequence
  Synthetic oligonucleotide; TTT chr11 5241356 5241377 5241361 5241356 -
ataattccattaagctgtgcat

SEQ ID NO: 141435 - DNA, 22 bp, Artificial Sequence
  Synthetic oligonucleotide; TTA chr11 5241355 5241376 5241360 5241355 -
taattccattaagctgtgcata

SEQ ID NO: 141436 - DNA, 22 bp, Artificial Sequence
  Synthetic oligonucleotide; TTC chr11 5241349 5241370 5241354 5241349 -
cattaagctgtgcatatgatag

SEQ ID NO: 141437 - DNA, 22 bp, Artificial Sequence
  Synthetic oligonucleotide; TTA chr11 5241344 5241365 5241349 5241344 -
agctgtgcatatgatagattta

SEQ ID NO: 141438 - DNA, 22 bp, Artificial Sequence
  Synthetic oligonucleotide; CTG chr11 5241339 5241360 5241344 5241339 -
tgcatatgatagatttatcata

SEQ ID NO: 141439 - DNA, 22 bp, Artificial Sequence
  Synthetic oligonucleotide; TTT chr11 5241323 5241344 5241328 5241323 -
atcatatgtattttccttaaag

SEQ ID NO: 141440 - DNA, 22 bp, Artificial Sequence
  Synthetic oligonucleotide; TTA chr11 5241322 5241343 5241327 5241322 -
tcatatgtattttccttaaagg

SEQ ID NO: 141441 - DNA, 22 bp, Artificial Sequence
  Synthetic oligonucleotide; TTT chr11 5241310 5241331 5241315 5241310 -
tccttaaaggatttttgtaaga

SEQ ID NO: 141442 - DNA, 22 bp, Artificial Sequence
  Synthetic oligonucleotide; TTT chr11 5241309 5241330 5241314 5241309 -
ccttaaaggatttttgtaagaa

SEQ ID NO: 141443 - DNA, 22 bp, Artificial Sequence
  Synthetic oligonucleotide; TTC chr11 5241308 5241329 5241313 5241308 -
cttaaaggatttttgtaagaac

SEQ ID NO: 141444 - DNA, 22 bp, Artificial Sequence
  Synthetic oligonucleotide; CTT chr11 5241305 5241326 5241310 5241305 -
aaaggatttttgtaagaactaa

SEQ ID NO: 141445 - DNA, 22 bp, Artificial Sequence
  Synthetic oligonucleotide; TTA chr11 5241304 5241325 5241309 5241304 -
aaggatttttgtaagaactaat

SEQ ID NO: 141446 - DNA, 22 bp, Artificial Sequence
  Synthetic oligonucleotide; TTT chr11 5241296 5241317 5241301 5241296 -
ttgtaagaactaattgaattga

SEQ ID NO: 141447 - DNA, 22 bp, Artificial Sequence
  Synthetic oligonucleotide; TTT chr11 5241295 5241316 5241300 5241295 -
tgtaagaactaattgaattgat

SEQ ID NO: 141448 - DNA, 22 bp, Artificial Sequence
  Synthetic oligonucleotide; TTT chr11 5241294 5241315 5241299 5241294 -
gtaagaactaattgaattgata

SEQ ID NO: 141449 - DNA, 22 bp, Artificial Sequence
  Synthetic oligonucleotide; TTG chr11 5241293 5241314 5241298 5241293 -
taagaactaattgaattgatac

SEQ ID NO: 141450 - DNA, 22 bp, Artificial Sequence
  Synthetic oligonucleotide; CTA chr11 5241284 5241305 5241289 5241284 -
attgaattgatacctgtaaagt

SEQ ID NO: 141451 - DNA, 22 bp, Artificial Sequence
  Synthetic oligonucleotide; TTG chr11 5241280 5241301 5241285 5241280 -
aattgatacctgtaaagtcttt

SEQ ID NO: 141452 - DNA, 22 bp, Artificial Sequence
  Synthetic oligonucleotide; TTG chr11 5241275 5241296 5241280 5241275 -
atacctgtaaagtctttatcac

SEQ ID NO: 141453 - DNA, 22 bp, Artificial Sequence
  Synthetic oligonucleotide; CTG chr11 5241268 5241289 5241273 5241268 -
taaagtctttatcacactaccc

SEQ ID NO: 141454 - DNA, 22 bp, Artificial Sequence
  Synthetic oligonucleotide; CTT chr11 5241259 5241280 5241264 5241259 -
tatcacactacccaataaataa

SEQ ID NO: 141455 - DNA, 22 bp, Artificial Sequence
  Synthetic oligonucleotide; TTT chr11 5241258 5241279 5241263 5241258 -
atcacactacccaataaataat

SEQ ID NO: 141456 - DNA, 22 bp, Artificial Sequence
  Synthetic oligonucleotide; TTA chr11 5241257 5241278 5241262 5241257 -
tcacactacccaataaataata

SEQ ID NO: 141457 - DNA, 22 bp, Artificial Sequence
  Synthetic oligonucleotide; CTA chr11 5241249 5241270 5241254 5241249 -
cccaataaataataaatctctt

SEQ ID NO: 141458 - DNA, 22 bp, Artificial Sequence
  Synthetic oligonucleotide; CTC chr11 5241229 5241250 5241234 5241229 -
tttgttcagctctctgtttcta

SEQ ID NO: 141459 - DNA, 22 bp, Artificial Sequence
  Synthetic oligonucleotide; CTT chr11 5241227 5241248 5241232 5241227 -
tgttcagctctctgtttctata

SEQ ID NO: 141460 - DNA, 22 bp, Artificial Sequence
  Synthetic oligonucleotide; TTT chr11 5241226 5241247 5241231 5241226 -
gttcagctctctgtttctataa

SEQ ID NO: 141461 - DNA, 22 bp, Artificial Sequence
  Synthetic oligonucleotide; TTG chr11 5241225 5241246 5241230 5241225 -
ttcagctctctgtttctataaa

SEQ ID NO: 141462 - DNA, 22 bp, Artificial Sequence
  Synthetic oligonucleotide; TTC chr11 5241222 5241243 5241227 5241222 -
agctctctgtttctataaatat

SEQ ID NO: 141463 - DNA, 22 bp, Artificial Sequence
  Synthetic oligonucleotide; CTC chr11 5241217 5241238 5241222 5241217 -
tctgtttctataaatatgtaca

SEQ ID NO: 141464 - DNA, 22 bp, Artificial Sequence
  Synthetic oligonucleotide; CTC chr11 5241215 5241236 5241220 5241215 -
tgtttctataaatatgtacaag

SEQ ID NO: 141465 - DNA, 22 bp, Artificial Sequence
  Synthetic oligonucleotide; CTG chr11 5241213 5241234 5241218 5241213 -
tttctataaatatgtacaagtt

SEQ ID NO: 141466 - DNA, 22 bp, Artificial Sequence
  Synthetic oligonucleotide; TTT chr11 5241210 5241231 5241215 5241210 -
ctataaatatgtacaagtttta

SEQ ID NO: 141467 - DNA, 22 bp, Artificial Sequence
  Synthetic oligonucleotide; TTC chr11 5241209 5241230 5241214 5241209 -
tataaatatgtacaagttttat

SEQ ID NO: 141468 - DNA, 22 bp, Artificial Sequence
  Synthetic oligonucleotide; CTA chr11 5241207 5241228 5241212 5241207 -
taaatatgtacaagttttattg

SEQ ID NO: 141469 - DNA, 22 bp, Artificial Sequence
  Synthetic oligonucleotide; TTT chr11 5241190 5241211 5241195 5241190 -
tattgtttttagtggtagtgat

SEQ ID NO: 141470 - DNA, 22 bp, Artificial Sequence
  Synthetic oligonucleotide; TTT chr11 5241189 5241210 5241194 5241189 -
attgtttttagtggtagtgatt

SEQ ID NO: 141471 - DNA, 22 bp, Artificial Sequence
  Synthetic oligonucleotide; TTA chr11 5241188 5241209 5241193 5241188 -
ttgtttttagtggtagtgattt

SEQ ID NO: 141472 - DNA, 22 bp, Artificial Sequence
  Synthetic oligonucleotide; TTG chr11 5241185 5241206 5241190 5241185 -
tttttagtggtagtgattttat

SEQ ID NO: 141473 - DNA, 22 bp, Artificial Sequence
  Synthetic oligonucleotide; TTT chr11 5241182 5241203 5241187 5241182 -
ttagtggtagtgattttattct

SEQ ID NO: 141474 - DNA, 22 bp, Artificial Sequence
  Synthetic oligonucleotide; TTT chr11 5241181 5241202 5241186 5241181 -
tagtggtagtgattttattctc

SEQ ID NO: 141475 - DNA, 22 bp, Artificial Sequence
  Synthetic oligonucleotide; TTT chr11 5241180 5241201 5241185 5241180 -
agtggtagtgattttattctct

SEQ ID NO: 141476 - DNA, 22 bp, Artificial Sequence
  Synthetic oligonucleotide; TTA chr11 5241179 5241200 5241184 5241179 -
gtggtagtgattttattctctt

SEQ ID NO: 141477 - DNA, 22 bp, Artificial Sequence
  Synthetic oligonucleotide; TTT chr11 5241166 5241187 5241171 5241166 -
tattctctttctatatatatac

SEQ ID NO: 141478 - DNA, 22 bp, Artificial Sequence
  Synthetic oligonucleotide; TTT chr11 5241165 5241186 5241170 5241165 -
attctctttctatatatataca

SEQ ID NO: 141479 - DNA, 22 bp, Artificial Sequence
  Synthetic oligonucleotide; TTA chr11 5241164 5241185 5241169 5241164 -
ttctctttctatatatatacac

SEQ ID NO: 141480 - DNA, 22 bp, Artificial Sequence
  Synthetic oligonucleotide; TTC chr11 5241161 5241182 5241166 5241161 -
tctttctatatatatacacaca

SEQ ID NO: 141481 - DNA, 22 bp, Artificial Sequence
  Synthetic oligonucleotide; CTC chr11 5241159 5241180 5241164 5241159 -
tttctatatatatacacacaca

SEQ ID NO: 141482 - DNA, 22 bp, Artificial Sequence
  Synthetic oligonucleotide; CTT chr11 5241157 5241178 5241162 5241157 -
tctatatatatacacacacatg

SEQ ID NO: 141483 - DNA, 22 bp, Artificial Sequence
  Synthetic oligonucleotide; TTT chr11 5241156 5241177 5241161 5241156 -
ctatatatatacacacacatgt

SEQ ID NO: 141484 - DNA, 22 bp, Artificial Sequence
  Synthetic oligonucleotide; TTC chr11 5241155 5241176 5241160 5241155 -
tatatatatacacacacatgtg

SEQ ID NO: 141485 - DNA, 22 bp, Artificial Sequence
  Synthetic oligonucleotide; CTA chr11 5241153 5241174 5241158 5241153 -
tatatatacacacacatgtgtg

SEQ ID NO: 141486 - DNA, 22 bp, Artificial Sequence
  Synthetic oligonucleotide; TTC chr11 5241126 5241147 5241131 5241126 -
ataaatatatacaatttttatg

SEQ ID NO: 141487 - DNA, 22 bp, Artificial Sequence
  Synthetic oligonucleotide; TTT chr11 5241109 5241130 5241114 5241109 -
ttatgaataaaaaattattagc

SEQ ID NO: 141488 - DNA, 22 bp, Artificial Sequence
  Synthetic oligonucleotide; TTT chr11 5241108 5241129 5241113 5241108 -
tatgaataaaaaattattagca

SEQ ID NO: 141489 - DNA, 22 bp, Artificial Sequence
  Synthetic oligonucleotide; TTT chr11 5241107 5241128 5241112 5241107 -
atgaataaaaaattattagcaa

SEQ ID NO: 141490 - DNA, 22 bp, Artificial Sequence
  Synthetic oligonucleotide; TTA chr11 5241106 5241127 5241111 5241106 -
tgaataaaaaattattagcaat

SEQ ID NO: 141491 - DNA, 22 bp, Artificial Sequence
  Synthetic oligonucleotide; TTA chr11 5241092 5241113 5241097 5241092 -
ttagcaatcaatattgaaaacc

SEQ ID NO: 141492 - DNA, 22 bp, Artificial Sequence
  Synthetic oligonucleotide; TTA chr11 5241089 5241110 5241094 5241089 -
gcaatcaatattgaaaaccact

SEQ ID NO: 141493 - DNA, 22 bp, Artificial Sequence
  Synthetic oligonucleotide; TTG chr11 5241076 5241097 5241081 5241076 -
aaaaccactgatttttgtttat

SEQ ID NO: 141494 - DNA, 22 bp, Artificial Sequence
  Synthetic oligonucleotide; CTG chr11 5241066 5241087 5241071 5241066 -
atttttgtttatgtgagcaaac

SEQ ID NO: 141495 - DNA, 22 bp, Artificial Sequence
  Synthetic oligonucleotide; TTT chr11 5241062 5241083 5241067 5241062 -
ttgtttatgtgagcaaacagca

SEQ ID NO: 141496 - DNA, 22 bp, Artificial Sequence
  Synthetic oligonucleotide; TTT chr11 5241061 5241082 5241066 5241061 -
tgtttatgtgagcaaacagcag

SEQ ID NO: 141497 - DNA, 22 bp, Artificial Sequence
  Synthetic oligonucleotide; TTT chr11 5241060 5241081 5241065 5241060 -
gtttatgtgagcaaacagcaga

SEQ ID NO: 141498 - DNA, 22 bp, Artificial Sequence
  Synthetic oligonucleotide; TTG chr11 5241059 5241080 5241064 5241059 -
tttatgtgagcaaacagcagat

SEQ ID NO: 141499 - DNA, 22 bp, Artificial Sequence
  Synthetic oligonucleotide; TTT chr11 5241056 5241077 5241061 5241056 -
atgtgagcaaacagcagattaa

SEQ ID NO: 141500 - DNA, 22 bp, Artificial Sequence
  Synthetic oligonucleotide; TTA chr11 5241055 5241076 5241060 5241055 -
tgtgagcaaacagcagattaaa

SEQ ID NO: 141501 - DNA, 22 bp, Artificial Sequence
  Synthetic oligonucleotide; TTA chr11 5241035 5241056 5241040 5241035 -
aaaggctgagatttaggaaaca

SEQ ID NO: 141502 - DNA, 22 bp, Artificial Sequence
  Synthetic oligonucleotide; CTG chr11 5241027 5241048 5241032 5241027 -
agatttaggaaacagcacgtta

SEQ ID NO: 141503 - DNA, 22 bp, Artificial Sequence
  Synthetic oligonucleotide; TTT chr11 5241021 5241042 5241026 5241021 -
aggaaacagcacgttaagtcaa

SEQ ID NO: 141504 - DNA, 22 bp, Artificial Sequence
  Synthetic oligonucleotide; TTA chr11 5241020 5241041 5241025 5241020 -
ggaaacagcacgttaagtcaag

SEQ ID NO: 141505 - DNA, 22 bp, Artificial Sequence
  Synthetic oligonucleotide; TTA chr11 5241005 5241026 5241010 5241005 -
agtcaagttgatagaggagaat

SEQ ID NO: 141506 - DNA, 22 bp, Artificial Sequence
  Synthetic oligonucleotide; TTG chr11 5240995 5241016 5241000 5240995 -
atagaggagaatatggacattt

SEQ ID NO: 141507 - DNA, 22 bp, Artificial Sequence
  Synthetic oligonucleotide; TTT chr11 5240973 5240994 5240978 5240973 -
aaaagaggcaggatgatataaa

SEQ ID NO: 141508 - DNA, 22 bp, Artificial Sequence
  Synthetic oligonucleotide; TTA chr11 5240972 5240993 5240977 5240972 -
aaagaggcaggatgatataaaa

SEQ ID NO: 141509 - DNA, 22 bp, Artificial Sequence
  Synthetic oligonucleotide; TTA chr11 5240947 5240968 5240952 5240947 -
gggaaactggatgcagagacca

SEQ ID NO: 141510 - DNA, 22 bp, Artificial Sequence
  Synthetic oligonucleotide; CTG chr11 5240938 5240959 5240943 5240938 -
gatgcagagaccagatgaagta

SEQ ID NO: 141511 - DNA, 22 bp, Artificial Sequence
  Synthetic oligonucleotide; CTA chr11 5240903 5240924 5240908 5240903 -
tcgttttgagcaaaaatcactg

SEQ ID NO: 141512 - DNA, 22 bp, Artificial Sequence
  Synthetic oligonucleotide; TTT chr11 5240897 5240918 5240902 5240897 -
tgagcaaaaatcactgaagttt

SEQ ID NO: 141513 - DNA, 22 bp, Artificial Sequence
  Synthetic oligonucleotide; TTT chr11 5240896 5240917 5240901 5240896 -
gagcaaaaatcactgaagtttc

SEQ ID NO: 141514 - DNA, 22 bp, Artificial Sequence
  Synthetic oligonucleotide; TTG chr11 5240895 5240916 5240900 5240895 -
agcaaaaatcactgaagtttct

SEQ ID NO: 141515 - DNA, 22 bp, Artificial Sequence
  Synthetic oligonucleotide; CTG chr11 5240881 5240902 5240886 5240881 -
aagtttcttgcatatgagagtg

SEQ ID NO: 141516 - DNA, 22 bp, Artificial Sequence
  Synthetic oligonucleotide; TTT chr11 5240875 5240896 5240880 5240875 -
cttgcatatgagagtgacataa

SEQ ID NO: 141517 - DNA, 22 bp, Artificial Sequence
  Synthetic oligonucleotide; TTC chr11 5240874 5240895 5240879 5240874 -
ttgcatatgagagtgacataat

SEQ ID NO: 141518 - DNA, 22 bp, Artificial Sequence
  Synthetic oligonucleotide; CTT chr11 5240872 5240893 5240877 5240872 -
gcatatgagagtgacataataa

SEQ ID NO: 141519 - DNA, 22 bp, Artificial Sequence
  Synthetic oligonucleotide; TTG chr11 5240871 5240892 5240876 5240871 -
catatgagagtgacataataaa

SEQ ID NO: 141520 - DNA, 22 bp, Artificial Sequence
  Synthetic oligonucleotide; TTG chr11 5240829 5240850 5240834 5240829 -
attcacatgtatatatatatat

SEQ ID NO: 141521 - DNA, 22 bp, Artificial Sequence
  Synthetic oligonucleotide; TTC chr11 5240825 5240846 5240830 5240825 -
acatgtatatatatatatagaa

SEQ ID NO: 141522 - DNA, 22 bp, Artificial Sequence
  Synthetic oligonucleotide; CTG chr11 5240800 5240821 5240805 5240800 -
attagacaaagtctaacttggg

SEQ ID NO: 141523 - DNA, 22 bp, Artificial Sequence
  Synthetic oligonucleotide; TTA chr11 5240796 5240817 5240801 5240796 -
gacaaagtctaacttgggtata

SEQ ID NO: 141524 - DNA, 22 bp, Artificial Sequence
  Synthetic oligonucleotide; CTA chr11 5240785 5240806 5240790 5240785 -
acttgggtatagtcagaggagc

SEQ ID NO: 141525 - DNA, 22 bp, Artificial Sequence
  Synthetic oligonucleotide; CTT chr11 5240781 5240802 5240786 5240781 -
gggtatagtcagaggagcttgc

SEQ ID NO: 141526 - DNA, 22 bp, Artificial Sequence
  Synthetic oligonucleotide; TTG chr11 5240780 5240801 5240785 5240780 -
ggtatagtcagaggagcttgct

SEQ ID NO: 141527 - DNA, 22 bp, Artificial Sequence
  Synthetic oligonucleotide; CTT chr11 5240761 5240782 5240766 5240761 -
gctgtaattatattgaggtgat

SEQ ID NO: 141528 - DNA, 22 bp, Artificial Sequence
  Synthetic oligonucleotide; TTG chr11 5240760 5240781 5240765 5240760 -
ctgtaattatattgaggtgatg

SEQ ID NO: 141529 - DNA, 22 bp, Artificial Sequence
  Synthetic oligonucleotide; CTG chr11 5240757 5240778 5240762 5240757 -
taattatattgaggtgatggat

SEQ ID NO: 141530 - DNA, 22 bp, Artificial Sequence
  Synthetic oligonucleotide; TTA chr11 5240751 5240772 5240756 5240751 -
tattgaggtgatggataaagaa

SEQ ID NO: 141531 - DNA, 22 bp, Artificial Sequence
  Synthetic oligonucleotide; TTG chr11 5240746 5240767 5240751 5240746 -
aggtgatggataaagaactgaa

SEQ ID NO: 141532 - DNA, 22 bp, Artificial Sequence
  Synthetic oligonucleotide; CTG chr11 5240726 5240747 5240731 5240726 -
aagttgatggaaacaatgaagt

SEQ ID NO: 141533 - DNA, 22 bp, Artificial Sequence
  Synthetic oligonucleotide; TTG chr11 5240720 5240741 5240725 5240720 -
atggaaacaatgaagttaagaa

SEQ ID NO: 141534 - DNA, 22 bp, Artificial Sequence
  Synthetic oligonucleotide; TTA chr11 5240702 5240723 5240707 5240702 -
agaaaaaaaatcgagtaagaga

SEQ ID NO: 141535 - DNA, 22 bp, Artificial Sequence
  Synthetic oligonucleotide; TTG chr11 5240674 5240695 5240679 5240674 -
tggcagtgattgcacagaactg

SEQ ID NO: 141536 - DNA, 22 bp, Artificial Sequence
  Synthetic oligonucleotide; TTG chr11 5240662 5240683 5240667 5240662 -
cacagaactggaaaacattgtg

SEQ ID NO: 141537 - DNA, 22 bp, Artificial Sequence
  Synthetic oligonucleotide; CTG chr11 5240652 5240673 5240657 5240652 -
gaaaacattgtgaaacagagag

SEQ ID NO: 141538 - DNA, 22 bp, Artificial Sequence
  Synthetic oligonucleotide; TTG chr11 5240642 5240663 5240647 5240642 -
tgaaacagagagtcagagatga

SEQ ID NO: 141539 - DNA, 22 bp, Artificial Sequence
  Synthetic oligonucleotide; CTA chr11 5240614 5240635 5240619 5240614 -
aaatccctgtctgtgaatgaaa

SEQ ID NO: 141540 - DNA, 22 bp, Artificial Sequence
  Synthetic oligonucleotide; CTG chr11 5240605 5240626 5240610 5240605 -
tctgtgaatgaaaagaaggaaa

SEQ ID NO: 141541 - DNA, 22 bp, Artificial Sequence
  Synthetic oligonucleotide; CTG chr11 5240601 5240622 5240606 5240601 -
tgaatgaaaagaaggaaattta

SEQ ID NO: 141542 - DNA, 22 bp, Artificial Sequence
  Synthetic oligonucleotide; TTT chr11 5240580 5240601 5240585 5240580 -
attgacagaacagcaaatgcct

SEQ ID NO: 141543 - DNA, 22 bp, Artificial Sequence
  Synthetic oligonucleotide; TTA chr11 5240579 5240600 5240584 5240579 -
ttgacagaacagcaaatgccta

SEQ ID NO: 141544 - DNA, 22 bp, Artificial Sequence
  Synthetic oligonucleotide; TTG chr11 5240576 5240597 5240581 5240576 -
acagaacagcaaatgcctacaa

SEQ ID NO: 141545 - DNA, 22 bp, Artificial Sequence
  Synthetic oligonucleotide; CTA chr11 5240557 5240578 5240562 5240557 -
caagccccctgtttggatctgg

SEQ ID NO: 141546 - DNA, 22 bp, Artificial Sequence
  Synthetic oligonucleotide; CTG chr11 5240546 5240567 5240551 5240546 -
tttggatctggcaatgaacgta

SEQ ID NO: 141547 - DNA, 22 bp, Artificial Sequence
  Synthetic oligonucleotide; TTT chr11 5240543 5240564 5240548 5240543 -
ggatctggcaatgaacgtagcc

SEQ ID NO: 141548 - DNA, 22 bp, Artificial Sequence
  Synthetic oligonucleotide; TTG chr11 5240542 5240563 5240547 5240542 -
gatctggcaatgaacgtagcca

SEQ ID NO: 141549 - DNA, 22 bp, Artificial Sequence
  Synthetic oligonucleotide; CTG chr11 5240536 5240557 5240541 5240536 -
gcaatgaacgtagccattctgt

SEQ ID NO: 141550 - DNA, 22 bp, Artificial Sequence
  Synthetic oligonucleotide; TTC chr11 5240517 5240538 5240522 5240517 -
tgtggcaatcacttcaaactcc

SEQ ID NO: 141551 - DNA, 22 bp, Artificial Sequence
  Synthetic oligonucleotide; CTG chr11 5240515 5240536 5240520 5240515 -
tggcaatcacttcaaactcctg

SEQ ID NO: 141552 - DNA, 22 bp, Artificial Sequence
  Synthetic oligonucleotide; CTT chr11 5240503 5240524 5240508 5240503 -
caaactcctgtacccaagaccc

SEQ ID NO: 141553 - DNA, 22 bp, Artificial Sequence
  Synthetic oligonucleotide; TTC chr11 5240502 5240523 5240507 5240502 -
aaactcctgtacccaagaccct

SEQ ID NO: 141554 - DNA, 22 bp, Artificial Sequence
  Synthetic oligonucleotide; CTC chr11 5240496 5240517 5240501 5240496 -
ctgtacccaagacccttaggaa

SEQ ID NO: 141555 - DNA, 22 bp, Artificial Sequence
  Synthetic oligonucleotide; CTG chr11 5240493 5240514 5240498 5240493 -
tacccaagacccttaggaagta

SEQ ID NO: 141556 - DNA, 22 bp, Artificial Sequence
  Synthetic oligonucleotide; CTT chr11 5240479 5240500 5240484 5240479 -
aggaagtatgtagcaccctcaa

SEQ ID NO: 141557 - DNA, 22 bp, Artificial Sequence
  Synthetic oligonucleotide; TTA chr11 5240478 5240499 5240483 5240478 -
ggaagtatgtagcaccctcaaa

SEQ ID NO: 141558 - DNA, 22 bp, Artificial Sequence
  Synthetic oligonucleotide; CTC chr11 5240459 5240480 5240464 5240459 -
aaacctaaaacctcaaagaaag

SEQ ID NO: 141559 - DNA, 22 bp, Artificial Sequence
  Synthetic oligonucleotide; CTA chr11 5240452 5240473 5240457 5240452 -
aaacctcaaagaaagaggtttt

SEQ ID NO: 141560 - DNA, 22 bp, Artificial Sequence
  Synthetic oligonucleotide; CTC chr11 5240445 5240466 5240450 5240445 -
aaagaaagaggttttagaagat

SEQ ID NO: 141561 - DNA, 22 bp, Artificial Sequence
  Synthetic oligonucleotide; TTT chr11 5240431 5240452 5240436 5240431 -
tagaagatataataccctttct

SEQ ID NO: 141562 - DNA, 22 bp, Artificial Sequence
  Synthetic oligonucleotide; TTT chr11 5240430 5240451 5240435 5240430 -
agaagatataataccctttctt

SEQ ID NO: 141563 - DNA, 22 bp, Artificial Sequence
  Synthetic oligonucleotide; TTA chr11 5240429 5240450 5240434 5240429 -
gaagatataataccctttcttc

SEQ ID NO: 141564 - DNA, 22 bp, Artificial Sequence
  Synthetic oligonucleotide; CTT chr11 5240412 5240433 5240417 5240412 -
tcttctccagtttcattaatcc

SEQ ID NO: 141565 - DNA, 22 bp, Artificial Sequence
  Synthetic oligonucleotide; TTT chr11 5240411 5240432 5240416 5240411 -
cttctccagtttcattaatccc

SEQ ID NO: 141566 - DNA, 22 bp, Artificial Sequence
  Synthetic oligonucleotide; TTC chr11 5240410 5240431 5240415 5240410 -
ttctccagtttcattaatccca

SEQ ID NO: 141567 - DNA, 22 bp, Artificial Sequence
  Synthetic oligonucleotide; CTT chr11 5240408 5240429 5240413 5240408 -
ctccagtttcattaatcccaaa

SEQ ID NO: 141568 - DNA, 22 bp, Artificial Sequence
  Synthetic oligonucleotide; TTC chr11 5240407 5240428 5240412 5240407 -
tccagtttcattaatcccaaaa

SEQ ID NO: 141569 - DNA, 22 bp, Artificial Sequence
  Synthetic oligonucleotide; CTC chr11 5240405 5240426 5240410 5240405 -
cagtttcattaatcccaaaacc

SEQ ID NO: 141570 - DNA, 22 bp, Artificial Sequence
  Synthetic oligonucleotide; TTT chr11 5240399 5240420 5240404 5240399 -
cattaatcccaaaacctctttc

SEQ ID NO: 141571 - DNA, 22 bp, Artificial Sequence
  Synthetic oligonucleotide; TTC chr11 5240398 5240419 5240403 5240398 -
attaatcccaaaacctctttct

SEQ ID NO: 141572 - DNA, 22 bp, Artificial Sequence
  Synthetic oligonucleotide; TTA chr11 5240394 5240415 5240399 5240394 -
atcccaaaacctctttctcaaa

SEQ ID NO: 141573 - DNA, 22 bp, Artificial Sequence
  Synthetic oligonucleotide; CTC chr11 5240381 5240402 5240386 5240381 -
tttctcaaagtatttcctctat

SEQ ID NO: 141574 - DNA, 22 bp, Artificial Sequence
  Synthetic oligonucleotide; CTT chr11 5240379 5240400 5240384 5240379 -
tctcaaagtatttcctctatgt

SEQ ID NO: 141575 - DNA, 22 bp, Artificial Sequence
  Synthetic oligonucleotide; TTT chr11 5240378 5240399 5240383 5240378 -
ctcaaagtatttcctctatgtg

SEQ ID NO: 141576 - DNA, 22 bp, Artificial Sequence
  Synthetic oligonucleotide; TTC chr11 5240377 5240398 5240382 5240377 -
tcaaagtatttcctctatgtgt

SEQ ID NO: 141577 - DNA, 22 bp, Artificial Sequence
  Synthetic oligonucleotide; CTC chr11 5240375 5240396 5240380 5240375 -
aaagtatttcctctatgtgtcc

SEQ ID NO: 141578 - DNA, 22 bp, Artificial Sequence
  Synthetic oligonucleotide; TTT chr11 5240366 5240387 5240371 5240366 -
cctctatgtgtccaccccaaag

SEQ ID NO: 141579 - DNA, 22 bp, Artificial Sequence
  Synthetic oligonucleotide; TTC chr11 5240365 5240386 5240370 5240365 -
ctctatgtgtccaccccaaaga

SEQ ID NO: 141580 - DNA, 22 bp, Artificial Sequence
  Synthetic oligonucleotide; CTC chr11 5240362 5240383 5240367 5240362 -
tatgtgtccaccccaaagagct

SEQ ID NO: 141581 - DNA, 22 bp, Artificial Sequence
  Synthetic oligonucleotide; CTA chr11 5240360 5240381 5240365 5240360 -
tgtgtccaccccaaagagctca

SEQ ID NO: 141582 - DNA, 22 bp, Artificial Sequence
  Synthetic oligonucleotide; CTC chr11 5240339 5240360 5240344 5240339 -
acctcaccatatctcttgagtg

SEQ ID NO: 141583 - DNA, 22 bp, Artificial Sequence
  Synthetic oligonucleotide; CTC chr11 5240334 5240355 5240339 5240334 -
accatatctcttgagtgggagc

SEQ ID NO: 141584 - DNA, 22 bp, Artificial Sequence
  Synthetic oligonucleotide; CTC chr11 5240324 5240345 5240329 5240324 -
ttgagtgggagcacatagatag

SEQ ID NO: 141585 - DNA, 22 bp, Artificial Sequence
  Synthetic oligonucleotide; CTT chr11 5240322 5240343 5240327 5240322 -
gagtgggagcacatagataggc

SEQ ID NO: 141586 - DNA, 22 bp, Artificial Sequence
  Synthetic oligonucleotide; TTG chr11 5240321 5240342 5240326 5240321 -
agtgggagcacatagataggcg

SEQ ID NO: 141587 - DNA, 22 bp, Artificial Sequence
  Synthetic oligonucleotide; CTA chr11 5240293 5240314 5240298 5240293 -
ccatctaacagcttctgaaatt

SEQ ID NO: 141588 - DNA, 22 bp, Artificial Sequence
  Synthetic oligonucleotide; CTA chr11 5240286 5240307 5240291 5240286 -
acagcttctgaaattcctttgt

SEQ ID NO: 141589 - DNA, 22 bp, Artificial Sequence
  Synthetic oligonucleotide; CTT chr11 5240279 5240300 5240284 5240279 -
ctgaaattcctttgtcatattt

SEQ ID NO: 141590 - DNA, 22 bp, Artificial Sequence
  Synthetic oligonucleotide; TTC chr11 5240278 5240299 5240283 5240278 -
tgaaattcctttgtcatatttt

SEQ ID NO: 141591 - DNA, 22 bp, Artificial Sequence
  Synthetic oligonucleotide; CTG chr11 5240276 5240297 5240281 5240276 -
aaattcctttgtcatatttttg

SEQ ID NO: 141592 - DNA, 22 bp, Artificial Sequence
  Synthetic oligonucleotide; TTC chr11 5240270 5240291 5240275 5240270 -
ctttgtcatatttttgagtccc

SEQ ID NO: 141593 - DNA, 22 bp, Artificial Sequence
  Synthetic oligonucleotide; CTT chr11 5240267 5240288 5240272 5240267 -
tgtcatatttttgagtccccac

SEQ ID NO: 141594 - DNA, 22 bp, Artificial Sequence
  Synthetic oligonucleotide; TTT chr11 5240266 5240287 5240271 5240266 -
gtcatatttttgagtccccact

SEQ ID NO: 141595 - DNA, 22 bp, Artificial Sequence
  Synthetic oligonucleotide; TTG chr11 5240265 5240286 5240270 5240265 -
tcatatttttgagtccccacta

SEQ ID NO: 141596 - DNA, 22 bp, Artificial Sequence
  Synthetic oligonucleotide; TTT chr11 5240257 5240278 5240262 5240257 -
ttgagtccccactaataaccca

SEQ ID NO: 141597 - DNA, 22 bp, Artificial Sequence
  Synthetic oligonucleotide; TTT chr11 5240256 5240277 5240261 5240256 -
tgagtccccactaataacccac

SEQ ID NO: 141598 - DNA, 22 bp, Artificial Sequence
  Synthetic oligonucleotide; TTT chr11 5240255 5240276 5240260 5240255 -
gagtccccactaataacccaca

SEQ ID NO: 141599 - DNA, 22 bp, Artificial Sequence
  Synthetic oligonucleotide; TTG chr11 5240254 5240275 5240259 5240254 -
agtccccactaataacccacaa

SEQ ID NO: 141600 - DNA, 22 bp, Artificial Sequence
  Synthetic oligonucleotide; CTA chr11 5240243 5240264 5240248 5240243 -
ataacccacaaagcagaataaa

SEQ ID NO: 141601 - DNA, 22 bp, Artificial Sequence
  Synthetic oligonucleotide; TTG chr11 5240212 5240233 5240217 5240212 -
ctcatgtacaataatcactcaa

SEQ ID NO: 141602 - DNA, 22 bp, Artificial Sequence
  Synthetic oligonucleotide; CTC chr11 5240209 5240230 5240214 5240209 -
atgtacaataatcactcaactg

SEQ ID NO: 141603 - DNA, 22 bp, Artificial Sequence
  Synthetic oligonucleotide; CTC chr11 5240192 5240213 5240197 5240192 -
aactgctgtcttgtagcataca

SEQ ID NO: 141604 - DNA, 22 bp, Artificial Sequence
  Synthetic oligonucleotide; CTG chr11 5240187 5240208 5240192 5240187 -
ctgtcttgtagcatacattaat

SEQ ID NO: 141605 - DNA, 22 bp, Artificial Sequence
  Synthetic oligonucleotide; CTG chr11 5240184 5240205 5240189 5240184 -
tcttgtagcatacattaattaa

SEQ ID NO: 141606 - DNA, 22 bp, Artificial Sequence
  Synthetic oligonucleotide; CTT chr11 5240180 5240201 5240185 5240180 -
gtagcatacattaattaagcac

SEQ ID NO: 141607 - DNA, 22 bp, Artificial Sequence
  Synthetic oligonucleotide; TTG chr11 5240179 5240200 5240184 5240179 -
tagcatacattaattaagcaca

SEQ ID NO: 141608 - DNA, 22 bp, Artificial Sequence
  Synthetic oligonucleotide; TTA chr11 5240167 5240188 5240172 5240167 -
attaagcacattctttgaataa

SEQ ID NO: 141609 - DNA, 22 bp, Artificial Sequence
  Synthetic oligonucleotide; TTA chr11 5240163 5240184 5240168 5240163 -
agcacattctttgaataattac

SEQ ID NO: 141610 - DNA, 22 bp, Artificial Sequence
  Synthetic oligonucleotide; TTC chr11 5240154 5240175 5240159 5240154 -
tttgaataattactgtgtccaa

SEQ ID NO: 141611 - DNA, 22 bp, Artificial Sequence
  Synthetic oligonucleotide; CTT chr11 5240152 5240173 5240157 5240152 -
tgaataattactgtgtccaaac

SEQ ID NO: 141612 - DNA, 22 bp, Artificial Sequence
  Synthetic oligonucleotide; TTT chr11 5240151 5240172 5240156 5240151 -
gaataattactgtgtccaaaca

SEQ ID NO: 141613 - DNA, 22 bp, Artificial Sequence
  Synthetic oligonucleotide; TTG chr11 5240150 5240171 5240155 5240150 -
aataattactgtgtccaaacaa

SEQ ID NO: 141614 - DNA, 22 bp, Artificial Sequence
  Synthetic oligonucleotide; TTA chr11 5240142 5240163 5240147 5240142 -
ctgtgtccaaacaatcacactt

SEQ ID NO: 141615 - DNA, 22 bp, Artificial Sequence
  Synthetic oligonucleotide; CTG chr11 5240139 5240160 5240144 5240139 -
tgtccaaacaatcacactttaa

SEQ ID NO: 141616 - DNA, 22 bp, Artificial Sequence
  Synthetic oligonucleotide; CTT chr11 5240120 5240141 5240125 5240120 -
taaaatctcacacttgtgctat

SEQ ID NO: 141617 - DNA, 22 bp, Artificial Sequence
  Synthetic oligonucleotide; TTT chr11 5240119 5240140 5240124 5240119 -
aaaatctcacacttgtgctatc

SEQ ID NO: 141618 - DNA, 22 bp, Artificial Sequence
  Synthetic oligonucleotide; TTA chr11 5240118 5240139 5240123 5240118 -
aaatctcacacttgtgctatcc

SEQ ID NO: 141619 - DNA, 22 bp, Artificial Sequence
  Synthetic oligonucleotide; CTC chr11 5240111 5240132 5240116 5240111 -
acacttgtgctatcccttgccc

SEQ ID NO: 141620 - DNA, 22 bp, Artificial Sequence
  Synthetic oligonucleotide; CTT chr11 5240105 5240126 5240110 5240105 -
gtgctatcccttgcccttctga

SEQ ID NO: 141621 - DNA, 22 bp, Artificial Sequence
  Synthetic oligonucleotide; TTG chr11 5240104 5240125 5240109 5240104 -
tgctatcccttgcccttctgaa

SEQ ID NO: 141622 - DNA, 22 bp, Artificial Sequence
  Synthetic oligonucleotide; CTA chr11 5240099 5240120 5240104 5240099 -
tcccttgcccttctgaatgtca

SEQ ID NO: 141623 - DNA, 22 bp, Artificial Sequence
  Synthetic oligonucleotide; CTT chr11 5240093 5240114 5240098 5240093 -
gcccttctgaatgtcactctgt

SEQ ID NO: 141624 - DNA, 22 bp, Artificial Sequence
  Synthetic oligonucleotide; TTG chr11 5240092 5240113 5240097 5240092 -
cccttctgaatgtcactctgta

SEQ ID NO: 141625 - DNA, 22 bp, Artificial Sequence
  Synthetic oligonucleotide; CTT chr11 5240087 5240108 5240092 5240087 -
ctgaatgtcactctgtatttta

SEQ ID NO: 141626 - DNA, 22 bp, Artificial Sequence
  Synthetic oligonucleotide; TTC chr11 5240086 5240107 5240091 5240086 -
tgaatgtcactctgtattttaa

SEQ ID NO: 141627 - DNA, 22 bp, Artificial Sequence
  Synthetic oligonucleotide; CTG chr11 5240084 5240105 5240089 5240084 -
aatgtcactctgtattttaaat

SEQ ID NO: 141628 - DNA, 22 bp, Artificial Sequence
  Synthetic oligonucleotide; CTC chr11 5240074 5240095 5240079 5240074 -
tgtattttaaatgaagagatga

SEQ ID NO: 141629 - DNA, 22 bp, Artificial Sequence
  Synthetic oligonucleotide; CTG chr11 5240072 5240093 5240077 5240072 -
tattttaaatgaagagatgagg

SEQ ID NO: 141630 - DNA, 22 bp, Artificial Sequence
  Synthetic oligonucleotide; TTT chr11 5240067 5240088 5240072 5240067 -
taaatgaagagatgagggttga

SEQ ID NO: 141631 - DNA, 22 bp, Artificial Sequence
  Synthetic oligonucleotide; TTT chr11 5240066 5240087 5240071 5240066 -
aaatgaagagatgagggttgaa

SEQ ID NO: 141632 - DNA, 22 bp, Artificial Sequence
  Synthetic oligonucleotide; TTA chr11 5240065 5240086 5240070 5240065 -
aatgaagagatgagggttgaat

SEQ ID NO: 141633 - DNA, 22 bp, Artificial Sequence
  Synthetic oligonucleotide; TTG chr11 5240046 5240067 5240051 5240046 -
aatttcctgtgttacttattgt

SEQ ID NO: 141634 - DNA, 22 bp, Artificial Sequence
  Synthetic oligonucleotide; TTT chr11 5240041 5240062 5240046 5240041 -
cctgtgttacttattgttcatt

SEQ ID NO: 141635 - DNA, 22 bp, Artificial Sequence
  Synthetic oligonucleotide; TTC chr11 5240040 5240061 5240045 5240040 -
ctgtgttacttattgttcattt

SEQ ID NO: 141636 - DNA, 22 bp, Artificial Sequence
  Synthetic oligonucleotide; CTG chr11 5240037 5240058 5240042 5240037 -
tgttacttattgttcatttctc

SEQ ID NO: 141637 - DNA, 22 bp, Artificial Sequence
  Synthetic oligonucleotide; TTA chr11 5240032 5240053 5240037 5240032 -
cttattgttcatttctcgatga

SEQ ID NO: 141638 - DNA, 22 bp, Artificial Sequence
  Synthetic oligonucleotide; CTT chr11 5240029 5240050 5240034 5240029 -
attgttcatttctcgatgagga

SEQ ID NO: 141639 - DNA, 22 bp, Artificial Sequence
  Synthetic oligonucleotide; TTA chr11 5240028 5240049 5240033 5240028 -
ttgttcatttctcgatgaggag

SEQ ID NO: 141640 - DNA, 22 bp, Artificial Sequence
  Synthetic oligonucleotide; TTG chr11 5240025 5240046 5240030 5240025 -
ttcatttctcgatgaggagttt

SEQ ID NO: 141641 - DNA, 22 bp, Artificial Sequence
  Synthetic oligonucleotide; TTC chr11 5240022 5240043 5240027 5240022 -
atttctcgatgaggagttttca

SEQ ID NO: 141642 - DNA, 22 bp, Artificial Sequence
  Synthetic oligonucleotide; TTT chr11 5240018 5240039 5240023 5240018 -
ctcgatgaggagttttcacatt

SEQ ID NO: 141643 - DNA, 22 bp, Artificial Sequence
  Synthetic oligonucleotide; TTC chr11 5240017 5240038 5240022 5240017 -
tcgatgaggagttttcacattc

SEQ ID NO: 141644 - DNA, 22 bp, Artificial Sequence
  Synthetic oligonucleotide; CTC chr11 5240015 5240036 5240020 5240015 -
gatgaggagttttcacattcac

SEQ ID NO: 141645 - DNA, 22 bp, Artificial Sequence
  Synthetic oligonucleotide; TTT chr11 5240003 5240024 5240008 5240003 -
tcacattcacctttagtggaaa

SEQ ID NO: 141646 - DNA, 22 bp, Artificial Sequence
  Synthetic oligonucleotide; TTT chr11 5240002 5240023 5240007 5240002 -
cacattcacctttagtggaaaa

SEQ ID NO: 141647 - DNA, 22 bp, Artificial Sequence
  Synthetic oligonucleotide; TTC chr11 5240001 5240022 5240006 5240001 -
acattcacctttagtggaaaac

SEQ ID NO: 141648 - DNA, 22 bp, Artificial Sequence
  Synthetic oligonucleotide; TTC chr11 5239995 5240016 5240000 5239995 -
acctttagtggaaaacacataa

SEQ ID NO: 141649 - DNA, 22 bp, Artificial Sequence
  Synthetic oligonucleotide; CTT chr11 5239990 5240011 5239995 5239990 -
tagtggaaaacacataagtaca

SEQ ID NO: 141650 - DNA, 22 bp, Artificial Sequence
  Synthetic oligonucleotide; TTT chr11 5239989 5240010 5239994 5239989 -
agtggaaaacacataagtacac

SEQ ID NO: 141651 - DNA, 22 bp, Artificial Sequence
  Synthetic oligonucleotide; TTA chr11 5239988 5240009 5239993 5239988 -
gtggaaaacacataagtacaca

SEQ ID NO: 141652 - DNA, 22 bp, Artificial Sequence
  Synthetic oligonucleotide; CTT chr11 5239962 5239983 5239967 5239962 -
acaggaaaaatataccaaactg

SEQ ID NO: 141653 - DNA, 22 bp, Artificial Sequence
  Synthetic oligonucleotide; TTA chr11 5239961 5239982 5239966 5239961 -
caggaaaaatataccaaactga

SEQ ID NO: 141654 - DNA, 22 bp, Artificial Sequence
  Synthetic oligonucleotide; CTG chr11 5239940 5239961 5239945 5239940 -
acatgtagcatgaatgcttgtg

SEQ ID NO: 141655 - DNA, 22 bp, Artificial Sequence
  Synthetic oligonucleotide; CTT chr11 5239921 5239942 5239926 5239921 -
gtgcatgtagtcatataaaatc

SEQ ID NO: 141656 - DNA, 22 bp, Artificial Sequence
  Synthetic oligonucleotide; TTG chr11 5239920 5239941 5239925 5239920 -
tgcatgtagtcatataaaatct

SEQ ID NO: 141657 - DNA, 22 bp, Artificial Sequence
  Synthetic oligonucleotide; CTT chr11 5239897 5239918 5239902 5239897 -
gtagcaatgtaaacattctctg

SEQ ID NO: 141658 - DNA, 22 bp, Artificial Sequence
  Synthetic oligonucleotide; TTG chr11 5239896 5239917 5239901 5239896 -
tagcaatgtaaacattctctga

SEQ ID NO: 141659 - DNA, 22 bp, Artificial Sequence
  Synthetic oligonucleotide; TTC chr11 5239879 5239900 5239884 5239879 -
tctgatatacacatacagatgt

SEQ ID NO: 141660 - DNA, 22 bp, Artificial Sequence
  Synthetic oligonucleotide; CTC chr11 5239877 5239898 5239882 5239877 -
tgatatacacatacagatgtgt

SEQ ID NO: 141661 - DNA, 22 bp, Artificial Sequence
  Synthetic oligonucleotide; CTG chr11 5239875 5239896 5239880 5239875 -
atatacacatacagatgtgtct

SEQ ID NO: 141662 - DNA, 22 bp, Artificial Sequence
  Synthetic oligonucleotide; CTA chr11 5239852 5239873 5239857 5239852 -
tatgtctacacaatttcttatg

SEQ ID NO: 141663 - DNA, 22 bp, Artificial Sequence
  Synthetic oligonucleotide; CTA chr11 5239844 5239865 5239849 5239844 -
cacaatttcttatgctccatga

SEQ ID NO: 141664 - DNA, 22 bp, Artificial Sequence
  Synthetic oligonucleotide; TTT chr11 5239836 5239857 5239841 5239836 -
cttatgctccatgaacaaacat

SEQ ID NO: 141665 - DNA, 22 bp, Artificial Sequence
  Synthetic oligonucleotide; TTC chr11 5239835 5239856 5239840 5239835 -
ttatgctccatgaacaaacatt

SEQ ID NO: 141666 - DNA, 22 bp, Artificial Sequence
  Synthetic oligonucleotide; CTT chr11 5239833 5239854 5239838 5239833 -
atgctccatgaacaaacattcc

SEQ ID NO: 141667 - DNA, 22 bp, Artificial Sequence
  Synthetic oligonucleotide; TTA chr11 5239832 5239853 5239837 5239832 -
tgctccatgaacaaacattcca

SEQ ID NO: 141668 - DNA, 22 bp, Artificial Sequence
  Synthetic oligonucleotide; CTC chr11 5239827 5239848 5239832 5239827 -
catgaacaaacattccatgcac

SEQ ID NO: 141669 - DNA, 22 bp, Artificial Sequence
  Synthetic oligonucleotide; TTC chr11 5239812 5239833 5239817 5239812 -
catgcacacataagaacacaca

SEQ ID NO: 141670 - DNA, 22 bp, Artificial Sequence
  Synthetic oligonucleotide; CTG chr11 5239787 5239808 5239792 5239787 -
ttacagatgcatacttgagtgc

SEQ ID NO: 141671 - DNA, 22 bp, Artificial Sequence
  Synthetic oligonucleotide; TTA chr11 5239784 5239805 5239789 5239784 -
cagatgcatacttgagtgcatt

SEQ ID NO: 141672 - DNA, 22 bp, Artificial Sequence
  Synthetic oligonucleotide; CTT chr11 5239771 5239792 5239776 5239771 -
gagtgcattgacaaaattaccc

SEQ ID NO: 141673 - DNA, 22 bp, Artificial Sequence
  Synthetic oligonucleotide; TTG chr11 5239770 5239791 5239775 5239770 -
agtgcattgacaaaattacccc

SEQ ID NO: 141674 - DNA, 22 bp, Artificial Sequence
  Synthetic oligonucleotide; TTG chr11 5239761 5239782 5239766 5239761 -
acaaaattaccccagtcaatct

SEQ ID NO: 141675 - DNA, 22 bp, Artificial Sequence
  Synthetic oligonucleotide; TTA chr11 5239752 5239773 5239757 5239752 -
ccccagtcaatctagagaattt

SEQ ID NO: 141676 - DNA, 22 bp, Artificial Sequence
  Synthetic oligonucleotide; CTA chr11 5239738 5239759 5239743 5239738 -
gagaatttggatttctgcattt

SEQ ID NO: 141677 - DNA, 22 bp, Artificial Sequence
  Synthetic oligonucleotide; TTT chr11 5239730 5239751 5239735 5239730 -
ggatttctgcatttgactctgt

SEQ ID NO: 141678 - DNA, 22 bp, Artificial Sequence
  Synthetic oligonucleotide; TTG chr11 5239729 5239750 5239734 5239729 -
gatttctgcatttgactctgtt

SEQ ID NO: 141679 - DNA, 22 bp, Artificial Sequence
  Synthetic oligonucleotide; TTT chr11 5239724 5239745 5239729 5239724 -
ctgcatttgactctgttagctt

SEQ ID NO: 141680 - DNA, 22 bp, Artificial Sequence
  Synthetic oligonucleotide; TTC chr11 5239723 5239744 5239728 5239723 -
tgcatttgactctgttagcttt

SEQ ID NO: 141681 - DNA, 22 bp, Artificial Sequence
  Synthetic oligonucleotide; CTG chr11 5239721 5239742 5239726 5239721 -
catttgactctgttagctttgt

SEQ ID NO: 141682 - DNA, 22 bp, Artificial Sequence
  Synthetic oligonucleotide; TTT chr11 5239716 5239737 5239721 5239716 -
gactctgttagctttgtacatg

SEQ ID NO: 141683 - DNA, 22 bp, Artificial Sequence
  Synthetic oligonucleotide; TTG chr11 5239715 5239736 5239720 5239715 -
actctgttagctttgtacatgc

SEQ ID NO: 141684 - DNA, 22 bp, Artificial Sequence
  Synthetic oligonucleotide; CTC chr11 5239711 5239732 5239716 5239711 -
tgttagctttgtacatgctgtt

SEQ ID NO: 141685 - DNA, 22 bp, Artificial Sequence
  Synthetic oligonucleotide; CTG chr11 5239709 5239730 5239714 5239709 -
ttagctttgtacatgctgttca

SEQ ID NO: 141686 - DNA, 22 bp, Artificial Sequence
  Synthetic oligonucleotide; TTA chr11 5239706 5239727 5239711 5239706 -
gctttgtacatgctgttcattt

SEQ ID NO: 141687 - DNA, 22 bp, Artificial Sequence
  Synthetic oligonucleotide; CTT chr11 5239702 5239723 5239707 5239702 -
tgtacatgctgttcatttactc

SEQ ID NO: 141688 - DNA, 22 bp, Artificial Sequence
  Synthetic oligonucleotide; TTT chr11 5239701 5239722 5239706 5239701 -
gtacatgctgttcatttactct

SEQ ID NO: 141689 - DNA, 22 bp, Artificial Sequence
  Synthetic oligonucleotide; TTG chr11 5239700 5239721 5239705 5239700 -
tacatgctgttcatttactctg

SEQ ID NO: 141690 - DNA, 22 bp, Artificial Sequence
  Synthetic oligonucleotide; CTG chr11 5239691 5239712 5239696 5239691 -
ttcatttactctgggtgatgtc

SEQ ID NO: 141691 - DNA, 22 bp, Artificial Sequence
  Synthetic oligonucleotide; TTC chr11 5239688 5239709 5239693 5239688 -
atttactctgggtgatgtcttt

SEQ ID NO: 141692 - DNA, 22 bp, Artificial Sequence
  Synthetic oligonucleotide; TTT chr11 5239684 5239705 5239689 5239684 -
actctgggtgatgtctttccct

SEQ ID NO: 141693 - DNA, 22 bp, Artificial Sequence
  Synthetic oligonucleotide; TTA chr11 5239683 5239704 5239688 5239683 -
ctctgggtgatgtctttccctc

SEQ ID NO: 141694 - DNA, 22 bp, Artificial Sequence
  Synthetic oligonucleotide; CTC chr11 5239680 5239701 5239685 5239680 -
tgggtgatgtctttccctcatt

SEQ ID NO: 141695 - DNA, 22 bp, Artificial Sequence
  Synthetic oligonucleotide; CTG chr11 5239678 5239699 5239683 5239678 -
ggtgatgtctttccctcatttt

SEQ ID NO: 141696 - DNA, 22 bp, Artificial Sequence
  Synthetic oligonucleotide; CTT chr11 5239667 5239688 5239672 5239667 -
tccctcattttgccttgtctat

SEQ ID NO: 141697 - DNA, 22 bp, Artificial Sequence
  Synthetic oligonucleotide; TTT chr11 5239666 5239687 5239671 5239666 -
ccctcattttgccttgtctatc

SEQ ID NO: 141698 - DNA, 22 bp, Artificial Sequence
  Synthetic oligonucleotide; TTC chr11 5239665 5239686 5239670 5239665 -
cctcattttgccttgtctatct

SEQ ID NO: 141699 - DNA, 22 bp, Artificial Sequence
  Synthetic oligonucleotide; CTC chr11 5239661 5239682 5239666 5239661 -
attttgccttgtctatcttgta

SEQ ID NO: 141700 - DNA, 22 bp, Artificial Sequence
  Synthetic oligonucleotide; TTT chr11 5239657 5239678 5239662 5239657 -
tgccttgtctatcttgtactca

SEQ ID NO: 141701 - DNA, 22 bp, Artificial Sequence
  Synthetic oligonucleotide; TTT chr11 5239656 5239677 5239661 5239656 -
gccttgtctatcttgtactcat

SEQ ID NO: 141702 - DNA, 22 bp, Artificial Sequence
  Synthetic oligonucleotide; TTG chr11 5239655 5239676 5239660 5239655 -
ccttgtctatcttgtactcata

SEQ ID NO: 141703 - DNA, 22 bp, Artificial Sequence
  Synthetic oligonucleotide; CTT chr11 5239651 5239672 5239656 5239651 -
gtctatcttgtactcatacttt

SEQ ID NO: 141704 - DNA, 22 bp, Artificial Sequence
  Synthetic oligonucleotide; TTG chr11 5239650 5239671 5239655 5239650 -
tctatcttgtactcatacttta

SEQ ID NO: 141705 - DNA, 22 bp, Artificial Sequence
  Synthetic oligonucleotide; CTA chr11 5239646 5239667 5239651 5239646 -
tcttgtactcatactttaagtc

SEQ ID NO: 141706 - DNA, 22 bp, Artificial Sequence
  Synthetic oligonucleotide; CTT chr11 5239642 5239663 5239647 5239642 -
gtactcatactttaagtcctaa

SEQ ID NO: 141707 - DNA, 22 bp, Artificial Sequence
  Synthetic oligonucleotide; TTG chr11 5239641 5239662 5239646 5239641 -
tactcatactttaagtcctaac

SEQ ID NO: 141708 - DNA, 22 bp, Artificial Sequence
  Synthetic oligonucleotide; CTC chr11 5239636 5239657 5239641 5239636 -
atactttaagtcctaacttata

SEQ ID NO: 141709 - DNA, 22 bp, Artificial Sequence
  Synthetic oligonucleotide; CTT chr11 5239630 5239651 5239635 5239630 -
taagtcctaacttatatgttat

SEQ ID NO: 141710 - DNA, 22 bp, Artificial Sequence
  Synthetic oligonucleotide; TTT chr11 5239629 5239650 5239634 5239629 -
aagtcctaacttatatgttatc

SEQ ID NO: 141711 - DNA, 22 bp, Artificial Sequence
  Synthetic oligonucleotide; TTA chr11 5239628 5239649 5239633 5239628 -
agtcctaacttatatgttatct

SEQ ID NO: 141712 - DNA, 22 bp, Artificial Sequence
  Synthetic oligonucleotide; CTA chr11 5239621 5239642 5239626 5239621 -
acttatatgttatctcaactaa

SEQ ID NO: 141713 - DNA, 22 bp, Artificial Sequence
  Synthetic oligonucleotide; CTT chr11 5239617 5239638 5239622 5239617 -
atatgttatctcaactaagaag

SEQ ID NO: 141714 - DNA, 22 bp, Artificial Sequence
  Synthetic oligonucleotide; TTA chr11 5239616 5239637 5239621 5239616 -
tatgttatctcaactaagaagc

SEQ ID NO: 141715 - DNA, 22 bp, Artificial Sequence
  Synthetic oligonucleotide; TTA chr11 5239609 5239630 5239614 5239609 -
tctcaactaagaagctattttt

SEQ ID NO: 141716 - DNA, 22 bp, Artificial Sequence
  Synthetic oligonucleotide; CTC chr11 5239605 5239626 5239610 5239605 -
aactaagaagctattttttttt

SEQ ID NO: 141717 - DNA, 22 bp, Artificial Sequence
  Synthetic oligonucleotide; CTA chr11 5239600 5239621 5239605 5239600 -
agaagctatttttttttaattt

SEQ ID NO: 141718 - DNA, 22 bp, Artificial Sequence
  Synthetic oligonucleotide; CTA chr11 5239592 5239613 5239597 5239592 -
tttttttttaattttaactggg

SEQ ID NO: 141719 - DNA, 22 bp, Artificial Sequence
  Synthetic oligonucleotide; TTT chr11 5239589 5239610 5239594 5239589 -
ttttttaattttaactgggctt

SEQ ID NO: 141720 - DNA, 22 bp, Artificial Sequence
  Synthetic oligonucleotide; TTT chr11 5239588 5239609 5239593 5239588 -
tttttaattttaactgggctta

SEQ ID NO: 141721 - DNA, 22 bp, Artificial Sequence
  Synthetic oligonucleotide; TTT chr11 5239587 5239608 5239592 5239587 -
ttttaattttaactgggcttaa

SEQ ID NO: 141722 - DNA, 22 bp, Artificial Sequence
  Synthetic oligonucleotide; TTT chr11 5239586 5239607 5239591 5239586 -
tttaattttaactgggcttaaa

SEQ ID NO: 141723 - DNA, 22 bp, Artificial Sequence
  Synthetic oligonucleotide; TTT chr11 5239585 5239606 5239590 5239585 -
ttaattttaactgggcttaaag

SEQ ID NO: 141724 - DNA, 22 bp, Artificial Sequence
  Synthetic oligonucleotide; TTT chr11 5239584 5239605 5239589 5239584 -
taattttaactgggcttaaagc

SEQ ID NO: 141725 - DNA, 22 bp, Artificial Sequence
  Synthetic oligonucleotide; TTT chr11 5239583 5239604 5239588 5239583 -
aattttaactgggcttaaagcc

SEQ ID NO: 141726 - DNA, 22 bp, Artificial Sequence
  Synthetic oligonucleotide; TTA chr11 5239582 5239603 5239587 5239582 -
attttaactgggcttaaagccc

SEQ ID NO: 141727 - DNA, 22 bp, Artificial Sequence
  Synthetic oligonucleotide; TTT chr11 5239578 5239599 5239583 5239578 -
taactgggcttaaagccctgtc

SEQ ID NO: 141728 - DNA, 22 bp, Artificial Sequence
  Synthetic oligonucleotide; TTT chr11 5239577 5239598 5239582 5239577 -
aactgggcttaaagccctgtct

SEQ ID NO: 141729 - DNA, 22 bp, Artificial Sequence
  Synthetic oligonucleotide; TTA chr11 5239576 5239597 5239581 5239576 -
actgggcttaaagccctgtcta

SEQ ID NO: 141730 - DNA, 22 bp, Artificial Sequence
  Synthetic oligonucleotide; CTG chr11 5239572 5239593 5239577 5239572 -
ggcttaaagccctgtctataaa

SEQ ID NO: 141731 - DNA, 22 bp, Artificial Sequence
  Synthetic oligonucleotide; CTT chr11 5239567 5239588 5239572 5239567 -
aaagccctgtctataaactctg

SEQ ID NO: 141732 - DNA, 22 bp, Artificial Sequence
  Synthetic oligonucleotide; TTA chr11 5239566 5239587 5239571 5239566 -
aagccctgtctataaactctgc

SEQ ID NO: 141733 - DNA, 22 bp, Artificial Sequence
  Synthetic oligonucleotide; CTG chr11 5239558 5239579 5239563 5239558 -
tctataaactctgctacaatta

SEQ ID NO: 141734 - DNA, 22 bp, Artificial Sequence
  Synthetic oligonucleotide; CTA chr11 5239554 5239575 5239559 5239554 -
taaactctgctacaattatggg

SEQ ID NO: 141735 - DNA, 22 bp, Artificial Sequence
  Synthetic oligonucleotide; CTC chr11 5239547 5239568 5239552 5239547 -
tgctacaattatgggctctttc

SEQ ID NO: 141736 - DNA, 22 bp, Artificial Sequence
  Synthetic oligonucleotide; CTG chr11 5239545 5239566 5239550 5239545 -
ctacaattatgggctctttctt

SEQ ID NO: 141737 - DNA, 22 bp, Artificial Sequence
  Synthetic oligonucleotide; CTA chr11 5239542 5239563 5239547 5239542 -
caattatgggctctttcttata

SEQ ID NO: 141738 - DNA, 22 bp, Artificial Sequence
  Synthetic oligonucleotide; TTA chr11 5239536 5239557 5239541 5239536 -
tgggctctttcttataatattt

SEQ ID NO: 141739 - DNA, 22 bp, Artificial Sequence
  Synthetic oligonucleotide; CTC chr11 5239529 5239550 5239534 5239529 -
tttcttataatatttagtgttt

SEQ ID NO: 141740 - DNA, 22 bp, Artificial Sequence
  Synthetic oligonucleotide; CTT chr11 5239527 5239548 5239532 5239527 -
tcttataatatttagtgttttt

SEQ ID NO: 141741 - DNA, 22 bp, Artificial Sequence
  Synthetic oligonucleotide; TTT chr11 5239526 5239547 5239531 5239526 -
cttataatatttagtgtttttc

SEQ ID NO: 141742 - DNA, 22 bp, Artificial Sequence
  Synthetic oligonucleotide; TTC chr11 5239525 5239546 5239530 5239525 -
ttataatatttagtgtttttcc

SEQ ID NO: 141743 - DNA, 22 bp, Artificial Sequence
  Synthetic oligonucleotide; CTT chr11 5239523 5239544 5239528 5239523 -
ataatatttagtgtttttccta

SEQ ID NO: 141744 - DNA, 22 bp, Artificial Sequence
  Synthetic oligonucleotide; TTA chr11 5239522 5239543 5239527 5239522 -
taatatttagtgtttttcctac

SEQ ID NO: 141745 - DNA, 22 bp, Artificial Sequence
  Synthetic oligonucleotide; TTT chr11 5239514 5239535 5239519 5239514 -
agtgtttttcctactaatgtac

SEQ ID NO: 141746 - DNA, 22 bp, Artificial Sequence
  Synthetic oligonucleotide; TTA chr11 5239513 5239534 5239518 5239513 -
gtgtttttcctactaatgtact

SEQ ID NO: 141747 - DNA, 22 bp, Artificial Sequence
  Synthetic oligonucleotide; TTT chr11 5239507 5239528 5239512 5239507 -
ttcctactaatgtacttaatct

SEQ ID NO: 141748 - DNA, 22 bp, Artificial Sequence
  Synthetic oligonucleotide; TTT chr11 5239506 5239527 5239511 5239506 -
tcctactaatgtacttaatctg

SEQ ID NO: 141749 - DNA, 22 bp, Artificial Sequence
  Synthetic oligonucleotide; TTT chr11 5239505 5239526 5239510 5239505 -
cctactaatgtacttaatctgc

SEQ ID NO: 141750 - DNA, 22 bp, Artificial Sequence
  Synthetic oligonucleotide; TTC chr11 5239504 5239525 5239509 5239504 -
ctactaatgtacttaatctgct

SEQ ID NO: 141751 - DNA, 22 bp, Artificial Sequence
  Synthetic oligonucleotide; CTA chr11 5239501 5239522 5239506 5239501 -
ctaatgtacttaatctgctcat

SEQ ID NO: 141752 - DNA, 22 bp, Artificial Sequence
  Synthetic oligonucleotide; CTA chr11 5239498 5239519 5239503 5239498 -
atgtacttaatctgctcattgt

SEQ ID NO: 141753 - DNA, 22 bp, Artificial Sequence
  Synthetic oligonucleotide; CTT chr11 5239490 5239511 5239495 5239490 -
aatctgctcattgtatattcct

SEQ ID NO: 141754 - DNA, 22 bp, Artificial Sequence
  Synthetic oligonucleotide; TTA chr11 5239489 5239510 5239494 5239489 -
atctgctcattgtatattccta

SEQ ID NO: 141755 - DNA, 22 bp, Artificial Sequence
  Synthetic oligonucleotide; CTG chr11 5239484 5239505 5239489 5239484 -
ctcattgtatattcctaccact

SEQ ID NO: 141756 - DNA, 22 bp, Artificial Sequence
  Synthetic oligonucleotide; CTC chr11 5239481 5239502 5239486 5239481 -
attgtatattcctaccactaaa

SEQ ID NO: 141757 - DNA, 22 bp, Artificial Sequence
  Synthetic oligonucleotide; TTG chr11 5239477 5239498 5239482 5239477 -
tatattcctaccactaaatttt

SEQ ID NO: 141758 - DNA, 22 bp, Artificial Sequence
  Synthetic oligonucleotide; TTC chr11 5239470 5239491 5239475 5239470 -
ctaccactaaattttaacctct

SEQ ID NO: 141759 - DNA, 22 bp, Artificial Sequence
  Synthetic oligonucleotide; CTA chr11 5239467 5239488 5239472 5239467 -
ccactaaattttaacctctttt

SEQ ID NO: 141760 - DNA, 22 bp, Artificial Sequence
  Synthetic oligonucleotide; CTA chr11 5239461 5239482 5239466 5239461 -
aattttaacctcttttatggta

SEQ ID NO: 141761 - DNA, 22 bp, Artificial Sequence
  Synthetic oligonucleotide; TTT chr11 5239456 5239477 5239461 5239456 -
taacctcttttatggtagagac

SEQ ID NO: 141762 - DNA, 22 bp, Artificial Sequence
  Synthetic oligonucleotide; TTT chr11 5239455 5239476 5239460 5239455 -
aacctcttttatggtagagaca

SEQ ID NO: 141763 - DNA, 22 bp, Artificial Sequence
  Synthetic oligonucleotide; TTA chr11 5239454 5239475 5239459 5239454 -
acctcttttatggtagagacat

SEQ ID NO: 141764 - DNA, 22 bp, Artificial Sequence
  Synthetic oligonucleotide; CTC chr11 5239449 5239470 5239454 5239449 -
ttttatggtagagacattgtct

SEQ ID NO: 141765 - DNA, 22 bp, Artificial Sequence
  Synthetic oligonucleotide; CTT chr11 5239447 5239468 5239452 5239447 -
ttatggtagagacattgtcttg

SEQ ID NO: 141766 - DNA, 22 bp, Artificial Sequence
  Synthetic oligonucleotide; TTT chr11 5239446 5239467 5239451 5239446 -
tatggtagagacattgtcttgt

SEQ ID NO: 141767 - DNA, 22 bp, Artificial Sequence
  Synthetic oligonucleotide; TTT chr11 5239445 5239466 5239450 5239445 -
atggtagagacattgtcttgta

SEQ ID NO: 141768 - DNA, 22 bp, Artificial Sequence
  Synthetic oligonucleotide; TTA chr11 5239444 5239465 5239449 5239444 -
tggtagagacattgtcttgtaa

SEQ ID NO: 141769 - DNA, 22 bp, Artificial Sequence
  Synthetic oligonucleotide; TTG chr11 5239430 5239451 5239435 5239430 -
tcttgtaaactcttatttccct

SEQ ID NO: 141770 - DNA, 22 bp, Artificial Sequence
  Synthetic oligonucleotide; CTT chr11 5239426 5239447 5239431 5239426 -
gtaaactcttatttccctagta

SEQ ID NO: 141771 - DNA, 22 bp, Artificial Sequence
  Synthetic oligonucleotide; TTG chr11 5239425 5239446 5239430 5239425 -
taaactcttatttccctagtat

SEQ ID NO: 141772 - DNA, 22 bp, Artificial Sequence
  Synthetic oligonucleotide; CTC chr11 5239418 5239439 5239423 5239418 -
ttatttccctagtatttggaga

SEQ ID NO: 141773 - DNA, 22 bp, Artificial Sequence
  Synthetic oligonucleotide; CTT chr11 5239416 5239437 5239421 5239416 -
atttccctagtatttggagatg

SEQ ID NO: 141774 - DNA, 22 bp, Artificial Sequence
  Synthetic oligonucleotide; TTA chr11 5239415 5239436 5239420 5239415 -
tttccctagtatttggagatga

SEQ ID NO: 141775 - DNA, 22 bp, Artificial Sequence
  Synthetic oligonucleotide; TTT chr11 5239412 5239433 5239417 5239412 -
ccctagtatttggagatgaaaa

SEQ ID NO: 141776 - DNA, 22 bp, Artificial Sequence
  Synthetic oligonucleotide; TTC chr11 5239411 5239432 5239416 5239411 -
cctagtatttggagatgaaaaa

SEQ ID NO: 141777 - DNA, 22 bp, Artificial Sequence
  Synthetic oligonucleotide; CTA chr11 5239407 5239428 5239412 5239407 -
gtatttggagatgaaaaaaaag

SEQ ID NO: 141778 - DNA, 22 bp, Artificial Sequence
  Synthetic oligonucleotide; TTT chr11 5239401 5239422 5239406 5239401 -
ggagatgaaaaaaaagattaaa

SEQ ID NO: 141779 - DNA, 22 bp, Artificial Sequence
  Synthetic oligonucleotide; TTG chr11 5239400 5239421 5239405 5239400 -
gagatgaaaaaaaagattaaat

SEQ ID NO: 141780 - DNA, 22 bp, Artificial Sequence
  Synthetic oligonucleotide; TTA chr11 5239381 5239402 5239386 5239381 -
aattatccaaaattagatctct

SEQ ID NO: 141781 - DNA, 22 bp, Artificial Sequence
  Synthetic oligonucleotide; TTA chr11 5239376 5239397 5239381 5239376 -
tccaaaattagatctctctttt

SEQ ID NO: 141782 - DNA, 22 bp, Artificial Sequence
  Synthetic oligonucleotide; TTA chr11 5239366 5239387 5239371 5239366 -
gatctctcttttctacattatg

SEQ ID NO: 141783 - DNA, 22 bp, Artificial Sequence
  Synthetic oligonucleotide; CTC chr11 5239360 5239381 5239365 5239360 -
tcttttctacattatgagtatt

SEQ ID NO: 141784 - DNA, 22 bp, Artificial Sequence
  Synthetic oligonucleotide; CTC chr11 5239358 5239379 5239363 5239358 -
ttttctacattatgagtattac

SEQ ID NO: 141785 - DNA, 22 bp, Artificial Sequence
  Synthetic oligonucleotide; CTT chr11 5239356 5239377 5239361 5239356 -
ttctacattatgagtattacac

SEQ ID NO: 141786 - DNA, 22 bp, Artificial Sequence
  Synthetic oligonucleotide; TTT chr11 5239355 5239376 5239360 5239355 -
tctacattatgagtattacact

SEQ ID NO: 141787 - DNA, 22 bp, Artificial Sequence
  Synthetic oligonucleotide; TTT chr11 5239354 5239375 5239359 5239354 -
ctacattatgagtattacacta

SEQ ID NO: 141788 - DNA, 22 bp, Artificial Sequence
  Synthetic oligonucleotide; TTC chr11 5239353 5239374 5239358 5239353 -
tacattatgagtattacactat

SEQ ID NO: 141789 - DNA, 22 bp, Artificial Sequence
  Synthetic oligonucleotide; CTA chr11 5239351 5239372 5239356 5239351 -
cattatgagtattacactatcc

SEQ ID NO: 141790 - DNA, 22 bp, Artificial Sequence
  Synthetic oligonucleotide; TTA chr11 5239346 5239367 5239351 5239346 -
tgagtattacactatccataga

SEQ ID NO: 141791 - DNA, 22 bp, Artificial Sequence
  Synthetic oligonucleotide; TTA chr11 5239337 5239358 5239342 5239337 -
cactatccatagagaagtttgt

SEQ ID NO: 141792 - DNA, 22 bp, Artificial Sequence
  Synthetic oligonucleotide; CTA chr11 5239332 5239353 5239337 5239332 -
tccatagagaagtttgtttgag

SEQ ID NO: 141793 - DNA, 22 bp, Artificial Sequence
  Synthetic oligonucleotide; TTT chr11 5239317 5239338 5239322 5239317 -
gtttgagacctaaactgaggaa

SEQ ID NO: 141794 - DNA, 22 bp, Artificial Sequence
  Synthetic oligonucleotide; TTG chr11 5239316 5239337 5239321 5239316 -
tttgagacctaaactgaggaac

SEQ ID NO: 141795 - DNA, 22 bp, Artificial Sequence
  Synthetic oligonucleotide; TTT chr11 5239313 5239334 5239318 5239313 -
gagacctaaactgaggaacctt

SEQ ID NO: 141796 - DNA, 22 bp, Artificial Sequence
  Synthetic oligonucleotide; TTG chr11 5239312 5239333 5239317 5239312 -
agacctaaactgaggaaccttt

SEQ ID NO: 141797 - DNA, 22 bp, Artificial Sequence
  Synthetic oligonucleotide; CTA chr11 5239305 5239326 5239310 5239305 -
aactgaggaacctttggttcta

SEQ ID NO: 141798 - DNA, 22 bp, Artificial Sequence
  Synthetic oligonucleotide; CTG chr11 5239300 5239321 5239305 5239300 -
aggaacctttggttctaaaatg

SEQ ID NO: 141799 - DNA, 22 bp, Artificial Sequence
  Synthetic oligonucleotide; CTT chr11 5239291 5239312 5239296 5239291 -
tggttctaaaatgactatgtga

SEQ ID NO: 141800 - DNA, 22 bp, Artificial Sequence
  Synthetic oligonucleotide; TTT chr11 5239290 5239311 5239295 5239290 -
ggttctaaaatgactatgtgat

SEQ ID NO: 141801 - DNA, 22 bp, Artificial Sequence
  Synthetic oligonucleotide; TTG chr11 5239289 5239310 5239294 5239289 -
gttctaaaatgactatgtgata

SEQ ID NO: 141802 - DNA, 22 bp, Artificial Sequence
  Synthetic oligonucleotide; TTC chr11 5239285 5239306 5239290 5239285 -
taaaatgactatgtgatatctt

SEQ ID NO: 141803 - DNA, 22 bp, Artificial Sequence
  Synthetic oligonucleotide; CTA chr11 5239283 5239304 5239288 5239283 -
aaatgactatgtgatatcttag

SEQ ID NO: 141804 - DNA, 22 bp, Artificial Sequence
  Synthetic oligonucleotide; CTA chr11 5239274 5239295 5239279 5239274 -
tgtgatatcttagtatttatag

SEQ ID NO: 141805 - DNA, 22 bp, Artificial Sequence
  Synthetic oligonucleotide; CTT chr11 5239263 5239284 5239268 5239263 -
agtatttataggtcatgaggtt

SEQ ID NO: 141806 - DNA, 22 bp, Artificial Sequence
  Synthetic oligonucleotide; TTA chr11 5239262 5239283 5239267 5239262 -
gtatttataggtcatgaggttc

SEQ ID NO: 141807 - DNA, 22 bp, Artificial Sequence
  Synthetic oligonucleotide; TTT chr11 5239256 5239277 5239261 5239256 -
ataggtcatgaggttccttcct

SEQ ID NO: 141808 - DNA, 22 bp, Artificial Sequence
  Synthetic oligonucleotide; TTA chr11 5239255 5239276 5239260 5239255 -
taggtcatgaggttccttcctc

SEQ ID NO: 141809 - DNA, 22 bp, Artificial Sequence
  Synthetic oligonucleotide; TTC chr11 5239240 5239261 5239245 5239240 -
cttcctctgcctctgctatagt

SEQ ID NO: 141810 - DNA, 22 bp, Artificial Sequence
  Synthetic oligonucleotide; CTT chr11 5239237 5239258 5239242 5239237 -
cctctgcctctgctatagtttg

SEQ ID NO: 141811 - DNA, 22 bp, Artificial Sequence
  Synthetic oligonucleotide; TTC chr11 5239236 5239257 5239241 5239236 -
ctctgcctctgctatagtttga

SEQ ID NO: 141812 - DNA, 22 bp, Artificial Sequence
  Synthetic oligonucleotide; CTC chr11 5239233 5239254 5239238 5239233 -
tgcctctgctatagtttgatta

SEQ ID NO: 141813 - DNA, 22 bp, Artificial Sequence
  Synthetic oligonucleotide; CTG chr11 5239231 5239252 5239236 5239231 -
cctctgctatagtttgattagt

SEQ ID NO: 141814 - DNA, 22 bp, Artificial Sequence
  Synthetic oligonucleotide; CTC chr11 5239227 5239248 5239232 5239227 -
tgctatagtttgattagtcaac

SEQ ID NO: 141815 - DNA, 22 bp, Artificial Sequence
  Synthetic oligonucleotide; CTG chr11 5239225 5239246 5239230 5239225 -
ctatagtttgattagtcaacaa

SEQ ID NO: 141816 - DNA, 22 bp, Artificial Sequence
  Synthetic oligonucleotide; CTA chr11 5239222 5239243 5239227 5239222 -
tagtttgattagtcaacaagca

SEQ ID NO: 141817 - DNA, 22 bp, Artificial Sequence
  Synthetic oligonucleotide; TTT chr11 5239216 5239237 5239221 5239216 -
gattagtcaacaagcatgtgtc

SEQ ID NO: 141818 - DNA, 22 bp, Artificial Sequence
  Synthetic oligonucleotide; TTG chr11 5239215 5239236 5239220 5239215 -
attagtcaacaagcatgtgtca

SEQ ID NO: 141819 - DNA, 22 bp, Artificial Sequence
  Synthetic oligonucleotide; TTA chr11 5239211 5239232 5239216 5239211 -
gtcaacaagcatgtgtcatgca

SEQ ID NO: 141820 - DNA, 22 bp, Artificial Sequence
  Synthetic oligonucleotide; TTT chr11 5239186 5239207 5239191 5239186 -
attcacatcagaatttcataca

SEQ ID NO: 141821 - DNA, 22 bp, Artificial Sequence
  Synthetic oligonucleotide; TTA chr11 5239185 5239206 5239190 5239185 -
ttcacatcagaatttcatacac

SEQ ID NO: 141822 - DNA, 22 bp, Artificial Sequence
  Synthetic oligonucleotide; TTC chr11 5239182 5239203 5239187 5239182 -
acatcagaatttcatacactaa

SEQ ID NO: 141823 - DNA, 22 bp, Artificial Sequence
  Synthetic oligonucleotide; TTT chr11 5239170 5239191 5239175 5239170 -
catacactaataagacatagta

SEQ ID NO: 141824 - DNA, 22 bp, Artificial Sequence
  Synthetic oligonucleotide; TTC chr11 5239169 5239190 5239174 5239169 -
atacactaataagacatagtat

SEQ ID NO: 141825 - DNA, 22 bp, Artificial Sequence
  Synthetic oligonucleotide; CTA chr11 5239161 5239182 5239166 5239161 -
ataagacatagtatcagaagtc

SEQ ID NO: 141826 - DNA, 22 bp, Artificial Sequence
  Synthetic oligonucleotide; TTT chr11 5239134 5239155 5239139 5239134 -
attagttatatcagttagggtc

SEQ ID NO: 141827 - DNA, 22 bp, Artificial Sequence
  Synthetic oligonucleotide; TTA chr11 5239133 5239154 5239138 5239133 -
ttagttatatcagttagggtcc

SEQ ID NO: 141828 - DNA, 22 bp, Artificial Sequence
  Synthetic oligonucleotide; TTA chr11 5239130 5239151 5239135 5239130 -
gttatatcagttagggtccatc

SEQ ID NO: 141829 - DNA, 22 bp, Artificial Sequence
  Synthetic oligonucleotide; TTA chr11 5239126 5239147 5239131 5239126 -
tatcagttagggtccatcaagg

SEQ ID NO: 141830 - DNA, 22 bp, Artificial Sequence
  Synthetic oligonucleotide; TTA chr11 5239117 5239138 5239122 5239117 -
gggtccatcaaggaaaggacaa

SEQ ID NO: 141831 - DNA, 22 bp, Artificial Sequence
  Synthetic oligonucleotide; TTA chr11 5239088 5239109 5239093 5239088 -
tcagttactcaacctagaatta

SEQ ID NO: 141832 - DNA, 22 bp, Artificial Sequence
  Synthetic oligonucleotide; TTA chr11 5239081 5239102 5239086 5239081 -
ctcaacctagaattaaatacag

SEQ ID NO: 141833 - DNA, 22 bp, Artificial Sequence
  Synthetic oligonucleotide; CTC chr11 5239078 5239099 5239083 5239078 -
aacctagaattaaatacagctc

SEQ ID NO: 141834 - DNA, 22 bp, Artificial Sequence
  Synthetic oligonucleotide; CTA chr11 5239072 5239093 5239077 5239072 -
gaattaaatacagctcttaata

SEQ ID NO: 141835 - DNA, 22 bp, Artificial Sequence
  Synthetic oligonucleotide; TTA chr11 5239066 5239087 5239071 5239066 -
aatacagctcttaatagttaat

SEQ ID NO: 141836 - DNA, 22 bp, Artificial Sequence
  Synthetic oligonucleotide; CTC chr11 5239056 5239077 5239061 5239056 -
ttaatagttaattatccttgta

SEQ ID NO: 141837 - DNA, 22 bp, Artificial Sequence
  Synthetic oligonucleotide; CTT chr11 5239054 5239075 5239059 5239054 -
aatagttaattatccttgtatt

SEQ ID NO: 141838 - DNA, 22 bp, Artificial Sequence
  Synthetic oligonucleotide; TTA chr11 5239053 5239074 5239058 5239053 -
atagttaattatccttgtattg

SEQ ID NO: 141839 - DNA, 22 bp, Artificial Sequence
  Synthetic oligonucleotide; TTA chr11 5239046 5239067 5239051 5239046 -
attatccttgtattggaagagc

SEQ ID NO: 141840 - DNA, 22 bp, Artificial Sequence
  Synthetic oligonucleotide; TTA chr11 5239042 5239063 5239047 5239042 -
tccttgtattggaagagctaaa

SEQ ID NO: 141841 - DNA, 22 bp, Artificial Sequence
  Synthetic oligonucleotide; CTT chr11 5239037 5239058 5239042 5239037 -
gtattggaagagctaaaatatc

SEQ ID NO: 141842 - DNA, 22 bp, Artificial Sequence
  Synthetic oligonucleotide; TTG chr11 5239036 5239057 5239041 5239036 -
tattggaagagctaaaatatca

SEQ ID NO: 141843 - DNA, 22 bp, Artificial Sequence
  Synthetic oligonucleotide; TTG chr11 5239031 5239052 5239036 5239031 -
gaagagctaaaatatcaaataa

SEQ ID NO: 141844 - DNA, 22 bp, Artificial Sequence
  Synthetic oligonucleotide; CTA chr11 5239022 5239043 5239027 5239022 -
aaatatcaaataaaggacagtg

SEQ ID NO: 141845 - DNA, 22 bp, Artificial Sequence
  Synthetic oligonucleotide; CTA chr11 5238990 5239011 5238995 5238990 -
gatgttagtaacatcagaaaac

SEQ ID NO: 141846 - DNA, 22 bp, Artificial Sequence
  Synthetic oligonucleotide; TTA chr11 5238983 5239004 5238988 5238983 -
gtaacatcagaaaacctcttcc

SEQ ID NO: 141847 - DNA, 22 bp, Artificial Sequence
  Synthetic oligonucleotide; CTC chr11 5238965 5238986 5238970 5238965 -
ttccgccattaggcctagaagg

SEQ ID NO: 141848 - DNA, 22 bp, Artificial Sequence
  Synthetic oligonucleotide; CTT chr11 5238963 5238984 5238968 5238963 -
ccgccattaggcctagaagggc

SEQ ID NO: 141849 - DNA, 22 bp, Artificial Sequence
  Synthetic oligonucleotide; TTC chr11 5238962 5238983 5238967 5238962 -
cgccattaggcctagaagggca

SEQ ID NO: 141850 - DNA, 22 bp, Artificial Sequence
  Synthetic oligonucleotide; TTA chr11 5238954 5238975 5238959 5238954 -
ggcctagaagggcagaaggaga

SEQ ID NO: 141851 - DNA, 22 bp, Artificial Sequence
  Synthetic oligonucleotide; CTA chr11 5238948 5238969 5238953 5238948 -
gaagggcagaaggagaaaatgt

SEQ ID NO: 141852 - DNA, 22 bp, Artificial Sequence
  Synthetic oligonucleotide; TTT chr11 5238924 5238945 5238929 5238924 -
ataccaccagagtccagaacca

SEQ ID NO: 141853 - DNA, 22 bp, Artificial Sequence
  Synthetic oligonucleotide; TTA chr11 5238923 5238944 5238928 5238923 -
taccaccagagtccagaaccag

SEQ ID NO: 141854 - DNA, 22 bp, Artificial Sequence
  Synthetic oligonucleotide; CTG chr11 5238878 5238899 5238883 5238878 -
gattcagtgagctagtgggtgc

SEQ ID NO: 141855 - DNA, 22 bp, Artificial Sequence
  Synthetic oligonucleotide; TTC chr11 5238873 5238894 5238878 5238873 -
agtgagctagtgggtgctcctt

SEQ ID NO: 141856 - DNA, 22 bp, Artificial Sequence
  Synthetic oligonucleotide; CTA chr11 5238864 5238885 5238869 5238864 -
gtgggtgctccttggagagagc

SEQ ID NO: 141857 - DNA, 22 bp, Artificial Sequence
  Synthetic oligonucleotide; CTC chr11 5238854 5238875 5238859 5238854 -
cttggagagagccagaactgtc

SEQ ID NO: 141858 - DNA, 22 bp, Artificial Sequence
  Synthetic oligonucleotide; CTT chr11 5238851 5238872 5238856 5238851 -
ggagagagccagaactgtctaa

SEQ ID NO: 141859 - DNA, 22 bp, Artificial Sequence
  Synthetic oligonucleotide; TTG chr11 5238850 5238871 5238855 5238850 -
gagagagccagaactgtctaat

SEQ ID NO: 141860 - DNA, 22 bp, Artificial Sequence
  Synthetic oligonucleotide; CTG chr11 5238834 5238855 5238839 5238834 -
tctaatgggggcatcaaagtat

SEQ ID NO: 141861 - DNA, 22 bp, Artificial Sequence
  Synthetic oligonucleotide; CTA chr11 5238830 5238851 5238835 5238830 -
atgggggcatcaaagtatcagc

SEQ ID NO: 141862 - DNA, 22 bp, Artificial Sequence
  Synthetic oligonucleotide; CTG chr11 5238784 5238805 5238789 5238784 -
tctgctgtaggagatccgttca

SEQ ID NO: 141863 - DNA, 22 bp, Artificial Sequence
  Synthetic oligonucleotide; CTG chr11 5238780 5238801 5238785 5238780 -
ctgtaggagatccgttcagaga

SEQ ID NO: 141864 - DNA, 22 bp, Artificial Sequence
  Synthetic oligonucleotide; CTG chr11 5238777 5238798 5238782 5238777 -
taggagatccgttcagagagag

SEQ ID NO: 141865 - DNA, 22 bp, Artificial Sequence
  Synthetic oligonucleotide; TTC chr11 5238763 5238784 5238768 5238763 -
agagagagagagagaccagaaa

SEQ ID NO: 141866 - DNA, 22 bp, Artificial Sequence
  Synthetic oligonucleotide; CTT chr11 5238734 5238755 5238739 5238734 -
gcttatgctttccctcagccag

SEQ ID NO: 141867 - DNA, 22 bp, Artificial Sequence
  Synthetic oligonucleotide; TTG chr11 5238733 5238754 5238738 5238733 -
cttatgctttccctcagccagt

SEQ ID NO: 141868 - DNA, 22 bp, Artificial Sequence
  Synthetic oligonucleotide; CTT chr11 5238730 5238751 5238735 5238730 -
atgctttccctcagccagtgtt

SEQ ID NO: 141869 - DNA, 22 bp, Artificial Sequence
  Synthetic oligonucleotide; TTA chr11 5238729 5238750 5238734 5238729 -
tgctttccctcagccagtgttt

SEQ ID NO: 141870 - DNA, 22 bp, Artificial Sequence
  Synthetic oligonucleotide; CTT chr11 5238724 5238745 5238729 5238724 -
tccctcagccagtgtttaccat

SEQ ID NO: 141871 - DNA, 22 bp, Artificial Sequence
  Synthetic oligonucleotide; TTT chr11 5238723 5238744 5238728 5238723 -
ccctcagccagtgtttaccatt

SEQ ID NO: 141872 - DNA, 22 bp, Artificial Sequence
  Synthetic oligonucleotide; TTC chr11 5238722 5238743 5238727 5238722 -
cctcagccagtgtttaccattg

SEQ ID NO: 141873 - DNA, 22 bp, Artificial Sequence
  Synthetic oligonucleotide; CTC chr11 5238718 5238739 5238723 5238718 -
agccagtgtttaccattgcaga

SEQ ID NO: 141874 - DNA, 22 bp, Artificial Sequence
  Synthetic oligonucleotide; TTT chr11 5238707 5238728 5238712 5238707 -
accattgcagaatgtacatgcg

SEQ ID NO: 141875 - DNA, 22 bp, Artificial Sequence
  Synthetic oligonucleotide; TTA chr11 5238706 5238727 5238711 5238706 -
ccattgcagaatgtacatgcga

SEQ ID NO: 141876 - DNA, 22 bp, Artificial Sequence
  Synthetic oligonucleotide; TTG chr11 5238700 5238721 5238705 5238700 -
cagaatgtacatgcgactgaaa

SEQ ID NO: 141877 - DNA, 22 bp, Artificial Sequence
  Synthetic oligonucleotide; CTG chr11 5238681 5238702 5238686 5238681 -
aaagggtgaggaaacctgggaa

SEQ ID NO: 141878 - DNA, 22 bp, Artificial Sequence
  Synthetic oligonucleotide; CTG chr11 5238663 5238684 5238668 5238663 -
ggaaatgtcagttcctcaaata

SEQ ID NO: 141879 - DNA, 22 bp, Artificial Sequence
  Synthetic oligonucleotide; TTC chr11 5238649 5238670 5238654 5238649 -
ctcaaatacagagaacactgag

SEQ ID NO: 141880 - DNA, 22 bp, Artificial Sequence
  Synthetic oligonucleotide; CTC chr11 5238646 5238667 5238651 5238646 -
aaatacagagaacactgaggga

SEQ ID NO: 141881 - DNA, 22 bp, Artificial Sequence
  Synthetic oligonucleotide; CTG chr11 5238629 5238650 5238634 5238629 -
agggaaggatgagaaataaatg

SEQ ID NO: 141882 - DNA, 22 bp, Artificial Sequence
  Synthetic oligonucleotide; TTG chr11 5238582 5238603 5238587 5238582 -
acagaaggaaactaggatgtgt

SEQ ID NO: 141883 - DNA, 22 bp, Artificial Sequence
  Synthetic oligonucleotide; CTA chr11 5238568 5238589 5238573 5238568 -
ggatgtgtccagtaaatgaata

SEQ ID NO: 141884 - DNA, 22 bp, Artificial Sequence
  Synthetic oligonucleotide; TTA chr11 5238542 5238563 5238547 5238542 -
cagtgtgcagtgattattgcaa

SEQ ID NO: 141885 - DNA, 22 bp, Artificial Sequence
  Synthetic oligonucleotide; TTA chr11 5238526 5238547 5238531 5238526 -
ttgcaatgattaatgtattgat

SEQ ID NO: 141886 - DNA, 22 bp, Artificial Sequence
  Synthetic oligonucleotide; TTG chr11 5238523 5238544 5238528 5238523 -
caatgattaatgtattgataag

SEQ ID NO: 141887 - DNA, 22 bp, Artificial Sequence
  Synthetic oligonucleotide; TTA chr11 5238514 5238535 5238519 5238514 -
atgtattgataagataatatga

SEQ ID NO: 141888 - DNA, 22 bp, Artificial Sequence
  Synthetic oligonucleotide; TTG chr11 5238506 5238527 5238511 5238506 -
ataagataatatgaaaacacag

SEQ ID NO: 141889 - DNA, 22 bp, Artificial Sequence
  Synthetic oligonucleotide; TTC chr11 5238479 5238500 5238484 5238479 -
aaacagcagtgaactgagatta

SEQ ID NO: 141890 - DNA, 22 bp, Artificial Sequence
  Synthetic oligonucleotide; CTG chr11 5238463 5238484 5238468 5238463 -
agattagaattgtggagagcac

SEQ ID NO: 141891 - DNA, 22 bp, Artificial Sequence
  Synthetic oligonucleotide; TTA chr11 5238457 5238478 5238462 5238457 -
gaattgtggagagcactggcat

SEQ ID NO: 141892 - DNA, 22 bp, Artificial Sequence
  Synthetic oligonucleotide; TTG chr11 5238451 5238472 5238456 5238451 -
tggagagcactggcatttaaga

SEQ ID NO: 141893 - DNA, 22 bp, Artificial Sequence
  Synthetic oligonucleotide; CTG chr11 5238439 5238460 5238444 5238439 -
gcatttaagaatgtcacactta

SEQ ID NO: 141894 - DNA, 22 bp, Artificial Sequence
  Synthetic oligonucleotide; TTT chr11 5238433 5238454 5238438 5238433 -
aagaatgtcacacttagaatgt

SEQ ID NO: 141895 - DNA, 22 bp, Artificial Sequence
  Synthetic oligonucleotide; TTA chr11 5238432 5238453 5238437 5238432 -
agaatgtcacacttagaatgtg

SEQ ID NO: 141896 - DNA, 22 bp, Artificial Sequence
  Synthetic oligonucleotide; CTT chr11 5238418 5238439 5238423 5238418 -
agaatgtgtctctaggcattgt

SEQ ID NO: 141897 - DNA, 22 bp, Artificial Sequence
  Synthetic oligonucleotide; TTA chr11 5238417 5238438 5238422 5238417 -
gaatgtgtctctaggcattgtt

SEQ ID NO: 141898 - DNA, 22 bp, Artificial Sequence
  Synthetic oligonucleotide; CTC chr11 5238406 5238427 5238411 5238406 -
taggcattgttctgtgcatata

SEQ ID NO: 141899 - DNA, 22 bp, Artificial Sequence
  Synthetic oligonucleotide; CTA chr11 5238404 5238425 5238409 5238404 -
ggcattgttctgtgcatatatc

SEQ ID NO: 141900 - DNA, 22 bp, Artificial Sequence
  Synthetic oligonucleotide; TTG chr11 5238397 5238418 5238402 5238397 -
ttctgtgcatatatcatctcaa

SEQ ID NO: 141901 - DNA, 22 bp, Artificial Sequence
  Synthetic oligonucleotide; TTC chr11 5238394 5238415 5238399 5238394 -
tgtgcatatatcatctcaatat

SEQ ID NO: 141902 - DNA, 22 bp, Artificial Sequence
  Synthetic oligonucleotide; CTG chr11 5238392 5238413 5238397 5238392 -
tgcatatatcatctcaatattc

SEQ ID NO: 141903 - DNA, 22 bp, Artificial Sequence
  Synthetic oligonucleotide; CTC chr11 5238377 5238398 5238382 5238377 -
aatattcattatctgaaaatta

SEQ ID NO: 141904 - DNA, 22 bp, Artificial Sequence
  Synthetic oligonucleotide; TTC chr11 5238370 5238391 5238375 5238370 -
attatctgaaaattatgaatta

SEQ ID NO: 141905 - DNA, 22 bp, Artificial Sequence
  Synthetic oligonucleotide; TTA chr11 5238366 5238387 5238371 5238366 -
tctgaaaattatgaattaggta

SEQ ID NO: 141906 - DNA, 22 bp, Artificial Sequence
  Synthetic oligonucleotide; CTG chr11 5238362 5238383 5238367 5238362 -
aaaattatgaattaggtacaaa

SEQ ID NO: 141907 - DNA, 22 bp, Artificial Sequence
  Synthetic oligonucleotide; TTA chr11 5238355 5238376 5238360 5238355 -
tgaattaggtacaaagctcaaa

SEQ ID NO: 141908 - DNA, 22 bp, Artificial Sequence
  Synthetic oligonucleotide; TTA chr11 5238348 5238369 5238353 5238348 -
ggtacaaagctcaaataattta

SEQ ID NO: 141909 - DNA, 22 bp, Artificial Sequence
  Synthetic oligonucleotide; CTC chr11 5238336 5238357 5238341 5238336 -
aaataatttattttttcaggtt

SEQ ID NO: 141910 - DNA, 22 bp, Artificial Sequence
  Synthetic oligonucleotide; TTT chr11 5238327 5238348 5238332 5238327 -
attttttcaggttagcaagaac

SEQ ID NO: 141911 - DNA, 22 bp, Artificial Sequence
  Synthetic oligonucleotide; TTA chr11 5238326 5238347 5238331 5238326 -
ttttttcaggttagcaagaact

SEQ ID NO: 141912 - DNA, 22 bp, Artificial Sequence
  Synthetic oligonucleotide; TTT chr11 5238323 5238344 5238328 5238323 -
tttcaggttagcaagaactttt

SEQ ID NO: 141913 - DNA, 22 bp, Artificial Sequence
  Synthetic oligonucleotide; TTT chr11 5238322 5238343 5238327 5238322 -
ttcaggttagcaagaacttttt

SEQ ID NO: 141914 - DNA, 22 bp, Artificial Sequence
  Synthetic oligonucleotide; TTT chr11 5238321 5238342 5238326 5238321 -
tcaggttagcaagaactttttt

SEQ ID NO: 141915 - DNA, 22 bp, Artificial Sequence
  Synthetic oligonucleotide; TTT chr11 5238320 5238341 5238325 5238320 -
caggttagcaagaacttttttt

SEQ ID NO: 141916 - DNA, 22 bp, Artificial Sequence
  Synthetic oligonucleotide; TTC chr11 5238319 5238340 5238324 5238319 -
aggttagcaagaactttttttt

SEQ ID NO: 141917 - DNA, 22 bp, Artificial Sequence
  Synthetic oligonucleotide; TTA chr11 5238313 5238334 5238318 5238313 -
gcaagaactttttttttttttt

SEQ ID NO: 141918 - DNA, 22 bp, Artificial Sequence
  Synthetic oligonucleotide; CTT chr11 5238303 5238324 5238308 5238303 -
tttttttttttttctgagatag

SEQ ID NO: 141919 - DNA, 22 bp, Artificial Sequence
  Synthetic oligonucleotide; TTT chr11 5238302 5238323 5238307 5238302 -
ttttttttttttctgagataga

SEQ ID NO: 141920 - DNA, 22 bp, Artificial Sequence
  Synthetic oligonucleotide; TTT chr11 5238301 5238322 5238306 5238301 -
tttttttttttctgagatagag

SEQ ID NO: 141921 - DNA, 22 bp, Artificial Sequence
  Synthetic oligonucleotide; TTT chr11 5238300 5238321 5238305 5238300 -
ttttttttttctgagatagagc

SEQ ID NO: 141922 - DNA, 22 bp, Artificial Sequence
  Synthetic oligonucleotide; TTT chr11 5238299 5238320 5238304 5238299 -
tttttttttctgagatagagca

SEQ ID NO: 141923 - DNA, 22 bp, Artificial Sequence
  Synthetic oligonucleotide; TTT chr11 5238298 5238319 5238303 5238298 -
ttttttttctgagatagagcat

SEQ ID NO: 141924 - DNA, 22 bp, Artificial Sequence
  Synthetic oligonucleotide; TTT chr11 5238297 5238318 5238302 5238297 -
tttttttctgagatagagcatt

SEQ ID NO: 141925 - DNA, 22 bp, Artificial Sequence
  Synthetic oligonucleotide; TTT chr11 5238296 5238317 5238301 5238296 -
ttttttctgagatagagcattg

SEQ ID NO: 141926 - DNA, 22 bp, Artificial Sequence
  Synthetic oligonucleotide; TTT chr11 5238295 5238316 5238300 5238295 -
tttttctgagatagagcattgc

SEQ ID NO: 141927 - DNA, 22 bp, Artificial Sequence
  Synthetic oligonucleotide; TTT chr11 5238294 5238315 5238299 5238294 -
ttttctgagatagagcattgct

SEQ ID NO: 141928 - DNA, 22 bp, Artificial Sequence
  Synthetic oligonucleotide; TTT chr11 5238293 5238314 5238298 5238293 -
tttctgagatagagcattgcta

SEQ ID NO: 141929 - DNA, 22 bp, Artificial Sequence
  Synthetic oligonucleotide; TTT chr11 5238292 5238313 5238297 5238292 -
ttctgagatagagcattgctat

SEQ ID NO: 141930 - DNA, 22 bp, Artificial Sequence
  Synthetic oligonucleotide; TTT chr11 5238291 5238312 5238296 5238291 -
tctgagatagagcattgctatg

SEQ ID NO: 141931 - DNA, 22 bp, Artificial Sequence
  Synthetic oligonucleotide; TTT chr11 5238290 5238311 5238295 5238290 -
ctgagatagagcattgctatgg

SEQ ID NO: 141932 - DNA, 22 bp, Artificial Sequence
  Synthetic oligonucleotide; TTC chr11 5238289 5238310 5238294 5238289 -
tgagatagagcattgctatggt

SEQ ID NO: 141933 - DNA, 22 bp, Artificial Sequence
  Synthetic oligonucleotide; CTG chr11 5238287 5238308 5238292 5238287 -
agatagagcattgctatggttg

SEQ ID NO: 141934 - DNA, 22 bp, Artificial Sequence
  Synthetic oligonucleotide; TTG chr11 5238274 5238295 5238279 5238274 -
ctatggttgcccaggctggagt

SEQ ID NO: 141935 - DNA, 22 bp, Artificial Sequence
  Synthetic oligonucleotide; CTA chr11 5238271 5238292 5238276 5238271 -
tggttgcccaggctggagtgca

SEQ ID NO: 141936 - DNA, 22 bp, Artificial Sequence
  Synthetic oligonucleotide; TTG chr11 5238265 5238286 5238270 5238265 -
cccaggctggagtgcaatggca

SEQ ID NO: 141937 - DNA, 22 bp, Artificial Sequence
  Synthetic oligonucleotide; CTG chr11 5238256 5238277 5238261 5238256 -
gagtgcaatggcatgatccagg

SEQ ID NO: 141938 - DNA, 22 bp, Artificial Sequence
  Synthetic oligonucleotide; CTC chr11 5238231 5238252 5238236 5238231 -
actgcaacatctgcctcccagg

SEQ ID NO: 141939 - DNA, 22 bp, Artificial Sequence
  Synthetic oligonucleotide; CTG chr11 5238227 5238248 5238232 5238227 -
caacatctgcctcccaggttca

SEQ ID NO: 141940 - DNA, 22 bp, Artificial Sequence
  Synthetic oligonucleotide; CTG chr11 5238218 5238239 5238223 5238218 -
cctcccaggttcaagcgattct

SEQ ID NO: 141941 - DNA, 22 bp, Artificial Sequence
  Synthetic oligonucleotide; CTC chr11 5238214 5238235 5238219 5238214 -
ccaggttcaagcgattctcctg

SEQ ID NO: 141942 - DNA, 22 bp, Artificial Sequence
  Synthetic oligonucleotide; TTC chr11 5238206 5238227 5238211 5238206 -
aagcgattctcctgcctcagcc

SEQ ID NO: 141943 - DNA, 22 bp, Artificial Sequence
  Synthetic oligonucleotide; TTC chr11 5238197 5238218 5238202 5238197 -
tcctgcctcagcctcccaagta

SEQ ID NO: 141944 - DNA, 22 bp, Artificial Sequence
  Synthetic oligonucleotide; CTC chr11 5238195 5238216 5238200 5238195 -
ctgcctcagcctcccaagtagc

SEQ ID NO: 141945 - DNA, 22 bp, Artificial Sequence
  Synthetic oligonucleotide; CTG chr11 5238192 5238213 5238197 5238192 -
cctcagcctcccaagtagctgg

SEQ ID NO: 141946 - DNA, 22 bp, Artificial Sequence
  Synthetic oligonucleotide; CTC chr11 5238188 5238209 5238193 5238188 -
agcctcccaagtagctggcact

SEQ ID NO: 141947 - DNA, 22 bp, Artificial Sequence
  Synthetic oligonucleotide; CTC chr11 5238182 5238203 5238187 5238182 -
ccaagtagctggcactacaggc

SEQ ID NO: 141948 - DNA, 22 bp, Artificial Sequence
  Synthetic oligonucleotide; CTG chr11 5238171 5238192 5238176 5238171 -
gcactacaggcatgtgccacca

SEQ ID NO: 141949 - DNA, 22 bp, Artificial Sequence
  Synthetic oligonucleotide; CTA chr11 5238165 5238186 5238170 5238165 -
caggcatgtgccaccaccatgc

SEQ ID NO: 141950 - DNA, 22 bp, Artificial Sequence
  Synthetic oligonucleotide; CTG chr11 5238140 5238161 5238145 5238140 -
gctaattttctatttttagtag

SEQ ID NO: 141951 - DNA, 22 bp, Artificial Sequence
  Synthetic oligonucleotide; CTA chr11 5238136 5238157 5238141 5238136 -
attttctatttttagtagatag

SEQ ID NO: 141952 - DNA, 22 bp, Artificial Sequence
  Synthetic oligonucleotide; TTT chr11 5238132 5238153 5238137 5238132 -
tctatttttagtagataggggg

SEQ ID NO: 141953 - DNA, 22 bp, Artificial Sequence
  Synthetic oligonucleotide; TTT chr11 5238131 5238152 5238136 5238131 -
ctatttttagtagatagggggt

SEQ ID NO: 141954 - DNA, 22 bp, Artificial Sequence
  Synthetic oligonucleotide; TTC chr11 5238130 5238151 5238135 5238130 -
tatttttagtagatagggggtt

SEQ ID NO: 141955 - DNA, 22 bp, Artificial Sequence
  Synthetic oligonucleotide; CTA chr11 5238128 5238149 5238133 5238128 -
tttttagtagatagggggtttc

SEQ ID NO: 141956 - DNA, 22 bp, Artificial Sequence
  Synthetic oligonucleotide; TTT chr11 5238125 5238146 5238130 5238125 -
ttagtagatagggggtttcacc

SEQ ID NO: 141957 - DNA, 22 bp, Artificial Sequence
  Synthetic oligonucleotide; TTT chr11 5238124 5238145 5238129 5238124 -
tagtagatagggggtttcacca

SEQ ID NO: 141958 - DNA, 22 bp, Artificial Sequence
  Synthetic oligonucleotide; TTT chr11 5238123 5238144 5238128 5238123 -
agtagatagggggtttcaccat

SEQ ID NO: 141959 - DNA, 22 bp, Artificial Sequence
  Synthetic oligonucleotide; TTA chr11 5238122 5238143 5238127 5238122 -
gtagatagggggtttcaccatg

SEQ ID NO: 141960 - DNA, 22 bp, Artificial Sequence
  Synthetic oligonucleotide; TTT chr11 5238107 5238128 5238112 5238107 -
caccatgttggtcaggctgatc

SEQ ID NO: 141961 - DNA, 22 bp, Artificial Sequence
  Synthetic oligonucleotide; TTC chr11 5238106 5238127 5238111 5238106 -
accatgttggtcaggctgatct

SEQ ID NO: 141962 - DNA, 22 bp, Artificial Sequence
  Synthetic oligonucleotide; TTG chr11 5238097 5238118 5238102 5238097 -
gtcaggctgatctcgaactcct

SEQ ID NO: 141963 - DNA, 22 bp, Artificial Sequence
  Synthetic oligonucleotide; CTG chr11 5238088 5238109 5238093 5238088 -
atctcgaactcctaacatcagg

SEQ ID NO: 141964 - DNA, 22 bp, Artificial Sequence
  Synthetic oligonucleotide; CTC chr11 5238083 5238104 5238088 5238083 -
gaactcctaacatcaggtgatc

SEQ ID NO: 141965 - DNA, 22 bp, Artificial Sequence
  Synthetic oligonucleotide; CTC chr11 5238077 5238098 5238082 5238077 -
ctaacatcaggtgatccaccct

SEQ ID NO: 141966 - DNA, 22 bp, Artificial Sequence
  Synthetic oligonucleotide; CTA chr11 5238074 5238095 5238079 5238074 -
acatcaggtgatccaccctcct

SEQ ID NO: 141967 - DNA, 22 bp, Artificial Sequence
  Synthetic oligonucleotide; CTC chr11 5238054 5238075 5238059 5238054 -
ctcggcctctgaaagtgctggg

SEQ ID NO: 141968 - DNA, 22 bp, Artificial Sequence
  Synthetic oligonucleotide; CTC chr11 5238051 5238072 5238056 5238051 -
ggcctctgaaagtgctgggatc

SEQ ID NO: 141969 - DNA, 22 bp, Artificial Sequence
  Synthetic oligonucleotide; CTC chr11 5238045 5238066 5238050 5238045 -
tgaaagtgctgggatcacaggc

SEQ ID NO: 141970 - DNA, 22 bp, Artificial Sequence
  Synthetic oligonucleotide; CTG chr11 5238043 5238064 5238048 5238043 -
aaagtgctgggatcacaggcgt

SEQ ID NO: 141971 - DNA, 22 bp, Artificial Sequence
  Synthetic oligonucleotide; CTG chr11 5238034 5238055 5238039 5238034 -
ggatcacaggcgtgagccacca

SEQ ID NO: 141972 - DNA, 22 bp, Artificial Sequence
  Synthetic oligonucleotide; TTT chr11 5237989 5238010 5237994 5237989 -
tgtagaaggatataacccatat

SEQ ID NO: 141973 - DNA, 22 bp, Artificial Sequence
  Synthetic oligonucleotide; TTT chr11 5237988 5238009 5237993 5237988 -
gtagaaggatataacccatatt

SEQ ID NO: 141974 - DNA, 22 bp, Artificial Sequence
  Synthetic oligonucleotide; TTG chr11 5237987 5238008 5237992 5237987 -
tagaaggatataacccatattt

SEQ ID NO: 141975 - DNA, 22 bp, Artificial Sequence
  Synthetic oligonucleotide; TTT chr11 5237965 5237986 5237970 5237965 -
ctctgaccctagagtccttagt

SEQ ID NO: 141976 - DNA, 22 bp, Artificial Sequence
  Synthetic oligonucleotide; TTC chr11 5237964 5237985 5237969 5237964 -
tctgaccctagagtccttagta

SEQ ID NO: 141977 - DNA, 22 bp, Artificial Sequence
  Synthetic oligonucleotide; CTC chr11 5237962 5237983 5237967 5237962 -
tgaccctagagtccttagtata

SEQ ID NO: 141978 - DNA, 22 bp, Artificial Sequence
  Synthetic oligonucleotide; CTG chr11 5237960 5237981 5237965 5237960 -
accctagagtccttagtatacc

SEQ ID NO: 141979 - DNA, 22 bp, Artificial Sequence
  Synthetic oligonucleotide; CTA chr11 5237954 5237975 5237959 5237954 -
gagtccttagtatacctcccat

SEQ ID NO: 141980 - DNA, 22 bp, Artificial Sequence
  Synthetic oligonucleotide; CTT chr11 5237946 5237967 5237951 5237946 -
agtatacctcccataccatgtg

SEQ ID NO: 141981 - DNA, 22 bp, Artificial Sequence
  Synthetic oligonucleotide; TTA chr11 5237945 5237966 5237950 5237945 -
gtatacctcccataccatgtgg

SEQ ID NO: 141982 - DNA, 22 bp, Artificial Sequence
  Synthetic oligonucleotide; CTC chr11 5237936 5237957 5237941 5237936 -
ccataccatgtggctcatcctc

SEQ ID NO: 141983 - DNA, 22 bp, Artificial Sequence
  Synthetic oligonucleotide; CTC chr11 5237920 5237941 5237925 5237920 -
atcctccttacatacatttccc

SEQ ID NO: 141984 - DNA, 22 bp, Artificial Sequence
  Synthetic oligonucleotide; CTC chr11 5237914 5237935 5237919 5237914 -
cttacatacatttcccatcttt

SEQ ID NO: 141985 - DNA, 22 bp, Artificial Sequence
  Synthetic oligonucleotide; CTT chr11 5237911 5237932 5237916 5237911 -
acatacatttcccatctttcac

SEQ ID NO: 141986 - DNA, 22 bp, Artificial Sequence
  Synthetic oligonucleotide; TTA chr11 5237910 5237931 5237915 5237910 -
catacatttcccatctttcacc

SEQ ID NO: 141987 - DNA, 22 bp, Artificial Sequence
  Synthetic oligonucleotide; TTT chr11 5237901 5237922 5237906 5237901 -
cccatctttcaccctacctttt

SEQ ID NO: 141988 - DNA, 22 bp, Artificial Sequence
  Synthetic oligonucleotide; TTC chr11 5237900 5237921 5237905 5237900 -
ccatctttcaccctaccttttc

SEQ ID NO: 141989 - DNA, 22 bp, Artificial Sequence
  Synthetic oligonucleotide; CTT chr11 5237893 5237914 5237898 5237893 -
tcaccctaccttttcctttttg

SEQ ID NO: 141990 - DNA, 22 bp, Artificial Sequence
  Synthetic oligonucleotide; TTT chr11 5237892 5237913 5237897 5237892 -
caccctaccttttcctttttgt

SEQ ID NO: 141991 - DNA, 22 bp, Artificial Sequence
  Synthetic oligonucleotide; TTC chr11 5237891 5237912 5237896 5237891 -
accctaccttttcctttttgtt

SEQ ID NO: 141992 - DNA, 22 bp, Artificial Sequence
  Synthetic oligonucleotide; CTA chr11 5237885 5237906 5237890 5237885 -
ccttttcctttttgtttcagct

SEQ ID NO: 141993 - DNA, 22 bp, Artificial Sequence
  Synthetic oligonucleotide; CTT chr11 5237881 5237902 5237886 5237881 -
ttcctttttgtttcagcttttc

SEQ ID NO: 141994 - DNA, 22 bp, Artificial Sequence
  Synthetic oligonucleotide; TTT chr11 5237880 5237901 5237885 5237880 -
tcctttttgtttcagcttttca

SEQ ID NO: 141995 - DNA, 22 bp, Artificial Sequence
  Synthetic oligonucleotide; TTT chr11 5237879 5237900 5237884 5237879 -
cctttttgtttcagcttttcac

SEQ ID NO: 141996 - DNA, 22 bp, Artificial Sequence
  Synthetic oligonucleotide; TTC chr11 5237878 5237899 5237883 5237878 -
ctttttgtttcagcttttcact

SEQ ID NO: 141997 - DNA, 22 bp, Artificial Sequence
  Synthetic oligonucleotide; CTT chr11 5237875 5237896 5237880 5237875 -
tttgtttcagcttttcactgtg

SEQ ID NO: 141998 - DNA, 22 bp, Artificial Sequence
  Synthetic oligonucleotide; TTT chr11 5237874 5237895 5237879 5237874 -
ttgtttcagcttttcactgtgt

SEQ ID NO: 141999 - DNA, 22 bp, Artificial Sequence
  Synthetic oligonucleotide; TTT chr11 5237873 5237894 5237878 5237873 -
tgtttcagcttttcactgtgtc

SEQ ID NO: 142000 - DNA, 22 bp, Artificial Sequence
  Synthetic oligonucleotide; TTT chr11 5237872 5237893 5237877 5237872 -
gtttcagcttttcactgtgtca

SEQ ID NO: 142001 - DNA, 22 bp, Artificial Sequence
  Synthetic oligonucleotide; TTG chr11 5237871 5237892 5237876 5237871 -
tttcagcttttcactgtgtcaa

SEQ ID NO: 142002 - DNA, 22 bp, Artificial Sequence
  Synthetic oligonucleotide; TTT chr11 5237868 5237889 5237873 5237868 -
cagcttttcactgtgtcaaaat

SEQ ID NO: 142003 - DNA, 22 bp, Artificial Sequence
  Synthetic oligonucleotide; TTC chr11 5237867 5237888 5237872 5237867 -
agcttttcactgtgtcaaaatc

SEQ ID NO: 142004 - DNA, 22 bp, Artificial Sequence
  Synthetic oligonucleotide; CTT chr11 5237862 5237883 5237867 5237862 -
ttcactgtgtcaaaatctagaa

SEQ ID NO: 142005 - DNA, 22 bp, Artificial Sequence
  Synthetic oligonucleotide; TTT chr11 5237861 5237882 5237866 5237861 -
tcactgtgtcaaaatctagaac

SEQ ID NO: 142006 - DNA, 22 bp, Artificial Sequence
  Synthetic oligonucleotide; TTT chr11 5237860 5237881 5237865 5237860 -
cactgtgtcaaaatctagaacc

SEQ ID NO: 142007 - DNA, 22 bp, Artificial Sequence
  Synthetic oligonucleotide; TTC chr11 5237859 5237880 5237864 5237859 -
actgtgtcaaaatctagaacct

SEQ ID NO: 142008 - DNA, 22 bp, Artificial Sequence
  Synthetic oligonucleotide; CTG chr11 5237855 5237876 5237860 5237855 -
tgtcaaaatctagaaccttatc

SEQ ID NO: 142009 - DNA, 22 bp, Artificial Sequence
  Synthetic oligonucleotide; CTA chr11 5237843 5237864 5237848 5237843 -
gaaccttatctcctacctgctc

SEQ ID NO: 142010 - DNA, 22 bp, Artificial Sequence
  Synthetic oligonucleotide; CTT chr11 5237836 5237857 5237841 5237836 -
atctcctacctgctctgaaacc

SEQ ID NO: 142011 - DNA, 22 bp, Artificial Sequence
  Synthetic oligonucleotide; TTA chr11 5237835 5237856 5237840 5237835 -
tctcctacctgctctgaaacca

SEQ ID NO: 142012 - DNA, 22 bp, Artificial Sequence
  Synthetic oligonucleotide; CTC chr11 5237831 5237852 5237836 5237831 -
ctacctgctctgaaaccaacag

SEQ ID NO: 142013 - DNA, 22 bp, Artificial Sequence
  Synthetic oligonucleotide; CTA chr11 5237828 5237849 5237833 5237828 -
cctgctctgaaaccaacagcaa

SEQ ID NO: 142014 - DNA, 22 bp, Artificial Sequence
  Synthetic oligonucleotide; CTG chr11 5237824 5237845 5237829 5237824 -
ctctgaaaccaacagcaagttg

SEQ ID NO: 142015 - DNA, 22 bp, Artificial Sequence
  Synthetic oligonucleotide; CTC chr11 5237821 5237842 5237826 5237821 -
tgaaaccaacagcaagttgact

SEQ ID NO: 142016 - DNA, 22 bp, Artificial Sequence
  Synthetic oligonucleotide; CTG chr11 5237819 5237840 5237824 5237819 -
aaaccaacagcaagttgacttc

SEQ ID NO: 142017 - DNA, 22 bp, Artificial Sequence
  Synthetic oligonucleotide; TTG chr11 5237802 5237823 5237807 5237802 -
acttccattctaacccacattg

SEQ ID NO: 142018 - DNA, 22 bp, Artificial Sequence
  Synthetic oligonucleotide; CTT chr11 5237798 5237819 5237803 5237798 -
ccattctaacccacattggcat

SEQ ID NO: 142019 - DNA, 22 bp, Artificial Sequence
  Synthetic oligonucleotide; TTC chr11 5237797 5237818 5237802 5237797 -
cattctaacccacattggcatt

SEQ ID NO: 142020 - DNA, 22 bp, Artificial Sequence
  Synthetic oligonucleotide; TTC chr11 5237792 5237813 5237797 5237792 -
taacccacattggcattacact

SEQ ID NO: 142021 - DNA, 22 bp, Artificial Sequence
  Synthetic oligonucleotide; CTA chr11 5237790 5237811 5237795 5237790 -
acccacattggcattacactaa

SEQ ID NO: 142022 - DNA, 22 bp, Artificial Sequence
  Synthetic oligonucleotide; TTG chr11 5237780 5237801 5237785 5237780 -
gcattacactaattaaaatcga

SEQ ID NO: 142023 - DNA, 22 bp, Artificial Sequence
  Synthetic oligonucleotide; TTA chr11 5237774 5237795 5237779 5237774 -
cactaattaaaatcgatactga

SEQ ID NO: 142024 - DNA, 22 bp, Artificial Sequence
  Synthetic oligonucleotide; CTA chr11 5237769 5237790 5237774 5237769 -
attaaaatcgatactgagttct

SEQ ID NO: 142025 - DNA, 22 bp, Artificial Sequence
  Synthetic oligonucleotide; TTA chr11 5237765 5237786 5237770 5237765 -
aaatcgatactgagttctaaaa

SEQ ID NO: 142026 - DNA, 22 bp, Artificial Sequence
  Synthetic oligonucleotide; CTG chr11 5237753 5237774 5237758 5237753 -
agttctaaaatcatcggggatt

SEQ ID NO: 142027 - DNA, 22 bp, Artificial Sequence
  Synthetic oligonucleotide; TTC chr11 5237748 5237769 5237753 5237748 -
taaaatcatcggggattttggg

SEQ ID NO: 142028 - DNA, 22 bp, Artificial Sequence
  Synthetic oligonucleotide; CTA chr11 5237746 5237767 5237751 5237746 -
aaatcatcggggattttgggga

SEQ ID NO: 142029 - DNA, 22 bp, Artificial Sequence
  Synthetic oligonucleotide; TTT chr11 5237730 5237751 5237735 5237730 -
tggggactatgtcttacttcat

SEQ ID NO: 142030 - DNA, 22 bp, Artificial Sequence
  Synthetic oligonucleotide; TTT chr11 5237729 5237750 5237734 5237729 -
ggggactatgtcttacttcata

SEQ ID NO: 142031 - DNA, 22 bp, Artificial Sequence
  Synthetic oligonucleotide; TTG chr11 5237728 5237749 5237733 5237728 -
gggactatgtcttacttcatac

SEQ ID NO: 142032 - DNA, 22 bp, Artificial Sequence
  Synthetic oligonucleotide; CTA chr11 5237721 5237742 5237726 5237721 -
tgtcttacttcatacttccttg

SEQ ID NO: 142033 - DNA, 22 bp, Artificial Sequence
  Synthetic oligonucleotide; CTT chr11 5237715 5237736 5237720 5237715 -
acttcatacttccttgagattt

SEQ ID NO: 142034 - DNA, 22 bp, Artificial Sequence
  Synthetic oligonucleotide; TTA chr11 5237714 5237735 5237719 5237714 -
cttcatacttccttgagatttc

SEQ ID NO: 142035 - DNA, 22 bp, Artificial Sequence
  Synthetic oligonucleotide; CTT chr11 5237711 5237732 5237716 5237711 -
catacttccttgagatttcaca

SEQ ID NO: 142036 - DNA, 22 bp, Artificial Sequence
  Synthetic oligonucleotide; TTC chr11 5237710 5237731 5237715 5237710 -
atacttccttgagatttcacat

SEQ ID NO: 142037 - DNA, 22 bp, Artificial Sequence
  Synthetic oligonucleotide; CTT chr11 5237704 5237725 5237709 5237704 -
ccttgagatttcacattaaatg

SEQ ID NO: 142038 - DNA, 22 bp, Artificial Sequence
  Synthetic oligonucleotide; TTC chr11 5237703 5237724 5237708 5237703 -
cttgagatttcacattaaatgt

SEQ ID NO: 142039 - DNA, 22 bp, Artificial Sequence
  Synthetic oligonucleotide; CTT chr11 5237700 5237721 5237705 5237700 -
gagatttcacattaaatgttgg

SEQ ID NO: 142040 - DNA, 22 bp, Artificial Sequence
  Synthetic oligonucleotide; TTG chr11 5237699 5237720 5237704 5237699 -
agatttcacattaaatgttggt

SEQ ID NO: 142041 - DNA, 22 bp, Artificial Sequence
  Synthetic oligonucleotide; TTT chr11 5237693 5237714 5237698 5237693 -
cacattaaatgttggtgttcat

SEQ ID NO: 142042 - DNA, 22 bp, Artificial Sequence
  Synthetic oligonucleotide; TTC chr11 5237692 5237713 5237697 5237692 -
acattaaatgttggtgttcatt

SEQ ID NO: 142043 - DNA, 22 bp, Artificial Sequence
  Synthetic oligonucleotide; TTA chr11 5237686 5237707 5237691 5237686 -
aatgttggtgttcattaaaggt

SEQ ID NO: 142044 - DNA, 22 bp, Artificial Sequence
  Synthetic oligonucleotide; TTG chr11 5237679 5237700 5237684 5237679 -
gtgttcattaaaggtccttcat

SEQ ID NO: 142045 - DNA, 22 bp, Artificial Sequence
  Synthetic oligonucleotide; TTC chr11 5237673 5237694 5237678 5237673 -
attaaaggtccttcatttaact

SEQ ID NO: 142046 - DNA, 22 bp, Artificial Sequence
  Synthetic oligonucleotide; TTA chr11 5237669 5237690 5237674 5237669 -
aaggtccttcatttaactttgt

SEQ ID NO: 142047 - DNA, 22 bp, Artificial Sequence
  Synthetic oligonucleotide; CTT chr11 5237660 5237681 5237665 5237660 -
catttaactttgtattcatcac

SEQ ID NO: 142048 - DNA, 22 bp, Artificial Sequence
  Synthetic oligonucleotide; TTC chr11 5237659 5237680 5237664 5237659 -
atttaactttgtattcatcaca

SEQ ID NO: 142049 - DNA, 22 bp, Artificial Sequence
  Synthetic oligonucleotide; TTT chr11 5237655 5237676 5237660 5237655 -
aactttgtattcatcacactct

SEQ ID NO: 142050 - DNA, 22 bp, Artificial Sequence
  Synthetic oligonucleotide; TTA chr11 5237654 5237675 5237659 5237654 -
actttgtattcatcacactctt

SEQ ID NO: 142051 - DNA, 22 bp, Artificial Sequence
  Synthetic oligonucleotide; CTT chr11 5237650 5237671 5237655 5237650 -
tgtattcatcacactcttggat

SEQ ID NO: 142052 - DNA, 22 bp, Artificial Sequence
  Synthetic oligonucleotide; TTT chr11 5237649 5237670 5237654 5237649 -
gtattcatcacactcttggatt

SEQ ID NO: 142053 - DNA, 22 bp, Artificial Sequence
  Synthetic oligonucleotide; TTG chr11 5237648 5237669 5237653 5237648 -
tattcatcacactcttggattc

SEQ ID NO: 142054 - DNA, 22 bp, Artificial Sequence
  Synthetic oligonucleotide; TTC chr11 5237643 5237664 5237648 5237643 -
atcacactcttggattcacagt

SEQ ID NO: 142055 - DNA, 22 bp, Artificial Sequence
  Synthetic oligonucleotide; CTC chr11 5237634 5237655 5237639 5237634 -
ttggattcacagttatatctaa

SEQ ID NO: 142056 - DNA, 22 bp, Artificial Sequence
  Synthetic oligonucleotide; CTT chr11 5237632 5237653 5237637 5237632 -
ggattcacagttatatctaaac

SEQ ID NO: 142057 - DNA, 22 bp, Artificial Sequence
  Synthetic oligonucleotide; TTG chr11 5237631 5237652 5237636 5237631 -
gattcacagttatatctaaact

SEQ ID NO: 142058 - DNA, 22 bp, Artificial Sequence
  Synthetic oligonucleotide; TTC chr11 5237626 5237647 5237631 5237626 -
acagttatatctaaactcttaa

SEQ ID NO: 142059 - DNA, 22 bp, Artificial Sequence
  Synthetic oligonucleotide; TTA chr11 5237619 5237640 5237624 5237619 -
tatctaaactcttaaatacagc

SEQ ID NO: 142060 - DNA, 22 bp, Artificial Sequence
  Synthetic oligonucleotide; CTA chr11 5237613 5237634 5237618 5237613 -
aactcttaaatacagcctgtat

SEQ ID NO: 142061 - DNA, 22 bp, Artificial Sequence
  Synthetic oligonucleotide; CTC chr11 5237608 5237629 5237613 5237608 -
ttaaatacagcctgtataatcc

SEQ ID NO: 142062 - DNA, 22 bp, Artificial Sequence
  Synthetic oligonucleotide; CTT chr11 5237606 5237627 5237611 5237606 -
aaatacagcctgtataatccca

SEQ ID NO: 142063 - DNA, 22 bp, Artificial Sequence
  Synthetic oligonucleotide; TTA chr11 5237605 5237626 5237610 5237605 -
aatacagcctgtataatcccaa

SEQ ID NO: 142064 - DNA, 22 bp, Artificial Sequence
  Synthetic oligonucleotide; CTG chr11 5237594 5237615 5237599 5237594 -
tataatcccaattcccaactct

SEQ ID NO: 142065 - DNA, 22 bp, Artificial Sequence
  Synthetic oligonucleotide; TTC chr11 5237580 5237601 5237585 5237580 -
ccaactctgatttctaacctct

SEQ ID NO: 142066 - DNA, 22 bp, Artificial Sequence
  Synthetic oligonucleotide; CTC chr11 5237573 5237594 5237578 5237573 -
tgatttctaacctctgacctcc

SEQ ID NO: 142067 - DNA, 22 bp, Artificial Sequence
  Synthetic oligonucleotide; CTG chr11 5237571 5237592 5237576 5237571 -
atttctaacctctgacctccaa

SEQ ID NO: 142068 - DNA, 22 bp, Artificial Sequence
  Synthetic oligonucleotide; TTT chr11 5237567 5237588 5237572 5237567 -
ctaacctctgacctccaacctc

SEQ ID NO: 142069 - DNA, 22 bp, Artificial Sequence
  Synthetic oligonucleotide; TTC chr11 5237566 5237587 5237571 5237566 -
taacctctgacctccaacctca

SEQ ID NO: 142070 - DNA, 22 bp, Artificial Sequence
  Synthetic oligonucleotide; CTA chr11 5237564 5237585 5237569 5237564 -
acctctgacctccaacctcagt

SEQ ID NO: 142071 - DNA, 22 bp, Artificial Sequence
  Synthetic oligonucleotide; CTC chr11 5237559 5237580 5237564 5237559 -
tgacctccaacctcagtgccaa

SEQ ID NO: 142072 - DNA, 22 bp, Artificial Sequence
  Synthetic oligonucleotide; CTG chr11 5237557 5237578 5237562 5237557 -
acctccaacctcagtgccaaac

SEQ ID NO: 142073 - DNA, 22 bp, Artificial Sequence
  Synthetic oligonucleotide; CTC chr11 5237552 5237573 5237557 5237552 -
caacctcagtgccaaacccata

SEQ ID NO: 142074 - DNA, 22 bp, Artificial Sequence
  Synthetic oligonucleotide; CTC chr11 5237545 5237566 5237550 5237545 -
agtgccaaacccatatatcaaa

SEQ ID NO: 142075 - DNA, 22 bp, Artificial Sequence
  Synthetic oligonucleotide; CTG chr11 5237513 5237534 5237518 5237513 -
ggcttatttatatagatgtcct

SEQ ID NO: 142076 - DNA, 22 bp, Artificial Sequence
  Synthetic oligonucleotide; CTT chr11 5237508 5237529 5237513 5237508 -
atttatatagatgtcctatagg

SEQ ID NO: 142077 - DNA, 22 bp, Artificial Sequence
  Synthetic oligonucleotide; TTA chr11 5237507 5237528 5237512 5237507 -
tttatatagatgtcctataggc

SEQ ID NO: 142078 - DNA, 22 bp, Artificial Sequence
  Synthetic oligonucleotide; TTT chr11 5237504 5237525 5237509 5237504 -
atatagatgtcctataggcacc

SEQ ID NO: 142079 - DNA, 22 bp, Artificial Sequence
  Synthetic oligonucleotide; TTA chr11 5237503 5237524 5237508 5237503 -
tatagatgtcctataggcacct

SEQ ID NO: 142080 - DNA, 22 bp, Artificial Sequence
  Synthetic oligonucleotide; CTA chr11 5237490 5237511 5237495 5237490 -
taggcacctcagactcagcatg

SEQ ID NO: 142081 - DNA, 22 bp, Artificial Sequence
  Synthetic oligonucleotide; CTC chr11 5237480 5237501 5237485 5237480 -
agactcagcatgggtatttcac

SEQ ID NO: 142082 - DNA, 22 bp, Artificial Sequence
  Synthetic oligonucleotide; CTC chr11 5237474 5237495 5237479 5237474 -
agcatgggtatttcacttgtta

SEQ ID NO: 142083 - DNA, 22 bp, Artificial Sequence
  Synthetic oligonucleotide; TTT chr11 5237461 5237482 5237466 5237461 -
cacttgttatactaaaactgtt

SEQ ID NO: 142084 - DNA, 22 bp, Artificial Sequence
  Synthetic oligonucleotide; TTC chr11 5237460 5237481 5237465 5237460 -
acttgttatactaaaactgttt

SEQ ID NO: 142085 - DNA, 22 bp, Artificial Sequence
  Synthetic oligonucleotide; CTT chr11 5237456 5237477 5237461 5237456 -
gttatactaaaactgtttctct

SEQ ID NO: 142086 - DNA, 22 bp, Artificial Sequence
  Synthetic oligonucleotide; TTG chr11 5237455 5237476 5237460 5237455 -
ttatactaaaactgtttctctt

SEQ ID NO: 142087 - DNA, 22 bp, Artificial Sequence
  Synthetic oligonucleotide; TTA chr11 5237452 5237473 5237457 5237452 -
tactaaaactgtttctcttcca

SEQ ID NO: 142088 - DNA, 22 bp, Artificial Sequence
  Synthetic oligonucleotide; CTA chr11 5237447 5237468 5237452 5237447 -
aaactgtttctcttccagtgtt

SEQ ID NO: 142089 - DNA, 22 bp, Artificial Sequence
  Synthetic oligonucleotide; CTG chr11 5237441 5237462 5237446 5237441 -
tttctcttccagtgttttccat

SEQ ID NO: 142090 - DNA, 22 bp, Artificial Sequence
  Synthetic oligonucleotide; TTT chr11 5237438 5237459 5237443 5237438 -
ctcttccagtgttttccatttt

SEQ ID NO: 142091 - DNA, 22 bp, Artificial Sequence
  Synthetic oligonucleotide; TTC chr11 5237437 5237458 5237442 5237437 -
tcttccagtgttttccatttta

SEQ ID NO: 142092 - DNA, 22 bp, Artificial Sequence
  Synthetic oligonucleotide; CTC chr11 5237435 5237456 5237440 5237435 -
ttccagtgttttccattttagt

SEQ ID NO: 142093 - DNA, 22 bp, Artificial Sequence
  Synthetic oligonucleotide; CTT chr11 5237433 5237454 5237438 5237433 -
ccagtgttttccattttagtca

SEQ ID NO: 142094 - DNA, 22 bp, Artificial Sequence
  Synthetic oligonucleotide; TTC chr11 5237432 5237453 5237437 5237432 -
cagtgttttccattttagtcat

SEQ ID NO: 142095 - DNA, 22 bp, Artificial Sequence
  Synthetic oligonucleotide; TTT chr11 5237424 5237445 5237429 5237424 -
tccattttagtcattagatagc

SEQ ID NO: 142096 - DNA, 22 bp, Artificial Sequence
  Synthetic oligonucleotide; TTT chr11 5237423 5237444 5237428 5237423 -
ccattttagtcattagatagct

SEQ ID NO: 142097 - DNA, 22 bp, Artificial Sequence
  Synthetic oligonucleotide; TTC chr11 5237422 5237443 5237427 5237422 -
cattttagtcattagatagcta

SEQ ID NO: 142098 - DNA, 22 bp, Artificial Sequence
  Synthetic oligonucleotide; TTT chr11 5237417 5237438 5237422 5237417 -
tagtcattagatagctacttgc

SEQ ID NO: 142099 - DNA, 22 bp, Artificial Sequence
  Synthetic oligonucleotide; TTT chr11 5237416 5237437 5237421 5237416 -
agtcattagatagctacttgcc

SEQ ID NO: 142100 - DNA, 22 bp, Artificial Sequence
  Synthetic oligonucleotide; TTA chr11 5237415 5237436 5237420 5237415 -
gtcattagatagctacttgccc

SEQ ID NO: 142101 - DNA, 22 bp, Artificial Sequence
  Synthetic oligonucleotide; TTA chr11 5237408 5237429 5237413 5237408 -
gatagctacttgcccattcacc

SEQ ID NO: 142102 - DNA, 22 bp, Artificial Sequence
  Synthetic oligonucleotide; CTA chr11 5237400 5237421 5237405 5237400 -
cttgcccattcaccaaggtcac

SEQ ID NO: 142103 - DNA, 22 bp, Artificial Sequence
  Synthetic oligonucleotide; CTT chr11 5237397 5237418 5237402 5237397 -
gcccattcaccaaggtcacaga

SEQ ID NO: 142104 - DNA, 22 bp, Artificial Sequence
  Synthetic oligonucleotide; TTG chr11 5237396 5237417 5237401 5237396 -
cccattcaccaaggtcacagat

SEQ ID NO: 142105 - DNA, 22 bp, Artificial Sequence
  Synthetic oligonucleotide; TTC chr11 5237389 5237410 5237394 5237389 -
accaaggtcacagattaaaatc

SEQ ID NO: 142106 - DNA, 22 bp, Artificial Sequence
  Synthetic oligonucleotide; TTA chr11 5237372 5237393 5237377 5237372 -
aaatcatttccctacctctaat

SEQ ID NO: 142107 - DNA, 22 bp, Artificial Sequence
  Synthetic oligonucleotide; TTT chr11 5237363 5237384 5237368 5237363 -
ccctacctctaatcaacagttc

SEQ ID NO: 142108 - DNA, 22 bp, Artificial Sequence
  Synthetic oligonucleotide; TTC chr11 5237362 5237383 5237367 5237362 -
cctacctctaatcaacagttcg

SEQ ID NO: 142109 - DNA, 22 bp, Artificial Sequence
  Synthetic oligonucleotide; CTA chr11 5237358 5237379 5237363 5237358 -
cctctaatcaacagttcgattc

SEQ ID NO: 142110 - DNA, 22 bp, Artificial Sequence
  Synthetic oligonucleotide; CTC chr11 5237354 5237375 5237359 5237354 -
taatcaacagttcgattctgct

SEQ ID NO: 142111 - DNA, 22 bp, Artificial Sequence
  Synthetic oligonucleotide; CTA chr11 5237352 5237373 5237357 5237352 -
atcaacagttcgattctgcttc

SEQ ID NO: 142112 - DNA, 22 bp, Artificial Sequence
  Synthetic oligonucleotide; TTC chr11 5237341 5237362 5237346 5237341 -
gattctgcttcaatttgtccct

SEQ ID NO: 142113 - DNA, 22 bp, Artificial Sequence
  Synthetic oligonucleotide; TTC chr11 5237336 5237357 5237341 5237336 -
tgcttcaatttgtccctatcta

SEQ ID NO: 142114 - DNA, 22 bp, Artificial Sequence
  Synthetic oligonucleotide; CTG chr11 5237334 5237355 5237339 5237334 -
cttcaatttgtccctatctatt

SEQ ID NO: 142115 - DNA, 22 bp, Artificial Sequence
  Synthetic oligonucleotide; CTT chr11 5237331 5237352 5237336 5237331 -
caatttgtccctatctattaat

SEQ ID NO: 142116 - DNA, 22 bp, Artificial Sequence
  Synthetic oligonucleotide; TTC chr11 5237330 5237351 5237335 5237330 -
aatttgtccctatctattaatc

SEQ ID NO: 142117 - DNA, 22 bp, Artificial Sequence
  Synthetic oligonucleotide; TTT chr11 5237325 5237346 5237330 5237325 -
gtccctatctattaatcaccac

SEQ ID NO: 142118 - DNA, 22 bp, Artificial Sequence
  Synthetic oligonucleotide; TTG chr11 5237324 5237345 5237329 5237324 -
tccctatctattaatcaccact

SEQ ID NO: 142119 - DNA, 22 bp, Artificial Sequence
  Synthetic oligonucleotide; CTA chr11 5237318 5237339 5237323 5237318 -
tctattaatcaccactcttact

SEQ ID NO: 142120 - DNA, 22 bp, Artificial Sequence
  Synthetic oligonucleotide; CTA chr11 5237314 5237335 5237319 5237314 -
ttaatcaccactcttactgccc

SEQ ID NO: 142121 - DNA, 22 bp, Artificial Sequence
  Synthetic oligonucleotide; TTA chr11 5237311 5237332 5237316 5237311 -
atcaccactcttactgcccagt

SEQ ID NO: 142122 - DNA, 22 bp, Artificial Sequence
  Synthetic oligonucleotide; CTC chr11 5237301 5237322 5237306 5237301 -
ttactgcccagtcaggtcctca

SEQ ID NO: 142123 - DNA, 22 bp, Artificial Sequence
  Synthetic oligonucleotide; CTT chr11 5237299 5237320 5237304 5237299 -
actgcccagtcaggtcctcatt

SEQ ID NO: 142124 - DNA, 22 bp, Artificial Sequence
  Synthetic oligonucleotide; TTA chr11 5237298 5237319 5237303 5237298 -
ctgcccagtcaggtcctcattg

SEQ ID NO: 142125 - DNA, 22 bp, Artificial Sequence
  Synthetic oligonucleotide; CTG chr11 5237295 5237316 5237300 5237295 -
cccagtcaggtcctcattgttt

SEQ ID NO: 142126 - DNA, 22 bp, Artificial Sequence
  Synthetic oligonucleotide; CTC chr11 5237280 5237301 5237285 5237280 -
attgtttcctgaacaagagtag

SEQ ID NO: 142127 - DNA, 22 bp, Artificial Sequence
  Synthetic oligonucleotide; TTG chr11 5237276 5237297 5237281 5237276 -
tttcctgaacaagagtagatgc

SEQ ID NO: 142128 - DNA, 22 bp, Artificial Sequence
  Synthetic oligonucleotide; TTT chr11 5237273 5237294 5237278 5237273 -
cctgaacaagagtagatgctat

SEQ ID NO: 142129 - DNA, 22 bp, Artificial Sequence
  Synthetic oligonucleotide; TTC chr11 5237272 5237293 5237277 5237272 -
ctgaacaagagtagatgctatt

SEQ ID NO: 142130 - DNA, 22 bp, Artificial Sequence
  Synthetic oligonucleotide; CTG chr11 5237269 5237290 5237274 5237269 -
aacaagagtagatgctattctt

SEQ ID NO: 142131 - DNA, 22 bp, Artificial Sequence
  Synthetic oligonucleotide; CTA chr11 5237252 5237273 5237257 5237252 -
ttctttccacttttagacctta

SEQ ID NO: 142132 - DNA, 22 bp, Artificial Sequence
  Synthetic oligonucleotide; TTC chr11 5237249 5237270 5237254 5237249 -
tttccacttttagaccttatcc

SEQ ID NO: 142133 - DNA, 22 bp, Artificial Sequence
  Synthetic oligonucleotide; CTT chr11 5237247 5237268 5237252 5237247 -
tccacttttagaccttatcctg

SEQ ID NO: 142134 - DNA, 22 bp, Artificial Sequence
  Synthetic oligonucleotide; TTT chr11 5237246 5237267 5237251 5237246 -
ccacttttagaccttatcctgg

SEQ ID NO: 142135 - DNA, 22 bp, Artificial Sequence
  Synthetic oligonucleotide; TTC chr11 5237245 5237266 5237250 5237245 -
cacttttagaccttatcctggc

SEQ ID NO: 142136 - DNA, 22 bp, Artificial Sequence
  Synthetic oligonucleotide; CTT chr11 5237240 5237261 5237245 5237240 -
ttagaccttatcctggctggat

SEQ ID NO: 142137 - DNA, 22 bp, Artificial Sequence
  Synthetic oligonucleotide; TTT chr11 5237239 5237260 5237244 5237239 -
tagaccttatcctggctggatg

SEQ ID NO: 142138 - DNA, 22 bp, Artificial Sequence
  Synthetic oligonucleotide; TTT chr11 5237238 5237259 5237243 5237238 -
agaccttatcctggctggatgc

SEQ ID NO: 142139 - DNA, 22 bp, Artificial Sequence
  Synthetic oligonucleotide; TTA chr11 5237237 5237258 5237242 5237237 -
gaccttatcctggctggatgcg

SEQ ID NO: 142140 - DNA, 22 bp, Artificial Sequence
  Synthetic oligonucleotide; CTT chr11 5237231 5237252 5237236 5237231 -
atcctggctggatgcggtggct

SEQ ID NO: 142141 - DNA, 22 bp, Artificial Sequence
  Synthetic oligonucleotide; TTA chr11 5237230 5237251 5237235 5237230 -
tcctggctggatgcggtggctc

SEQ ID NO: 142142 - DNA, 22 bp, Artificial Sequence
  Synthetic oligonucleotide; CTG chr11 5237225 5237246 5237230 5237225 -
gctggatgcggtggctcaggct

SEQ ID NO: 142143 - DNA, 22 bp, Artificial Sequence
  Synthetic oligonucleotide; CTG chr11 5237221 5237242 5237226 5237221 -
gatgcggtggctcaggcttgta

SEQ ID NO: 142144 - DNA, 22 bp, Artificial Sequence
  Synthetic oligonucleotide; CTC chr11 5237208 5237229 5237213 5237208 -
aggcttgtaaacccagcacttt

SEQ ID NO: 142145 - DNA, 22 bp, Artificial Sequence
  Synthetic oligonucleotide; CTT chr11 5237202 5237223 5237207 5237202 -
gtaaacccagcactttgggagg

SEQ ID NO: 142146 - DNA, 22 bp, Artificial Sequence
  Synthetic oligonucleotide; TTG chr11 5237201 5237222 5237206 5237201 -
taaacccagcactttgggaggc

SEQ ID NO: 142147 - DNA, 22 bp, Artificial Sequence
  Synthetic oligonucleotide; CTT chr11 5237187 5237208 5237192 5237187 -
tgggaggccaaggcaggcagat

SEQ ID NO: 142148 - DNA, 22 bp, Artificial Sequence
  Synthetic oligonucleotide; TTT chr11 5237186 5237207 5237191 5237186 -
gggaggccaaggcaggcagatc

SEQ ID NO: 142149 - DNA, 22 bp, Artificial Sequence
  Synthetic oligonucleotide; TTG chr11 5237185 5237206 5237190 5237185 -
ggaggccaaggcaggcagatca

SEQ ID NO: 142150 - DNA, 22 bp, Artificial Sequence
  Synthetic oligonucleotide; CTT chr11 5237160 5237181 5237165 5237160 -
gaggtcaggagttcaagaccag

SEQ ID NO: 142151 - DNA, 22 bp, Artificial Sequence
  Synthetic oligonucleotide; TTG chr11 5237159 5237180 5237164 5237159 -
aggtcaggagttcaagaccagc

SEQ ID NO: 142152 - DNA, 22 bp, Artificial Sequence
  Synthetic oligonucleotide; TTC chr11 5237146 5237167 5237151 5237146 -
aagaccagcctgaccaacatgg

SEQ ID NO: 142153 - DNA, 22 bp, Artificial Sequence
  Synthetic oligonucleotide; CTG chr11 5237134 5237155 5237139 5237134 -
accaacatggtgaaaccccatc

SEQ ID NO: 142154 - DNA, 22 bp, Artificial Sequence
  Synthetic oligonucleotide; CTC chr11 5237110 5237131 5237115 5237110 -
tactaaaaatacaaaatcagcc

SEQ ID NO: 142155 - DNA, 22 bp, Artificial Sequence
  Synthetic oligonucleotide; CTA chr11 5237108 5237129 5237113 5237108 -
ctaaaaatacaaaatcagccgg

SEQ ID NO: 142156 - DNA, 22 bp, Artificial Sequence
  Synthetic oligonucleotide; CTA chr11 5237105 5237126 5237110 5237105 -
aaaatacaaaatcagccgggcg

SEQ ID NO: 142157 - DNA, 22 bp, Artificial Sequence
  Synthetic oligonucleotide; CTG chr11 5237068 5237089 5237073 5237068 -
cagtcccagctattcaggtggc

SEQ ID NO: 142158 - DNA, 22 bp, Artificial Sequence
  Synthetic oligonucleotide; CTA chr11 5237056 5237077 5237061 5237056 -
ttcaggtggctgaggcaggaga

SEQ ID NO: 142159 - DNA, 22 bp, Artificial Sequence
  Synthetic oligonucleotide; TTC chr11 5237053 5237074 5237058 5237053 -
aggtggctgaggcaggagaatt

SEQ ID NO: 142160 - DNA, 22 bp, Artificial Sequence
  Synthetic oligonucleotide; CTG chr11 5237044 5237065 5237049 5237044 -
aggcaggagaattgcttgaacc

SEQ ID NO: 142161 - DNA, 22 bp, Artificial Sequence
  Synthetic oligonucleotide; TTG chr11 5237030 5237051 5237035 5237030 -
cttgaacccaggaggcagaggt

SEQ ID NO: 142162 - DNA, 22 bp, Artificial Sequence
  Synthetic oligonucleotide; CTT chr11 5237027 5237048 5237032 5237027 -
gaacccaggaggcagaggttgc

SEQ ID NO: 142163 - DNA, 22 bp, Artificial Sequence
  Synthetic oligonucleotide; TTG chr11 5237026 5237047 5237031 5237026 -
aacccaggaggcagaggttgcg

SEQ ID NO: 142164 - DNA, 22 bp, Artificial Sequence
  Synthetic oligonucleotide; TTG chr11 5237006 5237027 5237011 5237006 -
cggtgagcctagattgcaccat

SEQ ID NO: 142165 - DNA, 22 bp, Artificial Sequence
  Synthetic oligonucleotide; CTA chr11 5236995 5237016 5237000 5236995 -
gattgcaccattgcactctagc

SEQ ID NO: 142166 - DNA, 22 bp, Artificial Sequence
  Synthetic oligonucleotide; TTG chr11 5236990 5237011 5236995 5236990 -
caccattgcactctagcttggg

SEQ ID NO: 142167 - DNA, 22 bp, Artificial Sequence
  Synthetic oligonucleotide; TTG chr11 5236982 5237003 5236987 5236982 -
cactctagcttgggcaataggg

SEQ ID NO: 142168 - DNA, 22 bp, Artificial Sequence
  Synthetic oligonucleotide; CTC chr11 5236977 5236998 5236982 5236977 -
tagcttgggcaatagggatgaa

SEQ ID NO: 142169 - DNA, 22 bp, Artificial Sequence
  Synthetic oligonucleotide; CTA chr11 5236975 5236996 5236980 5236975 -
gcttgggcaatagggatgaaac

SEQ ID NO: 142170 - DNA, 22 bp, Artificial Sequence
  Synthetic oligonucleotide; CTT chr11 5236971 5236992 5236976 5236971 -
gggcaatagggatgaaactcca

SEQ ID NO: 142171 - DNA, 22 bp, Artificial Sequence
  Synthetic oligonucleotide; TTG chr11 5236970 5236991 5236975 5236970 -
ggcaatagggatgaaactccat

SEQ ID NO: 142172 - DNA, 22 bp, Artificial Sequence
  Synthetic oligonucleotide; CTC chr11 5236951 5236972 5236956 5236951 -
catctcagaagagaaaagaaaa

SEQ ID NO: 142173 - DNA, 22 bp, Artificial Sequence
  Synthetic oligonucleotide; CTC chr11 5236945 5236966 5236950 5236945 -
agaagagaaaagaaaaaaagac

SEQ ID NO: 142174 - DNA, 22 bp, Artificial Sequence
  Synthetic oligonucleotide; CTT chr11 5236920 5236941 5236925 5236920 -
attctgttatacaaatcctctc

SEQ ID NO: 142175 - DNA, 22 bp, Artificial Sequence
  Synthetic oligonucleotide; TTA chr11 5236919 5236940 5236924 5236919 -
ttctgttatacaaatcctctca

SEQ ID NO: 142176 - DNA, 22 bp, Artificial Sequence
  Synthetic oligonucleotide; TTC chr11 5236916 5236937 5236921 5236916 -
tgttatacaaatcctctcaatg

SEQ ID NO: 142177 - DNA, 22 bp, Artificial Sequence
  Synthetic oligonucleotide; CTG chr11 5236914 5236935 5236919 5236914 -
ttatacaaatcctctcaatgca

SEQ ID NO: 142178 - DNA, 22 bp, Artificial Sequence
  Synthetic oligonucleotide; TTA chr11 5236911 5236932 5236916 5236911 -
tacaaatcctctcaatgcaatc

SEQ ID NO: 142179 - DNA, 22 bp, Artificial Sequence
  Synthetic oligonucleotide; CTC chr11 5236900 5236921 5236905 5236900 -
tcaatgcaatccatatagaata

SEQ ID NO: 142180 - DNA, 22 bp, Artificial Sequence
  Synthetic oligonucleotide; CTC chr11 5236898 5236919 5236903 5236898 -
aatgcaatccatatagaataaa

SEQ ID NO: 142181 - DNA, 22 bp, Artificial Sequence
  Synthetic oligonucleotide; CTC chr11 5236860 5236881 5236865 5236860 -
ccaatgtgtaaaatcatttcag

SEQ ID NO: 142182 - DNA, 22 bp, Artificial Sequence
  Synthetic oligonucleotide; TTT chr11 5236841 5236862 5236846 5236841 -
caggtagaacagaattaaagtg

SEQ ID NO: 142183 - DNA, 22 bp, Artificial Sequence
  Synthetic oligonucleotide; TTC chr11 5236840 5236861 5236845 5236840 -
aggtagaacagaattaaagtga

SEQ ID NO: 142184 - DNA, 22 bp, Artificial Sequence
  Synthetic oligonucleotide; TTA chr11 5236824 5236845 5236829 5236824 -
aagtgaaaagccaagtctttgg

SEQ ID NO: 142185 - DNA, 22 bp, Artificial Sequence
  Synthetic oligonucleotide; CTT chr11 5236805 5236826 5236810 5236805 -
tggaattaacagacaaagatca

SEQ ID NO: 142186 - DNA, 22 bp, Artificial Sequence
  Synthetic oligonucleotide; TTT chr11 5236804 5236825 5236809 5236804 -
ggaattaacagacaaagatcaa

SEQ ID NO: 142187 - DNA, 22 bp, Artificial Sequence
  Synthetic oligonucleotide; TTG chr11 5236803 5236824 5236808 5236803 -
gaattaacagacaaagatcaaa

SEQ ID NO: 142188 - DNA, 22 bp, Artificial Sequence
  Synthetic oligonucleotide; TTA chr11 5236797 5236818 5236802 5236797 -
acagacaaagatcaaataacag

SEQ ID NO: 142189 - DNA, 22 bp, Artificial Sequence
  Synthetic oligonucleotide; CTC chr11 5236770 5236791 5236775 5236770 -
atggccttaagaatttacctaa

SEQ ID NO: 142190 - DNA, 22 bp, Artificial Sequence
  Synthetic oligonucleotide; CTT chr11 5236762 5236783 5236767 5236762 -
aagaatttacctaacatttttt

SEQ ID NO: 142191 - DNA, 22 bp, Artificial Sequence
  Synthetic oligonucleotide; TTA chr11 5236761 5236782 5236766 5236761 -
agaatttacctaacattttttt

SEQ ID NO: 142192 - DNA, 22 bp, Artificial Sequence
  Synthetic oligonucleotide; TTT chr11 5236754 5236775 5236759 5236754 -
acctaacattttttttagaatc

SEQ ID NO: 142193 - DNA, 22 bp, Artificial Sequence
  Synthetic oligonucleotide; TTA chr11 5236753 5236774 5236758 5236753 -
cctaacattttttttagaatca

SEQ ID NO: 142194 - DNA, 22 bp, Artificial Sequence
  Synthetic oligonucleotide; CTA chr11 5236749 5236770 5236754 5236749 -
acattttttttagaatcaattt

SEQ ID NO: 142195 - DNA, 22 bp, Artificial Sequence
  Synthetic oligonucleotide; TTT chr11 5236743 5236764 5236748 5236743 -
tttttagaatcaattttcttat

SEQ ID NO: 142196 - DNA, 22 bp, Artificial Sequence
  Synthetic oligonucleotide; TTT chr11 5236742 5236763 5236747 5236742 -
ttttagaatcaattttcttata

SEQ ID NO: 142197 - DNA, 22 bp, Artificial Sequence
  Synthetic oligonucleotide; TTT chr11 5236741 5236762 5236746 5236741 -
tttagaatcaattttcttatat

SEQ ID NO: 142198 - DNA, 22 bp, Artificial Sequence
  Synthetic oligonucleotide; TTT chr11 5236740 5236761 5236745 5236740 -
ttagaatcaattttcttatata

SEQ ID NO: 142199 - DNA, 22 bp, Artificial Sequence
  Synthetic oligonucleotide; TTT chr11 5236739 5236760 5236744 5236739 -
tagaatcaattttcttatatat

SEQ ID NO: 142200 - DNA, 22 bp, Artificial Sequence
  Synthetic oligonucleotide; TTT chr11 5236738 5236759 5236743 5236738 -
agaatcaattttcttatatatg

SEQ ID NO: 142201 - DNA, 22 bp, Artificial Sequence
  Synthetic oligonucleotide; TTA chr11 5236737 5236758 5236742 5236737 -
gaatcaattttcttatatatga

SEQ ID NO: 142202 - DNA, 22 bp, Artificial Sequence
  Synthetic oligonucleotide; TTT chr11 5236727 5236748 5236732 5236727 -
tcttatatatgaattggaaaca

SEQ ID NO: 142203 - DNA, 22 bp, Artificial Sequence
  Synthetic oligonucleotide; TTT chr11 5236726 5236747 5236731 5236726 -
cttatatatgaattggaaacat

SEQ ID NO: 142204 - DNA, 22 bp, Artificial Sequence
  Synthetic oligonucleotide; TTC chr11 5236725 5236746 5236730 5236725 -
ttatatatgaattggaaacata

SEQ ID NO: 142205 - DNA, 22 bp, Artificial Sequence
  Synthetic oligonucleotide; CTT chr11 5236723 5236744 5236728 5236723 -
atatatgaattggaaacataat

SEQ ID NO: 142206 - DNA, 22 bp, Artificial Sequence
  Synthetic oligonucleotide; TTA chr11 5236722 5236743 5236727 5236722 -
tatatgaattggaaacataatt

SEQ ID NO: 142207 - DNA, 22 bp, Artificial Sequence
  Synthetic oligonucleotide; TTG chr11 5236711 5236732 5236716 5236711 -
gaaacataattcctccctcaca

SEQ ID NO: 142208 - DNA, 22 bp, Artificial Sequence
  Synthetic oligonucleotide; TTC chr11 5236699 5236720 5236704 5236699 -
ctccctcacaaacacattctaa

SEQ ID NO: 142209 - DNA, 22 bp, Artificial Sequence
  Synthetic oligonucleotide; CTC chr11 5236696 5236717 5236701 5236696 -
cctcacaaacacattctaagat

SEQ ID NO: 142210 - DNA, 22 bp, Artificial Sequence
  Synthetic oligonucleotide; CTC chr11 5236692 5236713 5236697 5236692 -
acaaacacattctaagatttta

SEQ ID NO: 142211 - DNA, 22 bp, Artificial Sequence
  Synthetic oligonucleotide; TTC chr11 5236680 5236701 5236685 5236680 -
taagattttaaggagatattga

SEQ ID NO: 142212 - DNA, 22 bp, Artificial Sequence
  Synthetic oligonucleotide; CTA chr11 5236678 5236699 5236683 5236678 -
agattttaaggagatattgatg

SEQ ID NO: 142213 - DNA, 22 bp, Artificial Sequence
  Synthetic oligonucleotide; TTT chr11 5236672 5236693 5236677 5236672 -
taaggagatattgatgaagtac

SEQ ID NO: 142214 - DNA, 22 bp, Artificial Sequence
  Synthetic oligonucleotide; TTT chr11 5236671 5236692 5236676 5236671 -
aaggagatattgatgaagtaca

SEQ ID NO: 142215 - DNA, 22 bp, Artificial Sequence
  Synthetic oligonucleotide; TTA chr11 5236670 5236691 5236675 5236670 -
aggagatattgatgaagtacat

SEQ ID NO: 142216 - DNA, 22 bp, Artificial Sequence
  Synthetic oligonucleotide; TTG chr11 5236659 5236680 5236664 5236659 -
atgaagtacatcatctgtcatt

SEQ ID NO: 142217 - DNA, 22 bp, Artificial Sequence
  Synthetic oligonucleotide; CTG chr11 5236642 5236663 5236647 5236642 -
tcatttttaacaggtagtggta

SEQ ID NO: 142218 - DNA, 22 bp, Artificial Sequence
  Synthetic oligonucleotide; TTT chr11 5236636 5236657 5236641 5236636 -
ttaacaggtagtggtagtgatt

SEQ ID NO: 142219 - DNA, 22 bp, Artificial Sequence
  Synthetic oligonucleotide; TTT chr11 5236635 5236656 5236640 5236635 -
taacaggtagtggtagtgattc

SEQ ID NO: 142220 - DNA, 22 bp, Artificial Sequence
  Synthetic oligonucleotide; TTT chr11 5236634 5236655 5236639 5236634 -
aacaggtagtggtagtgattca

SEQ ID NO: 142221 - DNA, 22 bp, Artificial Sequence
  Synthetic oligonucleotide; TTA chr11 5236633 5236654 5236638 5236633 -
acaggtagtggtagtgattcac

SEQ ID NO: 142222 - DNA, 22 bp, Artificial Sequence
  Synthetic oligonucleotide; TTC chr11 5236613 5236634 5236618 5236613 -
acacagcacattatgatctgtt

SEQ ID NO: 142223 - DNA, 22 bp, Artificial Sequence
  Synthetic oligonucleotide; TTA chr11 5236600 5236621 5236605 5236600 -
tgatctgttcttgtatgttctg

SEQ ID NO: 142224 - DNA, 22 bp, Artificial Sequence
  Synthetic oligonucleotide; CTG chr11 5236593 5236614 5236598 5236593 -
ttcttgtatgttctgttccatt

SEQ ID NO: 142225 - DNA, 22 bp, Artificial Sequence
  Synthetic oligonucleotide; TTC chr11 5236590 5236611 5236595 5236590 -
ttgtatgttctgttccattctg

SEQ ID NO: 142226 - DNA, 22 bp, Artificial Sequence
  Synthetic oligonucleotide; CTT chr11 5236588 5236609 5236593 5236588 -
gtatgttctgttccattctgta

SEQ ID NO: 142227 - DNA, 22 bp, Artificial Sequence
  Synthetic oligonucleotide; TTG chr11 5236587 5236608 5236592 5236587 -
tatgttctgttccattctgtat

SEQ ID NO: 142228 - DNA, 22 bp, Artificial Sequence
  Synthetic oligonucleotide; TTC chr11 5236580 5236601 5236585 5236580 -
tgttccattctgtattcttgac

SEQ ID NO: 142229 - DNA, 22 bp, Artificial Sequence
  Synthetic oligonucleotide; CTG chr11 5236578 5236599 5236583 5236578 -
ttccattctgtattcttgacct

SEQ ID NO: 142230 - DNA, 22 bp, Artificial Sequence
  Synthetic oligonucleotide; TTC chr11 5236575 5236596 5236580 5236575 -
cattctgtattcttgacctggt

SEQ ID NO: 142231 - DNA, 22 bp, Artificial Sequence
  Synthetic oligonucleotide; TTC chr11 5236570 5236591 5236575 5236570 -
tgtattcttgacctggttgtat

SEQ ID NO: 142232 - DNA, 22 bp, Artificial Sequence
  Synthetic oligonucleotide; CTG chr11 5236568 5236589 5236573 5236568 -
tattcttgacctggttgtattc

SEQ ID NO: 142233 - DNA, 22 bp, Artificial Sequence
  Synthetic oligonucleotide; TTC chr11 5236563 5236584 5236568 5236563 -
ttgacctggttgtattctttct

SEQ ID NO: 142234 - DNA, 22 bp, Artificial Sequence
  Synthetic oligonucleotide; CTT chr11 5236561 5236582 5236566 5236561 -
gacctggttgtattctttctga

SEQ ID NO: 142235 - DNA, 22 bp, Artificial Sequence
  Synthetic oligonucleotide; TTG chr11 5236560 5236581 5236565 5236560 -
acctggttgtattctttctgag

SEQ ID NO: 142236 - DNA, 22 bp, Artificial Sequence
  Synthetic oligonucleotide; CTG chr11 5236555 5236576 5236560 5236555 -
gttgtattctttctgagctcca

SEQ ID NO: 142237 - DNA, 22 bp, Artificial Sequence
  Synthetic oligonucleotide; TTG chr11 5236551 5236572 5236556 5236551 -
tattctttctgagctccagatc

SEQ ID NO: 142238 - DNA, 22 bp, Artificial Sequence
  Synthetic oligonucleotide; TTC chr11 5236546 5236567 5236551 5236546 -
tttctgagctccagatccacat

SEQ ID NO: 142239 - DNA, 22 bp, Artificial Sequence
  Synthetic oligonucleotide; CTT chr11 5236544 5236565 5236549 5236544 -
tctgagctccagatccacatat

SEQ ID NO: 142240 - DNA, 22 bp, Artificial Sequence
  Synthetic oligonucleotide; TTT chr11 5236543 5236564 5236548 5236543 -
ctgagctccagatccacatatc

SEQ ID NO: 142241 - DNA, 22 bp, Artificial Sequence
  Synthetic oligonucleotide; TTC chr11 5236542 5236563 5236547 5236542 -
tgagctccagatccacatatct

SEQ ID NO: 142242 - DNA, 22 bp, Artificial Sequence
  Synthetic oligonucleotide; CTG chr11 5236540 5236561 5236545 5236540 -
agctccagatccacatatctaa

SEQ ID NO: 142243 - DNA, 22 bp, Artificial Sequence
  Synthetic oligonucleotide; CTC chr11 5236535 5236556 5236540 5236535 -
cagatccacatatctaagtaca

SEQ ID NO: 142244 - DNA, 22 bp, Artificial Sequence
  Synthetic oligonucleotide; CTA chr11 5236519 5236540 5236524 5236519 -
agtacatctttttgcattttac

SEQ ID NO: 142245 - DNA, 22 bp, Artificial Sequence
  Synthetic oligonucleotide; CTT chr11 5236509 5236530 5236514 5236509 -
tttgcattttacaagagtgcat

SEQ ID NO: 142246 - DNA, 22 bp, Artificial Sequence
  Synthetic oligonucleotide; TTT chr11 5236508 5236529 5236513 5236508 -
ttgcattttacaagagtgcata

SEQ ID NO: 142247 - DNA, 22 bp, Artificial Sequence
  Synthetic oligonucleotide; TTT chr11 5236507 5236528 5236512 5236507 -
tgcattttacaagagtgcatac

SEQ ID NO: 142248 - DNA, 22 bp, Artificial Sequence
  Synthetic oligonucleotide; TTT chr11 5236506 5236527 5236511 5236506 -
gcattttacaagagtgcataca

SEQ ID NO: 142249 - DNA, 22 bp, Artificial Sequence
  Synthetic oligonucleotide; TTG chr11 5236505 5236526 5236510 5236505 -
cattttacaagagtgcatacaa

SEQ ID NO: 142250 - DNA, 22 bp, Artificial Sequence
  Synthetic oligonucleotide; TTT chr11 5236500 5236521 5236505 5236500 -
tacaagagtgcatacaatacaa

SEQ ID NO: 142251 - DNA, 22 bp, Artificial Sequence
  Synthetic oligonucleotide; TTT chr11 5236499 5236520 5236504 5236499 -
acaagagtgcatacaatacaat

SEQ ID NO: 142252 - DNA, 22 bp, Artificial Sequence
  Synthetic oligonucleotide; TTA chr11 5236498 5236519 5236503 5236498 -
caagagtgcatacaatacaatg

SEQ ID NO: 142253 - DNA, 22 bp, Artificial Sequence
  Synthetic oligonucleotide; CTG chr11 5236464 5236485 5236469 5236464 -
tatttctgattttatcgtacca

SEQ ID NO: 142254 - DNA, 22 bp, Artificial Sequence
  Synthetic oligonucleotide; TTT chr11 5236459 5236480 5236464 5236459 -
ctgattttatcgtaccactaaa

SEQ ID NO: 142255 - DNA, 22 bp, Artificial Sequence
  Synthetic oligonucleotide; TTC chr11 5236458 5236479 5236463 5236458 -
tgattttatcgtaccactaaac

SEQ ID NO: 142256 - DNA, 22 bp, Artificial Sequence
  Synthetic oligonucleotide; CTG chr11 5236456 5236477 5236461 5236456 -
attttatcgtaccactaaactc

SEQ ID NO: 142257 - DNA, 22 bp, Artificial Sequence
  Synthetic oligonucleotide; TTT chr11 5236452 5236473 5236457 5236452 -
tatcgtaccactaaactcacaa

SEQ ID NO: 142258 - DNA, 22 bp, Artificial Sequence
  Synthetic oligonucleotide; TTT chr11 5236451 5236472 5236456 5236451 -
atcgtaccactaaactcacaaa

SEQ ID NO: 142259 - DNA, 22 bp, Artificial Sequence
  Synthetic oligonucleotide; TTA chr11 5236450 5236471 5236455 5236450 -
tcgtaccactaaactcacaaat

SEQ ID NO: 142260 - DNA, 22 bp, Artificial Sequence
  Synthetic oligonucleotide; CTA chr11 5236439 5236460 5236444 5236439 -
aactcacaaatgtggccctatt

SEQ ID NO: 142261 - DNA, 22 bp, Artificial Sequence
  Synthetic oligonucleotide; CTC chr11 5236434 5236455 5236439 5236434 -
acaaatgtggccctattcttgt

SEQ ID NO: 142262 - DNA, 22 bp, Artificial Sequence
  Synthetic oligonucleotide; CTA chr11 5236419 5236440 5236424 5236419 -
ttcttgtgttcacgactgacat

SEQ ID NO: 142263 - DNA, 22 bp, Artificial Sequence
  Synthetic oligonucleotide; TTC chr11 5236416 5236437 5236421 5236416 -
ttgtgttcacgactgacatcac

SEQ ID NO: 142264 - DNA, 22 bp, Artificial Sequence
  Synthetic oligonucleotide; CTT chr11 5236414 5236435 5236419 5236414 -
gtgttcacgactgacatcaccg

SEQ ID NO: 142265 - DNA, 22 bp, Artificial Sequence
  Synthetic oligonucleotide; TTG chr11 5236413 5236434 5236418 5236413 -
tgttcacgactgacatcaccgt

SEQ ID NO: 142266 - DNA, 22 bp, Artificial Sequence
  Synthetic oligonucleotide; TTC chr11 5236408 5236429 5236413 5236408 -
acgactgacatcaccgtcatgg

SEQ ID NO: 142267 - DNA, 22 bp, Artificial Sequence
  Synthetic oligonucleotide; CTG chr11 5236401 5236422 5236406 5236401 -
acatcaccgtcatggtccaagt

SEQ ID NO: 142268 - DNA, 22 bp, Artificial Sequence
  Synthetic oligonucleotide; CTG chr11 5236376 5236397 5236381 5236376 -
ataatagaaatggcattgtcac

SEQ ID NO: 142269 - DNA, 22 bp, Artificial Sequence
  Synthetic oligonucleotide; TTG chr11 5236358 5236379 5236363 5236358 -
tcactttcttccctactgcaac

SEQ ID NO: 142270 - DNA, 22 bp, Artificial Sequence
  Synthetic oligonucleotide; CTT chr11 5236352 5236373 5236357 5236352 -
tcttccctactgcaacagaagc

SEQ ID NO: 142271 - DNA, 22 bp, Artificial Sequence
  Synthetic oligonucleotide; TTT chr11 5236351 5236372 5236356 5236351 -
cttccctactgcaacagaagcc

SEQ ID NO: 142272 - DNA, 22 bp, Artificial Sequence
  Synthetic oligonucleotide; TTC chr11 5236350 5236371 5236355 5236350 -
ttccctactgcaacagaagccc

SEQ ID NO: 142273 - DNA, 22 bp, Artificial Sequence
  Synthetic oligonucleotide; CTT chr11 5236348 5236369 5236353 5236348 -
ccctactgcaacagaagcccag

SEQ ID NO: 142274 - DNA, 22 bp, Artificial Sequence
  Synthetic oligonucleotide; TTC chr11 5236347 5236368 5236352 5236347 -
cctactgcaacagaagcccagc

SEQ ID NO: 142275 - DNA, 22 bp, Artificial Sequence
  Synthetic oligonucleotide; CTA chr11 5236343 5236364 5236348 5236343 -
ctgcaacagaagcccagctatt

SEQ ID NO: 142276 - DNA, 22 bp, Artificial Sequence
  Synthetic oligonucleotide; CTG chr11 5236340 5236361 5236345 5236340 -
caacagaagcccagctatttgt

SEQ ID NO: 142277 - DNA, 22 bp, Artificial Sequence
  Synthetic oligonucleotide; CTA chr11 5236323 5236344 5236328 5236323 -
tttgtctcccattttctctact

SEQ ID NO: 142278 - DNA, 22 bp, Artificial Sequence
  Synthetic oligonucleotide; TTT chr11 5236320 5236341 5236325 5236320 -
gtctcccattttctctacttct

SEQ ID NO: 142279 - DNA, 22 bp, Artificial Sequence
  Synthetic oligonucleotide; TTG chr11 5236319 5236340 5236324 5236319 -
tctcccattttctctacttcta

SEQ ID NO: 142280 - DNA, 22 bp, Artificial Sequence
  Synthetic oligonucleotide; CTC chr11 5236315 5236336 5236320 5236315 -
ccattttctctacttctaaaat

SEQ ID NO: 142281 - DNA, 22 bp, Artificial Sequence
  Synthetic oligonucleotide; TTT chr11 5236309 5236330 5236314 5236309 -
tctctacttctaaaatacattt

SEQ ID NO: 142282 - DNA, 22 bp, Artificial Sequence
  Synthetic oligonucleotide; TTT chr11 5236308 5236329 5236313 5236308 -
ctctacttctaaaatacatttc

SEQ ID NO: 142283 - DNA, 22 bp, Artificial Sequence
  Synthetic oligonucleotide; TTC chr11 5236307 5236328 5236312 5236307 -
tctacttctaaaatacatttct

SEQ ID NO: 142284 - DNA, 22 bp, Artificial Sequence
  Synthetic oligonucleotide; CTC chr11 5236305 5236326 5236310 5236305 -
tacttctaaaatacatttcttc

SEQ ID NO: 142285 - DNA, 22 bp, Artificial Sequence
  Synthetic oligonucleotide; CTA chr11 5236303 5236324 5236308 5236303 -
cttctaaaatacatttcttcac

SEQ ID NO: 142286 - DNA, 22 bp, Artificial Sequence
  Synthetic oligonucleotide; CTT chr11 5236300 5236321 5236305 5236300 -
ctaaaatacatttcttcactaa

SEQ ID NO: 142287 - DNA, 22 bp, Artificial Sequence
  Synthetic oligonucleotide; TTC chr11 5236299 5236320 5236304 5236299 -
taaaatacatttcttcactaag

SEQ ID NO: 142288 - DNA, 22 bp, Artificial Sequence
  Synthetic oligonucleotide; CTA chr11 5236297 5236318 5236302 5236297 -
aaatacatttcttcactaagtg

SEQ ID NO: 142289 - DNA, 22 bp, Artificial Sequence
  Synthetic oligonucleotide; TTT chr11 5236287 5236308 5236292 5236287 -
cttcactaagtgagaataatct

SEQ ID NO: 142290 - DNA, 22 bp, Artificial Sequence
  Synthetic oligonucleotide; TTC chr11 5236286 5236307 5236291 5236286 -
ttcactaagtgagaataatctt

SEQ ID NO: 142291 - DNA, 22 bp, Artificial Sequence
  Synthetic oligonucleotide; CTT chr11 5236284 5236305 5236289 5236284 -
cactaagtgagaataatctttt

SEQ ID NO: 142292 - DNA, 22 bp, Artificial Sequence
  Synthetic oligonucleotide; TTC chr11 5236283 5236304 5236288 5236283 -
actaagtgagaataatctttta

SEQ ID NO: 142293 - DNA, 22 bp, Artificial Sequence
  Synthetic oligonucleotide; CTA chr11 5236279 5236300 5236284 5236279 -
agtgagaataatcttttaaaga

SEQ ID NO: 142294 - DNA, 22 bp, Artificial Sequence
  Synthetic oligonucleotide; CTT chr11 5236264 5236285 5236269 5236264 -
ttaaagacacaaatcaaaccat

SEQ ID NO: 142295 - DNA, 22 bp, Artificial Sequence
  Synthetic oligonucleotide; TTT chr11 5236263 5236284 5236268 5236263 -
taaagacacaaatcaaaccatg

SEQ ID NO: 142296 - DNA, 22 bp, Artificial Sequence
  Synthetic oligonucleotide; TTT chr11 5236262 5236283 5236267 5236262 -
aaagacacaaatcaaaccatgc

SEQ ID NO: 142297 - DNA, 22 bp, Artificial Sequence
  Synthetic oligonucleotide; TTA chr11 5236261 5236282 5236266 5236261 -
aagacacaaatcaaaccatgcc

SEQ ID NO: 142298 - DNA, 22 bp, Artificial Sequence
  Synthetic oligonucleotide; CTT chr11 5236231 5236252 5236236 5236231 -
tcttgaattattcaatatcttt

SEQ ID NO: 142299 - DNA, 22 bp, Artificial Sequence
  Synthetic oligonucleotide; TTT chr11 5236230 5236251 5236235 5236230 -
cttgaattattcaatatctttc

SEQ ID NO: 142300 - DNA, 22 bp, Artificial Sequence
  Synthetic oligonucleotide; TTC chr11 5236229 5236250 5236234 5236229 -
ttgaattattcaatatctttcg

SEQ ID NO: 142301 - DNA, 22 bp, Artificial Sequence
  Synthetic oligonucleotide; CTT chr11 5236227 5236248 5236232 5236227 -
gaattattcaatatctttcgtt

SEQ ID NO: 142302 - DNA, 22 bp, Artificial Sequence
  Synthetic oligonucleotide; TTG chr11 5236226 5236247 5236231 5236226 -
aattattcaatatctttcgttg

SEQ ID NO: 142303 - DNA, 22 bp, Artificial Sequence
  Synthetic oligonucleotide; TTA chr11 5236221 5236242 5236226 5236221 -
ttcaatatctttcgttggcttc

SEQ ID NO: 142304 - DNA, 22 bp, Artificial Sequence
  Synthetic oligonucleotide; TTC chr11 5236218 5236239 5236223 5236218 -
aatatctttcgttggcttccag

SEQ ID NO: 142305 - DNA, 22 bp, Artificial Sequence
  Synthetic oligonucleotide; CTT chr11 5236210 5236231 5236215 5236210 -
tcgttggcttccaggttacaga

SEQ ID NO: 142306 - DNA, 22 bp, Artificial Sequence
  Synthetic oligonucleotide; TTT chr11 5236209 5236230 5236214 5236209 -
cgttggcttccaggttacagaa

SEQ ID NO: 142307 - DNA, 22 bp, Artificial Sequence
  Synthetic oligonucleotide; TTC chr11 5236208 5236229 5236213 5236208 -
gttggcttccaggttacagaaa

SEQ ID NO: 142308 - DNA, 22 bp, Artificial Sequence
  Synthetic oligonucleotide; TTG chr11 5236204 5236225 5236209 5236204 -
gcttccaggttacagaaaaata

SEQ ID NO: 142309 - DNA, 22 bp, Artificial Sequence
  Synthetic oligonucleotide; CTT chr11 5236200 5236221 5236205 5236200 -
ccaggttacagaaaaataactt

SEQ ID NO: 142310 - DNA, 22 bp, Artificial Sequence
  Synthetic oligonucleotide; TTC chr11 5236199 5236220 5236204 5236199 -
caggttacagaaaaataacttg

SEQ ID NO: 142311 - DNA, 22 bp, Artificial Sequence
  Synthetic oligonucleotide; TTA chr11 5236192 5236213 5236197 5236192 -
cagaaaaataacttgtaacaaa

SEQ ID NO: 142312 - DNA, 22 bp, Artificial Sequence
  Synthetic oligonucleotide; CTT chr11 5236178 5236199 5236183 5236178 -
gtaacaaagtttaaaggtcatt

SEQ ID NO: 142313 - DNA, 22 bp, Artificial Sequence
  Synthetic oligonucleotide; TTG chr11 5236177 5236198 5236182 5236177 -
taacaaagtttaaaggtcattc

SEQ ID NO: 142314 - DNA, 22 bp, Artificial Sequence
  Synthetic oligonucleotide; TTT chr11 5236166 5236187 5236171 5236166 -
aaaggtcattcatggctcctct

SEQ ID NO: 142315 - DNA, 22 bp, Artificial Sequence
  Synthetic oligonucleotide; TTA chr11 5236165 5236186 5236170 5236165 -
aaggtcattcatggctcctctc

SEQ ID NO: 142316 - DNA, 22 bp, Artificial Sequence
  Synthetic oligonucleotide; TTC chr11 5236155 5236176 5236160 5236155 -
atggctcctctctaccctattt

SEQ ID NO: 142317 - DNA, 22 bp, Artificial Sequence
  Synthetic oligonucleotide; CTC chr11 5236148 5236169 5236153 5236148 -
ctctctaccctattttataaca

SEQ ID NO: 142318 - DNA, 22 bp, Artificial Sequence
  Synthetic oligonucleotide; CTC chr11 5236145 5236166 5236150 5236145 -
tctaccctattttataacattt

SEQ ID NO: 142319 - DNA, 22 bp, Artificial Sequence
  Synthetic oligonucleotide; CTC chr11 5236143 5236164 5236148 5236143 -
taccctattttataacatttcc

SEQ ID NO: 142320 - DNA, 22 bp, Artificial Sequence
  Synthetic oligonucleotide; CTA chr11 5236141 5236162 5236146 5236141 -
ccctattttataacatttcccc

SEQ ID NO: 142321 - DNA, 22 bp, Artificial Sequence
  Synthetic oligonucleotide; CTA chr11 5236136 5236157 5236141 5236136 -
ttttataacatttccccttgtg

SEQ ID NO: 142322 - DNA, 22 bp, Artificial Sequence
  Synthetic oligonucleotide; TTT chr11 5236133 5236154 5236138 5236133 -
tataacatttccccttgtgatc

SEQ ID NO: 142323 - DNA, 22 bp, Artificial Sequence
  Synthetic oligonucleotide; TTT chr11 5236132 5236153 5236137 5236132 -
ataacatttccccttgtgatca

SEQ ID NO: 142324 - DNA, 22 bp, Artificial Sequence
  Synthetic oligonucleotide; TTA chr11 5236131 5236152 5236136 5236131 -
taacatttccccttgtgatcag

SEQ ID NO: 142325 - DNA, 22 bp, Artificial Sequence
  Synthetic oligonucleotide; TTT chr11 5236123 5236144 5236128 5236123 -
ccccttgtgatcagaatctcag

SEQ ID NO: 142326 - DNA, 22 bp, Artificial Sequence
  Synthetic oligonucleotide; TTC chr11 5236122 5236143 5236127 5236122 -
cccttgtgatcagaatctcagg

SEQ ID NO: 142327 - DNA, 22 bp, Artificial Sequence
  Synthetic oligonucleotide; CTT chr11 5236117 5236138 5236122 5236117 -
gtgatcagaatctcaggcacat

SEQ ID NO: 142328 - DNA, 22 bp, Artificial Sequence
  Synthetic oligonucleotide; TTG chr11 5236116 5236137 5236121 5236116 -
tgatcagaatctcaggcacatc

SEQ ID NO: 142329 - DNA, 22 bp, Artificial Sequence
  Synthetic oligonucleotide; CTC chr11 5236103 5236124 5236108 5236103 -
aggcacatcatccatctttcta

SEQ ID NO: 142330 - DNA, 22 bp, Artificial Sequence
  Synthetic oligonucleotide; CTT chr11 5236085 5236106 5236090 5236085 -
tctatatacaaataaagtcata

SEQ ID NO: 142331 - DNA, 22 bp, Artificial Sequence
  Synthetic oligonucleotide; TTT chr11 5236084 5236105 5236089 5236084 -
ctatatacaaataaagtcatat

SEQ ID NO: 142332 - DNA, 22 bp, Artificial Sequence
  Synthetic oligonucleotide; TTC chr11 5236083 5236104 5236088 5236083 -
tatatacaaataaagtcatata

SEQ ID NO: 142333 - DNA, 22 bp, Artificial Sequence
  Synthetic oligonucleotide; CTA chr11 5236081 5236102 5236086 5236081 -
tatacaaataaagtcatatagt

SEQ ID NO: 142334 - DNA, 22 bp, Artificial Sequence
  Synthetic oligonucleotide; TTT chr11 5236057 5236078 5236062 5236057 -
gaactcacctctggttactttt

SEQ ID NO: 142335 - DNA, 22 bp, Artificial Sequence
  Synthetic oligonucleotide; TTG chr11 5236056 5236077 5236061 5236056 -
aactcacctctggttactttta

SEQ ID NO: 142336 - DNA, 22 bp, Artificial Sequence
  Synthetic oligonucleotide; CTC chr11 5236051 5236072 5236056 5236051 -
acctctggttacttttaatcaa

SEQ ID NO: 142337 - DNA, 22 bp, Artificial Sequence
  Synthetic oligonucleotide; CTC chr11 5236046 5236067 5236051 5236046 -
tggttacttttaatcaaccaaa

SEQ ID NO: 142338 - DNA, 22 bp, Artificial Sequence
  Synthetic oligonucleotide; CTG chr11 5236044 5236065 5236049 5236044 -
gttacttttaatcaaccaaatg

SEQ ID NO: 142339 - DNA, 22 bp, Artificial Sequence
  Synthetic oligonucleotide; TTA chr11 5236040 5236061 5236045 5236040 -
cttttaatcaaccaaatgctgt

SEQ ID NO: 142340 - DNA, 22 bp, Artificial Sequence
  Synthetic oligonucleotide; CTT chr11 5236037 5236058 5236042 5236037 -
ttaatcaaccaaatgctgtaaa

SEQ ID NO: 142341 - DNA, 22 bp, Artificial Sequence
  Synthetic oligonucleotide; TTT chr11 5236036 5236057 5236041 5236036 -
taatcaaccaaatgctgtaaaa

SEQ ID NO: 142342 - DNA, 22 bp, Artificial Sequence
  Synthetic oligonucleotide; TTT chr11 5236035 5236056 5236040 5236035 -
aatcaaccaaatgctgtaaaat

SEQ ID NO: 142343 - DNA, 22 bp, Artificial Sequence
  Synthetic oligonucleotide; TTA chr11 5236034 5236055 5236039 5236034 -
atcaaccaaatgctgtaaaatg

SEQ ID NO: 142344 - DNA, 22 bp, Artificial Sequence
  Synthetic oligonucleotide; CTG chr11 5236019 5236040 5236024 5236019 -
taaaatgcatttgtatcgctac

SEQ ID NO: 142345 - DNA, 22 bp, Artificial Sequence
  Synthetic oligonucleotide; TTT chr11 5236007 5236028 5236012 5236007 -
gtatcgctacgtgttaagcagt

SEQ ID NO: 142346 - DNA, 22 bp, Artificial Sequence
  Synthetic oligonucleotide; TTG chr11 5236006 5236027 5236011 5236006 -
tatcgctacgtgttaagcagta

SEQ ID NO: 142347 - DNA, 22 bp, Artificial Sequence
  Synthetic oligonucleotide; CTA chr11 5235998 5236019 5236003 5235998 -
cgtgttaagcagtagttgattc

SEQ ID NO: 142348 - DNA, 22 bp, Artificial Sequence
  Synthetic oligonucleotide; TTA chr11 5235991 5236012 5235996 5235991 -
agcagtagttgattcttttcat

SEQ ID NO: 142349 - DNA, 22 bp, Artificial Sequence
  Synthetic oligonucleotide; TTG chr11 5235980 5236001 5235985 5235980 -
attcttttcatttctgtgtaat

SEQ ID NO: 142350 - DNA, 22 bp, Artificial Sequence
  Synthetic oligonucleotide; TTC chr11 5235976 5235997 5235981 5235976 -
ttttcatttctgtgtaatattc

SEQ ID NO: 142351 - DNA, 22 bp, Artificial Sequence
  Synthetic oligonucleotide; CTT chr11 5235974 5235995 5235979 5235974 -
ttcatttctgtgtaatattcta

SEQ ID NO: 142352 - DNA, 22 bp, Artificial Sequence
  Synthetic oligonucleotide; TTT chr11 5235973 5235994 5235978 5235973 -
tcatttctgtgtaatattctat

SEQ ID NO: 142353 - DNA, 22 bp, Artificial Sequence
  Synthetic oligonucleotide; TTT chr11 5235972 5235993 5235977 5235972 -
catttctgtgtaatattctatt

SEQ ID NO: 142354 - DNA, 22 bp, Artificial Sequence
  Synthetic oligonucleotide; TTC chr11 5235971 5235992 5235976 5235971 -
atttctgtgtaatattctattc

SEQ ID NO: 142355 - DNA, 22 bp, Artificial Sequence
  Synthetic oligonucleotide; TTT chr11 5235967 5235988 5235972 5235967 -
ctgtgtaatattctattctttg

SEQ ID NO: 142356 - DNA, 22 bp, Artificial Sequence
  Synthetic oligonucleotide; TTC chr11 5235966 5235987 5235971 5235966 -
tgtgtaatattctattctttga

SEQ ID NO: 142357 - DNA, 22 bp, Artificial Sequence
  Synthetic oligonucleotide; CTG chr11 5235964 5235985 5235969 5235964 -
tgtaatattctattctttgact

SEQ ID NO: 142358 - DNA, 22 bp, Artificial Sequence
  Synthetic oligonucleotide; TTC chr11 5235954 5235975 5235959 5235954 -
tattctttgactataccgtaat

SEQ ID NO: 142359 - DNA, 22 bp, Artificial Sequence
  Synthetic oligonucleotide; CTA chr11 5235952 5235973 5235957 5235952 -
ttctttgactataccgtaattt

SEQ ID NO: 142360 - DNA, 22 bp, Artificial Sequence
  Synthetic oligonucleotide; TTC chr11 5235949 5235970 5235954 5235949 -
tttgactataccgtaatttatc

SEQ ID NO: 142361 - DNA, 22 bp, Artificial Sequence
  Synthetic oligonucleotide; CTT chr11 5235947 5235968 5235952 5235947 -
tgactataccgtaatttatcaa

SEQ ID NO: 142362 - DNA, 22 bp, Artificial Sequence
  Synthetic oligonucleotide; TTT chr11 5235946 5235967 5235951 5235946 -
gactataccgtaatttatcaat

SEQ ID NO: 142363 - DNA, 22 bp, Artificial Sequence
  Synthetic oligonucleotide; TTG chr11 5235945 5235966 5235950 5235945 -
actataccgtaatttatcaatt

SEQ ID NO: 142364 - DNA, 22 bp, Artificial Sequence
  Synthetic oligonucleotide; CTA chr11 5235941 5235962 5235946 5235941 -
taccgtaatttatcaattctac

SEQ ID NO: 142365 - DNA, 22 bp, Artificial Sequence
  Synthetic oligonucleotide; TTT chr11 5235930 5235951 5235935 5235930 -
atcaattctactgttggtaagc

SEQ ID NO: 142366 - DNA, 22 bp, Artificial Sequence
  Synthetic oligonucleotide; TTA chr11 5235929 5235950 5235934 5235929 -
tcaattctactgttggtaagca

SEQ ID NO: 142367 - DNA, 22 bp, Artificial Sequence
  Synthetic oligonucleotide; TTC chr11 5235922 5235943 5235927 5235922 -
tactgttggtaagcatttaagt

SEQ ID NO: 142368 - DNA, 22 bp, Artificial Sequence
  Synthetic oligonucleotide; CTA chr11 5235920 5235941 5235925 5235920 -
ctgttggtaagcatttaagtgg

SEQ ID NO: 142369 - DNA, 22 bp, Artificial Sequence
  Synthetic oligonucleotide; CTG chr11 5235917 5235938 5235922 5235917 -
ttggtaagcatttaagtggcta

SEQ ID NO: 142370 - DNA, 22 bp, Artificial Sequence
  Synthetic oligonucleotide; TTG chr11 5235914 5235935 5235919 5235914 -
gtaagcatttaagtggctaccg

SEQ ID NO: 142371 - DNA, 22 bp, Artificial Sequence
  Synthetic oligonucleotide; TTT chr11 5235904 5235925 5235909 5235904 -
aagtggctaccggtttgaggtt

SEQ ID NO: 142372 - DNA, 22 bp, Artificial Sequence
  Synthetic oligonucleotide; TTA chr11 5235903 5235924 5235908 5235903 -
agtggctaccggtttgaggttt

SEQ ID NO: 142373 - DNA, 22 bp, Artificial Sequence
  Synthetic oligonucleotide; CTA chr11 5235895 5235916 5235900 5235895 -
ccggtttgaggtttttatgatt

SEQ ID NO: 142374 - DNA, 22 bp, Artificial Sequence
  Synthetic oligonucleotide; TTT chr11 5235888 5235909 5235893 5235888 -
gaggtttttatgattattgctg

SEQ ID NO: 142375 - DNA, 22 bp, Artificial Sequence
  Synthetic oligonucleotide; TTG chr11 5235887 5235908 5235892 5235887 -
aggtttttatgattattgctgt

SEQ ID NO: 142376 - DNA, 22 bp, Artificial Sequence
  Synthetic oligonucleotide; TTT chr11 5235881 5235902 5235886 5235881 -
ttatgattattgctgtcataag

SEQ ID NO: 142377 - DNA, 22 bp, Artificial Sequence
  Synthetic oligonucleotide; TTT chr11 5235880 5235901 5235885 5235880 -
tatgattattgctgtcataagc

SEQ ID NO: 142378 - DNA, 22 bp, Artificial Sequence
  Synthetic oligonucleotide; TTT chr11 5235879 5235900 5235884 5235879 -
atgattattgctgtcataagca

SEQ ID NO: 142379 - DNA, 22 bp, Artificial Sequence
  Synthetic oligonucleotide; TTA chr11 5235878 5235899 5235883 5235878 -
tgattattgctgtcataagcat

SEQ ID NO: 142380 - DNA, 22 bp, Artificial Sequence
  Synthetic oligonucleotide; TTA chr11 5235872 5235893 5235877 5235872 -
ttgctgtcataagcatttctat

SEQ ID NO: 142381 - DNA, 22 bp, Artificial Sequence
  Synthetic oligonucleotide; TTG chr11 5235869 5235890 5235874 5235869 -
ctgtcataagcatttctataca

SEQ ID NO: 142382 - DNA, 22 bp, Artificial Sequence
  Synthetic oligonucleotide; CTG chr11 5235866 5235887 5235871 5235866 -
tcataagcatttctatacatgt

SEQ ID NO: 142383 - DNA, 22 bp, Artificial Sequence
  Synthetic oligonucleotide; TTT chr11 5235854 5235875 5235859 5235854 -
ctatacatgtctttggatacac

SEQ ID NO: 142384 - DNA, 22 bp, Artificial Sequence
  Synthetic oligonucleotide; TTC chr11 5235853 5235874 5235858 5235853 -
tatacatgtctttggatacaca

SEQ ID NO: 142385 - DNA, 22 bp, Artificial Sequence
  Synthetic oligonucleotide; CTA chr11 5235851 5235872 5235856 5235851 -
tacatgtctttggatacacaca

SEQ ID NO: 142386 - DNA, 22 bp, Artificial Sequence
  Synthetic oligonucleotide; CTT chr11 5235841 5235862 5235846 5235841 -
tggatacacacatgcatgtgtt

SEQ ID NO: 142387 - DNA, 22 bp, Artificial Sequence
  Synthetic oligonucleotide; TTT chr11 5235840 5235861 5235845 5235840 -
ggatacacacatgcatgtgttt

SEQ ID NO: 142388 - DNA, 22 bp, Artificial Sequence
  Synthetic oligonucleotide; TTG chr11 5235839 5235860 5235844 5235839 -
gatacacacatgcatgtgtttc

SEQ ID NO: 142389 - DNA, 22 bp, Artificial Sequence
  Synthetic oligonucleotide; TTT chr11 5235818 5235839 5235823 5235818 -
ctgaatatctaaaaatgtaatt

SEQ ID NO: 142390 - DNA, 22 bp, Artificial Sequence
  Synthetic oligonucleotide; TTC chr11 5235817 5235838 5235822 5235817 -
tgaatatctaaaaatgtaattg

SEQ ID NO: 142391 - DNA, 22 bp, Artificial Sequence
  Synthetic oligonucleotide; CTG chr11 5235815 5235836 5235820 5235815 -
aatatctaaaaatgtaattgct

SEQ ID NO: 142392 - DNA, 22 bp, Artificial Sequence
  Synthetic oligonucleotide; CTA chr11 5235807 5235828 5235812 5235807 -
aaaatgtaattgctaggtaata

SEQ ID NO: 142393 - DNA, 22 bp, Artificial Sequence
  Synthetic oligonucleotide; TTG chr11 5235795 5235816 5235800 5235795 -
ctaggtaatagacttatcaagc

SEQ ID NO: 142394 - DNA, 22 bp, Artificial Sequence
  Synthetic oligonucleotide; CTA chr11 5235792 5235813 5235797 5235792 -
ggtaatagacttatcaagcatc

SEQ ID NO: 142395 - DNA, 22 bp, Artificial Sequence
  Synthetic oligonucleotide; CTT chr11 5235780 5235801 5235785 5235780 -
atcaagcatccagcatttgtgg

SEQ ID NO: 142396 - DNA, 22 bp, Artificial Sequence
  Synthetic oligonucleotide; TTA chr11 5235779 5235800 5235784 5235779 -
tcaagcatccagcatttgtgga

SEQ ID NO: 142397 - DNA, 22 bp, Artificial Sequence
  Synthetic oligonucleotide; TTT chr11 5235762 5235783 5235767 5235762 -
gtggatactattaaaggttttc

SEQ ID NO: 142398 - DNA, 22 bp, Artificial Sequence
  Synthetic oligonucleotide; TTG chr11 5235761 5235782 5235766 5235761 -
tggatactattaaaggttttcc

SEQ ID NO: 142399 - DNA, 22 bp, Artificial Sequence
  Synthetic oligonucleotide; CTA chr11 5235752 5235773 5235757 5235752 -
ttaaaggttttccaaaggggtt

SEQ ID NO: 142400 - DNA, 22 bp, Artificial Sequence
  Synthetic oligonucleotide; TTA chr11 5235749 5235770 5235754 5235749 -
aaggttttccaaaggggttata

SEQ ID NO: 142401 - DNA, 22 bp, Artificial Sequence
  Synthetic oligonucleotide; TTT chr11 5235742 5235763 5235747 5235742 -
tccaaaggggttatactattgt

SEQ ID NO: 142402 - DNA, 22 bp, Artificial Sequence
  Synthetic oligonucleotide; TTT chr11 5235741 5235762 5235746 5235741 -
ccaaaggggttatactattgta

SEQ ID NO: 142403 - DNA, 22 bp, Artificial Sequence
  Synthetic oligonucleotide; TTC chr11 5235740 5235761 5235745 5235740 -
caaaggggttatactattgtac

SEQ ID NO: 142404 - DNA, 22 bp, Artificial Sequence
  Synthetic oligonucleotide; TTA chr11 5235729 5235750 5235734 5235729 -
tactattgtacagtgtcaccaa

SEQ ID NO: 142405 - DNA, 22 bp, Artificial Sequence
  Synthetic oligonucleotide; CTA chr11 5235724 5235745 5235729 5235724 -
ttgtacagtgtcaccaacagag

SEQ ID NO: 142406 - DNA, 22 bp, Artificial Sequence
  Synthetic oligonucleotide; TTG chr11 5235721 5235742 5235726 5235721 -
tacagtgtcaccaacagagttt

SEQ ID NO: 142407 - DNA, 22 bp, Artificial Sequence
  Synthetic oligonucleotide; TTT chr11 5235699 5235720 5235704 5235699 -
gagtttctattgatccatatca

SEQ ID NO: 142408 - DNA, 22 bp, Artificial Sequence
  Synthetic oligonucleotide; TTG chr11 5235698 5235719 5235703 5235698 -
agtttctattgatccatatcac

SEQ ID NO: 142409 - DNA, 22 bp, Artificial Sequence
  Synthetic oligonucleotide; TTT chr11 5235693 5235714 5235698 5235693 -
ctattgatccatatcaccacca

SEQ ID NO: 142410 - DNA, 22 bp, Artificial Sequence
  Synthetic oligonucleotide; TTC chr11 5235692 5235713 5235697 5235692 -
tattgatccatatcaccaccaa

SEQ ID NO: 142411 - DNA, 22 bp, Artificial Sequence
  Synthetic oligonucleotide; CTA chr11 5235690 5235711 5235695 5235690 -
ttgatccatatcaccaccaaaa

SEQ ID NO: 142412 - DNA, 22 bp, Artificial Sequence
  Synthetic oligonucleotide; TTG chr11 5235687 5235708 5235692 5235687 -
atccatatcaccaccaaaattt

SEQ ID NO: 142413 - DNA, 22 bp, Artificial Sequence
  Synthetic oligonucleotide; TTT chr11 5235665 5235686 5235670 5235665 -
gaactgtcagtcttatctcttc

SEQ ID NO: 142414 - DNA, 22 bp, Artificial Sequence
  Synthetic oligonucleotide; TTG chr11 5235664 5235685 5235669 5235664 -
aactgtcagtcttatctcttct

SEQ ID NO: 142415 - DNA, 22 bp, Artificial Sequence
  Synthetic oligonucleotide; CTG chr11 5235659 5235680 5235664 5235659 -
tcagtcttatctcttctcttgt

SEQ ID NO: 142416 - DNA, 22 bp, Artificial Sequence
  Synthetic oligonucleotide; CTT chr11 5235651 5235672 5235656 5235651 -
atctcttctcttgtctcttttt

SEQ ID NO: 142417 - DNA, 22 bp, Artificial Sequence
  Synthetic oligonucleotide; TTA chr11 5235650 5235671 5235655 5235650 -
tctcttctcttgtctctttttt

SEQ ID NO: 142418 - DNA, 22 bp, Artificial Sequence
  Synthetic oligonucleotide; CTC chr11 5235646 5235667 5235651 5235646 -
ttctcttgtctcttttttcctc

SEQ ID NO: 142419 - DNA, 22 bp, Artificial Sequence
  Synthetic oligonucleotide; CTT chr11 5235644 5235665 5235649 5235644 -
ctcttgtctcttttttcctctt

SEQ ID NO: 142420 - DNA, 22 bp, Artificial Sequence
  Synthetic oligonucleotide; TTC chr11 5235643 5235664 5235648 5235643 -
tcttgtctcttttttcctcttt

SEQ ID NO: 142421 - DNA, 22 bp, Artificial Sequence
  Synthetic oligonucleotide; CTC chr11 5235641 5235662 5235646 5235641 -
ttgtctcttttttcctcttttt

SEQ ID NO: 142422 - DNA, 22 bp, Artificial Sequence
  Synthetic oligonucleotide; CTT chr11 5235639 5235660 5235644 5235639 -
gtctcttttttcctcttttttt

SEQ ID NO: 142423 - DNA, 22 bp, Artificial Sequence
  Synthetic oligonucleotide; TTG chr11 5235638 5235659 5235643 5235638 -
tctcttttttcctctttttttt

SEQ ID NO: 142424 - DNA, 22 bp, Artificial Sequence
  Synthetic oligonucleotide; CTC chr11 5235634 5235655 5235639 5235634 -
ttttttcctcttttttttcctt

SEQ ID NO: 142425 - DNA, 22 bp, Artificial Sequence
  Synthetic oligonucleotide; CTT chr11 5235632 5235653 5235637 5235632 -
ttttcctcttttttttccttcc

SEQ ID NO: 142426 - DNA, 22 bp, Artificial Sequence
  Synthetic oligonucleotide; TTT chr11 5235631 5235652 5235636 5235631 -
tttcctcttttttttccttccc

SEQ ID NO: 142427 - DNA, 22 bp, Artificial Sequence
  Synthetic oligonucleotide; TTT chr11 5235630 5235651 5235635 5235630 -
ttcctcttttttttccttccct

SEQ ID NO: 142428 - DNA, 22 bp, Artificial Sequence
  Synthetic oligonucleotide; TTT chr11 5235629 5235650 5235634 5235629 -
tcctcttttttttccttccctt

SEQ ID NO: 142429 - DNA, 22 bp, Artificial Sequence
  Synthetic oligonucleotide; TTT chr11 5235628 5235649 5235633 5235628 -
cctcttttttttccttcccttc

SEQ ID NO: 142430 - DNA, 22 bp, Artificial Sequence
  Synthetic oligonucleotide; TTC chr11 5235627 5235648 5235632 5235627 -
ctcttttttttccttcccttcc

SEQ ID NO: 142431 - DNA, 22 bp, Artificial Sequence
  Synthetic oligonucleotide; CTC chr11 5235624 5235645 5235629 5235624 -
ttttttttccttcccttcccct

SEQ ID NO: 142432 - DNA, 22 bp, Artificial Sequence
  Synthetic oligonucleotide; CTT chr11 5235622 5235643 5235627 5235622 -
ttttttccttcccttcccctct

SEQ ID NO: 142433 - DNA, 22 bp, Artificial Sequence
  Synthetic oligonucleotide; TTT chr11 5235621 5235642 5235626 5235621 -
tttttccttcccttcccctctc

SEQ ID NO: 142434 - DNA, 22 bp, Artificial Sequence
  Synthetic oligonucleotide; TTT chr11 5235620 5235641 5235625 5235620 -
ttttccttcccttcccctctct

SEQ ID NO: 142435 - DNA, 22 bp, Artificial Sequence
  Synthetic oligonucleotide; TTT chr11 5235619 5235640 5235624 5235619 -
tttccttcccttcccctctctt

SEQ ID NO: 142436 - DNA, 22 bp, Artificial Sequence
  Synthetic oligonucleotide; TTT chr11 5235618 5235639 5235623 5235618 -
ttccttcccttcccctctcttc

SEQ ID NO: 142437 - DNA, 22 bp, Artificial Sequence
  Synthetic oligonucleotide; TTT chr11 5235617 5235638 5235622 5235617 -
tccttcccttcccctctcttcg

SEQ ID NO: 142438 - DNA, 22 bp, Artificial Sequence
  Synthetic oligonucleotide; TTT chr11 5235616 5235637 5235621 5235616 -
ccttcccttcccctctcttcgt

SEQ ID NO: 142439 - DNA, 22 bp, Artificial Sequence
  Synthetic oligonucleotide; TTC chr11 5235615 5235636 5235620 5235615 -
cttcccttcccctctcttcgtt

SEQ ID NO: 142440 - DNA, 22 bp, Artificial Sequence
  Synthetic oligonucleotide; CTT chr11 5235612 5235633 5235617 5235612 -
cccttcccctctcttcgtttct

SEQ ID NO: 142441 - DNA, 22 bp, Artificial Sequence
  Synthetic oligonucleotide; TTC chr11 5235611 5235632 5235616 5235611 -
ccttcccctctcttcgtttctt

SEQ ID NO: 142442 - DNA, 22 bp, Artificial Sequence
  Synthetic oligonucleotide; CTT chr11 5235607 5235628 5235612 5235607 -
cccctctcttcgtttcttttct

SEQ ID NO: 142443 - DNA, 22 bp, Artificial Sequence
  Synthetic oligonucleotide; TTC chr11 5235606 5235627 5235611 5235606 -
ccctctcttcgtttcttttctc

SEQ ID NO: 142444 - DNA, 22 bp, Artificial Sequence
  Synthetic oligonucleotide; CTC chr11 5235601 5235622 5235606 5235601 -
tcttcgtttcttttctctcctc

SEQ ID NO: 142445 - DNA, 22 bp, Artificial Sequence
  Synthetic oligonucleotide; CTC chr11 5235599 5235620 5235604 5235599 -
ttcgtttcttttctctcctctt

SEQ ID NO: 142446 - DNA, 22 bp, Artificial Sequence
  Synthetic oligonucleotide; CTT chr11 5235597 5235618 5235602 5235597 -
cgtttcttttctctcctcttct

SEQ ID NO: 142447 - DNA, 22 bp, Artificial Sequence
  Synthetic oligonucleotide; TTC chr11 5235596 5235617 5235601 5235596 -
gtttcttttctctcctcttctc

SEQ ID NO: 142448 - DNA, 22 bp, Artificial Sequence
  Synthetic oligonucleotide; TTT chr11 5235592 5235613 5235597 5235592 -
cttttctctcctcttctcttct

SEQ ID NO: 142449 - DNA, 22 bp, Artificial Sequence
  Synthetic oligonucleotide; TTC chr11 5235591 5235612 5235596 5235591 -
ttttctctcctcttctcttctt

SEQ ID NO: 142450 - DNA, 22 bp, Artificial Sequence
  Synthetic oligonucleotide; CTT chr11 5235589 5235610 5235594 5235589 -
ttctctcctcttctcttctttc

SEQ ID NO: 142451 - DNA, 22 bp, Artificial Sequence
  Synthetic oligonucleotide; TTT chr11 5235588 5235609 5235593 5235588 -
tctctcctcttctcttctttcc

SEQ ID NO: 142452 - DNA, 22 bp, Artificial Sequence
  Synthetic oligonucleotide; TTT chr11 5235587 5235608 5235592 5235587 -
ctctcctcttctcttctttcct

SEQ ID NO: 142453 - DNA, 22 bp, Artificial Sequence
  Synthetic oligonucleotide; TTC chr11 5235586 5235607 5235591 5235586 -
tctcctcttctcttctttcctc

SEQ ID NO: 142454 - DNA, 22 bp, Artificial Sequence
  Synthetic oligonucleotide; CTC chr11 5235584 5235605 5235589 5235584 -
tcctcttctcttctttcctctc

SEQ ID NO: 142455 - DNA, 22 bp, Artificial Sequence
  Synthetic oligonucleotide; CTC chr11 5235582 5235603 5235587 5235582 -
ctcttctcttctttcctctctt

SEQ ID NO: 142456 - DNA, 22 bp, Artificial Sequence
  Synthetic oligonucleotide; CTC chr11 5235579 5235600 5235584 5235579 -
ttctcttctttcctctcttccc

SEQ ID NO: 142457 - DNA, 22 bp, Artificial Sequence
  Synthetic oligonucleotide; CTT chr11 5235577 5235598 5235582 5235577 -
ctcttctttcctctcttccctt

SEQ ID NO: 142458 - DNA, 22 bp, Artificial Sequence
  Synthetic oligonucleotide; TTC chr11 5235576 5235597 5235581 5235576 -
tcttctttcctctcttcccttc

SEQ ID NO: 142459 - DNA, 22 bp, Artificial Sequence
  Synthetic oligonucleotide; CTC chr11 5235574 5235595 5235579 5235574 -
ttctttcctctcttcccttccc

SEQ ID NO: 142460 - DNA, 22 bp, Artificial Sequence
  Synthetic oligonucleotide; CTT chr11 5235572 5235593 5235577 5235572 -
ctttcctctcttcccttccctt

SEQ ID NO: 142461 - DNA, 22 bp, Artificial Sequence
  Synthetic oligonucleotide; TTC chr11 5235571 5235592 5235576 5235571 -
tttcctctcttcccttcccttt

SEQ ID NO: 142462 - DNA, 22 bp, Artificial Sequence
  Synthetic oligonucleotide; CTT chr11 5235569 5235590 5235574 5235569 -
tcctctcttcccttccctttct

SEQ ID NO: 142463 - DNA, 22 bp, Artificial Sequence
  Synthetic oligonucleotide; TTT chr11 5235568 5235589 5235573 5235568 -
cctctcttcccttccctttctc

SEQ ID NO: 142464 - DNA, 22 bp, Artificial Sequence
  Synthetic oligonucleotide; TTC chr11 5235567 5235588 5235572 5235567 -
ctctcttcccttccctttctct

SEQ ID NO: 142465 - DNA, 22 bp, Artificial Sequence
  Synthetic oligonucleotide; CTC chr11 5235564 5235585 5235569 5235564 -
tcttcccttccctttctctttc

SEQ ID NO: 142466 - DNA, 22 bp, Artificial Sequence
  Synthetic oligonucleotide; CTC chr11 5235562 5235583 5235567 5235562 -
ttcccttccctttctctttctc

SEQ ID NO: 142467 - DNA, 22 bp, Artificial Sequence
  Synthetic oligonucleotide; CTT chr11 5235560 5235581 5235565 5235560 -
cccttccctttctctttctctt

SEQ ID NO: 142468 - DNA, 22 bp, Artificial Sequence
  Synthetic oligonucleotide; TTC chr11 5235559 5235580 5235564 5235559 -
ccttccctttctctttctcttc

SEQ ID NO: 142469 - DNA, 22 bp, Artificial Sequence
  Synthetic oligonucleotide; CTT chr11 5235555 5235576 5235560 5235555 -
ccctttctctttctcttcccta

SEQ ID NO: 142470 - DNA, 22 bp, Artificial Sequence
  Synthetic oligonucleotide; TTC chr11 5235554 5235575 5235559 5235554 -
cctttctctttctcttccctat

SEQ ID NO: 142471 - DNA, 22 bp, Artificial Sequence
  Synthetic oligonucleotide; CTT chr11 5235550 5235571 5235555 5235550 -
tctctttctcttccctatccct

SEQ ID NO: 142472 - DNA, 22 bp, Artificial Sequence
  Synthetic oligonucleotide; TTT chr11 5235549 5235570 5235554 5235549 -
ctctttctcttccctatccctt

SEQ ID NO: 142473 - DNA, 22 bp, Artificial Sequence
  Synthetic oligonucleotide; TTC chr11 5235548 5235569 5235553 5235548 -
tctttctcttccctatcccttc

SEQ ID NO: 142474 - DNA, 22 bp, Artificial Sequence
  Synthetic oligonucleotide; CTC chr11 5235546 5235567 5235551 5235546 -
tttctcttccctatcccttctc

SEQ ID NO: 142475 - DNA, 22 bp, Artificial Sequence
  Synthetic oligonucleotide; CTT chr11 5235544 5235565 5235549 5235544 -
tctcttccctatcccttctcct

SEQ ID NO: 142476 - DNA, 22 bp, Artificial Sequence
  Synthetic oligonucleotide; TTT chr11 5235543 5235564 5235548 5235543 -
ctcttccctatcccttctcctc

SEQ ID NO: 142477 - DNA, 22 bp, Artificial Sequence
  Synthetic oligonucleotide; TTC chr11 5235542 5235563 5235547 5235542 -
tcttccctatcccttctcctct

SEQ ID NO: 142478 - DNA, 22 bp, Artificial Sequence
  Synthetic oligonucleotide; CTC chr11 5235540 5235561 5235545 5235540 -
ttccctatcccttctcctctcc

SEQ ID NO: 142479 - DNA, 22 bp, Artificial Sequence
  Synthetic oligonucleotide; CTT chr11 5235538 5235559 5235543 5235538 -
ccctatcccttctcctctcctc

SEQ ID NO: 142480 - DNA, 22 bp, Artificial Sequence
  Synthetic oligonucleotide; TTC chr11 5235537 5235558 5235542 5235537 -
cctatcccttctcctctcctct

SEQ ID NO: 142481 - DNA, 22 bp, Artificial Sequence
  Synthetic oligonucleotide; CTA chr11 5235533 5235554 5235538 5235533 -
tcccttctcctctcctctcccc

SEQ ID NO: 142482 - DNA, 22 bp, Artificial Sequence
  Synthetic oligonucleotide; CTT chr11 5235527 5235548 5235532 5235527 -
ctcctctcctctcccctccttt

SEQ ID NO: 142483 - DNA, 22 bp, Artificial Sequence
  Synthetic oligonucleotide; TTC chr11 5235526 5235547 5235531 5235526 -
tcctctcctctcccctcctttt

SEQ ID NO: 142484 - DNA, 22 bp, Artificial Sequence
  Synthetic oligonucleotide; CTC chr11 5235524 5235545 5235529 5235524 -
ctctcctctcccctcctttttt

SEQ ID NO: 142485 - DNA, 22 bp, Artificial Sequence
  Synthetic oligonucleotide; CTC chr11 5235521 5235542 5235526 5235521 -
tcctctcccctccttttttctc

SEQ ID NO: 142486 - DNA, 22 bp, Artificial Sequence
  Synthetic oligonucleotide; CTC chr11 5235519 5235540 5235524 5235519 -
ctctcccctccttttttctcct

SEQ ID NO: 142487 - DNA, 22 bp, Artificial Sequence
  Synthetic oligonucleotide; CTC chr11 5235516 5235537 5235521 5235516 -
tcccctccttttttctcctctc

SEQ ID NO: 142488 - DNA, 22 bp, Artificial Sequence
  Synthetic oligonucleotide; CTC chr11 5235514 5235535 5235519 5235514 -
ccctccttttttctcctctcct

SEQ ID NO: 142489 - DNA, 22 bp, Artificial Sequence
  Synthetic oligonucleotide; CTC chr11 5235509 5235530 5235514 5235509 -
cttttttctcctctcctctcca

SEQ ID NO: 142490 - DNA, 22 bp, Artificial Sequence
  Synthetic oligonucleotide; CTT chr11 5235506 5235527 5235511 5235506 -
ttttctcctctcctctccatta

SEQ ID NO: 142491 - DNA, 22 bp, Artificial Sequence
  Synthetic oligonucleotide; TTT chr11 5235505 5235526 5235510 5235505 -
tttctcctctcctctccattat

SEQ ID NO: 142492 - DNA, 22 bp, Artificial Sequence
  Synthetic oligonucleotide; TTT chr11 5235504 5235525 5235509 5235504 -
ttctcctctcctctccattatt

SEQ ID NO: 142493 - DNA, 22 bp, Artificial Sequence
  Synthetic oligonucleotide; TTT chr11 5235503 5235524 5235508 5235503 -
tctcctctcctctccattattt

SEQ ID NO: 142494 - DNA, 22 bp, Artificial Sequence
  Synthetic oligonucleotide; TTT chr11 5235502 5235523 5235507 5235502 -
ctcctctcctctccattattta

SEQ ID NO: 142495 - DNA, 22 bp, Artificial Sequence
  Synthetic oligonucleotide; TTC chr11 5235501 5235522 5235506 5235501 -
tcctctcctctccattatttat

SEQ ID NO: 142496 - DNA, 22 bp, Artificial Sequence
  Synthetic oligonucleotide; CTC chr11 5235499 5235520 5235504 5235499 -
ctctcctctccattatttattt

SEQ ID NO: 142497 - DNA, 22 bp, Artificial Sequence
  Synthetic oligonucleotide; CTC chr11 5235496 5235517 5235501 5235496 -
tcctctccattatttatttttc

SEQ ID NO: 142498 - DNA, 22 bp, Artificial Sequence
  Synthetic oligonucleotide; CTC chr11 5235494 5235515 5235499 5235494 -
ctctccattatttatttttcct

SEQ ID NO: 142499 - DNA, 22 bp, Artificial Sequence
  Synthetic oligonucleotide; CTC chr11 5235491 5235512 5235496 5235491 -
tccattatttatttttccttct

SEQ ID NO: 142500 - DNA, 22 bp, Artificial Sequence
  Synthetic oligonucleotide; CTC chr11 5235489 5235510 5235494 5235489 -
cattatttatttttccttcttc

SEQ ID NO: 142501 - DNA, 22 bp, Artificial Sequence
  Synthetic oligonucleotide; TTA chr11 5235484 5235505 5235489 5235484 -
tttatttttccttcttctcctc

SEQ ID NO: 142502 - DNA, 22 bp, Artificial Sequence
  Synthetic oligonucleotide; TTT chr11 5235481 5235502 5235486 5235481 -
atttttccttcttctcctccat

SEQ ID NO: 142503 - DNA, 22 bp, Artificial Sequence
  Synthetic oligonucleotide; TTA chr11 5235480 5235501 5235485 5235480 -
tttttccttcttctcctccatc

SEQ ID NO: 142504 - DNA, 22 bp, Artificial Sequence
  Synthetic oligonucleotide; TTT chr11 5235477 5235498 5235482 5235477 -
ttccttcttctcctccatccct

SEQ ID NO: 142505 - DNA, 22 bp, Artificial Sequence
  Synthetic oligonucleotide; TTT chr11 5235476 5235497 5235481 5235476 -
tccttcttctcctccatccctt

SEQ ID NO: 142506 - DNA, 22 bp, Artificial Sequence
  Synthetic oligonucleotide; TTT chr11 5235475 5235496 5235480 5235475 -
ccttcttctcctccatcccttc

SEQ ID NO: 142507 - DNA, 22 bp, Artificial Sequence
  Synthetic oligonucleotide; TTC chr11 5235474 5235495 5235479 5235474 -
cttcttctcctccatcccttcc

SEQ ID NO: 142508 - DNA, 22 bp, Artificial Sequence
  Synthetic oligonucleotide; CTT chr11 5235471 5235492 5235476 5235471 -
cttctcctccatcccttccatc

SEQ ID NO: 142509 - DNA, 22 bp, Artificial Sequence
  Synthetic oligonucleotide; TTC chr11 5235470 5235491 5235475 5235470 -
ttctcctccatcccttccatcc

SEQ ID NO: 142510 - DNA, 22 bp, Artificial Sequence
  Synthetic oligonucleotide; CTT chr11 5235468 5235489 5235473 5235468 -
ctcctccatcccttccatcctc

SEQ ID NO: 142511 - DNA, 22 bp, Artificial Sequence
  Synthetic oligonucleotide; TTC chr11 5235467 5235488 5235472 5235467 -
tcctccatcccttccatcctct

SEQ ID NO: 142512 - DNA, 22 bp, Artificial Sequence
  Synthetic oligonucleotide; CTC chr11 5235465 5235486 5235470 5235465 -
ctccatcccttccatcctctct

SEQ ID NO: 142513 - DNA, 22 bp, Artificial Sequence
  Synthetic oligonucleotide; CTC chr11 5235462 5235483 5235467 5235462 -
catcccttccatcctctctctt

SEQ ID NO: 142514 - DNA, 22 bp, Artificial Sequence
  Synthetic oligonucleotide; CTT chr11 5235454 5235475 5235459 5235454 -
ccatcctctctcttcccctctt

SEQ ID NO: 142515 - DNA, 22 bp, Artificial Sequence
  Synthetic oligonucleotide; TTC chr11 5235453 5235474 5235458 5235453 -
catcctctctcttcccctcttc

SEQ ID NO: 142516 - DNA, 22 bp, Artificial Sequence
  Synthetic oligonucleotide; CTC chr11 5235446 5235467 5235451 5235446 -
tctcttcccctcttccttcctt

SEQ ID NO: 142517 - DNA, 22 bp, Artificial Sequence
  Synthetic oligonucleotide; CTC chr11 5235444 5235465 5235449 5235444 -
tcttcccctcttccttccttcc

SEQ ID NO: 142518 - DNA, 22 bp, Artificial Sequence
  Synthetic oligonucleotide; CTC chr11 5235442 5235463 5235447 5235442 -
ttcccctcttccttccttcctt

SEQ ID NO: 142519 - DNA, 22 bp, Artificial Sequence
  Synthetic oligonucleotide; CTT chr11 5235440 5235461 5235445 5235440 -
cccctcttccttccttcctttc

SEQ ID NO: 142520 - DNA, 22 bp, Artificial Sequence
  Synthetic oligonucleotide; TTC chr11 5235439 5235460 5235444 5235439 -
ccctcttccttccttcctttct

SEQ ID NO: 142521 - DNA, 22 bp, Artificial Sequence
  Synthetic oligonucleotide; CTC chr11 5235434 5235455 5235439 5235434 -
ttccttccttcctttctccatt

SEQ ID NO: 142522 - DNA, 22 bp, Artificial Sequence
  Synthetic oligonucleotide; CTT chr11 5235432 5235453 5235437 5235432 -
ccttccttcctttctccatttc

SEQ ID NO: 142523 - DNA, 22 bp, Artificial Sequence
  Synthetic oligonucleotide; TTC chr11 5235431 5235452 5235436 5235431 -
cttccttcctttctccatttct

SEQ ID NO: 142524 - DNA, 22 bp, Artificial Sequence
  Synthetic oligonucleotide; CTT chr11 5235428 5235449 5235433 5235428 -
ccttcctttctccatttcttcc

SEQ ID NO: 142525 - DNA, 22 bp, Artificial Sequence
  Synthetic oligonucleotide; TTC chr11 5235427 5235448 5235432 5235427 -
cttcctttctccatttcttcct

SEQ ID NO: 142526 - DNA, 22 bp, Artificial Sequence
  Synthetic oligonucleotide; CTT chr11 5235424 5235445 5235429 5235424 -
cctttctccatttcttcctcct

SEQ ID NO: 142527 - DNA, 22 bp, Artificial Sequence
  Synthetic oligonucleotide; TTC chr11 5235423 5235444 5235428 5235423 -
ctttctccatttcttcctcctc

SEQ ID NO: 142528 - DNA, 22 bp, Artificial Sequence
  Synthetic oligonucleotide; CTT chr11 5235420 5235441 5235425 5235420 -
tctccatttcttcctcctcttt

SEQ ID NO: 142529 - DNA, 22 bp, Artificial Sequence
  Synthetic oligonucleotide; TTT chr11 5235419 5235440 5235424 5235419 -
ctccatttcttcctcctctttc

SEQ ID NO: 142530 - DNA, 22 bp, Artificial Sequence
  Synthetic oligonucleotide; TTC chr11 5235418 5235439 5235423 5235418 -
tccatttcttcctcctctttcc

SEQ ID NO: 142531 - DNA, 22 bp, Artificial Sequence
  Synthetic oligonucleotide; CTC chr11 5235416 5235437 5235421 5235416 -
catttcttcctcctctttcctt

SEQ ID NO: 142532 - DNA, 22 bp, Artificial Sequence
  Synthetic oligonucleotide; TTT chr11 5235411 5235432 5235416 5235411 -
cttcctcctctttccttcaatc

SEQ ID NO: 142533 - DNA, 22 bp, Artificial Sequence
  Synthetic oligonucleotide; TTC chr11 5235410 5235431 5235415 5235410 -
ttcctcctctttccttcaatcc

SEQ ID NO: 142534 - DNA, 22 bp, Artificial Sequence
  Synthetic oligonucleotide; CTT chr11 5235408 5235429 5235413 5235408 -
cctcctctttccttcaatcctt

SEQ ID NO: 142535 - DNA, 22 bp, Artificial Sequence
  Synthetic oligonucleotide; TTC chr11 5235407 5235428 5235412 5235407 -
ctcctctttccttcaatccttc

SEQ ID NO: 142536 - DNA, 22 bp, Artificial Sequence
  Synthetic oligonucleotide; CTC chr11 5235404 5235425 5235409 5235404 -
ctctttccttcaatccttcctt

SEQ ID NO: 142537 - DNA, 22 bp, Artificial Sequence
  Synthetic oligonucleotide; CTC chr11 5235401 5235422 5235406 5235401 -
tttccttcaatccttccttttg

SEQ ID NO: 142538 - DNA, 22 bp, Artificial Sequence
  Synthetic oligonucleotide; CTT chr11 5235399 5235420 5235404 5235399 -
tccttcaatccttccttttgga

SEQ ID NO: 142539 - DNA, 22 bp, Artificial Sequence
  Synthetic oligonucleotide; TTT chr11 5235398 5235419 5235403 5235398 -
ccttcaatccttccttttggat

SEQ ID NO: 142540 - DNA, 22 bp, Artificial Sequence
  Synthetic oligonucleotide; TTC chr11 5235397 5235418 5235402 5235397 -
cttcaatccttccttttggata

SEQ ID NO: 142541 - DNA, 22 bp, Artificial Sequence
  Synthetic oligonucleotide; CTT chr11 5235394 5235415 5235399 5235394 -
caatccttccttttggatatgc

SEQ ID NO: 142542 - DNA, 22 bp, Artificial Sequence
  Synthetic oligonucleotide; TTC chr11 5235393 5235414 5235398 5235393 -
aatccttccttttggatatgct

SEQ ID NO: 142543 - DNA, 22 bp, Artificial Sequence
  Synthetic oligonucleotide; CTT chr11 5235386 5235407 5235391 5235386 -
ccttttggatatgctcatgggt

SEQ ID NO: 142544 - DNA, 22 bp, Artificial Sequence
  Synthetic oligonucleotide; TTC chr11 5235385 5235406 5235390 5235385 -
cttttggatatgctcatgggtg

SEQ ID NO: 142545 - DNA, 22 bp, Artificial Sequence
  Synthetic oligonucleotide; CTT chr11 5235382 5235403 5235387 5235382 -
ttggatatgctcatgggtgtgt

SEQ ID NO: 142546 - DNA, 22 bp, Artificial Sequence
  Synthetic oligonucleotide; TTT chr11 5235381 5235402 5235386 5235381 -
tggatatgctcatgggtgtgta

SEQ ID NO: 142547 - DNA, 22 bp, Artificial Sequence
  Synthetic oligonucleotide; TTT chr11 5235380 5235401 5235385 5235380 -
ggatatgctcatgggtgtgtat

SEQ ID NO: 142548 - DNA, 22 bp, Artificial Sequence
  Synthetic oligonucleotide; TTG chr11 5235379 5235400 5235384 5235379 -
gatatgctcatgggtgtgtatt

SEQ ID NO: 142549 - DNA, 22 bp, Artificial Sequence
  Synthetic oligonucleotide; CTC chr11 5235370 5235391 5235375 5235370 -
atgggtgtgtatttgtctgcca

SEQ ID NO: 142550 - DNA, 22 bp, Artificial Sequence
  Synthetic oligonucleotide; TTT chr11 5235356 5235377 5235361 5235356 -
gtctgccattgtggcattattt

SEQ ID NO: 142551 - DNA, 22 bp, Artificial Sequence
  Synthetic oligonucleotide; TTG chr11 5235355 5235376 5235360 5235355 -
tctgccattgtggcattatttg

SEQ ID NO: 142552 - DNA, 22 bp, Artificial Sequence
  Synthetic oligonucleotide; CTG chr11 5235351 5235372 5235356 5235351 -
ccattgtggcattatttgaatt

SEQ ID NO: 142553 - DNA, 22 bp, Artificial Sequence
  Synthetic oligonucleotide; TTG chr11 5235345 5235366 5235350 5235345 -
tggcattatttgaattcagaaa

SEQ ID NO: 142554 - DNA, 22 bp, Artificial Sequence
  Synthetic oligonucleotide; TTA chr11 5235337 5235358 5235342 5235337 -
tttgaattcagaaaagagtgaa

SEQ ID NO: 142555 - DNA, 22 bp, Artificial Sequence
  Synthetic oligonucleotide; TTT chr11 5235334 5235355 5235339 5235334 -
gaattcagaaaagagtgaaaaa

SEQ ID NO: 142556 - DNA, 22 bp, Artificial Sequence
  Synthetic oligonucleotide; TTG chr11 5235333 5235354 5235338 5235333 -
aattcagaaaagagtgaaaaac

SEQ ID NO: 142557 - DNA, 22 bp, Artificial Sequence
  Synthetic oligonucleotide; TTC chr11 5235328 5235349 5235333 5235328 -
agaaaagagtgaaaaactactg

SEQ ID NO: 142558 - DNA, 22 bp, Artificial Sequence
  Synthetic oligonucleotide; CTA chr11 5235309 5235330 5235314 5235309 -
ctgggatcttcattcctgggtc

SEQ ID NO: 142559 - DNA, 22 bp, Artificial Sequence
  Synthetic oligonucleotide; CTG chr11 5235306 5235327 5235311 5235306 -
ggatcttcattcctgggtctaa

SEQ ID NO: 142560 - DNA, 22 bp, Artificial Sequence
  Synthetic oligonucleotide; CTT chr11 5235299 5235320 5235304 5235299 -
cattcctgggtctaattccaca

SEQ ID NO: 142561 - DNA, 22 bp, Artificial Sequence
  Synthetic oligonucleotide; TTC chr11 5235298 5235319 5235303 5235298 -
attcctgggtctaattccacat

SEQ ID NO: 142562 - DNA, 22 bp, Artificial Sequence
  Synthetic oligonucleotide; TTC chr11 5235294 5235315 5235299 5235294 -
ctgggtctaattccacattttt

SEQ ID NO: 142563 - DNA, 22 bp, Artificial Sequence
  Synthetic oligonucleotide; CTG chr11 5235291 5235312 5235296 5235291 -
ggtctaattccacatttttttt

SEQ ID NO: 142564 - DNA, 22 bp, Artificial Sequence
  Synthetic oligonucleotide; CTA chr11 5235285 5235306 5235290 5235285 -
attccacatttttttttaagaa

SEQ ID NO: 142565 - DNA, 22 bp, Artificial Sequence
  Synthetic oligonucleotide; TTC chr11 5235281 5235302 5235286 5235281 -
cacatttttttttaagaacaca

SEQ ID NO: 142566 - DNA, 22 bp, Artificial Sequence
  Synthetic oligonucleotide; TTT chr11 5235274 5235295 5235279 5235274 -
ttttttaagaacacatctgtaa

SEQ ID NO: 142567 - DNA, 22 bp, Artificial Sequence
  Synthetic oligonucleotide; TTT chr11 5235273 5235294 5235278 5235273 -
tttttaagaacacatctgtaaa

SEQ ID NO: 142568 - DNA, 22 bp, Artificial Sequence
  Synthetic oligonucleotide; TTT chr11 5235272 5235293 5235277 5235272 -
ttttaagaacacatctgtaaaa

SEQ ID NO: 142569 - DNA, 22 bp, Artificial Sequence
  Synthetic oligonucleotide; TTT chr11 5235271 5235292 5235276 5235271 -
tttaagaacacatctgtaaaaa

SEQ ID NO: 142570 - DNA, 22 bp, Artificial Sequence
  Synthetic oligonucleotide; TTT chr11 5235270 5235291 5235275 5235270 -
ttaagaacacatctgtaaaaat

SEQ ID NO: 142571 - DNA, 22 bp, Artificial Sequence
  Synthetic oligonucleotide; TTT chr11 5235269 5235290 5235274 5235269 -
taagaacacatctgtaaaaatg

SEQ ID NO: 142572 - DNA, 22 bp, Artificial Sequence
  Synthetic oligonucleotide; TTT chr11 5235268 5235289 5235273 5235268 -
aagaacacatctgtaaaaatgt

SEQ ID NO: 142573 - DNA, 22 bp, Artificial Sequence
  Synthetic oligonucleotide; TTA chr11 5235267 5235288 5235272 5235267 -
agaacacatctgtaaaaatgtt

SEQ ID NO: 142574 - DNA, 22 bp, Artificial Sequence
  Synthetic oligonucleotide; CTG chr11 5235255 5235276 5235260 5235255 -
taaaaatgttctgtactagcat

SEQ ID NO: 142575 - DNA, 22 bp, Artificial Sequence
  Synthetic oligonucleotide; TTC chr11 5235244 5235265 5235249 5235244 -
tgtactagcatattcccaggaa

SEQ ID NO: 142576 - DNA, 22 bp, Artificial Sequence
  Synthetic oligonucleotide; CTG chr11 5235242 5235263 5235247 5235242 -
tactagcatattcccaggaact

SEQ ID NO: 142577 - DNA, 22 bp, Artificial Sequence
  Synthetic oligonucleotide; CTA chr11 5235237 5235258 5235242 5235237 -
gcatattcccaggaacttcgtt

SEQ ID NO: 142578 - DNA, 22 bp, Artificial Sequence
  Synthetic oligonucleotide; TTC chr11 5235229 5235250 5235234 5235229 -
ccaggaacttcgttaaatttaa

SEQ ID NO: 142579 - DNA, 22 bp, Artificial Sequence
  Synthetic oligonucleotide; CTT chr11 5235219 5235240 5235224 5235219 -
cgttaaatttaatctggctgaa

SEQ ID NO: 142580 - DNA, 22 bp, Artificial Sequence
  Synthetic oligonucleotide; TTC chr11 5235218 5235239 5235223 5235218 -
gttaaatttaatctggctgaat

SEQ ID NO: 142581 - DNA, 22 bp, Artificial Sequence
  Synthetic oligonucleotide; TTA chr11 5235214 5235235 5235219 5235214 -
aatttaatctggctgaatatgg

SEQ ID NO: 142582 - DNA, 22 bp, Artificial Sequence
  Synthetic oligonucleotide; TTT chr11 5235209 5235230 5235214 5235209 -
aatctggctgaatatggtaaat

SEQ ID NO: 142583 - DNA, 22 bp, Artificial Sequence
  Synthetic oligonucleotide; TTA chr11 5235208 5235229 5235213 5235208 -
atctggctgaatatggtaaatc

SEQ ID NO: 142584 - DNA, 22 bp, Artificial Sequence
  Synthetic oligonucleotide; CTG chr11 5235203 5235224 5235208 5235203 -
gctgaatatggtaaatctactt

SEQ ID NO: 142585 - DNA, 22 bp, Artificial Sequence
  Synthetic oligonucleotide; CTG chr11 5235199 5235220 5235204 5235199 -
aatatggtaaatctacttttca

SEQ ID NO: 142586 - DNA, 22 bp, Artificial Sequence
  Synthetic oligonucleotide; CTA chr11 5235184 5235205 5235189 5235184 -
cttttcactttgcattctttct

SEQ ID NO: 142587 - DNA, 22 bp, Artificial Sequence
  Synthetic oligonucleotide; CTT chr11 5235181 5235202 5235186 5235181 -
ttcactttgcattctttcttta

SEQ ID NO: 142588 - DNA, 22 bp, Artificial Sequence
  Synthetic oligonucleotide; TTT chr11 5235180 5235201 5235185 5235180 -
tcactttgcattctttctttag

SEQ ID NO: 142589 - DNA, 22 bp, Artificial Sequence
  Synthetic oligonucleotide; TTT chr11 5235179 5235200 5235184 5235179 -
cactttgcattctttctttagt

SEQ ID NO: 142590 - DNA, 22 bp, Artificial Sequence
  Synthetic oligonucleotide; TTC chr11 5235178 5235199 5235183 5235178 -
actttgcattctttctttagtc

SEQ ID NO: 142591 - DNA, 22 bp, Artificial Sequence
  Synthetic oligonucleotide; CTT chr11 5235174 5235195 5235179 5235174 -
tgcattctttctttagtcatac

SEQ ID NO: 142592 - DNA, 22 bp, Artificial Sequence
  Synthetic oligonucleotide; TTT chr11 5235173 5235194 5235178 5235173 -
gcattctttctttagtcatacc

SEQ ID NO: 142593 - DNA, 22 bp, Artificial Sequence
  Synthetic oligonucleotide; TTG chr11 5235172 5235193 5235177 5235172 -
cattctttctttagtcatacca

SEQ ID NO: 142594 - DNA, 22 bp, Artificial Sequence
  Synthetic oligonucleotide; TTC chr11 5235167 5235188 5235172 5235167 -
tttctttagtcataccataatt

SEQ ID NO: 142595 - DNA, 22 bp, Artificial Sequence
  Synthetic oligonucleotide; CTT chr11 5235165 5235186 5235170 5235165 -
tctttagtcataccataatttt

SEQ ID NO: 142596 - DNA, 22 bp, Artificial Sequence
  Synthetic oligonucleotide; TTT chr11 5235164 5235185 5235169 5235164 -
ctttagtcataccataatttta

SEQ ID NO: 142597 - DNA, 22 bp, Artificial Sequence
  Synthetic oligonucleotide; TTC chr11 5235163 5235184 5235168 5235163 -
tttagtcataccataattttaa

SEQ ID NO: 142598 - DNA, 22 bp, Artificial Sequence
  Synthetic oligonucleotide; CTT chr11 5235161 5235182 5235166 5235161 -
tagtcataccataattttaaac

SEQ ID NO: 142599 - DNA, 22 bp, Artificial Sequence
  Synthetic oligonucleotide; TTT chr11 5235160 5235181 5235165 5235160 -
agtcataccataattttaaaca

SEQ ID NO: 142600 - DNA, 22 bp, Artificial Sequence
  Synthetic oligonucleotide; TTA chr11 5235159 5235180 5235164 5235159 -
gtcataccataattttaaacat

SEQ ID NO: 142601 - DNA, 22 bp, Artificial Sequence
  Synthetic oligonucleotide; TTT chr11 5235144 5235165 5235149 5235144 -
taaacattcaaaatatttgtat

SEQ ID NO: 142602 - DNA, 22 bp, Artificial Sequence
  Synthetic oligonucleotide; TTT chr11 5235143 5235164 5235148 5235143 -
aaacattcaaaatatttgtata

SEQ ID NO: 142603 - DNA, 22 bp, Artificial Sequence
  Synthetic oligonucleotide; TTA chr11 5235142 5235163 5235147 5235142 -
aacattcaaaatatttgtatat

SEQ ID NO: 142604 - DNA, 22 bp, Artificial Sequence
  Synthetic oligonucleotide; TTC chr11 5235135 5235156 5235140 5235135 -
aaaatatttgtatataatattt

SEQ ID NO: 142605 - DNA, 22 bp, Artificial Sequence
  Synthetic oligonucleotide; TTT chr11 5235126 5235147 5235131 5235126 -
gtatataatatttgattttatc

SEQ ID NO: 142606 - DNA, 22 bp, Artificial Sequence
  Synthetic oligonucleotide; TTG chr11 5235125 5235146 5235130 5235125 -
tatataatatttgattttatct

SEQ ID NO: 142607 - DNA, 22 bp, Artificial Sequence
  Synthetic oligonucleotide; TTT chr11 5235113 5235134 5235118 5235113 -
gattttatctgtcattaaaatg

SEQ ID NO: 142608 - DNA, 22 bp, Artificial Sequence
  Synthetic oligonucleotide; TTG chr11 5235112 5235133 5235117 5235112 -
attttatctgtcattaaaatgt

SEQ ID NO: 142609 - DNA, 22 bp, Artificial Sequence
  Synthetic oligonucleotide; TTT chr11 5235108 5235129 5235113 5235108 -
tatctgtcattaaaatgttaac

SEQ ID NO: 142610 - DNA, 22 bp, Artificial Sequence
  Synthetic oligonucleotide; TTT chr11 5235107 5235128 5235112 5235107 -
atctgtcattaaaatgttaacc

SEQ ID NO: 142611 - DNA, 22 bp, Artificial Sequence
  Synthetic oligonucleotide; TTA chr11 5235106 5235127 5235111 5235106 -
tctgtcattaaaatgttaacct

SEQ ID NO: 142612 - DNA, 22 bp, Artificial Sequence
  Synthetic oligonucleotide; CTG chr11 5235102 5235123 5235107 5235102 -
tcattaaaatgttaaccttaaa

SEQ ID NO: 142613 - DNA, 22 bp, Artificial Sequence
  Synthetic oligonucleotide; TTA chr11 5235096 5235117 5235101 5235096 -
aaatgttaaccttaaaattcat

SEQ ID NO: 142614 - DNA, 22 bp, Artificial Sequence
  Synthetic oligonucleotide; TTA chr11 5235088 5235109 5235093 5235088 -
accttaaaattcatgtttccag

SEQ ID NO: 142615 - DNA, 22 bp, Artificial Sequence
  Synthetic oligonucleotide; CTT chr11 5235083 5235104 5235088 5235083 -
aaaattcatgtttccagaacct

SEQ ID NO: 142616 - DNA, 22 bp, Artificial Sequence
  Synthetic oligonucleotide; TTA chr11 5235082 5235103 5235087 5235082 -
aaattcatgtttccagaaccta

SEQ ID NO: 142617 - DNA, 22 bp, Artificial Sequence
  Synthetic oligonucleotide; TTC chr11 5235076 5235097 5235081 5235076 -
atgtttccagaacctatttcaa

SEQ ID NO: 142618 - DNA, 22 bp, Artificial Sequence
  Synthetic oligonucleotide; TTT chr11 5235070 5235091 5235075 5235070 -
ccagaacctatttcaataactg

SEQ ID NO: 142619 - DNA, 22 bp, Artificial Sequence
  Synthetic oligonucleotide; TTC chr11 5235069 5235090 5235074 5235069 -
cagaacctatttcaataactgg

SEQ ID NO: 142620 - DNA, 22 bp, Artificial Sequence
  Synthetic oligonucleotide; CTA chr11 5235060 5235081 5235065 5235060 -
tttcaataactggtaaataaac

SEQ ID NO: 142621 - DNA, 22 bp, Artificial Sequence
  Synthetic oligonucleotide; TTT chr11 5235057 5235078 5235062 5235057 -
caataactggtaaataaacact

SEQ ID NO: 142622 - DNA, 22 bp, Artificial Sequence
  Synthetic oligonucleotide; TTC chr11 5235056 5235077 5235061 5235056 -
aataactggtaaataaacacta

SEQ ID NO: 142623 - DNA, 22 bp, Artificial Sequence
  Synthetic oligonucleotide; CTG chr11 5235048 5235069 5235053 5235048 -
gtaaataaacactattcatttt

SEQ ID NO: 142624 - DNA, 22 bp, Artificial Sequence
  Synthetic oligonucleotide; CTA chr11 5235034 5235055 5235039 5235034 -
ttcattttttaaatattctttt

SEQ ID NO: 142625 - DNA, 22 bp, Artificial Sequence
  Synthetic oligonucleotide; TTC chr11 5235031 5235052 5235036 5235031 -
attttttaaatattcttttaat

SEQ ID NO: 142626 - DNA, 22 bp, Artificial Sequence
  Synthetic oligonucleotide; TTT chr11 5235027 5235048 5235032 5235027 -
tttaaatattcttttaatggat

SEQ ID NO: 142627 - DNA, 22 bp, Artificial Sequence
  Synthetic oligonucleotide; TTT chr11 5235026 5235047 5235031 5235026 -
ttaaatattcttttaatggata

SEQ ID NO: 142628 - DNA, 22 bp, Artificial Sequence
  Synthetic oligonucleotide; TTT chr11 5235025 5235046 5235030 5235025 -
taaatattcttttaatggatat

SEQ ID NO: 142629 - DNA, 22 bp, Artificial Sequence
  Synthetic oligonucleotide; TTT chr11 5235024 5235045 5235029 5235024 -
aaatattcttttaatggatatt

SEQ ID NO: 142630 - DNA, 22 bp, Artificial Sequence
  Synthetic oligonucleotide; TTA chr11 5235023 5235044 5235028 5235023 -
aatattcttttaatggatattt

SEQ ID NO: 142631 - DNA, 22 bp, Artificial Sequence
  Synthetic oligonucleotide; TTC chr11 5235016 5235037 5235021 5235016 -
ttttaatggatatttatttcaa

SEQ ID NO: 142632 - DNA, 22 bp, Artificial Sequence
  Synthetic oligonucleotide; CTT chr11 5235014 5235035 5235019 5235014 -
ttaatggatatttatttcaata

SEQ ID NO: 142633 - DNA, 22 bp, Artificial Sequence
  Synthetic oligonucleotide; TTT chr11 5235013 5235034 5235018 5235013 -
taatggatatttatttcaatat

SEQ ID NO: 142634 - DNA, 22 bp, Artificial Sequence
  Synthetic oligonucleotide; TTT chr11 5235012 5235033 5235017 5235012 -
aatggatatttatttcaatata

SEQ ID NO: 142635 - DNA, 22 bp, Artificial Sequence
  Synthetic oligonucleotide; TTA chr11 5235011 5235032 5235016 5235011 -
atggatatttatttcaatataa

SEQ ID NO: 142636 - DNA, 22 bp, Artificial Sequence
  Synthetic oligonucleotide; TTT chr11 5235001 5235022 5235006 5235001 -
atttcaatataataaaaaatta

SEQ ID NO: 142637 - DNA, 22 bp, Artificial Sequence
  Synthetic oligonucleotide; TTA chr11 5235000 5235021 5235005 5235000 -
tttcaatataataaaaaattag

SEQ ID NO: 142638 - DNA, 22 bp, Artificial Sequence
  Synthetic oligonucleotide; TTT chr11 5234997 5235018 5235002 5234997 -
caatataataaaaaattagagt

SEQ ID NO: 142639 - DNA, 22 bp, Artificial Sequence
  Synthetic oligonucleotide; TTC chr11 5234996 5235017 5235001 5234996 -
aatataataaaaaattagagtt

SEQ ID NO: 142640 - DNA, 22 bp, Artificial Sequence
  Synthetic oligonucleotide; TTA chr11 5234979 5235000 5234984 5234979 -
gagttttattataggaagaatt

SEQ ID NO: 142641 - DNA, 22 bp, Artificial Sequence
  Synthetic oligonucleotide; TTT chr11 5234973 5234994 5234978 5234973 -
tattataggaagaatttaccaa

SEQ ID NO: 142642 - DNA, 22 bp, Artificial Sequence
  Synthetic oligonucleotide; TTT chr11 5234972 5234993 5234977 5234972 -
attataggaagaatttaccaaa

SEQ ID NO: 142643 - DNA, 22 bp, Artificial Sequence
  Synthetic oligonucleotide; TTA chr11 5234971 5234992 5234976 5234971 -
ttataggaagaatttaccaaaa

SEQ ID NO: 142644 - DNA, 22 bp, Artificial Sequence
  Synthetic oligonucleotide; TTA chr11 5234968 5234989 5234973 5234968 -
taggaagaatttaccaaaagaa

SEQ ID NO: 142645 - DNA, 22 bp, Artificial Sequence
  Synthetic oligonucleotide; TTT chr11 5234956 5234977 5234961 5234956 -
accaaaagaaggaggaagcaag

SEQ ID NO: 142646 - DNA, 22 bp, Artificial Sequence
  Synthetic oligonucleotide; TTA chr11 5234955 5234976 5234960 5234955 -
ccaaaagaaggaggaagcaagc

SEQ ID NO: 142647 - DNA, 22 bp, Artificial Sequence
  Synthetic oligonucleotide; TTT chr11 5234927 5234948 5234932 5234927 -
aaactgcagcaatagatttgtc

SEQ ID NO: 142648 - DNA, 22 bp, Artificial Sequence
  Synthetic oligonucleotide; TTA chr11 5234926 5234947 5234931 5234926 -
aactgcagcaatagatttgtcc

SEQ ID NO: 142649 - DNA, 22 bp, Artificial Sequence
  Synthetic oligonucleotide; CTG chr11 5234921 5234942 5234926 5234921 -
cagcaatagatttgtccattcc

SEQ ID NO: 142650 - DNA, 22 bp, Artificial Sequence
  Synthetic oligonucleotide; TTT chr11 5234908 5234929 5234913 5234908 -
gtccattccaacctctcaaaat

SEQ ID NO: 142651 - DNA, 22 bp, Artificial Sequence
  Synthetic oligonucleotide; TTG chr11 5234907 5234928 5234912 5234907 -
tccattccaacctctcaaaatt

SEQ ID NO: 142652 - DNA, 22 bp, Artificial Sequence
  Synthetic oligonucleotide; TTC chr11 5234900 5234921 5234905 5234900 -
caacctctcaaaattcccttgg

SEQ ID NO: 142653 - DNA, 22 bp, Artificial Sequence
  Synthetic oligonucleotide; CTC chr11 5234893 5234914 5234898 5234893 -
tcaaaattcccttggagacaaa

SEQ ID NO: 142654 - DNA, 22 bp, Artificial Sequence
  Synthetic oligonucleotide; CTC chr11 5234891 5234912 5234896 5234891 -
aaaattcccttggagacaaaaa

SEQ ID NO: 142655 - DNA, 22 bp, Artificial Sequence
  Synthetic oligonucleotide; TTC chr11 5234884 5234905 5234889 5234884 -
ccttggagacaaaaatctctag

SEQ ID NO: 142656 - DNA, 22 bp, Artificial Sequence
  Synthetic oligonucleotide; CTT chr11 5234880 5234901 5234885 5234880 -
ggagacaaaaatctctagaggc

SEQ ID NO: 142657 - DNA, 22 bp, Artificial Sequence
  Synthetic oligonucleotide; TTG chr11 5234879 5234900 5234884 5234879 -
gagacaaaaatctctagaggca

SEQ ID NO: 142658 - DNA, 22 bp, Artificial Sequence
  Synthetic oligonucleotide; CTC chr11 5234865 5234886 5234870 5234865 -
tagaggcaaagaagaactttat

SEQ ID NO: 142659 - DNA, 22 bp, Artificial Sequence
  Synthetic oligonucleotide; CTA chr11 5234863 5234884 5234868 5234863 -
gaggcaaagaagaactttatat

SEQ ID NO: 142660 - DNA, 22 bp, Artificial Sequence
  Synthetic oligonucleotide; CTT chr11 5234846 5234867 5234851 5234846 -
tatattgagtcaacttgttaaa

SEQ ID NO: 142661 - DNA, 22 bp, Artificial Sequence
  Synthetic oligonucleotide; TTT chr11 5234845 5234866 5234850 5234845 -
atattgagtcaacttgttaaaa

SEQ ID NO: 142662 - DNA, 22 bp, Artificial Sequence
  Synthetic oligonucleotide; TTA chr11 5234844 5234865 5234849 5234844 -
tattgagtcaacttgttaaaac

SEQ ID NO: 142663 - DNA, 22 bp, Artificial Sequence
  Synthetic oligonucleotide; TTG chr11 5234839 5234860 5234844 5234839 -
agtcaacttgttaaaacatctg

SEQ ID NO: 142664 - DNA, 22 bp, Artificial Sequence
  Synthetic oligonucleotide; CTT chr11 5234830 5234851 5234835 5234830 -
gttaaaacatctgcttttagat

SEQ ID NO: 142665 - DNA, 22 bp, Artificial Sequence
  Synthetic oligonucleotide; TTG chr11 5234829 5234850 5234834 5234829 -
ttaaaacatctgcttttagata

SEQ ID NO: 142666 - DNA, 22 bp, Artificial Sequence
  Synthetic oligonucleotide; TTA chr11 5234826 5234847 5234831 5234826 -
aaacatctgcttttagataagt

SEQ ID NO: 142667 - DNA, 22 bp, Artificial Sequence
  Synthetic oligonucleotide; CTG chr11 5234817 5234838 5234822 5234817 -
cttttagataagttttcttagt

SEQ ID NO: 142668 - DNA, 22 bp, Artificial Sequence
  Synthetic oligonucleotide; CTT chr11 5234814 5234835 5234819 5234814 -
ttagataagttttcttagtata

SEQ ID NO: 142669 - DNA, 22 bp, Artificial Sequence
  Synthetic oligonucleotide; TTT chr11 5234813 5234834 5234818 5234813 -
tagataagttttcttagtataa

SEQ ID NO: 142670 - DNA, 22 bp, Artificial Sequence
  Synthetic oligonucleotide; TTT chr11 5234812 5234833 5234817 5234812 -
agataagttttcttagtataaa

SEQ ID NO: 142671 - DNA, 22 bp, Artificial Sequence
  Synthetic oligonucleotide; TTA chr11 5234811 5234832 5234816 5234811 -
gataagttttcttagtataaag

SEQ ID NO: 142672 - DNA, 22 bp, Artificial Sequence
  Synthetic oligonucleotide; TTT chr11 5234802 5234823 5234807 5234802 -
tcttagtataaagtgacagaaa

SEQ ID NO: 142673 - DNA, 22 bp, Artificial Sequence
  Synthetic oligonucleotide; TTT chr11 5234801 5234822 5234806 5234801 -
cttagtataaagtgacagaaac

SEQ ID NO: 142674 - DNA, 22 bp, Artificial Sequence
  Synthetic oligonucleotide; TTC chr11 5234800 5234821 5234805 5234800 -
ttagtataaagtgacagaaaca

SEQ ID NO: 142675 - DNA, 22 bp, Artificial Sequence
  Synthetic oligonucleotide; CTT chr11 5234798 5234819 5234803 5234798 -
agtataaagtgacagaaacaaa

SEQ ID NO: 142676 - DNA, 22 bp, Artificial Sequence
  Synthetic oligonucleotide; TTA chr11 5234797 5234818 5234802 5234797 -
gtataaagtgacagaaacaaat

SEQ ID NO: 142677 - DNA, 22 bp, Artificial Sequence
  Synthetic oligonucleotide; TTA chr11 5234769 5234790 5234774 5234769 -
aactctaagatacattccacta

SEQ ID NO: 142678 - DNA, 22 bp, Artificial Sequence
  Synthetic oligonucleotide; CTC chr11 5234764 5234785 5234769 5234764 -
taagatacattccactatatta

SEQ ID NO: 142679 - DNA, 22 bp, Artificial Sequence
  Synthetic oligonucleotide; CTA chr11 5234762 5234783 5234767 5234762 -
agatacattccactatattagc

SEQ ID NO: 142680 - DNA, 22 bp, Artificial Sequence
  Synthetic oligonucleotide; TTC chr11 5234752 5234773 5234757 5234752 -
cactatattagcctaaaacact

SEQ ID NO: 142681 - DNA, 22 bp, Artificial Sequence
  Synthetic oligonucleotide; CTA chr11 5234747 5234768 5234752 5234747 -
tattagcctaaaacacttctgc

SEQ ID NO: 142682 - DNA, 22 bp, Artificial Sequence
  Synthetic oligonucleotide; TTA chr11 5234742 5234763 5234747 5234742 -
gcctaaaacacttctgcaaaaa

SEQ ID NO: 142683 - DNA, 22 bp, Artificial Sequence
  Synthetic oligonucleotide; CTA chr11 5234737 5234758 5234742 5234737 -
aaacacttctgcaaaaatgaaa

SEQ ID NO: 142684 - DNA, 22 bp, Artificial Sequence
  Synthetic oligonucleotide; CTT chr11 5234729 5234750 5234734 5234729 -
ctgcaaaaatgaaactaggagg

SEQ ID NO: 142685 - DNA, 22 bp, Artificial Sequence
  Synthetic oligonucleotide; TTC chr11 5234728 5234749 5234733 5234728 -
tgcaaaaatgaaactaggagga

SEQ ID NO: 142686 - DNA, 22 bp, Artificial Sequence
  Synthetic oligonucleotide; CTG chr11 5234726 5234747 5234731 5234726 -
caaaaatgaaactaggaggata

SEQ ID NO: 142687 - DNA, 22 bp, Artificial Sequence
  Synthetic oligonucleotide; CTA chr11 5234712 5234733 5234717 5234712 -
ggaggatatttttagaaacaac

SEQ ID NO: 142688 - DNA, 22 bp, Artificial Sequence
  Synthetic oligonucleotide; TTT chr11 5234701 5234722 5234706 5234701 -
ttagaaacaactgctgaaagag

SEQ ID NO: 142689 - DNA, 22 bp, Artificial Sequence
  Synthetic oligonucleotide; TTT chr11 5234700 5234721 5234705 5234700 -
tagaaacaactgctgaaagaga

SEQ ID NO: 142690 - DNA, 22 bp, Artificial Sequence
  Synthetic oligonucleotide; TTT chr11 5234699 5234720 5234704 5234699 -
agaaacaactgctgaaagagat

SEQ ID NO: 142691 - DNA, 22 bp, Artificial Sequence
  Synthetic oligonucleotide; TTA chr11 5234698 5234719 5234703 5234698 -
gaaacaactgctgaaagagatg

SEQ ID NO: 142692 - DNA, 22 bp, Artificial Sequence
  Synthetic oligonucleotide; CTG chr11 5234688 5234709 5234693 5234688 -
ctgaaagagatgcggtggggag

SEQ ID NO: 142693 - DNA, 22 bp, Artificial Sequence
  Synthetic oligonucleotide; CTG chr11 5234685 5234706 5234690 5234685 -
aaagagatgcggtggggagata

SEQ ID NO: 142694 - DNA, 22 bp, Artificial Sequence
  Synthetic oligonucleotide; TTT chr11 5234643 5234664 5234648 5234643 -
ctgagtcaagacacacatgaca

SEQ ID NO: 142695 - DNA, 22 bp, Artificial Sequence
  Synthetic oligonucleotide; TTC chr11 5234642 5234663 5234647 5234642 -
tgagtcaagacacacatgacag

SEQ ID NO: 142696 - DNA, 22 bp, Artificial Sequence
  Synthetic oligonucleotide; CTG chr11 5234640 5234661 5234645 5234640 -
agtcaagacacacatgacagaa

SEQ ID NO: 142697 - DNA, 22 bp, Artificial Sequence
  Synthetic oligonucleotide; CTC chr11 5234607 5234628 5234612 5234607 -
agggcaagttaagggaatagtg

SEQ ID NO: 142698 - DNA, 22 bp, Artificial Sequence
  Synthetic oligonucleotide; TTA chr11 5234596 5234617 5234601 5234596 -
agggaatagtggaatgaaggtt

SEQ ID NO: 142699 - DNA, 22 bp, Artificial Sequence
  Synthetic oligonucleotide; TTC chr11 5234573 5234594 5234578 5234573 -
atttttcattctcacaaactaa

SEQ ID NO: 142700 - DNA, 22 bp, Artificial Sequence
  Synthetic oligonucleotide; TTT chr11 5234569 5234590 5234574 5234569 -
ttcattctcacaaactaatgaa

SEQ ID NO: 142701 - DNA, 22 bp, Artificial Sequence
  Synthetic oligonucleotide; TTT chr11 5234568 5234589 5234573 5234568 -
tcattctcacaaactaatgaaa

SEQ ID NO: 142702 - DNA, 22 bp, Artificial Sequence
  Synthetic oligonucleotide; TTT chr11 5234567 5234588 5234572 5234567 -
cattctcacaaactaatgaaac

SEQ ID NO: 142703 - DNA, 22 bp, Artificial Sequence
  Synthetic oligonucleotide; TTC chr11 5234566 5234587 5234571 5234566 -
attctcacaaactaatgaaacc

SEQ ID NO: 142704 - DNA, 22 bp, Artificial Sequence
  Synthetic oligonucleotide; TTC chr11 5234562 5234583 5234567 5234562 -
tcacaaactaatgaaaccctgc

SEQ ID NO: 142705 - DNA, 22 bp, Artificial Sequence
  Synthetic oligonucleotide; CTC chr11 5234560 5234581 5234565 5234560 -
acaaactaatgaaaccctgctt

SEQ ID NO: 142706 - DNA, 22 bp, Artificial Sequence
  Synthetic oligonucleotide; CTA chr11 5234552 5234573 5234557 5234552 -
atgaaaccctgcttatcttaaa

SEQ ID NO: 142707 - DNA, 22 bp, Artificial Sequence
  Synthetic oligonucleotide; CTG chr11 5234541 5234562 5234546 5234541 -
cttatcttaaaccaacctgctc

SEQ ID NO: 142708 - DNA, 22 bp, Artificial Sequence
  Synthetic oligonucleotide; CTT chr11 5234538 5234559 5234543 5234538 -
atcttaaaccaacctgctcact

SEQ ID NO: 142709 - DNA, 22 bp, Artificial Sequence
  Synthetic oligonucleotide; TTA chr11 5234537 5234558 5234542 5234537 -
tcttaaaccaacctgctcactg

SEQ ID NO: 142710 - DNA, 22 bp, Artificial Sequence
  Synthetic oligonucleotide; CTT chr11 5234533 5234554 5234538 5234533 -
aaaccaacctgctcactggagc

SEQ ID NO: 142711 - DNA, 22 bp, Artificial Sequence
  Synthetic oligonucleotide; TTA chr11 5234532 5234553 5234537 5234532 -
aaccaacctgctcactggagca

SEQ ID NO: 142712 - DNA, 22 bp, Artificial Sequence
  Synthetic oligonucleotide; CTG chr11 5234522 5234543 5234527 5234522 -
ctcactggagcagggaggacag

SEQ ID NO: 142713 - DNA, 22 bp, Artificial Sequence
  Synthetic oligonucleotide; CTC chr11 5234519 5234540 5234524 5234519 -
actggagcagggaggacaggac

SEQ ID NO: 142714 - DNA, 22 bp, Artificial Sequence
  Synthetic oligonucleotide; CTG chr11 5234515 5234536 5234520 5234515 -
gagcagggaggacaggaccagc

SEQ ID NO: 142715 - DNA, 22 bp, Artificial Sequence
  Synthetic oligonucleotide; CTG chr11 5234468 5234489 5234473 5234468 -
ttgcttacactttcttctgaca

SEQ ID NO: 142716 - DNA, 22 bp, Artificial Sequence
  Synthetic oligonucleotide; TTG chr11 5234465 5234486 5234470 5234465 -
cttacactttcttctgacataa

SEQ ID NO: 142717 - DNA, 22 bp, Artificial Sequence
  Synthetic oligonucleotide; CTT chr11 5234462 5234483 5234467 5234462 -
acactttcttctgacataacag

SEQ ID NO: 142718 - DNA, 22 bp, Artificial Sequence
  Synthetic oligonucleotide; TTA chr11 5234461 5234482 5234466 5234461 -
cactttcttctgacataacagt

SEQ ID NO: 142719 - DNA, 22 bp, Artificial Sequence
  Synthetic oligonucleotide; CTT chr11 5234456 5234477 5234461 5234456 -
tcttctgacataacagtgttca

SEQ ID NO: 142720 - DNA, 22 bp, Artificial Sequence
  Synthetic oligonucleotide; TTT chr11 5234455 5234476 5234460 5234455 -
cttctgacataacagtgttcac

SEQ ID NO: 142721 - DNA, 22 bp, Artificial Sequence
  Synthetic oligonucleotide; TTC chr11 5234454 5234475 5234459 5234454 -
ttctgacataacagtgttcact

SEQ ID NO: 142722 - DNA, 22 bp, Artificial Sequence
  Synthetic oligonucleotide; CTT chr11 5234452 5234473 5234457 5234452 -
ctgacataacagtgttcactag

SEQ ID NO: 142723 - DNA, 22 bp, Artificial Sequence
  Synthetic oligonucleotide; TTC chr11 5234451 5234472 5234456 5234451 -
tgacataacagtgttcactagc

SEQ ID NO: 142724 - DNA, 22 bp, Artificial Sequence
  Synthetic oligonucleotide; CTG chr11 5234449 5234470 5234454 5234449 -
acataacagtgttcactagcaa

SEQ ID NO: 142725 - DNA, 22 bp, Artificial Sequence
  Synthetic oligonucleotide; TTC chr11 5234435 5234456 5234440 5234435 -
actagcaacctcaaacagacac

SEQ ID NO: 142726 - DNA, 22 bp, Artificial Sequence
  Synthetic oligonucleotide; CTA chr11 5234431 5234452 5234436 5234431 -
gcaacctcaaacagacaccatg

SEQ ID NO: 142727 - DNA, 22 bp, Artificial Sequence
  Synthetic oligonucleotide; CTC chr11 5234423 5234444 5234428 5234423 -
aaacagacaccatggtgcatct

SEQ ID NO: 142728 - DNA, 22 bp, Artificial Sequence
  Synthetic oligonucleotide; CTG chr11 5234400 5234421 5234405 5234400 -
actcctgaggagaagactgctg

SEQ ID NO: 142729 - DNA, 22 bp, Artificial Sequence
  Synthetic oligonucleotide; CTC chr11 5234396 5234417 5234401 5234396 -
ctgaggagaagactgctgtcaa

SEQ ID NO: 142730 - DNA, 22 bp, Artificial Sequence
  Synthetic oligonucleotide; CTG chr11 5234393 5234414 5234398 5234393 -
aggagaagactgctgtcaatgc

SEQ ID NO: 142731 - DNA, 22 bp, Artificial Sequence
  Synthetic oligonucleotide; CTG chr11 5234381 5234402 5234386 5234381 -
ctgtcaatgccctgtggggcaa

SEQ ID NO: 142732 - DNA, 22 bp, Artificial Sequence
  Synthetic oligonucleotide; CTG chr11 5234378 5234399 5234383 5234378 -
tcaatgccctgtggggcaaagt

SEQ ID NO: 142733 - DNA, 22 bp, Artificial Sequence
  Synthetic oligonucleotide; CTG chr11 5234367 5234388 5234372 5234367 -
tggggcaaagtgaacgtggatg

SEQ ID NO: 142734 - DNA, 22 bp, Artificial Sequence
  Synthetic oligonucleotide; TTG chr11 5234339 5234360 5234344 5234339 -
gtggtgaggccctgggcaggtt

SEQ ID NO: 142735 - DNA, 22 bp, Artificial Sequence
  Synthetic oligonucleotide; CTG chr11 5234325 5234346 5234330 5234325 -
ggcaggttggtatcaaggttat

SEQ ID NO: 142736 - DNA, 22 bp, Artificial Sequence
  Synthetic oligonucleotide; TTG chr11 5234316 5234337 5234321 5234316 -
gtatcaaggttataagagaggc

SEQ ID NO: 142737 - DNA, 22 bp, Artificial Sequence
  Synthetic oligonucleotide; TTA chr11 5234304 5234325 5234309 5234304 -
taagagaggctcaaggaggcaa

SEQ ID NO: 142738 - DNA, 22 bp, Artificial Sequence
  Synthetic oligonucleotide; CTC chr11 5234292 5234313 5234297 5234292 -
aaggaggcaaatggaaactggg

SEQ ID NO: 142739 - DNA, 22 bp, Artificial Sequence
  Synthetic oligonucleotide; CTG chr11 5234272 5234293 5234277 5234272 -
ggcatgtgtagacagagaagac

SEQ ID NO: 142740 - DNA, 22 bp, Artificial Sequence
  Synthetic oligonucleotide; CTC chr11 5234248 5234269 5234253 5234248 -
ttgggtttctgataggcactga

SEQ ID NO: 142741 - DNA, 22 bp, Artificial Sequence
  Synthetic oligonucleotide; CTT chr11 5234246 5234267 5234251 5234246 -
gggtttctgataggcactgact

SEQ ID NO: 142742 - DNA, 22 bp, Artificial Sequence
  Synthetic oligonucleotide; TTG chr11 5234245 5234266 5234250 5234245 -
ggtttctgataggcactgactc

SEQ ID NO: 142743 - DNA, 22 bp, Artificial Sequence
  Synthetic oligonucleotide; TTT chr11 5234240 5234261 5234245 5234240 -
ctgataggcactgactctctgt

SEQ ID NO: 142744 - DNA, 22 bp, Artificial Sequence
  Synthetic oligonucleotide; TTC chr11 5234239 5234260 5234244 5234239 -
tgataggcactgactctctgtc

SEQ ID NO: 142745 - DNA, 22 bp, Artificial Sequence
  Synthetic oligonucleotide; CTG chr11 5234237 5234258 5234242 5234237 -
ataggcactgactctctgtccc

SEQ ID NO: 142746 - DNA, 22 bp, Artificial Sequence
  Synthetic oligonucleotide; CTG chr11 5234227 5234248 5234232 5234227 -
actctctgtcccttgggctgtt

SEQ ID NO: 142747 - DNA, 22 bp, Artificial Sequence
  Synthetic oligonucleotide; CTC chr11 5234223 5234244 5234228 5234223 -
tctgtcccttgggctgttttcc

SEQ ID NO: 142748 - DNA, 22 bp, Artificial Sequence
  Synthetic oligonucleotide; CTC chr11 5234221 5234242 5234226 5234221 -
tgtcccttgggctgttttccta

SEQ ID NO: 142749 - DNA, 22 bp, Artificial Sequence
  Synthetic oligonucleotide; CTG chr11 5234219 5234240 5234224 5234219 -
tcccttgggctgttttcctacc

SEQ ID NO: 142750 - DNA, 22 bp, Artificial Sequence
  Synthetic oligonucleotide; CTT chr11 5234213 5234234 5234218 5234213 -
gggctgttttcctaccctcaga

SEQ ID NO: 142751 - DNA, 22 bp, Artificial Sequence
  Synthetic oligonucleotide; TTG chr11 5234212 5234233 5234217 5234212 -
ggctgttttcctaccctcagat

SEQ ID NO: 142752 - DNA, 22 bp, Artificial Sequence
  Synthetic oligonucleotide; CTG chr11 5234207 5234228 5234212 5234207 -
ttttcctaccctcagattactg

SEQ ID NO: 142753 - DNA, 22 bp, Artificial Sequence
  Synthetic oligonucleotide; TTT chr11 5234204 5234225 5234209 5234204 -
tcctaccctcagattactggtg

SEQ ID NO: 142754 - DNA, 22 bp, Artificial Sequence
  Synthetic oligonucleotide; TTT chr11 5234203 5234224 5234208 5234203 -
cctaccctcagattactggtgg

SEQ ID NO: 142755 - DNA, 22 bp, Artificial Sequence
  Synthetic oligonucleotide; TTC chr11 5234202 5234223 5234207 5234202 -
ctaccctcagattactggtggt

SEQ ID NO: 142756 - DNA, 22 bp, Artificial Sequence
  Synthetic oligonucleotide; CTA chr11 5234199 5234220 5234204 5234199 -
ccctcagattactggtggtcta

SEQ ID NO: 142757 - DNA, 22 bp, Artificial Sequence
  Synthetic oligonucleotide; CTC chr11 5234194 5234215 5234199 5234194 -
agattactggtggtctaccctt

SEQ ID NO: 142758 - DNA, 22 bp, Artificial Sequence
  Synthetic oligonucleotide; TTA chr11 5234188 5234209 5234193 5234188 -
ctggtggtctacccttggaccc

SEQ ID NO: 142759 - DNA, 22 bp, Artificial Sequence
  Synthetic oligonucleotide; CTG chr11 5234185 5234206 5234190 5234185 -
gtggtctacccttggacccaga

SEQ ID NO: 142760 - DNA, 22 bp, Artificial Sequence
  Synthetic oligonucleotide; CTA chr11 5234177 5234198 5234182 5234177 -
cccttggacccagaggttcttt

SEQ ID NO: 142761 - DNA, 22 bp, Artificial Sequence
  Synthetic oligonucleotide; CTT chr11 5234172 5234193 5234177 5234172 -
ggacccagaggttctttgagtc

SEQ ID NO: 142762 - DNA, 22 bp, Artificial Sequence
  Synthetic oligonucleotide; TTG chr11 5234171 5234192 5234176 5234171 -
gacccagaggttctttgagtcc

SEQ ID NO: 142763 - DNA, 22 bp, Artificial Sequence
  Synthetic oligonucleotide; TTC chr11 5234158 5234179 5234163 5234158 -
tttgagtcctttggggatctgt

SEQ ID NO: 142764 - DNA, 22 bp, Artificial Sequence
  Synthetic oligonucleotide; CTT chr11 5234156 5234177 5234161 5234156 -
tgagtcctttggggatctgtcc

SEQ ID NO: 142765 - DNA, 22 bp, Artificial Sequence
  Synthetic oligonucleotide; TTT chr11 5234155 5234176 5234160 5234155 -
gagtcctttggggatctgtcct

SEQ ID NO: 142766 - DNA, 22 bp, Artificial Sequence
  Synthetic oligonucleotide; TTG chr11 5234154 5234175 5234159 5234154 -
agtcctttggggatctgtcctc

SEQ ID NO: 142767 - DNA, 22 bp, Artificial Sequence
  Synthetic oligonucleotide; CTT chr11 5234147 5234168 5234152 5234147 -
tggggatctgtcctctcctgat

SEQ ID NO: 142768 - DNA, 22 bp, Artificial Sequence
  Synthetic oligonucleotide; TTT chr11 5234146 5234167 5234151 5234146 -
ggggatctgtcctctcctgatg

SEQ ID NO: 142769 - DNA, 22 bp, Artificial Sequence
  Synthetic oligonucleotide; TTG chr11 5234145 5234166 5234150 5234145 -
gggatctgtcctctcctgatgc

SEQ ID NO: 142770 - DNA, 22 bp, Artificial Sequence
  Synthetic oligonucleotide; CTG chr11 5234137 5234158 5234142 5234137 -
tcctctcctgatgctgttatgg

SEQ ID NO: 142771 - DNA, 22 bp, Artificial Sequence
  Synthetic oligonucleotide; CTC chr11 5234132 5234153 5234137 5234132 -
tcctgatgctgttatgggcaac

SEQ ID NO: 142772 - DNA, 22 bp, Artificial Sequence
  Synthetic oligonucleotide; CTC chr11 5234130 5234151 5234135 5234130 -
ctgatgctgttatgggcaaccc

SEQ ID NO: 142773 - DNA, 22 bp, Artificial Sequence
  Synthetic oligonucleotide; CTG chr11 5234127 5234148 5234132 5234127 -
atgctgttatgggcaaccctaa

SEQ ID NO: 142774 - DNA, 22 bp, Artificial Sequence
  Synthetic oligonucleotide; CTG chr11 5234121 5234142 5234126 5234121 -
ttatgggcaaccctaaggtgaa

SEQ ID NO: 142775 - DNA, 22 bp, Artificial Sequence
  Synthetic oligonucleotide; TTA chr11 5234118 5234139 5234123 5234118 -
tgggcaaccctaaggtgaaggc

SEQ ID NO: 142776 - DNA, 22 bp, Artificial Sequence
  Synthetic oligonucleotide; CTA chr11 5234106 5234127 5234111 5234106 -
aggtgaaggctcatggcaagaa

SEQ ID NO: 142777 - DNA, 22 bp, Artificial Sequence
  Synthetic oligonucleotide; CTC chr11 5234094 5234115 5234099 5234094 -
atggcaagaaggtgctaggtgc

SEQ ID NO: 142778 - DNA, 22 bp, Artificial Sequence
  Synthetic oligonucleotide; CTA chr11 5234077 5234098 5234082 5234077 -
ggtgcctttagtgatggcctgg

SEQ ID NO: 142779 - DNA, 22 bp, Artificial Sequence
  Synthetic oligonucleotide; CTT chr11 5234069 5234090 5234074 5234069 -
tagtgatggcctggctcacctg

SEQ ID NO: 142780 - DNA, 22 bp, Artificial Sequence
  Synthetic oligonucleotide; TTT chr11 5234068 5234089 5234073 5234068 -
agtgatggcctggctcacctgg

SEQ ID NO: 142781 - DNA, 22 bp, Artificial Sequence
  Synthetic oligonucleotide; TTA chr11 5234067 5234088 5234072 5234067 -
gtgatggcctggctcacctgga

SEQ ID NO: 142782 - DNA, 22 bp, Artificial Sequence
  Synthetic oligonucleotide; CTG chr11 5234056 5234077 5234061 5234056 -
gctcacctggacaacctcaagg

SEQ ID NO: 142783 - DNA, 22 bp, Artificial Sequence
  Synthetic oligonucleotide; CTC chr11 5234052 5234073 5234057 5234052 -
acctggacaacctcaagggcac

SEQ ID NO: 142784 - DNA, 22 bp, Artificial Sequence
  Synthetic oligonucleotide; CTG chr11 5234047 5234068 5234052 5234047 -
gacaacctcaagggcacttttt

SEQ ID NO: 142785 - DNA, 22 bp, Artificial Sequence
  Synthetic oligonucleotide; CTC chr11 5234038 5234059 5234043 5234038 -
aagggcactttttctcagctga

SEQ ID NO: 142786 - DNA, 22 bp, Artificial Sequence
  Synthetic oligonucleotide; CTT chr11 5234028 5234049 5234033 5234028 -
tttctcagctgagtgagctgca

SEQ ID NO: 142787 - DNA, 22 bp, Artificial Sequence
  Synthetic oligonucleotide; TTT chr11 5234027 5234048 5234032 5234027 -
ttctcagctgagtgagctgcac

SEQ ID NO: 142788 - DNA, 22 bp, Artificial Sequence
  Synthetic oligonucleotide; TTT chr11 5234026 5234047 5234031 5234026 -
tctcagctgagtgagctgcact

SEQ ID NO: 142789 - DNA, 22 bp, Artificial Sequence
  Synthetic oligonucleotide; TTT chr11 5234025 5234046 5234030 5234025 -
ctcagctgagtgagctgcactg

SEQ ID NO: 142790 - DNA, 22 bp, Artificial Sequence
  Synthetic oligonucleotide; TTC chr11 5234024 5234045 5234029 5234024 -
tcagctgagtgagctgcactgt

SEQ ID NO: 142791 - DNA, 22 bp, Artificial Sequence
  Synthetic oligonucleotide; CTC chr11 5234022 5234043 5234027 5234022 -
agctgagtgagctgcactgtga

SEQ ID NO: 142792 - DNA, 22 bp, Artificial Sequence
  Synthetic oligonucleotide; CTG chr11 5234017 5234038 5234022 5234017 -
agtgagctgcactgtgacaagc

SEQ ID NO: 142793 - DNA, 22 bp, Artificial Sequence
  Synthetic oligonucleotide; CTG chr11 5234008 5234029 5234013 5234008 -
cactgtgacaagctgcacgtgg

SEQ ID NO: 142794 - DNA, 22 bp, Artificial Sequence
  Synthetic oligonucleotide; CTG chr11 5234003 5234024 5234008 5234003 -
tgacaagctgcacgtggatcct

SEQ ID NO: 142795 - DNA, 22 bp, Artificial Sequence
  Synthetic oligonucleotide; CTG chr11 5233993 5234014 5233998 5233993 -
cacgtggatcctgagaacttca

SEQ ID NO: 142796 - DNA, 22 bp, Artificial Sequence
  Synthetic oligonucleotide; CTG chr11 5233980 5234001 5233985 5233980 -
agaacttcagggtgagtccagg

SEQ ID NO: 142797 - DNA, 22 bp, Artificial Sequence
  Synthetic oligonucleotide; CTT chr11 5233973 5233994 5233978 5233973 -
cagggtgagtccaggagatgct

SEQ ID NO: 142798 - DNA, 22 bp, Artificial Sequence
  Synthetic oligonucleotide; TTC chr11 5233972 5233993 5233977 5233972 -
agggtgagtccaggagatgctt

SEQ ID NO: 142799 - DNA, 22 bp, Artificial Sequence
  Synthetic oligonucleotide; CTT chr11 5233950 5233971 5233955 5233950 -
cacttttctctttttactttct

SEQ ID NO: 142800 - DNA, 22 bp, Artificial Sequence
  Synthetic oligonucleotide; TTC chr11 5233949 5233970 5233954 5233949 -
acttttctctttttactttcta

SEQ ID NO: 142801 - DNA, 22 bp, Artificial Sequence
  Synthetic oligonucleotide; CTT chr11 5233945 5233966 5233950 5233945 -
ttctctttttactttctaatct

SEQ ID NO: 142802 - DNA, 22 bp, Artificial Sequence
  Synthetic oligonucleotide; TTT chr11 5233944 5233965 5233949 5233944 -
tctctttttactttctaatctt

SEQ ID NO: 142803 - DNA, 22 bp, Artificial Sequence
  Synthetic oligonucleotide; TTT chr11 5233943 5233964 5233948 5233943 -
ctctttttactttctaatctta

SEQ ID NO: 142804 - DNA, 22 bp, Artificial Sequence
  Synthetic oligonucleotide; TTC chr11 5233942 5233963 5233947 5233942 -
tctttttactttctaatcttac

SEQ ID NO: 142805 - DNA, 22 bp, Artificial Sequence
  Synthetic oligonucleotide; CTC chr11 5233940 5233961 5233945 5233940 -
tttttactttctaatcttacat

SEQ ID NO: 142806 - DNA, 22 bp, Artificial Sequence
  Synthetic oligonucleotide; CTT chr11 5233938 5233959 5233943 5233938 -
tttactttctaatcttacattt

SEQ ID NO: 142807 - DNA, 22 bp, Artificial Sequence
  Synthetic oligonucleotide; TTT chr11 5233937 5233958 5233942 5233937 -
ttactttctaatcttacatttt

SEQ ID NO: 142808 - DNA, 22 bp, Artificial Sequence
  Synthetic oligonucleotide; TTT chr11 5233936 5233957 5233941 5233936 -
tactttctaatcttacattttg

SEQ ID NO: 142809 - DNA, 22 bp, Artificial Sequence
  Synthetic oligonucleotide; TTT chr11 5233935 5233956 5233940 5233935 -
actttctaatcttacattttgg

SEQ ID NO: 142810 - DNA, 22 bp, Artificial Sequence
  Synthetic oligonucleotide; TTA chr11 5233934 5233955 5233939 5233934 -
ctttctaatcttacattttggt

SEQ ID NO: 142811 - DNA, 22 bp, Artificial Sequence
  Synthetic oligonucleotide; CTT chr11 5233931 5233952 5233936 5233931 -
tctaatcttacattttggttct

SEQ ID NO: 142812 - DNA, 22 bp, Artificial Sequence
  Synthetic oligonucleotide; TTT chr11 5233930 5233951 5233935 5233930 -
ctaatcttacattttggttctt

SEQ ID NO: 142813 - DNA, 22 bp, Artificial Sequence
  Synthetic oligonucleotide; TTC chr11 5233929 5233950 5233934 5233929 -
taatcttacattttggttcttt

SEQ ID NO: 142814 - DNA, 22 bp, Artificial Sequence
  Synthetic oligonucleotide; CTA chr11 5233927 5233948 5233932 5233927 -
atcttacattttggttctttta

SEQ ID NO: 142815 - DNA, 22 bp, Artificial Sequence
  Synthetic oligonucleotide; CTT chr11 5233922 5233943 5233927 5233922 -
acattttggttcttttacctac

SEQ ID NO: 142816 - DNA, 22 bp, Artificial Sequence
  Synthetic oligonucleotide; TTA chr11 5233921 5233942 5233926 5233921 -
cattttggttcttttacctacc

SEQ ID NO: 142817 - DNA, 22 bp, Artificial Sequence
  Synthetic oligonucleotide; TTT chr11 5233916 5233937 5233921 5233916 -
tggttcttttacctacctgctc

SEQ ID NO: 142818 - DNA, 22 bp, Artificial Sequence
  Synthetic oligonucleotide; TTT chr11 5233915 5233936 5233920 5233915 -
ggttcttttacctacctgctct

SEQ ID NO: 142819 - DNA, 22 bp, Artificial Sequence
  Synthetic oligonucleotide; TTG chr11 5233914 5233935 5233919 5233914 -
gttcttttacctacctgctctt

SEQ ID NO: 142820 - DNA, 22 bp, Artificial Sequence
  Synthetic oligonucleotide; TTC chr11 5233910 5233931 5233915 5233910 -
ttttacctacctgctcttctcc

SEQ ID NO: 142821 - DNA, 22 bp, Artificial Sequence
  Synthetic oligonucleotide; CTT chr11 5233908 5233929 5233913 5233908 -
ttacctacctgctcttctccca

SEQ ID NO: 142822 - DNA, 22 bp, Artificial Sequence
  Synthetic oligonucleotide; TTT chr11 5233907 5233928 5233912 5233907 -
tacctacctgctcttctcccac

SEQ ID NO: 142823 - DNA, 22 bp, Artificial Sequence
  Synthetic oligonucleotide; TTT chr11 5233906 5233927 5233911 5233906 -
acctacctgctcttctcccaca

SEQ ID NO: 142824 - DNA, 22 bp, Artificial Sequence
  Synthetic oligonucleotide; TTA chr11 5233905 5233926 5233910 5233905 -
cctacctgctcttctcccacat

SEQ ID NO: 142825 - DNA, 22 bp, Artificial Sequence
  Synthetic oligonucleotide; CTA chr11 5233901 5233922 5233906 5233901 -
cctgctcttctcccacattttt

SEQ ID NO: 142826 - DNA, 22 bp, Artificial Sequence
  Synthetic oligonucleotide; CTG chr11 5233897 5233918 5233902 5233897 -
ctcttctcccacatttttgtca

SEQ ID NO: 142827 - DNA, 22 bp, Artificial Sequence
  Synthetic oligonucleotide; CTC chr11 5233894 5233915 5233899 5233894 -
ttctcccacatttttgtcattt

SEQ ID NO: 142828 - DNA, 22 bp, Artificial Sequence
  Synthetic oligonucleotide; CTT chr11 5233892 5233913 5233897 5233892 -
ctcccacatttttgtcatttta

SEQ ID NO: 142829 - DNA, 22 bp, Artificial Sequence
  Synthetic oligonucleotide; TTC chr11 5233891 5233912 5233896 5233891 -
tcccacatttttgtcattttac

SEQ ID NO: 142830 - DNA, 22 bp, Artificial Sequence
  Synthetic oligonucleotide; CTC chr11 5233889 5233910 5233894 5233889 -
ccacatttttgtcattttacta

SEQ ID NO: 142831 - DNA, 22 bp, Artificial Sequence
  Synthetic oligonucleotide; TTT chr11 5233881 5233902 5233886 5233881 -
ttgtcattttactatattttat

SEQ ID NO: 142832 - DNA, 22 bp, Artificial Sequence
  Synthetic oligonucleotide; TTT chr11 5233880 5233901 5233885 5233880 -
tgtcattttactatattttatc

SEQ ID NO: 142833 - DNA, 22 bp, Artificial Sequence
  Synthetic oligonucleotide; TTT chr11 5233879 5233900 5233884 5233879 -
gtcattttactatattttatca

SEQ ID NO: 142834 - DNA, 22 bp, Artificial Sequence
  Synthetic oligonucleotide; TTG chr11 5233878 5233899 5233883 5233878 -
tcattttactatattttatcat

SEQ ID NO: 142835 - DNA, 22 bp, Artificial Sequence
  Synthetic oligonucleotide; TTT chr11 5233872 5233893 5233877 5233872 -
tactatattttatcatttaatg

SEQ ID NO: 142836 - DNA, 22 bp, Artificial Sequence
  Synthetic oligonucleotide; TTT chr11 5233871 5233892 5233876 5233871 -
actatattttatcatttaatgc

SEQ ID NO: 142837 - DNA, 22 bp, Artificial Sequence
  Synthetic oligonucleotide; TTA chr11 5233870 5233891 5233875 5233870 -
ctatattttatcatttaatgct

SEQ ID NO: 142838 - DNA, 22 bp, Artificial Sequence
  Synthetic oligonucleotide; CTA chr11 5233867 5233888 5233872 5233867 -
tattttatcatttaatgcttct

SEQ ID NO: 142839 - DNA, 22 bp, Artificial Sequence
  Synthetic oligonucleotide; TTT chr11 5233862 5233883 5233867 5233862 -
tatcatttaatgcttctaaaat

SEQ ID NO: 142840 - DNA, 22 bp, Artificial Sequence
  Synthetic oligonucleotide; TTT chr11 5233861 5233882 5233866 5233861 -
atcatttaatgcttctaaaatt

SEQ ID NO: 142841 - DNA, 22 bp, Artificial Sequence
  Synthetic oligonucleotide; TTA chr11 5233860 5233881 5233865 5233860 -
tcatttaatgcttctaaaattt

SEQ ID NO: 142842 - DNA, 22 bp, Artificial Sequence
  Synthetic oligonucleotide; TTT chr11 5233854 5233875 5233859 5233854 -
aatgcttctaaaattttgttaa

SEQ ID NO: 142843 - DNA, 22 bp, Artificial Sequence
  Synthetic oligonucleotide; TTA chr11 5233853 5233874 5233858 5233853 -
atgcttctaaaattttgttaat

SEQ ID NO: 142844 - DNA, 22 bp, Artificial Sequence
  Synthetic oligonucleotide; CTT chr11 5233847 5233868 5233852 5233847 -
ctaaaattttgttaatttttta

SEQ ID NO: 142845 - DNA, 22 bp, Artificial Sequence
  Synthetic oligonucleotide; TTC chr11 5233846 5233867 5233851 5233846 -
taaaattttgttaattttttat

SEQ ID NO: 142846 - DNA, 22 bp, Artificial Sequence
  Synthetic oligonucleotide; CTA chr11 5233844 5233865 5233849 5233844 -
aaattttgttaattttttattt

SEQ ID NO: 142847 - DNA, 22 bp, Artificial Sequence
  Synthetic oligonucleotide; TTT chr11 5233838 5233859 5233843 5233838 -
tgttaattttttatttaaatat

SEQ ID NO: 142848 - DNA, 22 bp, Artificial Sequence
  Synthetic oligonucleotide; TTT chr11 5233837 5233858 5233842 5233837 -
gttaattttttatttaaatatt

SEQ ID NO: 142849 - DNA, 22 bp, Artificial Sequence
  Synthetic oligonucleotide; TTG chr11 5233836 5233857 5233841 5233836 -
ttaattttttatttaaatattc

SEQ ID NO: 142850 - DNA, 22 bp, Artificial Sequence
  Synthetic oligonucleotide; TTA chr11 5233833 5233854 5233838 5233833 -
attttttatttaaatattctgc

SEQ ID NO: 142851 - DNA, 22 bp, Artificial Sequence
  Synthetic oligonucleotide; TTT chr11 5233829 5233850 5233834 5233829 -
tttatttaaatattctgcattt

SEQ ID NO: 142852 - DNA, 22 bp, Artificial Sequence
  Synthetic oligonucleotide; TTT chr11 5233828 5233849 5233833 5233828 -
ttatttaaatattctgcatttt

SEQ ID NO: 142853 - DNA, 22 bp, Artificial Sequence
  Synthetic oligonucleotide; TTT chr11 5233827 5233848 5233832 5233827 -
tatttaaatattctgcattttt

SEQ ID NO: 142854 - DNA, 22 bp, Artificial Sequence
  Synthetic oligonucleotide; TTT chr11 5233826 5233847 5233831 5233826 -
atttaaatattctgcatttttt

SEQ ID NO: 142855 - DNA, 22 bp, Artificial Sequence
  Synthetic oligonucleotide; TTA chr11 5233825 5233846 5233830 5233825 -
tttaaatattctgcattttttc

SEQ ID NO: 142856 - DNA, 22 bp, Artificial Sequence
  Synthetic oligonucleotide; TTT chr11 5233822 5233843 5233827 5233822 -
aaatattctgcattttttcctt

SEQ ID NO: 142857 - DNA, 22 bp, Artificial Sequence
  Synthetic oligonucleotide; TTA chr11 5233821 5233842 5233826 5233821 -
aatattctgcattttttccttc

SEQ ID NO: 142858 - DNA, 22 bp, Artificial Sequence
  Synthetic oligonucleotide; TTC chr11 5233814 5233835 5233819 5233814 -
tgcattttttccttcctcacaa

SEQ ID NO: 142859 - DNA, 22 bp, Artificial Sequence
  Synthetic oligonucleotide; CTG chr11 5233812 5233833 5233817 5233812 -
cattttttccttcctcacaatc

SEQ ID NO: 142860 - DNA, 22 bp, Artificial Sequence
  Synthetic oligonucleotide; TTT chr11 5233807 5233828 5233812 5233807 -
tttccttcctcacaatcttgct

SEQ ID NO: 142861 - DNA, 22 bp, Artificial Sequence
  Synthetic oligonucleotide; TTT chr11 5233806 5233827 5233811 5233806 -
ttccttcctcacaatcttgcta

SEQ ID NO: 142862 - DNA, 22 bp, Artificial Sequence
  Synthetic oligonucleotide; TTT chr11 5233805 5233826 5233810 5233805 -
tccttcctcacaatcttgctat

SEQ ID NO: 142863 - DNA, 22 bp, Artificial Sequence
  Synthetic oligonucleotide; TTT chr11 5233804 5233825 5233809 5233804 -
ccttcctcacaatcttgctatt

SEQ ID NO: 142864 - DNA, 22 bp, Artificial Sequence
  Synthetic oligonucleotide; TTC chr11 5233803 5233824 5233808 5233803 -
cttcctcacaatcttgctattt

SEQ ID NO: 142865 - DNA, 22 bp, Artificial Sequence
  Synthetic oligonucleotide; CTT chr11 5233800 5233821 5233805 5233800 -
cctcacaatcttgctattttaa

SEQ ID NO: 142866 - DNA, 22 bp, Artificial Sequence
  Synthetic oligonucleotide; TTC chr11 5233799 5233820 5233804 5233799 -
ctcacaatcttgctattttaaa

SEQ ID NO: 142867 - DNA, 22 bp, Artificial Sequence
  Synthetic oligonucleotide; CTC chr11 5233796 5233817 5233801 5233796 -
acaatcttgctattttaaatta

SEQ ID NO: 142868 - DNA, 22 bp, Artificial Sequence
  Synthetic oligonucleotide; CTT chr11 5233788 5233809 5233793 5233788 -
gctattttaaattatttaatat

SEQ ID NO: 142869 - DNA, 22 bp, Artificial Sequence
  Synthetic oligonucleotide; TTG chr11 5233787 5233808 5233792 5233787 -
ctattttaaattatttaatatc

SEQ ID NO: 142870 - DNA, 22 bp, Artificial Sequence
  Synthetic oligonucleotide; CTA chr11 5233784 5233805 5233789 5233784 -
ttttaaattatttaatatcctg

SEQ ID NO: 142871 - DNA, 22 bp, Artificial Sequence
  Synthetic oligonucleotide; TTT chr11 5233781 5233802 5233786 5233781 -
taaattatttaatatcctgtct

SEQ ID NO: 142872 - DNA, 22 bp, Artificial Sequence
  Synthetic oligonucleotide; TTT chr11 5233780 5233801 5233785 5233780 -
aaattatttaatatcctgtctt

SEQ ID NO: 142873 - DNA, 22 bp, Artificial Sequence
  Synthetic oligonucleotide; TTA chr11 5233779 5233800 5233784 5233779 -
aattatttaatatcctgtcttt

SEQ ID NO: 142874 - DNA, 22 bp, Artificial Sequence
  Synthetic oligonucleotide; TTA chr11 5233774 5233795 5233779 5233774 -
tttaatatcctgtctttctctc

SEQ ID NO: 142875 - DNA, 22 bp, Artificial Sequence
  Synthetic oligonucleotide; TTT chr11 5233771 5233792 5233776 5233771 -
aatatcctgtctttctctccca

SEQ ID NO: 142876 - DNA, 22 bp, Artificial Sequence
  Synthetic oligonucleotide; TTA chr11 5233770 5233791 5233775 5233770 -
atatcctgtctttctctcccaa

SEQ ID NO: 142877 - DNA, 22 bp, Artificial Sequence
  Synthetic oligonucleotide; CTG chr11 5233762 5233783 5233767 5233762 -
tctttctctcccaaccccctcc

SEQ ID NO: 142878 - DNA, 22 bp, Artificial Sequence
  Synthetic oligonucleotide; CTT chr11 5233758 5233779 5233763 5233758 -
tctctcccaaccccctcccttc

SEQ ID NO: 142879 - DNA, 22 bp, Artificial Sequence
  Synthetic oligonucleotide; TTT chr11 5233757 5233778 5233762 5233757 -
ctctcccaaccccctcccttca

SEQ ID NO: 142880 - DNA, 22 bp, Artificial Sequence
  Synthetic oligonucleotide; TTC chr11 5233756 5233777 5233761 5233756 -
tctcccaaccccctcccttcat

SEQ ID NO: 142881 - DNA, 22 bp, Artificial Sequence
  Synthetic oligonucleotide; CTC chr11 5233754 5233775 5233759 5233754 -
tcccaaccccctcccttcattt

SEQ ID NO: 142882 - DNA, 22 bp, Artificial Sequence
  Synthetic oligonucleotide; CTC chr11 5233752 5233773 5233757 5233752 -
ccaaccccctcccttcattttt

SEQ ID NO: 142883 - DNA, 22 bp, Artificial Sequence
  Synthetic oligonucleotide; CTC chr11 5233741 5233762 5233746 5233741 -
ccttcatttttccttctctaac

SEQ ID NO: 142884 - DNA, 22 bp, Artificial Sequence
  Synthetic oligonucleotide; CTT chr11 5233737 5233758 5233742 5233737 -
catttttccttctctaacaaca

SEQ ID NO: 142885 - DNA, 22 bp, Artificial Sequence
  Synthetic oligonucleotide; TTC chr11 5233736 5233757 5233741 5233736 -
atttttccttctctaacaacaa

SEQ ID NO: 142886 - DNA, 22 bp, Artificial Sequence
  Synthetic oligonucleotide; TTT chr11 5233732 5233753 5233737 5233732 -
ttccttctctaacaacaactca

SEQ ID NO: 142887 - DNA, 22 bp, Artificial Sequence
  Synthetic oligonucleotide; TTT chr11 5233731 5233752 5233736 5233731 -
tccttctctaacaacaactcaa

SEQ ID NO: 142888 - DNA, 22 bp, Artificial Sequence
  Synthetic oligonucleotide; TTT chr11 5233730 5233751 5233735 5233730 -
ccttctctaacaacaactcaaa

SEQ ID NO: 142889 - DNA, 22 bp, Artificial Sequence
  Synthetic oligonucleotide; TTC chr11 5233729 5233750 5233734 5233729 -
cttctctaacaacaactcaaat

SEQ ID NO: 142890 - DNA, 22 bp, Artificial Sequence
  Synthetic oligonucleotide; CTT chr11 5233726 5233747 5233731 5233726 -
ctctaacaacaactcaaattat

SEQ ID NO: 142891 - DNA, 22 bp, Artificial Sequence
  Synthetic oligonucleotide; TTC chr11 5233725 5233746 5233730 5233725 -
tctaacaacaactcaaattatg

SEQ ID NO: 142892 - DNA, 22 bp, Artificial Sequence
  Synthetic oligonucleotide; CTC chr11 5233723 5233744 5233728 5233723 -
taacaacaactcaaattatgca

SEQ ID NO: 142893 - DNA, 22 bp, Artificial Sequence
  Synthetic oligonucleotide; CTA chr11 5233721 5233742 5233726 5233721 -
acaacaactcaaattatgcata

SEQ ID NO: 142894 - DNA, 22 bp, Artificial Sequence
  Synthetic oligonucleotide; CTC chr11 5233711 5233732 5233716 5233711 -
aaattatgcataccagctctca

SEQ ID NO: 142895 - DNA, 22 bp, Artificial Sequence
  Synthetic oligonucleotide; TTA chr11 5233705 5233726 5233710 5233705 -
tgcataccagctctcacctgct

SEQ ID NO: 142896 - DNA, 22 bp, Artificial Sequence
  Synthetic oligonucleotide; CTC chr11 5233692 5233713 5233697 5233692 -
tcacctgctaattctgcactta

SEQ ID NO: 142897 - DNA, 22 bp, Artificial Sequence
  Synthetic oligonucleotide; CTC chr11 5233690 5233711 5233695 5233690 -
acctgctaattctgcacttaga

SEQ ID NO: 142898 - DNA, 22 bp, Artificial Sequence
  Synthetic oligonucleotide; CTG chr11 5233685 5233706 5233690 5233685 -
ctaattctgcacttagaataat

SEQ ID NO: 142899 - DNA, 22 bp, Artificial Sequence
  Synthetic oligonucleotide; CTA chr11 5233682 5233703 5233687 5233682 -
attctgcacttagaataatcct

SEQ ID NO: 142900 - DNA, 22 bp, Artificial Sequence
  Synthetic oligonucleotide; TTC chr11 5233678 5233699 5233683 5233678 -
tgcacttagaataatccttttg

SEQ ID NO: 142901 - DNA, 22 bp, Artificial Sequence
  Synthetic oligonucleotide; CTG chr11 5233676 5233697 5233681 5233676 -
cacttagaataatccttttgtc

SEQ ID NO: 142902 - DNA, 22 bp, Artificial Sequence
  Synthetic oligonucleotide; CTT chr11 5233671 5233692 5233676 5233671 -
agaataatccttttgtctctcc

SEQ ID NO: 142903 - DNA, 22 bp, Artificial Sequence
  Synthetic oligonucleotide; TTA chr11 5233670 5233691 5233675 5233670 -
gaataatccttttgtctctcca

SEQ ID NO: 142904 - DNA, 22 bp, Artificial Sequence
  Synthetic oligonucleotide; CTT chr11 5233659 5233680 5233664 5233659 -
ttgtctctccacatgggtatgg

SEQ ID NO: 142905 - DNA, 22 bp, Artificial Sequence
  Synthetic oligonucleotide; TTT chr11 5233658 5233679 5233663 5233658 -
tgtctctccacatgggtatggg

SEQ ID NO: 142906 - DNA, 22 bp, Artificial Sequence
  Synthetic oligonucleotide; TTT chr11 5233657 5233678 5233662 5233657 -
gtctctccacatgggtatggga

SEQ ID NO: 142907 - DNA, 22 bp, Artificial Sequence
  Synthetic oligonucleotide; TTG chr11 5233656 5233677 5233661 5233656 -
tctctccacatgggtatgggag

SEQ ID NO: 142908 - DNA, 22 bp, Artificial Sequence
  Synthetic oligonucleotide; CTC chr11 5233652 5233673 5233657 5233652 -
tccacatgggtatgggagaggc

SEQ ID NO: 142909 - DNA, 22 bp, Artificial Sequence
  Synthetic oligonucleotide; CTC chr11 5233650 5233671 5233655 5233650 -
cacatgggtatgggagaggctc

SEQ ID NO: 142910 - DNA, 22 bp, Artificial Sequence
  Synthetic oligonucleotide; CTC chr11 5233628 5233649 5233633 5233628 -
caactcaaagatgagaggcata

SEQ ID NO: 142911 - DNA, 22 bp, Artificial Sequence
  Synthetic oligonucleotide; CTC chr11 5233622 5233643 5233627 5233622 -
aaagatgagaggcatagaatac

SEQ ID NO: 142912 - DNA, 22 bp, Artificial Sequence
  Synthetic oligonucleotide; CTG chr11 5233598 5233619 5233603 5233598 -
ttttagaggctataaatcattt

SEQ ID NO: 142913 - DNA, 22 bp, Artificial Sequence
  Synthetic oligonucleotide; TTT chr11 5233595 5233616 5233600 5233595 -
tagaggctataaatcattttac

SEQ ID NO: 142914 - DNA, 22 bp, Artificial Sequence
  Synthetic oligonucleotide; TTT chr11 5233594 5233615 5233599 5233594 -
agaggctataaatcattttaca

SEQ ID NO: 142915 - DNA, 22 bp, Artificial Sequence
  Synthetic oligonucleotide; TTA chr11 5233593 5233614 5233598 5233593 -
gaggctataaatcattttacaa

SEQ ID NO: 142916 - DNA, 22 bp, Artificial Sequence
  Synthetic oligonucleotide; CTA chr11 5233586 5233607 5233591 5233586 -
taaatcattttacaataaggaa

SEQ ID NO: 142917 - DNA, 22 bp, Artificial Sequence
  Synthetic oligonucleotide; TTT chr11 5233576 5233597 5233581 5233576 -
tacaataaggaataattggaat

SEQ ID NO: 142918 - DNA, 22 bp, Artificial Sequence
  Synthetic oligonucleotide; TTT chr11 5233575 5233596 5233580 5233575 -
acaataaggaataattggaatt

SEQ ID NO: 142919 - DNA, 22 bp, Artificial Sequence
  Synthetic oligonucleotide; TTA chr11 5233574 5233595 5233579 5233574 -
caataaggaataattggaattt

SEQ ID NO: 142920 - DNA, 22 bp, Artificial Sequence
  Synthetic oligonucleotide; TTG chr11 5233558 5233579 5233563 5233558 -
gaattttataaattctgtagta

SEQ ID NO: 142921 - DNA, 22 bp, Artificial Sequence
  Synthetic oligonucleotide; TTT chr11 5233552 5233573 5233557 5233552 -
tataaattctgtagtaaatgga

SEQ ID NO: 142922 - DNA, 22 bp, Artificial Sequence
  Synthetic oligonucleotide; TTT chr11 5233551 5233572 5233556 5233551 -
ataaattctgtagtaaatggaa

SEQ ID NO: 142923 - DNA, 22 bp, Artificial Sequence
  Synthetic oligonucleotide; TTA chr11 5233550 5233571 5233555 5233550 -
taaattctgtagtaaatggaat

SEQ ID NO: 142924 - DNA, 22 bp, Artificial Sequence
  Synthetic oligonucleotide; TTC chr11 5233543 5233564 5233548 5233543 -
tgtagtaaatggaatggaaagg

SEQ ID NO: 142925 - DNA, 22 bp, Artificial Sequence
  Synthetic oligonucleotide; CTG chr11 5233541 5233562 5233546 5233541 -
tagtaaatggaatggaaaggaa

SEQ ID NO: 142926 - DNA, 22 bp, Artificial Sequence
  Synthetic oligonucleotide; TTT chr11 5233508 5233529 5233513 5233508 -
gattatgaaagactaggcagtt

SEQ ID NO: 142927 - DNA, 22 bp, Artificial Sequence
  Synthetic oligonucleotide; TTG chr11 5233507 5233528 5233512 5233507 -
attatgaaagactaggcagtta

SEQ ID NO: 142928 - DNA, 22 bp, Artificial Sequence
  Synthetic oligonucleotide; TTA chr11 5233503 5233524 5233508 5233503 -
tgaaagactaggcagttacact

SEQ ID NO: 142929 - DNA, 22 bp, Artificial Sequence
  Synthetic oligonucleotide; CTA chr11 5233493 5233514 5233498 5233493 -
ggcagttacactggaggtgggg

SEQ ID NO: 142930 - DNA, 22 bp, Artificial Sequence
  Synthetic oligonucleotide; TTA chr11 5233485 5233506 5233490 5233485 -
cactggaggtggggcagaagtc

SEQ ID NO: 142931 - DNA, 22 bp, Artificial Sequence
  Synthetic oligonucleotide; CTG chr11 5233480 5233501 5233485 5233480 -
gaggtggggcagaagtcgttgc

SEQ ID NO: 142932 - DNA, 22 bp, Artificial Sequence
  Synthetic oligonucleotide; TTG chr11 5233459 5233480 5233464 5233459 -
ctaggagacagcccatcatcac

SEQ ID NO: 142933 - DNA, 22 bp, Artificial Sequence
  Synthetic oligonucleotide; CTA chr11 5233456 5233477 5233461 5233456 -
ggagacagcccatcatcacact

SEQ ID NO: 142934 - DNA, 22 bp, Artificial Sequence
  Synthetic oligonucleotide; CTG chr11 5233433 5233454 5233438 5233433 -
attaatcaattaatttgtatct

SEQ ID NO: 142935 - DNA, 22 bp, Artificial Sequence
  Synthetic oligonucleotide; TTA chr11 5233429 5233450 5233434 5233429 -
atcaattaatttgtatctatta

SEQ ID NO: 142936 - DNA, 22 bp, Artificial Sequence
  Synthetic oligonucleotide; TTA chr11 5233421 5233442 5233426 5233421 -
atttgtatctattaatctgttt

SEQ ID NO: 142937 - DNA, 22 bp, Artificial Sequence
  Synthetic oligonucleotide; TTT chr11 5233417 5233438 5233422 5233417 -
gtatctattaatctgtttatag

SEQ ID NO: 142938 - DNA, 22 bp, Artificial Sequence
  Synthetic oligonucleotide; TTG chr11 5233416 5233437 5233421 5233416 -
tatctattaatctgtttatagt

SEQ ID NO: 142939 - DNA, 22 bp, Artificial Sequence
  Synthetic oligonucleotide; CTA chr11 5233410 5233431 5233415 5233410 -
ttaatctgtttatagtaattaa

SEQ ID NO: 142940 - DNA, 22 bp, Artificial Sequence
  Synthetic oligonucleotide; TTA chr11 5233407 5233428 5233412 5233407 -
atctgtttatagtaattaattt

SEQ ID NO: 142941 - DNA, 22 bp, Artificial Sequence
  Synthetic oligonucleotide; CTG chr11 5233402 5233423 5233407 5233402 -
tttatagtaattaatttgtata

SEQ ID NO: 142942 - DNA, 22 bp, Artificial Sequence
  Synthetic oligonucleotide; TTT chr11 5233399 5233420 5233404 5233399 -
atagtaattaatttgtatatgc

SEQ ID NO: 142943 - DNA, 22 bp, Artificial Sequence
  Synthetic oligonucleotide; TTA chr11 5233398 5233419 5233403 5233398 -
tagtaattaatttgtatatgct

SEQ ID NO: 142944 - DNA, 22 bp, Artificial Sequence
  Synthetic oligonucleotide; TTA chr11 5233389 5233410 5233394 5233389 -
atttgtatatgctatatacaca

SEQ ID NO: 142945 - DNA, 22 bp, Artificial Sequence
  Synthetic oligonucleotide; TTT chr11 5233385 5233406 5233390 5233385 -
gtatatgctatatacacataca

SEQ ID NO: 142946 - DNA, 22 bp, Artificial Sequence
  Synthetic oligonucleotide; TTG chr11 5233384 5233405 5233389 5233384 -
tatatgctatatacacatacaa

SEQ ID NO: 142947 - DNA, 22 bp, Artificial Sequence
  Synthetic oligonucleotide; CTA chr11 5233375 5233396 5233380 5233375 -
tatacacatacaaaattaaaac

SEQ ID NO: 142948 - DNA, 22 bp, Artificial Sequence
  Synthetic oligonucleotide; TTA chr11 5233357 5233378 5233362 5233357 -
aaactaatttggaattaatttg

SEQ ID NO: 142949 - DNA, 22 bp, Artificial Sequence
  Synthetic oligonucleotide; CTA chr11 5233351 5233372 5233356 5233351 -
atttggaattaatttgtatata

SEQ ID NO: 142950 - DNA, 22 bp, Artificial Sequence
  Synthetic oligonucleotide; TTT chr11 5233347 5233368 5233352 5233347 -
ggaattaatttgtatatagtat

SEQ ID NO: 142951 - DNA, 22 bp, Artificial Sequence
  Synthetic oligonucleotide; TTG chr11 5233346 5233367 5233351 5233346 -
gaattaatttgtatatagtatt

SEQ ID NO: 142952 - DNA, 22 bp, Artificial Sequence
  Synthetic oligonucleotide; TTA chr11 5233340 5233361 5233345 5233340 -
atttgtatatagtattatacag

SEQ ID NO: 142953 - DNA, 22 bp, Artificial Sequence
  Synthetic oligonucleotide; TTT chr11 5233336 5233357 5233341 5233336 -
gtatatagtattatacagcata

SEQ ID NO: 142954 - DNA, 22 bp, Artificial Sequence
  Synthetic oligonucleotide; TTG chr11 5233335 5233356 5233340 5233335 -
tatatagtattatacagcatat

SEQ ID NO: 142955 - DNA, 22 bp, Artificial Sequence
  Synthetic oligonucleotide; TTA chr11 5233323 5233344 5233328 5233323 -
tacagcatatatagcatatatg

SEQ ID NO: 142956 - DNA, 22 bp, Artificial Sequence
  Synthetic oligonucleotide; CTA chr11 5233286 5233307 5233291 5233286 -
catgctagttaagtacatagag

SEQ ID NO: 142957 - DNA, 22 bp, Artificial Sequence
  Synthetic oligonucleotide; CTA chr11 5233279 5233300 5233284 5233279 -
gttaagtacatagaggatgtgt

SEQ ID NO: 142958 - DNA, 22 bp, Artificial Sequence
  Synthetic oligonucleotide; TTA chr11 5233275 5233296 5233280 5233275 -
agtacatagaggatgtgtgtgt

SEQ ID NO: 142959 - DNA, 22 bp, Artificial Sequence
  Synthetic oligonucleotide; TTA chr11 5233239 5233260 5233244 5233239 -
tatgtatgcattcatatatgta

SEQ ID NO: 142960 - DNA, 22 bp, Artificial Sequence
  Synthetic oligonucleotide; TTC chr11 5233226 5233247 5233231 5233226 -
atatatgtacttatttatgctg

SEQ ID NO: 142961 - DNA, 22 bp, Artificial Sequence
  Synthetic oligonucleotide; CTT chr11 5233214 5233235 5233219 5233214 -
atttatgctgatgggaataacc

SEQ ID NO: 142962 - DNA, 22 bp, Artificial Sequence
  Synthetic oligonucleotide; TTA chr11 5233213 5233234 5233218 5233213 -
tttatgctgatgggaataacct

SEQ ID NO: 142963 - DNA, 22 bp, Artificial Sequence
  Synthetic oligonucleotide; TTT chr11 5233210 5233231 5233215 5233210 -
atgctgatgggaataacctggg

SEQ ID NO: 142964 - DNA, 22 bp, Artificial Sequence
  Synthetic oligonucleotide; TTA chr11 5233209 5233230 5233214 5233209 -
tgctgatgggaataacctgggg

SEQ ID NO: 142965 - DNA, 22 bp, Artificial Sequence
  Synthetic oligonucleotide; CTG chr11 5233204 5233225 5233209 5233204 -
atgggaataacctggggatcag

SEQ ID NO: 142966 - DNA, 22 bp, Artificial Sequence
  Synthetic oligonucleotide; CTG chr11 5233190 5233211 5233195 5233190 -
gggatcagttttgtctaagatt

SEQ ID NO: 142967 - DNA, 22 bp, Artificial Sequence
  Synthetic oligonucleotide; TTT chr11 5233179 5233200 5233184 5233179 -
tgtctaagatttgggcagaaaa

SEQ ID NO: 142968 - DNA, 22 bp, Artificial Sequence
  Synthetic oligonucleotide; TTT chr11 5233178 5233199 5233183 5233178 -
gtctaagatttgggcagaaaaa

SEQ ID NO: 142969 - DNA, 22 bp, Artificial Sequence
  Synthetic oligonucleotide; TTG chr11 5233177 5233198 5233182 5233177 -
tctaagatttgggcagaaaaaa

SEQ ID NO: 142970 - DNA, 22 bp, Artificial Sequence
  Synthetic oligonucleotide; CTA chr11 5233173 5233194 5233178 5233173 -
agatttgggcagaaaaaaatgg

SEQ ID NO: 142971 - DNA, 22 bp, Artificial Sequence
  Synthetic oligonucleotide; TTT chr11 5233167 5233188 5233172 5233167 -
gggcagaaaaaaatgggtgttg

SEQ ID NO: 142972 - DNA, 22 bp, Artificial Sequence
  Synthetic oligonucleotide; TTG chr11 5233166 5233187 5233171 5233166 -
ggcagaaaaaaatgggtgttgg

SEQ ID NO: 142973 - DNA, 22 bp, Artificial Sequence
  Synthetic oligonucleotide; TTG chr11 5233145 5233166 5233150 5233145 -
gctcagtttctcagaagccagt

SEQ ID NO: 142974 - DNA, 22 bp, Artificial Sequence
  Synthetic oligonucleotide; CTC chr11 5233141 5233162 5233146 5233141 -
agtttctcagaagccagtcttt

SEQ ID NO: 142975 - DNA, 22 bp, Artificial Sequence
  Synthetic oligonucleotide; TTT chr11 5233136 5233157 5233141 5233136 -
ctcagaagccagtctttatttc

SEQ ID NO: 142976 - DNA, 22 bp, Artificial Sequence
  Synthetic oligonucleotide; TTC chr11 5233135 5233156 5233140 5233135 -
tcagaagccagtctttatttct

SEQ ID NO: 142977 - DNA, 22 bp, Artificial Sequence
  Synthetic oligonucleotide; CTC chr11 5233133 5233154 5233138 5233133 -
agaagccagtctttatttctct

SEQ ID NO: 142978 - DNA, 22 bp, Artificial Sequence
  Synthetic oligonucleotide; CTT chr11 5233120 5233141 5233125 5233120 -
tatttctctgttaaccatatgc

SEQ ID NO: 142979 - DNA, 22 bp, Artificial Sequence
  Synthetic oligonucleotide; TTT chr11 5233119 5233140 5233124 5233119 -
atttctctgttaaccatatgca

SEQ ID NO: 142980 - DNA, 22 bp, Artificial Sequence
  Synthetic oligonucleotide; TTA chr11 5233118 5233139 5233123 5233118 -
tttctctgttaaccatatgcat

SEQ ID NO: 142981 - DNA, 22 bp, Artificial Sequence
  Synthetic oligonucleotide; TTT chr11 5233115 5233136 5233120 5233115 -
ctctgttaaccatatgcatgta

SEQ ID NO: 142982 - DNA, 22 bp, Artificial Sequence
  Synthetic oligonucleotide; TTC chr11 5233114 5233135 5233119 5233114 -
tctgttaaccatatgcatgtat

SEQ ID NO: 142983 - DNA, 22 bp, Artificial Sequence
  Synthetic oligonucleotide; CTC chr11 5233112 5233133 5233117 5233112 -
tgttaaccatatgcatgtatct

SEQ ID NO: 142984 - DNA, 22 bp, Artificial Sequence
  Synthetic oligonucleotide; CTG chr11 5233110 5233131 5233115 5233110 -
ttaaccatatgcatgtatctgc

SEQ ID NO: 142985 - DNA, 22 bp, Artificial Sequence
  Synthetic oligonucleotide; TTA chr11 5233107 5233128 5233112 5233107 -
accatatgcatgtatctgccta

SEQ ID NO: 142986 - DNA, 22 bp, Artificial Sequence
  Synthetic oligonucleotide; CTG chr11 5233089 5233110 5233094 5233089 -
cctacctcttctccgcagctct

SEQ ID NO: 142987 - DNA, 22 bp, Artificial Sequence
  Synthetic oligonucleotide; CTA chr11 5233085 5233106 5233090 5233085 -
cctcttctccgcagctcttggg

SEQ ID NO: 142988 - DNA, 22 bp, Artificial Sequence
  Synthetic oligonucleotide; CTC chr11 5233081 5233102 5233086 5233081 -
ttctccgcagctcttgggcaat

SEQ ID NO: 142989 - DNA, 22 bp, Artificial Sequence
  Synthetic oligonucleotide; CTT chr11 5233079 5233100 5233084 5233079 -
ctccgcagctcttgggcaatgt

SEQ ID NO: 142990 - DNA, 22 bp, Artificial Sequence
  Synthetic oligonucleotide; TTC chr11 5233078 5233099 5233083 5233078 -
tccgcagctcttgggcaatgtg

SEQ ID NO: 142991 - DNA, 22 bp, Artificial Sequence
  Synthetic oligonucleotide; CTC chr11 5233076 5233097 5233081 5233076 -
cgcagctcttgggcaatgtgct

SEQ ID NO: 142992 - DNA, 22 bp, Artificial Sequence
  Synthetic oligonucleotide; CTC chr11 5233068 5233089 5233073 5233068 -
ttgggcaatgtgctggtgtgtg

SEQ ID NO: 142993 - DNA, 22 bp, Artificial Sequence
  Synthetic oligonucleotide; CTT chr11 5233066 5233087 5233071 5233066 -
gggcaatgtgctggtgtgtgtg

SEQ ID NO: 142994 - DNA, 22 bp, Artificial Sequence
  Synthetic oligonucleotide; TTG chr11 5233065 5233086 5233070 5233065 -
ggcaatgtgctggtgtgtgtgc

SEQ ID NO: 142995 - DNA, 22 bp, Artificial Sequence
  Synthetic oligonucleotide; CTG chr11 5233053 5233074 5233058 5233053 -
gtgtgtgtgctggcccgcaact

SEQ ID NO: 142996 - DNA, 22 bp, Artificial Sequence
  Synthetic oligonucleotide; CTG chr11 5233041 5233062 5233046 5233041 -
gcccgcaactttggcaaggaat

SEQ ID NO: 142997 - DNA, 22 bp, Artificial Sequence
  Synthetic oligonucleotide; CTT chr11 5233030 5233051 5233035 5233030 -
tggcaaggaattcaccccacaa

SEQ ID NO: 142998 - DNA, 22 bp, Artificial Sequence
  Synthetic oligonucleotide; TTT chr11 5233029 5233050 5233034 5233029 -
ggcaaggaattcaccccacaaa

SEQ ID NO: 142999 - DNA, 22 bp, Artificial Sequence
  Synthetic oligonucleotide; TTG chr11 5233028 5233049 5233033 5233028 -
gcaaggaattcaccccacaaat

SEQ ID NO: 143000 - DNA, 22 bp, Artificial Sequence
  Synthetic oligonucleotide; TTC chr11 5233017 5233038 5233022 5233017 -
accccacaaatgcaggctgcct

SEQ ID NO: 143001 - DNA, 22 bp, Artificial Sequence
  Synthetic oligonucleotide; CTG chr11 5232998 5233019 5233003 5232998 -
cctatcagaaggtggtggctgg

SEQ ID NO: 143002 - DNA, 22 bp, Artificial Sequence
  Synthetic oligonucleotide; CTA chr11 5232994 5233015 5232999 5232994 -
tcagaaggtggtggctggtgtg

SEQ ID NO: 143003 - DNA, 22 bp, Artificial Sequence
  Synthetic oligonucleotide; CTG chr11 5232977 5232998 5232982 5232977 -
gtgtggctaatgccctggctca

SEQ ID NO: 143004 - DNA, 22 bp, Artificial Sequence
  Synthetic oligonucleotide; CTA chr11 5232968 5232989 5232973 5232968 -
atgccctggctcacaagtacca

SEQ ID NO: 143005 - DNA, 22 bp, Artificial Sequence
  Synthetic oligonucleotide; CTG chr11 5232960 5232981 5232965 5232960 -
gctcacaagtaccattgagatc

SEQ ID NO: 143006 - DNA, 22 bp, Artificial Sequence
  Synthetic oligonucleotide; CTC chr11 5232956 5232977 5232961 5232956 -
acaagtaccattgagatcctgg

SEQ ID NO: 143007 - DNA, 22 bp, Artificial Sequence
  Synthetic oligonucleotide; TTG chr11 5232943 5232964 5232948 5232943 -
agatcctggactgtttcctgat

SEQ ID NO: 143008 - DNA, 22 bp, Artificial Sequence
  Synthetic oligonucleotide; CTG chr11 5232935 5232956 5232940 5232935 -
gactgtttcctgataaccataa

SEQ ID NO: 143009 - DNA, 22 bp, Artificial Sequence
  Synthetic oligonucleotide; CTG chr11 5232930 5232951 5232935 5232930 -
tttcctgataaccataagaaga

SEQ ID NO: 143010 - DNA, 22 bp, Artificial Sequence
  Synthetic oligonucleotide; TTT chr11 5232927 5232948 5232932 5232927 -
cctgataaccataagaagaccc

SEQ ID NO: 143011 - DNA, 22 bp, Artificial Sequence
  Synthetic oligonucleotide; TTC chr11 5232926 5232947 5232931 5232926 -
ctgataaccataagaagaccct

SEQ ID NO: 143012 - DNA, 22 bp, Artificial Sequence
  Synthetic oligonucleotide; CTG chr11 5232923 5232944 5232928 5232923 -
ataaccataagaagaccctatt

SEQ ID NO: 143013 - DNA, 22 bp, Artificial Sequence
  Synthetic oligonucleotide; CTA chr11 5232903 5232924 5232908 5232903 -
tttccctagattctattttctg

SEQ ID NO: 143014 - DNA, 22 bp, Artificial Sequence
  Synthetic oligonucleotide; TTT chr11 5232900 5232921 5232905 5232900 -
ccctagattctattttctgaac

SEQ ID NO: 143015 - DNA, 22 bp, Artificial Sequence
  Synthetic oligonucleotide; TTC chr11 5232899 5232920 5232904 5232899 -
cctagattctattttctgaact

SEQ ID NO: 143016 - DNA, 22 bp, Artificial Sequence
  Synthetic oligonucleotide; CTA chr11 5232895 5232916 5232900 5232895 -
gattctattttctgaacttggg

SEQ ID NO: 143017 - DNA, 22 bp, Artificial Sequence
  Synthetic oligonucleotide; TTC chr11 5232890 5232911 5232895 5232890 -
tattttctgaacttgggaacac

SEQ ID NO: 143018 - DNA, 22 bp, Artificial Sequence
  Synthetic oligonucleotide; CTA chr11 5232888 5232909 5232893 5232888 -
ttttctgaacttgggaacacaa

SEQ ID NO: 143019 - DNA, 22 bp, Artificial Sequence
  Synthetic oligonucleotide; TTT chr11 5232885 5232906 5232890 5232885 -
tctgaacttgggaacacaatgc

SEQ ID NO: 143020 - DNA, 22 bp, Artificial Sequence
  Synthetic oligonucleotide; TTT chr11 5232884 5232905 5232889 5232884 -
ctgaacttgggaacacaatgcc

SEQ ID NO: 143021 - DNA, 22 bp, Artificial Sequence
  Synthetic oligonucleotide; TTC chr11 5232883 5232904 5232888 5232883 -
tgaacttgggaacacaatgcct

SEQ ID NO: 143022 - DNA, 22 bp, Artificial Sequence
  Synthetic oligonucleotide; CTG chr11 5232881 5232902 5232886 5232881 -
aacttgggaacacaatgcctac

SEQ ID NO: 143023 - DNA, 22 bp, Artificial Sequence
  Synthetic oligonucleotide; CTT chr11 5232876 5232897 5232881 5232876 -
gggaacacaatgcctacttcaa

SEQ ID NO: 143024 - DNA, 22 bp, Artificial Sequence
  Synthetic oligonucleotide; TTG chr11 5232875 5232896 5232880 5232875 -
ggaacacaatgcctacttcaag

SEQ ID NO: 143025 - DNA, 22 bp, Artificial Sequence
  Synthetic oligonucleotide; CTA chr11 5232860 5232881 5232865 5232860 -
cttcaagggtatggcttctgcc

SEQ ID NO: 143026 - DNA, 22 bp, Artificial Sequence
  Synthetic oligonucleotide; CTT chr11 5232857 5232878 5232862 5232857 -
caagggtatggcttctgcctaa

SEQ ID NO: 143027 - DNA, 22 bp, Artificial Sequence
  Synthetic oligonucleotide; TTC chr11 5232856 5232877 5232861 5232856 -
aagggtatggcttctgcctaat

SEQ ID NO: 143028 - DNA, 22 bp, Artificial Sequence
  Synthetic oligonucleotide; CTT chr11 5232843 5232864 5232848 5232843 -
ctgcctaataaagaatgttcag

SEQ ID NO: 143029 - DNA, 22 bp, Artificial Sequence
  Synthetic oligonucleotide; TTC chr11 5232842 5232863 5232847 5232842 -
tgcctaataaagaatgttcagc

SEQ ID NO: 143030 - DNA, 22 bp, Artificial Sequence
  Synthetic oligonucleotide; CTG chr11 5232840 5232861 5232845 5232840 -
cctaataaagaatgttcagctc

SEQ ID NO: 143031 - DNA, 22 bp, Artificial Sequence
  Synthetic oligonucleotide; CTA chr11 5232836 5232857 5232841 5232836 -
ataaagaatgttcagctcaact

SEQ ID NO: 143032 - DNA, 22 bp, Artificial Sequence
  Synthetic oligonucleotide; TTC chr11 5232823 5232844 5232828 5232823 -
agctcaacttcctgattaattt

SEQ ID NO: 143033 - DNA, 22 bp, Artificial Sequence
  Synthetic oligonucleotide; CTC chr11 5232818 5232839 5232823 5232818 -
aacttcctgattaatttcactt

SEQ ID NO: 143034 - DNA, 22 bp, Artificial Sequence
  Synthetic oligonucleotide; CTT chr11 5232813 5232834 5232818 5232813 -
cctgattaatttcacttatttc

SEQ ID NO: 143035 - DNA, 22 bp, Artificial Sequence
  Synthetic oligonucleotide; TTC chr11 5232812 5232833 5232817 5232812 -
ctgattaatttcacttatttca

SEQ ID NO: 143036 - DNA, 22 bp, Artificial Sequence
  Synthetic oligonucleotide; CTG chr11 5232809 5232830 5232814 5232809 -
attaatttcacttatttcattt

SEQ ID NO: 143037 - DNA, 22 bp, Artificial Sequence
  Synthetic oligonucleotide; TTA chr11 5232805 5232826 5232810 5232805 -
atttcacttatttcattttttt

SEQ ID NO: 143038 - DNA, 22 bp, Artificial Sequence
  Synthetic oligonucleotide; TTT chr11 5232801 5232822 5232806 5232801 -
cacttatttcatttttttgtcc

SEQ ID NO: 143039 - DNA, 22 bp, Artificial Sequence
  Synthetic oligonucleotide; TTC chr11 5232800 5232821 5232805 5232800 -
acttatttcatttttttgtcca

SEQ ID NO: 143040 - DNA, 22 bp, Artificial Sequence
  Synthetic oligonucleotide; CTT chr11 5232796 5232817 5232801 5232796 -
atttcatttttttgtccaggtg

SEQ ID NO: 143041 - DNA, 22 bp, Artificial Sequence
  Synthetic oligonucleotide; TTA chr11 5232795 5232816 5232800 5232795 -
tttcatttttttgtccaggtgt

SEQ ID NO: 143042 - DNA, 22 bp, Artificial Sequence
  Synthetic oligonucleotide; TTT chr11 5232792 5232813 5232797 5232792 -
catttttttgtccaggtgtgta

SEQ ID NO: 143043 - DNA, 22 bp, Artificial Sequence
  Synthetic oligonucleotide; TTC chr11 5232791 5232812 5232796 5232791 -
atttttttgtccaggtgtgtaa

SEQ ID NO: 143044 - DNA, 22 bp, Artificial Sequence
  Synthetic oligonucleotide; TTT chr11 5232787 5232808 5232792 5232787 -
ttttgtccaggtgtgtaagaag

SEQ ID NO: 143045 - DNA, 22 bp, Artificial Sequence
  Synthetic oligonucleotide; TTT chr11 5232786 5232807 5232791 5232786 -
tttgtccaggtgtgtaagaagg

SEQ ID NO: 143046 - DNA, 22 bp, Artificial Sequence
  Synthetic oligonucleotide; TTT chr11 5232785 5232806 5232790 5232785 -
ttgtccaggtgtgtaagaaggt

SEQ ID NO: 143047 - DNA, 22 bp, Artificial Sequence
  Synthetic oligonucleotide; TTT chr11 5232784 5232805 5232789 5232784 -
tgtccaggtgtgtaagaaggtt

SEQ ID NO: 143048 - DNA, 22 bp, Artificial Sequence
  Synthetic oligonucleotide; TTT chr11 5232783 5232804 5232788 5232783 -
gtccaggtgtgtaagaaggttc

SEQ ID NO: 143049 - DNA, 22 bp, Artificial Sequence
  Synthetic oligonucleotide; TTG chr11 5232782 5232803 5232787 5232782 -
tccaggtgtgtaagaaggttcc

SEQ ID NO: 143050 - DNA, 22 bp, Artificial Sequence
  Synthetic oligonucleotide; TTC chr11 5232761 5232782 5232766 5232761 -
ctgaggctctacagatagggag

SEQ ID NO: 143051 - DNA, 22 bp, Artificial Sequence
  Synthetic oligonucleotide; CTG chr11 5232758 5232779 5232763 5232758 -
aggctctacagatagggagcac

SEQ ID NO: 143052 - DNA, 22 bp, Artificial Sequence
  Synthetic oligonucleotide; CTC chr11 5232752 5232773 5232757 5232752 -
tacagatagggagcacttgttt

SEQ ID NO: 143053 - DNA, 22 bp, Artificial Sequence
  Synthetic oligonucleotide; CTA chr11 5232750 5232771 5232755 5232750 -
cagatagggagcacttgtttat

SEQ ID NO: 143054 - DNA, 22 bp, Artificial Sequence
  Synthetic oligonucleotide; CTT chr11 5232734 5232755 5232739 5232734 -
gtttattttacaaagagtacat

SEQ ID NO: 143055 - DNA, 22 bp, Artificial Sequence
  Synthetic oligonucleotide; TTG chr11 5232733 5232754 5232738 5232733 -
tttattttacaaagagtacatg

SEQ ID NO: 143056 - DNA, 22 bp, Artificial Sequence
  Synthetic oligonucleotide; TTT chr11 5232730 5232751 5232735 5232730 -
attttacaaagagtacatggga

SEQ ID NO: 143057 - DNA, 22 bp, Artificial Sequence
  Synthetic oligonucleotide; TTA chr11 5232729 5232750 5232734 5232729 -
ttttacaaagagtacatgggaa

SEQ ID NO: 143058 - DNA, 22 bp, Artificial Sequence
  Synthetic oligonucleotide; TTT chr11 5232726 5232747 5232731 5232726 -
tacaaagagtacatgggaaaag

SEQ ID NO: 143059 - DNA, 22 bp, Artificial Sequence
  Synthetic oligonucleotide; TTT chr11 5232725 5232746 5232730 5232725 -
acaaagagtacatgggaaaaga

SEQ ID NO: 143060 - DNA, 22 bp, Artificial Sequence
  Synthetic oligonucleotide; TTA chr11 5232724 5232745 5232729 5232724 -
caaagagtacatgggaaaagag

SEQ ID NO: 143061 - DNA, 22 bp, Artificial Sequence
  Synthetic oligonucleotide; TTA chr11 5232674 5232695 5232679 5232674 -
atgggtgacacttctacctcca

SEQ ID NO: 143062 - DNA, 22 bp, Artificial Sequence
  Synthetic oligonucleotide; CTT chr11 5232661 5232682 5232666 5232661 -
ctacctccaaagagcagaaatt

SEQ ID NO: 143063 - DNA, 22 bp, Artificial Sequence
  Synthetic oligonucleotide; TTC chr11 5232660 5232681 5232665 5232660 -
tacctccaaagagcagaaatta

SEQ ID NO: 143064 - DNA, 22 bp, Artificial Sequence
  Synthetic oligonucleotide; CTA chr11 5232658 5232679 5232663 5232658 -
cctccaaagagcagaaattatc

SEQ ID NO: 143065 - DNA, 22 bp, Artificial Sequence
  Synthetic oligonucleotide; CTC chr11 5232654 5232675 5232659 5232654 -
caaagagcagaaattatcaaga

SEQ ID NO: 143066 - DNA, 22 bp, Artificial Sequence
  Synthetic oligonucleotide; TTA chr11 5232638 5232659 5232643 5232638 -
tcaagaactcttgatacaaaga

SEQ ID NO: 143067 - DNA, 22 bp, Artificial Sequence
  Synthetic oligonucleotide; CTC chr11 5232628 5232649 5232633 5232628 -
ttgatacaaagataatactggc

SEQ ID NO: 143068 - DNA, 22 bp, Artificial Sequence
  Synthetic oligonucleotide; CTT chr11 5232626 5232647 5232631 5232626 -
gatacaaagataatactggcac

SEQ ID NO: 143069 - DNA, 22 bp, Artificial Sequence
  Synthetic oligonucleotide; TTG chr11 5232625 5232646 5232630 5232625 -
atacaaagataatactggcact

SEQ ID NO: 143070 - DNA, 22 bp, Artificial Sequence
  Synthetic oligonucleotide; CTG chr11 5232608 5232629 5232613 5232608 -
gcactgcagaggttctagggaa

SEQ ID NO: 143071 - DNA, 22 bp, Artificial Sequence
  Synthetic oligonucleotide; CTG chr11 5232602 5232623 5232607 5232602 -
cagaggttctagggaagacctc

SEQ ID NO: 143072 - DNA, 22 bp, Artificial Sequence
  Synthetic oligonucleotide; TTC chr11 5232593 5232614 5232598 5232593 -
tagggaagacctcaaccctaag

SEQ ID NO: 143073 - DNA, 22 bp, Artificial Sequence
  Synthetic oligonucleotide; CTA chr11 5232591 5232612 5232596 5232591 -
gggaagacctcaaccctaagac

SEQ ID NO: 143074 - DNA, 22 bp, Artificial Sequence
  Synthetic oligonucleotide; CTC chr11 5232580 5232601 5232585 5232580 -
aaccctaagacatagcctcaag

SEQ ID NO: 143075 - DNA, 22 bp, Artificial Sequence
  Synthetic oligonucleotide; CTA chr11 5232573 5232594 5232578 5232573 -
agacatagcctcaagggtaatg

SEQ ID NO: 143076 - DNA, 22 bp, Artificial Sequence
  Synthetic oligonucleotide; CTC chr11 5232561 5232582 5232566 5232561 -
aagggtaatgctacgattaaac

SEQ ID NO: 143077 - DNA, 22 bp, Artificial Sequence
  Synthetic oligonucleotide; CTA chr11 5232548 5232569 5232553 5232548 -
cgattaaactccaacaattact

SEQ ID NO: 143078 - DNA, 22 bp, Artificial Sequence
  Synthetic oligonucleotide; TTA chr11 5232542 5232563 5232547 5232542 -
aactccaacaattactgagaaa

SEQ ID NO: 143079 - DNA, 22 bp, Artificial Sequence
  Synthetic oligonucleotide; CTC chr11 5232537 5232558 5232542 5232537 -
caacaattactgagaaaataat

SEQ ID NO: 143080 - DNA, 22 bp, Artificial Sequence
  Synthetic oligonucleotide; TTA chr11 5232528 5232549 5232533 5232528 -
ctgagaaaataatgtgctcaat

SEQ ID NO: 143081 - DNA, 22 bp, Artificial Sequence
  Synthetic oligonucleotide; CTG chr11 5232525 5232546 5232530 5232525 -
agaaaataatgtgctcaattaa

SEQ ID NO: 143082 - DNA, 22 bp, Artificial Sequence
  Synthetic oligonucleotide; CTC chr11 5232509 5232530 5232514 5232509 -
aattaaaggcataatgattact

SEQ ID NO: 143083 - DNA, 22 bp, Artificial Sequence
  Synthetic oligonucleotide; TTA chr11 5232504 5232525 5232509 5232504 -
aaggcataatgattactcaaga

SEQ ID NO: 143084 - DNA, 22 bp, Artificial Sequence
  Synthetic oligonucleotide; TTA chr11 5232489 5232510 5232494 5232489 -
ctcaagacaatgttatgttgtc

SEQ ID NO: 143085 - DNA, 22 bp, Artificial Sequence
  Synthetic oligonucleotide; CTC chr11 5232486 5232507 5232491 5232486 -
aagacaatgttatgttgtcttt

SEQ ID NO: 143086 - DNA, 22 bp, Artificial Sequence
  Synthetic oligonucleotide; TTA chr11 5232474 5232495 5232479 5232474 -
tgttgtctttcttcctccttcc

SEQ ID NO: 143087 - DNA, 22 bp, Artificial Sequence
  Synthetic oligonucleotide; TTG chr11 5232469 5232490 5232474 5232469 -
tctttcttcctccttcctttgc

SEQ ID NO: 143088 - DNA, 22 bp, Artificial Sequence
  Synthetic oligonucleotide; CTT chr11 5232465 5232486 5232470 5232465 -
tcttcctccttcctttgcctgc

SEQ ID NO: 143089 - DNA, 22 bp, Artificial Sequence
  Synthetic oligonucleotide; TTT chr11 5232464 5232485 5232469 5232464 -
cttcctccttcctttgcctgca

SEQ ID NO: 143090 - DNA, 22 bp, Artificial Sequence
  Synthetic oligonucleotide; TTC chr11 5232463 5232484 5232468 5232463 -
ttcctccttcctttgcctgcac

SEQ ID NO: 143091 - DNA, 22 bp, Artificial Sequence
  Synthetic oligonucleotide; CTT chr11 5232461 5232482 5232466 5232461 -
cctccttcctttgcctgcacat

SEQ ID NO: 143092 - DNA, 22 bp, Artificial Sequence
  Synthetic oligonucleotide; TTC chr11 5232460 5232481 5232465 5232460 -
ctccttcctttgcctgcacatt

SEQ ID NO: 143093 - DNA, 22 bp, Artificial Sequence
  Synthetic oligonucleotide; CTC chr11 5232457 5232478 5232462 5232457 -
cttcctttgcctgcacattgta

SEQ ID NO: 143094 - DNA, 22 bp, Artificial Sequence
  Synthetic oligonucleotide; CTT chr11 5232454 5232475 5232459 5232454 -
cctttgcctgcacattgtagcc

SEQ ID NO: 143095 - DNA, 22 bp, Artificial Sequence
  Synthetic oligonucleotide; TTC chr11 5232453 5232474 5232458 5232453 -
ctttgcctgcacattgtagccc

SEQ ID NO: 143096 - DNA, 22 bp, Artificial Sequence
  Synthetic oligonucleotide; CTT chr11 5232450 5232471 5232455 5232450 -
tgcctgcacattgtagcccata

SEQ ID NO: 143097 - DNA, 22 bp, Artificial Sequence
  Synthetic oligonucleotide; TTT chr11 5232449 5232470 5232454 5232449 -
gcctgcacattgtagcccataa

SEQ ID NO: 143098 - DNA, 22 bp, Artificial Sequence
  Synthetic oligonucleotide; TTG chr11 5232448 5232469 5232453 5232448 -
cctgcacattgtagcccataat

SEQ ID NO: 143099 - DNA, 22 bp, Artificial Sequence
  Synthetic oligonucleotide; CTG chr11 5232444 5232465 5232449 5232444 -
cacattgtagcccataatacta

SEQ ID NO: 143100 - DNA, 22 bp, Artificial Sequence
  Synthetic oligonucleotide; TTG chr11 5232437 5232458 5232442 5232437 -
tagcccataatactatacccca

SEQ ID NO: 143101 - DNA, 22 bp, Artificial Sequence
  Synthetic oligonucleotide; CTA chr11 5232422 5232443 5232427 5232422 -
taccccatcaagtgttcctgct

SEQ ID NO: 143102 - DNA, 22 bp, Artificial Sequence
  Synthetic oligonucleotide; TTC chr11 5232405 5232426 5232410 5232405 -
ctgctccaagaaatagcttcct

SEQ ID NO: 143103 - DNA, 22 bp, Artificial Sequence
  Synthetic oligonucleotide; CTG chr11 5232402 5232423 5232407 5232402 -
ctccaagaaatagcttcctcct

SEQ ID NO: 143104 - DNA, 22 bp, Artificial Sequence
  Synthetic oligonucleotide; CTC chr11 5232399 5232420 5232404 5232399 -
caagaaatagcttcctcctctt

SEQ ID NO: 143105 - DNA, 22 bp, Artificial Sequence
  Synthetic oligonucleotide; CTT chr11 5232386 5232407 5232391 5232386 -
cctcctcttacttgccccagaa

SEQ ID NO: 143106 - DNA, 22 bp, Artificial Sequence
  Synthetic oligonucleotide; TTC chr11 5232385 5232406 5232390 5232385 -
ctcctcttacttgccccagaac

SEQ ID NO: 143107 - DNA, 22 bp, Artificial Sequence
  Synthetic oligonucleotide; CTC chr11 5232382 5232403 5232387 5232382 -
ctcttacttgccccagaacatc

SEQ ID NO: 143108 - DNA, 22 bp, Artificial Sequence
  Synthetic oligonucleotide; CTC chr11 5232379 5232400 5232384 5232379 -
ttacttgccccagaacatctct

SEQ ID NO: 143109 - DNA, 22 bp, Artificial Sequence
  Synthetic oligonucleotide; CTT chr11 5232377 5232398 5232382 5232377 -
acttgccccagaacatctctgt

SEQ ID NO: 143110 - DNA, 22 bp, Artificial Sequence
  Synthetic oligonucleotide; TTA chr11 5232376 5232397 5232381 5232376 -
cttgccccagaacatctctgta

SEQ ID NO: 143111 - DNA, 22 bp, Artificial Sequence
  Synthetic oligonucleotide; CTT chr11 5232373 5232394 5232378 5232373 -
gccccagaacatctctgtaaag

SEQ ID NO: 143112 - DNA, 22 bp, Artificial Sequence
  Synthetic oligonucleotide; TTG chr11 5232372 5232393 5232377 5232372 -
ccccagaacatctctgtaaaga

SEQ ID NO: 143113 - DNA, 22 bp, Artificial Sequence
  Synthetic oligonucleotide; CTC chr11 5232358 5232379 5232363 5232358 -
tgtaaagaatttcctcttatct

SEQ ID NO: 143114 - DNA, 22 bp, Artificial Sequence
  Synthetic oligonucleotide; CTG chr11 5232356 5232377 5232361 5232356 -
taaagaatttcctcttatcttc

SEQ ID NO: 143115 - DNA, 22 bp, Artificial Sequence
  Synthetic oligonucleotide; TTT chr11 5232346 5232367 5232351 5232346 -
cctcttatcttcccatatttca

SEQ ID NO: 143116 - DNA, 22 bp, Artificial Sequence
  Synthetic oligonucleotide; TTC chr11 5232345 5232366 5232350 5232345 -
ctcttatcttcccatatttcag

SEQ ID NO: 143117 - DNA, 22 bp, Artificial Sequence
  Synthetic oligonucleotide; CTC chr11 5232342 5232363 5232347 5232342 -
ttatcttcccatatttcagtca

SEQ ID NO: 143118 - DNA, 22 bp, Artificial Sequence
  Synthetic oligonucleotide; CTT chr11 5232340 5232361 5232345 5232340 -
atcttcccatatttcagtcaag

SEQ ID NO: 143119 - DNA, 22 bp, Artificial Sequence
  Synthetic oligonucleotide; TTA chr11 5232339 5232360 5232344 5232339 -
tcttcccatatttcagtcaaga

SEQ ID NO: 143120 - DNA, 22 bp, Artificial Sequence
  Synthetic oligonucleotide; CTT chr11 5232335 5232356 5232340 5232335 -
cccatatttcagtcaagattca

SEQ ID NO: 143121 - DNA, 22 bp, Artificial Sequence
  Synthetic oligonucleotide; TTC chr11 5232334 5232355 5232339 5232334 -
ccatatttcagtcaagattcat

SEQ ID NO: 143122 - DNA, 22 bp, Artificial Sequence
  Synthetic oligonucleotide; TTT chr11 5232326 5232347 5232331 5232326 -
cagtcaagattcattgctcacg

SEQ ID NO: 143123 - DNA, 22 bp, Artificial Sequence
  Synthetic oligonucleotide; TTC chr11 5232325 5232346 5232330 5232325 -
agtcaagattcattgctcacgt

SEQ ID NO: 143124 - DNA, 22 bp, Artificial Sequence
  Synthetic oligonucleotide; TTC chr11 5232314 5232335 5232319 5232314 -
attgctcacgtattacttgtga

SEQ ID NO: 143125 - DNA, 22 bp, Artificial Sequence
  Synthetic oligonucleotide; TTG chr11 5232310 5232331 5232315 5232310 -
ctcacgtattacttgtgacctc

SEQ ID NO: 143126 - DNA, 22 bp, Artificial Sequence
  Synthetic oligonucleotide; CTC chr11 5232307 5232328 5232312 5232307 -
acgtattacttgtgacctctct

SEQ ID NO: 143127 - DNA, 22 bp, Artificial Sequence
  Synthetic oligonucleotide; TTA chr11 5232299 5232320 5232304 5232299 -
cttgtgacctctcttgacccca

SEQ ID NO: 143128 - DNA, 22 bp, Artificial Sequence
  Synthetic oligonucleotide; CTT chr11 5232296 5232317 5232301 5232296 -
gtgacctctcttgaccccagcc

SEQ ID NO: 143129 - DNA, 22 bp, Artificial Sequence
  Synthetic oligonucleotide; TTG chr11 5232295 5232316 5232300 5232295 -
tgacctctcttgaccccagcca

SEQ ID NO: 143130 - DNA, 22 bp, Artificial Sequence
  Synthetic oligonucleotide; CTC chr11 5232288 5232309 5232293 5232288 -
tcttgaccccagccacaataaa

SEQ ID NO: 143131 - DNA, 22 bp, Artificial Sequence
  Synthetic oligonucleotide; CTC chr11 5232286 5232307 5232291 5232286 -
ttgaccccagccacaataaact

SEQ ID NO: 143132 - DNA, 22 bp, Artificial Sequence
  Synthetic oligonucleotide; CTT chr11 5232284 5232305 5232289 5232284 -
gaccccagccacaataaacttc

SEQ ID NO: 143133 - DNA, 22 bp, Artificial Sequence
  Synthetic oligonucleotide; TTG chr11 5232283 5232304 5232288 5232283 -
accccagccacaataaacttct

SEQ ID NO: 143134 - DNA, 22 bp, Artificial Sequence
  Synthetic oligonucleotide; CTT chr11 5232263 5232284 5232268 5232263 -
ctctatactacccaaaaaatct

SEQ ID NO: 143135 - DNA, 22 bp, Artificial Sequence
  Synthetic oligonucleotide; TTC chr11 5232262 5232283 5232267 5232262 -
tctatactacccaaaaaatctt

SEQ ID NO: 143136 - DNA, 22 bp, Artificial Sequence
  Synthetic oligonucleotide; CTC chr11 5232260 5232281 5232265 5232260 -
tatactacccaaaaaatctttc

SEQ ID NO: 143137 - DNA, 22 bp, Artificial Sequence
  Synthetic oligonucleotide; CTA chr11 5232258 5232279 5232263 5232258 -
tactacccaaaaaatctttcca

SEQ ID NO: 143138 - DNA, 22 bp, Artificial Sequence
  Synthetic oligonucleotide; CTA chr11 5232253 5232274 5232258 5232253 -
cccaaaaaatctttccaaaccc

SEQ ID NO: 143139 - DNA, 22 bp, Artificial Sequence
  Synthetic oligonucleotide; CTT chr11 5232240 5232261 5232245 5232240 -
tccaaaccctcccccacaccat

SEQ ID NO: 143140 - DNA, 22 bp, Artificial Sequence
  Synthetic oligonucleotide; TTT chr11 5232239 5232260 5232244 5232239 -
ccaaaccctcccccacaccatt

SEQ ID NO: 143141 - DNA, 22 bp, Artificial Sequence
  Synthetic oligonucleotide; TTC chr11 5232238 5232259 5232243 5232238 -
caaaccctcccccacaccattt

SEQ ID NO: 143142 - DNA, 22 bp, Artificial Sequence
  Synthetic oligonucleotide; CTC chr11 5232229 5232250 5232234 5232229 -
ccccacaccattttttatattt

SEQ ID NO: 143143 - DNA, 22 bp, Artificial Sequence
  Synthetic oligonucleotide; TTT chr11 5232216 5232237 5232221 5232216 -
tttatatttttatatttttctt

SEQ ID NO: 143144 - DNA, 22 bp, Artificial Sequence
  Synthetic oligonucleotide; TTT chr11 5232215 5232236 5232220 5232215 -
ttatatttttatatttttctta

SEQ ID NO: 143145 - DNA, 22 bp, Artificial Sequence
  Synthetic oligonucleotide; TTT chr11 5232214 5232235 5232219 5232214 -
tatatttttatatttttcttat

SEQ ID NO: 143146 - DNA, 22 bp, Artificial Sequence
  Synthetic oligonucleotide; TTT chr11 5232213 5232234 5232218 5232213 -
atatttttatatttttcttatt

SEQ ID NO: 143147 - DNA, 22 bp, Artificial Sequence
  Synthetic oligonucleotide; TTA chr11 5232212 5232233 5232217 5232212 -
tatttttatatttttcttattt

SEQ ID NO: 143148 - DNA, 22 bp, Artificial Sequence
  Synthetic oligonucleotide; TTT chr11 5232207 5232228 5232212 5232207 -
ttatatttttcttatttatttc

SEQ ID NO: 143149 - DNA, 22 bp, Artificial Sequence
  Synthetic oligonucleotide; TTT chr11 5232206 5232227 5232211 5232206 -
tatatttttcttatttatttca

SEQ ID NO: 143150 - DNA, 22 bp, Artificial Sequence
  Synthetic oligonucleotide; TTT chr11 5232205 5232226 5232210 5232205 -
atatttttcttatttatttcat

SEQ ID NO: 143151 - DNA, 22 bp, Artificial Sequence
  Synthetic oligonucleotide; TTA chr11 5232204 5232225 5232209 5232204 -
tatttttcttatttatttcatg

SEQ ID NO: 143152 - DNA, 22 bp, Artificial Sequence
  Synthetic oligonucleotide; TTT chr11 5232199 5232220 5232204 5232199 -
ttcttatttatttcatgcacac

SEQ ID NO: 143153 - DNA, 22 bp, Artificial Sequence
  Synthetic oligonucleotide; TTT chr11 5232198 5232219 5232203 5232198 -
tcttatttatttcatgcacaca

SEQ ID NO: 143154 - DNA, 22 bp, Artificial Sequence
  Synthetic oligonucleotide; TTT chr11 5232197 5232218 5232202 5232197 -
cttatttatttcatgcacacac

SEQ ID NO: 143155 - DNA, 22 bp, Artificial Sequence
  Synthetic oligonucleotide; TTC chr11 5232196 5232217 5232201 5232196 -
ttatttatttcatgcacacaca

SEQ ID NO: 143156 - DNA, 22 bp, Artificial Sequence
  Synthetic oligonucleotide; CTT chr11 5232194 5232215 5232199 5232194 -
atttatttcatgcacacacaca

SEQ ID NO: 143157 - DNA, 22 bp, Artificial Sequence
  Synthetic oligonucleotide; TTA chr11 5232193 5232214 5232198 5232193 -
tttatttcatgcacacacacac

SEQ ID NO: 143158 - DNA, 22 bp, Artificial Sequence
  Synthetic oligonucleotide; TTT chr11 5232190 5232211 5232195 5232190 -
atttcatgcacacacacacact

SEQ ID NO: 143159 - DNA, 22 bp, Artificial Sequence
  Synthetic oligonucleotide; TTA chr11 5232189 5232210 5232194 5232189 -
tttcatgcacacacacacactc

SEQ ID NO: 143160 - DNA, 22 bp, Artificial Sequence
  Synthetic oligonucleotide; TTT chr11 5232186 5232207 5232191 5232186 -
catgcacacacacacactccgt

SEQ ID NO: 143161 - DNA, 22 bp, Artificial Sequence
  Synthetic oligonucleotide; TTC chr11 5232185 5232206 5232190 5232185 -
atgcacacacacacactccgtg

SEQ ID NO: 143162 - DNA, 22 bp, Artificial Sequence
  Synthetic oligonucleotide; CTC chr11 5232167 5232188 5232172 5232167 -
cgtgctttataagcaattctgc

SEQ ID NO: 143163 - DNA, 22 bp, Artificial Sequence
  Synthetic oligonucleotide; CTT chr11 5232160 5232181 5232165 5232160 -
tataagcaattctgcctattct

SEQ ID NO: 143164 - DNA, 22 bp, Artificial Sequence
  Synthetic oligonucleotide; TTT chr11 5232159 5232180 5232164 5232159 -
ataagcaattctgcctattctc

SEQ ID NO: 143165 - DNA, 22 bp, Artificial Sequence
  Synthetic oligonucleotide; TTA chr11 5232158 5232179 5232163 5232158 -
taagcaattctgcctattctct

SEQ ID NO: 143166 - DNA, 22 bp, Artificial Sequence
  Synthetic oligonucleotide; TTC chr11 5232148 5232169 5232153 5232148 -
tgcctattctctaccttcttac

SEQ ID NO: 143167 - DNA, 22 bp, Artificial Sequence
  Synthetic oligonucleotide; CTG chr11 5232146 5232167 5232151 5232146 -
cctattctctaccttcttacat

SEQ ID NO: 143168 - DNA, 22 bp, Artificial Sequence
  Synthetic oligonucleotide; CTA chr11 5232142 5232163 5232147 5232142 -
ttctctaccttcttacatgcct

SEQ ID NO: 143169 - DNA, 22 bp, Artificial Sequence
  Synthetic oligonucleotide; TTC chr11 5232139 5232160 5232144 5232139 -
tctaccttcttacatgcctact

SEQ ID NO: 143170 - DNA, 22 bp, Artificial Sequence
  Synthetic oligonucleotide; CTC chr11 5232137 5232158 5232142 5232137 -
taccttcttacatgcctactgt

SEQ ID NO: 143171 - DNA, 22 bp, Artificial Sequence
  Synthetic oligonucleotide; CTA chr11 5232135 5232156 5232140 5232135 -
ccttcttacatgcctactgtgc

SEQ ID NO: 143172 - DNA, 22 bp, Artificial Sequence
  Synthetic oligonucleotide; CTT chr11 5232131 5232152 5232136 5232131 -
cttacatgcctactgtgcctca

SEQ ID NO: 143173 - DNA, 22 bp, Artificial Sequence
  Synthetic oligonucleotide; TTC chr11 5232130 5232151 5232135 5232130 -
ttacatgcctactgtgcctcat

SEQ ID NO: 143174 - DNA, 22 bp, Artificial Sequence
  Synthetic oligonucleotide; CTT chr11 5232128 5232149 5232133 5232128 -
acatgcctactgtgcctcatat

SEQ ID NO: 143175 - DNA, 22 bp, Artificial Sequence
  Synthetic oligonucleotide; TTA chr11 5232127 5232148 5232132 5232127 -
catgcctactgtgcctcatatt

SEQ ID NO: 143176 - DNA, 22 bp, Artificial Sequence
  Synthetic oligonucleotide; CTA chr11 5232119 5232140 5232124 5232119 -
ctgtgcctcatattaaattcat

SEQ ID NO: 143177 - DNA, 22 bp, Artificial Sequence
  Synthetic oligonucleotide; CTG chr11 5232116 5232137 5232121 5232116 -
tgcctcatattaaattcatcaa

SEQ ID NO: 143178 - DNA, 22 bp, Artificial Sequence
  Synthetic oligonucleotide; CTC chr11 5232110 5232131 5232115 5232110 -
atattaaattcatcaatgggca

SEQ ID NO: 143179 - DNA, 22 bp, Artificial Sequence
  Synthetic oligonucleotide; TTA chr11 5232104 5232125 5232109 5232104 -
aattcatcaatgggcagaaaga

SEQ ID NO: 143180 - DNA, 22 bp, Artificial Sequence
  Synthetic oligonucleotide; TTC chr11 5232099 5232120 5232104 5232099 -
atcaatgggcagaaagaaaata

SEQ ID NO: 143181 - DNA, 22 bp, Artificial Sequence
  Synthetic oligonucleotide; TTT chr11 5232074 5232095 5232079 5232074 -
attcaagaaaacagtgaatgaa

SEQ ID NO: 143182 - DNA, 22 bp, Artificial Sequence
  Synthetic oligonucleotide; TTA chr11 5232073 5232094 5232078 5232073 -
ttcaagaaaacagtgaatgaat

SEQ ID NO: 143183 - DNA, 22 bp, Artificial Sequence
  Synthetic oligonucleotide; TTC chr11 5232070 5232091 5232075 5232070 -
aagaaaacagtgaatgaatgaa

SEQ ID NO: 143184 - DNA, 22 bp, Artificial Sequence
  Synthetic oligonucleotide; TTA chr11 5232014 5232035 5232019 5232014 -
ttccttgctttagaacttctgg

SEQ ID NO: 143185 - DNA, 22 bp, Artificial Sequence
  Synthetic oligonucleotide; TTC chr11 5232011 5232032 5232016 5232011 -
cttgctttagaacttctggaat

SEQ ID NO: 143186 - DNA, 22 bp, Artificial Sequence
  Synthetic oligonucleotide; CTT chr11 5232008 5232029 5232013 5232008 -
gctttagaacttctggaattag

SEQ ID NO: 143187 - DNA, 22 bp, Artificial Sequence
  Synthetic oligonucleotide; TTG chr11 5232007 5232028 5232012 5232007 -
ctttagaacttctggaattaga

SEQ ID NO: 143188 - DNA, 22 bp, Artificial Sequence
  Synthetic oligonucleotide; CTT chr11 5232004 5232025 5232009 5232004 -
tagaacttctggaattagagga

SEQ ID NO: 143189 - DNA, 22 bp, Artificial Sequence
  Synthetic oligonucleotide; TTT chr11 5232003 5232024 5232008 5232003 -
agaacttctggaattagaggac

SEQ ID NO: 143190 - DNA, 22 bp, Artificial Sequence
  Synthetic oligonucleotide; TTA chr11 5232002 5232023 5232007 5232002 -
gaacttctggaattagaggaca

SEQ ID NO: 143191 - DNA, 22 bp, Artificial Sequence
  Synthetic oligonucleotide; CTT chr11 5231996 5232017 5232001 5231996 -
ctggaattagaggacaatatta

SEQ ID NO: 143192 - DNA, 22 bp, Artificial Sequence
  Synthetic oligonucleotide; TTC chr11 5231995 5232016 5232000 5231995 -
tggaattagaggacaatattaa

SEQ ID NO: 143193 - DNA, 22 bp, Artificial Sequence
  Synthetic oligonucleotide; CTG chr11 5231993 5232014 5231998 5231993 -
gaattagaggacaatattaata

SEQ ID NO: 143194 - DNA, 22 bp, Artificial Sequence
  Synthetic oligonucleotide; TTA chr11 5231987 5232008 5231992 5231987 -
gaggacaatattaataatacca

SEQ ID NO: 143195 - DNA, 22 bp, Artificial Sequence
  Synthetic oligonucleotide; TTA chr11 5231974 5231995 5231979 5231974 -
ataataccatcgcacagtgttt

SEQ ID NO: 143196 - DNA, 22 bp, Artificial Sequence
  Synthetic oligonucleotide; TTT chr11 5231952 5231973 5231957 5231952 -
ctttgttgttaatgctacaaca

SEQ ID NO: 143197 - DNA, 22 bp, Artificial Sequence
  Synthetic oligonucleotide; TTC chr11 5231951 5231972 5231956 5231951 -
tttgttgttaatgctacaacat

SEQ ID NO: 143198 - DNA, 22 bp, Artificial Sequence
  Synthetic oligonucleotide; CTT chr11 5231949 5231970 5231954 5231949 -
tgttgttaatgctacaacatac

SEQ ID NO: 143199 - DNA, 22 bp, Artificial Sequence
  Synthetic oligonucleotide; TTT chr11 5231948 5231969 5231953 5231948 -
gttgttaatgctacaacataca

SEQ ID NO: 143200 - DNA, 22 bp, Artificial Sequence
  Synthetic oligonucleotide; TTG chr11 5231947 5231968 5231952 5231947 -
ttgttaatgctacaacatacaa

SEQ ID NO: 143201 - DNA, 22 bp, Artificial Sequence
  Synthetic oligonucleotide; TTG chr11 5231944 5231965 5231949 5231944 -
ttaatgctacaacatacaaaga

SEQ ID NO: 143202 - DNA, 22 bp, Artificial Sequence
  Synthetic oligonucleotide; TTA chr11 5231941 5231962 5231946 5231941 -
atgctacaacatacaaagagga

SEQ ID NO: 143203 - DNA, 22 bp, Artificial Sequence
  Synthetic oligonucleotide; CTA chr11 5231935 5231956 5231940 5231935 -
caacatacaaagaggaagcatg

SEQ ID NO: 143204 - DNA, 22 bp, Artificial Sequence
  Synthetic oligonucleotide; TTA chr11 5231892 5231913 5231897 5231892 -
tttcctttctgatcataggagt

SEQ ID NO: 143205 - DNA, 22 bp, Artificial Sequence
  Synthetic oligonucleotide; TTT chr11 5231889 5231910 5231894 5231889 -
cctttctgatcataggagtaat

SEQ ID NO: 143206 - DNA, 22 bp, Artificial Sequence
  Synthetic oligonucleotide; TTC chr11 5231888 5231909 5231893 5231888 -
ctttctgatcataggagtaata

SEQ ID NO: 143207 - DNA, 22 bp, Artificial Sequence
  Synthetic oligonucleotide; CTT chr11 5231885 5231906 5231890 5231885 -
tctgatcataggagtaatattt

SEQ ID NO: 143208 - DNA, 22 bp, Artificial Sequence
  Synthetic oligonucleotide; TTT chr11 5231884 5231905 5231889 5231884 -
ctgatcataggagtaatatttt

SEQ ID NO: 143209 - DNA, 22 bp, Artificial Sequence
  Synthetic oligonucleotide; TTC chr11 5231883 5231904 5231888 5231883 -
tgatcataggagtaatattttt

SEQ ID NO: 143210 - DNA, 22 bp, Artificial Sequence
  Synthetic oligonucleotide; CTG chr11 5231881 5231902 5231886 5231881 -
atcataggagtaatattttttt

SEQ ID NO: 143211 - DNA, 22 bp, Artificial Sequence
  Synthetic oligonucleotide; TTT chr11 5231863 5231884 5231868 5231863 -
ttttccttgagcaccatttttg

SEQ ID NO: 143212 - DNA, 22 bp, Artificial Sequence
  Synthetic oligonucleotide; TTT chr11 5231862 5231883 5231867 5231862 -
tttccttgagcaccatttttgc

SEQ ID NO: 143213 - DNA, 22 bp, Artificial Sequence
  Synthetic oligonucleotide; TTT chr11 5231861 5231882 5231866 5231861 -
ttccttgagcaccatttttgcc

SEQ ID NO: 143214 - DNA, 22 bp, Artificial Sequence
  Synthetic oligonucleotide; TTT chr11 5231860 5231881 5231865 5231860 -
tccttgagcaccatttttgcca

SEQ ID NO: 143215 - DNA, 22 bp, Artificial Sequence
  Synthetic oligonucleotide; TTT chr11 5231859 5231880 5231864 5231859 -
ccttgagcaccatttttgccat

SEQ ID NO: 143216 - DNA, 22 bp, Artificial Sequence
  Synthetic oligonucleotide; TTC chr11 5231858 5231879 5231863 5231858 -
cttgagcaccatttttgccata

SEQ ID NO: 143217 - DNA, 22 bp, Artificial Sequence
  Synthetic oligonucleotide; CTT chr11 5231855 5231876 5231860 5231855 -
gagcaccatttttgccataggt

SEQ ID NO: 143218 - DNA, 22 bp, Artificial Sequence
  Synthetic oligonucleotide; TTG chr11 5231854 5231875 5231859 5231854 -
agcaccatttttgccataggta

SEQ ID NO: 143219 - DNA, 22 bp, Artificial Sequence
  Synthetic oligonucleotide; TTT chr11 5231844 5231865 5231849 5231844 -
ttgccataggtaaaattagaag

SEQ ID NO: 143220 - DNA, 22 bp, Artificial Sequence
  Synthetic oligonucleotide; TTT chr11 5231843 5231864 5231848 5231843 -
tgccataggtaaaattagaagg

SEQ ID NO: 143221 - DNA, 22 bp, Artificial Sequence
  Synthetic oligonucleotide; TTT chr11 5231842 5231863 5231847 5231842 -
gccataggtaaaattagaagga

SEQ ID NO: 143222 - DNA, 22 bp, Artificial Sequence
  Synthetic oligonucleotide; TTG chr11 5231841 5231862 5231846 5231841 -
ccataggtaaaattagaaggat

SEQ ID NO: 143223 - DNA, 22 bp, Artificial Sequence
  Synthetic oligonucleotide; TTA chr11 5231826 5231847 5231831 5231826 -
gaaggatttttagaactttctc

SEQ ID NO: 143224 - DNA, 22 bp, Artificial Sequence
  Synthetic oligonucleotide; TTT chr11 5231817 5231838 5231822 5231817 -
ttagaactttctcagttgtata

SEQ ID NO: 143225 - DNA, 22 bp, Artificial Sequence
  Synthetic oligonucleotide; TTT chr11 5231816 5231837 5231821 5231816 -
tagaactttctcagttgtatac

SEQ ID NO: 143226 - DNA, 22 bp, Artificial Sequence
  Synthetic oligonucleotide; TTT chr11 5231815 5231836 5231820 5231815 -
agaactttctcagttgtataca

SEQ ID NO: 143227 - DNA, 22 bp, Artificial Sequence
  Synthetic oligonucleotide; TTA chr11 5231814 5231835 5231819 5231814 -
gaactttctcagttgtatacat

SEQ ID NO: 143228 - DNA, 22 bp, Artificial Sequence
  Synthetic oligonucleotide; CTT chr11 5231808 5231829 5231813 5231808 -
tctcagttgtatacatttttaa

SEQ ID NO: 143229 - DNA, 22 bp, Artificial Sequence
  Synthetic oligonucleotide; TTT chr11 5231807 5231828 5231812 5231807 -
ctcagttgtatacatttttaaa

SEQ ID NO: 143230 - DNA, 22 bp, Artificial Sequence
  Synthetic oligonucleotide; TTC chr11 5231806 5231827 5231811 5231806 -
tcagttgtatacatttttaaaa

SEQ ID NO: 143231 - DNA, 22 bp, Artificial Sequence
  Synthetic oligonucleotide; CTC chr11 5231804 5231825 5231809 5231804 -
agttgtatacatttttaaaaat

SEQ ID NO: 143232 - DNA, 22 bp, Artificial Sequence
  Synthetic oligonucleotide; TTG chr11 5231799 5231820 5231804 5231799 -
tatacatttttaaaaatctgta

SEQ ID NO: 143233 - DNA, 22 bp, Artificial Sequence
  Synthetic oligonucleotide; TTT chr11 5231790 5231811 5231795 5231790 -
ttaaaaatctgtattatatgca

SEQ ID NO: 143234 - DNA, 22 bp, Artificial Sequence
  Synthetic oligonucleotide; TTT chr11 5231789 5231810 5231794 5231789 -
taaaaatctgtattatatgcat

SEQ ID NO: 143235 - DNA, 22 bp, Artificial Sequence
  Synthetic oligonucleotide; TTT chr11 5231788 5231809 5231793 5231788 -
aaaaatctgtattatatgcatg

SEQ ID NO: 143236 - DNA, 22 bp, Artificial Sequence
  Synthetic oligonucleotide; TTA chr11 5231787 5231808 5231792 5231787 -
aaaatctgtattatatgcatgt

SEQ ID NO: 143237 - DNA, 22 bp, Artificial Sequence
  Synthetic oligonucleotide; CTG chr11 5231779 5231800 5231784 5231779 -
tattatatgcatgttgattaat

SEQ ID NO: 143238 - DNA, 22 bp, Artificial Sequence
  Synthetic oligonucleotide; TTA chr11 5231774 5231795 5231779 5231774 -
tatgcatgttgattaattttaa

SEQ ID NO: 143239 - DNA, 22 bp, Artificial Sequence
  Synthetic oligonucleotide; TTG chr11 5231763 5231784 5231768 5231763 -
attaattttaaacttacttgaa

SEQ ID NO: 143240 - DNA, 22 bp, Artificial Sequence
  Synthetic oligonucleotide; TTA chr11 5231759 5231780 5231764 5231759 -
attttaaacttacttgaatacc

SEQ ID NO: 143241 - DNA, 22 bp, Artificial Sequence
  Synthetic oligonucleotide; TTT chr11 5231755 5231776 5231760 5231755 -
taaacttacttgaatacctaaa

SEQ ID NO: 143242 - DNA, 22 bp, Artificial Sequence
  Synthetic oligonucleotide; TTT chr11 5231754 5231775 5231759 5231754 -
aaacttacttgaatacctaaac

SEQ ID NO: 143243 - DNA, 22 bp, Artificial Sequence
  Synthetic oligonucleotide; TTA chr11 5231753 5231774 5231758 5231753 -
aacttacttgaatacctaaaca

SEQ ID NO: 143244 - DNA, 22 bp, Artificial Sequence
  Synthetic oligonucleotide; CTT chr11 5231748 5231769 5231753 5231748 -
acttgaatacctaaacagaatc

SEQ ID NO: 143245 - DNA, 22 bp, Artificial Sequence
  Synthetic oligonucleotide; TTA chr11 5231747 5231768 5231752 5231747 -
cttgaatacctaaacagaatct

SEQ ID NO: 143246 - DNA, 22 bp, Artificial Sequence
  Synthetic oligonucleotide; CTT chr11 5231744 5231765 5231749 5231744 -
gaatacctaaacagaatctgtt

SEQ ID NO: 143247 - DNA, 22 bp, Artificial Sequence
  Synthetic oligonucleotide; TTG chr11 5231743 5231764 5231748 5231743 -
aatacctaaacagaatctgttg

SEQ ID NO: 143248 - DNA, 22 bp, Artificial Sequence
  Synthetic oligonucleotide; CTA chr11 5231735 5231756 5231740 5231735 -
aacagaatctgttgtttccttg

SEQ ID NO: 143249 - DNA, 22 bp, Artificial Sequence
  Synthetic oligonucleotide; CTG chr11 5231724 5231745 5231729 5231724 -
ttgtttccttgtgtttgaaagt

SEQ ID NO: 143250 - DNA, 22 bp, Artificial Sequence
  Synthetic oligonucleotide; TTG chr11 5231721 5231742 5231726 5231721 -
tttccttgtgtttgaaagtgct

SEQ ID NO: 143251 - DNA, 22 bp, Artificial Sequence
  Synthetic oligonucleotide; TTT chr11 5231718 5231739 5231723 5231718 -
ccttgtgtttgaaagtgctttc

SEQ ID NO: 143252 - DNA, 22 bp, Artificial Sequence
  Synthetic oligonucleotide; TTC chr11 5231717 5231738 5231722 5231717 -
cttgtgtttgaaagtgctttca

SEQ ID NO: 143253 - DNA, 22 bp, Artificial Sequence
  Synthetic oligonucleotide; CTT chr11 5231714 5231735 5231719 5231714 -
gtgtttgaaagtgctttcacag

SEQ ID NO: 143254 - DNA, 22 bp, Artificial Sequence
  Synthetic oligonucleotide; TTG chr11 5231713 5231734 5231718 5231713 -
tgtttgaaagtgctttcacagt

SEQ ID NO: 143255 - DNA, 22 bp, Artificial Sequence
  Synthetic oligonucleotide; TTT chr11 5231708 5231729 5231713 5231708 -
gaaagtgctttcacagtaactc

SEQ ID NO: 143256 - DNA, 22 bp, Artificial Sequence
  Synthetic oligonucleotide; TTG chr11 5231707 5231728 5231712 5231707 -
aaagtgctttcacagtaactct

SEQ ID NO: 143257 - DNA, 22 bp, Artificial Sequence
  Synthetic oligonucleotide; CTT chr11 5231698 5231719 5231703 5231698 -
tcacagtaactctgtctgtact

SEQ ID NO: 143258 - DNA, 22 bp, Artificial Sequence
  Synthetic oligonucleotide; TTT chr11 5231697 5231718 5231702 5231697 -
cacagtaactctgtctgtactg

SEQ ID NO: 143259 - DNA, 22 bp, Artificial Sequence
  Synthetic oligonucleotide; TTC chr11 5231696 5231717 5231701 5231696 -
acagtaactctgtctgtactgc

SEQ ID NO: 143260 - DNA, 22 bp, Artificial Sequence
  Synthetic oligonucleotide; CTC chr11 5231686 5231707 5231691 5231686 -
tgtctgtactgccagaatatac

SEQ ID NO: 143261 - DNA, 22 bp, Artificial Sequence
  Synthetic oligonucleotide; CTG chr11 5231684 5231705 5231689 5231684 -
tctgtactgccagaatatactg

SEQ ID NO: 143262 - DNA, 22 bp, Artificial Sequence
  Synthetic oligonucleotide; CTG chr11 5231680 5231701 5231685 5231680 -
tactgccagaatatactgacaa

SEQ ID NO: 143263 - DNA, 22 bp, Artificial Sequence
  Synthetic oligonucleotide; CTG chr11 5231675 5231696 5231680 5231675 -
ccagaatatactgacaatgtgt

SEQ ID NO: 143264 - DNA, 22 bp, Artificial Sequence
  Synthetic oligonucleotide; CTG chr11 5231662 5231683 5231667 5231662 -
acaatgtgttatagttaactgt

SEQ ID NO: 143265 - DNA, 22 bp, Artificial Sequence
  Synthetic oligonucleotide; TTA chr11 5231651 5231672 5231656 5231651 -
tagttaactgttttgatcacaa

SEQ ID NO: 143266 - DNA, 22 bp, Artificial Sequence
  Synthetic oligonucleotide; TTA chr11 5231645 5231666 5231650 5231645 -
actgttttgatcacaacatttt

SEQ ID NO: 143267 - DNA, 22 bp, Artificial Sequence
  Synthetic oligonucleotide; CTG chr11 5231641 5231662 5231646 5231641 -
ttttgatcacaacattttgaat

SEQ ID NO: 143268 - DNA, 22 bp, Artificial Sequence
  Synthetic oligonucleotide; TTT chr11 5231638 5231659 5231643 5231638 -
tgatcacaacattttgaattga

SEQ ID NO: 143269 - DNA, 22 bp, Artificial Sequence
  Synthetic oligonucleotide; TTT chr11 5231637 5231658 5231642 5231637 -
gatcacaacattttgaattgac

SEQ ID NO: 143270 - DNA, 22 bp, Artificial Sequence
  Synthetic oligonucleotide; TTG chr11 5231636 5231657 5231641 5231636 -
atcacaacattttgaattgact

SEQ ID NO: 143271 - DNA, 22 bp, Artificial Sequence
  Synthetic oligonucleotide; TTT chr11 5231624 5231645 5231629 5231624 -
tgaattgactggcagcagaagc

SEQ ID NO: 143272 - DNA, 22 bp, Artificial Sequence
  Synthetic oligonucleotide; TTT chr11 5231623 5231644 5231628 5231623 -
gaattgactggcagcagaagct

SEQ ID NO: 143273 - DNA, 22 bp, Artificial Sequence
  Synthetic oligonucleotide; TTG chr11 5231622 5231643 5231627 5231622 -
aattgactggcagcagaagctc

SEQ ID NO: 143274 - DNA, 22 bp, Artificial Sequence
  Synthetic oligonucleotide; TTG chr11 5231617 5231638 5231622 5231617 -
actggcagcagaagctctttta

SEQ ID NO: 143275 - DNA, 22 bp, Artificial Sequence
  Synthetic oligonucleotide; CTG chr11 5231613 5231634 5231618 5231613 -
gcagcagaagctcttttatatc

SEQ ID NO: 143276 - DNA, 22 bp, Artificial Sequence
  Synthetic oligonucleotide; CTC chr11 5231600 5231621 5231605 5231600 -
ttttatatccatgtgttttcct

SEQ ID NO: 143277 - DNA, 22 bp, Artificial Sequence
  Synthetic oligonucleotide; CTT chr11 5231598 5231619 5231603 5231598 -
ttatatccatgtgttttcctta

SEQ ID NO: 143278 - DNA, 22 bp, Artificial Sequence
  Synthetic oligonucleotide; TTT chr11 5231597 5231618 5231602 5231597 -
tatatccatgtgttttccttaa

SEQ ID NO: 143279 - DNA, 22 bp, Artificial Sequence
  Synthetic oligonucleotide; TTT chr11 5231596 5231617 5231601 5231596 -
atatccatgtgttttccttaag

SEQ ID NO: 143280 - DNA, 22 bp, Artificial Sequence
  Synthetic oligonucleotide; TTA chr11 5231595 5231616 5231600 5231595 -
tatccatgtgttttccttaagt

SEQ ID NO: 143281 - DNA, 22 bp, Artificial Sequence
  Synthetic oligonucleotide; TTT chr11 5231582 5231603 5231587 5231582 -
tccttaagtcattatacatagt

SEQ ID NO: 143282 - DNA, 22 bp, Artificial Sequence
  Synthetic oligonucleotide; TTT chr11 5231581 5231602 5231586 5231581 -
ccttaagtcattatacatagta

SEQ ID NO: 143283 - DNA, 22 bp, Artificial Sequence
  Synthetic oligonucleotide; TTC chr11 5231580 5231601 5231585 5231580 -
cttaagtcattatacatagtag

SEQ ID NO: 143284 - DNA, 22 bp, Artificial Sequence
  Synthetic oligonucleotide; CTT chr11 5231577 5231598 5231582 5231577 -
aagtcattatacatagtaggca

SEQ ID NO: 143285 - DNA, 22 bp, Artificial Sequence
  Synthetic oligonucleotide; TTA chr11 5231576 5231597 5231581 5231576 -
agtcattatacatagtaggcac

SEQ ID NO: 143286 - DNA, 22 bp, Artificial Sequence
  Synthetic oligonucleotide; TTA chr11 5231568 5231589 5231573 5231568 -
tacatagtaggcactgagaact

SEQ ID NO: 143287 - DNA, 22 bp, Artificial Sequence
  Synthetic oligonucleotide; CTG chr11 5231552 5231573 5231557 5231552 -
agaactctttatatctgaataa

SEQ ID NO: 143288 - DNA, 22 bp, Artificial Sequence
  Synthetic oligonucleotide; CTC chr11 5231545 5231566 5231550 5231545 -
tttatatctgaataagatattt

SEQ ID NO: 143289 - DNA, 22 bp, Artificial Sequence
  Synthetic oligonucleotide; CTT chr11 5231543 5231564 5231548 5231543 -
tatatctgaataagatatttag

SEQ ID NO: 143290 - DNA, 22 bp, Artificial Sequence
  Synthetic oligonucleotide; TTT chr11 5231542 5231563 5231547 5231542 -
atatctgaataagatatttagg

SEQ ID NO: 143291 - DNA, 22 bp, Artificial Sequence
  Synthetic oligonucleotide; TTA chr11 5231541 5231562 5231546 5231541 -
tatctgaataagatatttagga

SEQ ID NO: 143292 - DNA, 22 bp, Artificial Sequence
  Synthetic oligonucleotide; CTG chr11 5231535 5231556 5231540 5231535 -
aataagatatttaggaaccact

SEQ ID NO: 143293 - DNA, 22 bp, Artificial Sequence
  Synthetic oligonucleotide; TTT chr11 5231523 5231544 5231528 5231523 -
aggaaccactggtttacatatc

SEQ ID NO: 143294 - DNA, 22 bp, Artificial Sequence
  Synthetic oligonucleotide; TTA chr11 5231522 5231543 5231527 5231522 -
ggaaccactggtttacatatca

SEQ ID NO: 143295 - DNA, 22 bp, Artificial Sequence
  Synthetic oligonucleotide; CTG chr11 5231512 5231533 5231517 5231512 -
gtttacatatcagaagcagagc

SEQ ID NO: 143296 - DNA, 22 bp, Artificial Sequence
  Synthetic oligonucleotide; TTT chr11 5231508 5231529 5231513 5231508 -
acatatcagaagcagagctact

SEQ ID NO: 143297 - DNA, 22 bp, Artificial Sequence
  Synthetic oligonucleotide; TTA chr11 5231507 5231528 5231512 5231507 -
catatcagaagcagagctactc

SEQ ID NO: 143298 - DNA, 22 bp, Artificial Sequence
  Synthetic oligonucleotide; CTA chr11 5231488 5231509 5231493 5231488 -
ctcagggcattttggggaagat

SEQ ID NO: 143299 - DNA, 22 bp, Artificial Sequence
  Synthetic oligonucleotide; CTC chr11 5231485 5231506 5231490 5231485 -
agggcattttggggaagatcac

SEQ ID NO: 143300 - DNA, 22 bp, Artificial Sequence
  Synthetic oligonucleotide; TTT chr11 5231476 5231497 5231481 5231476 -
tggggaagatcactttcacatt

SEQ ID NO: 143301 - DNA, 22 bp, Artificial Sequence
  Synthetic oligonucleotide; TTT chr11 5231475 5231496 5231480 5231475 -
ggggaagatcactttcacattc

SEQ ID NO: 143302 - DNA, 22 bp, Artificial Sequence
  Synthetic oligonucleotide; TTG chr11 5231474 5231495 5231479 5231474 -
gggaagatcactttcacattcc

SEQ ID NO: 143303 - DNA, 22 bp, Artificial Sequence
  Synthetic oligonucleotide; CTT chr11 5231461 5231482 5231466 5231461 -
tcacattcctgagcatagggaa

SEQ ID NO: 143304 - DNA, 22 bp, Artificial Sequence
  Synthetic oligonucleotide; TTT chr11 5231460 5231481 5231465 5231460 -
cacattcctgagcatagggaag

SEQ ID NO: 143305 - DNA, 22 bp, Artificial Sequence
  Synthetic oligonucleotide; TTC chr11 5231459 5231480 5231464 5231459 -
acattcctgagcatagggaagt

SEQ ID NO: 143306 - DNA, 22 bp, Artificial Sequence
  Synthetic oligonucleotide; TTC chr11 5231453 5231474 5231458 5231453 -
ctgagcatagggaagttctcat

SEQ ID NO: 143307 - DNA, 22 bp, Artificial Sequence
  Synthetic oligonucleotide; CTG chr11 5231450 5231471 5231455 5231450 -
agcatagggaagttctcataag

SEQ ID NO: 143308 - DNA, 22 bp, Artificial Sequence
  Synthetic oligonucleotide; TTC chr11 5231435 5231456 5231440 5231435 -
tcataagagtaagatattaaaa

SEQ ID NO: 143309 - DNA, 22 bp, Artificial Sequence
  Synthetic oligonucleotide; CTC chr11 5231433 5231454 5231438 5231433 -
ataagagtaagatattaaaagg

SEQ ID NO: 143310 - DNA, 22 bp, Artificial Sequence
  Synthetic oligonucleotide; TTA chr11 5231416 5231437 5231421 5231416 -
aaaggagatacttgtgtggtat

SEQ ID NO: 143311 - DNA, 22 bp, Artificial Sequence
  Synthetic oligonucleotide; CTT chr11 5231403 5231424 5231408 5231403 -
gtgtggtattcgaaagacagta

SEQ ID NO: 143312 - DNA, 22 bp, Artificial Sequence
  Synthetic oligonucleotide; TTG chr11 5231402 5231423 5231407 5231402 -
tgtggtattcgaaagacagtaa

SEQ ID NO: 143313 - DNA, 22 bp, Artificial Sequence
  Synthetic oligonucleotide; TTC chr11 5231392 5231413 5231397 5231392 -
gaaagacagtaagagagattgt

SEQ ID NO: 143314 - DNA, 22 bp, Artificial Sequence
  Synthetic oligonucleotide; TTG chr11 5231371 5231392 5231376 5231371 -
tagaccttatgatcttgatagg

SEQ ID NO: 143315 - DNA, 22 bp, Artificial Sequence
  Synthetic oligonucleotide; CTT chr11 5231363 5231384 5231368 5231363 -
atgatcttgatagggaaaacaa

SEQ ID NO: 143316 - DNA, 22 bp, Artificial Sequence
  Synthetic oligonucleotide; TTA chr11 5231362 5231383 5231367 5231362 -
tgatcttgatagggaaaacaaa

SEQ ID NO: 143317 - DNA, 22 bp, Artificial Sequence
  Synthetic oligonucleotide; CTT chr11 5231355 5231376 5231360 5231355 -
gatagggaaaacaaactacatt

SEQ ID NO: 143318 - DNA, 22 bp, Artificial Sequence
  Synthetic oligonucleotide; TTG chr11 5231354 5231375 5231359 5231354 -
atagggaaaacaaactacattc

SEQ ID NO: 143319 - DNA, 22 bp, Artificial Sequence
  Synthetic oligonucleotide; CTA chr11 5231337 5231358 5231342 5231337 -
cattcctttctccaaaagtcaa

SEQ ID NO: 143320 - DNA, 22 bp, Artificial Sequence
  Synthetic oligonucleotide; TTC chr11 5231332 5231353 5231337 5231332 -
ctttctccaaaagtcaaaaaaa

SEQ ID NO: 143321 - DNA, 22 bp, Artificial Sequence
  Synthetic oligonucleotide; CTT chr11 5231329 5231350 5231334 5231329 -
tctccaaaagtcaaaaaaaaag

SEQ ID NO: 143322 - DNA, 22 bp, Artificial Sequence
  Synthetic oligonucleotide; TTT chr11 5231328 5231349 5231333 5231328 -
ctccaaaagtcaaaaaaaaaga

SEQ ID NO: 143323 - DNA, 22 bp, Artificial Sequence
  Synthetic oligonucleotide; TTC chr11 5231327 5231348 5231332 5231327 -
tccaaaagtcaaaaaaaaagag

SEQ ID NO: 143324 - DNA, 22 bp, Artificial Sequence
  Synthetic oligonucleotide; CTC chr11 5231325 5231346 5231330 5231325 -
caaaagtcaaaaaaaaagagca

SEQ ID NO: 143325 - DNA, 22 bp, Artificial Sequence
  Synthetic oligonucleotide; CTT chr11 5231293 5231314 5231298 5231293 -
actataccttctattcctacac

SEQ ID NO: 143326 - DNA, 22 bp, Artificial Sequence
  Synthetic oligonucleotide; TTA chr11 5231292 5231313 5231297 5231292 -
ctataccttctattcctacacc

SEQ ID NO: 143327 - DNA, 22 bp, Artificial Sequence
  Synthetic oligonucleotide; CTA chr11 5231289 5231310 5231294 5231289 -
taccttctattcctacaccatt

SEQ ID NO: 143328 - DNA, 22 bp, Artificial Sequence
  Synthetic oligonucleotide; CTT chr11 5231283 5231304 5231288 5231283 -
ctattcctacaccattagaagt

SEQ ID NO: 143329 - DNA, 22 bp, Artificial Sequence
  Synthetic oligonucleotide; TTC chr11 5231282 5231303 5231287 5231282 -
tattcctacaccattagaagta

SEQ ID NO: 143330 - DNA, 22 bp, Artificial Sequence
  Synthetic oligonucleotide; CTA chr11 5231280 5231301 5231285 5231280 -
ttcctacaccattagaagtagt

SEQ ID NO: 143331 - DNA, 22 bp, Artificial Sequence
  Synthetic oligonucleotide; TTC chr11 5231277 5231298 5231282 5231277 -
ctacaccattagaagtagtcag

SEQ ID NO: 143332 - DNA, 22 bp, Artificial Sequence
  Synthetic oligonucleotide; CTA chr11 5231274 5231295 5231279 5231274 -
caccattagaagtagtcagtga

SEQ ID NO: 143333 - DNA, 22 bp, Artificial Sequence
  Synthetic oligonucleotide; TTA chr11 5231266 5231287 5231271 5231266 -
gaagtagtcagtgagtctaggc

SEQ ID NO: 143334 - DNA, 22 bp, Artificial Sequence
  Synthetic oligonucleotide; CTA chr11 5231247 5231268 5231252 5231247 -
ggcaagatgttggccctaaaaa

SEQ ID NO: 143335 - DNA, 22 bp, Artificial Sequence
  Synthetic oligonucleotide; TTG chr11 5231235 5231256 5231240 5231235 -
gccctaaaaatccaaataccag

SEQ ID NO: 143336 - DNA, 22 bp, Artificial Sequence
  Synthetic oligonucleotide; CTA chr11 5231229 5231250 5231234 5231229 -
aaaatccaaataccagagaatt

SEQ ID NO: 143337 - DNA, 22 bp, Artificial Sequence
  Synthetic oligonucleotide; TTC chr11 5231206 5231227 5231211 5231206 -
atgagaacatcacctggatggg

SEQ ID NO: 143338 - DNA, 22 bp, Artificial Sequence
  Synthetic oligonucleotide; CTG chr11 5231190 5231211 5231195 5231190 -
gatgggacatgtgccgagcaca

SEQ ID NO: 143339 - DNA, 22 bp, Artificial Sequence
  Synthetic oligonucleotide; TTA chr11 5231160 5231181 5231165 5231160 -
ctatatgctaggcattgctatc

SEQ ID NO: 143340 - DNA, 22 bp, Artificial Sequence
  Synthetic oligonucleotide; CTA chr11 5231157 5231178 5231162 5231157 -
tatgctaggcattgctatcttc

SEQ ID NO: 143341 - DNA, 22 bp, Artificial Sequence
  Synthetic oligonucleotide; CTA chr11 5231150 5231171 5231155 5231150 -
ggcattgctatcttcatattga

SEQ ID NO: 143342 - DNA, 22 bp, Artificial Sequence
  Synthetic oligonucleotide; TTG chr11 5231143 5231164 5231148 5231143 -
ctatcttcatattgaagatgag

SEQ ID NO: 143343 - DNA, 22 bp, Artificial Sequence
  Synthetic oligonucleotide; CTA chr11 5231140 5231161 5231145 5231140 -
tcttcatattgaagatgaggag

SEQ ID NO: 143344 - DNA, 22 bp, Artificial Sequence
  Synthetic oligonucleotide; CTT chr11 5231136 5231157 5231141 5231136 -
catattgaagatgaggaggtca

SEQ ID NO: 143345 - DNA, 22 bp, Artificial Sequence
  Synthetic oligonucleotide; TTC chr11 5231135 5231156 5231140 5231135 -
atattgaagatgaggaggtcaa

SEQ ID NO: 143346 - DNA, 22 bp, Artificial Sequence
  Synthetic oligonucleotide; TTG chr11 5231129 5231150 5231134 5231129 -
aagatgaggaggtcaagagatg

SEQ ID NO: 143347 - DNA, 22 bp, Artificial Sequence
  Synthetic oligonucleotide; CTT chr11 5231096 5231117 5231101 5231096 -
ggcaccttgttgttatattaaa

SEQ ID NO: 143348 - DNA, 22 bp, Artificial Sequence
  Synthetic oligonucleotide; TTG chr11 5231095 5231116 5231100 5231095 -
gcaccttgttgttatattaaaa

SEQ ID NO: 143349 - DNA, 22 bp, Artificial Sequence
  Synthetic oligonucleotide; CTT chr11 5231088 5231109 5231093 5231088 -
gttgttatattaaaattatttg

SEQ ID NO: 143350 - DNA, 22 bp, Artificial Sequence
  Synthetic oligonucleotide; TTG chr11 5231087 5231108 5231092 5231087 -
ttgttatattaaaattatttgt

SEQ ID NO: 143351 - DNA, 22 bp, Artificial Sequence
  Synthetic oligonucleotide; TTG chr11 5231084 5231105 5231089 5231084 -
ttatattaaaattatttgttag

SEQ ID NO: 143352 - DNA, 22 bp, Artificial Sequence
  Synthetic oligonucleotide; TTA chr11 5231081 5231102 5231086 5231081 -
tattaaaattatttgttagagt

SEQ ID NO: 143353 - DNA, 22 bp, Artificial Sequence
  Synthetic oligonucleotide; TTA chr11 5231076 5231097 5231081 5231076 -
aaattatttgttagagtagagc

SEQ ID NO: 143354 - DNA, 22 bp, Artificial Sequence
  Synthetic oligonucleotide; TTA chr11 5231070 5231091 5231075 5231070 -
tttgttagagtagagcttttgt

SEQ ID NO: 143355 - DNA, 22 bp, Artificial Sequence
  Synthetic oligonucleotide; TTT chr11 5231067 5231088 5231072 5231067 -
gttagagtagagcttttgtaag

SEQ ID NO: 143356 - DNA, 22 bp, Artificial Sequence
  Synthetic oligonucleotide; TTG chr11 5231066 5231087 5231071 5231066 -
ttagagtagagcttttgtaaga

SEQ ID NO: 143357 - DNA, 22 bp, Artificial Sequence
  Synthetic oligonucleotide; TTA chr11 5231063 5231084 5231068 5231063 -
gagtagagcttttgtaagagtc

SEQ ID NO: 143358 - DNA, 22 bp, Artificial Sequence
  Synthetic oligonucleotide; CTT chr11 5231052 5231073 5231057 5231052 -
ttgtaagagtctaggagtgtgg

SEQ ID NO: 143359 - DNA, 22 bp, Artificial Sequence
  Synthetic oligonucleotide; TTT chr11 5231051 5231072 5231056 5231051 -
tgtaagagtctaggagtgtggg

SEQ ID NO: 143360 - DNA, 22 bp, Artificial Sequence
  Synthetic oligonucleotide; TTT chr11 5231050 5231071 5231055 5231050 -
gtaagagtctaggagtgtggga

SEQ ID NO: 143361 - DNA, 22 bp, Artificial Sequence
  Synthetic oligonucleotide; TTG chr11 5231049 5231070 5231054 5231049 -
taagagtctaggagtgtgggag

SEQ ID NO: 143362 - DNA, 22 bp, Artificial Sequence
  Synthetic oligonucleotide; CTA chr11 5231039 5231060 5231044 5231039 -
ggagtgtgggagctaaatgatg

SEQ ID NO: 143363 - DNA, 22 bp, Artificial Sequence
  Synthetic oligonucleotide; CTA chr11 5231024 5231045 5231029 5231024 -
aatgatgatacacatggacaca

SEQ ID NO: 143364 - DNA, 22 bp, Artificial Sequence
  Synthetic oligonucleotide; CTA chr11 5230973 5230994 5230978 5230973 -
cttgagggttgagggtgggaag

SEQ ID NO: 143365 - DNA, 22 bp, Artificial Sequence
  Synthetic oligonucleotide; CTT chr11 5230970 5230991 5230975 5230970 -
gagggttgagggtgggaagagg

SEQ ID NO: 143366 - DNA, 22 bp, Artificial Sequence
  Synthetic oligonucleotide; TTG chr11 5230969 5230990 5230974 5230969 -
agggttgagggtgggaagaggg

SEQ ID NO: 143367 - DNA, 22 bp, Artificial Sequence
  Synthetic oligonucleotide; TTG chr11 5230962 5230983 5230967 5230962 -
agggtgggaagagggagacgat

SEQ ID NO: 143368 - DNA, 22 bp, Artificial Sequence
  Synthetic oligonucleotide; CTA chr11 5230927 5230948 5230932 5230927 -
ttgggtattaagttcatcactg

SEQ ID NO: 143369 - DNA, 22 bp, Artificial Sequence
  Synthetic oligonucleotide; TTG chr11 5230924 5230945 5230929 5230924 -
ggtattaagttcatcactgagt

SEQ ID NO: 143370 - DNA, 22 bp, Artificial Sequence
  Synthetic oligonucleotide; TTA chr11 5230917 5230938 5230922 5230917 -
agttcatcactgagtgatgaaa

SEQ ID NO: 143371 - DNA, 22 bp, Artificial Sequence
  Synthetic oligonucleotide; TTC chr11 5230912 5230933 5230917 5230912 -
atcactgagtgatgaaataatc

SEQ ID NO: 143372 - DNA, 22 bp, Artificial Sequence
  Synthetic oligonucleotide; CTG chr11 5230905 5230926 5230910 5230905 -
agtgatgaaataatctgtacat

SEQ ID NO: 143373 - DNA, 22 bp, Artificial Sequence
  Synthetic oligonucleotide; CTG chr11 5230888 5230909 5230893 5230888 -
tacatcaagacccagtgatatg

SEQ ID NO: 143374 - DNA, 22 bp, Artificial Sequence
  Synthetic oligonucleotide; TTT chr11 5230860 5230881 5230865 5230860 -
acctatataacttgtacatgta

SEQ ID NO: 143375 - DNA, 22 bp, Artificial Sequence
  Synthetic oligonucleotide; TTA chr11 5230859 5230880 5230864 5230859 -
cctatataacttgtacatgtac

SEQ ID NO: 143376 - DNA, 22 bp, Artificial Sequence
  Synthetic oligonucleotide; CTA chr11 5230855 5230876 5230860 5230855 -
tataacttgtacatgtaccccc

SEQ ID NO: 143377 - DNA, 22 bp, Artificial Sequence
  Synthetic oligonucleotide; CTT chr11 5230847 5230868 5230852 5230847 -
gtacatgtacccccaaatttaa

SEQ ID NO: 143378 - DNA, 22 bp, Artificial Sequence
  Synthetic oligonucleotide; TTG chr11 5230846 5230867 5230851 5230846 -
tacatgtacccccaaatttaaa

SEQ ID NO: 143379 - DNA, 22 bp, Artificial Sequence
  Synthetic oligonucleotide; TTT chr11 5230827 5230848 5230832 5230827 -
aaaatgaaagttaaaacaaagt

SEQ ID NO: 143380 - DNA, 22 bp, Artificial Sequence
  Synthetic oligonucleotide; TTA chr11 5230826 5230847 5230831 5230826 -
aaatgaaagttaaaacaaagta

SEQ ID NO: 143381 - DNA, 22 bp, Artificial Sequence
  Synthetic oligonucleotide; TTA chr11 5230814 5230835 5230819 5230814 -
aaacaaagtataggaatggaat

SEQ ID NO: 143382 - DNA, 22 bp, Artificial Sequence
  Synthetic oligonucleotide; TTA chr11 5230790 5230811 5230795 5230790 -
attcctcaagatttggctttaa

SEQ ID NO: 143383 - DNA, 22 bp, Artificial Sequence
  Synthetic oligonucleotide; TTC chr11 5230786 5230807 5230791 5230786 -
ctcaagatttggctttaatttt

SEQ ID NO: 143384 - DNA, 22 bp, Artificial Sequence
  Synthetic oligonucleotide; CTC chr11 5230783 5230804 5230788 5230783 -
aagatttggctttaattttatt

SEQ ID NO: 143385 - DNA, 22 bp, Artificial Sequence
  Synthetic oligonucleotide; TTT chr11 5230776 5230797 5230781 5230776 -
ggctttaattttatttgataat

SEQ ID NO: 143386 - DNA, 22 bp, Artificial Sequence
  Synthetic oligonucleotide; TTG chr11 5230775 5230796 5230780 5230775 -
gctttaattttatttgataatt

SEQ ID NO: 143387 - DNA, 22 bp, Artificial Sequence
  Synthetic oligonucleotide; CTT chr11 5230771 5230792 5230776 5230771 -
taattttatttgataatttatc

SEQ ID NO: 143388 - DNA, 22 bp, Artificial Sequence
  Synthetic oligonucleotide; TTT chr11 5230770 5230791 5230775 5230770 -
aattttatttgataatttatca

SEQ ID NO: 143389 - DNA, 22 bp, Artificial Sequence
  Synthetic oligonucleotide; TTA chr11 5230769 5230790 5230774 5230769 -
attttatttgataatttatcaa

SEQ ID NO: 143390 - DNA, 22 bp, Artificial Sequence
  Synthetic oligonucleotide; TTT chr11 5230765 5230786 5230770 5230765 -
tatttgataatttatcaaatgg

SEQ ID NO: 143391 - DNA, 22 bp, Artificial Sequence
  Synthetic oligonucleotide; TTT chr11 5230764 5230785 5230769 5230764 -
atttgataatttatcaaatggt

SEQ ID NO: 143392 - DNA, 22 bp, Artificial Sequence
  Synthetic oligonucleotide; TTA chr11 5230763 5230784 5230768 5230763 -
tttgataatttatcaaatggtt

SEQ ID NO: 143393 - DNA, 22 bp, Artificial Sequence
  Synthetic oligonucleotide; TTT chr11 5230760 5230781 5230765 5230760 -
gataatttatcaaatggttgtt

SEQ ID NO: 143394 - DNA, 22 bp, Artificial Sequence
  Synthetic oligonucleotide; TTG chr11 5230759 5230780 5230764 5230759 -
ataatttatcaaatggttgttt

SEQ ID NO: 143395 - DNA, 22 bp, Artificial Sequence
  Synthetic oligonucleotide; TTT chr11 5230752 5230773 5230757 5230752 -
atcaaatggttgtttttctttt

SEQ ID NO: 143396 - DNA, 22 bp, Artificial Sequence
  Synthetic oligonucleotide; TTA chr11 5230751 5230772 5230756 5230751 -
tcaaatggttgtttttcttttc

SEQ ID NO: 143397 - DNA, 22 bp, Artificial Sequence
  Synthetic oligonucleotide; TTG chr11 5230740 5230761 5230745 5230740 -
tttttcttttctcactatggcg

SEQ ID NO: 143398 - DNA, 22 bp, Artificial Sequence
  Synthetic oligonucleotide; TTT chr11 5230737 5230758 5230742 5230737 -
ttcttttctcactatggcgttg

SEQ ID NO: 143399 - DNA, 22 bp, Artificial Sequence
  Synthetic oligonucleotide; TTT chr11 5230736 5230757 5230741 5230736 -
tcttttctcactatggcgttgc

SEQ ID NO: 143400 - DNA, 22 bp, Artificial Sequence
  Synthetic oligonucleotide; TTT chr11 5230735 5230756 5230740 5230735 -
cttttctcactatggcgttgct

SEQ ID NO: 143401 - DNA, 22 bp, Artificial Sequence
  Synthetic oligonucleotide; TTC chr11 5230734 5230755 5230739 5230734 -
ttttctcactatggcgttgctt

SEQ ID NO: 143402 - DNA, 22 bp, Artificial Sequence
  Synthetic oligonucleotide; CTT chr11 5230732 5230753 5230737 5230732 -
ttctcactatggcgttgcttta

SEQ ID NO: 143403 - DNA, 22 bp, Artificial Sequence
  Synthetic oligonucleotide; TTT chr11 5230731 5230752 5230736 5230731 -
tctcactatggcgttgctttat

SEQ ID NO: 143404 - DNA, 22 bp, Artificial Sequence
  Synthetic oligonucleotide; TTT chr11 5230730 5230751 5230735 5230730 -
ctcactatggcgttgctttata

SEQ ID NO: 143405 - DNA, 22 bp, Artificial Sequence
  Synthetic oligonucleotide; TTC chr11 5230729 5230750 5230734 5230729 -
tcactatggcgttgctttataa

SEQ ID NO: 143406 - DNA, 22 bp, Artificial Sequence
  Synthetic oligonucleotide; CTC chr11 5230727 5230748 5230732 5230727 -
actatggcgttgctttataaac

SEQ ID NO: 143407 - DNA, 22 bp, Artificial Sequence
  Synthetic oligonucleotide; CTA chr11 5230723 5230744 5230728 5230723 -
tggcgttgctttataaactatg

SEQ ID NO: 143408 - DNA, 22 bp, Artificial Sequence
  Synthetic oligonucleotide; TTG chr11 5230715 5230736 5230720 5230715 -
ctttataaactatgttcagtat

SEQ ID NO: 143409 - DNA, 22 bp, Artificial Sequence
  Synthetic oligonucleotide; CTT chr11 5230712 5230733 5230717 5230712 -
tataaactatgttcagtatgtc

SEQ ID NO: 143410 - DNA, 22 bp, Artificial Sequence
  Synthetic oligonucleotide; TTT chr11 5230711 5230732 5230716 5230711 -
ataaactatgttcagtatgtct

SEQ ID NO: 143411 - DNA, 22 bp, Artificial Sequence
  Synthetic oligonucleotide; TTA chr11 5230710 5230731 5230715 5230710 -
taaactatgttcagtatgtctg

SEQ ID NO: 143412 - DNA, 22 bp, Artificial Sequence
  Synthetic oligonucleotide; CTA chr11 5230703 5230724 5230708 5230703 -
tgttcagtatgtctgaatgaaa

SEQ ID NO: 143413 - DNA, 22 bp, Artificial Sequence
  Synthetic oligonucleotide; TTC chr11 5230698 5230719 5230703 5230698 -
agtatgtctgaatgaaagggtg

SEQ ID NO: 143414 - DNA, 22 bp, Artificial Sequence
  Synthetic oligonucleotide; CTG chr11 5230688 5230709 5230693 5230688 -
aatgaaagggtgtgtgtgtgtg

SEQ ID NO: 143415 - DNA, 22 bp, Artificial Sequence
  Synthetic oligonucleotide; TTT chr11 5230616 5230637 5230621 5230616 -
gagttcatgaaaatttttcaat

SEQ ID NO: 143416 - DNA, 22 bp, Artificial Sequence
  Synthetic oligonucleotide; TTG chr11 5230615 5230636 5230620 5230615 -
agttcatgaaaatttttcaata

SEQ ID NO: 143417 - DNA, 22 bp, Artificial Sequence
  Synthetic oligonucleotide; TTC chr11 5230610 5230631 5230615 5230610 -
atgaaaatttttcaataaaata

SEQ ID NO: 143418 - DNA, 22 bp, Artificial Sequence
  Synthetic oligonucleotide; TTT chr11 5230600 5230621 5230605 5230600 -
ttcaataaaataatttaatgtc

SEQ ID NO: 143419 - DNA, 22 bp, Artificial Sequence
  Synthetic oligonucleotide; TTT chr11 5230599 5230620 5230604 5230599 -
tcaataaaataatttaatgtca

SEQ ID NO: 143420 - DNA, 22 bp, Artificial Sequence
  Synthetic oligonucleotide; TTT chr11 5230598 5230619 5230603 5230598 -
caataaaataatttaatgtcag

SEQ ID NO: 143421 - DNA, 22 bp, Artificial Sequence
  Synthetic oligonucleotide; TTC chr11 5230597 5230618 5230602 5230597 -
aataaaataatttaatgtcagg

SEQ ID NO: 143422 - DNA, 22 bp, Artificial Sequence
  Synthetic oligonucleotide; TTT chr11 5230584 5230605 5230589 5230584 -
aatgtcaggagaattaagccta

SEQ ID NO: 143423 - DNA, 22 bp, Artificial Sequence
  Synthetic oligonucleotide; TTA chr11 5230583 5230604 5230588 5230583 -
atgtcaggagaattaagcctaa

SEQ ID NO: 143424 - DNA, 22 bp, Artificial Sequence
  Synthetic oligonucleotide; TTA chr11 5230568 5230589 5230573 5230568 -
agcctaatagtctcctaaatca

SEQ ID NO: 143425 - DNA, 22 bp, Artificial Sequence
  Synthetic oligonucleotide; CTA chr11 5230562 5230583 5230567 5230562 -
atagtctcctaaatcatccatc

SEQ ID NO: 143426 - DNA, 22 bp, Artificial Sequence
  Synthetic oligonucleotide; CTC chr11 5230554 5230575 5230559 5230554 -
ctaaatcatccatctcttgagc

SEQ ID NO: 143427 - DNA, 22 bp, Artificial Sequence
  Synthetic oligonucleotide; CTA chr11 5230551 5230572 5230556 5230551 -
aatcatccatctcttgagcttc

SEQ ID NO: 143428 - DNA, 22 bp, Artificial Sequence
  Synthetic oligonucleotide; CTC chr11 5230538 5230559 5230543 5230538 -
ttgagcttcagagcagtcctct

SEQ ID NO: 143429 - DNA, 22 bp, Artificial Sequence
  Synthetic oligonucleotide; CTT chr11 5230536 5230557 5230541 5230536 -
gagcttcagagcagtcctctga

SEQ ID NO: 143430 - DNA, 22 bp, Artificial Sequence
  Synthetic oligonucleotide; TTG chr11 5230535 5230556 5230540 5230535 -
agcttcagagcagtcctctgaa

SEQ ID NO: 143431 - DNA, 22 bp, Artificial Sequence
  Synthetic oligonucleotide; CTT chr11 5230530 5230551 5230535 5230530 -
cagagcagtcctctgaattaat

SEQ ID NO: 143432 - DNA, 22 bp, Artificial Sequence
  Synthetic oligonucleotide; TTC chr11 5230529 5230550 5230534 5230529 -
agagcagtcctctgaattaatg

SEQ ID NO: 143433 - DNA, 22 bp, Artificial Sequence
  Synthetic oligonucleotide; CTC chr11 5230517 5230538 5230522 5230517 -
tgaattaatgcctacatgtttg

SEQ ID NO: 143434 - DNA, 22 bp, Artificial Sequence
  Synthetic oligonucleotide; CTG chr11 5230515 5230536 5230520 5230515 -
aattaatgcctacatgtttgta

SEQ ID NO: 143435 - DNA, 22 bp, Artificial Sequence
  Synthetic oligonucleotide; TTA chr11 5230510 5230531 5230515 5230510 -
atgcctacatgtttgtaaaggg

SEQ ID NO: 143436 - DNA, 22 bp, Artificial Sequence
  Synthetic oligonucleotide; CTA chr11 5230503 5230524 5230508 5230503 -
catgtttgtaaagggtgttcag

SEQ ID NO: 143437 - DNA, 22 bp, Artificial Sequence
  Synthetic oligonucleotide; TTT chr11 5230496 5230517 5230501 5230496 -
gtaaagggtgttcagactgaag

SEQ ID NO: 143438 - DNA, 22 bp, Artificial Sequence
  Synthetic oligonucleotide; TTG chr11 5230495 5230516 5230500 5230495 -
taaagggtgttcagactgaagc

SEQ ID NO: 143439 - DNA, 22 bp, Artificial Sequence
  Synthetic oligonucleotide; TTC chr11 5230483 5230504 5230488 5230483 -
agactgaagccaagattctacc

SEQ ID NO: 143440 - DNA, 22 bp, Artificial Sequence
  Synthetic oligonucleotide; CTG chr11 5230477 5230498 5230482 5230477 -
aagccaagattctacctctaaa

SEQ ID NO: 143441 - DNA, 22 bp, Artificial Sequence
  Synthetic oligonucleotide; TTC chr11 5230465 5230486 5230470 5230465 -
tacctctaaagagatgcaatct

SEQ ID NO: 143442 - DNA, 22 bp, Artificial Sequence
  Synthetic oligonucleotide; CTA chr11 5230463 5230484 5230468 5230463 -
cctctaaagagatgcaatctca

SEQ ID NO: 143443 - DNA, 22 bp, Artificial Sequence
  Synthetic oligonucleotide; CTC chr11 5230459 5230480 5230464 5230459 -
taaagagatgcaatctcaaatt

SEQ ID NO: 143444 - DNA, 22 bp, Artificial Sequence
  Synthetic oligonucleotide; CTA chr11 5230457 5230478 5230462 5230457 -
aagagatgcaatctcaaattta

SEQ ID NO: 143445 - DNA, 22 bp, Artificial Sequence
  Synthetic oligonucleotide; CTC chr11 5230442 5230463 5230447 5230442 -
aaatttatctgaagactgtacc

SEQ ID NO: 143446 - DNA, 22 bp, Artificial Sequence
  Synthetic oligonucleotide; TTT chr11 5230436 5230457 5230441 5230436 -
atctgaagactgtacctctgct

SEQ ID NO: 143447 - DNA, 22 bp, Artificial Sequence
  Synthetic oligonucleotide; TTA chr11 5230435 5230456 5230440 5230435 -
tctgaagactgtacctctgctc

SEQ ID NO: 143448 - DNA, 22 bp, Artificial Sequence
  Synthetic oligonucleotide; CTG chr11 5230431 5230452 5230436 5230431 -
aagactgtacctctgctctcca

SEQ ID NO: 143449 - DNA, 22 bp, Artificial Sequence
  Synthetic oligonucleotide; CTG chr11 5230424 5230445 5230429 5230424 -
tacctctgctctccataaattg

SEQ ID NO: 143450 - DNA, 22 bp, Artificial Sequence
  Synthetic oligonucleotide; CTC chr11 5230418 5230439 5230423 5230418 -
tgctctccataaattgacacca

SEQ ID NO: 143451 - DNA, 22 bp, Artificial Sequence
  Synthetic oligonucleotide; CTG chr11 5230416 5230437 5230421 5230416 -
ctctccataaattgacaccatg

SEQ ID NO: 143452 - DNA, 22 bp, Artificial Sequence
  Synthetic oligonucleotide; CTC chr11 5230413 5230434 5230418 5230413 -
tccataaattgacaccatggcc

SEQ ID NO: 143453 - DNA, 22 bp, Artificial Sequence
  Synthetic oligonucleotide; CTC chr11 5230411 5230432 5230416 5230411 -
cataaattgacaccatggccca

SEQ ID NO: 143454 - DNA, 22 bp, Artificial Sequence
  Synthetic oligonucleotide; TTG chr11 5230402 5230423 5230407 5230402 -
acaccatggcccacttaatgag

SEQ ID NO: 143455 - DNA, 22 bp, Artificial Sequence
  Synthetic oligonucleotide; CTT chr11 5230386 5230407 5230391 5230386 -
aatgaggttaaaaaaaagctaa

SEQ ID NO: 143456 - DNA, 22 bp, Artificial Sequence
  Synthetic oligonucleotide; TTA chr11 5230385 5230406 5230390 5230385 -
atgaggttaaaaaaaagctaat

SEQ ID NO: 143457 - DNA, 22 bp, Artificial Sequence
  Synthetic oligonucleotide; TTA chr11 5230376 5230397 5230381 5230376 -
aaaaaaagctaattctgaatga

SEQ ID NO: 143458 - DNA, 22 bp, Artificial Sequence
  Synthetic oligonucleotide; CTA chr11 5230365 5230386 5230370 5230365 -
attctgaatgaaaatctgagcc

SEQ ID NO: 143459 - DNA, 22 bp, Artificial Sequence
  Synthetic oligonucleotide; TTC chr11 5230361 5230382 5230366 5230361 -
tgaatgaaaatctgagcccagt

SEQ ID NO: 143460 - DNA, 22 bp, Artificial Sequence
  Synthetic oligonucleotide; CTG chr11 5230359 5230380 5230364 5230359 -
aatgaaaatctgagcccagtgg

SEQ ID NO: 143461 - DNA, 22 bp, Artificial Sequence
  Synthetic oligonucleotide; CTG chr11 5230347 5230368 5230352 5230347 -
agcccagtggaggaaatattaa

SEQ ID NO: 143462 - DNA, 22 bp, Artificial Sequence
  Synthetic oligonucleotide; TTA chr11 5230326 5230347 5230331 5230326 -
atgaacaaggtgcagactgaaa

SEQ ID NO: 143463 - DNA, 22 bp, Artificial Sequence
  Synthetic oligonucleotide; CTG chr11 5230307 5230328 5230312 5230307 -
aaatataaatttttctgtaata

SEQ ID NO: 143464 - DNA, 22 bp, Artificial Sequence
  Synthetic oligonucleotide; TTT chr11 5230295 5230316 5230300 5230295 -
ttctgtaataattatgcatata

SEQ ID NO: 143465 - DNA, 22 bp, Artificial Sequence
  Synthetic oligonucleotide; TTT chr11 5230294 5230315 5230299 5230294 -
tctgtaataattatgcatatac

SEQ ID NO: 143466 - DNA, 22 bp, Artificial Sequence
  Synthetic oligonucleotide; TTT chr11 5230293 5230314 5230298 5230293 -
ctgtaataattatgcatatact

SEQ ID NO: 143467 - DNA, 22 bp, Artificial Sequence
  Synthetic oligonucleotide; TTC chr11 5230292 5230313 5230297 5230292 -
tgtaataattatgcatatactt

SEQ ID NO: 143468 - DNA, 22 bp, Artificial Sequence
  Synthetic oligonucleotide; CTG chr11 5230290 5230311 5230295 5230290 -
taataattatgcatatacttta

SEQ ID NO: 143469 - DNA, 22 bp, Artificial Sequence
  Synthetic oligonucleotide; TTA chr11 5230281 5230302 5230286 5230281 -
tgcatatactttagcaaagttc

SEQ ID NO: 143470 - DNA, 22 bp, Artificial Sequence
  Synthetic oligonucleotide; CTT chr11 5230270 5230291 5230275 5230270 -
tagcaaagttctgtctatgttg

SEQ ID NO: 143471 - DNA, 22 bp, Artificial Sequence
  Synthetic oligonucleotide; TTT chr11 5230269 5230290 5230274 5230269 -
agcaaagttctgtctatgttga

SEQ ID NO: 143472 - DNA, 22 bp, Artificial Sequence
  Synthetic oligonucleotide; TTA chr11 5230268 5230289 5230273 5230268 -
gcaaagttctgtctatgttgac

SEQ ID NO: 143473 - DNA, 22 bp, Artificial Sequence
  Synthetic oligonucleotide; TTC chr11 5230259 5230280 5230264 5230259 -
tgtctatgttgactttattgct

SEQ ID NO: 143474 - DNA, 22 bp, Artificial Sequence
  Synthetic oligonucleotide; CTG chr11 5230257 5230278 5230262 5230257 -
tctatgttgactttattgcttt

SEQ ID NO: 143475 - DNA, 22 bp, Artificial Sequence
  Synthetic oligonucleotide; CTA chr11 5230253 5230274 5230258 5230253 -
tgttgactttattgctttttgg

SEQ ID NO: 143476 - DNA, 22 bp, Artificial Sequence
  Synthetic oligonucleotide; TTG chr11 5230248 5230269 5230253 5230248 -
actttattgctttttggtaaga

SEQ ID NO: 143477 - DNA, 22 bp, Artificial Sequence
  Synthetic oligonucleotide; CTT chr11 5230244 5230265 5230249 5230244 -
tattgctttttggtaagaaata

SEQ ID NO: 143478 - DNA, 22 bp, Artificial Sequence
  Synthetic oligonucleotide; TTT chr11 5230243 5230264 5230248 5230243 -
attgctttttggtaagaaatac

SEQ ID NO: 143479 - DNA, 22 bp, Artificial Sequence
  Synthetic oligonucleotide; TTA chr11 5230242 5230263 5230247 5230242 -
ttgctttttggtaagaaataca

SEQ ID NO: 143480 - DNA, 22 bp, Artificial Sequence
  Synthetic oligonucleotide; TTG chr11 5230239 5230260 5230244 5230239 -
ctttttggtaagaaatacaact

SEQ ID NO: 143481 - DNA, 22 bp, Artificial Sequence
  Synthetic oligonucleotide; CTT chr11 5230236 5230257 5230241 5230236 -
tttggtaagaaatacaactttt

SEQ ID NO: 143482 - DNA, 22 bp, Artificial Sequence
  Synthetic oligonucleotide; TTT chr11 5230235 5230256 5230240 5230235 -
ttggtaagaaatacaacttttt

SEQ ID NO: 143483 - DNA, 22 bp, Artificial Sequence
  Synthetic oligonucleotide; TTT chr11 5230234 5230255 5230239 5230234 -
tggtaagaaatacaacttttta

SEQ ID NO: 143484 - DNA, 22 bp, Artificial Sequence
  Synthetic oligonucleotide; TTT chr11 5230233 5230254 5230238 5230233 -
ggtaagaaatacaactttttaa

SEQ ID NO: 143485 - DNA, 22 bp, Artificial Sequence
  Synthetic oligonucleotide; TTG chr11 5230232 5230253 5230237 5230232 -
gtaagaaatacaactttttaaa

SEQ ID NO: 143486 - DNA, 22 bp, Artificial Sequence
  Synthetic oligonucleotide; CTT chr11 5230216 5230237 5230221 5230216 -
tttaaagtgaactaaactatcc

SEQ ID NO: 143487 - DNA, 22 bp, Artificial Sequence
  Synthetic oligonucleotide; TTT chr11 5230215 5230236 5230220 5230215 -
ttaaagtgaactaaactatcct

SEQ ID NO: 143488 - DNA, 22 bp, Artificial Sequence
  Synthetic oligonucleotide; TTT chr11 5230214 5230235 5230219 5230214 -
taaagtgaactaaactatccta

SEQ ID NO: 143489 - DNA, 22 bp, Artificial Sequence
  Synthetic oligonucleotide; TTT chr11 5230213 5230234 5230218 5230213 -
aaagtgaactaaactatcctat

SEQ ID NO: 143490 - DNA, 22 bp, Artificial Sequence
  Synthetic oligonucleotide; TTA chr11 5230212 5230233 5230217 5230212 -
aagtgaactaaactatcctatt

SEQ ID NO: 143491 - DNA, 22 bp, Artificial Sequence
  Synthetic oligonucleotide; CTA chr11 5230202 5230223 5230207 5230202 -
aactatcctatttccaaactat

SEQ ID NO: 143492 - DNA, 22 bp, Artificial Sequence
  Synthetic oligonucleotide; CTA chr11 5230197 5230218 5230202 5230197 -
tcctatttccaaactattttgt

SEQ ID NO: 143493 - DNA, 22 bp, Artificial Sequence
  Synthetic oligonucleotide; CTA chr11 5230192 5230213 5230197 5230192 -
tttccaaactattttgtgtgtg

SEQ ID NO: 143494 - DNA, 22 bp, Artificial Sequence
  Synthetic oligonucleotide; TTT chr11 5230189 5230210 5230194 5230189 -
ccaaactattttgtgtgtgtgc

SEQ ID NO: 143495 - DNA, 22 bp, Artificial Sequence
  Synthetic oligonucleotide; TTC chr11 5230188 5230209 5230193 5230188 -
caaactattttgtgtgtgtgcg

SEQ ID NO: 143496 - DNA, 22 bp, Artificial Sequence
  Synthetic oligonucleotide; CTA chr11 5230181 5230202 5230186 5230181 -
ttttgtgtgtgtgcggtttgtt

SEQ ID NO: 143497 - DNA, 22 bp, Artificial Sequence
  Synthetic oligonucleotide; TTT chr11 5230178 5230199 5230183 5230178 -
tgtgtgtgtgcggtttgtttct

SEQ ID NO: 143498 - DNA, 22 bp, Artificial Sequence
  Synthetic oligonucleotide; TTT chr11 5230177 5230198 5230182 5230177 -
gtgtgtgtgcggtttgtttcta

SEQ ID NO: 143499 - DNA, 22 bp, Artificial Sequence
  Synthetic oligonucleotide; TTG chr11 5230176 5230197 5230181 5230176 -
tgtgtgtgcggtttgtttctat

SEQ ID NO: 143500 - DNA, 22 bp, Artificial Sequence
  Synthetic oligonucleotide; TTT chr11 5230162 5230183 5230167 5230162 -
gtttctatgggttctggttttc

SEQ ID NO: 143501 - DNA, 22 bp, Artificial Sequence
  Synthetic oligonucleotide; TTG chr11 5230161 5230182 5230166 5230161 -
tttctatgggttctggttttct

SEQ ID NO: 143502 - DNA, 22 bp, Artificial Sequence
  Synthetic oligonucleotide; TTT chr11 5230158 5230179 5230163 5230158 -
ctatgggttctggttttcttgg

SEQ ID NO: 143503 - DNA, 22 bp, Artificial Sequence
  Synthetic oligonucleotide; TTC chr11 5230157 5230178 5230162 5230157 -
tatgggttctggttttcttgga

SEQ ID NO: 143504 - DNA, 22 bp, Artificial Sequence
  Synthetic oligonucleotide; CTA chr11 5230155 5230176 5230160 5230155 -
tgggttctggttttcttggagc

SEQ ID NO: 143505 - DNA, 22 bp, Artificial Sequence
  Synthetic oligonucleotide; TTC chr11 5230148 5230169 5230153 5230148 -
tggttttcttggagcattttta

SEQ ID NO: 143506 - DNA, 22 bp, Artificial Sequence
  Synthetic oligonucleotide; CTG chr11 5230146 5230167 5230151 5230146 -
gttttcttggagcatttttatt

SEQ ID NO: 143507 - DNA, 22 bp, Artificial Sequence
  Synthetic oligonucleotide; TTT chr11 5230142 5230163 5230147 5230142 -
tcttggagcatttttatttcat

SEQ ID NO: 143508 - DNA, 22 bp, Artificial Sequence
  Synthetic oligonucleotide; TTT chr11 5230141 5230162 5230146 5230141 -
cttggagcatttttatttcatt

SEQ ID NO: 143509 - DNA, 22 bp, Artificial Sequence
  Synthetic oligonucleotide; TTC chr11 5230140 5230161 5230145 5230140 -
ttggagcatttttatttcattt

SEQ ID NO: 143510 - DNA, 22 bp, Artificial Sequence
  Synthetic oligonucleotide; CTT chr11 5230138 5230159 5230143 5230138 -
ggagcatttttatttcatttta

SEQ ID NO: 143511 - DNA, 22 bp, Artificial Sequence
  Synthetic oligonucleotide; TTG chr11 5230137 5230158 5230142 5230137 -
gagcatttttatttcattttaa

SEQ ID NO: 143512 - DNA, 22 bp, Artificial Sequence
  Synthetic oligonucleotide; TTT chr11 5230129 5230150 5230134 5230129 -
ttatttcattttaattaattaa

SEQ ID NO: 143513 - DNA, 22 bp, Artificial Sequence
  Synthetic oligonucleotide; TTT chr11 5230128 5230149 5230133 5230128 -
tatttcattttaattaattaat

SEQ ID NO: 143514 - DNA, 22 bp, Artificial Sequence
  Synthetic oligonucleotide; TTT chr11 5230127 5230148 5230132 5230127 -
atttcattttaattaattaatt

SEQ ID NO: 143515 - DNA, 22 bp, Artificial Sequence
  Synthetic oligonucleotide; TTA chr11 5230126 5230147 5230131 5230126 -
tttcattttaattaattaattc

SEQ ID NO: 143516 - DNA, 22 bp, Artificial Sequence
  Synthetic oligonucleotide; TTT chr11 5230123 5230144 5230128 5230123 -
cattttaattaattaattctga

SEQ ID NO: 143517 - DNA, 22 bp, Artificial Sequence
  Synthetic oligonucleotide; TTC chr11 5230122 5230143 5230127 5230122 -
attttaattaattaattctgag

SEQ ID NO: 143518 - DNA, 22 bp, Artificial Sequence
  Synthetic oligonucleotide; TTT chr11 5230118 5230139 5230123 5230118 -
taattaattaattctgagagct

SEQ ID NO: 143519 - DNA, 22 bp, Artificial Sequence
  Synthetic oligonucleotide; TTT chr11 5230117 5230138 5230122 5230117 -
aattaattaattctgagagctg

SEQ ID NO: 143520 - DNA, 22 bp, Artificial Sequence
  Synthetic oligonucleotide; TTA chr11 5230116 5230137 5230121 5230116 -
attaattaattctgagagctgc

SEQ ID NO: 143521 - DNA, 22 bp, Artificial Sequence
  Synthetic oligonucleotide; TTA chr11 5230112 5230133 5230117 5230112 -
attaattctgagagctgctgag

SEQ ID NO: 143522 - DNA, 22 bp, Artificial Sequence
  Synthetic oligonucleotide; TTA chr11 5230108 5230129 5230113 5230108 -
attctgagagctgctgagttgt

SEQ ID NO: 143523 - DNA, 22 bp, Artificial Sequence
  Synthetic oligonucleotide; TTC chr11 5230104 5230125 5230109 5230104 -
tgagagctgctgagttgtgttt

SEQ ID NO: 143524 - DNA, 22 bp, Artificial Sequence
  Synthetic oligonucleotide; CTG chr11 5230102 5230123 5230107 5230102 -
agagctgctgagttgtgtttac

SEQ ID NO: 143525 - DNA, 22 bp, Artificial Sequence
  Synthetic oligonucleotide; CTG chr11 5230095 5230116 5230100 5230095 -
ctgagttgtgtttactgagaga

SEQ ID NO: 143526 - DNA, 22 bp, Artificial Sequence
  Synthetic oligonucleotide; CTG chr11 5230092 5230113 5230097 5230092 -
agttgtgtttactgagagattg

SEQ ID NO: 143527 - DNA, 22 bp, Artificial Sequence
  Synthetic oligonucleotide; TTG chr11 5230087 5230108 5230092 5230087 -
tgtttactgagagattgtgtat

SEQ ID NO: 143528 - DNA, 22 bp, Artificial Sequence
  Synthetic oligonucleotide; TTT chr11 5230082 5230103 5230087 5230082 -
actgagagattgtgtatctgcg

SEQ ID NO: 143529 - DNA, 22 bp, Artificial Sequence
  Synthetic oligonucleotide; TTA chr11 5230081 5230102 5230086 5230081 -
ctgagagattgtgtatctgcga

SEQ ID NO: 143530 - DNA, 22 bp, Artificial Sequence
  Synthetic oligonucleotide; CTG chr11 5230078 5230099 5230083 5230078 -
agagattgtgtatctgcgagag

SEQ ID NO: 143531 - DNA, 22 bp, Artificial Sequence
  Synthetic oligonucleotide; TTG chr11 5230070 5230091 5230075 5230070 -
tgtatctgcgagagaagtctgt

SEQ ID NO: 143532 - DNA, 22 bp, Artificial Sequence
  Synthetic oligonucleotide; CTG chr11 5230062 5230083 5230067 5230062 -
cgagagaagtctgtagcaagta

SEQ ID NO: 143533 - DNA, 22 bp, Artificial Sequence
  Synthetic oligonucleotide; CTG chr11 5230049 5230070 5230054 5230049 -
tagcaagtagctagactgtgct

SEQ ID NO: 143534 - DNA, 22 bp, Artificial Sequence
  Synthetic oligonucleotide; CTA chr11 5230036 5230057 5230041 5230036 -
gactgtgcttgacctaggaaca

SEQ ID NO: 143535 - DNA, 22 bp, Artificial Sequence
  Synthetic oligonucleotide; CTG chr11 5230031 5230052 5230036 5230031 -
tgcttgacctaggaacatatac

SEQ ID NO: 143536 - DNA, 22 bp, Artificial Sequence
  Synthetic oligonucleotide; CTT chr11 5230026 5230047 5230031 5230026 -
gacctaggaacatatacagtag

SEQ ID NO: 143537 - DNA, 22 bp, Artificial Sequence
  Synthetic oligonucleotide; TTG chr11 5230025 5230046 5230030 5230025 -
acctaggaacatatacagtaga

SEQ ID NO: 143538 - DNA, 22 bp, Artificial Sequence
  Synthetic oligonucleotide; CTA chr11 5230020 5230041 5230025 5230020 -
ggaacatatacagtagattgct

SEQ ID NO: 143539 - DNA, 22 bp, Artificial Sequence
  Synthetic oligonucleotide; TTG chr11 5230000 5230021 5230005 5230000 -
ctaaaatgtctcacttggggaa

SEQ ID NO: 143540 - DNA, 22 bp, Artificial Sequence
  Synthetic oligonucleotide; CTA chr11 5229997 5230018 5230002 5229997 -
aaatgtctcacttggggaattt

SEQ ID NO: 143541 - DNA, 22 bp, Artificial Sequence
  Synthetic oligonucleotide; CTC chr11 5229988 5230009 5229993 5229988 -
acttggggaattttagactaaa

SEQ ID NO: 143542 - DNA, 22 bp, Artificial Sequence
  Synthetic oligonucleotide; CTT chr11 5229984 5230005 5229989 5229984 -
ggggaattttagactaaacagt

SEQ ID NO: 143543 - DNA, 22 bp, Artificial Sequence
  Synthetic oligonucleotide; TTG chr11 5229983 5230004 5229988 5229983 -
gggaattttagactaaacagta

SEQ ID NO: 143544 - DNA, 22 bp, Artificial Sequence
  Synthetic oligonucleotide; TTT chr11 5229975 5229996 5229980 5229975 -
tagactaaacagtagagcatgt

SEQ ID NO: 143545 - DNA, 22 bp, Artificial Sequence
  Synthetic oligonucleotide; TTT chr11 5229974 5229995 5229979 5229974 -
agactaaacagtagagcatgta

SEQ ID NO: 143546 - DNA, 22 bp, Artificial Sequence
  Synthetic oligonucleotide; TTA chr11 5229973 5229994 5229978 5229973 -
gactaaacagtagagcatgtat

SEQ ID NO: 143547 - DNA, 22 bp, Artificial Sequence
  Synthetic oligonucleotide; CTA chr11 5229968 5229989 5229973 5229968 -
aacagtagagcatgtataaaaa

SEQ ID NO: 143548 - DNA, 22 bp, Artificial Sequence
  Synthetic oligonucleotide; CTC chr11 5229941 5229962 5229946 5229941 -
tagtcaagtgctgcttttgaaa

SEQ ID NO: 143549 - DNA, 22 bp, Artificial Sequence
  Synthetic oligonucleotide; CTA chr11 5229939 5229960 5229944 5229939 -
gtcaagtgctgcttttgaaaca

SEQ ID NO: 143550 - DNA, 22 bp, Artificial Sequence
  Synthetic oligonucleotide; CTG chr11 5229928 5229949 5229933 5229928 -
cttttgaaacaaatgataaaac

SEQ ID NO: 143551 - DNA, 22 bp, Artificial Sequence
  Synthetic oligonucleotide; CTT chr11 5229925 5229946 5229930 5229925 -
ttgaaacaaatgataaaaccac

SEQ ID NO: 143552 - DNA, 22 bp, Artificial Sequence
  Synthetic oligonucleotide; TTT chr11 5229924 5229945 5229929 5229924 -
tgaaacaaatgataaaaccaca

SEQ ID NO: 143553 - DNA, 22 bp, Artificial Sequence
  Synthetic oligonucleotide; TTT chr11 5229923 5229944 5229928 5229923 -
gaaacaaatgataaaaccacac

SEQ ID NO: 143554 - DNA, 22 bp, Artificial Sequence
  Synthetic oligonucleotide; TTG chr11 5229922 5229943 5229927 5229922 -
aaacaaatgataaaaccacact

SEQ ID NO: 143555 - DNA, 22 bp, Artificial Sequence
  Synthetic oligonucleotide; CTC chr11 5229899 5229920 5229904 5229899 -
ccatagatgagtgtcatgattt

SEQ ID NO: 143556 - DNA, 22 bp, Artificial Sequence
  Synthetic oligonucleotide; TTT chr11 5229877 5229898 5229882 5229877 -
tcatggaggaagttaatattca

SEQ ID NO: 143557 - DNA, 22 bp, Artificial Sequence
  Synthetic oligonucleotide; TTT chr11 5229876 5229897 5229881 5229876 -
catggaggaagttaatattcat

SEQ ID NO: 143558 - DNA, 22 bp, Artificial Sequence
  Synthetic oligonucleotide; TTC chr11 5229875 5229896 5229880 5229875 -
atggaggaagttaatattcatc

SEQ ID NO: 143559 - DNA, 22 bp, Artificial Sequence
  Synthetic oligonucleotide; TTA chr11 5229862 5229883 5229867 5229862 -
atattcatcctctaagtatacc

SEQ ID NO: 143560 - DNA, 22 bp, Artificial Sequence
  Synthetic oligonucleotide; TTC chr11 5229856 5229877 5229861 5229856 -
atcctctaagtatacccagact

SEQ ID NO: 143561 - DNA, 22 bp, Artificial Sequence
  Synthetic oligonucleotide; CTC chr11 5229850 5229871 5229855 5229850 -
taagtatacccagactagggcc

SEQ ID NO: 143562 - DNA, 22 bp, Artificial Sequence
  Synthetic oligonucleotide; CTA chr11 5229848 5229869 5229853 5229848 -
agtatacccagactagggccat

SEQ ID NO: 143563 - DNA, 22 bp, Artificial Sequence
  Synthetic oligonucleotide; CTA chr11 5229833 5229854 5229838 5229833 -
gggccattctgatataaaacat

SEQ ID NO: 143564 - DNA, 22 bp, Artificial Sequence
  Synthetic oligonucleotide; TTC chr11 5229824 5229845 5229829 5229824 -
tgatataaaacattaggactta

SEQ ID NO: 143565 - DNA, 22 bp, Artificial Sequence
  Synthetic oligonucleotide; CTG chr11 5229822 5229843 5229827 5229822 -
atataaaacattaggacttaag

SEQ ID NO: 143566 - DNA, 22 bp, Artificial Sequence
  Synthetic oligonucleotide; TTA chr11 5229809 5229830 5229814 5229809 -
ggacttaagaaagattaataga

SEQ ID NO: 143567 - DNA, 22 bp, Artificial Sequence
  Synthetic oligonucleotide; CTT chr11 5229803 5229824 5229808 5229803 -
aagaaagattaatagactggag

SEQ ID NO: 143568 - DNA, 22 bp, Artificial Sequence
  Synthetic oligonucleotide; TTA chr11 5229802 5229823 5229807 5229802 -
agaaagattaatagactggagt

SEQ ID NO: 143569 - DNA, 22 bp, Artificial Sequence
  Synthetic oligonucleotide; TTA chr11 5229792 5229813 5229797 5229792 -
atagactggagtaaaggaaatg

SEQ ID NO: 143570 - DNA, 22 bp, Artificial Sequence
  Synthetic oligonucleotide; CTG chr11 5229784 5229805 5229789 5229784 -
gagtaaaggaaatggacctctg

SEQ ID NO: 143571 - DNA, 22 bp, Artificial Sequence
  Synthetic oligonucleotide; CTC chr11 5229764 5229785 5229769 5229764 -
tgtctctctcgctgtctctttt

SEQ ID NO: 143572 - DNA, 22 bp, Artificial Sequence
  Synthetic oligonucleotide; CTG chr11 5229762 5229783 5229767 5229762 -
tctctctcgctgtctctttttt

SEQ ID NO: 143573 - DNA, 22 bp, Artificial Sequence
  Synthetic oligonucleotide; CTC chr11 5229758 5229779 5229763 5229758 -
tctcgctgtctcttttttgagg

SEQ ID NO: 143574 - DNA, 22 bp, Artificial Sequence
  Synthetic oligonucleotide; CTC chr11 5229756 5229777 5229761 5229756 -
tcgctgtctcttttttgaggac

SEQ ID NO: 143575 - DNA, 22 bp, Artificial Sequence
  Synthetic oligonucleotide; CTC chr11 5229754 5229775 5229759 5229754 -
gctgtctcttttttgaggactt

SEQ ID NO: 143576 - DNA, 22 bp, Artificial Sequence
  Synthetic oligonucleotide; CTG chr11 5229750 5229771 5229755 5229750 -
tctcttttttgaggacttgtgt

SEQ ID NO: 143577 - DNA, 22 bp, Artificial Sequence
  Synthetic oligonucleotide; CTC chr11 5229746 5229767 5229751 5229746 -
ttttttgaggacttgtgtgtgt

SEQ ID NO: 143578 - DNA, 22 bp, Artificial Sequence
  Synthetic oligonucleotide; CTT chr11 5229744 5229765 5229749 5229744 -
ttttgaggacttgtgtgtgtgt

SEQ ID NO: 143579 - DNA, 22 bp, Artificial Sequence
  Synthetic oligonucleotide; TTT chr11 5229743 5229764 5229748 5229743 -
tttgaggacttgtgtgtgtgtg

SEQ ID NO: 143580 - DNA, 22 bp, Artificial Sequence
  Synthetic oligonucleotide; TTT chr11 5229742 5229763 5229747 5229742 -
ttgaggacttgtgtgtgtgtgt

SEQ ID NO: 143581 - DNA, 22 bp, Artificial Sequence
  Synthetic oligonucleotide; TTT chr11 5229741 5229762 5229746 5229741 -
tgaggacttgtgtgtgtgtgtg

SEQ ID NO: 143582 - DNA, 22 bp, Artificial Sequence
  Synthetic oligonucleotide; TTT chr11 5229740 5229761 5229745 5229740 -
gaggacttgtgtgtgtgtgtgt

SEQ ID NO: 143583 - DNA, 22 bp, Artificial Sequence
  Synthetic oligonucleotide; TTG chr11 5229739 5229760 5229744 5229739 -
aggacttgtgtgtgtgtgtgtg

SEQ ID NO: 143584 - DNA, 22 bp, Artificial Sequence
  Synthetic oligonucleotide; CTT chr11 5229732 5229753 5229737 5229732 -
gtgtgtgtgtgtgtgtgtgtgt

SEQ ID NO: 143585 - DNA, 22 bp, Artificial Sequence
  Synthetic oligonucleotide; TTG chr11 5229731 5229752 5229736 5229731 -
tgtgtgtgtgtgtgtgtgtgtg

SEQ ID NO: 143586 - DNA, 22 bp, Artificial Sequence
  Synthetic oligonucleotide; TTG chr11 5229696 5229717 5229701 5229696 -
tggtcagtggggctggaataaa

SEQ ID NO: 143587 - DNA, 22 bp, Artificial Sequence
  Synthetic oligonucleotide; CTG chr11 5229681 5229702 5229686 5229681 -
gaataaaagtagaatagacctg

SEQ ID NO: 143588 - DNA, 22 bp, Artificial Sequence
  Synthetic oligonucleotide; CTG chr11 5229659 5229680 5229664 5229659 -
cacctgctgtggcatccattca

SEQ ID NO: 143589 - DNA, 22 bp, Artificial Sequence
  Synthetic oligonucleotide; CTG chr11 5229653 5229674 5229658 5229653 -
ctgtggcatccattcacagagt

SEQ ID NO: 143590 - DNA, 22 bp, Artificial Sequence
  Synthetic oligonucleotide; CTG chr11 5229650 5229671 5229655 5229650 -
tggcatccattcacagagtaga

SEQ ID NO: 143591 - DNA, 22 bp, Artificial Sequence
  Synthetic oligonucleotide; TTC chr11 5229638 5229659 5229643 5229638 -
acagagtagaagcaagctcaca

SEQ ID NO: 143592 - DNA, 22 bp, Artificial Sequence
  Synthetic oligonucleotide; CTC chr11 5229619 5229640 5229624 5229619 -
acaatagtgaagatgtcagtaa

SEQ ID NO: 143593 - DNA, 22 bp, Artificial Sequence
  Synthetic oligonucleotide; CTT chr11 5229593 5229614 5229598 5229593 -
gaatagtttttcaggaactttg

SEQ ID NO: 143594 - DNA, 22 bp, Artificial Sequence
  Synthetic oligonucleotide; TTG chr11 5229592 5229613 5229597 5229592 -
aatagtttttcaggaactttga

SEQ ID NO: 143595 - DNA, 22 bp, Artificial Sequence
  Synthetic oligonucleotide; TTT chr11 5229584 5229605 5229589 5229584 -
ttcaggaactttgaatgctgat

SEQ ID NO: 143596 - DNA, 22 bp, Artificial Sequence
  Synthetic oligonucleotide; TTT chr11 5229583 5229604 5229588 5229583 -
tcaggaactttgaatgctgatt

SEQ ID NO: 143597 - DNA, 22 bp, Artificial Sequence
  Synthetic oligonucleotide; TTT chr11 5229582 5229603 5229587 5229582 -
caggaactttgaatgctgattt

SEQ ID NO: 143598 - DNA, 22 bp, Artificial Sequence
  Synthetic oligonucleotide; TTC chr11 5229581 5229602 5229586 5229581 -
aggaactttgaatgctgattta

SEQ ID NO: 143599 - DNA, 22 bp, Artificial Sequence
  Synthetic oligonucleotide; CTT chr11 5229573 5229594 5229578 5229573 -
tgaatgctgatttagatttgaa

SEQ ID NO: 143600 - DNA, 22 bp, Artificial Sequence
  Synthetic oligonucleotide; TTT chr11 5229572 5229593 5229577 5229572 -
gaatgctgatttagatttgaaa

SEQ ID NO: 143601 - DNA, 22 bp, Artificial Sequence
  Synthetic oligonucleotide; TTG chr11 5229571 5229592 5229576 5229571 -
aatgctgatttagatttgaaac

SEQ ID NO: 143602 - DNA, 22 bp, Artificial Sequence
  Synthetic oligonucleotide; CTG chr11 5229564 5229585 5229569 5229564 -
atttagatttgaaactgaggct

SEQ ID NO: 143603 - DNA, 22 bp, Artificial Sequence
  Synthetic oligonucleotide; TTT chr11 5229560 5229581 5229565 5229560 -
agatttgaaactgaggctctga

SEQ ID NO: 143604 - DNA, 22 bp, Artificial Sequence
  Synthetic oligonucleotide; TTA chr11 5229559 5229580 5229564 5229559 -
gatttgaaactgaggctctgac

SEQ ID NO: 143605 - DNA, 22 bp, Artificial Sequence
  Synthetic oligonucleotide; TTT chr11 5229554 5229575 5229559 5229554 -
gaaactgaggctctgaccataa

SEQ ID NO: 143606 - DNA, 22 bp, Artificial Sequence
  Synthetic oligonucleotide; TTG chr11 5229553 5229574 5229558 5229553 -
aaactgaggctctgaccataac

SEQ ID NO: 143607 - DNA, 22 bp, Artificial Sequence
  Synthetic oligonucleotide; CTG chr11 5229547 5229568 5229552 5229547 -
aggctctgaccataaccaaatt

SEQ ID NO: 143608 - DNA, 22 bp, Artificial Sequence
  Synthetic oligonucleotide; CTC chr11 5229541 5229562 5229546 5229541 -
tgaccataaccaaatttgcact

SEQ ID NO: 143609 - DNA, 22 bp, Artificial Sequence
  Synthetic oligonucleotide; CTG chr11 5229539 5229560 5229544 5229539 -
accataaccaaatttgcactat

SEQ ID NO: 143610 - DNA, 22 bp, Artificial Sequence
  Synthetic oligonucleotide; TTT chr11 5229524 5229545 5229529 5229524 -
gcactatttattgcttcttgaa

SEQ ID NO: 143611 - DNA, 22 bp, Artificial Sequence
  Synthetic oligonucleotide; TTG chr11 5229523 5229544 5229528 5229523 -
cactatttattgcttcttgaaa

SEQ ID NO: 143612 - DNA, 22 bp, Artificial Sequence
  Synthetic oligonucleotide; CTA chr11 5229518 5229539 5229523 5229518 -
tttattgcttcttgaaacttat

SEQ ID NO: 143613 - DNA, 22 bp, Artificial Sequence
  Synthetic oligonucleotide; TTT chr11 5229515 5229536 5229520 5229515 -
attgcttcttgaaacttatttg

SEQ ID NO: 143614 - DNA, 22 bp, Artificial Sequence
  Synthetic oligonucleotide; TTA chr11 5229514 5229535 5229519 5229514 -
ttgcttcttgaaacttatttgc

SEQ ID NO: 143615 - DNA, 22 bp, Artificial Sequence
  Synthetic oligonucleotide; TTG chr11 5229511 5229532 5229516 5229511 -
cttcttgaaacttatttgcctg

SEQ ID NO: 143616 - DNA, 22 bp, Artificial Sequence
  Synthetic oligonucleotide; CTT chr11 5229508 5229529 5229513 5229508 -
cttgaaacttatttgcctggta

SEQ ID NO: 143617 - DNA, 22 bp, Artificial Sequence
  Synthetic oligonucleotide; TTC chr11 5229507 5229528 5229512 5229507 -
ttgaaacttatttgcctggtat

SEQ ID NO: 143618 - DNA, 22 bp, Artificial Sequence
  Synthetic oligonucleotide; CTT chr11 5229505 5229526 5229510 5229505 -
gaaacttatttgcctggtatgc

SEQ ID NO: 143619 - DNA, 22 bp, Artificial Sequence
  Synthetic oligonucleotide; TTG chr11 5229504 5229525 5229509 5229504 -
aaacttatttgcctggtatgcc

SEQ ID NO: 143620 - DNA, 22 bp, Artificial Sequence
  Synthetic oligonucleotide; CTT chr11 5229498 5229519 5229503 5229498 -
atttgcctggtatgcctgggct

SEQ ID NO: 143621 - DNA, 22 bp, Artificial Sequence
  Synthetic oligonucleotide; TTA chr11 5229497 5229518 5229502 5229497 -
tttgcctggtatgcctgggctt

SEQ ID NO: 143622 - DNA, 22 bp, Artificial Sequence
  Synthetic oligonucleotide; TTT chr11 5229494 5229515 5229499 5229494 -
gcctggtatgcctgggcttttg

SEQ ID NO: 143623 - DNA, 22 bp, Artificial Sequence
  Synthetic oligonucleotide; TTG chr11 5229493 5229514 5229498 5229493 -
cctggtatgcctgggcttttga

SEQ ID NO: 143624 - DNA, 22 bp, Artificial Sequence
  Synthetic oligonucleotide; CTG chr11 5229489 5229510 5229494 5229489 -
gtatgcctgggcttttgatggt

SEQ ID NO: 143625 - DNA, 22 bp, Artificial Sequence
  Synthetic oligonucleotide; CTG chr11 5229480 5229501 5229485 5229480 -
ggcttttgatggtcttagtata

SEQ ID NO: 143626 - DNA, 22 bp, Artificial Sequence
  Synthetic oligonucleotide; CTT chr11 5229475 5229496 5229480 5229475 -
ttgatggtcttagtatagcttg

SEQ ID NO: 143627 - DNA, 22 bp, Artificial Sequence
  Synthetic oligonucleotide; TTT chr11 5229474 5229495 5229479 5229474 -
tgatggtcttagtatagcttgc

SEQ ID NO: 143628 - DNA, 22 bp, Artificial Sequence
  Synthetic oligonucleotide; TTT chr11 5229473 5229494 5229478 5229473 -
gatggtcttagtatagcttgca

SEQ ID NO: 143629 - DNA, 22 bp, Artificial Sequence
  Synthetic oligonucleotide; TTG chr11 5229472 5229493 5229477 5229472 -
atggtcttagtatagcttgcag

SEQ ID NO: 143630 - DNA, 22 bp, Artificial Sequence
  Synthetic oligonucleotide; CTT chr11 5229464 5229485 5229469 5229464 -
agtatagcttgcagccttgtcc

SEQ ID NO: 143631 - DNA, 22 bp, Artificial Sequence
  Synthetic oligonucleotide; TTA chr11 5229463 5229484 5229468 5229463 -
gtatagcttgcagccttgtccc

SEQ ID NO: 143632 - DNA, 22 bp, Artificial Sequence
  Synthetic oligonucleotide; CTT chr11 5229454 5229475 5229459 5229454 -
gcagccttgtccctgcagggta

SEQ ID NO: 143633 - DNA, 22 bp, Artificial Sequence
  Synthetic oligonucleotide; TTG chr11 5229453 5229474 5229458 5229453 -
cagccttgtccctgcagggtat

SEQ ID NO: 143634 - DNA, 22 bp, Artificial Sequence
  Synthetic oligonucleotide; CTT chr11 5229446 5229467 5229451 5229446 -
gtccctgcagggtattatgggt

SEQ ID NO: 143635 - DNA, 22 bp, Artificial Sequence
  Synthetic oligonucleotide; TTG chr11 5229445 5229466 5229450 5229445 -
tccctgcagggtattatgggta

SEQ ID NO: 143636 - DNA, 22 bp, Artificial Sequence
  Synthetic oligonucleotide; CTG chr11 5229439 5229460 5229444 5229439 -
cagggtattatgggtaatagaa

SEQ ID NO: 143637 - DNA, 22 bp, Artificial Sequence
  Synthetic oligonucleotide; TTA chr11 5229429 5229450 5229434 5229429 -
tgggtaatagaaagaaaagtct

SEQ ID NO: 143638 - DNA, 22 bp, Artificial Sequence
  Synthetic oligonucleotide; CTG chr11 5229406 5229427 5229411 5229406 -
cgttacactctagtcacactaa

SEQ ID NO: 143639 - DNA, 22 bp, Artificial Sequence
  Synthetic oligonucleotide; TTA chr11 5229401 5229422 5229406 5229401 -
cactctagtcacactaagtaac

SEQ ID NO: 143640 - DNA, 22 bp, Artificial Sequence
  Synthetic oligonucleotide; CTC chr11 5229396 5229417 5229401 5229396 -
tagtcacactaagtaactacca

SEQ ID NO: 143641 - DNA, 22 bp, Artificial Sequence
  Synthetic oligonucleotide; CTA chr11 5229394 5229415 5229399 5229394 -
gtcacactaagtaactaccatt

SEQ ID NO: 143642 - DNA, 22 bp, Artificial Sequence
  Synthetic oligonucleotide; CTA chr11 5229385 5229406 5229390 5229385 -
agtaactaccattggaaaagca

SEQ ID NO: 143643 - DNA, 22 bp, Artificial Sequence
  Synthetic oligonucleotide; CTA chr11 5229377 5229398 5229382 5229377 -
ccattggaaaagcaacccctgc

SEQ ID NO: 143644 - DNA, 22 bp, Artificial Sequence
  Synthetic oligonucleotide; TTG chr11 5229371 5229392 5229376 5229371 -
gaaaagcaacccctgccttgaa

SEQ ID NO: 143645 - DNA, 22 bp, Artificial Sequence
  Synthetic oligonucleotide; CTG chr11 5229356 5229377 5229361 5229356 -
ccttgaagccaggatgatggta

SEQ ID NO: 143646 - DNA, 22 bp, Artificial Sequence
  Synthetic oligonucleotide; CTT chr11 5229352 5229373 5229357 5229352 -
gaagccaggatgatggtatctg

SEQ ID NO: 143647 - DNA, 22 bp, Artificial Sequence
  Synthetic oligonucleotide; TTG chr11 5229351 5229372 5229356 5229351 -
aagccaggatgatggtatctgc

SEQ ID NO: 143648 - DNA, 22 bp, Artificial Sequence
  Synthetic oligonucleotide; CTG chr11 5229330 5229351 5229335 5229330 -
cagcagttgccaacacaagaga

SEQ ID NO: 143649 - DNA, 22 bp, Artificial Sequence
  Synthetic oligonucleotide; TTG chr11 5229321 5229342 5229326 5229321 -
ccaacacaagagaaggatccat

SEQ ID NO: 143650 - DNA, 22 bp, Artificial Sequence
  Synthetic oligonucleotide; TTC chr11 5229294 5229315 5229299 5229294 -
atcatttaaaaaagaaaacaaa

SEQ ID NO: 143651 - DNA, 22 bp, Artificial Sequence
  Synthetic oligonucleotide; TTT chr11 5229287 5229308 5229292 5229287 -
aaaaaagaaaacaaaatagaaa

SEQ ID NO: 143652 - DNA, 22 bp, Artificial Sequence
  Synthetic oligonucleotide; TTA chr11 5229286 5229307 5229291 5229286 -
aaaaagaaaacaaaatagaaaa

SEQ ID NO: 143653 - DNA, 22 bp, Artificial Sequence
  Synthetic oligonucleotide; CTA chr11 5229254 5229275 5229259 5229254 -
tttctgagcataagaagttgta

SEQ ID NO: 143654 - DNA, 22 bp, Artificial Sequence
  Synthetic oligonucleotide; TTT chr11 5229251 5229272 5229256 5229251 -
ctgagcataagaagttgtaggg

SEQ ID NO: 143655 - DNA, 22 bp, Artificial Sequence
  Synthetic oligonucleotide; TTC chr11 5229250 5229271 5229255 5229250 -
tgagcataagaagttgtagggt

SEQ ID NO: 143656 - DNA, 22 bp, Artificial Sequence
  Synthetic oligonucleotide; CTG chr11 5229248 5229269 5229253 5229248 -
agcataagaagttgtagggtaa

SEQ ID NO: 143657 - DNA, 22 bp, Artificial Sequence
  Synthetic oligonucleotide; TTG chr11 5229234 5229255 5229239 5229234 -
tagggtaagtctttaagaaggt

SEQ ID NO: 143658 - DNA, 22 bp, Artificial Sequence
  Synthetic oligonucleotide; CTT chr11 5229221 5229242 5229226 5229221 -
taagaaggtgacaatttctgcc

SEQ ID NO: 143659 - DNA, 22 bp, Artificial Sequence
  Synthetic oligonucleotide; TTT chr11 5229220 5229241 5229225 5229220 -
aagaaggtgacaatttctgcca

SEQ ID NO: 143660 - DNA, 22 bp, Artificial Sequence
  Synthetic oligonucleotide; TTA chr11 5229219 5229240 5229224 5229219 -
agaaggtgacaatttctgccaa

SEQ ID NO: 143661 - DNA, 22 bp, Artificial Sequence
  Synthetic oligonucleotide; TTT chr11 5229204 5229225 5229209 5229204 -
ctgccaatcaggatttcaaagc

SEQ ID NO: 143662 - DNA, 22 bp, Artificial Sequence
  Synthetic oligonucleotide; TTC chr11 5229203 5229224 5229208 5229203 -
tgccaatcaggatttcaaagct

SEQ ID NO: 143663 - DNA, 22 bp, Artificial Sequence
  Synthetic oligonucleotide; CTG chr11 5229201 5229222 5229206 5229201 -
ccaatcaggatttcaaagctct

SEQ ID NO: 143664 - DNA, 22 bp, Artificial Sequence
  Synthetic oligonucleotide; TTT chr11 5229188 5229209 5229193 5229188 -
caaagctcttgctttgacaatt

SEQ ID NO: 143665 - DNA, 22 bp, Artificial Sequence
  Synthetic oligonucleotide; TTC chr11 5229187 5229208 5229192 5229187 -
aaagctcttgctttgacaattt

SEQ ID NO: 143666 - DNA, 22 bp, Artificial Sequence
  Synthetic oligonucleotide; CTC chr11 5229180 5229201 5229185 5229180 -
ttgctttgacaattttggtctt

SEQ ID NO: 143667 - DNA, 22 bp, Artificial Sequence
  Synthetic oligonucleotide; CTT chr11 5229178 5229199 5229183 5229178 -
gctttgacaattttggtctttc

SEQ ID NO: 143668 - DNA, 22 bp, Artificial Sequence
  Synthetic oligonucleotide; TTG chr11 5229177 5229198 5229182 5229177 -
ctttgacaattttggtctttca

SEQ ID NO: 143669 - DNA, 22 bp, Artificial Sequence
  Synthetic oligonucleotide; CTT chr11 5229174 5229195 5229179 5229174 -
tgacaattttggtctttcagaa

SEQ ID NO: 143670 - DNA, 22 bp, Artificial Sequence
  Synthetic oligonucleotide; TTT chr11 5229173 5229194 5229178 5229173 -
gacaattttggtctttcagaat

SEQ ID NO: 143671 - DNA, 22 bp, Artificial Sequence
  Synthetic oligonucleotide; TTG chr11 5229172 5229193 5229177 5229172 -
acaattttggtctttcagaata

SEQ ID NO: 143672 - DNA, 22 bp, Artificial Sequence
  Synthetic oligonucleotide; TTT chr11 5229165 5229186 5229170 5229165 -
tggtctttcagaatactataaa

SEQ ID NO: 143673 - DNA, 22 bp, Artificial Sequence
  Synthetic oligonucleotide; TTT chr11 5229164 5229185 5229169 5229164 -
ggtctttcagaatactataaat

SEQ ID NO: 143674 - DNA, 22 bp, Artificial Sequence
  Synthetic oligonucleotide; TTG chr11 5229163 5229184 5229168 5229163 -
gtctttcagaatactataaata

SEQ ID NO: 143675 - DNA, 22 bp, Artificial Sequence
  Synthetic oligonucleotide; CTT chr11 5229158 5229179 5229163 5229158 -
tcagaatactataaatataacc

SEQ ID NO: 143676 - DNA, 22 bp, Artificial Sequence
  Synthetic oligonucleotide; TTT chr11 5229157 5229178 5229162 5229157 -
cagaatactataaatataacct

SEQ ID NO: 143677 - DNA, 22 bp, Artificial Sequence
  Synthetic oligonucleotide; TTC chr11 5229156 5229177 5229161 5229156 -
agaatactataaatataaccta

SEQ ID NO: 143678 - DNA, 22 bp, Artificial Sequence
  Synthetic oligonucleotide; CTA chr11 5229147 5229168 5229152 5229147 -
taaatataacctatattataat

SEQ ID NO: 143679 - DNA, 22 bp, Artificial Sequence
  Synthetic oligonucleotide; CTA chr11 5229134 5229155 5229139 5229134 -
tattataatttcataaagtctg

SEQ ID NO: 143680 - DNA, 22 bp, Artificial Sequence
  Synthetic oligonucleotide; TTA chr11 5229129 5229150 5229134 5229129 -
taatttcataaagtctgtgcat

SEQ ID NO: 143681 - DNA, 22 bp, Artificial Sequence
  Synthetic oligonucleotide; TTT chr11 5229123 5229144 5229128 5229123 -
cataaagtctgtgcattttctt

SEQ ID NO: 143682 - DNA, 22 bp, Artificial Sequence
  Synthetic oligonucleotide; TTC chr11 5229122 5229143 5229127 5229122 -
ataaagtctgtgcattttcttt

SEQ ID NO: 143683 - DNA, 22 bp, Artificial Sequence
  Synthetic oligonucleotide; CTG chr11 5229112 5229133 5229117 5229112 -
tgcattttctttgacccaggat

SEQ ID NO: 143684 - DNA, 22 bp, Artificial Sequence
  Synthetic oligonucleotide; TTT chr11 5229105 5229126 5229110 5229105 -
tctttgacccaggatatttgca

SEQ ID NO: 143685 - DNA, 22 bp, Artificial Sequence
  Synthetic oligonucleotide; TTT chr11 5229104 5229125 5229109 5229104 -
ctttgacccaggatatttgcaa

SEQ ID NO: 143686 - DNA, 22 bp, Artificial Sequence
  Synthetic oligonucleotide; TTC chr11 5229103 5229124 5229108 5229103 -
tttgacccaggatatttgcaaa

SEQ ID NO: 143687 - DNA, 22 bp, Artificial Sequence
  Synthetic oligonucleotide; CTT chr11 5229101 5229122 5229106 5229101 -
tgacccaggatatttgcaaaag

SEQ ID NO: 143688 - DNA, 22 bp, Artificial Sequence
  Synthetic oligonucleotide; TTT chr11 5229100 5229121 5229105 5229100 -
gacccaggatatttgcaaaaga

SEQ ID NO: 143689 - DNA, 22 bp, Artificial Sequence
  Synthetic oligonucleotide; TTG chr11 5229099 5229120 5229104 5229099 -
acccaggatatttgcaaaagac

SEQ ID NO: 143690 - DNA, 22 bp, Artificial Sequence
  Synthetic oligonucleotide; TTT chr11 5229086 5229107 5229091 5229086 -
gcaaaagacatattcaaacttc

SEQ ID NO: 143691 - DNA, 22 bp, Artificial Sequence
  Synthetic oligonucleotide; TTG chr11 5229085 5229106 5229090 5229085 -
caaaagacatattcaaacttcc

SEQ ID NO: 143692 - DNA, 22 bp, Artificial Sequence
  Synthetic oligonucleotide; TTC chr11 5229071 5229092 5229076 5229071 -
aaacttccgcagaacactttat

SEQ ID NO: 143693 - DNA, 22 bp, Artificial Sequence
  Synthetic oligonucleotide; CTT chr11 5229065 5229086 5229070 5229065 -
ccgcagaacactttatttcaca

SEQ ID NO: 143694 - DNA, 22 bp, Artificial Sequence
  Synthetic oligonucleotide; TTC chr11 5229064 5229085 5229069 5229064 -
cgcagaacactttatttcacat

SEQ ID NO: 143695 - DNA, 22 bp, Artificial Sequence
  Synthetic oligonucleotide; CTT chr11 5229052 5229073 5229057 5229052 -
tatttcacatatacatgcctct

SEQ ID NO: 143696 - DNA, 22 bp, Artificial Sequence
  Synthetic oligonucleotide; TTT chr11 5229051 5229072 5229056 5229051 -
atttcacatatacatgcctctt

SEQ ID NO: 143697 - DNA, 22 bp, Artificial Sequence
  Synthetic oligonucleotide; TTA chr11 5229050 5229071 5229055 5229050 -
tttcacatatacatgcctctta

SEQ ID NO: 143698 - DNA, 22 bp, Artificial Sequence
  Synthetic oligonucleotide; TTT chr11 5229047 5229068 5229052 5229047 -
cacatatacatgcctcttatat

SEQ ID NO: 143699 - DNA, 22 bp, Artificial Sequence
  Synthetic oligonucleotide; TTC chr11 5229046 5229067 5229051 5229046 -
acatatacatgcctcttatatc

SEQ ID NO: 143700 - DNA, 22 bp, Artificial Sequence
  Synthetic oligonucleotide; CTC chr11 5229031 5229052 5229036 5229031 -
ttatatcagggatgtgaaacag

SEQ ID NO: 143701 - DNA, 22 bp, Artificial Sequence
  Synthetic oligonucleotide; CTT chr11 5229029 5229050 5229034 5229029 -
atatcagggatgtgaaacaggg

SEQ ID NO: 143702 - DNA, 22 bp, Artificial Sequence
  Synthetic oligonucleotide; TTA chr11 5229028 5229049 5229033 5229028 -
tatcagggatgtgaaacagggt

SEQ ID NO: 143703 - DNA, 22 bp, Artificial Sequence
  Synthetic oligonucleotide; CTT chr11 5229003 5229024 5229008 5229003 -
gaaaactgtctaaatctaaaac

SEQ ID NO: 143704 - DNA, 22 bp, Artificial Sequence
  Synthetic oligonucleotide; TTG chr11 5229002 5229023 5229007 5229002 -
aaaactgtctaaatctaaaaca

SEQ ID NO: 143705 - DNA, 22 bp, Artificial Sequence
  Synthetic oligonucleotide; CTG chr11 5228995 5229016 5229000 5228995 -
tctaaatctaaaacaatgctaa

SEQ ID NO: 143706 - DNA, 22 bp, Artificial Sequence
  Synthetic oligonucleotide; CTA chr11 5228991 5229012 5228996 5228991 -
aatctaaaacaatgctaatgca

SEQ ID NO: 143707 - DNA, 22 bp, Artificial Sequence
  Synthetic oligonucleotide; CTA chr11 5228985 5229006 5228990 5228985 -
aaacaatgctaatgcaggttta

SEQ ID NO: 143708 - DNA, 22 bp, Artificial Sequence
  Synthetic oligonucleotide; CTA chr11 5228974 5228995 5228979 5228974 -
atgcaggtttaaatttaataaa

SEQ ID NO: 143709 - DNA, 22 bp, Artificial Sequence
  Synthetic oligonucleotide; TTT chr11 5228964 5228985 5228969 5228964 -
aaatttaataaaataaaatcca

SEQ ID NO: 143710 - DNA, 22 bp, Artificial Sequence
  Synthetic oligonucleotide; TTA chr11 5228963 5228984 5228968 5228963 -
aatttaataaaataaaatccaa

SEQ ID NO: 143711 - DNA, 22 bp, Artificial Sequence
  Synthetic oligonucleotide; TTT chr11 5228958 5228979 5228963 5228958 -
aataaaataaaatccaaaatct

SEQ ID NO: 143712 - DNA, 22 bp, Artificial Sequence
  Synthetic oligonucleotide; TTA chr11 5228957 5228978 5228962 5228957 -
ataaaataaaatccaaaatcta

SEQ ID NO: 143713 - DNA, 22 bp, Artificial Sequence
  Synthetic oligonucleotide; CTA chr11 5228935 5228956 5228940 5228935 -
acagccaagtcaaatctgcatg

SEQ ID NO: 143714 - DNA, 22 bp, Artificial Sequence
  Synthetic oligonucleotide; CTG chr11 5228917 5228938 5228922 5228917 -
catgttttaacatttaaaatat

SEQ ID NO: 143715 - DNA, 22 bp, Artificial Sequence
  Synthetic oligonucleotide; TTT chr11 5228910 5228931 5228915 5228910 -
taacatttaaaatattttaaag

SEQ ID NO: 143716 - DNA, 22 bp, Artificial Sequence
  Synthetic oligonucleotide; TTT chr11 5228909 5228930 5228914 5228909 -
aacatttaaaatattttaaaga

SEQ ID NO: 143717 - DNA, 22 bp, Artificial Sequence
  Synthetic oligonucleotide; TTA chr11 5228908 5228929 5228913 5228908 -
acatttaaaatattttaaagac

SEQ ID NO: 143718 - DNA, 22 bp, Artificial Sequence
  Synthetic oligonucleotide; TTT chr11 5228902 5228923 5228907 5228902 -
aaaatattttaaagacgtcttt

SEQ ID NO: 143719 - DNA, 22 bp, Artificial Sequence
  Synthetic oligonucleotide; TTA chr11 5228901 5228922 5228906 5228901 -
aaatattttaaagacgtctttt

SEQ ID NO: 143720 - DNA, 22 bp, Artificial Sequence
  Synthetic oligonucleotide; TTT chr11 5228893 5228914 5228898 5228893 -
taaagacgtcttttcccaggat

SEQ ID NO: 143721 - DNA, 22 bp, Artificial Sequence
  Synthetic oligonucleotide; TTT chr11 5228892 5228913 5228897 5228892 -
aaagacgtcttttcccaggatt

SEQ ID NO: 143722 - DNA, 22 bp, Artificial Sequence
  Synthetic oligonucleotide; TTA chr11 5228891 5228912 5228896 5228891 -
aagacgtcttttcccaggattc

SEQ ID NO: 143723 - DNA, 22 bp, Artificial Sequence
  Synthetic oligonucleotide; CTT chr11 5228881 5228902 5228886 5228881 -
ttcccaggattcaacatgtgaa

SEQ ID NO: 143724 - DNA, 22 bp, Artificial Sequence
  Synthetic oligonucleotide; TTT chr11 5228880 5228901 5228885 5228880 -
tcccaggattcaacatgtgaaa

SEQ ID NO: 143725 - DNA, 22 bp, Artificial Sequence
  Synthetic oligonucleotide; TTT chr11 5228879 5228900 5228884 5228879 -
cccaggattcaacatgtgaaat

SEQ ID NO: 143726 - DNA, 22 bp, Artificial Sequence
  Synthetic oligonucleotide; TTC chr11 5228878 5228899 5228883 5228878 -
ccaggattcaacatgtgaaatc

SEQ ID NO: 143727 - DNA, 22 bp, Artificial Sequence
  Synthetic oligonucleotide; TTC chr11 5228869 5228890 5228874 5228869 -
aacatgtgaaatcttttctcag

SEQ ID NO: 143728 - DNA, 22 bp, Artificial Sequence
  Synthetic oligonucleotide; CTT chr11 5228854 5228875 5228859 5228854 -
ttctcagggatacacgtgtgcc

SEQ ID NO: 143729 - DNA, 22 bp, Artificial Sequence
  Synthetic oligonucleotide; TTT chr11 5228853 5228874 5228858 5228853 -
tctcagggatacacgtgtgcct

SEQ ID NO: 143730 - DNA, 22 bp, Artificial Sequence
  Synthetic oligonucleotide; TTT chr11 5228852 5228873 5228857 5228852 -
ctcagggatacacgtgtgccta

SEQ ID NO: 143731 - DNA, 22 bp, Artificial Sequence
  Synthetic oligonucleotide; TTC chr11 5228851 5228872 5228856 5228851 -
tcagggatacacgtgtgcctag

SEQ ID NO: 143732 - DNA, 22 bp, Artificial Sequence
  Synthetic oligonucleotide; CTC chr11 5228849 5228870 5228854 5228849 -
agggatacacgtgtgcctagat

SEQ ID NO: 143733 - DNA, 22 bp, Artificial Sequence
  Synthetic oligonucleotide; CTA chr11 5228830 5228851 5228835 5228830 -
gatcctcattgctttagttttt

SEQ ID NO: 143734 - DNA, 22 bp, Artificial Sequence
  Synthetic oligonucleotide; CTC chr11 5228823 5228844 5228828 5228823 -
attgctttagttttttacagag

SEQ ID NO: 143735 - DNA, 22 bp, Artificial Sequence
  Synthetic oligonucleotide; TTG chr11 5228819 5228840 5228824 5228819 -
ctttagttttttacagaggaat

SEQ ID NO: 143736 - DNA, 22 bp, Artificial Sequence
  Synthetic oligonucleotide; CTT chr11 5228816 5228837 5228821 5228816 -
tagttttttacagaggaatgaa

SEQ ID NO: 143737 - DNA, 22 bp, Artificial Sequence
  Synthetic oligonucleotide; TTT chr11 5228815 5228836 5228820 5228815 -
agttttttacagaggaatgaat

SEQ ID NO: 143738 - DNA, 22 bp, Artificial Sequence
  Synthetic oligonucleotide; TTA chr11 5228814 5228835 5228819 5228814 -
gttttttacagaggaatgaata

SEQ ID NO: 143739 - DNA, 22 bp, Artificial Sequence
  Synthetic oligonucleotide; TTT chr11 5228810 5228831 5228815 5228810 -
tttacagaggaatgaatataaa

SEQ ID NO: 143740 - DNA, 22 bp, Artificial Sequence
  Synthetic oligonucleotide; TTT chr11 5228809 5228830 5228814 5228809 -
ttacagaggaatgaatataaaa

SEQ ID NO: 143741 - DNA, 22 bp, Artificial Sequence
  Synthetic oligonucleotide; TTT chr11 5228808 5228829 5228813 5228808 -
tacagaggaatgaatataaaaa

SEQ ID NO: 143742 - DNA, 22 bp, Artificial Sequence
  Synthetic oligonucleotide; TTT chr11 5228807 5228828 5228812 5228807 -
acagaggaatgaatataaaaag

SEQ ID NO: 143743 - DNA, 22 bp, Artificial Sequence
  Synthetic oligonucleotide; TTA chr11 5228806 5228827 5228811 5228806 -
cagaggaatgaatataaaaaga

SEQ ID NO: 143744 - DNA, 22 bp, Artificial Sequence
  Synthetic oligonucleotide; CTT chr11 5228776 5228797 5228781 5228776 -
aaattttatccctcttacctct

SEQ ID NO: 143745 - DNA, 22 bp, Artificial Sequence
  Synthetic oligonucleotide; TTA chr11 5228775 5228796 5228780 5228775 -
aattttatccctcttacctcta

SEQ ID NO: 143746 - DNA, 22 bp, Artificial Sequence
  Synthetic oligonucleotide; TTT chr11 5228770 5228791 5228775 5228770 -
tatccctcttacctctataatc

SEQ ID NO: 143747 - DNA, 22 bp, Artificial Sequence
  Synthetic oligonucleotide; TTT chr11 5228769 5228790 5228774 5228769 -
atccctcttacctctataatca

SEQ ID NO: 143748 - DNA, 22 bp, Artificial Sequence
  Synthetic oligonucleotide; TTA chr11 5228768 5228789 5228773 5228768 -
tccctcttacctctataatcat

SEQ ID NO: 143749 - DNA, 22 bp, Artificial Sequence
  Synthetic oligonucleotide; CTC chr11 5228762 5228783 5228767 5228762 -
ttacctctataatcatacatag

SEQ ID NO: 143750 - DNA, 22 bp, Artificial Sequence
  Synthetic oligonucleotide; CTT chr11 5228760 5228781 5228765 5228760 -
acctctataatcatacataggc

SEQ ID NO: 143751 - DNA, 22 bp, Artificial Sequence
  Synthetic oligonucleotide; TTA chr11 5228759 5228780 5228764 5228759 -
cctctataatcatacataggca

SEQ ID NO: 143752 - DNA, 22 bp, Artificial Sequence
  Synthetic oligonucleotide; CTC chr11 5228755 5228776 5228760 5228755 -
tataatcatacataggcataat

SEQ ID NO: 143753 - DNA, 22 bp, Artificial Sequence
  Synthetic oligonucleotide; CTA chr11 5228753 5228774 5228758 5228753 -
taatcatacataggcataattt

SEQ ID NO: 143754 - DNA, 22 bp, Artificial Sequence
  Synthetic oligonucleotide; TTT chr11 5228731 5228752 5228736 5228731 -
tttaacctaggctccagatagc

SEQ ID NO: 143755 - DNA, 22 bp, Artificial Sequence
  Synthetic oligonucleotide; TTT chr11 5228730 5228751 5228735 5228730 -
ttaacctaggctccagatagcc

SEQ ID NO: 143756 - DNA, 22 bp, Artificial Sequence
  Synthetic oligonucleotide; TTT chr11 5228729 5228750 5228734 5228729 -
taacctaggctccagatagcca

SEQ ID NO: 143757 - DNA, 22 bp, Artificial Sequence
  Synthetic oligonucleotide; TTT chr11 5228728 5228749 5228733 5228728 -
aacctaggctccagatagccat

SEQ ID NO: 143758 - DNA, 22 bp, Artificial Sequence
  Synthetic oligonucleotide; TTA chr11 5228727 5228748 5228732 5228727 -
acctaggctccagatagccata

SEQ ID NO: 143759 - DNA, 22 bp, Artificial Sequence
  Synthetic oligonucleotide; CTA chr11 5228722 5228743 5228727 5228722 -
ggctccagatagccatagaaga

SEQ ID NO: 143760 - DNA, 22 bp, Artificial Sequence
  Synthetic oligonucleotide; CTC chr11 5228717 5228738 5228722 5228717 -
cagatagccatagaagaaccaa

SEQ ID NO: 143761 - DNA, 22 bp, Artificial Sequence
  Synthetic oligonucleotide; CTT chr11 5228689 5228710 5228694 5228689 -
tctgcgtgtgtgagaataatca

SEQ ID NO: 143762 - DNA, 22 bp, Artificial Sequence
  Synthetic oligonucleotide; TTT chr11 5228688 5228709 5228693 5228688 -
ctgcgtgtgtgagaataatcag

SEQ ID NO: 143763 - DNA, 22 bp, Artificial Sequence
  Synthetic oligonucleotide; TTC chr11 5228687 5228708 5228692 5228687 -
tgcgtgtgtgagaataatcaga

SEQ ID NO: 143764 - DNA, 22 bp, Artificial Sequence
  Synthetic oligonucleotide; CTG chr11 5228685 5228706 5228690 5228685 -
cgtgtgtgagaataatcagagt

SEQ ID NO: 143765 - DNA, 22 bp, Artificial Sequence
  Synthetic oligonucleotide; TTT chr11 5228656 5228677 5228661 5228656 -
tttcacaagtacctgatgaggg

SEQ ID NO: 143766 - DNA, 22 bp, Artificial Sequence
  Synthetic oligonucleotide; TTT chr11 5228655 5228676 5228660 5228655 -
ttcacaagtacctgatgagggt

SEQ ID NO: 143767 - DNA, 22 bp, Artificial Sequence
  Synthetic oligonucleotide; TTT chr11 5228654 5228675 5228659 5228654 -
tcacaagtacctgatgagggtt

SEQ ID NO: 143768 - DNA, 22 bp, Artificial Sequence
  Synthetic oligonucleotide; TTT chr11 5228653 5228674 5228658 5228653 -
cacaagtacctgatgagggttg

SEQ ID NO: 143769 - DNA, 22 bp, Artificial Sequence
  Synthetic oligonucleotide; TTC chr11 5228652 5228673 5228657 5228652 -
acaagtacctgatgagggttga

SEQ ID NO: 143770 - DNA, 22 bp, Artificial Sequence
  Synthetic oligonucleotide; CTG chr11 5228641 5228662 5228646 5228641 -
atgagggttgagacaggtagaa

SEQ ID NO: 143771 - DNA, 22 bp, Artificial Sequence
  Synthetic oligonucleotide; TTG chr11 5228631 5228652 5228636 5228631 -
agacaggtagaaaaagtgagag

SEQ ID NO: 143772 - DNA, 22 bp, Artificial Sequence
  Synthetic oligonucleotide; CTC chr11 5228604 5228625 5228609 5228604 -
tatttatttagcaataatagag

SEQ ID NO: 143773 - DNA, 22 bp, Artificial Sequence
  Synthetic oligonucleotide; CTA chr11 5228602 5228623 5228607 5228602 -
tttatttagcaataatagagaa

SEQ ID NO: 143774 - DNA, 22 bp, Artificial Sequence
  Synthetic oligonucleotide; TTT chr11 5228599 5228620 5228604 5228599 -
atttagcaataatagagaaagc

SEQ ID NO: 143775 - DNA, 22 bp, Artificial Sequence
  Synthetic oligonucleotide; TTA chr11 5228598 5228619 5228603 5228598 -
tttagcaataatagagaaagca

SEQ ID NO: 143776 - DNA, 22 bp, Artificial Sequence
  Synthetic oligonucleotide; TTT chr11 5228595 5228616 5228600 5228595 -
agcaataatagagaaagcattt

SEQ ID NO: 143777 - DNA, 22 bp, Artificial Sequence
  Synthetic oligonucleotide; TTA chr11 5228594 5228615 5228599 5228594 -
gcaataatagagaaagcattta

SEQ ID NO: 143778 - DNA, 22 bp, Artificial Sequence
  Synthetic oligonucleotide; TTT chr11 5228573 5228594 5228578 5228573 -
aagagaataaagcaatggaaat

SEQ ID NO: 143779 - DNA, 22 bp, Artificial Sequence
  Synthetic oligonucleotide; TTA chr11 5228572 5228593 5228577 5228572 -
agagaataaagcaatggaaata

SEQ ID NO: 143780 - DNA, 22 bp, Artificial Sequence
  Synthetic oligonucleotide; TTT chr11 5228542 5228563 5228547 5228542 -
gtaaatttccttctgataacta

SEQ ID NO: 143781 - DNA, 22 bp, Artificial Sequence
  Synthetic oligonucleotide; TTG chr11 5228541 5228562 5228546 5228541 -
taaatttccttctgataactag

SEQ ID NO: 143782 - DNA, 22 bp, Artificial Sequence
  Synthetic oligonucleotide; TTT chr11 5228534 5228555 5228539 5228534 -
ccttctgataactagaaataga

SEQ ID NO: 143783 - DNA, 22 bp, Artificial Sequence
  Synthetic oligonucleotide; TTC chr11 5228533 5228554 5228538 5228533 -
cttctgataactagaaatagag

SEQ ID NO: 143784 - DNA, 22 bp, Artificial Sequence
  Synthetic oligonucleotide; CTT chr11 5228530 5228551 5228535 5228530 -
ctgataactagaaatagaggat

SEQ ID NO: 143785 - DNA, 22 bp, Artificial Sequence
  Synthetic oligonucleotide; TTC chr11 5228529 5228550 5228534 5228529 -
tgataactagaaatagaggatc

SEQ ID NO: 143786 - DNA, 22 bp, Artificial Sequence
  Synthetic oligonucleotide; CTG chr11 5228527 5228548 5228532 5228527 -
ataactagaaatagaggatcca

SEQ ID NO: 143787 - DNA, 22 bp, Artificial Sequence
  Synthetic oligonucleotide; CTA chr11 5228520 5228541 5228525 5228520 -
gaaatagaggatccagtttctt

SEQ ID NO: 143788 - DNA, 22 bp, Artificial Sequence
  Synthetic oligonucleotide; TTT chr11 5228501 5228522 5228506 5228501 -
cttttggttaacctaaatttta

SEQ ID NO: 143789 - DNA, 22 bp, Artificial Sequence
  Synthetic oligonucleotide; TTC chr11 5228500 5228521 5228505 5228500 -
ttttggttaacctaaattttat

SEQ ID NO: 143790 - DNA, 22 bp, Artificial Sequence
  Synthetic oligonucleotide; CTT chr11 5228498 5228519 5228503 5228498 -
ttggttaacctaaattttattt

SEQ ID NO: 143791 - DNA, 22 bp, Artificial Sequence
  Synthetic oligonucleotide; TTT chr11 5228497 5228518 5228502 5228497 -
tggttaacctaaattttatttc

SEQ ID NO: 143792 - DNA, 22 bp, Artificial Sequence
  Synthetic oligonucleotide; TTT chr11 5228496 5228517 5228501 5228496 -
ggttaacctaaattttatttca

SEQ ID NO: 143793 - DNA, 22 bp, Artificial Sequence
  Synthetic oligonucleotide; TTG chr11 5228495 5228516 5228500 5228495 -
gttaacctaaattttatttcat

SEQ ID NO: 143794 - DNA, 22 bp, Artificial Sequence
  Synthetic oligonucleotide; TTA chr11 5228491 5228512 5228496 5228491 -
acctaaattttatttcatttta

SEQ ID NO: 143795 - DNA, 22 bp, Artificial Sequence
  Synthetic oligonucleotide; CTA chr11 5228486 5228507 5228491 5228486 -
aattttatttcattttattgtt

SEQ ID NO: 143796 - DNA, 22 bp, Artificial Sequence
  Synthetic oligonucleotide; TTT chr11 5228481 5228502 5228486 5228481 -
tatttcattttattgttttatt

SEQ ID NO: 143797 - DNA, 22 bp, Artificial Sequence
  Synthetic oligonucleotide; TTT chr11 5228480 5228501 5228485 5228480 -
atttcattttattgttttattt

SEQ ID NO: 143798 - DNA, 22 bp, Artificial Sequence
  Synthetic oligonucleotide; TTA chr11 5228479 5228500 5228484 5228479 -
tttcattttattgttttatttt

SEQ ID NO: 143799 - DNA, 22 bp, Artificial Sequence
  Synthetic oligonucleotide; TTT chr11 5228476 5228497 5228481 5228476 -
cattttattgttttattttatt

SEQ ID NO: 143800 - DNA, 22 bp, Artificial Sequence
  Synthetic oligonucleotide; TTC chr11 5228475 5228496 5228480 5228475 -
attttattgttttattttattt

SEQ ID NO: 143801 - DNA, 22 bp, Artificial Sequence
  Synthetic oligonucleotide; TTT chr11 5228471 5228492 5228476 5228471 -
tattgttttattttattttatt

SEQ ID NO: 143802 - DNA, 22 bp, Artificial Sequence
  Synthetic oligonucleotide; TTT chr11 5228470 5228491 5228475 5228470 -
attgttttattttattttattt

SEQ ID NO: 143803 - DNA, 22 bp, Artificial Sequence
  Synthetic oligonucleotide; TTA chr11 5228469 5228490 5228474 5228469 -
ttgttttattttattttatttt

SEQ ID NO: 143804 - DNA, 22 bp, Artificial Sequence
  Synthetic oligonucleotide; TTG chr11 5228466 5228487 5228471 5228466 -
ttttattttattttattttatt

SEQ ID NO: 143805 - DNA, 22 bp, Artificial Sequence
  Synthetic oligonucleotide; TTT chr11 5228463 5228484 5228468 5228463 -
tattttattttattttatttta

SEQ ID NO: 143806 - DNA, 22 bp, Artificial Sequence
  Synthetic oligonucleotide; TTT chr11 5228462 5228483 5228467 5228462 -
attttattttattttattttat

SEQ ID NO: 143807 - DNA, 22 bp, Artificial Sequence
  Synthetic oligonucleotide; TTA chr11 5228461 5228482 5228466 5228461 -
ttttattttattttattttatt

SEQ ID NO: 143808 - DNA, 22 bp, Artificial Sequence
  Synthetic oligonucleotide; TTT chr11 5228458 5228479 5228463 5228458 -
tattttattttattttattttg

SEQ ID NO: 143809 - DNA, 22 bp, Artificial Sequence
  Synthetic oligonucleotide; TTT chr11 5228457 5228478 5228462 5228457 -
attttattttattttattttgt

SEQ ID NO: 143810 - DNA, 22 bp, Artificial Sequence
  Synthetic oligonucleotide; TTA chr11 5228456 5228477 5228461 5228456 -
ttttattttattttattttgtg

SEQ ID NO: 143811 - DNA, 22 bp, Artificial Sequence
  Synthetic oligonucleotide; TTT chr11 5228453 5228474 5228458 5228453 -
tattttattttattttgtgtaa

SEQ ID NO: 143812 - DNA, 22 bp, Artificial Sequence
  Synthetic oligonucleotide; TTT chr11 5228452 5228473 5228457 5228452 -
attttattttattttgtgtaat

SEQ ID NO: 143813 - DNA, 22 bp, Artificial Sequence
  Synthetic oligonucleotide; TTA chr11 5228451 5228472 5228456 5228451 -
ttttattttattttgtgtaatc

SEQ ID NO: 143814 - DNA, 22 bp, Artificial Sequence
  Synthetic oligonucleotide; TTT chr11 5228448 5228469 5228453 5228448 -
tattttattttgtgtaatcgta

SEQ ID NO: 143815 - DNA, 22 bp, Artificial Sequence
  Synthetic oligonucleotide; TTT chr11 5228447 5228468 5228452 5228447 -
attttattttgtgtaatcgtag

SEQ ID NO: 143816 - DNA, 22 bp, Artificial Sequence
  Synthetic oligonucleotide; TTA chr11 5228446 5228467 5228451 5228446 -
ttttattttgtgtaatcgtagt

SEQ ID NO: 143817 - DNA, 22 bp, Artificial Sequence
  Synthetic oligonucleotide; TTT chr11 5228443 5228464 5228448 5228443 -
tattttgtgtaatcgtagtttc

SEQ ID NO: 143818 - DNA, 22 bp, Artificial Sequence
  Synthetic oligonucleotide; TTT chr11 5228442 5228463 5228447 5228442 -
attttgtgtaatcgtagtttca

SEQ ID NO: 143819 - DNA, 22 bp, Artificial Sequence
  Synthetic oligonucleotide; TTA chr11 5228441 5228462 5228446 5228441 -
ttttgtgtaatcgtagtttcag

SEQ ID NO: 143820 - DNA, 22 bp, Artificial Sequence
  Synthetic oligonucleotide; TTT chr11 5228438 5228459 5228443 5228438 -
tgtgtaatcgtagtttcagagt

SEQ ID NO: 143821 - DNA, 22 bp, Artificial Sequence
  Synthetic oligonucleotide; TTT chr11 5228437 5228458 5228442 5228437 -
gtgtaatcgtagtttcagagtg

SEQ ID NO: 143822 - DNA, 22 bp, Artificial Sequence
  Synthetic oligonucleotide; TTG chr11 5228436 5228457 5228441 5228436 -
tgtaatcgtagtttcagagtgt

SEQ ID NO: 143823 - DNA, 22 bp, Artificial Sequence
  Synthetic oligonucleotide; TTT chr11 5228422 5228443 5228427 5228422 -
cagagtgttagagctgaaagga

SEQ ID NO: 143824 - DNA, 22 bp, Artificial Sequence
  Synthetic oligonucleotide; TTC chr11 5228421 5228442 5228426 5228421 -
agagtgttagagctgaaaggaa

SEQ ID NO: 143825 - DNA, 22 bp, Artificial Sequence
  Synthetic oligonucleotide; TTA chr11 5228412 5228433 5228417 5228412 -
gagctgaaaggaagaagtagga

SEQ ID NO: 143826 - DNA, 22 bp, Artificial Sequence
  Synthetic oligonucleotide; CTG chr11 5228406 5228427 5228411 5228406 -
aaaggaagaagtaggagaaaca

SEQ ID NO: 143827 - DNA, 22 bp, Artificial Sequence
  Synthetic oligonucleotide; CTT chr11 5228361 5228382 5228366 5228361 -
tccttactaaaccgacatgggt

SEQ ID NO: 143828 - DNA, 22 bp, Artificial Sequence
  Synthetic oligonucleotide; TTT chr11 5228360 5228381 5228365 5228360 -
ccttactaaaccgacatgggtt

SEQ ID NO: 143829 - DNA, 22 bp, Artificial Sequence
  Synthetic oligonucleotide; TTC chr11 5228359 5228380 5228364 5228359 -
cttactaaaccgacatgggttt

SEQ ID NO: 143830 - DNA, 22 bp, Artificial Sequence
  Synthetic oligonucleotide; CTT chr11 5228356 5228377 5228361 5228356 -
actaaaccgacatgggtttcca

SEQ ID NO: 143831 - DNA, 22 bp, Artificial Sequence
  Synthetic oligonucleotide; TTA chr11 5228355 5228376 5228360 5228355 -
ctaaaccgacatgggtttccag

SEQ ID NO: 143832 - DNA, 22 bp, Artificial Sequence
  Synthetic oligonucleotide; CTA chr11 5228352 5228373 5228357 5228352 -
aaccgacatgggtttccaggta

SEQ ID NO: 143833 - DNA, 22 bp, Artificial Sequence
  Synthetic oligonucleotide; TTT chr11 5228337 5228358 5228342 5228337 -
ccaggtaggggcaggattcagg

SEQ ID NO: 143834 - DNA, 22 bp, Artificial Sequence
  Synthetic oligonucleotide; TTC chr11 5228336 5228357 5228341 5228336 -
caggtaggggcaggattcagga

SEQ ID NO: 143835 - DNA, 22 bp, Artificial Sequence
  Synthetic oligonucleotide; TTC chr11 5228318 5228339 5228323 5228318 -
aggatgactgacagggccctta

SEQ ID NO: 143836 - DNA, 22 bp, Artificial Sequence
  Synthetic oligonucleotide; CTG chr11 5228308 5228329 5228313 5228308 -
acagggcccttagggaacactg

SEQ ID NO: 143837 - DNA, 22 bp, Artificial Sequence
  Synthetic oligonucleotide; CTT chr11 5228297 5228318 5228302 5228297 -
agggaacactgagaccctacgc

SEQ ID NO: 143838 - DNA, 22 bp, Artificial Sequence
  Synthetic oligonucleotide; TTA chr11 5228296 5228317 5228301 5228296 -
gggaacactgagaccctacgct

SEQ ID NO: 143839 - DNA, 22 bp, Artificial Sequence
  Synthetic oligonucleotide; CTG chr11 5228286 5228307 5228291 5228286 -
agaccctacgctgacctcataa

SEQ ID NO: 143840 - DNA, 22 bp, Artificial Sequence
  Synthetic oligonucleotide; CTA chr11 5228278 5228299 5228283 5228278 -
cgctgacctcataaatgcttgc

SEQ ID NO: 143841 - DNA, 22 bp, Artificial Sequence
  Synthetic oligonucleotide; CTG chr11 5228273 5228294 5228278 5228273 -
acctcataaatgcttgctacct

SEQ ID NO: 143842 - DNA, 22 bp, Artificial Sequence
  Synthetic oligonucleotide; CTC chr11 5228268 5228289 5228273 5228268 -
ataaatgcttgctacctttgct

SEQ ID NO: 143843 - DNA, 22 bp, Artificial Sequence
  Synthetic oligonucleotide; CTT chr11 5228258 5228279 5228263 5228258 -
gctacctttgctgttttaatta

SEQ ID NO: 143844 - DNA, 22 bp, Artificial Sequence
  Synthetic oligonucleotide; TTG chr11 5228257 5228278 5228262 5228257 -
ctacctttgctgttttaattac

SEQ ID NO: 143845 - DNA, 22 bp, Artificial Sequence
  Synthetic oligonucleotide; CTA chr11 5228254 5228275 5228259 5228254 -
cctttgctgttttaattacatc

SEQ ID NO: 143846 - DNA, 22 bp, Artificial Sequence
  Synthetic oligonucleotide; CTT chr11 5228250 5228271 5228255 5228250 -
tgctgttttaattacatctttt

SEQ ID NO: 143847 - DNA, 22 bp, Artificial Sequence
  Synthetic oligonucleotide; TTT chr11 5228249 5228270 5228254 5228249 -
gctgttttaattacatctttta

SEQ ID NO: 143848 - DNA, 22 bp, Artificial Sequence
  Synthetic oligonucleotide; TTG chr11 5228248 5228269 5228253 5228248 -
ctgttttaattacatcttttaa

SEQ ID NO: 143849 - DNA, 22 bp, Artificial Sequence
  Synthetic oligonucleotide; CTG chr11 5228245 5228266 5228250 5228245 -
ttttaattacatcttttaatag

SEQ ID NO: 143850 - DNA, 22 bp, Artificial Sequence
  Synthetic oligonucleotide; TTT chr11 5228242 5228263 5228247 5228242 -
taattacatcttttaatagcag

SEQ ID NO: 143851 - DNA, 22 bp, Artificial Sequence
  Synthetic oligonucleotide; TTT chr11 5228241 5228262 5228246 5228241 -
aattacatcttttaatagcagg

SEQ ID NO: 143852 - DNA, 22 bp, Artificial Sequence
  Synthetic oligonucleotide; TTA chr11 5228240 5228261 5228245 5228240 -
attacatcttttaatagcagga

SEQ ID NO: 143853 - DNA, 22 bp, Artificial Sequence
  Synthetic oligonucleotide; TTA chr11 5228236 5228257 5228241 5228236 -
catcttttaatagcaggaagca

SEQ ID NO: 143854 - DNA, 22 bp, Artificial Sequence
  Synthetic oligonucleotide; CTT chr11 5228230 5228251 5228235 5228230 -
ttaatagcaggaagcagaactc

SEQ ID NO: 143855 - DNA, 22 bp, Artificial Sequence
  Synthetic oligonucleotide; TTT chr11 5228229 5228250 5228234 5228229 -
taatagcaggaagcagaactct

SEQ ID NO: 143856 - DNA, 22 bp, Artificial Sequence
  Synthetic oligonucleotide; TTT chr11 5228228 5228249 5228233 5228228 -
aatagcaggaagcagaactctg

SEQ ID NO: 143857 - DNA, 22 bp, Artificial Sequence
  Synthetic oligonucleotide; TTA chr11 5228227 5228248 5228232 5228227 -
atagcaggaagcagaactctgc

SEQ ID NO: 143858 - DNA, 22 bp, Artificial Sequence
  Synthetic oligonucleotide; CTC chr11 5228208 5228229 5228213 5228208 -
tgcacttcaaaagtttttcctc

SEQ ID NO: 143859 - DNA, 22 bp, Artificial Sequence
  Synthetic oligonucleotide; CTG chr11 5228206 5228227 5228211 5228206 -
cacttcaaaagtttttcctcac

SEQ ID NO: 143860 - DNA, 22 bp, Artificial Sequence
  Synthetic oligonucleotide; CTT chr11 5228201 5228222 5228206 5228201 -
caaaagtttttcctcacctgag

SEQ ID NO: 143861 - DNA, 22 bp, Artificial Sequence
  Synthetic oligonucleotide; TTC chr11 5228200 5228221 5228205 5228200 -
aaaagtttttcctcacctgagg

SEQ ID NO: 143862 - DNA, 22 bp, Artificial Sequence
  Synthetic oligonucleotide; TTT chr11 5228192 5228213 5228197 5228192 -
ttcctcacctgaggagttaatt

SEQ ID NO: 143863 - DNA, 22 bp, Artificial Sequence
  Synthetic oligonucleotide; TTT chr11 5228191 5228212 5228196 5228191 -
tcctcacctgaggagttaattt

SEQ ID NO: 143864 - DNA, 22 bp, Artificial Sequence
  Synthetic oligonucleotide; TTT chr11 5228190 5228211 5228195 5228190 -
cctcacctgaggagttaattta

SEQ ID NO: 143865 - DNA, 22 bp, Artificial Sequence
  Synthetic oligonucleotide; TTC chr11 5228189 5228210 5228194 5228189 -
ctcacctgaggagttaatttag

SEQ ID NO: 143866 - DNA, 22 bp, Artificial Sequence
  Synthetic oligonucleotide; CTC chr11 5228186 5228207 5228191 5228186 -
acctgaggagttaatttagtac

SEQ ID NO: 143867 - DNA, 22 bp, Artificial Sequence
  Synthetic oligonucleotide; CTG chr11 5228181 5228202 5228186 5228181 -
aggagttaatttagtacaaggg

SEQ ID NO: 143868 - DNA, 22 bp, Artificial Sequence
  Synthetic oligonucleotide; TTA chr11 5228173 5228194 5228178 5228173 -
atttagtacaaggggaaaaagt

SEQ ID NO: 143869 - DNA, 22 bp, Artificial Sequence
  Synthetic oligonucleotide; TTT chr11 5228169 5228190 5228174 5228169 -
agtacaaggggaaaaagtacag

SEQ ID NO: 143870 - DNA, 22 bp, Artificial Sequence
  Synthetic oligonucleotide; TTA chr11 5228168 5228189 5228173 5228168 -
gtacaaggggaaaaagtacagg

SEQ ID NO: 143871 - DNA, 22 bp, Artificial Sequence
  Synthetic oligonucleotide; TTG chr11 5228120 5228141 5228125 5228120 -
ggaagctatagagaaagaagag

SEQ ID NO: 143872 - DNA, 22 bp, Artificial Sequence
  Synthetic oligonucleotide; CTA chr11 5228112 5228133 5228117 5228112 -
tagagaaagaagagtaaatttt

SEQ ID NO: 143873 - DNA, 22 bp, Artificial Sequence
  Synthetic oligonucleotide; TTT chr11 5228091 5228112 5228096 5228091 -
tagtaaaggaggtttaaacaaa

SEQ ID NO: 143874 - DNA, 22 bp, Artificial Sequence
  Synthetic oligonucleotide; TTT chr11 5228090 5228111 5228095 5228090 -
agtaaaggaggtttaaacaaac

SEQ ID NO: 143875 - DNA, 22 bp, Artificial Sequence
  Synthetic oligonucleotide; TTA chr11 5228089 5228110 5228094 5228089 -
gtaaaggaggtttaaacaaaca

SEQ ID NO: 143876 - DNA, 22 bp, Artificial Sequence
  Synthetic oligonucleotide; TTT chr11 5228076 5228097 5228081 5228076 -
aaacaaacaaaatataaagaga

SEQ ID NO: 143877 - DNA, 22 bp, Artificial Sequence
  Synthetic oligonucleotide; TTA chr11 5228075 5228096 5228080 5228075 -
aacaaacaaaatataaagagaa

SEQ ID NO: 143878 - DNA, 22 bp, Artificial Sequence
  Synthetic oligonucleotide; CTT chr11 5228043 5228064 5228048 5228043 -
gaatcaaggaaatgattttaaa

SEQ ID NO: 143879 - DNA, 22 bp, Artificial Sequence
  Synthetic oligonucleotide; TTG chr11 5228042 5228063 5228047 5228042 -
aatcaaggaaatgattttaaaa

SEQ ID NO: 143880 - DNA, 22 bp, Artificial Sequence
  Synthetic oligonucleotide; TTT chr11 5228025 5228046 5228030 5228025 -
taaaacgcagtattcttagtgg

SEQ ID NO: 143881 - DNA, 22 bp, Artificial Sequence
  Synthetic oligonucleotide; TTT chr11 5228024 5228045 5228029 5228024 -
aaaacgcagtattcttagtgga

SEQ ID NO: 143882 - DNA, 22 bp, Artificial Sequence
  Synthetic oligonucleotide; TTA chr11 5228023 5228044 5228028 5228023 -
aaacgcagtattcttagtggac

SEQ ID NO: 143883 - DNA, 22 bp, Artificial Sequence
  Synthetic oligonucleotide; TTC chr11 5228010 5228031 5228015 5228010 -
ttagtggactagaggaaaaaaa

SEQ ID NO: 143884 - DNA, 22 bp, Artificial Sequence
  Synthetic oligonucleotide; CTT chr11 5228008 5228029 5228013 5228008 -
agtggactagaggaaaaaaata

SEQ ID NO: 143885 - DNA, 22 bp, Artificial Sequence
  Synthetic oligonucleotide; TTA chr11 5228007 5228028 5228012 5228007 -
gtggactagaggaaaaaaataa

SEQ ID NO: 143886 - DNA, 22 bp, Artificial Sequence
  Synthetic oligonucleotide; CTA chr11 5227999 5228020 5228004 5227999 -
gaggaaaaaaataatctgagcc

SEQ ID NO: 143887 - DNA, 22 bp, Artificial Sequence
  Synthetic oligonucleotide; CTG chr11 5227981 5228002 5227986 5227981 -
agccaagtagaagaccttttcc

SEQ ID NO: 143888 - DNA, 22 bp, Artificial Sequence
  Synthetic oligonucleotide; CTT chr11 5227963 5227984 5227968 5227963 -
ttcccctcctacccctactttc

SEQ ID NO: 143889 - DNA, 22 bp, Artificial Sequence
  Synthetic oligonucleotide; TTT chr11 5227962 5227983 5227967 5227962 -
tcccctcctacccctactttct

SEQ ID NO: 143890 - DNA, 22 bp, Artificial Sequence
  Synthetic oligonucleotide; TTT chr11 5227961 5227982 5227966 5227961 -
cccctcctacccctactttcta

SEQ ID NO: 143891 - DNA, 22 bp, Artificial Sequence
  Synthetic oligonucleotide; TTC chr11 5227960 5227981 5227965 5227960 -
ccctcctacccctactttctaa

SEQ ID NO: 143892 - DNA, 22 bp, Artificial Sequence
  Synthetic oligonucleotide; CTC chr11 5227955 5227976 5227960 5227955 -
ctacccctactttctaagtcac

SEQ ID NO: 143893 - DNA, 22 bp, Artificial Sequence
  Synthetic oligonucleotide; CTA chr11 5227952 5227973 5227957 5227952 -
cccctactttctaagtcacaga

SEQ ID NO: 143894 - DNA, 22 bp, Artificial Sequence
  Synthetic oligonucleotide; CTA chr11 5227946 5227967 5227951 5227946 -
ctttctaagtcacagaggcttt

SEQ ID NO: 143895 - DNA, 22 bp, Artificial Sequence
  Synthetic oligonucleotide; CTT chr11 5227943 5227964 5227948 5227943 -
tctaagtcacagaggctttttg

SEQ ID NO: 143896 - DNA, 22 bp, Artificial Sequence
  Synthetic oligonucleotide; TTT chr11 5227942 5227963 5227947 5227942 -
ctaagtcacagaggctttttgt

SEQ ID NO: 143897 - DNA, 22 bp, Artificial Sequence
  Synthetic oligonucleotide; TTC chr11 5227941 5227962 5227946 5227941 -
taagtcacagaggctttttgtt

SEQ ID NO: 143898 - DNA, 22 bp, Artificial Sequence
  Synthetic oligonucleotide; CTA chr11 5227939 5227960 5227944 5227939 -
agtcacagaggctttttgttcc

SEQ ID NO: 143899 - DNA, 22 bp, Artificial Sequence
  Synthetic oligonucleotide; CTT chr11 5227925 5227946 5227930 5227925 -
tttgttcccccagacactcttg

SEQ ID NO: 143900 - DNA, 22 bp, Artificial Sequence
  Synthetic oligonucleotide; TTT chr11 5227924 5227945 5227929 5227924 -
ttgttcccccagacactcttgc

SEQ ID NO: 143901 - DNA, 22 bp, Artificial Sequence
  Synthetic oligonucleotide; TTT chr11 5227923 5227944 5227928 5227923 -
tgttcccccagacactcttgca

SEQ ID NO: 143902 - DNA, 22 bp, Artificial Sequence
  Synthetic oligonucleotide; TTT chr11 5227922 5227943 5227927 5227922 -
gttcccccagacactcttgcag

SEQ ID NO: 143903 - DNA, 22 bp, Artificial Sequence
  Synthetic oligonucleotide; TTG chr11 5227921 5227942 5227926 5227921 -
ttcccccagacactcttgcaga

SEQ ID NO: 143904 - DNA, 22 bp, Artificial Sequence
  Synthetic oligonucleotide; TTC chr11 5227918 5227939 5227923 5227918 -
ccccagacactcttgcagatta

SEQ ID NO: 143905 - DNA, 22 bp, Artificial Sequence
  Synthetic oligonucleotide; CTC chr11 5227906 5227927 5227911 5227906 -
ttgcagattagtccaggcagaa

SEQ ID NO: 143906 - DNA, 22 bp, Artificial Sequence
  Synthetic oligonucleotide; CTT chr11 5227904 5227925 5227909 5227904 -
gcagattagtccaggcagaaac

SEQ ID NO: 143907 - DNA, 22 bp, Artificial Sequence
  Synthetic oligonucleotide; TTG chr11 5227903 5227924 5227908 5227903 -
cagattagtccaggcagaaaca

SEQ ID NO: 143908 - DNA, 22 bp, Artificial Sequence
  Synthetic oligonucleotide; TTA chr11 5227896 5227917 5227901 5227896 -
gtccaggcagaaacagttagat

SEQ ID NO: 143909 - DNA, 22 bp, Artificial Sequence
  Synthetic oligonucleotide; TTA chr11 5227877 5227898 5227882 5227877 -
gatgtccccagttaacctccta

SEQ ID NO: 143910 - DNA, 22 bp, Artificial Sequence
  Synthetic oligonucleotide; TTA chr11 5227863 5227884 5227868 5227863 -
acctcctatttgacaccactga

SEQ ID NO: 143911 - DNA, 22 bp, Artificial Sequence
  Synthetic oligonucleotide; CTC chr11 5227858 5227879 5227863 5227858 -
ctatttgacaccactgattacc

SEQ ID NO: 143912 - DNA, 22 bp, Artificial Sequence
  Synthetic oligonucleotide; CTA chr11 5227855 5227876 5227860 5227855 -
tttgacaccactgattacccca

SEQ ID NO: 143913 - DNA, 22 bp, Artificial Sequence
  Synthetic oligonucleotide; TTT chr11 5227852 5227873 5227857 5227852 -
gacaccactgattaccccattg

SEQ ID NO: 143914 - DNA, 22 bp, Artificial Sequence
  Synthetic oligonucleotide; TTG chr11 5227851 5227872 5227856 5227851 -
acaccactgattaccccattga

SEQ ID NO: 143915 - DNA, 22 bp, Artificial Sequence
  Synthetic oligonucleotide; CTG chr11 5227842 5227863 5227847 5227842 -
attaccccattgatagtcacac

SEQ ID NO: 143916 - DNA, 22 bp, Artificial Sequence
  Synthetic oligonucleotide; TTA chr11 5227838 5227859 5227843 5227838 -
ccccattgatagtcacactttg

SEQ ID NO: 143917 - DNA, 22 bp, Artificial Sequence
  Synthetic oligonucleotide; TTG chr11 5227830 5227851 5227835 5227830 -
atagtcacactttgggttgtaa

SEQ ID NO: 143918 - DNA, 22 bp, Artificial Sequence
  Synthetic oligonucleotide; CTT chr11 5227818 5227839 5227823 5227818 -
tgggttgtaagtgactttttat

SEQ ID NO: 143919 - DNA, 22 bp, Artificial Sequence
  Synthetic oligonucleotide; TTT chr11 5227817 5227838 5227822 5227817 -
gggttgtaagtgactttttatt

SEQ ID NO: 143920 - DNA, 22 bp, Artificial Sequence
  Synthetic oligonucleotide; TTG chr11 5227816 5227837 5227821 5227816 -
ggttgtaagtgactttttattt

SEQ ID NO: 143921 - DNA, 22 bp, Artificial Sequence
  Synthetic oligonucleotide; TTG chr11 5227811 5227832 5227816 5227811 -
taagtgactttttatttatttg

SEQ ID NO: 143922 - DNA, 22 bp, Artificial Sequence
  Synthetic oligonucleotide; CTT chr11 5227801 5227822 5227806 5227801 -
tttatttatttgtatttttgac

SEQ ID NO: 143923 - DNA, 22 bp, Artificial Sequence
  Synthetic oligonucleotide; TTT chr11 5227800 5227821 5227805 5227800 -
ttatttatttgtatttttgact

SEQ ID NO: 143924 - DNA, 22 bp, Artificial Sequence
  Synthetic oligonucleotide; TTT chr11 5227799 5227820 5227804 5227799 -
tatttatttgtatttttgactg

SEQ ID NO: 143925 - DNA, 22 bp, Artificial Sequence
  Synthetic oligonucleotide; TTT chr11 5227798 5227819 5227803 5227798 -
atttatttgtatttttgactgc

SEQ ID NO: 143926 - DNA, 22 bp, Artificial Sequence
  Synthetic oligonucleotide; TTA chr11 5227797 5227818 5227802 5227797 -
tttatttgtatttttgactgca

SEQ ID NO: 143927 - DNA, 22 bp, Artificial Sequence
  Synthetic oligonucleotide; TTT chr11 5227794 5227815 5227799 5227794 -
atttgtatttttgactgcatta

SEQ ID NO: 143928 - DNA, 22 bp, Artificial Sequence
  Synthetic oligonucleotide; TTA chr11 5227793 5227814 5227798 5227793 -
tttgtatttttgactgcattaa

SEQ ID NO: 143929 - DNA, 22 bp, Artificial Sequence
  Synthetic oligonucleotide; TTT chr11 5227790 5227811 5227795 5227790 -
gtatttttgactgcattaagag

SEQ ID NO: 143930 - DNA, 22 bp, Artificial Sequence
  Synthetic oligonucleotide; TTG chr11 5227789 5227810 5227794 5227789 -
tatttttgactgcattaagagg

SEQ ID NO: 143931 - DNA, 22 bp, Artificial Sequence
  Synthetic oligonucleotide; TTT chr11 5227784 5227805 5227789 5227784 -
ttgactgcattaagaggtctct

SEQ ID NO: 143932 - DNA, 22 bp, Artificial Sequence
  Synthetic oligonucleotide; TTT chr11 5227783 5227804 5227788 5227783 -
tgactgcattaagaggtctcta

SEQ ID NO: 143933 - DNA, 22 bp, Artificial Sequence
  Synthetic oligonucleotide; TTT chr11 5227782 5227803 5227787 5227782 -
gactgcattaagaggtctctag

SEQ ID NO: 143934 - DNA, 22 bp, Artificial Sequence
  Synthetic oligonucleotide; TTG chr11 5227781 5227802 5227786 5227781 -
actgcattaagaggtctctagt

SEQ ID NO: 143935 - DNA, 22 bp, Artificial Sequence
  Synthetic oligonucleotide; CTG chr11 5227777 5227798 5227782 5227777 -
cattaagaggtctctagttttt

SEQ ID NO: 143936 - DNA, 22 bp, Artificial Sequence
  Synthetic oligonucleotide; TTA chr11 5227772 5227793 5227777 5227772 -
agaggtctctagttttttatct

SEQ ID NO: 143937 - DNA, 22 bp, Artificial Sequence
  Synthetic oligonucleotide; CTC chr11 5227763 5227784 5227768 5227763 -
tagttttttatctcttgtttcc

SEQ ID NO: 143938 - DNA, 22 bp, Artificial Sequence
  Synthetic oligonucleotide; CTA chr11 5227761 5227782 5227766 5227761 -
gttttttatctcttgtttccca

SEQ ID NO: 143939 - DNA, 22 bp, Artificial Sequence
  Synthetic oligonucleotide; TTT chr11 5227757 5227778 5227762 5227757 -
tttatctcttgtttcccaaaac

SEQ ID NO: 143940 - DNA, 22 bp, Artificial Sequence
  Synthetic oligonucleotide; TTT chr11 5227756 5227777 5227761 5227756 -
ttatctcttgtttcccaaaacc

SEQ ID NO: 143941 - DNA, 22 bp, Artificial Sequence
  Synthetic oligonucleotide; TTT chr11 5227755 5227776 5227760 5227755 -
tatctcttgtttcccaaaacct

SEQ ID NO: 143942 - DNA, 22 bp, Artificial Sequence
  Synthetic oligonucleotide; TTT chr11 5227754 5227775 5227759 5227754 -
atctcttgtttcccaaaaccta

SEQ ID NO: 143943 - DNA, 22 bp, Artificial Sequence
  Synthetic oligonucleotide; TTA chr11 5227753 5227774 5227758 5227753 -
tctcttgtttcccaaaacctaa

SEQ ID NO: 143944 - DNA, 22 bp, Artificial Sequence
  Synthetic oligonucleotide; CTC chr11 5227749 5227770 5227754 5227749 -
ttgtttcccaaaacctaataag

SEQ ID NO: 143945 - DNA, 22 bp, Artificial Sequence
  Synthetic oligonucleotide; CTT chr11 5227747 5227768 5227752 5227747 -
gtttcccaaaacctaataagta

SEQ ID NO: 143946 - DNA, 22 bp, Artificial Sequence
  Synthetic oligonucleotide; TTG chr11 5227746 5227767 5227751 5227746 -
tttcccaaaacctaataagtaa

SEQ ID NO: 143947 - DNA, 22 bp, Artificial Sequence
  Synthetic oligonucleotide; TTT chr11 5227743 5227764 5227748 5227743 -
cccaaaacctaataagtaacta

SEQ ID NO: 143948 - DNA, 22 bp, Artificial Sequence
  Synthetic oligonucleotide; TTC chr11 5227742 5227763 5227747 5227742 -
ccaaaacctaataagtaactaa

SEQ ID NO: 143949 - DNA, 22 bp, Artificial Sequence
  Synthetic oligonucleotide; CTA chr11 5227732 5227753 5227737 5227732 -
ataagtaactaatgcacagagc

SEQ ID NO: 143950 - DNA, 22 bp, Artificial Sequence
  Synthetic oligonucleotide; CTA chr11 5227721 5227742 5227726 5227721 -
atgcacagagcacattgatttg

SEQ ID NO: 143951 - DNA, 22 bp, Artificial Sequence
  Synthetic oligonucleotide; TTG chr11 5227704 5227725 5227709 5227704 -
atttgtatttattctattttta

SEQ ID NO: 143952 - DNA, 22 bp, Artificial Sequence
  Synthetic oligonucleotide; TTT chr11 5227700 5227721 5227705 5227700 -
gtatttattctatttttagaca

SEQ ID NO: 143953 - DNA, 22 bp, Artificial Sequence
  Synthetic oligonucleotide; TTG chr11 5227699 5227720 5227704 5227699 -
tatttattctatttttagacat

SEQ ID NO: 143954 - DNA, 22 bp, Artificial Sequence
  Synthetic oligonucleotide; TTT chr11 5227694 5227715 5227699 5227694 -
attctatttttagacataattt

SEQ ID NO: 143955 - DNA, 22 bp, Artificial Sequence
  Synthetic oligonucleotide; TTA chr11 5227693 5227714 5227698 5227693 -
ttctatttttagacataattta

SEQ ID NO: 143956 - DNA, 22 bp, Artificial Sequence
  Synthetic oligonucleotide; TTC chr11 5227690 5227711 5227695 5227690 -
tatttttagacataatttatta

SEQ ID NO: 143957 - DNA, 22 bp, Artificial Sequence
  Synthetic oligonucleotide; CTA chr11 5227688 5227709 5227693 5227688 -
tttttagacataatttattagc

SEQ ID NO: 143958 - DNA, 22 bp, Artificial Sequence
  Synthetic oligonucleotide; TTT chr11 5227685 5227706 5227690 5227685 -
ttagacataatttattagcatg

SEQ ID NO: 143959 - DNA, 22 bp, Artificial Sequence
  Synthetic oligonucleotide; TTT chr11 5227684 5227705 5227689 5227684 -
tagacataatttattagcatgc

SEQ ID NO: 143960 - DNA, 22 bp, Artificial Sequence
  Synthetic oligonucleotide; TTT chr11 5227683 5227704 5227688 5227683 -
agacataatttattagcatgca

SEQ ID NO: 143961 - DNA, 22 bp, Artificial Sequence
  Synthetic oligonucleotide; TTA chr11 5227682 5227703 5227687 5227682 -
gacataatttattagcatgcat

SEQ ID NO: 143962 - DNA, 22 bp, Artificial Sequence
  Synthetic oligonucleotide; TTT chr11 5227672 5227693 5227677 5227672 -
attagcatgcatgagcaaatta

SEQ ID NO: 143963 - DNA, 22 bp, Artificial Sequence
  Synthetic oligonucleotide; TTA chr11 5227671 5227692 5227676 5227671 -
ttagcatgcatgagcaaattaa

SEQ ID NO: 143964 - DNA, 22 bp, Artificial Sequence
  Synthetic oligonucleotide; TTA chr11 5227668 5227689 5227673 5227668 -
gcatgcatgagcaaattaagaa

SEQ ID NO: 143965 - DNA, 22 bp, Artificial Sequence
  Synthetic oligonucleotide; TTA chr11 5227650 5227671 5227655 5227650 -
agaaaaacaacaacaaatgaat

SEQ ID NO: 143966 - DNA, 22 bp, Artificial Sequence
  Synthetic oligonucleotide; TTT chr11 5227574 5227595 5227579 5227574 -
tttcttttcttaccagaaggtt

SEQ ID NO: 143967 - DNA, 22 bp, Artificial Sequence
  Synthetic oligonucleotide; TTT chr11 5227573 5227594 5227578 5227573 -
ttcttttcttaccagaaggttt

SEQ ID NO: 143968 - DNA, 22 bp, Artificial Sequence
  Synthetic oligonucleotide; TTT chr11 5227572 5227593 5227577 5227572 -
tcttttcttaccagaaggtttt

SEQ ID NO: 143969 - DNA, 22 bp, Artificial Sequence
  Synthetic oligonucleotide; TTT chr11 5227571 5227592 5227576 5227571 -
cttttcttaccagaaggtttta

SEQ ID NO: 143970 - DNA, 22 bp, Artificial Sequence
  Synthetic oligonucleotide; TTC chr11 5227570 5227591 5227575 5227570 -
ttttcttaccagaaggttttaa

SEQ ID NO: 143971 - DNA, 22 bp, Artificial Sequence
  Synthetic oligonucleotide; CTT chr11 5227568 5227589 5227573 5227568 -
ttcttaccagaaggttttaatc

SEQ ID NO: 143972 - DNA, 22 bp, Artificial Sequence
  Synthetic oligonucleotide; TTT chr11 5227567 5227588 5227572 5227567 -
tcttaccagaaggttttaatcc

SEQ ID NO: 143973 - DNA, 22 bp, Artificial Sequence
  Synthetic oligonucleotide; TTT chr11 5227566 5227587 5227571 5227566 -
cttaccagaaggttttaatcca

SEQ ID NO: 143974 - DNA, 22 bp, Artificial Sequence
  Synthetic oligonucleotide; TTC chr11 5227565 5227586 5227570 5227565 -
ttaccagaaggttttaatccaa

SEQ ID NO: 143975 - DNA, 22 bp, Artificial Sequence
  Synthetic oligonucleotide; CTT chr11 5227563 5227584 5227568 5227563 -
accagaaggttttaatccaaat

SEQ ID NO: 143976 - DNA, 22 bp, Artificial Sequence
  Synthetic oligonucleotide; TTA chr11 5227562 5227583 5227567 5227562 -
ccagaaggttttaatccaaata

SEQ ID NO: 143977 - DNA, 22 bp, Artificial Sequence
  Synthetic oligonucleotide; TTT chr11 5227551 5227572 5227556 5227551 -
taatccaaataaggagaagata

SEQ ID NO: 143978 - DNA, 22 bp, Artificial Sequence
  Synthetic oligonucleotide; TTT chr11 5227550 5227571 5227555 5227550 -
aatccaaataaggagaagatat

SEQ ID NO: 143979 - DNA, 22 bp, Artificial Sequence
  Synthetic oligonucleotide; TTA chr11 5227549 5227570 5227554 5227549 -
atccaaataaggagaagatatg

SEQ ID NO: 143980 - DNA, 22 bp, Artificial Sequence
  Synthetic oligonucleotide; CTT chr11 5227524 5227545 5227529 5227524 -
agaaccgaggtagagttttcat

SEQ ID NO: 143981 - DNA, 22 bp, Artificial Sequence
  Synthetic oligonucleotide; TTA chr11 5227523 5227544 5227528 5227523 -
gaaccgaggtagagttttcatc

SEQ ID NO: 143982 - DNA, 22 bp, Artificial Sequence
  Synthetic oligonucleotide; TTT chr11 5227506 5227527 5227511 5227506 -
tcatccattctgtcctgtaagt

SEQ ID NO: 143983 - DNA, 22 bp, Artificial Sequence
  Synthetic oligonucleotide; TTT chr11 5227505 5227526 5227510 5227505 -
catccattctgtcctgtaagta

SEQ ID NO: 143984 - DNA, 22 bp, Artificial Sequence
  Synthetic oligonucleotide; TTC chr11 5227504 5227525 5227509 5227504 -
atccattctgtcctgtaagtat

SEQ ID NO: 143985 - DNA, 22 bp, Artificial Sequence
  Synthetic oligonucleotide; TTC chr11 5227496 5227517 5227501 5227496 -
tgtcctgtaagtattttgcata

SEQ ID NO: 143986 - DNA, 22 bp, Artificial Sequence
  Synthetic oligonucleotide; CTG chr11 5227494 5227515 5227499 5227494 -
tcctgtaagtattttgcatatt

SEQ ID NO: 143987 - DNA, 22 bp, Artificial Sequence
  Synthetic oligonucleotide; CTG chr11 5227489 5227510 5227494 5227489 -
taagtattttgcatattctgga

SEQ ID NO: 143988 - DNA, 22 bp, Artificial Sequence
  Synthetic oligonucleotide; TTT chr11 5227480 5227501 5227485 5227480 -
tgcatattctggagacgcagga

SEQ ID NO: 143989 - DNA, 22 bp, Artificial Sequence
  Synthetic oligonucleotide; TTT chr11 5227479 5227500 5227484 5227479 -
gcatattctggagacgcaggaa

SEQ ID NO: 143990 - DNA, 22 bp, Artificial Sequence
  Synthetic oligonucleotide; TTG chr11 5227478 5227499 5227483 5227478 -
catattctggagacgcaggaag

SEQ ID NO: 143991 - DNA, 22 bp, Artificial Sequence
  Synthetic oligonucleotide; TTC chr11 5227471 5227492 5227476 5227471 -
tggagacgcaggaagagatcca

SEQ ID NO: 143992 - DNA, 22 bp, Artificial Sequence
  Synthetic oligonucleotide; CTG chr11 5227469 5227490 5227474 5227469 -
gagacgcaggaagagatccatc

SEQ ID NO: 143993 - DNA, 22 bp, Artificial Sequence
  Synthetic oligonucleotide; CTA chr11 5227445 5227466 5227450 5227445 -
catatcccaaagctgaattatg

SEQ ID NO: 143994 - DNA, 22 bp, Artificial Sequence
  Synthetic oligonucleotide; CTG chr11 5227430 5227451 5227435 5227430 -
aattatggtagacaaaactctt

SEQ ID NO: 143995 - DNA, 22 bp, Artificial Sequence
  Synthetic oligonucleotide; TTA chr11 5227425 5227446 5227430 5227425 -
tggtagacaaaactcttccact

SEQ ID NO: 143996 - DNA, 22 bp, Artificial Sequence
  Synthetic oligonucleotide; CTC chr11 5227410 5227431 5227415 5227410 -
ttccacttttagtgcatcaact

SEQ ID NO: 143997 - DNA, 22 bp, Artificial Sequence
  Synthetic oligonucleotide; CTT chr11 5227408 5227429 5227413 5227408 -
ccacttttagtgcatcaacttc

SEQ ID NO: 143998 - DNA, 22 bp, Artificial Sequence
  Synthetic oligonucleotide; TTC chr11 5227407 5227428 5227412 5227407 -
cacttttagtgcatcaacttct

SEQ ID NO: 143999 - DNA, 22 bp, Artificial Sequence
  Synthetic oligonucleotide; CTT chr11 5227402 5227423 5227407 5227402 -
ttagtgcatcaacttcttattt

SEQ ID NO: 144000 - DNA, 22 bp, Artificial Sequence
  Synthetic oligonucleotide; TTT chr11 5227401 5227422 5227406 5227401 -
tagtgcatcaacttcttatttg

SEQ ID NO: 144001 - DNA, 22 bp, Artificial Sequence
  Synthetic oligonucleotide; TTT chr11 5227400 5227421 5227405 5227400 -
agtgcatcaacttcttatttgt

SEQ ID NO: 144002 - DNA, 22 bp, Artificial Sequence
  Synthetic oligonucleotide; TTA chr11 5227399 5227420 5227404 5227399 -
gtgcatcaacttcttatttgtg

SEQ ID NO: 144003 - DNA, 22 bp, Artificial Sequence
  Synthetic oligonucleotide; CTT chr11 5227387 5227408 5227392 5227387 -
cttatttgtgtaataagaaaat

SEQ ID NO: 144004 - DNA, 22 bp, Artificial Sequence
  Synthetic oligonucleotide; TTC chr11 5227386 5227407 5227391 5227386 -
ttatttgtgtaataagaaaatt

SEQ ID NO: 144005 - DNA, 22 bp, Artificial Sequence
  Synthetic oligonucleotide; CTT chr11 5227384 5227405 5227389 5227384 -
atttgtgtaataagaaaattgg

SEQ ID NO: 144006 - DNA, 22 bp, Artificial Sequence
  Synthetic oligonucleotide; TTA chr11 5227383 5227404 5227388 5227383 -
tttgtgtaataagaaaattggg

SEQ ID NO: 144007 - DNA, 22 bp, Artificial Sequence
  Synthetic oligonucleotide; TTT chr11 5227380 5227401 5227385 5227380 -
gtgtaataagaaaattgggaaa

SEQ ID NO: 144008 - DNA, 22 bp, Artificial Sequence
  Synthetic oligonucleotide; TTG chr11 5227379 5227400 5227384 5227379 -
tgtaataagaaaattgggaaaa

SEQ ID NO: 144009 - DNA, 22 bp, Artificial Sequence
  Synthetic oligonucleotide; TTG chr11 5227363 5227384 5227368 5227363 -
ggaaaacgatcttcaatatgct

SEQ ID NO: 144010 - DNA, 22 bp, Artificial Sequence
  Synthetic oligonucleotide; CTT chr11 5227350 5227371 5227355 5227350 -
caatatgcttaccaagctgtga

SEQ ID NO: 144011 - DNA, 22 bp, Artificial Sequence
  Synthetic oligonucleotide; TTC chr11 5227349 5227370 5227354 5227349 -
aatatgcttaccaagctgtgat

SEQ ID NO: 144012 - DNA, 22 bp, Artificial Sequence
  Synthetic oligonucleotide; CTT chr11 5227340 5227361 5227345 5227340 -
accaagctgtgattccaaatat

SEQ ID NO: 144013 - DNA, 22 bp, Artificial Sequence
  Synthetic oligonucleotide; TTA chr11 5227339 5227360 5227344 5227339 -
ccaagctgtgattccaaatatt

SEQ ID NO: 144014 - DNA, 22 bp, Artificial Sequence
  Synthetic oligonucleotide; CTG chr11 5227331 5227352 5227336 5227331 -
tgattccaaatattacgtaaat

SEQ ID NO: 144015 - DNA, 22 bp, Artificial Sequence
  Synthetic oligonucleotide; TTC chr11 5227325 5227346 5227330 5227325 -
caaatattacgtaaatacactt

SEQ ID NO: 144016 - DNA, 22 bp, Artificial Sequence
  Synthetic oligonucleotide; TTA chr11 5227316 5227337 5227321 5227316 -
cgtaaatacacttgcaaaggag

SEQ ID NO: 144017 - DNA, 22 bp, Artificial Sequence
  Synthetic oligonucleotide; CTT chr11 5227303 5227324 5227308 5227303 -
gcaaaggaggatgtttttagta

SEQ ID NO: 144018 - DNA, 22 bp, Artificial Sequence
  Synthetic oligonucleotide; TTG chr11 5227302 5227323 5227307 5227302 -
caaaggaggatgtttttagtag

SEQ ID NO: 144019 - DNA, 22 bp, Artificial Sequence
  Synthetic oligonucleotide; TTT chr11 5227287 5227308 5227292 5227287 -
ttagtagcaatttgtactgatg

SEQ ID NO: 144020 - DNA, 22 bp, Artificial Sequence
  Synthetic oligonucleotide; TTT chr11 5227286 5227307 5227291 5227286 -
tagtagcaatttgtactgatgg

SEQ ID NO: 144021 - DNA, 22 bp, Artificial Sequence
  Synthetic oligonucleotide; TTT chr11 5227285 5227306 5227290 5227285 -
agtagcaatttgtactgatggt

SEQ ID NO: 144022 - DNA, 22 bp, Artificial Sequence
  Synthetic oligonucleotide; TTA chr11 5227284 5227305 5227289 5227284 -
gtagcaatttgtactgatggta

SEQ ID NO: 144023 - DNA, 22 bp, Artificial Sequence
  Synthetic oligonucleotide; TTT chr11 5227274 5227295 5227279 5227274 -
gtactgatggtatggggccaag

SEQ ID NO: 144024 - DNA, 22 bp, Artificial Sequence
  Synthetic oligonucleotide; TTG chr11 5227273 5227294 5227278 5227273 -
tactgatggtatggggccaaga

SEQ ID NO: 144025 - DNA, 22 bp, Artificial Sequence
  Synthetic oligonucleotide; CTG chr11 5227268 5227289 5227273 5227268 -
atggtatggggccaagagatat

SEQ ID NO: 144026 - DNA, 22 bp, Artificial Sequence
  Synthetic oligonucleotide; CTT chr11 5227241 5227262 5227246 5227241 -
agagggagggctgagggtttga

SEQ ID NO: 144027 - DNA, 22 bp, Artificial Sequence
  Synthetic oligonucleotide; TTA chr11 5227240 5227261 5227245 5227240 -
gagggagggctgagggtttgaa

SEQ ID NO: 144028 - DNA, 22 bp, Artificial Sequence
  Synthetic oligonucleotide; CTG chr11 5227228 5227249 5227233 5227228 -
agggtttgaagtccaactccta

SEQ ID NO: 144029 - DNA, 22 bp, Artificial Sequence
  Synthetic oligonucleotide; TTT chr11 5227221 5227242 5227226 5227221 -
gaagtccaactcctaagccagt

SEQ ID NO: 144030 - DNA, 22 bp, Artificial Sequence
  Synthetic oligonucleotide; TTG chr11 5227220 5227241 5227225 5227220 -
aagtccaactcctaagccagtg

SEQ ID NO: 144031 - DNA, 22 bp, Artificial Sequence
  Synthetic oligonucleotide; CTC chr11 5227209 5227230 5227214 5227209 -
ctaagccagtgccagaagagcc

SEQ ID NO: 144032 - DNA, 22 bp, Artificial Sequence
  Synthetic oligonucleotide; CTA chr11 5227206 5227227 5227211 5227206 -
agccagtgccagaagagccaag

SEQ ID NO: 144033 - DNA, 22 bp, Artificial Sequence
  Synthetic oligonucleotide; CTG chr11 5227170 5227191 5227175 5227170 -
tcatcacttagacctcaccctg

SEQ ID NO: 144034 - DNA, 22 bp, Artificial Sequence
  Synthetic oligonucleotide; CTT chr11 5227161 5227182 5227166 5227161 -
agacctcaccctgtggagccac

SEQ ID NO: 144035 - DNA, 22 bp, Artificial Sequence
  Synthetic oligonucleotide; TTA chr11 5227160 5227181 5227165 5227160 -
gacctcaccctgtggagccaca

SEQ ID NO: 144036 - DNA, 22 bp, Artificial Sequence
  Synthetic oligonucleotide; CTC chr11 5227154 5227175 5227159 5227154 -
accctgtggagccacaccctag

SEQ ID NO: 144037 - DNA, 22 bp, Artificial Sequence
  Synthetic oligonucleotide; CTG chr11 5227148 5227169 5227153 5227148 -
tggagccacaccctagggttgg

SEQ ID NO: 144038 - DNA, 22 bp, Artificial Sequence
  Synthetic oligonucleotide; CTA chr11 5227133 5227154 5227138 5227133 -
gggttggccaatctactcccag

SEQ ID NO: 144039 - DNA, 22 bp, Artificial Sequence
  Synthetic oligonucleotide; TTG chr11 5227127 5227148 5227132 5227127 -
gccaatctactcccaggagcag

SEQ ID NO: 144040 - DNA, 22 bp, Artificial Sequence
  Synthetic oligonucleotide; CTA chr11 5227118 5227139 5227123 5227118 -
ctcccaggagcagggagggcag

SEQ ID NO: 144041 - DNA, 22 bp, Artificial Sequence
  Synthetic oligonucleotide; CTC chr11 5227115 5227136 5227120 5227115 -
ccaggagcagggagggcaggag

SEQ ID NO: 144042 - DNA, 22 bp, Artificial Sequence
  Synthetic oligonucleotide; CTG chr11 5227084 5227105 5227089 5227084 -
ggcataaaagtcagggcagagc

SEQ ID NO: 144043 - DNA, 22 bp, Artificial Sequence
  Synthetic oligonucleotide; CTA chr11 5227056 5227077 5227061 5227056 -
ttgcttacatttgcttctgaca

SEQ ID NO: 144044 - DNA, 22 bp, Artificial Sequence
  Synthetic oligonucleotide; TTG chr11 5227053 5227074 5227058 5227053 -
cttacatttgcttctgacacaa

SEQ ID NO: 144045 - DNA, 22 bp, Artificial Sequence
  Synthetic oligonucleotide; CTT chr11 5227050 5227071 5227055 5227050 -
acatttgcttctgacacaactg

SEQ ID NO: 144046 - DNA, 22 bp, Artificial Sequence
  Synthetic oligonucleotide; TTA chr11 5227049 5227070 5227054 5227049 -
catttgcttctgacacaactgt

SEQ ID NO: 144047 - DNA, 22 bp, Artificial Sequence
  Synthetic oligonucleotide; TTT chr11 5227044 5227065 5227049 5227044 -
gcttctgacacaactgtgttca

SEQ ID NO: 144048 - DNA, 22 bp, Artificial Sequence
  Synthetic oligonucleotide; TTG chr11 5227043 5227064 5227048 5227043 -
cttctgacacaactgtgttcac

SEQ ID NO: 144049 - DNA, 22 bp, Artificial Sequence
  Synthetic oligonucleotide; CTT chr11 5227040 5227061 5227045 5227040 -
ctgacacaactgtgttcactag

SEQ ID NO: 144050 - DNA, 22 bp, Artificial Sequence
  Synthetic oligonucleotide; TTC chr11 5227039 5227060 5227044 5227039 -
tgacacaactgtgttcactagc

SEQ ID NO: 144051 - DNA, 22 bp, Artificial Sequence
  Synthetic oligonucleotide; CTG chr11 5227037 5227058 5227042 5227037 -
acacaactgtgttcactagcaa

SEQ ID NO: 144052 - DNA, 22 bp, Artificial Sequence
  Synthetic oligonucleotide; CTG chr11 5227028 5227049 5227033 5227028 -
tgttcactagcaacctcaaaca

SEQ ID NO: 144053 - DNA, 22 bp, Artificial Sequence
  Synthetic oligonucleotide; TTC chr11 5227023 5227044 5227028 5227023 -
actagcaacctcaaacagacac

SEQ ID NO: 144054 - DNA, 22 bp, Artificial Sequence
  Synthetic oligonucleotide; CTA chr11 5227019 5227040 5227024 5227019 -
gcaacctcaaacagacaccatg

SEQ ID NO: 144055 - DNA, 22 bp, Artificial Sequence
  Synthetic oligonucleotide; CTC chr11 5227011 5227032 5227016 5227011 -
aaacagacaccatggtgcatct

SEQ ID NO: 144056 - DNA, 22 bp, Artificial Sequence
  Synthetic oligonucleotide; CTG chr11 5226988 5227009 5226993 5226988 -
actcctgaggagaagtctgccg

SEQ ID NO: 144057 - DNA, 22 bp, Artificial Sequence
  Synthetic oligonucleotide; CTC chr11 5226984 5227005 5226989 5226984 -
ctgaggagaagtctgccgttac

SEQ ID NO: 144058 - DNA, 22 bp, Artificial Sequence
  Synthetic oligonucleotide; CTG chr11 5226981 5227002 5226986 5226981 -
aggagaagtctgccgttactgc

SEQ ID NO: 144059 - DNA, 22 bp, Artificial Sequence
  Synthetic oligonucleotide; CTG chr11 5226969 5226990 5226974 5226969 -
ccgttactgccctgtggggcaa

SEQ ID NO: 144060 - DNA, 22 bp, Artificial Sequence
  Synthetic oligonucleotide; TTA chr11 5226963 5226984 5226968 5226963 -
ctgccctgtggggcaaggtgaa

SEQ ID NO: 144061 - DNA, 22 bp, Artificial Sequence
  Synthetic oligonucleotide; CTG chr11 5226960 5226981 5226965 5226960 -
ccctgtggggcaaggtgaacgt

SEQ ID NO: 144062 - DNA, 22 bp, Artificial Sequence
  Synthetic oligonucleotide; CTG chr11 5226955 5226976 5226960 5226955 -
tggggcaaggtgaacgtggatg

SEQ ID NO: 144063 - DNA, 22 bp, Artificial Sequence
  Synthetic oligonucleotide; TTG chr11 5226927 5226948 5226932 5226927 -
gtggtgaggccctgggcaggtt

SEQ ID NO: 144064 - DNA, 22 bp, Artificial Sequence
  Synthetic oligonucleotide; CTG chr11 5226913 5226934 5226918 5226913 -
ggcaggttggtatcaaggttac

SEQ ID NO: 144065 - DNA, 22 bp, Artificial Sequence
  Synthetic oligonucleotide; TTG chr11 5226904 5226925 5226909 5226904 -
gtatcaaggttacaagacaggt

SEQ ID NO: 144066 - DNA, 22 bp, Artificial Sequence
  Synthetic oligonucleotide; TTA chr11 5226892 5226913 5226897 5226892 -
caagacaggtttaaggagacca

SEQ ID NO: 144067 - DNA, 22 bp, Artificial Sequence
  Synthetic oligonucleotide; TTT chr11 5226880 5226901 5226885 5226880 -
aaggagaccaatagaaactggg

SEQ ID NO: 144068 - DNA, 22 bp, Artificial Sequence
  Synthetic oligonucleotide; TTA chr11 5226879 5226900 5226884 5226879 -
aggagaccaatagaaactgggc

SEQ ID NO: 144069 - DNA, 22 bp, Artificial Sequence
  Synthetic oligonucleotide; CTG chr11 5226860 5226881 5226865 5226860 -
ggcatgtggagacagagaagac

SEQ ID NO: 144070 - DNA, 22 bp, Artificial Sequence
  Synthetic oligonucleotide; CTC chr11 5226836 5226857 5226841 5226836 -
ttgggtttctgataggcactga

SEQ ID NO: 144071 - DNA, 22 bp, Artificial Sequence
  Synthetic oligonucleotide; CTT chr11 5226834 5226855 5226839 5226834 -
gggtttctgataggcactgact

SEQ ID NO: 144072 - DNA, 22 bp, Artificial Sequence
  Synthetic oligonucleotide; TTG chr11 5226833 5226854 5226838 5226833 -
ggtttctgataggcactgactc

SEQ ID NO: 144073 - DNA, 22 bp, Artificial Sequence
  Synthetic oligonucleotide; TTT chr11 5226828 5226849 5226833 5226828 -
ctgataggcactgactctctct

SEQ ID NO: 144074 - DNA, 22 bp, Artificial Sequence
  Synthetic oligonucleotide; TTC chr11 5226827 5226848 5226832 5226827 -
tgataggcactgactctctctg

SEQ ID NO: 144075 - DNA, 22 bp, Artificial Sequence
  Synthetic oligonucleotide; CTG chr11 5226825 5226846 5226830 5226825 -
ataggcactgactctctctgcc

SEQ ID NO: 144076 - DNA, 22 bp, Artificial Sequence
  Synthetic oligonucleotide; CTG chr11 5226815 5226836 5226820 5226815 -
actctctctgcctattggtcta

SEQ ID NO: 144077 - DNA, 22 bp, Artificial Sequence
  Synthetic oligonucleotide; CTC chr11 5226811 5226832 5226816 5226811 -
tctctgcctattggtctatttt

SEQ ID NO: 144078 - DNA, 22 bp, Artificial Sequence
  Synthetic oligonucleotide; CTC chr11 5226809 5226830 5226814 5226809 -
tctgcctattggtctattttcc

SEQ ID NO: 144079 - DNA, 22 bp, Artificial Sequence
  Synthetic oligonucleotide; CTC chr11 5226807 5226828 5226812 5226807 -
tgcctattggtctattttccca

SEQ ID NO: 144080 - DNA, 22 bp, Artificial Sequence
  Synthetic oligonucleotide; CTG chr11 5226805 5226826 5226810 5226805 -
cctattggtctattttcccacc

SEQ ID NO: 144081 - DNA, 22 bp, Artificial Sequence
  Synthetic oligonucleotide; CTA chr11 5226801 5226822 5226806 5226801 -
ttggtctattttcccaccctta

SEQ ID NO: 144082 - DNA, 22 bp, Artificial Sequence
  Synthetic oligonucleotide; TTG chr11 5226798 5226819 5226803 5226798 -
gtctattttcccacccttaggc

SEQ ID NO: 144083 - DNA, 22 bp, Artificial Sequence
  Synthetic oligonucleotide; CTA chr11 5226793 5226814 5226798 5226793 -
ttttcccacccttaggctgctg

SEQ ID NO: 144084 - DNA, 22 bp, Artificial Sequence
  Synthetic oligonucleotide; TTT chr11 5226790 5226811 5226795 5226790 -
tcccacccttaggctgctggtg

SEQ ID NO: 144085 - DNA, 22 bp, Artificial Sequence
  Synthetic oligonucleotide; TTT chr11 5226789 5226810 5226794 5226789 -
cccacccttaggctgctggtgg

SEQ ID NO: 144086 - DNA, 22 bp, Artificial Sequence
  Synthetic oligonucleotide; TTC chr11 5226788 5226809 5226793 5226788 -
ccacccttaggctgctggtggt

SEQ ID NO: 144087 - DNA, 22 bp, Artificial Sequence
  Synthetic oligonucleotide; CTT chr11 5226780 5226801 5226785 5226780 -
aggctgctggtggtctaccctt

SEQ ID NO: 144088 - DNA, 22 bp, Artificial Sequence
  Synthetic oligonucleotide; TTA chr11 5226779 5226800 5226784 5226779 -
ggctgctggtggtctacccttg

SEQ ID NO: 144089 - DNA, 22 bp, Artificial Sequence
  Synthetic oligonucleotide; CTG chr11 5226774 5226795 5226779 5226774 -
ctggtggtctacccttggaccc

SEQ ID NO: 144090 - DNA, 22 bp, Artificial Sequence
  Synthetic oligonucleotide; CTG chr11 5226771 5226792 5226776 5226771 -
gtggtctacccttggacccaga

SEQ ID NO: 144091 - DNA, 22 bp, Artificial Sequence
  Synthetic oligonucleotide; CTA chr11 5226763 5226784 5226768 5226763 -
cccttggacccagaggttcttt

SEQ ID NO: 144092 - DNA, 22 bp, Artificial Sequence
  Synthetic oligonucleotide; CTT chr11 5226758 5226779 5226763 5226758 -
ggacccagaggttctttgagtc

SEQ ID NO: 144093 - DNA, 22 bp, Artificial Sequence
  Synthetic oligonucleotide; TTG chr11 5226757 5226778 5226762 5226757 -
gacccagaggttctttgagtcc

SEQ ID NO: 144094 - DNA, 22 bp, Artificial Sequence
  Synthetic oligonucleotide; TTC chr11 5226744 5226765 5226749 5226744 -
tttgagtcctttggggatctgt

SEQ ID NO: 144095 - DNA, 22 bp, Artificial Sequence
  Synthetic oligonucleotide; CTT chr11 5226742 5226763 5226747 5226742 -
tgagtcctttggggatctgtcc

SEQ ID NO: 144096 - DNA, 22 bp, Artificial Sequence
  Synthetic oligonucleotide; TTT chr11 5226741 5226762 5226746 5226741 -
gagtcctttggggatctgtcca

SEQ ID NO: 144097 - DNA, 22 bp, Artificial Sequence
  Synthetic oligonucleotide; TTG chr11 5226740 5226761 5226745 5226740 -
agtcctttggggatctgtccac

SEQ ID NO: 144098 - DNA, 22 bp, Artificial Sequence
  Synthetic oligonucleotide; CTT chr11 5226733 5226754 5226738 5226733 -
tggggatctgtccactcctgat

SEQ ID NO: 144099 - DNA, 22 bp, Artificial Sequence
  Synthetic oligonucleotide; TTT chr11 5226732 5226753 5226737 5226732 -
ggggatctgtccactcctgatg

SEQ ID NO: 144100 - DNA, 22 bp, Artificial Sequence
  Synthetic oligonucleotide; TTG chr11 5226731 5226752 5226736 5226731 -
gggatctgtccactcctgatgc

SEQ ID NO: 144101 - DNA, 22 bp, Artificial Sequence
  Synthetic oligonucleotide; CTG chr11 5226723 5226744 5226728 5226723 -
tccactcctgatgctgttatgg

SEQ ID NO: 144102 - DNA, 22 bp, Artificial Sequence
  Synthetic oligonucleotide; CTC chr11 5226716 5226737 5226721 5226716 -
ctgatgctgttatgggcaaccc

SEQ ID NO: 144103 - DNA, 22 bp, Artificial Sequence
  Synthetic oligonucleotide; CTG chr11 5226713 5226734 5226718 5226713 -
atgctgttatgggcaaccctaa

SEQ ID NO: 144104 - DNA, 22 bp, Artificial Sequence
  Synthetic oligonucleotide; CTG chr11 5226707 5226728 5226712 5226707 -
ttatgggcaaccctaaggtgaa

SEQ ID NO: 144105 - DNA, 22 bp, Artificial Sequence
  Synthetic oligonucleotide; TTA chr11 5226704 5226725 5226709 5226704 -
tgggcaaccctaaggtgaaggc

SEQ ID NO: 144106 - DNA, 22 bp, Artificial Sequence
  Synthetic oligonucleotide; CTA chr11 5226692 5226713 5226697 5226692 -
aggtgaaggctcatggcaagaa

SEQ ID NO: 144107 - DNA, 22 bp, Artificial Sequence
  Synthetic oligonucleotide; CTC chr11 5226680 5226701 5226685 5226680 -
atggcaagaaagtgctcggtgc

SEQ ID NO: 144108 - DNA, 22 bp, Artificial Sequence
  Synthetic oligonucleotide; CTC chr11 5226663 5226684 5226668 5226663 -
ggtgcctttagtgatggcctgg

SEQ ID NO: 144109 - DNA, 22 bp, Artificial Sequence
  Synthetic oligonucleotide; CTT chr11 5226655 5226676 5226660 5226655 -
tagtgatggcctggctcacctg

SEQ ID NO: 144110 - DNA, 22 bp, Artificial Sequence
  Synthetic oligonucleotide; TTT chr11 5226654 5226675 5226659 5226654 -
agtgatggcctggctcacctgg

SEQ ID NO: 144111 - DNA, 22 bp, Artificial Sequence
  Synthetic oligonucleotide; TTA chr11 5226653 5226674 5226658 5226653 -
gtgatggcctggctcacctgga

SEQ ID NO: 144112 - DNA, 22 bp, Artificial Sequence
  Synthetic oligonucleotide; CTG chr11 5226642 5226663 5226647 5226642 -
gctcacctggacaacctcaagg

SEQ ID NO: 144113 - DNA, 22 bp, Artificial Sequence
  Synthetic oligonucleotide; CTC chr11 5226638 5226659 5226643 5226638 -
acctggacaacctcaagggcac

SEQ ID NO: 144114 - DNA, 22 bp, Artificial Sequence
  Synthetic oligonucleotide; CTG chr11 5226633 5226654 5226638 5226633 -
gacaacctcaagggcacctttg

SEQ ID NO: 144115 - DNA, 22 bp, Artificial Sequence
  Synthetic oligonucleotide; CTC chr11 5226624 5226645 5226629 5226624 -
aagggcacctttgccacactga

SEQ ID NO: 144116 - DNA, 22 bp, Artificial Sequence
  Synthetic oligonucleotide; CTT chr11 5226613 5226634 5226618 5226613 -
tgccacactgagtgagctgcac

SEQ ID NO: 144117 - DNA, 22 bp, Artificial Sequence
  Synthetic oligonucleotide; TTT chr11 5226612 5226633 5226617 5226612 -
gccacactgagtgagctgcact

SEQ ID NO: 144118 - DNA, 22 bp, Artificial Sequence
  Synthetic oligonucleotide; TTG chr11 5226611 5226632 5226616 5226611 -
ccacactgagtgagctgcactg

SEQ ID NO: 144119 - DNA, 22 bp, Artificial Sequence
  Synthetic oligonucleotide; CTG chr11 5226603 5226624 5226608 5226603 -
agtgagctgcactgtgacaagc

SEQ ID NO: 144120 - DNA, 22 bp, Artificial Sequence
  Synthetic oligonucleotide; CTG chr11 5226594 5226615 5226599 5226594 -
cactgtgacaagctgcacgtgg

SEQ ID NO: 144121 - DNA, 22 bp, Artificial Sequence
  Synthetic oligonucleotide; CTG chr11 5226589 5226610 5226594 5226589 -
tgacaagctgcacgtggatcct

SEQ ID NO: 144122 - DNA, 22 bp, Artificial Sequence
  Synthetic oligonucleotide; CTG chr11 5226579 5226600 5226584 5226579 -
cacgtggatcctgagaacttca

SEQ ID NO: 144123 - DNA, 22 bp, Artificial Sequence
  Synthetic oligonucleotide; CTG chr11 5226566 5226587 5226571 5226566 -
agaacttcagggtgagtctatg

SEQ ID NO: 144124 - DNA, 22 bp, Artificial Sequence
  Synthetic oligonucleotide; CTT chr11 5226559 5226580 5226564 5226559 -
cagggtgagtctatgggacgct

SEQ ID NO: 144125 - DNA, 22 bp, Artificial Sequence
  Synthetic oligonucleotide; TTC chr11 5226558 5226579 5226563 5226558 -
agggtgagtctatgggacgctt

SEQ ID NO: 144126 - DNA, 22 bp, Artificial Sequence
  Synthetic oligonucleotide; CTA chr11 5226546 5226567 5226551 5226546 -
tgggacgcttgatgttttcttt

SEQ ID NO: 144127 - DNA, 22 bp, Artificial Sequence
  Synthetic oligonucleotide; CTT chr11 5226536 5226557 5226541 5226536 -
gatgttttctttccccttcttt

SEQ ID NO: 144128 - DNA, 22 bp, Artificial Sequence
  Synthetic oligonucleotide; TTG chr11 5226535 5226556 5226540 5226535 -
atgttttctttccccttctttt

SEQ ID NO: 144129 - DNA, 22 bp, Artificial Sequence
  Synthetic oligonucleotide; TTT chr11 5226529 5226550 5226534 5226529 -
tctttccccttcttttctatgg

SEQ ID NO: 144130 - DNA, 22 bp, Artificial Sequence
  Synthetic oligonucleotide; TTT chr11 5226528 5226549 5226533 5226528 -
ctttccccttcttttctatggt

SEQ ID NO: 144131 - DNA, 22 bp, Artificial Sequence
  Synthetic oligonucleotide; TTC chr11 5226527 5226548 5226532 5226527 -
tttccccttcttttctatggtt

SEQ ID NO: 144132 - DNA, 22 bp, Artificial Sequence
  Synthetic oligonucleotide; CTT chr11 5226525 5226546 5226530 5226525 -
tccccttcttttctatggttaa

SEQ ID NO: 144133 - DNA, 22 bp, Artificial Sequence
  Synthetic oligonucleotide; TTT chr11 5226524 5226545 5226529 5226524 -
ccccttcttttctatggttaag

SEQ ID NO: 144134 - DNA, 22 bp, Artificial Sequence
  Synthetic oligonucleotide; TTC chr11 5226523 5226544 5226528 5226523 -
cccttcttttctatggttaagt

SEQ ID NO: 144135 - DNA, 22 bp, Artificial Sequence
  Synthetic oligonucleotide; CTT chr11 5226518 5226539 5226523 5226518 -
cttttctatggttaagttcatg

SEQ ID NO: 144136 - DNA, 22 bp, Artificial Sequence
  Synthetic oligonucleotide; TTC chr11 5226517 5226538 5226522 5226517 -
ttttctatggttaagttcatgt

SEQ ID NO: 144137 - DNA, 22 bp, Artificial Sequence
  Synthetic oligonucleotide; CTT chr11 5226515 5226536 5226520 5226515 -
ttctatggttaagttcatgtca

SEQ ID NO: 144138 - DNA, 22 bp, Artificial Sequence
  Synthetic oligonucleotide; TTT chr11 5226514 5226535 5226519 5226514 -
tctatggttaagttcatgtcat

SEQ ID NO: 144139 - DNA, 22 bp, Artificial Sequence
  Synthetic oligonucleotide; TTT chr11 5226513 5226534 5226518 5226513 -
ctatggttaagttcatgtcata

SEQ ID NO: 144140 - DNA, 22 bp, Artificial Sequence
  Synthetic oligonucleotide; TTC chr11 5226512 5226533 5226517 5226512 -
tatggttaagttcatgtcatag

SEQ ID NO: 144141 - DNA, 22 bp, Artificial Sequence
  Synthetic oligonucleotide; CTA chr11 5226510 5226531 5226515 5226510 -
tggttaagttcatgtcatagga

SEQ ID NO: 144142 - DNA, 22 bp, Artificial Sequence
  Synthetic oligonucleotide; TTA chr11 5226504 5226525 5226509 5226504 -
agttcatgtcataggaagggga

SEQ ID NO: 144143 - DNA, 22 bp, Artificial Sequence
  Synthetic oligonucleotide; TTC chr11 5226499 5226520 5226504 5226499 -
atgtcataggaaggggataagt

SEQ ID NO: 144144 - DNA, 22 bp, Artificial Sequence
  Synthetic oligonucleotide; TTT chr11 5226462 5226483 5226467 5226462 -
agaatgggaaacagacgaatga

SEQ ID NO: 144145 - DNA, 22 bp, Artificial Sequence
  Synthetic oligonucleotide; TTA chr11 5226461 5226482 5226466 5226461 -
gaatgggaaacagacgaatgat

SEQ ID NO: 144146 - DNA, 22 bp, Artificial Sequence
  Synthetic oligonucleotide; TTG chr11 5226437 5226458 5226442 5226437 -
catcagtgtggaagtctcagga

SEQ ID NO: 144147 - DNA, 22 bp, Artificial Sequence
  Synthetic oligonucleotide; CTC chr11 5226419 5226440 5226424 5226419 -
aggatcgttttagtttctttta

SEQ ID NO: 144148 - DNA, 22 bp, Artificial Sequence
  Synthetic oligonucleotide; TTT chr11 5226409 5226430 5226414 5226409 -
tagtttcttttatttgctgttc

SEQ ID NO: 144149 - DNA, 22 bp, Artificial Sequence
  Synthetic oligonucleotide; TTT chr11 5226408 5226429 5226413 5226408 -
agtttcttttatttgctgttca

SEQ ID NO: 144150 - DNA, 22 bp, Artificial Sequence
  Synthetic oligonucleotide; TTA chr11 5226407 5226428 5226412 5226407 -
gtttcttttatttgctgttcat

SEQ ID NO: 144151 - DNA, 22 bp, Artificial Sequence
  Synthetic oligonucleotide; TTT chr11 5226403 5226424 5226408 5226403 -
cttttatttgctgttcataaca

SEQ ID NO: 144152 - DNA, 22 bp, Artificial Sequence
  Synthetic oligonucleotide; TTC chr11 5226402 5226423 5226407 5226402 -
ttttatttgctgttcataacaa

SEQ ID NO: 144153 - DNA, 22 bp, Artificial Sequence
  Synthetic oligonucleotide; CTT chr11 5226400 5226421 5226405 5226400 -
ttatttgctgttcataacaatt

SEQ ID NO: 144154 - DNA, 22 bp, Artificial Sequence
  Synthetic oligonucleotide; TTT chr11 5226399 5226420 5226404 5226399 -
tatttgctgttcataacaattg

SEQ ID NO: 144155 - DNA, 22 bp, Artificial Sequence
  Synthetic oligonucleotide; TTT chr11 5226398 5226419 5226403 5226398 -
atttgctgttcataacaattgt

SEQ ID NO: 144156 - DNA, 22 bp, Artificial Sequence
  Synthetic oligonucleotide; TTA chr11 5226397 5226418 5226402 5226397 -
tttgctgttcataacaattgtt

SEQ ID NO: 144157 - DNA, 22 bp, Artificial Sequence
  Synthetic oligonucleotide; TTT chr11 5226394 5226415 5226399 5226394 -
gctgttcataacaattgttttc

SEQ ID NO: 144158 - DNA, 22 bp, Artificial Sequence
  Synthetic oligonucleotide; TTG chr11 5226393 5226414 5226398 5226393 -
ctgttcataacaattgttttct

SEQ ID NO: 144159 - DNA, 22 bp, Artificial Sequence
  Synthetic oligonucleotide; CTG chr11 5226390 5226411 5226395 5226390 -
ttcataacaattgttttctttt

SEQ ID NO: 144160 - DNA, 22 bp, Artificial Sequence
  Synthetic oligonucleotide; TTC chr11 5226387 5226408 5226392 5226387 -
ataacaattgttttcttttgtt

SEQ ID NO: 144161 - DNA, 22 bp, Artificial Sequence
  Synthetic oligonucleotide; TTG chr11 5226377 5226398 5226382 5226377 -
ttttcttttgtttaattcttgc

SEQ ID NO: 144162 - DNA, 22 bp, Artificial Sequence
  Synthetic oligonucleotide; TTT chr11 5226374 5226395 5226379 5226374 -
tcttttgtttaattcttgcttt

SEQ ID NO: 144163 - DNA, 22 bp, Artificial Sequence
  Synthetic oligonucleotide; TTT chr11 5226373 5226394 5226378 5226373 -
cttttgtttaattcttgctttc

SEQ ID NO: 144164 - DNA, 22 bp, Artificial Sequence
  Synthetic oligonucleotide; TTC chr11 5226372 5226393 5226377 5226372 -
ttttgtttaattcttgctttct

SEQ ID NO: 144165 - DNA, 22 bp, Artificial Sequence
  Synthetic oligonucleotide; CTT chr11 5226370 5226391 5226375 5226370 -
ttgtttaattcttgctttcttt

SEQ ID NO: 144166 - DNA, 22 bp, Artificial Sequence
  Synthetic oligonucleotide; TTT chr11 5226369 5226390 5226374 5226369 -
tgtttaattcttgctttctttt

SEQ ID NO: 144167 - DNA, 22 bp, Artificial Sequence
  Synthetic oligonucleotide; TTT chr11 5226368 5226389 5226373 5226368 -
gtttaattcttgctttcttttt

SEQ ID NO: 144168 - DNA, 22 bp, Artificial Sequence
  Synthetic oligonucleotide; TTG chr11 5226367 5226388 5226372 5226367 -
tttaattcttgctttctttttt

SEQ ID NO: 144169 - DNA, 22 bp, Artificial Sequence
  Synthetic oligonucleotide; TTT chr11 5226364 5226385 5226369 5226364 -
aattcttgctttcttttttttt

SEQ ID NO: 144170 - DNA, 22 bp, Artificial Sequence
  Synthetic oligonucleotide; TTA chr11 5226363 5226384 5226368 5226363 -
attcttgctttctttttttttc

SEQ ID NO: 144171 - DNA, 22 bp, Artificial Sequence
  Synthetic oligonucleotide; TTC chr11 5226359 5226380 5226364 5226359 -
ttgctttctttttttttcttct

SEQ ID NO: 144172 - DNA, 22 bp, Artificial Sequence
  Synthetic oligonucleotide; CTT chr11 5226357 5226378 5226362 5226357 -
gctttctttttttttcttctcc

SEQ ID NO: 144173 - DNA, 22 bp, Artificial Sequence
  Synthetic oligonucleotide; TTG chr11 5226356 5226377 5226361 5226356 -
ctttctttttttttcttctccg

SEQ ID NO: 144174 - DNA, 22 bp, Artificial Sequence
  Synthetic oligonucleotide; CTT chr11 5226353 5226374 5226358 5226353 -
tctttttttttcttctccgcaa

SEQ ID NO: 144175 - DNA, 22 bp, Artificial Sequence
  Synthetic oligonucleotide; TTT chr11 5226352 5226373 5226357 5226352 -
ctttttttttcttctccgcaat

SEQ ID NO: 144176 - DNA, 22 bp, Artificial Sequence
  Synthetic oligonucleotide; TTC chr11 5226351 5226372 5226356 5226351 -
tttttttttcttctccgcaatt

SEQ ID NO: 144177 - DNA, 22 bp, Artificial Sequence
  Synthetic oligonucleotide; CTT chr11 5226349 5226370 5226354 5226349 -
tttttttcttctccgcaatttt

SEQ ID NO: 144178 - DNA, 22 bp, Artificial Sequence
  Synthetic oligonucleotide; TTT chr11 5226348 5226369 5226353 5226348 -
ttttttcttctccgcaattttt

SEQ ID NO: 144179 - DNA, 22 bp, Artificial Sequence
  Synthetic oligonucleotide; TTT chr11 5226347 5226368 5226352 5226347 -
tttttcttctccgcaattttta

SEQ ID NO: 144180 - DNA, 22 bp, Artificial Sequence
  Synthetic oligonucleotide; TTT chr11 5226346 5226367 5226351 5226346 -
ttttcttctccgcaatttttac

SEQ ID NO: 144181 - DNA, 22 bp, Artificial Sequence
  Synthetic oligonucleotide; TTT chr11 5226345 5226366 5226350 5226345 -
tttcttctccgcaatttttact

SEQ ID NO: 144182 - DNA, 22 bp, Artificial Sequence
  Synthetic oligonucleotide; TTT chr11 5226344 5226365 5226349 5226344 -
ttcttctccgcaatttttacta

SEQ ID NO: 144183 - DNA, 22 bp, Artificial Sequence
  Synthetic oligonucleotide; TTT chr11 5226343 5226364 5226348 5226343 -
tcttctccgcaatttttactat

SEQ ID NO: 144184 - DNA, 22 bp, Artificial Sequence
  Synthetic oligonucleotide; TTT chr11 5226342 5226363 5226347 5226342 -
cttctccgcaatttttactatt

SEQ ID NO: 144185 - DNA, 22 bp, Artificial Sequence
  Synthetic oligonucleotide; TTC chr11 5226341 5226362 5226346 5226341 -
ttctccgcaatttttactatta

SEQ ID NO: 144186 - DNA, 22 bp, Artificial Sequence
  Synthetic oligonucleotide; CTT chr11 5226339 5226360 5226344 5226339 -
ctccgcaatttttactattata

SEQ ID NO: 144187 - DNA, 22 bp, Artificial Sequence
  Synthetic oligonucleotide; TTC chr11 5226338 5226359 5226343 5226338 -
tccgcaatttttactattatac

SEQ ID NO: 144188 - DNA, 22 bp, Artificial Sequence
  Synthetic oligonucleotide; CTC chr11 5226336 5226357 5226341 5226336 -
cgcaatttttactattatactt

SEQ ID NO: 144189 - DNA, 22 bp, Artificial Sequence
  Synthetic oligonucleotide; TTT chr11 5226328 5226349 5226333 5226328 -
ttactattatacttaatgcctt

SEQ ID NO: 144190 - DNA, 22 bp, Artificial Sequence
  Synthetic oligonucleotide; TTT chr11 5226327 5226348 5226332 5226327 -
tactattatacttaatgcctta

SEQ ID NO: 144191 - DNA, 22 bp, Artificial Sequence
  Synthetic oligonucleotide; TTT chr11 5226326 5226347 5226331 5226326 -
actattatacttaatgccttaa

SEQ ID NO: 144192 - DNA, 22 bp, Artificial Sequence
  Synthetic oligonucleotide; TTA chr11 5226325 5226346 5226330 5226325 -
ctattatacttaatgccttaac

SEQ ID NO: 144193 - DNA, 22 bp, Artificial Sequence
  Synthetic oligonucleotide; CTA chr11 5226322 5226343 5226327 5226322 -
ttatacttaatgccttaacatt

SEQ ID NO: 144194 - DNA, 22 bp, Artificial Sequence
  Synthetic oligonucleotide; TTA chr11 5226319 5226340 5226324 5226319 -
tacttaatgccttaacattgtg

SEQ ID NO: 144195 - DNA, 22 bp, Artificial Sequence
  Synthetic oligonucleotide; CTT chr11 5226314 5226335 5226319 5226314 -
aatgccttaacattgtgtataa

SEQ ID NO: 144196 - DNA, 22 bp, Artificial Sequence
  Synthetic oligonucleotide; TTA chr11 5226313 5226334 5226318 5226313 -
atgccttaacattgtgtataac

SEQ ID NO: 144197 - DNA, 22 bp, Artificial Sequence
  Synthetic oligonucleotide; CTT chr11 5226306 5226327 5226311 5226306 -
aacattgtgtataacaaaagga

SEQ ID NO: 144198 - DNA, 22 bp, Artificial Sequence
  Synthetic oligonucleotide; TTA chr11 5226305 5226326 5226310 5226305 -
acattgtgtataacaaaaggaa

SEQ ID NO: 144199 - DNA, 22 bp, Artificial Sequence
  Synthetic oligonucleotide; TTG chr11 5226299 5226320 5226304 5226299 -
tgtataacaaaaggaaatatct

SEQ ID NO: 144200 - DNA, 22 bp, Artificial Sequence
  Synthetic oligonucleotide; CTC chr11 5226276 5226297 5226281 5226276 -
tgagatacattaagtaacttaa

SEQ ID NO: 144201 - DNA, 22 bp, Artificial Sequence
  Synthetic oligonucleotide; CTG chr11 5226274 5226295 5226279 5226274 -
agatacattaagtaacttaaaa

SEQ ID NO: 144202 - DNA, 22 bp, Artificial Sequence
  Synthetic oligonucleotide; TTA chr11 5226264 5226285 5226269 5226264 -
agtaacttaaaaaaaaacttta

SEQ ID NO: 144203 - DNA, 22 bp, Artificial Sequence
  Synthetic oligonucleotide; CTT chr11 5226256 5226277 5226261 5226256 -
aaaaaaaaactttacacagtct

SEQ ID NO: 144204 - DNA, 22 bp, Artificial Sequence
  Synthetic oligonucleotide; TTA chr11 5226255 5226276 5226260 5226255 -
aaaaaaaactttacacagtctg

SEQ ID NO: 144205 - DNA, 22 bp, Artificial Sequence
  Synthetic oligonucleotide; CTT chr11 5226244 5226265 5226249 5226244 -
tacacagtctgcctagtacatt

SEQ ID NO: 144206 - DNA, 22 bp, Artificial Sequence
  Synthetic oligonucleotide; TTT chr11 5226243 5226264 5226248 5226243 -
acacagtctgcctagtacatta

SEQ ID NO: 144207 - DNA, 22 bp, Artificial Sequence
  Synthetic oligonucleotide; TTA chr11 5226242 5226263 5226247 5226242 -
cacagtctgcctagtacattac

SEQ ID NO: 144208 - DNA, 22 bp, Artificial Sequence
  Synthetic oligonucleotide; CTG chr11 5226233 5226254 5226238 5226233 -
cctagtacattactatttggaa

SEQ ID NO: 144209 - DNA, 22 bp, Artificial Sequence
  Synthetic oligonucleotide; CTA chr11 5226229 5226250 5226234 5226229 -
gtacattactatttggaatata

SEQ ID NO: 144210 - DNA, 22 bp, Artificial Sequence
  Synthetic oligonucleotide; TTA chr11 5226221 5226242 5226226 5226221 -
ctatttggaatatatgtgtgct

SEQ ID NO: 144211 - DNA, 22 bp, Artificial Sequence
  Synthetic oligonucleotide; CTA chr11 5226218 5226239 5226223 5226218 -
tttggaatatatgtgtgcttat

SEQ ID NO: 144212 - DNA, 22 bp, Artificial Sequence
  Synthetic oligonucleotide; TTT chr11 5226215 5226236 5226220 5226215 -
ggaatatatgtgtgcttatttg

SEQ ID NO: 144213 - DNA, 22 bp, Artificial Sequence
  Synthetic oligonucleotide; TTG chr11 5226214 5226235 5226219 5226214 -
gaatatatgtgtgcttatttgc

SEQ ID NO: 144214 - DNA, 22 bp, Artificial Sequence
  Synthetic oligonucleotide; CTT chr11 5226198 5226219 5226203 5226198 -
atttgcatattcataatctccc

SEQ ID NO: 144215 - DNA, 22 bp, Artificial Sequence
  Synthetic oligonucleotide; TTA chr11 5226197 5226218 5226202 5226197 -
tttgcatattcataatctccct

SEQ ID NO: 144216 - DNA, 22 bp, Artificial Sequence
  Synthetic oligonucleotide; TTT chr11 5226194 5226215 5226199 5226194 -
gcatattcataatctccctact

SEQ ID NO: 144217 - DNA, 22 bp, Artificial Sequence
  Synthetic oligonucleotide; TTG chr11 5226193 5226214 5226198 5226193 -
catattcataatctccctactt

SEQ ID NO: 144218 - DNA, 22 bp, Artificial Sequence
  Synthetic oligonucleotide; TTC chr11 5226186 5226207 5226191 5226186 -
ataatctccctactttattttc

SEQ ID NO: 144219 - DNA, 22 bp, Artificial Sequence
  Synthetic oligonucleotide; CTC chr11 5226178 5226199 5226183 5226178 -
cctactttattttcttttattt

SEQ ID NO: 144220 - DNA, 22 bp, Artificial Sequence
  Synthetic oligonucleotide; CTA chr11 5226174 5226195 5226179 5226174 -
ctttattttcttttatttttaa

SEQ ID NO: 144221 - DNA, 22 bp, Artificial Sequence
  Synthetic oligonucleotide; CTT chr11 5226171 5226192 5226176 5226171 -
tattttcttttatttttaattg

SEQ ID NO: 144222 - DNA, 22 bp, Artificial Sequence
  Synthetic oligonucleotide; TTT chr11 5226170 5226191 5226175 5226170 -
attttcttttatttttaattga

SEQ ID NO: 144223 - DNA, 22 bp, Artificial Sequence
  Synthetic oligonucleotide; TTA chr11 5226169 5226190 5226174 5226169 -
ttttcttttatttttaattgat

SEQ ID NO: 144224 - DNA, 22 bp, Artificial Sequence
  Synthetic oligonucleotide; TTT chr11 5226166 5226187 5226171 5226166 -
tcttttatttttaattgataca

SEQ ID NO: 144225 - DNA, 22 bp, Artificial Sequence
  Synthetic oligonucleotide; TTT chr11 5226165 5226186 5226170 5226165 -
cttttatttttaattgatacat

SEQ ID NO: 144226 - DNA, 22 bp, Artificial Sequence
  Synthetic oligonucleotide; TTC chr11 5226164 5226185 5226169 5226164 -
ttttatttttaattgatacata

SEQ ID NO: 144227 - DNA, 22 bp, Artificial Sequence
  Synthetic oligonucleotide; CTT chr11 5226162 5226183 5226167 5226162 -
ttatttttaattgatacataat

SEQ ID NO: 144228 - DNA, 22 bp, Artificial Sequence
  Synthetic oligonucleotide; TTT chr11 5226161 5226182 5226166 5226161 -
tatttttaattgatacataatc

SEQ ID NO: 144229 - DNA, 22 bp, Artificial Sequence
  Synthetic oligonucleotide; TTT chr11 5226160 5226181 5226165 5226160 -
atttttaattgatacataatca

SEQ ID NO: 144230 - DNA, 22 bp, Artificial Sequence
  Synthetic oligonucleotide; TTA chr11 5226159 5226180 5226164 5226159 -
tttttaattgatacataatcat

SEQ ID NO: 144231 - DNA, 22 bp, Artificial Sequence
  Synthetic oligonucleotide; TTT chr11 5226156 5226177 5226161 5226156 -
ttaattgatacataatcattat

SEQ ID NO: 144232 - DNA, 22 bp, Artificial Sequence
  Synthetic oligonucleotide; TTT chr11 5226155 5226176 5226160 5226155 -
taattgatacataatcattata

SEQ ID NO: 144233 - DNA, 22 bp, Artificial Sequence
  Synthetic oligonucleotide; TTT chr11 5226154 5226175 5226159 5226154 -
aattgatacataatcattatac

SEQ ID NO: 144234 - DNA, 22 bp, Artificial Sequence
  Synthetic oligonucleotide; TTA chr11 5226153 5226174 5226158 5226153 -
attgatacataatcattataca

SEQ ID NO: 144235 - DNA, 22 bp, Artificial Sequence
  Synthetic oligonucleotide; TTG chr11 5226149 5226170 5226154 5226149 -
atacataatcattatacatatt

SEQ ID NO: 144236 - DNA, 22 bp, Artificial Sequence
  Synthetic oligonucleotide; TTA chr11 5226135 5226156 5226140 5226135 -
tacatatttatgggttaaagtg

SEQ ID NO: 144237 - DNA, 22 bp, Artificial Sequence
  Synthetic oligonucleotide; TTT chr11 5226126 5226147 5226131 5226126 -
atgggttaaagtgtaatgtttt

SEQ ID NO: 144238 - DNA, 22 bp, Artificial Sequence
  Synthetic oligonucleotide; TTA chr11 5226125 5226146 5226130 5226125 -
tgggttaaagtgtaatgtttta

SEQ ID NO: 144239 - DNA, 22 bp, Artificial Sequence
  Synthetic oligonucleotide; TTA chr11 5226118 5226139 5226123 5226118 -
aagtgtaatgttttaatatgtg

SEQ ID NO: 144240 - DNA, 22 bp, Artificial Sequence
  Synthetic oligonucleotide; TTT chr11 5226105 5226126 5226110 5226105 -
taatatgtgtacacatattgac

SEQ ID NO: 144241 - DNA, 22 bp, Artificial Sequence
  Synthetic oligonucleotide; TTT chr11 5226104 5226125 5226109 5226104 -
aatatgtgtacacatattgacc

SEQ ID NO: 144242 - DNA, 22 bp, Artificial Sequence
  Synthetic oligonucleotide; TTA chr11 5226103 5226124 5226108 5226103 -
atatgtgtacacatattgacca

SEQ ID NO: 144243 - DNA, 22 bp, Artificial Sequence
  Synthetic oligonucleotide; TTG chr11 5226085 5226106 5226090 5226085 -
accaaatcagggtaattttgca

SEQ ID NO: 144244 - DNA, 22 bp, Artificial Sequence
  Synthetic oligonucleotide; TTT chr11 5226067 5226088 5226072 5226067 -
tgcatttgtaattttaaaaaat

SEQ ID NO: 144245 - DNA, 22 bp, Artificial Sequence
  Synthetic oligonucleotide; TTT chr11 5226066 5226087 5226071 5226066 -
gcatttgtaattttaaaaaatg

SEQ ID NO: 144246 - DNA, 22 bp, Artificial Sequence
  Synthetic oligonucleotide; TTG chr11 5226065 5226086 5226070 5226065 -
catttgtaattttaaaaaatgc

SEQ ID NO: 144247 - DNA, 22 bp, Artificial Sequence
  Synthetic oligonucleotide; TTT chr11 5226060 5226081 5226065 5226060 -
gtaattttaaaaaatgctttct

SEQ ID NO: 144248 - DNA, 22 bp, Artificial Sequence
  Synthetic oligonucleotide; TTG chr11 5226059 5226080 5226064 5226059 -
taattttaaaaaatgctttctt

SEQ ID NO: 144249 - DNA, 22 bp, Artificial Sequence
  Synthetic oligonucleotide; TTT chr11 5226053 5226074 5226058 5226053 -
taaaaaatgctttcttctttta

SEQ ID NO: 144250 - DNA, 22 bp, Artificial Sequence
  Synthetic oligonucleotide; TTT chr11 5226052 5226073 5226057 5226052 -
aaaaaatgctttcttcttttaa

SEQ ID NO: 144251 - DNA, 22 bp, Artificial Sequence
  Synthetic oligonucleotide; TTA chr11 5226051 5226072 5226056 5226051 -
aaaaatgctttcttcttttaat

SEQ ID NO: 144252 - DNA, 22 bp, Artificial Sequence
  Synthetic oligonucleotide; CTT chr11 5226041 5226062 5226046 5226041 -
tcttcttttaatatactttttt

SEQ ID NO: 144253 - DNA, 22 bp, Artificial Sequence
  Synthetic oligonucleotide; TTT chr11 5226040 5226061 5226045 5226040 -
cttcttttaatatacttttttg

SEQ ID NO: 144254 - DNA, 22 bp, Artificial Sequence
  Synthetic oligonucleotide; TTC chr11 5226039 5226060 5226044 5226039 -
ttcttttaatatacttttttgt

SEQ ID NO: 144255 - DNA, 22 bp, Artificial Sequence
  Synthetic oligonucleotide; CTT chr11 5226037 5226058 5226042 5226037 -
cttttaatatacttttttgttt

SEQ ID NO: 144256 - DNA, 22 bp, Artificial Sequence
  Synthetic oligonucleotide; TTC chr11 5226036 5226057 5226041 5226036 -
ttttaatatacttttttgttta

SEQ ID NO: 144257 - DNA, 22 bp, Artificial Sequence
  Synthetic oligonucleotide; CTT chr11 5226034 5226055 5226039 5226034 -
ttaatatacttttttgtttatc

SEQ ID NO: 144258 - DNA, 22 bp, Artificial Sequence
  Synthetic oligonucleotide; TTT chr11 5226033 5226054 5226038 5226033 -
taatatacttttttgtttatct

SEQ ID NO: 144259 - DNA, 22 bp, Artificial Sequence
  Synthetic oligonucleotide; TTT chr11 5226032 5226053 5226037 5226032 -
aatatacttttttgtttatctt

SEQ ID NO: 144260 - DNA, 22 bp, Artificial Sequence
  Synthetic oligonucleotide; TTA chr11 5226031 5226052 5226036 5226031 -
atatacttttttgtttatctta

SEQ ID NO: 144261 - DNA, 22 bp, Artificial Sequence
  Synthetic oligonucleotide; CTT chr11 5226023 5226044 5226028 5226023 -
ttttgtttatcttatttctaat

SEQ ID NO: 144262 - DNA, 22 bp, Artificial Sequence
  Synthetic oligonucleotide; TTT chr11 5226022 5226043 5226027 5226022 -
tttgtttatcttatttctaata

SEQ ID NO: 144263 - DNA, 22 bp, Artificial Sequence
  Synthetic oligonucleotide; TTT chr11 5226021 5226042 5226026 5226021 -
ttgtttatcttatttctaatac

SEQ ID NO: 144264 - DNA, 22 bp, Artificial Sequence
  Synthetic oligonucleotide; TTT chr11 5226020 5226041 5226025 5226020 -
tgtttatcttatttctaatact

SEQ ID NO: 144265 - DNA, 22 bp, Artificial Sequence
  Synthetic oligonucleotide; TTT chr11 5226019 5226040 5226024 5226019 -
gtttatcttatttctaatactt

SEQ ID NO: 144266 - DNA, 22 bp, Artificial Sequence
  Synthetic oligonucleotide; TTG chr11 5226018 5226039 5226023 5226018 -
tttatcttatttctaatacttt

SEQ ID NO: 144267 - DNA, 22 bp, Artificial Sequence
  Synthetic oligonucleotide; TTT chr11 5226015 5226036 5226020 5226015 -
atcttatttctaatactttccc

SEQ ID NO: 144268 - DNA, 22 bp, Artificial Sequence
  Synthetic oligonucleotide; TTA chr11 5226014 5226035 5226019 5226014 -
tcttatttctaatactttccct

SEQ ID NO: 144269 - DNA, 22 bp, Artificial Sequence
  Synthetic oligonucleotide; CTT chr11 5226010 5226031 5226015 5226010 -
atttctaatactttccctaatc

SEQ ID NO: 144270 - DNA, 22 bp, Artificial Sequence
  Synthetic oligonucleotide; TTA chr11 5226009 5226030 5226014 5226009 -
tttctaatactttccctaatct

SEQ ID NO: 144271 - DNA, 22 bp, Artificial Sequence
  Synthetic oligonucleotide; TTT chr11 5226006 5226027 5226011 5226006 -
ctaatactttccctaatctctt

SEQ ID NO: 144272 - DNA, 22 bp, Artificial Sequence
  Synthetic oligonucleotide; TTC chr11 5226005 5226026 5226010 5226005 -
taatactttccctaatctcttt

SEQ ID NO: 144273 - DNA, 22 bp, Artificial Sequence
  Synthetic oligonucleotide; CTA chr11 5226003 5226024 5226008 5226003 -
atactttccctaatctctttct

SEQ ID NO: 144274 - DNA, 22 bp, Artificial Sequence
  Synthetic oligonucleotide; CTT chr11 5225997 5226018 5226002 5225997 -
tccctaatctctttctttcagg

SEQ ID NO: 144275 - DNA, 22 bp, Artificial Sequence
  Synthetic oligonucleotide; TTT chr11 5225996 5226017 5226001 5225996 -
ccctaatctctttctttcaggg

SEQ ID NO: 144276 - DNA, 22 bp, Artificial Sequence
  Synthetic oligonucleotide; TTC chr11 5225995 5226016 5226000 5225995 -
cctaatctctttctttcagggc

SEQ ID NO: 144277 - DNA, 22 bp, Artificial Sequence
  Synthetic oligonucleotide; CTA chr11 5225991 5226012 5225996 5225991 -
atctctttctttcagggcaata

SEQ ID NO: 144278 - DNA, 22 bp, Artificial Sequence
  Synthetic oligonucleotide; CTC chr11 5225986 5226007 5225991 5225986 -
tttctttcagggcaataatgat

SEQ ID NO: 144279 - DNA, 22 bp, Artificial Sequence
  Synthetic oligonucleotide; CTT chr11 5225984 5226005 5225989 5225984 -
tctttcagggcaataatgatac

SEQ ID NO: 144280 - DNA, 22 bp, Artificial Sequence
  Synthetic oligonucleotide; TTT chr11 5225983 5226004 5225988 5225983 -
ctttcagggcaataatgataca

SEQ ID NO: 144281 - DNA, 22 bp, Artificial Sequence
  Synthetic oligonucleotide; TTC chr11 5225982 5226003 5225987 5225982 -
tttcagggcaataatgatacaa

SEQ ID NO: 144282 - DNA, 22 bp, Artificial Sequence
  Synthetic oligonucleotide; CTT chr11 5225980 5226001 5225985 5225980 -
tcagggcaataatgatacaatg

SEQ ID NO: 144283 - DNA, 22 bp, Artificial Sequence
  Synthetic oligonucleotide; TTT chr11 5225979 5226000 5225984 5225979 -
cagggcaataatgatacaatgt

SEQ ID NO: 144284 - DNA, 22 bp, Artificial Sequence
  Synthetic oligonucleotide; TTC chr11 5225978 5225999 5225983 5225978 -
agggcaataatgatacaatgta

SEQ ID NO: 144285 - DNA, 22 bp, Artificial Sequence
  Synthetic oligonucleotide; CTC chr11 5225947 5225968 5225952 5225947 -
tttgcaccattctaaagaataa

SEQ ID NO: 144286 - DNA, 22 bp, Artificial Sequence
  Synthetic oligonucleotide; CTT chr11 5225945 5225966 5225950 5225945 -
tgcaccattctaaagaataaca

SEQ ID NO: 144287 - DNA, 22 bp, Artificial Sequence
  Synthetic oligonucleotide; TTT chr11 5225944 5225965 5225949 5225944 -
gcaccattctaaagaataacag

SEQ ID NO: 144288 - DNA, 22 bp, Artificial Sequence
  Synthetic oligonucleotide; TTG chr11 5225943 5225964 5225948 5225943 -
caccattctaaagaataacagt

SEQ ID NO: 144289 - DNA, 22 bp, Artificial Sequence
  Synthetic oligonucleotide; TTC chr11 5225935 5225956 5225940 5225935 -
taaagaataacagtgataattt

SEQ ID NO: 144290 - DNA, 22 bp, Artificial Sequence
  Synthetic oligonucleotide; CTA chr11 5225933 5225954 5225938 5225933 -
aagaataacagtgataatttct

SEQ ID NO: 144291 - DNA, 22 bp, Artificial Sequence
  Synthetic oligonucleotide; TTT chr11 5225913 5225934 5225918 5225913 -
ctgggttaaggcaatagcaata

SEQ ID NO: 144292 - DNA, 22 bp, Artificial Sequence
  Synthetic oligonucleotide; TTC chr11 5225912 5225933 5225917 5225912 -
tgggttaaggcaatagcaatat

SEQ ID NO: 144293 - DNA, 22 bp, Artificial Sequence
  Synthetic oligonucleotide; CTG chr11 5225910 5225931 5225915 5225910 -
ggttaaggcaatagcaatatct

SEQ ID NO: 144294 - DNA, 22 bp, Artificial Sequence
  Synthetic oligonucleotide; TTA chr11 5225905 5225926 5225910 5225905 -
aggcaatagcaatatctctgca

SEQ ID NO: 144295 - DNA, 22 bp, Artificial Sequence
  Synthetic oligonucleotide; CTC chr11 5225887 5225908 5225892 5225887 -
tgcatataaatatttctgcata

SEQ ID NO: 144296 - DNA, 22 bp, Artificial Sequence
  Synthetic oligonucleotide; CTG chr11 5225885 5225906 5225890 5225885 -
catataaatatttctgcatata

SEQ ID NO: 144297 - DNA, 22 bp, Artificial Sequence
  Synthetic oligonucleotide; TTT chr11 5225872 5225893 5225877 5225872 -
ctgcatataaattgtaactgat

SEQ ID NO: 144298 - DNA, 22 bp, Artificial Sequence
  Synthetic oligonucleotide; TTC chr11 5225871 5225892 5225876 5225871 -
tgcatataaattgtaactgatg

SEQ ID NO: 144299 - DNA, 22 bp, Artificial Sequence
  Synthetic oligonucleotide; CTG chr11 5225869 5225890 5225874 5225869 -
catataaattgtaactgatgta

SEQ ID NO: 144300 - DNA, 22 bp, Artificial Sequence
  Synthetic oligonucleotide; TTG chr11 5225858 5225879 5225863 5225858 -
taactgatgtaagaggtttcat

SEQ ID NO: 144301 - DNA, 22 bp, Artificial Sequence
  Synthetic oligonucleotide; CTG chr11 5225852 5225873 5225857 5225852 -
atgtaagaggtttcatattgct

SEQ ID NO: 144302 - DNA, 22 bp, Artificial Sequence
  Synthetic oligonucleotide; TTT chr11 5225839 5225860 5225844 5225839 -
catattgctaatagcagctaca

SEQ ID NO: 144303 - DNA, 22 bp, Artificial Sequence
  Synthetic oligonucleotide; TTC chr11 5225838 5225859 5225843 5225838 -
atattgctaatagcagctacaa

SEQ ID NO: 144304 - DNA, 22 bp, Artificial Sequence
  Synthetic oligonucleotide; TTG chr11 5225832 5225853 5225837 5225832 -
ctaatagcagctacaatccagc

SEQ ID NO: 144305 - DNA, 22 bp, Artificial Sequence
  Synthetic oligonucleotide; CTA chr11 5225829 5225850 5225834 5225829 -
atagcagctacaatccagctac

SEQ ID NO: 144306 - DNA, 22 bp, Artificial Sequence
  Synthetic oligonucleotide; CTA chr11 5225819 5225840 5225824 5225819 -
caatccagctaccattctgctt

SEQ ID NO: 144307 - DNA, 22 bp, Artificial Sequence
  Synthetic oligonucleotide; CTA chr11 5225808 5225829 5225813 5225808 -
ccattctgcttttattttatgg

SEQ ID NO: 144308 - DNA, 22 bp, Artificial Sequence
  Synthetic oligonucleotide; TTC chr11 5225802 5225823 5225807 5225802 -
tgcttttattttatggttggga

SEQ ID NO: 144309 - DNA, 22 bp, Artificial Sequence
  Synthetic oligonucleotide; CTG chr11 5225800 5225821 5225805 5225800 -
cttttattttatggttgggata

SEQ ID NO: 144310 - DNA, 22 bp, Artificial Sequence
  Synthetic oligonucleotide; CTT chr11 5225797 5225818 5225802 5225797 -
ttattttatggttgggataagg

SEQ ID NO: 144311 - DNA, 22 bp, Artificial Sequence
  Synthetic oligonucleotide; TTT chr11 5225796 5225817 5225801 5225796 -
tattttatggttgggataaggc

SEQ ID NO: 144312 - DNA, 22 bp, Artificial Sequence
  Synthetic oligonucleotide; TTT chr11 5225795 5225816 5225800 5225795 -
attttatggttgggataaggct

SEQ ID NO: 144313 - DNA, 22 bp, Artificial Sequence
  Synthetic oligonucleotide; TTA chr11 5225794 5225815 5225799 5225794 -
ttttatggttgggataaggctg

SEQ ID NO: 144314 - DNA, 22 bp, Artificial Sequence
  Synthetic oligonucleotide; TTT chr11 5225791 5225812 5225796 5225791 -
tatggttgggataaggctggat

SEQ ID NO: 144315 - DNA, 22 bp, Artificial Sequence
  Synthetic oligonucleotide; TTT chr11 5225790 5225811 5225795 5225790 -
atggttgggataaggctggatt

SEQ ID NO: 144316 - DNA, 22 bp, Artificial Sequence
  Synthetic oligonucleotide; TTA chr11 5225789 5225810 5225794 5225789 -
tggttgggataaggctggatta

SEQ ID NO: 144317 - DNA, 22 bp, Artificial Sequence
  Synthetic oligonucleotide; TTG chr11 5225783 5225804 5225788 5225783 -
ggataaggctggattattctga

SEQ ID NO: 144318 - DNA, 22 bp, Artificial Sequence
  Synthetic oligonucleotide; CTG chr11 5225772 5225793 5225777 5225772 -
gattattctgagtccaagctag

SEQ ID NO: 144319 - DNA, 22 bp, Artificial Sequence
  Synthetic oligonucleotide; TTA chr11 5225767 5225788 5225772 5225767 -
ttctgagtccaagctaggccct

SEQ ID NO: 144320 - DNA, 22 bp, Artificial Sequence
  Synthetic oligonucleotide; TTC chr11 5225764 5225785 5225769 5225764 -
tgagtccaagctaggccctttt

SEQ ID NO: 144321 - DNA, 22 bp, Artificial Sequence
  Synthetic oligonucleotide; CTG chr11 5225762 5225783 5225767 5225762 -
agtccaagctaggcccttttgc

SEQ ID NO: 144322 - DNA, 22 bp, Artificial Sequence
  Synthetic oligonucleotide; CTA chr11 5225751 5225772 5225756 5225751 -
ggcccttttgctaatcatgttc

SEQ ID NO: 144323 - DNA, 22 bp, Artificial Sequence
  Synthetic oligonucleotide; CTT chr11 5225744 5225765 5225749 5225744 -
ttgctaatcatgttcatacctc

SEQ ID NO: 144324 - DNA, 22 bp, Artificial Sequence
  Synthetic oligonucleotide; TTT chr11 5225743 5225764 5225748 5225743 -
tgctaatcatgttcatacctct

SEQ ID NO: 144325 - DNA, 22 bp, Artificial Sequence
  Synthetic oligonucleotide; TTT chr11 5225742 5225763 5225747 5225742 -
gctaatcatgttcatacctctt

SEQ ID NO: 144326 - DNA, 22 bp, Artificial Sequence
  Synthetic oligonucleotide; TTG chr11 5225741 5225762 5225746 5225741 -
ctaatcatgttcatacctctta

SEQ ID NO: 144327 - DNA, 22 bp, Artificial Sequence
  Synthetic oligonucleotide; CTA chr11 5225738 5225759 5225743 5225738 -
atcatgttcatacctcttatct

SEQ ID NO: 144328 - DNA, 22 bp, Artificial Sequence
  Synthetic oligonucleotide; TTC chr11 5225729 5225750 5225734 5225729 -
atacctcttatcttcctcccac

SEQ ID NO: 144329 - DNA, 22 bp, Artificial Sequence
  Synthetic oligonucleotide; CTC chr11 5225722 5225743 5225727 5225722 -
ttatcttcctcccacagctcct

SEQ ID NO: 144330 - DNA, 22 bp, Artificial Sequence
  Synthetic oligonucleotide; CTT chr11 5225720 5225741 5225725 5225720 -
atcttcctcccacagctcctgg

SEQ ID NO: 144331 - DNA, 22 bp, Artificial Sequence
  Synthetic oligonucleotide; TTA chr11 5225719 5225740 5225724 5225719 -
tcttcctcccacagctcctggg

SEQ ID NO: 144332 - DNA, 22 bp, Artificial Sequence
  Synthetic oligonucleotide; CTT chr11 5225715 5225736 5225720 5225715 -
cctcccacagctcctgggcaac

SEQ ID NO: 144333 - DNA, 22 bp, Artificial Sequence
  Synthetic oligonucleotide; TTC chr11 5225714 5225735 5225719 5225714 -
ctcccacagctcctgggcaacg

SEQ ID NO: 144334 - DNA, 22 bp, Artificial Sequence
  Synthetic oligonucleotide; CTC chr11 5225711 5225732 5225716 5225711 -
ccacagctcctgggcaacgtgc

SEQ ID NO: 144335 - DNA, 22 bp, Artificial Sequence
  Synthetic oligonucleotide; CTC chr11 5225702 5225723 5225707 5225702 -
ctgggcaacgtgctggtctgtg

SEQ ID NO: 144336 - DNA, 22 bp, Artificial Sequence
  Synthetic oligonucleotide; CTG chr11 5225699 5225720 5225704 5225699 -
ggcaacgtgctggtctgtgtgc

SEQ ID NO: 144337 - DNA, 22 bp, Artificial Sequence
  Synthetic oligonucleotide; CTG chr11 5225687 5225708 5225692 5225687 -
gtctgtgtgctggcccatcact

SEQ ID NO: 144338 - DNA, 22 bp, Artificial Sequence
  Synthetic oligonucleotide; CTG chr11 5225682 5225703 5225687 5225682 -
tgtgctggcccatcactttggc

SEQ ID NO: 144339 - DNA, 22 bp, Artificial Sequence
  Synthetic oligonucleotide; CTG chr11 5225675 5225696 5225680 5225675 -
gcccatcactttggcaaagaat

SEQ ID NO: 144340 - DNA, 22 bp, Artificial Sequence
  Synthetic oligonucleotide; CTT chr11 5225664 5225685 5225669 5225664 -
tggcaaagaattcaccccacca

SEQ ID NO: 144341 - DNA, 22 bp, Artificial Sequence
  Synthetic oligonucleotide; TTT chr11 5225663 5225684 5225668 5225663 -
ggcaaagaattcaccccaccag

SEQ ID NO: 144342 - DNA, 22 bp, Artificial Sequence
  Synthetic oligonucleotide; TTG chr11 5225662 5225683 5225667 5225662 -
gcaaagaattcaccccaccagt

SEQ ID NO: 144343 - DNA, 22 bp, Artificial Sequence
  Synthetic oligonucleotide; TTC chr11 5225651 5225672 5225656 5225651 -
accccaccagtgcaggctgcct

SEQ ID NO: 144344 - DNA, 22 bp, Artificial Sequence
  Synthetic oligonucleotide; CTG chr11 5225632 5225653 5225637 5225632 -
cctatcagaaagtggtggctgg

SEQ ID NO: 144345 - DNA, 22 bp, Artificial Sequence
  Synthetic oligonucleotide; CTA chr11 5225628 5225649 5225633 5225628 -
tcagaaagtggtggctggtgtg

SEQ ID NO: 144346 - DNA, 22 bp, Artificial Sequence
  Synthetic oligonucleotide; CTG chr11 5225611 5225632 5225616 5225611 -
gtgtggctaatgccctggccca

SEQ ID NO: 144347 - DNA, 22 bp, Artificial Sequence
  Synthetic oligonucleotide; CTA chr11 5225602 5225623 5225607 5225602 -
atgccctggcccacaagtatca

SEQ ID NO: 144348 - DNA, 22 bp, Artificial Sequence
  Synthetic oligonucleotide; CTG chr11 5225594 5225615 5225599 5225594 -
gcccacaagtatcactaagctc

SEQ ID NO: 144349 - DNA, 22 bp, Artificial Sequence
  Synthetic oligonucleotide; CTA chr11 5225577 5225598 5225582 5225577 -
agctcgctttcttgctgtccaa

SEQ ID NO: 144350 - DNA, 22 bp, Artificial Sequence
  Synthetic oligonucleotide; CTC chr11 5225572 5225593 5225577 5225572 -
gctttcttgctgtccaatttct

SEQ ID NO: 144351 - DNA, 22 bp, Artificial Sequence
  Synthetic oligonucleotide; CTT chr11 5225568 5225589 5225573 5225568 -
tcttgctgtccaatttctatta

SEQ ID NO: 144352 - DNA, 22 bp, Artificial Sequence
  Synthetic oligonucleotide; TTT chr11 5225567 5225588 5225572 5225567 -
cttgctgtccaatttctattaa

SEQ ID NO: 144353 - DNA, 22 bp, Artificial Sequence
  Synthetic oligonucleotide; TTC chr11 5225566 5225587 5225571 5225566 -
ttgctgtccaatttctattaaa

SEQ ID NO: 144354 - DNA, 22 bp, Artificial Sequence
  Synthetic oligonucleotide; CTT chr11 5225564 5225585 5225569 5225564 -
gctgtccaatttctattaaagg

SEQ ID NO: 144355 - DNA, 22 bp, Artificial Sequence
  Synthetic oligonucleotide; TTG chr11 5225563 5225584 5225568 5225563 -
ctgtccaatttctattaaaggt

SEQ ID NO: 144356 - DNA, 22 bp, Artificial Sequence
  Synthetic oligonucleotide; CTG chr11 5225560 5225581 5225565 5225560 -
tccaatttctattaaaggttcc

SEQ ID NO: 144357 - DNA, 22 bp, Artificial Sequence
  Synthetic oligonucleotide; TTT chr11 5225552 5225573 5225557 5225552 -
ctattaaaggttcctttgttcc

SEQ ID NO: 144358 - DNA, 22 bp, Artificial Sequence
  Synthetic oligonucleotide; TTC chr11 5225551 5225572 5225556 5225551 -
tattaaaggttcctttgttccc

SEQ ID NO: 144359 - DNA, 22 bp, Artificial Sequence
  Synthetic oligonucleotide; CTA chr11 5225549 5225570 5225554 5225549 -
ttaaaggttcctttgttcccta

SEQ ID NO: 144360 - DNA, 22 bp, Artificial Sequence
  Synthetic oligonucleotide; TTA chr11 5225546 5225567 5225551 5225546 -
aaggttcctttgttccctaagt

SEQ ID NO: 144361 - DNA, 22 bp, Artificial Sequence
  Synthetic oligonucleotide; TTC chr11 5225539 5225560 5225544 5225539 -
ctttgttccctaagtccaacta

SEQ ID NO: 144362 - DNA, 22 bp, Artificial Sequence
  Synthetic oligonucleotide; CTT chr11 5225536 5225557 5225541 5225536 -
tgttccctaagtccaactacta

SEQ ID NO: 144363 - DNA, 22 bp, Artificial Sequence
  Synthetic oligonucleotide; TTT chr11 5225535 5225556 5225540 5225535 -
gttccctaagtccaactactaa

SEQ ID NO: 144364 - DNA, 22 bp, Artificial Sequence
  Synthetic oligonucleotide; TTG chr11 5225534 5225555 5225539 5225534 -
ttccctaagtccaactactaaa

SEQ ID NO: 144365 - DNA, 22 bp, Artificial Sequence
  Synthetic oligonucleotide; TTC chr11 5225531 5225552 5225536 5225531 -
cctaagtccaactactaaactg

SEQ ID NO: 144366 - DNA, 22 bp, Artificial Sequence
  Synthetic oligonucleotide; CTA chr11 5225527 5225548 5225532 5225527 -
agtccaactactaaactggggg

SEQ ID NO: 144367 - DNA, 22 bp, Artificial Sequence
  Synthetic oligonucleotide; CTA chr11 5225517 5225538 5225522 5225517 -
ctaaactgggggatattatgaa

SEQ ID NO: 144368 - DNA, 22 bp, Artificial Sequence
  Synthetic oligonucleotide; CTA chr11 5225514 5225535 5225519 5225514 -
aactgggggatattatgaaggg

SEQ ID NO: 144369 - DNA, 22 bp, Artificial Sequence
  Synthetic oligonucleotide; CTG chr11 5225509 5225530 5225514 5225509 -
ggggatattatgaagggccttg

SEQ ID NO: 144370 - DNA, 22 bp, Artificial Sequence
  Synthetic oligonucleotide; TTA chr11 5225499 5225520 5225504 5225499 -
tgaagggccttgagcatctgga

SEQ ID NO: 144371 - DNA, 22 bp, Artificial Sequence
  Synthetic oligonucleotide; CTT chr11 5225488 5225509 5225493 5225488 -
gagcatctggattctgcctaat

SEQ ID NO: 144372 - DNA, 22 bp, Artificial Sequence
  Synthetic oligonucleotide; TTG chr11 5225487 5225508 5225492 5225487 -
agcatctggattctgcctaata

SEQ ID NO: 144373 - DNA, 22 bp, Artificial Sequence
  Synthetic oligonucleotide; CTG chr11 5225479 5225500 5225484 5225479 -
gattctgcctaataaaaaacat

SEQ ID NO: 144374 - DNA, 22 bp, Artificial Sequence
  Synthetic oligonucleotide; TTC chr11 5225474 5225495 5225479 5225474 -
tgcctaataaaaaacatttatt

SEQ ID NO: 144375 - DNA, 22 bp, Artificial Sequence
  Synthetic oligonucleotide; CTG chr11 5225472 5225493 5225477 5225472 -
cctaataaaaaacatttatttt

SEQ ID NO: 144376 - DNA, 22 bp, Artificial Sequence
  Synthetic oligonucleotide; CTA chr11 5225468 5225489 5225473 5225468 -
ataaaaaacatttattttcatt

SEQ ID NO: 144377 - DNA, 22 bp, Artificial Sequence
  Synthetic oligonucleotide; TTT chr11 5225455 5225476 5225460 5225455 -
attttcattgcaatgatgtatt

SEQ ID NO: 144378 - DNA, 22 bp, Artificial Sequence
  Synthetic oligonucleotide; TTA chr11 5225454 5225475 5225459 5225454 -
ttttcattgcaatgatgtattt

SEQ ID NO: 144379 - DNA, 22 bp, Artificial Sequence
  Synthetic oligonucleotide; TTT chr11 5225451 5225472 5225456 5225451 -
tcattgcaatgatgtatttaaa

SEQ ID NO: 144380 - DNA, 22 bp, Artificial Sequence
  Synthetic oligonucleotide; TTT chr11 5225450 5225471 5225455 5225450 -
cattgcaatgatgtatttaaat

SEQ ID NO: 144381 - DNA, 22 bp, Artificial Sequence
  Synthetic oligonucleotide; TTC chr11 5225449 5225470 5225454 5225449 -
attgcaatgatgtatttaaatt

SEQ ID NO: 144382 - DNA, 22 bp, Artificial Sequence
  Synthetic oligonucleotide; TTG chr11 5225445 5225466 5225450 5225445 -
caatgatgtatttaaattattt

SEQ ID NO: 144383 - DNA, 22 bp, Artificial Sequence
  Synthetic oligonucleotide; TTT chr11 5225432 5225453 5225437 5225432 -
aaattatttctgaatattttac

SEQ ID NO: 144384 - DNA, 22 bp, Artificial Sequence
  Synthetic oligonucleotide; TTA chr11 5225431 5225452 5225436 5225431 -
aattatttctgaatattttact

SEQ ID NO: 144385 - DNA, 22 bp, Artificial Sequence
  Synthetic oligonucleotide; TTA chr11 5225426 5225447 5225431 5225426 -
tttctgaatattttactaaaaa

SEQ ID NO: 144386 - DNA, 22 bp, Artificial Sequence
  Synthetic oligonucleotide; TTT chr11 5225423 5225444 5225428 5225423 -
ctgaatattttactaaaaaggg

SEQ ID NO: 144387 - DNA, 22 bp, Artificial Sequence
  Synthetic oligonucleotide; TTC chr11 5225422 5225443 5225427 5225422 -
tgaatattttactaaaaaggga

SEQ ID NO: 144388 - DNA, 22 bp, Artificial Sequence
  Synthetic oligonucleotide; CTG chr11 5225420 5225441 5225425 5225420 -
aatattttactaaaaagggaat

SEQ ID NO: 144389 - DNA, 22 bp, Artificial Sequence
  Synthetic oligonucleotide; TTT chr11 5225413 5225434 5225418 5225413 -
tactaaaaagggaatgtgggag

SEQ ID NO: 144390 - DNA, 22 bp, Artificial Sequence
  Synthetic oligonucleotide; TTT chr11 5225412 5225433 5225417 5225412 -
actaaaaagggaatgtgggagg

SEQ ID NO: 144391 - DNA, 22 bp, Artificial Sequence
  Synthetic oligonucleotide; TTA chr11 5225411 5225432 5225416 5225411 -
ctaaaaagggaatgtgggaggt

SEQ ID NO: 144392 - DNA, 22 bp, Artificial Sequence
  Synthetic oligonucleotide; CTA chr11 5225408 5225429 5225413 5225408 -
aaaagggaatgtgggaggtcag

SEQ ID NO: 144393 - DNA, 22 bp, Artificial Sequence
  Synthetic oligonucleotide; TTT chr11 5225379 5225400 5225384 5225379 -
aaaacataaagaaatgaagagc

SEQ ID NO: 144394 - DNA, 22 bp, Artificial Sequence
  Synthetic oligonucleotide; TTA chr11 5225378 5225399 5225383 5225378 -
aaacataaagaaatgaagagct

SEQ ID NO: 144395 - DNA, 22 bp, Artificial Sequence
  Synthetic oligonucleotide; CTA chr11 5225355 5225376 5225360 5225355 -
gttcaaaccttgggaaaataca

SEQ ID NO: 144396 - DNA, 22 bp, Artificial Sequence
  Synthetic oligonucleotide; TTC chr11 5225351 5225372 5225356 5225351 -
aaaccttgggaaaatacactat

SEQ ID NO: 144397 - DNA, 22 bp, Artificial Sequence
  Synthetic oligonucleotide; CTT chr11 5225344 5225365 5225349 5225344 -
gggaaaatacactatatcttaa

SEQ ID NO: 144398 - DNA, 22 bp, Artificial Sequence
  Synthetic oligonucleotide; TTG chr11 5225343 5225364 5225348 5225343 -
ggaaaatacactatatcttaaa

SEQ ID NO: 144399 - DNA, 22 bp, Artificial Sequence
  Synthetic oligonucleotide; CTA chr11 5225330 5225351 5225335 5225330 -
tatcttaaactccatgaaagaa

SEQ ID NO: 144400 - DNA, 22 bp, Artificial Sequence
  Synthetic oligonucleotide; CTT chr11 5225324 5225345 5225329 5225324 -
aaactccatgaaagaaggtgag

SEQ ID NO: 144401 - DNA, 22 bp, Artificial Sequence
  Synthetic oligonucleotide; TTA chr11 5225323 5225344 5225328 5225323 -
aactccatgaaagaaggtgagg

SEQ ID NO: 144402 - DNA, 22 bp, Artificial Sequence
  Synthetic oligonucleotide; CTC chr11 5225318 5225339 5225323 5225318 -
catgaaagaaggtgaggctgca

SEQ ID NO: 144403 - DNA, 22 bp, Artificial Sequence
  Synthetic oligonucleotide; CTG chr11 5225298 5225319 5225303 5225298 -
caaacagctaatgcacattggc

SEQ ID NO: 144404 - DNA, 22 bp, Artificial Sequence
  Synthetic oligonucleotide; CTA chr11 5225288 5225309 5225293 5225288 -
atgcacattggcaacagcccct

SEQ ID NO: 144405 - DNA, 22 bp, Artificial Sequence
  Synthetic oligonucleotide; TTG chr11 5225278 5225299 5225283 5225278 -
gcaacagcccctgatgcatatg

SEQ ID NO: 144406 - DNA, 22 bp, Artificial Sequence
  Synthetic oligonucleotide; CTG chr11 5225265 5225286 5225270 5225265 -
atgcatatgccttattcatccc

SEQ ID NO: 144407 - DNA, 22 bp, Artificial Sequence
  Synthetic oligonucleotide; CTT chr11 5225252 5225273 5225257 5225252 -
attcatccctcagaaaaggatt

SEQ ID NO: 144408 - DNA, 22 bp, Artificial Sequence
  Synthetic oligonucleotide; TTA chr11 5225251 5225272 5225256 5225251 -
ttcatccctcagaaaaggattc

SEQ ID NO: 144409 - DNA, 22 bp, Artificial Sequence
  Synthetic oligonucleotide; TTC chr11 5225248 5225269 5225253 5225248 -
atccctcagaaaaggattcaag

SEQ ID NO: 144410 - DNA, 22 bp, Artificial Sequence
  Synthetic oligonucleotide; CTC chr11 5225241 5225262 5225246 5225241 -
agaaaaggattcaagtagaggc

SEQ ID NO: 144411 - DNA, 22 bp, Artificial Sequence
  Synthetic oligonucleotide; TTC chr11 5225229 5225250 5225234 5225229 -
aagtagaggcttgatttggagg

SEQ ID NO: 144412 - DNA, 22 bp, Artificial Sequence
  Synthetic oligonucleotide; CTT chr11 5225217 5225238 5225222 5225217 -
gatttggaggttaaagttttgc

SEQ ID NO: 144413 - DNA, 22 bp, Artificial Sequence
  Synthetic oligonucleotide; TTG chr11 5225216 5225237 5225221 5225216 -
atttggaggttaaagttttgct

SEQ ID NO: 144414 - DNA, 22 bp, Artificial Sequence
  Synthetic oligonucleotide; TTT chr11 5225212 5225233 5225217 5225212 -
ggaggttaaagttttgctatgc

SEQ ID NO: 144415 - DNA, 22 bp, Artificial Sequence
  Synthetic oligonucleotide; TTG chr11 5225211 5225232 5225216 5225211 -
gaggttaaagttttgctatgct

SEQ ID NO: 144416 - DNA, 22 bp, Artificial Sequence
  Synthetic oligonucleotide; TTA chr11 5225204 5225225 5225209 5225204 -
aagttttgctatgctgtatttt

SEQ ID NO: 144417 - DNA, 22 bp, Artificial Sequence
  Synthetic oligonucleotide; TTT chr11 5225198 5225219 5225203 5225198 -
tgctatgctgtattttacatta

SEQ ID NO: 144418 - DNA, 22 bp, Artificial Sequence
  Synthetic oligonucleotide; TTT chr11 5225197 5225218 5225202 5225197 -
gctatgctgtattttacattac

SEQ ID NO: 144419 - DNA, 22 bp, Artificial Sequence
  Synthetic oligonucleotide; TTG chr11 5225196 5225217 5225201 5225196 -
ctatgctgtattttacattact

SEQ ID NO: 144420 - DNA, 22 bp, Artificial Sequence
  Synthetic oligonucleotide; CTA chr11 5225193 5225214 5225198 5225193 -
tgctgtattttacattacttat

SEQ ID NO: 144421 - DNA, 22 bp, Artificial Sequence
  Synthetic oligonucleotide; CTG chr11 5225188 5225209 5225193 5225188 -
tattttacattacttattgttt

SEQ ID NO: 144422 - DNA, 22 bp, Artificial Sequence
  Synthetic oligonucleotide; TTT chr11 5225183 5225204 5225188 5225183 -
tacattacttattgttttagct

SEQ ID NO: 144423 - DNA, 22 bp, Artificial Sequence
  Synthetic oligonucleotide; TTT chr11 5225182 5225203 5225187 5225182 -
acattacttattgttttagctg

SEQ ID NO: 144424 - DNA, 22 bp, Artificial Sequence
  Synthetic oligonucleotide; TTA chr11 5225181 5225202 5225186 5225181 -
cattacttattgttttagctgt

SEQ ID NO: 144425 - DNA, 22 bp, Artificial Sequence
  Synthetic oligonucleotide; TTA chr11 5225176 5225197 5225181 5225176 -
cttattgttttagctgtcctca

SEQ ID NO: 144426 - DNA, 22 bp, Artificial Sequence
  Synthetic oligonucleotide; CTT chr11 5225173 5225194 5225178 5225173 -
attgttttagctgtcctcatga

SEQ ID NO: 144427 - DNA, 22 bp, Artificial Sequence
  Synthetic oligonucleotide; TTA chr11 5225172 5225193 5225177 5225172 -
ttgttttagctgtcctcatgaa

SEQ ID NO: 144428 - DNA, 22 bp, Artificial Sequence
  Synthetic oligonucleotide; TTG chr11 5225169 5225190 5225174 5225169 -
ttttagctgtcctcatgaatgt

SEQ ID NO: 144429 - DNA, 22 bp, Artificial Sequence
  Synthetic oligonucleotide; TTT chr11 5225166 5225187 5225171 5225166 -
tagctgtcctcatgaatgtctt

SEQ ID NO: 144430 - DNA, 22 bp, Artificial Sequence
  Synthetic oligonucleotide; TTT chr11 5225165 5225186 5225170 5225165 -
agctgtcctcatgaatgtcttt

SEQ ID NO: 144431 - DNA, 22 bp, Artificial Sequence
  Synthetic oligonucleotide; TTA chr11 5225164 5225185 5225169 5225164 -
gctgtcctcatgaatgtctttt

SEQ ID NO: 144432 - DNA, 22 bp, Artificial Sequence
  Synthetic oligonucleotide; CTG chr11 5225160 5225181 5225165 5225160 -
tcctcatgaatgtcttttcact

SEQ ID NO: 144433 - DNA, 22 bp, Artificial Sequence
  Synthetic oligonucleotide; CTC chr11 5225155 5225176 5225160 5225155 -
atgaatgtcttttcactaccca

SEQ ID NO: 144434 - DNA, 22 bp, Artificial Sequence
  Synthetic oligonucleotide; CTT chr11 5225144 5225165 5225149 5225144 -
ttcactacccatttgcttatcc

SEQ ID NO: 144435 - DNA, 22 bp, Artificial Sequence
  Synthetic oligonucleotide; TTT chr11 5225143 5225164 5225148 5225143 -
tcactacccatttgcttatcct

SEQ ID NO: 144436 - DNA, 22 bp, Artificial Sequence
  Synthetic oligonucleotide; TTT chr11 5225142 5225163 5225147 5225142 -
cactacccatttgcttatcctg

SEQ ID NO: 144437 - DNA, 22 bp, Artificial Sequence
  Synthetic oligonucleotide; TTC chr11 5225141 5225162 5225146 5225141 -
actacccatttgcttatcctgc

SEQ ID NO: 144438 - DNA, 22 bp, Artificial Sequence
  Synthetic oligonucleotide; CTA chr11 5225137 5225158 5225142 5225137 -
cccatttgcttatcctgcatct

SEQ ID NO: 144439 - DNA, 22 bp, Artificial Sequence
  Synthetic oligonucleotide; TTT chr11 5225130 5225151 5225135 5225130 -
gcttatcctgcatctctcagcc

SEQ ID NO: 144440 - DNA, 22 bp, Artificial Sequence
  Synthetic oligonucleotide; TTG chr11 5225129 5225150 5225134 5225129 -
cttatcctgcatctctcagcct

SEQ ID NO: 144441 - DNA, 22 bp, Artificial Sequence
  Synthetic oligonucleotide; CTT chr11 5225126 5225147 5225131 5225126 -
atcctgcatctctcagccttga

SEQ ID NO: 144442 - DNA, 22 bp, Artificial Sequence
  Synthetic oligonucleotide; TTA chr11 5225125 5225146 5225130 5225125 -
tcctgcatctctcagccttgac

SEQ ID NO: 144443 - DNA, 22 bp, Artificial Sequence
  Synthetic oligonucleotide; CTG chr11 5225120 5225141 5225125 5225120 -
catctctcagccttgactccac

SEQ ID NO: 144444 - DNA, 22 bp, Artificial Sequence
  Synthetic oligonucleotide; CTC chr11 5225114 5225135 5225119 5225114 -
tcagccttgactccactcagtt

SEQ ID NO: 144445 - DNA, 22 bp, Artificial Sequence
  Synthetic oligonucleotide; CTC chr11 5225112 5225133 5225117 5225112 -
agccttgactccactcagttct

SEQ ID NO: 144446 - DNA, 22 bp, Artificial Sequence
  Synthetic oligonucleotide; CTT chr11 5225106 5225127 5225111 5225106 -
gactccactcagttctcttgct

SEQ ID NO: 144447 - DNA, 22 bp, Artificial Sequence
  Synthetic oligonucleotide; TTG chr11 5225105 5225126 5225110 5225105 -
actccactcagttctcttgctt

SEQ ID NO: 144448 - DNA, 22 bp, Artificial Sequence
  Synthetic oligonucleotide; CTC chr11 5225101 5225122 5225106 5225101 -
cactcagttctcttgcttagag

SEQ ID NO: 144449 - DNA, 22 bp, Artificial Sequence
  Synthetic oligonucleotide; CTC chr11 5225096 5225117 5225101 5225096 -
agttctcttgcttagagatacc

SEQ ID NO: 144450 - DNA, 22 bp, Artificial Sequence
  Synthetic oligonucleotide; TTC chr11 5225091 5225112 5225096 5225091 -
tcttgcttagagataccacctt

SEQ ID NO: 144451 - DNA, 22 bp, Artificial Sequence
  Synthetic oligonucleotide; CTC chr11 5225089 5225110 5225094 5225089 -
ttgcttagagataccacctttc

SEQ ID NO: 144452 - DNA, 22 bp, Artificial Sequence
  Synthetic oligonucleotide; CTT chr11 5225087 5225108 5225092 5225087 -
gcttagagataccacctttccc

SEQ ID NO: 144453 - DNA, 22 bp, Artificial Sequence
  Synthetic oligonucleotide; TTG chr11 5225086 5225107 5225091 5225086 -
cttagagataccacctttcccc

SEQ ID NO: 144454 - DNA, 22 bp, Artificial Sequence
  Synthetic oligonucleotide; CTT chr11 5225083 5225104 5225088 5225083 -
agagataccacctttcccctga

SEQ ID NO: 144455 - DNA, 22 bp, Artificial Sequence
  Synthetic oligonucleotide; TTA chr11 5225082 5225103 5225087 5225082 -
gagataccacctttcccctgaa

SEQ ID NO: 144456 - DNA, 22 bp, Artificial Sequence
  Synthetic oligonucleotide; CTT chr11 5225069 5225090 5225074 5225069 -
tcccctgaagtgttccttccat

SEQ ID NO: 144457 - DNA, 22 bp, Artificial Sequence
  Synthetic oligonucleotide; TTT chr11 5225068 5225089 5225073 5225068 -
cccctgaagtgttccttccatg

SEQ ID NO: 144458 - DNA, 22 bp, Artificial Sequence
  Synthetic oligonucleotide; TTC chr11 5225067 5225088 5225072 5225067 -
ccctgaagtgttccttccatgt

SEQ ID NO: 144459 - DNA, 22 bp, Artificial Sequence
  Synthetic oligonucleotide; CTG chr11 5225062 5225083 5225067 5225062 -
aagtgttccttccatgttttac

SEQ ID NO: 144460 - DNA, 22 bp, Artificial Sequence
  Synthetic oligonucleotide; TTC chr11 5225054 5225075 5225059 5225054 -
cttccatgttttacggcgagat

SEQ ID NO: 144461 - DNA, 22 bp, Artificial Sequence
  Synthetic oligonucleotide; CTT chr11 5225051 5225072 5225056 5225051 -
ccatgttttacggcgagatggt

SEQ ID NO: 144462 - DNA, 22 bp, Artificial Sequence
  Synthetic oligonucleotide; TTC chr11 5225050 5225071 5225055 5225050 -
catgttttacggcgagatggtt

SEQ ID NO: 144463 - DNA, 22 bp, Artificial Sequence
  Synthetic oligonucleotide; TTT chr11 5225043 5225064 5225048 5225043 -
tacggcgagatggtttctcctc

SEQ ID NO: 144464 - DNA, 22 bp, Artificial Sequence
  Synthetic oligonucleotide; TTT chr11 5225042 5225063 5225047 5225042 -
acggcgagatggtttctcctcg

SEQ ID NO: 144465 - DNA, 22 bp, Artificial Sequence
  Synthetic oligonucleotide; TTA chr11 5225041 5225062 5225046 5225041 -
cggcgagatggtttctcctcgc

SEQ ID NO: 144466 - DNA, 22 bp, Artificial Sequence
  Synthetic oligonucleotide; TTT chr11 5225027 5225048 5225032 5225027 -
ctcctcgcctggccactcagcc

SEQ ID NO: 144467 - DNA, 22 bp, Artificial Sequence
  Synthetic oligonucleotide; TTC chr11 5225026 5225047 5225031 5225026 -
tcctcgcctggccactcagcct

SEQ ID NO: 144468 - DNA, 22 bp, Artificial Sequence
  Synthetic oligonucleotide; CTC chr11 5225024 5225045 5225029 5225024 -
ctcgcctggccactcagcctta

SEQ ID NO: 144469 - DNA, 22 bp, Artificial Sequence
  Synthetic oligonucleotide; CTC chr11 5225021 5225042 5225026 5225021 -
gcctggccactcagccttagtt

SEQ ID NO: 144470 - DNA, 22 bp, Artificial Sequence
  Synthetic oligonucleotide; CTG chr11 5225016 5225037 5225021 5225016 -
gccactcagccttagttgtctc

SEQ ID NO: 144471 - DNA, 22 bp, Artificial Sequence
  Synthetic oligonucleotide; CTC chr11 5225009 5225030 5225014 5225009 -
agccttagttgtctctgttgtc

SEQ ID NO: 144472 - DNA, 22 bp, Artificial Sequence
  Synthetic oligonucleotide; CTT chr11 5225003 5225024 5225008 5225003 -
agttgtctctgttgtcttatag

SEQ ID NO: 144473 - DNA, 22 bp, Artificial Sequence
  Synthetic oligonucleotide; TTA chr11 5225002 5225023 5225007 5225002 -
gttgtctctgttgtcttataga

SEQ ID NO: 144474 - DNA, 22 bp, Artificial Sequence
  Synthetic oligonucleotide; TTG chr11 5224998 5225019 5225003 5224998 -
tctctgttgtcttatagaggtc

SEQ ID NO: 144475 - DNA, 22 bp, Artificial Sequence
  Synthetic oligonucleotide; CTC chr11 5224994 5225015 5224999 5224994 -
tgttgtcttatagaggtctact

SEQ ID NO: 144476 - DNA, 22 bp, Artificial Sequence
  Synthetic oligonucleotide; CTG chr11 5224992 5225013 5224997 5224992 -
ttgtcttatagaggtctacttg

SEQ ID NO: 144477 - DNA, 22 bp, Artificial Sequence
  Synthetic oligonucleotide; TTG chr11 5224989 5225010 5224994 5224989 -
tcttatagaggtctacttgaag

SEQ ID NO: 144478 - DNA, 22 bp, Artificial Sequence
  Synthetic oligonucleotide; CTT chr11 5224985 5225006 5224990 5224985 -
atagaggtctacttgaagaagg

SEQ ID NO: 144479 - DNA, 22 bp, Artificial Sequence
  Synthetic oligonucleotide; TTA chr11 5224984 5225005 5224989 5224984 -
tagaggtctacttgaagaagga

SEQ ID NO: 144480 - DNA, 22 bp, Artificial Sequence
  Synthetic oligonucleotide; CTA chr11 5224974 5224995 5224979 5224974 -
cttgaagaaggaaaaacagggg

SEQ ID NO: 144481 - DNA, 22 bp, Artificial Sequence
  Synthetic oligonucleotide; CTT chr11 5224971 5224992 5224976 5224971 -
gaagaaggaaaaacaggggtca

SEQ ID NO: 144482 - DNA, 22 bp, Artificial Sequence
  Synthetic oligonucleotide; TTG chr11 5224970 5224991 5224975 5224970 -
aagaaggaaaaacaggggtcat

SEQ ID NO: 144483 - DNA, 22 bp, Artificial Sequence
  Synthetic oligonucleotide; TTT chr11 5224943 5224964 5224948 5224943 -
gactgtcctgtgagcccttctt

SEQ ID NO: 144484 - DNA, 22 bp, Artificial Sequence
  Synthetic oligonucleotide; TTG chr11 5224942 5224963 5224947 5224942 -
actgtcctgtgagcccttcttc

SEQ ID NO: 144485 - DNA, 22 bp, Artificial Sequence
  Synthetic oligonucleotide; CTG chr11 5224938 5224959 5224943 5224938 -
tcctgtgagcccttcttccctg

SEQ ID NO: 144486 - DNA, 22 bp, Artificial Sequence
  Synthetic oligonucleotide; CTG chr11 5224933 5224954 5224938 5224933 -
tgagcccttcttccctgcctcc

SEQ ID NO: 144487 - DNA, 22 bp, Artificial Sequence
  Synthetic oligonucleotide; CTT chr11 5224924 5224945 5224929 5224924 -
cttccctgcctcccccactcac

SEQ ID NO: 144488 - DNA, 22 bp, Artificial Sequence
  Synthetic oligonucleotide; TTC chr11 5224923 5224944 5224928 5224923 -
ttccctgcctcccccactcaca

SEQ ID NO: 144489 - DNA, 22 bp, Artificial Sequence
  Synthetic oligonucleotide; CTT chr11 5224921 5224942 5224926 5224921 -
ccctgcctcccccactcacagt

SEQ ID NO: 144490 - DNA, 22 bp, Artificial Sequence
  Synthetic oligonucleotide; TTC chr11 5224920 5224941 5224925 5224920 -
cctgcctcccccactcacagtg

SEQ ID NO: 144491 - DNA, 22 bp, Artificial Sequence
  Synthetic oligonucleotide; CTG chr11 5224916 5224937 5224921 5224916 -
cctcccccactcacagtgaccc

SEQ ID NO: 144492 - DNA, 22 bp, Artificial Sequence
  Synthetic oligonucleotide; CTC chr11 5224912 5224933 5224917 5224912 -
ccccactcacagtgacccggaa

SEQ ID NO: 144493 - DNA, 22 bp, Artificial Sequence
  Synthetic oligonucleotide; CTC chr11 5224904 5224925 5224909 5224904 -
acagtgacccggaatctgcagt

SEQ ID NO: 144494 - DNA, 22 bp, Artificial Sequence
  Synthetic oligonucleotide; CTG chr11 5224886 5224907 5224891 5224886 -
cagtgctagtctcccggaacta

SEQ ID NO: 144495 - DNA, 22 bp, Artificial Sequence
  Synthetic oligonucleotide; CTA chr11 5224878 5224899 5224883 5224878 -
gtctcccggaactatcactctt

SEQ ID NO: 144496 - DNA, 22 bp, Artificial Sequence
  Synthetic oligonucleotide; CTC chr11 5224873 5224894 5224878 5224873 -
ccggaactatcactctttcaca

SEQ ID NO: 144497 - DNA, 22 bp, Artificial Sequence
  Synthetic oligonucleotide; CTA chr11 5224864 5224885 5224869 5224864 -
tcactctttcacagtctgcttt

SEQ ID NO: 144498 - DNA, 22 bp, Artificial Sequence
  Synthetic oligonucleotide; CTC chr11 5224858 5224879 5224863 5224858 -
tttcacagtctgctttggaagg

SEQ ID NO: 144499 - DNA, 22 bp, Artificial Sequence
  Synthetic oligonucleotide; CTT chr11 5224856 5224877 5224861 5224856 -
tcacagtctgctttggaaggac

SEQ ID NO: 144500 - DNA, 22 bp, Artificial Sequence
  Synthetic oligonucleotide; TTT chr11 5224855 5224876 5224860 5224855 -
cacagtctgctttggaaggact

SEQ ID NO: 144501 - DNA, 22 bp, Artificial Sequence
  Synthetic oligonucleotide; TTC chr11 5224854 5224875 5224859 5224854 -
acagtctgctttggaaggactg

SEQ ID NO: 144502 - DNA, 22 bp, Artificial Sequence
  Synthetic oligonucleotide; CTG chr11 5224846 5224867 5224851 5224846 -
ctttggaaggactgggcttagt

SEQ ID NO: 144503 - DNA, 22 bp, Artificial Sequence
  Synthetic oligonucleotide; CTT chr11 5224843 5224864 5224848 5224843 -
tggaaggactgggcttagtatg

SEQ ID NO: 144504 - DNA, 22 bp, Artificial Sequence
  Synthetic oligonucleotide; TTT chr11 5224842 5224863 5224847 5224842 -
ggaaggactgggcttagtatga

SEQ ID NO: 144505 - DNA, 22 bp, Artificial Sequence
  Synthetic oligonucleotide; TTG chr11 5224841 5224862 5224846 5224841 -
gaaggactgggcttagtatgaa

SEQ ID NO: 144506 - DNA, 22 bp, Artificial Sequence
  Synthetic oligonucleotide; CTG chr11 5224832 5224853 5224837 5224832 -
ggcttagtatgaaaagttagga

SEQ ID NO: 144507 - DNA, 22 bp, Artificial Sequence
  Synthetic oligonucleotide; CTT chr11 5224827 5224848 5224832 5224827 -
agtatgaaaagttaggactgag

SEQ ID NO: 144508 - DNA, 22 bp, Artificial Sequence
  Synthetic oligonucleotide; TTA chr11 5224826 5224847 5224831 5224826 -
gtatgaaaagttaggactgaga

SEQ ID NO: 144509 - DNA, 22 bp, Artificial Sequence
  Synthetic oligonucleotide; TTA chr11 5224813 5224834 5224818 5224813 -
ggactgagaagaatttgaaagg

SEQ ID NO: 144510 - DNA, 22 bp, Artificial Sequence
  Synthetic oligonucleotide; CTG chr11 5224807 5224828 5224812 5224807 -
agaagaatttgaaaggcggctt

SEQ ID NO: 144511 - DNA, 22 bp, Artificial Sequence
  Synthetic oligonucleotide; TTT chr11 5224797 5224818 5224802 5224797 -
gaaaggcggctttttgtagctt

SEQ ID NO: 144512 - DNA, 22 bp, Artificial Sequence
  Synthetic oligonucleotide; TTG chr11 5224796 5224817 5224801 5224796 -
aaaggcggctttttgtagcttg

SEQ ID NO: 144513 - DNA, 22 bp, Artificial Sequence
  Synthetic oligonucleotide; CTT chr11 5224785 5224806 5224790 5224785 -
tttgtagcttgatattcactac

SEQ ID NO: 144514 - DNA, 22 bp, Artificial Sequence
  Synthetic oligonucleotide; TTT chr11 5224784 5224805 5224789 5224784 -
ttgtagcttgatattcactact

SEQ ID NO: 144515 - DNA, 22 bp, Artificial Sequence
  Synthetic oligonucleotide; TTT chr11 5224783 5224804 5224788 5224783 -
tgtagcttgatattcactactg

SEQ ID NO: 144516 - DNA, 22 bp, Artificial Sequence
  Synthetic oligonucleotide; TTT chr11 5224782 5224803 5224787 5224782 -
gtagcttgatattcactactgt

SEQ ID NO: 144517 - DNA, 22 bp, Artificial Sequence
  Synthetic oligonucleotide; TTG chr11 5224781 5224802 5224786 5224781 -
tagcttgatattcactactgtc

SEQ ID NO: 144518 - DNA, 22 bp, Artificial Sequence
  Synthetic oligonucleotide; CTT chr11 5224775 5224796 5224780 5224775 -
gatattcactactgtcttatta

SEQ ID NO: 144519 - DNA, 22 bp, Artificial Sequence
  Synthetic oligonucleotide; TTG chr11 5224774 5224795 5224779 5224774 -
atattcactactgtcttattac

SEQ ID NO: 144520 - DNA, 22 bp, Artificial Sequence
  Synthetic oligonucleotide; TTC chr11 5224768 5224789 5224773 5224768 -
actactgtcttattaccctgtc

SEQ ID NO: 144521 - DNA, 22 bp, Artificial Sequence
  Synthetic oligonucleotide; CTA chr11 5224764 5224785 5224769 5224764 -
ctgtcttattaccctgtcatag

SEQ ID NO: 144522 - DNA, 22 bp, Artificial Sequence
  Synthetic oligonucleotide; CTG chr11 5224761 5224782 5224766 5224761 -
tcttattaccctgtcataggcc

SEQ ID NO: 144523 - DNA, 22 bp, Artificial Sequence
  Synthetic oligonucleotide; CTT chr11 5224757 5224778 5224762 5224757 -
attaccctgtcataggcccacc

SEQ ID NO: 144524 - DNA, 22 bp, Artificial Sequence
  Synthetic oligonucleotide; TTA chr11 5224756 5224777 5224761 5224756 -
ttaccctgtcataggcccaccc

SEQ ID NO: 144525 - DNA, 22 bp, Artificial Sequence
  Synthetic oligonucleotide; TTA chr11 5224753 5224774 5224758 5224753 -
ccctgtcataggcccaccccaa

SEQ ID NO: 144526 - DNA, 22 bp, Artificial Sequence
  Synthetic oligonucleotide; CTG chr11 5224748 5224769 5224753 5224748 -
tcataggcccaccccaaatgga

SEQ ID NO: 144527 - DNA, 22 bp, Artificial Sequence
  Synthetic oligonucleotide; TTC chr11 5224716 5224737 5224721 5224716 -
ttcctcaggatgtttaagatta

SEQ ID NO: 144528 - DNA, 22 bp, Artificial Sequence
  Synthetic oligonucleotide; CTT chr11 5224714 5224735 5224719 5224714 -
cctcaggatgtttaagattagc

SEQ ID NO: 144529 - DNA, 22 bp, Artificial Sequence
  Synthetic oligonucleotide; TTC chr11 5224713 5224734 5224718 5224713 -
ctcaggatgtttaagattagca

SEQ ID NO: 144530 - DNA, 22 bp, Artificial Sequence
  Synthetic oligonucleotide; CTC chr11 5224710 5224731 5224715 5224710 -
aggatgtttaagattagcattc

SEQ ID NO: 144531 - DNA, 22 bp, Artificial Sequence
  Synthetic oligonucleotide; TTT chr11 5224701 5224722 5224706 5224701 -
aagattagcattcaggaagaga

SEQ ID NO: 144532 - DNA, 22 bp, Artificial Sequence
  Synthetic oligonucleotide; TTA chr11 5224700 5224721 5224705 5224700 -
agattagcattcaggaagagat

SEQ ID NO: 144533 - DNA, 22 bp, Artificial Sequence
  Synthetic oligonucleotide; TTA chr11 5224694 5224715 5224699 5224694 -
gcattcaggaagagatcagagg

SEQ ID NO: 144534 - DNA, 22 bp, Artificial Sequence
  Synthetic oligonucleotide; TTC chr11 5224688 5224709 5224693 5224688 -
aggaagagatcagaggtctgct

SEQ ID NO: 144535 - DNA, 22 bp, Artificial Sequence
  Synthetic oligonucleotide; CTG chr11 5224668 5224689 5224673 5224668 -
ctggctcccttatcatgtccct

SEQ ID NO: 144536 - DNA, 22 bp, Artificial Sequence
  Synthetic oligonucleotide; CTG chr11 5224665 5224686 5224670 5224665 -
gctcccttatcatgtcccttat

SEQ ID NO: 144537 - DNA, 22 bp, Artificial Sequence
  Synthetic oligonucleotide; CTC chr11 5224661 5224682 5224666 5224661 -
ccttatcatgtcccttatggtg

SEQ ID NO: 144538 - DNA, 22 bp, Artificial Sequence
  Synthetic oligonucleotide; CTT chr11 5224657 5224678 5224662 5224657 -
atcatgtcccttatggtgcttc

SEQ ID NO: 144539 - DNA, 22 bp, Artificial Sequence
  Synthetic oligonucleotide; TTA chr11 5224656 5224677 5224661 5224656 -
tcatgtcccttatggtgcttct

SEQ ID NO: 144540 - DNA, 22 bp, Artificial Sequence
  Synthetic oligonucleotide; CTT chr11 5224645 5224666 5224650 5224645 -
atggtgcttctggctctgcagt

SEQ ID NO: 144541 - DNA, 22 bp, Artificial Sequence
  Synthetic oligonucleotide; TTA chr11 5224644 5224665 5224649 5224644 -
tggtgcttctggctctgcagtt

SEQ ID NO: 144542 - DNA, 22 bp, Artificial Sequence
  Synthetic oligonucleotide; CTT chr11 5224636 5224657 5224641 5224636 -
ctggctctgcagttattagcat

SEQ ID NO: 144543 - DNA, 22 bp, Artificial Sequence
  Synthetic oligonucleotide; TTC chr11 5224635 5224656 5224640 5224635 -
tggctctgcagttattagcata

SEQ ID NO: 144544 - DNA, 22 bp, Artificial Sequence
  Synthetic oligonucleotide; CTG chr11 5224633 5224654 5224638 5224633 -
gctctgcagttattagcatagt

SEQ ID NO: 144545 - DNA, 22 bp, Artificial Sequence
  Synthetic oligonucleotide; CTC chr11 5224629 5224650 5224634 5224629 -
tgcagttattagcatagtgtta

SEQ ID NO: 144546 - DNA, 22 bp, Artificial Sequence
  Synthetic oligonucleotide; CTG chr11 5224627 5224648 5224632 5224627 -
cagttattagcatagtgttacc

SEQ ID NO: 144547 - DNA, 22 bp, Artificial Sequence
  Synthetic oligonucleotide; TTA chr11 5224621 5224642 5224626 5224621 -
ttagcatagtgttaccatcaac

SEQ ID NO: 144548 - DNA, 22 bp, Artificial Sequence
  Synthetic oligonucleotide; TTA chr11 5224618 5224639 5224623 5224618 -
gcatagtgttaccatcaaccac

SEQ ID NO: 144549 - DNA, 22 bp, Artificial Sequence
  Synthetic oligonucleotide; TTA chr11 5224607 5224628 5224612 5224607 -
ccatcaaccaccttaacttcat

SEQ ID NO: 144550 - DNA, 22 bp, Artificial Sequence
  Synthetic oligonucleotide; CTT chr11 5224593 5224614 5224598 5224593 -
aacttcatttttcttattcaat

SEQ ID NO: 144551 - DNA, 22 bp, Artificial Sequence
  Synthetic oligonucleotide; TTA chr11 5224592 5224613 5224597 5224592 -
acttcatttttcttattcaata

SEQ ID NO: 144552 - DNA, 22 bp, Artificial Sequence
  Synthetic oligonucleotide; CTT chr11 5224588 5224609 5224593 5224588 -
catttttcttattcaataccta

SEQ ID NO: 144553 - DNA, 22 bp, Artificial Sequence
  Synthetic oligonucleotide; TTC chr11 5224587 5224608 5224592 5224587 -
atttttcttattcaatacctag

SEQ ID NO: 144554 - DNA, 22 bp, Artificial Sequence
  Synthetic oligonucleotide; TTT chr11 5224583 5224604 5224588 5224583 -
ttcttattcaatacctaggtag

SEQ ID NO: 144555 - DNA, 22 bp, Artificial Sequence
  Synthetic oligonucleotide; TTT chr11 5224582 5224603 5224587 5224582 -
tcttattcaatacctaggtagg

SEQ ID NO: 144556 - DNA, 22 bp, Artificial Sequence
  Synthetic oligonucleotide; TTT chr11 5224581 5224602 5224586 5224581 -
cttattcaatacctaggtaggt

SEQ ID NO: 144557 - DNA, 22 bp, Artificial Sequence
  Synthetic oligonucleotide; TTC chr11 5224580 5224601 5224585 5224580 -
ttattcaatacctaggtaggta

SEQ ID NO: 144558 - DNA, 22 bp, Artificial Sequence
  Synthetic oligonucleotide; CTT chr11 5224578 5224599 5224583 5224578 -
attcaatacctaggtaggtaga

SEQ ID NO: 144559 - DNA, 22 bp, Artificial Sequence
  Synthetic oligonucleotide; TTA chr11 5224577 5224598 5224582 5224577 -
ttcaatacctaggtaggtagat

SEQ ID NO: 144560 - DNA, 22 bp, Artificial Sequence
  Synthetic oligonucleotide; TTC chr11 5224574 5224595 5224579 5224574 -
aatacctaggtaggtagatgct

SEQ ID NO: 144561 - DNA, 22 bp, Artificial Sequence
  Synthetic oligonucleotide; CTA chr11 5224566 5224587 5224571 5224566 -
ggtaggtagatgctagattctg

SEQ ID NO: 144562 - DNA, 22 bp, Artificial Sequence
  Synthetic oligonucleotide; CTA chr11 5224551 5224572 5224556 5224551 -
gattctggaaataaaatatgag

SEQ ID NO: 144563 - DNA, 22 bp, Artificial Sequence
  Synthetic oligonucleotide; TTC chr11 5224546 5224567 5224551 5224546 -
tggaaataaaatatgagtctca

SEQ ID NO: 144564 - DNA, 22 bp, Artificial Sequence
  Synthetic oligonucleotide; CTG chr11 5224544 5224565 5224549 5224544 -
gaaataaaatatgagtctcaag

SEQ ID NO: 144565 - DNA, 22 bp, Artificial Sequence
  Synthetic oligonucleotide; CTC chr11 5224525 5224546 5224530 5224525 -
aagtggtccttgtcctctctcc

SEQ ID NO: 144566 - DNA, 22 bp, Artificial Sequence
  Synthetic oligonucleotide; CTT chr11 5224514 5224535 5224519 5224514 -
gtcctctctcccagtcaaattc

SEQ ID NO: 144567 - DNA, 22 bp, Artificial Sequence
  Synthetic oligonucleotide; TTG chr11 5224513 5224534 5224518 5224513 -
tcctctctcccagtcaaattct

SEQ ID NO: 144568 - DNA, 22 bp, Artificial Sequence
  Synthetic oligonucleotide; CTC chr11 5224508 5224529 5224513 5224508 -
tctcccagtcaaattctgaatc

SEQ ID NO: 144569 - DNA, 22 bp, Artificial Sequence
  Synthetic oligonucleotide; CTC chr11 5224506 5224527 5224511 5224506 -
tcccagtcaaattctgaatcta

SEQ ID NO: 144570 - DNA, 22 bp, Artificial Sequence
  Synthetic oligonucleotide; CTC chr11 5224504 5224525 5224509 5224504 -
ccagtcaaattctgaatctagt

SEQ ID NO: 144571 - DNA, 22 bp, Artificial Sequence
  Synthetic oligonucleotide; TTC chr11 5224492 5224513 5224497 5224492 -
tgaatctagttggcaagattct

SEQ ID NO: 144572 - DNA, 22 bp, Artificial Sequence
  Synthetic oligonucleotide; CTG chr11 5224490 5224511 5224495 5224490 -
aatctagttggcaagattctga

SEQ ID NO: 144573 - DNA, 22 bp, Artificial Sequence
  Synthetic oligonucleotide; CTA chr11 5224484 5224505 5224489 5224484 -
gttggcaagattctgaaatcaa

SEQ ID NO: 144574 - DNA, 22 bp, Artificial Sequence
  Synthetic oligonucleotide; TTG chr11 5224480 5224501 5224485 5224480 -
gcaagattctgaaatcaaggca

SEQ ID NO: 144575 - DNA, 22 bp, Artificial Sequence
  Synthetic oligonucleotide; TTC chr11 5224471 5224492 5224476 5224471 -
tgaaatcaaggcatataatcag

SEQ ID NO: 144576 - DNA, 22 bp, Artificial Sequence
  Synthetic oligonucleotide; CTG chr11 5224469 5224490 5224474 5224469 -
aaatcaaggcatataatcagta

SEQ ID NO: 144577 - DNA, 22 bp, Artificial Sequence
  Synthetic oligonucleotide; TTT chr11 5224413 5224434 5224418 5224413 -
tattatatgagagggtgaaacc

SEQ ID NO: 144578 - DNA, 22 bp, Artificial Sequence
  Synthetic oligonucleotide; TTT chr11 5224412 5224433 5224417 5224412 -
attatatgagagggtgaaaccc

SEQ ID NO: 144579 - DNA, 22 bp, Artificial Sequence
  Synthetic oligonucleotide; TTA chr11 5224411 5224432 5224416 5224411 -
ttatatgagagggtgaaaccct

SEQ ID NO: 144580 - DNA, 22 bp, Artificial Sequence
  Synthetic oligonucleotide; TTA chr11 5224408 5224429 5224413 5224408 -
tatgagagggtgaaaccctcaa

SEQ ID NO: 144581 - DNA, 22 bp, Artificial Sequence
  Synthetic oligonucleotide; CTC chr11 5224388 5224409 5224393 5224388 -
aaaatgaaatgaaatcagaccc

SEQ ID NO: 144582 - DNA, 22 bp, Artificial Sequence
  Synthetic oligonucleotide; CTT chr11 5224364 5224385 5224369 5224364 -
gtcttacaccataaacaaaaat

SEQ ID NO: 144583 - DNA, 22 bp, Artificial Sequence
  Synthetic oligonucleotide; TTG chr11 5224363 5224384 5224368 5224363 -
tcttacaccataaacaaaaata

SEQ ID NO: 144584 - DNA, 22 bp, Artificial Sequence
  Synthetic oligonucleotide; CTT chr11 5224359 5224380 5224364 5224359 -
acaccataaacaaaaataaatt

SEQ ID NO: 144585 - DNA, 22 bp, Artificial Sequence
  Synthetic oligonucleotide; TTA chr11 5224358 5224379 5224363 5224358 -
caccataaacaaaaataaattt

SEQ ID NO: 144586 - DNA, 22 bp, Artificial Sequence
  Synthetic oligonucleotide; TTT chr11 5224336 5224357 5224341 5224336 -
gaatgggttaaagaattaaact

SEQ ID NO: 144587 - DNA, 22 bp, Artificial Sequence
  Synthetic oligonucleotide; TTG chr11 5224335 5224356 5224340 5224335 -
aatgggttaaagaattaaacta

SEQ ID NO: 144588 - DNA, 22 bp, Artificial Sequence
  Synthetic oligonucleotide; TTA chr11 5224326 5224347 5224331 5224326 -
aagaattaaactaagacctaaa

SEQ ID NO: 144589 - DNA, 22 bp, Artificial Sequence
  Synthetic oligonucleotide; TTA chr11 5224318 5224339 5224323 5224318 -
aactaagacctaaaaccataaa

SEQ ID NO: 144590 - DNA, 22 bp, Artificial Sequence
  Synthetic oligonucleotide; CTA chr11 5224313 5224334 5224318 5224313 -
agacctaaaaccataaaaattt

SEQ ID NO: 144591 - DNA, 22 bp, Artificial Sequence
  Synthetic oligonucleotide; CTA chr11 5224306 5224327 5224311 5224306 -
aaaccataaaaatttttaaaga

SEQ ID NO: 144592 - DNA, 22 bp, Artificial Sequence
  Synthetic oligonucleotide; TTT chr11 5224291 5224312 5224296 5224291 -
ttaaagaaatcaaaagaagaaa

SEQ ID NO: 144593 - DNA, 22 bp, Artificial Sequence
  Synthetic oligonucleotide; TTT chr11 5224290 5224311 5224295 5224290 -
taaagaaatcaaaagaagaaaa

SEQ ID NO: 144594 - DNA, 22 bp, Artificial Sequence
  Synthetic oligonucleotide; TTT chr11 5224289 5224310 5224294 5224289 -
aaagaaatcaaaagaagaaaat

SEQ ID NO: 144595 - DNA, 22 bp, Artificial Sequence
  Synthetic oligonucleotide; TTA chr11 5224288 5224309 5224293 5224288 -
aagaaatcaaaagaagaaaatt

SEQ ID NO: 144596 - DNA, 22 bp, Artificial Sequence
  Synthetic oligonucleotide; TTC chr11 5224265 5224286 5224270 5224265 -
taatattcacgttgcagccgtt

SEQ ID NO: 144597 - DNA, 22 bp, Artificial Sequence
  Synthetic oligonucleotide; CTA chr11 5224263 5224284 5224268 5224263 -
atattcacgttgcagccgtttt

SEQ ID NO: 144598 - DNA, 22 bp, Artificial Sequence
  Synthetic oligonucleotide; TTC chr11 5224257 5224278 5224262 5224257 -
acgttgcagccgttttttgaat

SEQ ID NO: 144599 - DNA, 22 bp, Artificial Sequence
  Synthetic oligonucleotide; TTG chr11 5224251 5224272 5224256 5224251 -
cagccgttttttgaatttgata

SEQ ID NO: 144600 - DNA, 22 bp, Artificial Sequence
  Synthetic oligonucleotide; TTT chr11 5224242 5224263 5224247 5224242 -
tttgaatttgatatgagaagca

SEQ ID NO: 144601 - DNA, 22 bp, Artificial Sequence
  Synthetic oligonucleotide; TTT chr11 5224241 5224262 5224246 5224241 -
ttgaatttgatatgagaagcaa

SEQ ID NO: 144602 - DNA, 22 bp, Artificial Sequence
  Synthetic oligonucleotide; TTT chr11 5224240 5224261 5224245 5224240 -
tgaatttgatatgagaagcaaa

SEQ ID NO: 144603 - DNA, 22 bp, Artificial Sequence
  Synthetic oligonucleotide; TTT chr11 5224239 5224260 5224244 5224239 -
gaatttgatatgagaagcaaag

SEQ ID NO: 144604 - DNA, 22 bp, Artificial Sequence
  Synthetic oligonucleotide; TTG chr11 5224238 5224259 5224243 5224238 -
aatttgatatgagaagcaaagg

SEQ ID NO: 144605 - DNA, 22 bp, Artificial Sequence
  Synthetic oligonucleotide; TTT chr11 5224233 5224254 5224238 5224233 -
gatatgagaagcaaaggcaaca

SEQ ID NO: 144606 - DNA, 22 bp, Artificial Sequence
  Synthetic oligonucleotide; TTG chr11 5224232 5224253 5224237 5224232 -
atatgagaagcaaaggcaacaa

SEQ ID NO: 144607 - DNA, 22 bp, Artificial Sequence
  Synthetic oligonucleotide; CTA chr11 5224185 5224206 5224190 5224185 -
catcaaactaaaaaatttccac

SEQ ID NO: 144608 - DNA, 22 bp, Artificial Sequence
  Synthetic oligonucleotide; CTA chr11 5224175 5224196 5224180 5224175 -
aaaaatttccacacaaaaaaca

SEQ ID NO: 144609 - DNA, 22 bp, Artificial Sequence
  Synthetic oligonucleotide; TTT chr11 5224167 5224188 5224172 5224167 -
ccacacaaaaaacaaaacaatg

SEQ ID NO: 144610 - DNA, 22 bp, Artificial Sequence
  Synthetic oligonucleotide; TTC chr11 5224166 5224187 5224171 5224166 -
cacacaaaaaacaaaacaatga

SEQ ID NO: 144611 - DNA, 22 bp, Artificial Sequence
  Synthetic oligonucleotide; TTT chr11 5224110 5224131 5224115 5224110 -
gcaaaccaaatatttcttaaat

SEQ ID NO: 144612 - DNA, 22 bp, Artificial Sequence
  Synthetic oligonucleotide; TTG chr11 5224109 5224130 5224114 5224109 -
caaaccaaatatttcttaaata

SEQ ID NO: 144613 - DNA, 22 bp, Artificial Sequence
  Synthetic oligonucleotide; TTT chr11 5224095 5224116 5224100 5224095 -
cttaaatattttggttaatatc

SEQ ID NO: 144614 - DNA, 22 bp, Artificial Sequence
  Synthetic oligonucleotide; TTC chr11 5224094 5224115 5224099 5224094 -
ttaaatattttggttaatatcc

SEQ ID NO: 144615 - DNA, 22 bp, Artificial Sequence
  Synthetic oligonucleotide; CTT chr11 5224092 5224113 5224097 5224092 -
aaatattttggttaatatccaa

SEQ ID NO: 144616 - DNA, 22 bp, Artificial Sequence
  Synthetic oligonucleotide; TTA chr11 5224091 5224112 5224096 5224091 -
aatattttggttaatatccaaa

SEQ ID NO: 144617 - DNA, 22 bp, Artificial Sequence
  Synthetic oligonucleotide; TTT chr11 5224084 5224105 5224089 5224084 -
tggttaatatccaaaatatata

SEQ ID NO: 144618 - DNA, 22 bp, Artificial Sequence
  Synthetic oligonucleotide; TTT chr11 5224083 5224104 5224088 5224083 -
ggttaatatccaaaatatataa

SEQ ID NO: 144619 - DNA, 22 bp, Artificial Sequence
  Synthetic oligonucleotide; TTG chr11 5224082 5224103 5224087 5224082 -
gttaatatccaaaatatataag

SEQ ID NO: 144620 - DNA, 22 bp, Artificial Sequence
  Synthetic oligonucleotide; TTA chr11 5224078 5224099 5224083 5224078 -
atatccaaaatatataagaaac

SEQ ID NO: 144621 - DNA, 22 bp, Artificial Sequence
  Synthetic oligonucleotide; TTC chr11 5224045 5224066 5224050 5224045 -
aataacaaacaaaaaattaaaa

SEQ ID NO: 144622 - DNA, 22 bp, Artificial Sequence
  Synthetic oligonucleotide; TTA chr11 5224026 5224047 5224031 5224026 -
aaaataggaaaataaaaaaatt

SEQ ID NO: 144623 - DNA, 22 bp, Artificial Sequence
  Synthetic oligonucleotide; TTA chr11 5224003 5224024 5224008 5224003 -
aaaagaagaaaatcctgccatt

SEQ ID NO: 144624 - DNA, 22 bp, Artificial Sequence
  Synthetic oligonucleotide; CTG chr11 5223986 5224007 5223991 5223986 -
ccatttatggcagaattgatga

SEQ ID NO: 144625 - DNA, 22 bp, Artificial Sequence
  Synthetic oligonucleotide; TTT chr11 5223980 5224001 5223985 5223980 -
atggcagaattgatgaacctgg

SEQ ID NO: 144626 - DNA, 22 bp, Artificial Sequence
  Synthetic oligonucleotide; TTA chr11 5223979 5224000 5223984 5223979 -
tggcagaattgatgaacctgga

SEQ ID NO: 144627 - DNA, 22 bp, Artificial Sequence
  Synthetic oligonucleotide; TTG chr11 5223968 5223989 5223973 5223968 -
atgaacctggaggatgtaaaac

SEQ ID NO: 144628 - DNA, 22 bp, Artificial Sequence
  Synthetic oligonucleotide; CTG chr11 5223959 5223980 5223964 5223959 -
gaggatgtaaaactaagaaaaa

SEQ ID NO: 144629 - DNA, 22 bp, Artificial Sequence
  Synthetic oligonucleotide; CTA chr11 5223944 5223965 5223949 5223944 -
agaaaaataagcctgacacaaa

SEQ ID NO: 144630 - DNA, 22 bp, Artificial Sequence
  Synthetic oligonucleotide; CTG chr11 5223929 5223950 5223934 5223929 -
acacaaaaagacaaatactaca

SEQ ID NO: 144631 - DNA, 22 bp, Artificial Sequence
  Synthetic oligonucleotide; CTA chr11 5223909 5223930 5223914 5223909 -
cacaaccttgctcatatgtgaa

SEQ ID NO: 144632 - DNA, 22 bp, Artificial Sequence
  Synthetic oligonucleotide; CTT chr11 5223900 5223921 5223905 5223900 -
gctcatatgtgaaacataaaaa

SEQ ID NO: 144633 - DNA, 22 bp, Artificial Sequence
  Synthetic oligonucleotide; TTG chr11 5223899 5223920 5223904 5223899 -
ctcatatgtgaaacataaaaaa

SEQ ID NO: 144634 - DNA, 22 bp, Artificial Sequence
  Synthetic oligonucleotide; CTC chr11 5223896 5223917 5223901 5223896 -
atatgtgaaacataaaaaagtc

SEQ ID NO: 144635 - DNA, 22 bp, Artificial Sequence
  Synthetic oligonucleotide; CTC chr11 5223870 5223891 5223875 5223870 -
tcatggaaacagacagtagagg

SEQ ID NO: 144636 - DNA, 22 bp, Artificial Sequence
  Synthetic oligonucleotide; CTC chr11 5223868 5223889 5223873 5223868 -
atggaaacagacagtagaggta

SEQ ID NO: 144637 - DNA, 22 bp, Artificial Sequence
  Synthetic oligonucleotide; TTT chr11 5223840 5223861 5223845 5223840 -
ccaggggttgggggtgggagaa

SEQ ID NO: 144638 - DNA, 22 bp, Artificial Sequence
  Synthetic oligonucleotide; TTC chr11 5223839 5223860 5223844 5223839 -
caggggttgggggtgggagaat

SEQ ID NO: 144639 - DNA, 22 bp, Artificial Sequence
  Synthetic oligonucleotide; TTG chr11 5223830 5223851 5223835 5223830 -
ggggtgggagaatcaggaaact

SEQ ID NO: 144640 - DNA, 22 bp, Artificial Sequence
  Synthetic oligonucleotide; CTA chr11 5223807 5223828 5223812 5223807 -
ttactcaaagggtataaaattt

SEQ ID NO: 144641 - DNA, 22 bp, Artificial Sequence
  Synthetic oligonucleotide; TTA chr11 5223804 5223825 5223809 5223804 -
ctcaaagggtataaaatttcag

SEQ ID NO: 144642 - DNA, 22 bp, Artificial Sequence
  Synthetic oligonucleotide; CTC chr11 5223801 5223822 5223806 5223801 -
aaagggtataaaatttcagtta

SEQ ID NO: 144643 - DNA, 22 bp, Artificial Sequence
  Synthetic oligonucleotide; TTT chr11 5223785 5223806 5223790 5223785 -
cagttatgtgggatgaataaat

SEQ ID NO: 144644 - DNA, 22 bp, Artificial Sequence
  Synthetic oligonucleotide; TTC chr11 5223784 5223805 5223789 5223784 -
agttatgtgggatgaataaatt

SEQ ID NO: 144645 - DNA, 22 bp, Artificial Sequence
  Synthetic oligonucleotide; TTA chr11 5223779 5223800 5223784 5223779 -
tgtgggatgaataaattctaga

SEQ ID NO: 144646 - DNA, 22 bp, Artificial Sequence
  Synthetic oligonucleotide; TTC chr11 5223761 5223782 5223766 5223761 -
tagatatctaatgtacagcatc

SEQ ID NO: 144647 - DNA, 22 bp, Artificial Sequence
  Synthetic oligonucleotide; CTA chr11 5223759 5223780 5223764 5223759 -
gatatctaatgtacagcatcgt

SEQ ID NO: 144648 - DNA, 22 bp, Artificial Sequence
  Synthetic oligonucleotide; CTA chr11 5223751 5223772 5223756 5223751 -
atgtacagcatcgtgactgtag

SEQ ID NO: 144649 - DNA, 22 bp, Artificial Sequence
  Synthetic oligonucleotide; CTG chr11 5223732 5223753 5223737 5223732 -
tagttaattgtactgtaagtat

SEQ ID NO: 144650 - DNA, 22 bp, Artificial Sequence
  Synthetic oligonucleotide; TTA chr11 5223726 5223747 5223731 5223726 -
attgtactgtaagtatatttaa

SEQ ID NO: 144651 - DNA, 22 bp, Artificial Sequence
  Synthetic oligonucleotide; TTG chr11 5223722 5223743 5223727 5223722 -
tactgtaagtatatttaaaatt

SEQ ID NO: 144652 - DNA, 22 bp, Artificial Sequence
  Synthetic oligonucleotide; CTG chr11 5223717 5223738 5223722 5223717 -
taagtatatttaaaatttgcaa

SEQ ID NO: 144653 - DNA, 22 bp, Artificial Sequence
  Synthetic oligonucleotide; TTT chr11 5223706 5223727 5223711 5223706 -
aaaatttgcaaagagagtagat

SEQ ID NO: 144654 - DNA, 22 bp, Artificial Sequence
  Synthetic oligonucleotide; TTA chr11 5223705 5223726 5223710 5223705 -
aaatttgcaaagagagtagatt

SEQ ID NO: 144655 - DNA, 22 bp, Artificial Sequence
  Synthetic oligonucleotide; TTT chr11 5223699 5223720 5223704 5223699 -
gcaaagagagtagatttttttt

SEQ ID NO: 144656 - DNA, 22 bp, Artificial Sequence
  Synthetic oligonucleotide; TTG chr11 5223698 5223719 5223703 5223698 -
caaagagagtagattttttttt

SEQ ID NO: 144657 - DNA, 22 bp, Artificial Sequence
  Synthetic oligonucleotide; TTT chr11 5223682 5223703 5223687 5223682 -
ttttttttttttagatggagtt

SEQ ID NO: 144658 - DNA, 22 bp, Artificial Sequence
  Synthetic oligonucleotide; TTT chr11 5223681 5223702 5223686 5223681 -
tttttttttttagatggagttt

SEQ ID NO: 144659 - DNA, 22 bp, Artificial Sequence
  Synthetic oligonucleotide; TTT chr11 5223680 5223701 5223685 5223680 -
ttttttttttagatggagtttt

SEQ ID NO: 144660 - DNA, 22 bp, Artificial Sequence
  Synthetic oligonucleotide; TTT chr11 5223679 5223700 5223684 5223679 -
tttttttttagatggagttttg

SEQ ID NO: 144661 - DNA, 22 bp, Artificial Sequence
  Synthetic oligonucleotide; TTT chr11 5223678 5223699 5223683 5223678 -
ttttttttagatggagttttgc

SEQ ID NO: 144662 - DNA, 22 bp, Artificial Sequence
  Synthetic oligonucleotide; TTT chr11 5223677 5223698 5223682 5223677 -
tttttttagatggagttttgct

SEQ ID NO: 144663 - DNA, 22 bp, Artificial Sequence
  Synthetic oligonucleotide; TTT chr11 5223676 5223697 5223681 5223676 -
ttttttagatggagttttgctc

SEQ ID NO: 144664 - DNA, 22 bp, Artificial Sequence
  Synthetic oligonucleotide; TTT chr11 5223675 5223696 5223680 5223675 -
tttttagatggagttttgctct

SEQ ID NO: 144665 - DNA, 22 bp, Artificial Sequence
  Synthetic oligonucleotide; TTT chr11 5223674 5223695 5223679 5223674 -
ttttagatggagttttgctctt

SEQ ID NO: 144666 - DNA, 22 bp, Artificial Sequence
  Synthetic oligonucleotide; TTT chr11 5223673 5223694 5223678 5223673 -
tttagatggagttttgctcttg

SEQ ID NO: 144667 - DNA, 22 bp, Artificial Sequence
  Synthetic oligonucleotide; TTT chr11 5223672 5223693 5223677 5223672 -
ttagatggagttttgctcttgt

SEQ ID NO: 144668 - DNA, 22 bp, Artificial Sequence
  Synthetic oligonucleotide; TTT chr11 5223671 5223692 5223676 5223671 -
tagatggagttttgctcttgtt

SEQ ID NO: 144669 - DNA, 22 bp, Artificial Sequence
  Synthetic oligonucleotide; TTT chr11 5223670 5223691 5223675 5223670 -
agatggagttttgctcttgttg

SEQ ID NO: 144670 - DNA, 22 bp, Artificial Sequence
  Synthetic oligonucleotide; TTA chr11 5223669 5223690 5223674 5223669 -
gatggagttttgctcttgttgt

SEQ ID NO: 144671 - DNA, 22 bp, Artificial Sequence
  Synthetic oligonucleotide; TTT chr11 5223659 5223680 5223664 5223659 -
tgctcttgttgtccaggctgga

SEQ ID NO: 144672 - DNA, 22 bp, Artificial Sequence
  Synthetic oligonucleotide; TTT chr11 5223658 5223679 5223663 5223658 -
gctcttgttgtccaggctggag

SEQ ID NO: 144673 - DNA, 22 bp, Artificial Sequence
  Synthetic oligonucleotide; TTG chr11 5223657 5223678 5223662 5223657 -
ctcttgttgtccaggctggagt

SEQ ID NO: 144674 - DNA, 22 bp, Artificial Sequence
  Synthetic oligonucleotide; CTC chr11 5223654 5223675 5223659 5223654 -
ttgttgtccaggctggagtgca

SEQ ID NO: 144675 - DNA, 22 bp, Artificial Sequence
  Synthetic oligonucleotide; CTT chr11 5223652 5223673 5223657 5223652 -
gttgtccaggctggagtgcaat

SEQ ID NO: 144676 - DNA, 22 bp, Artificial Sequence
  Synthetic oligonucleotide; TTG chr11 5223651 5223672 5223656 5223651 -
ttgtccaggctggagtgcaatg

SEQ ID NO: 144677 - DNA, 22 bp, Artificial Sequence
  Synthetic oligonucleotide; TTG chr11 5223648 5223669 5223653 5223648 -
tccaggctggagtgcaatggca

SEQ ID NO: 144678 - DNA, 22 bp, Artificial Sequence
  Synthetic oligonucleotide; CTG chr11 5223639 5223660 5223644 5223639 -
gagtgcaatggcaagatcttgg

SEQ ID NO: 144679 - DNA, 22 bp, Artificial Sequence
  Synthetic oligonucleotide; CTT chr11 5223619 5223640 5223624 5223619 -
ggctcactgcaacctccgcctc

SEQ ID NO: 144680 - DNA, 22 bp, Artificial Sequence
  Synthetic oligonucleotide; TTG chr11 5223618 5223639 5223623 5223618 -
gctcactgcaacctccgcctcc

SEQ ID NO: 144681 - DNA, 22 bp, Artificial Sequence
  Synthetic oligonucleotide; CTC chr11 5223614 5223635 5223619 5223614 -
actgcaacctccgcctcctggg

SEQ ID NO: 144682 - DNA, 22 bp, Artificial Sequence
  Synthetic oligonucleotide; CTG chr11 5223610 5223631 5223615 5223610 -
caacctccgcctcctgggttca

SEQ ID NO: 144683 - DNA, 22 bp, Artificial Sequence
  Synthetic oligonucleotide; CTC chr11 5223603 5223624 5223608 5223603 -
cgcctcctgggttcaagcaaat

SEQ ID NO: 144684 - DNA, 22 bp, Artificial Sequence
  Synthetic oligonucleotide; CTC chr11 5223597 5223618 5223602 5223597 -
ctgggttcaagcaaatctcctg

SEQ ID NO: 144685 - DNA, 22 bp, Artificial Sequence
  Synthetic oligonucleotide; CTG chr11 5223594 5223615 5223599 5223594 -
ggttcaagcaaatctcctgcct

SEQ ID NO: 144686 - DNA, 22 bp, Artificial Sequence
  Synthetic oligonucleotide; TTC chr11 5223589 5223610 5223594 5223589 -
aagcaaatctcctgcctcagcc

SEQ ID NO: 144687 - DNA, 22 bp, Artificial Sequence
  Synthetic oligonucleotide; CTC chr11 5223578 5223599 5223583 5223578 -
ctgcctcagcctcccgagtagc

SEQ ID NO: 144688 - DNA, 22 bp, Artificial Sequence
  Synthetic oligonucleotide; CTG chr11 5223575 5223596 5223580 5223575 -
cctcagcctcccgagtagctgg

SEQ ID NO: 144689 - DNA, 22 bp, Artificial Sequence
  Synthetic oligonucleotide; CTC chr11 5223571 5223592 5223576 5223571 -
agcctcccgagtagctgggatt

SEQ ID NO: 144690 - DNA, 22 bp, Artificial Sequence
  Synthetic oligonucleotide; CTC chr11 5223565 5223586 5223570 5223565 -
ccgagtagctgggattacaggc

SEQ ID NO: 144691 - DNA, 22 bp, Artificial Sequence
  Synthetic oligonucleotide; CTG chr11 5223554 5223575 5223559 5223554 -
ggattacaggcatgcgacacca

SEQ ID NO: 144692 - DNA, 22 bp, Artificial Sequence
  Synthetic oligonucleotide; TTA chr11 5223548 5223569 5223553 5223548 -
caggcatgcgacaccatgccca

SEQ ID NO: 144693 - DNA, 22 bp, Artificial Sequence
  Synthetic oligonucleotide; CTA chr11 5223522 5223543 5223527 5223522 -
attttgtatttttagtagagac

SEQ ID NO: 144694 - DNA, 22 bp, Artificial Sequence
  Synthetic oligonucleotide; TTT chr11 5223518 5223539 5223523 5223518 -
tgtatttttagtagagacgggg

SEQ ID NO: 144695 - DNA, 22 bp, Artificial Sequence
  Synthetic oligonucleotide; TTT chr11 5223517 5223538 5223522 5223517 -
gtatttttagtagagacggggt

SEQ ID NO: 144696 - DNA, 22 bp, Artificial Sequence
  Synthetic oligonucleotide; TTG chr11 5223516 5223537 5223521 5223516 -
tatttttagtagagacggggtt

SEQ ID NO: 144697 - DNA, 22 bp, Artificial Sequence
  Synthetic oligonucleotide; TTT chr11 5223511 5223532 5223516 5223511 -
ttagtagagacggggtttctcc

SEQ ID NO: 144698 - DNA, 22 bp, Artificial Sequence
  Synthetic oligonucleotide; TTT chr11 5223510 5223531 5223515 5223510 -
tagtagagacggggtttctcca

SEQ ID NO: 144699 - DNA, 22 bp, Artificial Sequence
  Synthetic oligonucleotide; TTT chr11 5223509 5223530 5223514 5223509 -
agtagagacggggtttctccat

SEQ ID NO: 144700 - DNA, 22 bp, Artificial Sequence
  Synthetic oligonucleotide; TTA chr11 5223508 5223529 5223513 5223508 -
gtagagacggggtttctccatg

SEQ ID NO: 144701 - DNA, 22 bp, Artificial Sequence
  Synthetic oligonucleotide; TTT chr11 5223493 5223514 5223498 5223493 -
ctccatgttggtcaggctgatc

SEQ ID NO: 144702 - DNA, 22 bp, Artificial Sequence
  Synthetic oligonucleotide; TTC chr11 5223492 5223513 5223497 5223492 -
tccatgttggtcaggctgatcc

SEQ ID NO: 144703 - DNA, 22 bp, Artificial Sequence
  Synthetic oligonucleotide; CTC chr11 5223490 5223511 5223495 5223490 -
catgttggtcaggctgatccgc

SEQ ID NO: 144704 - DNA, 22 bp, Artificial Sequence
  Synthetic oligonucleotide; TTG chr11 5223483 5223504 5223488 5223483 -
gtcaggctgatccgcctgcctc

SEQ ID NO: 144705 - DNA, 22 bp, Artificial Sequence
  Synthetic oligonucleotide; CTG chr11 5223474 5223495 5223479 5223474 -
atccgcctgcctcggccaccca

SEQ ID NO: 144706 - DNA, 22 bp, Artificial Sequence
  Synthetic oligonucleotide; CTG chr11 5223465 5223486 5223470 5223465 -
cctcggccacccaaagggctgg

SEQ ID NO: 144707 - DNA, 22 bp, Artificial Sequence
  Synthetic oligonucleotide; CTC chr11 5223461 5223482 5223466 5223461 -
ggccacccaaagggctgggatt

SEQ ID NO: 144708 - DNA, 22 bp, Artificial Sequence
  Synthetic oligonucleotide; CTG chr11 5223444 5223465 5223449 5223444 -
ggattacaggcgtgagccaccg

SEQ ID NO: 144709 - DNA, 22 bp, Artificial Sequence
  Synthetic oligonucleotide; TTA chr11 5223438 5223459 5223443 5223438 -
caggcgtgagccaccgggcctg

SEQ ID NO: 144710 - DNA, 22 bp, Artificial Sequence
  Synthetic oligonucleotide; CTG chr11 5223416 5223437 5223421 5223416 -
gccgagagtagatcttaaaagc

SEQ ID NO: 144711 - DNA, 22 bp, Artificial Sequence
  Synthetic oligonucleotide; CTT chr11 5223400 5223421 5223405 5223400 -
aaaagcatttaccacaagaaaa

SEQ ID NO: 144712 - DNA, 22 bp, Artificial Sequence
  Synthetic oligonucleotide; TTA chr11 5223399 5223420 5223404 5223399 -
aaagcatttaccacaagaaaaa

SEQ ID NO: 144713 - DNA, 22 bp, Artificial Sequence
  Synthetic oligonucleotide; TTT chr11 5223390 5223411 5223395 5223390 -
accacaagaaaaaggtaactat

SEQ ID NO: 144714 - DNA, 22 bp, Artificial Sequence
  Synthetic oligonucleotide; TTA chr11 5223389 5223410 5223394 5223389 -
ccacaagaaaaaggtaactatg

SEQ ID NO: 144715 - DNA, 22 bp, Artificial Sequence
  Synthetic oligonucleotide; CTA chr11 5223369 5223390 5223374 5223369 -
tgtgagataatgggtatgttaa

SEQ ID NO: 144716 - DNA, 22 bp, Artificial Sequence
  Synthetic oligonucleotide; TTA chr11 5223348 5223369 5223353 5223348 -
attagcttgattgtggtaatca

SEQ ID NO: 144717 - DNA, 22 bp, Artificial Sequence
  Synthetic oligonucleotide; TTA chr11 5223344 5223365 5223349 5223344 -
gcttgattgtggtaatcatttc

SEQ ID NO: 144718 - DNA, 22 bp, Artificial Sequence
  Synthetic oligonucleotide; CTT chr11 5223340 5223361 5223345 5223340 -
gattgtggtaatcatttcacaa

SEQ ID NO: 144719 - DNA, 22 bp, Artificial Sequence
  Synthetic oligonucleotide; TTG chr11 5223339 5223360 5223344 5223339 -
attgtggtaatcatttcacaag

SEQ ID NO: 144720 - DNA, 22 bp, Artificial Sequence
  Synthetic oligonucleotide; TTG chr11 5223335 5223356 5223340 5223335 -
tggtaatcatttcacaaggtat

SEQ ID NO: 144721 - DNA, 22 bp, Artificial Sequence
  Synthetic oligonucleotide; TTT chr11 5223323 5223344 5223328 5223323 -
cacaaggtatacatatattaaa

SEQ ID NO: 144722 - DNA, 22 bp, Artificial Sequence
  Synthetic oligonucleotide; TTC chr11 5223322 5223343 5223327 5223322 -
acaaggtatacatatattaaaa

SEQ ID NO: 144723 - DNA, 22 bp, Artificial Sequence
  Synthetic oligonucleotide; TTA chr11 5223303 5223324 5223308 5223303 -
aaacatcatgttgtacacctta

SEQ ID NO: 144724 - DNA, 22 bp, Artificial Sequence
  Synthetic oligonucleotide; TTG chr11 5223290 5223311 5223295 5223290 -
tacaccttaaatatatacaatt

SEQ ID NO: 144725 - DNA, 22 bp, Artificial Sequence
  Synthetic oligonucleotide; CTT chr11 5223282 5223303 5223287 5223282 -
aaatatatacaatttttatttg

SEQ ID NO: 144726 - DNA, 22 bp, Artificial Sequence
  Synthetic oligonucleotide; TTA chr11 5223281 5223302 5223286 5223281 -
aatatatacaatttttatttgt

SEQ ID NO: 144727 - DNA, 22 bp, Artificial Sequence
  Synthetic oligonucleotide; TTT chr11 5223267 5223288 5223272 5223267 -
ttatttgtgaatgatacctcaa

SEQ ID NO: 144728 - DNA, 22 bp, Artificial Sequence
  Synthetic oligonucleotide; TTT chr11 5223266 5223287 5223271 5223266 -
tatttgtgaatgatacctcaat

SEQ ID NO: 144729 - DNA, 22 bp, Artificial Sequence
  Synthetic oligonucleotide; TTT chr11 5223265 5223286 5223270 5223265 -
atttgtgaatgatacctcaata

SEQ ID NO: 144730 - DNA, 22 bp, Artificial Sequence
  Synthetic oligonucleotide; TTA chr11 5223264 5223285 5223269 5223264 -
tttgtgaatgatacctcaataa

SEQ ID NO: 144731 - DNA, 22 bp, Artificial Sequence
  Synthetic oligonucleotide; TTT chr11 5223261 5223282 5223266 5223261 -
gtgaatgatacctcaataaagt

SEQ ID NO: 144732 - DNA, 22 bp, Artificial Sequence
  Synthetic oligonucleotide; TTG chr11 5223260 5223281 5223265 5223260 -
tgaatgatacctcaataaagtt

SEQ ID NO: 144733 - DNA, 22 bp, Artificial Sequence
  Synthetic oligonucleotide; CTC chr11 5223247 5223268 5223252 5223247 -
aataaagttgaagaataataaa

SEQ ID NO: 144734 - DNA, 22 bp, Artificial Sequence
  Synthetic oligonucleotide; TTG chr11 5223237 5223258 5223242 5223237 -
aagaataataaaaaagaataga

SEQ ID NO: 144735 - DNA, 22 bp, Artificial Sequence
  Synthetic oligonucleotide; TTA chr11 5223201 5223222 5223206 5223201 -
aaaaactaaaaaataaaaaaat

SEQ ID NO: 144736 - DNA, 22 bp, Artificial Sequence
  Synthetic oligonucleotide; CTA chr11 5223193 5223214 5223198 5223193 -
aaaaataaaaaaatgcatcttg

SEQ ID NO: 144737 - DNA, 22 bp, Artificial Sequence
  Synthetic oligonucleotide; CTT chr11 5223172 5223193 5223177 5223172 -
gatgattagaattgcattcttg

SEQ ID NO: 144738 - DNA, 22 bp, Artificial Sequence
  Synthetic oligonucleotide; TTG chr11 5223171 5223192 5223176 5223171 -
atgattagaattgcattcttga

SEQ ID NO: 144739 - DNA, 22 bp, Artificial Sequence
  Synthetic oligonucleotide; TTA chr11 5223164 5223185 5223169 5223164 -
gaattgcattcttgatttttca

SEQ ID NO: 144740 - DNA, 22 bp, Artificial Sequence
  Synthetic oligonucleotide; TTG chr11 5223158 5223179 5223163 5223158 -
cattcttgatttttcagataca

SEQ ID NO: 144741 - DNA, 22 bp, Artificial Sequence
  Synthetic oligonucleotide; TTC chr11 5223153 5223174 5223158 5223153 -
ttgatttttcagatacaaatat

SEQ ID NO: 144742 - DNA, 22 bp, Artificial Sequence
  Synthetic oligonucleotide; CTT chr11 5223151 5223172 5223156 5223151 -
gatttttcagatacaaatatcc

SEQ ID NO: 144743 - DNA, 22 bp, Artificial Sequence
  Synthetic oligonucleotide; TTG chr11 5223150 5223171 5223155 5223150 -
atttttcagatacaaatatcca

SEQ ID NO: 144744 - DNA, 22 bp, Artificial Sequence
  Synthetic oligonucleotide; TTT chr11 5223146 5223167 5223151 5223146 -
ttcagatacaaatatccatttg

SEQ ID NO: 144745 - DNA, 22 bp, Artificial Sequence
  Synthetic oligonucleotide; TTT chr11 5223145 5223166 5223150 5223145 -
tcagatacaaatatccatttga

SEQ ID NO: 144746 - DNA, 22 bp, Artificial Sequence
  Synthetic oligonucleotide; TTT chr11 5223144 5223165 5223149 5223144 -
cagatacaaatatccatttgac

SEQ ID NO: 144747 - DNA, 22 bp, Artificial Sequence
  Synthetic oligonucleotide; TTC chr11 5223143 5223164 5223148 5223143 -
agatacaaatatccatttgact

SEQ ID NO: 144748 - DNA, 22 bp, Artificial Sequence
  Synthetic oligonucleotide; TTT chr11 5223125 5223146 5223130 5223125 -
gactgtttactcttttccaaaa

SEQ ID NO: 144749 - DNA, 22 bp, Artificial Sequence
  Synthetic oligonucleotide; TTG chr11 5223124 5223145 5223129 5223124 -
actgtttactcttttccaaaac

SEQ ID NO: 144750 - DNA, 22 bp, Artificial Sequence
  Synthetic oligonucleotide; CTG chr11 5223120 5223141 5223125 5223120 -
tttactcttttccaaaacaata

SEQ ID NO: 144751 - DNA, 22 bp, Artificial Sequence
  Synthetic oligonucleotide; TTT chr11 5223117 5223138 5223122 5223117 -
actcttttccaaaacaatacaa

SEQ ID NO: 144752 - DNA, 22 bp, Artificial Sequence
  Synthetic oligonucleotide; TTA chr11 5223116 5223137 5223121 5223116 -
ctcttttccaaaacaatacaat

SEQ ID NO: 144753 - DNA, 22 bp, Artificial Sequence
  Synthetic oligonucleotide; CTC chr11 5223113 5223134 5223118 5223113 -
ttttccaaaacaatacaataaa

SEQ ID NO: 144754 - DNA, 22 bp, Artificial Sequence
  Synthetic oligonucleotide; CTT chr11 5223111 5223132 5223116 5223111 -
ttccaaaacaatacaataaatt

SEQ ID NO: 144755 - DNA, 22 bp, Artificial Sequence
  Synthetic oligonucleotide; TTT chr11 5223110 5223131 5223115 5223110 -
tccaaaacaatacaataaattt

SEQ ID NO: 144756 - DNA, 22 bp, Artificial Sequence
  Synthetic oligonucleotide; TTT chr11 5223109 5223130 5223114 5223109 -
ccaaaacaatacaataaatttt

SEQ ID NO: 144757 - DNA, 22 bp, Artificial Sequence
  Synthetic oligonucleotide; TTC chr11 5223108 5223129 5223113 5223108 -
caaaacaatacaataaatttta

SEQ ID NO: 144758 - DNA, 22 bp, Artificial Sequence
  Synthetic oligonucleotide; TTT chr11 5223088 5223109 5223093 5223088 -
tagcactttatcttcattttcc

SEQ ID NO: 144759 - DNA, 22 bp, Artificial Sequence
  Synthetic oligonucleotide; TTT chr11 5223087 5223108 5223092 5223087 -
agcactttatcttcattttccc

SEQ ID NO: 144760 - DNA, 22 bp, Artificial Sequence
  Synthetic oligonucleotide; TTA chr11 5223086 5223107 5223091 5223086 -
gcactttatcttcattttcccc

SEQ ID NO: 144761 - DNA, 22 bp, Artificial Sequence
  Synthetic oligonucleotide; CTT chr11 5223080 5223101 5223085 5223080 -
tatcttcattttccccttccca

SEQ ID NO: 144762 - DNA, 22 bp, Artificial Sequence
  Synthetic oligonucleotide; TTT chr11 5223079 5223100 5223084 5223079 -
atcttcattttccccttcccaa

SEQ ID NO: 144763 - DNA, 22 bp, Artificial Sequence
  Synthetic oligonucleotide; TTA chr11 5223078 5223099 5223083 5223078 -
tcttcattttccccttcccaat

SEQ ID NO: 144764 - DNA, 22 bp, Artificial Sequence
  Synthetic oligonucleotide; CTT chr11 5223074 5223095 5223079 5223074 -
cattttccccttcccaatctat

SEQ ID NO: 144765 - DNA, 22 bp, Artificial Sequence
  Synthetic oligonucleotide; TTC chr11 5223073 5223094 5223078 5223073 -
attttccccttcccaatctata

SEQ ID NO: 144766 - DNA, 22 bp, Artificial Sequence
  Synthetic oligonucleotide; TTT chr11 5223069 5223090 5223074 5223069 -
tccccttcccaatctataatta

SEQ ID NO: 144767 - DNA, 22 bp, Artificial Sequence
  Synthetic oligonucleotide; TTT chr11 5223068 5223089 5223073 5223068 -
ccccttcccaatctataattat

SEQ ID NO: 144768 - DNA, 22 bp, Artificial Sequence
  Synthetic oligonucleotide; TTC chr11 5223067 5223088 5223072 5223067 -
cccttcccaatctataattata

SEQ ID NO: 144769 - DNA, 22 bp, Artificial Sequence
  Synthetic oligonucleotide; CTT chr11 5223062 5223083 5223067 5223062 -
cccaatctataattatatatat

SEQ ID NO: 144770 - DNA, 22 bp, Artificial Sequence
  Synthetic oligonucleotide; TTC chr11 5223061 5223082 5223066 5223061 -
ccaatctataattatatatata

SEQ ID NO: 144771 - DNA, 22 bp, Artificial Sequence
  Synthetic oligonucleotide; CTA chr11 5223053 5223074 5223058 5223053 -
taattatatatatatatatttt

SEQ ID NO: 144772 - DNA, 22 bp, Artificial Sequence
  Synthetic oligonucleotide; TTA chr11 5223047 5223068 5223052 5223047 -
tatatatatatattttagatat

SEQ ID NO: 144773 - DNA, 22 bp, Artificial Sequence
  Synthetic oligonucleotide; TTT chr11 5223032 5223053 5223037 5223032 -
tagatattttgtatagttttac

SEQ ID NO: 144774 - DNA, 22 bp, Artificial Sequence
  Synthetic oligonucleotide; TTT chr11 5223031 5223052 5223036 5223031 -
agatattttgtatagttttact

SEQ ID NO: 144775 - DNA, 22 bp, Artificial Sequence
  Synthetic oligonucleotide; TTA chr11 5223030 5223051 5223035 5223030 -
gatattttgtatagttttactc

SEQ ID NO: 144776 - DNA, 22 bp, Artificial Sequence
  Synthetic oligonucleotide; TTT chr11 5223023 5223044 5223028 5223023 -
tgtatagttttactccctagat

SEQ ID NO: 144777 - DNA, 22 bp, Artificial Sequence
  Synthetic oligonucleotide; TTT chr11 5223022 5223043 5223027 5223022 -
gtatagttttactccctagatt

SEQ ID NO: 144778 - DNA, 22 bp, Artificial Sequence
  Synthetic oligonucleotide; TTG chr11 5223021 5223042 5223026 5223021 -
tatagttttactccctagattt

SEQ ID NO: 144779 - DNA, 22 bp, Artificial Sequence
  Synthetic oligonucleotide; TTT chr11 5223013 5223034 5223018 5223013 -
tactccctagattttctagtgt

SEQ ID NO: 144780 - DNA, 22 bp, Artificial Sequence
  Synthetic oligonucleotide; TTT chr11 5223012 5223033 5223017 5223012 -
actccctagattttctagtgtt

SEQ ID NO: 144781 - DNA, 22 bp, Artificial Sequence
  Synthetic oligonucleotide; TTA chr11 5223011 5223032 5223016 5223011 -
ctccctagattttctagtgtta

SEQ ID NO: 144782 - DNA, 22 bp, Artificial Sequence
  Synthetic oligonucleotide; CTC chr11 5223008 5223029 5223013 5223008 -
cctagattttctagtgttatta

SEQ ID NO: 144783 - DNA, 22 bp, Artificial Sequence
  Synthetic oligonucleotide; CTA chr11 5223004 5223025 5223009 5223004 -
gattttctagtgttattattaa

SEQ ID NO: 144784 - DNA, 22 bp, Artificial Sequence
  Synthetic oligonucleotide; TTT chr11 5222999 5223020 5223004 5222999 -
tctagtgttattattaaatagt

SEQ ID NO: 144785 - DNA, 22 bp, Artificial Sequence
  Synthetic oligonucleotide; TTT chr11 5222998 5223019 5223003 5222998 -
ctagtgttattattaaatagtg

SEQ ID NO: 144786 - DNA, 22 bp, Artificial Sequence
  Synthetic oligonucleotide; TTC chr11 5222997 5223018 5223002 5222997 -
tagtgttattattaaatagtga

SEQ ID NO: 144787 - DNA, 22 bp, Artificial Sequence
  Synthetic oligonucleotide; CTA chr11 5222995 5223016 5223000 5222995 -
gtgttattattaaatagtgaag

SEQ ID NO: 144788 - DNA, 22 bp, Artificial Sequence
  Synthetic oligonucleotide; TTA chr11 5222989 5223010 5222994 5222989 -
ttattaaatagtgaagaaatgt

SEQ ID NO: 144789 - DNA, 22 bp, Artificial Sequence
  Synthetic oligonucleotide; TTA chr11 5222986 5223007 5222991 5222986 -
ttaaatagtgaagaaatgttta

SEQ ID NO: 144790 - DNA, 22 bp, Artificial Sequence
  Synthetic oligonucleotide; TTA chr11 5222983 5223004 5222988 5222983 -
aatagtgaagaaatgtttacac

SEQ ID NO: 144791 - DNA, 22 bp, Artificial Sequence
  Synthetic oligonucleotide; TTT chr11 5222965 5222986 5222970 5222965 -
acacttatgtacaaaatgtttt

SEQ ID NO: 144792 - DNA, 22 bp, Artificial Sequence
  Synthetic oligonucleotide; TTA chr11 5222964 5222985 5222969 5222964 -
cacttatgtacaaaatgttttg

SEQ ID NO: 144793 - DNA, 22 bp, Artificial Sequence
  Synthetic oligonucleotide; CTT chr11 5222959 5222980 5222964 5222959 -
atgtacaaaatgttttgcatgc

SEQ ID NO: 144794 - DNA, 22 bp, Artificial Sequence
  Synthetic oligonucleotide; TTA chr11 5222958 5222979 5222963 5222958 -
tgtacaaaatgttttgcatgct

SEQ ID NO: 144795 - DNA, 22 bp, Artificial Sequence
  Synthetic oligonucleotide; TTT chr11 5222944 5222965 5222949 5222944 -
tgcatgcttttcttcatttcta

SEQ ID NO: 144796 - DNA, 22 bp, Artificial Sequence
  Synthetic oligonucleotide; TTT chr11 5222943 5222964 5222948 5222943 -
gcatgcttttcttcatttctaa

SEQ ID NO: 144797 - DNA, 22 bp, Artificial Sequence
  Synthetic oligonucleotide; TTG chr11 5222942 5222963 5222947 5222942 -
catgcttttcttcatttctaac

SEQ ID NO: 144798 - DNA, 22 bp, Artificial Sequence
  Synthetic oligonucleotide; CTT chr11 5222935 5222956 5222940 5222935 -
ttcttcatttctaacattctct

SEQ ID NO: 144799 - DNA, 22 bp, Artificial Sequence
  Synthetic oligonucleotide; TTT chr11 5222934 5222955 5222939 5222934 -
tcttcatttctaacattctctc

SEQ ID NO: 144800 - DNA, 22 bp, Artificial Sequence
  Synthetic oligonucleotide; TTT chr11 5222933 5222954 5222938 5222933 -
cttcatttctaacattctctct

SEQ ID NO: 144801 - DNA, 22 bp, Artificial Sequence
  Synthetic oligonucleotide; TTC chr11 5222932 5222953 5222937 5222932 -
ttcatttctaacattctctcta

SEQ ID NO: 144802 - DNA, 22 bp, Artificial Sequence
  Synthetic oligonucleotide; CTT chr11 5222930 5222951 5222935 5222930 -
catttctaacattctctctaag

SEQ ID NO: 144803 - DNA, 22 bp, Artificial Sequence
  Synthetic oligonucleotide; TTC chr11 5222929 5222950 5222934 5222929 -
atttctaacattctctctaagt

SEQ ID NO: 144804 - DNA, 22 bp, Artificial Sequence
  Synthetic oligonucleotide; TTT chr11 5222925 5222946 5222930 5222925 -
ctaacattctctctaagtttat

SEQ ID NO: 144805 - DNA, 22 bp, Artificial Sequence
  Synthetic oligonucleotide; TTC chr11 5222924 5222945 5222929 5222924 -
taacattctctctaagtttatt

SEQ ID NO: 144806 - DNA, 22 bp, Artificial Sequence
  Synthetic oligonucleotide; CTA chr11 5222922 5222943 5222927 5222922 -
acattctctctaagtttattct

SEQ ID NO: 144807 - DNA, 22 bp, Artificial Sequence
  Synthetic oligonucleotide; TTC chr11 5222916 5222937 5222921 5222916 -
tctctaagtttattctattttt

SEQ ID NO: 144808 - DNA, 22 bp, Artificial Sequence
  Synthetic oligonucleotide; CTC chr11 5222914 5222935 5222919 5222914 -
tctaagtttattctattttttt

SEQ ID NO: 144809 - DNA, 22 bp, Artificial Sequence
  Synthetic oligonucleotide; CTC chr11 5222912 5222933 5222917 5222912 -
taagtttattctatttttttct

SEQ ID NO: 144810 - DNA, 22 bp, Artificial Sequence
  Synthetic oligonucleotide; CTA chr11 5222910 5222931 5222915 5222910 -
agtttattctatttttttctga

SEQ ID NO: 144811 - DNA, 22 bp, Artificial Sequence
  Synthetic oligonucleotide; TTT chr11 5222905 5222926 5222910 5222905 -
attctatttttttctgattatc

SEQ ID NO: 144812 - DNA, 22 bp, Artificial Sequence
  Synthetic oligonucleotide; TTA chr11 5222904 5222925 5222909 5222904 -
ttctatttttttctgattatcc

SEQ ID NO: 144813 - DNA, 22 bp, Artificial Sequence
  Synthetic oligonucleotide; TTC chr11 5222901 5222922 5222906 5222901 -
tatttttttctgattatcctta

SEQ ID NO: 144814 - DNA, 22 bp, Artificial Sequence
  Synthetic oligonucleotide; CTA chr11 5222899 5222920 5222904 5222899 -
tttttttctgattatccttaat

SEQ ID NO: 144815 - DNA, 22 bp, Artificial Sequence
  Synthetic oligonucleotide; TTT chr11 5222896 5222917 5222901 5222896 -
ttttctgattatccttaatatt

SEQ ID NO: 144816 - DNA, 22 bp, Artificial Sequence
  Synthetic oligonucleotide; TTT chr11 5222895 5222916 5222900 5222895 -
tttctgattatccttaatatta

SEQ ID NO: 144817 - DNA, 22 bp, Artificial Sequence
  Synthetic oligonucleotide; TTT chr11 5222894 5222915 5222899 5222894 -
ttctgattatccttaatattat

SEQ ID NO: 144818 - DNA, 22 bp, Artificial Sequence
  Synthetic oligonucleotide; TTT chr11 5222893 5222914 5222898 5222893 -
tctgattatccttaatattatc

SEQ ID NO: 144819 - DNA, 22 bp, Artificial Sequence
  Synthetic oligonucleotide; TTT chr11 5222892 5222913 5222897 5222892 -
ctgattatccttaatattatct

SEQ ID NO: 144820 - DNA, 22 bp, Artificial Sequence
  Synthetic oligonucleotide; TTC chr11 5222891 5222912 5222896 5222891 -
tgattatccttaatattatctc

SEQ ID NO: 144821 - DNA, 22 bp, Artificial Sequence
  Synthetic oligonucleotide; CTG chr11 5222889 5222910 5222894 5222889 -
attatccttaatattatctctt

SEQ ID NO: 144822 - DNA, 22 bp, Artificial Sequence
  Synthetic oligonucleotide; TTA chr11 5222885 5222906 5222890 5222885 -
tccttaatattatctctttctg

SEQ ID NO: 144823 - DNA, 22 bp, Artificial Sequence
  Synthetic oligonucleotide; CTT chr11 5222880 5222901 5222885 5222880 -
aatattatctctttctgctgga

SEQ ID NO: 144824 - DNA, 22 bp, Artificial Sequence
  Synthetic oligonucleotide; TTA chr11 5222879 5222900 5222884 5222879 -
atattatctctttctgctggaa

SEQ ID NO: 144825 - DNA, 22 bp, Artificial Sequence
  Synthetic oligonucleotide; TTA chr11 5222873 5222894 5222878 5222873 -
tctctttctgctggaaatacat

SEQ ID NO: 144826 - DNA, 22 bp, Artificial Sequence
  Synthetic oligonucleotide; CTC chr11 5222869 5222890 5222874 5222869 -
tttctgctggaaatacattgtt

SEQ ID NO: 144827 - DNA, 22 bp, Artificial Sequence
  Synthetic oligonucleotide; CTT chr11 5222867 5222888 5222872 5222867 -
tctgctggaaatacattgttac

SEQ ID NO: 144828 - DNA, 22 bp, Artificial Sequence
  Synthetic oligonucleotide; TTT chr11 5222866 5222887 5222871 5222866 -
ctgctggaaatacattgttact

SEQ ID NO: 144829 - DNA, 22 bp, Artificial Sequence
  Synthetic oligonucleotide; TTC chr11 5222865 5222886 5222870 5222865 -
tgctggaaatacattgttactt

SEQ ID NO: 144830 - DNA, 22 bp, Artificial Sequence
  Synthetic oligonucleotide; CTG chr11 5222863 5222884 5222868 5222863 -
ctggaaatacattgttactttt

SEQ ID NO: 144831 - DNA, 22 bp, Artificial Sequence
  Synthetic oligonucleotide; CTG chr11 5222860 5222881 5222865 5222860 -
gaaatacattgttacttttggt

SEQ ID NO: 144832 - DNA, 22 bp, Artificial Sequence
  Synthetic oligonucleotide; TTG chr11 5222849 5222870 5222854 5222849 -
ttacttttggtttatctaaaaa

SEQ ID NO: 144833 - DNA, 22 bp, Artificial Sequence
  Synthetic oligonucleotide; TTA chr11 5222846 5222867 5222851 5222846 -
cttttggtttatctaaaaatgg

SEQ ID NO: 144834 - DNA, 22 bp, Artificial Sequence
  Synthetic oligonucleotide; CTT chr11 5222843 5222864 5222848 5222843 -
ttggtttatctaaaaatggctt

SEQ ID NO: 144835 - DNA, 22 bp, Artificial Sequence
  Synthetic oligonucleotide; TTT chr11 5222842 5222863 5222847 5222842 -
tggtttatctaaaaatggcttc

SEQ ID NO: 144836 - DNA, 22 bp, Artificial Sequence
  Synthetic oligonucleotide; TTT chr11 5222841 5222862 5222846 5222841 -
ggtttatctaaaaatggcttca

SEQ ID NO: 144837 - DNA, 22 bp, Artificial Sequence
  Synthetic oligonucleotide; TTG chr11 5222840 5222861 5222845 5222840 -
gtttatctaaaaatggcttcat

SEQ ID NO: 144838 - DNA, 22 bp, Artificial Sequence
  Synthetic oligonucleotide; TTT chr11 5222836 5222857 5222841 5222836 -
atctaaaaatggcttcattttc

SEQ ID NO: 144839 - DNA, 22 bp, Artificial Sequence
  Synthetic oligonucleotide; TTA chr11 5222835 5222856 5222840 5222835 -
tctaaaaatggcttcattttct

SEQ ID NO: 144840 - DNA, 22 bp, Artificial Sequence
  Synthetic oligonucleotide; CTA chr11 5222831 5222852 5222836 5222831 -
aaaatggcttcattttcttcat

SEQ ID NO: 144841 - DNA, 22 bp, Artificial Sequence
  Synthetic oligonucleotide; CTT chr11 5222821 5222842 5222826 5222821 -
cattttcttcattctaaaatca

SEQ ID NO: 144842 - DNA, 22 bp, Artificial Sequence
  Synthetic oligonucleotide; TTC chr11 5222820 5222841 5222825 5222820 -
attttcttcattctaaaatcat

SEQ ID NO: 144843 - DNA, 22 bp, Artificial Sequence
  Synthetic oligonucleotide; TTT chr11 5222816 5222837 5222821 5222816 -
tcttcattctaaaatcatgtta

SEQ ID NO: 144844 - DNA, 22 bp, Artificial Sequence
  Synthetic oligonucleotide; TTT chr11 5222815 5222836 5222820 5222815 -
cttcattctaaaatcatgttaa

SEQ ID NO: 144845 - DNA, 22 bp, Artificial Sequence
  Synthetic oligonucleotide; TTC chr11 5222814 5222835 5222819 5222814 -
ttcattctaaaatcatgttaaa

SEQ ID NO: 144846 - DNA, 22 bp, Artificial Sequence
  Synthetic oligonucleotide; CTT chr11 5222812 5222833 5222817 5222812 -
cattctaaaatcatgttaaatt

SEQ ID NO: 144847 - DNA, 22 bp, Artificial Sequence
  Synthetic oligonucleotide; TTC chr11 5222811 5222832 5222816 5222811 -
attctaaaatcatgttaaatta

SEQ ID NO: 144848 - DNA, 22 bp, Artificial Sequence
  Synthetic oligonucleotide; TTC chr11 5222807 5222828 5222812 5222807 -
taaaatcatgttaaattaatac

SEQ ID NO: 144849 - DNA, 22 bp, Artificial Sequence
  Synthetic oligonucleotide; CTA chr11 5222805 5222826 5222810 5222805 -
aaatcatgttaaattaatacca

SEQ ID NO: 144850 - DNA, 22 bp, Artificial Sequence
  Synthetic oligonucleotide; TTA chr11 5222794 5222815 5222799 5222794 -
aattaataccactcatgtgtaa

SEQ ID NO: 144851 - DNA, 22 bp, Artificial Sequence
  Synthetic oligonucleotide; TTA chr11 5222789 5222810 5222794 5222789 -
ataccactcatgtgtaagtaag

SEQ ID NO: 144852 - DNA, 22 bp, Artificial Sequence
  Synthetic oligonucleotide; CTC chr11 5222780 5222801 5222785 5222780 -
atgtgtaagtaagatagtggaa

SEQ ID NO: 144853 - DNA, 22 bp, Artificial Sequence
  Synthetic oligonucleotide; CTA chr11 5222737 5222758 5222742 5222737 -
aatctcactaaaatataataat

SEQ ID NO: 144854 - DNA, 22 bp, Artificial Sequence
  Synthetic oligonucleotide; CTC chr11 5222731 5222752 5222736 5222731 -
actaaaatataataatgtgata

SEQ ID NO: 144855 - DNA, 22 bp, Artificial Sequence
  Synthetic oligonucleotide; CTA chr11 5222727 5222748 5222732 5222727 -
aaatataataatgtgatatata

SEQ ID NO: 144856 - DNA, 22 bp, Artificial Sequence
  Synthetic oligonucleotide; CTT chr11 5222693 5222714 5222698 5222693 -
ttaaatttagcttggaaataaa

SEQ ID NO: 144857 - DNA, 22 bp, Artificial Sequence
  Synthetic oligonucleotide; TTT chr11 5222692 5222713 5222697 5222692 -
taaatttagcttggaaataaaa

SEQ ID NO: 144858 - DNA, 22 bp, Artificial Sequence
  Synthetic oligonucleotide; TTT chr11 5222691 5222712 5222696 5222691 -
aaatttagcttggaaataaaaa

SEQ ID NO: 144859 - DNA, 22 bp, Artificial Sequence
  Synthetic oligonucleotide; TTA chr11 5222690 5222711 5222695 5222690 -
aatttagcttggaaataaaaaa

SEQ ID NO: 144860 - DNA, 22 bp, Artificial Sequence
  Synthetic oligonucleotide; TTT chr11 5222685 5222706 5222690 5222685 -
agcttggaaataaaaaacaaac

SEQ ID NO: 144861 - DNA, 22 bp, Artificial Sequence
  Synthetic oligonucleotide; TTA chr11 5222684 5222705 5222689 5222684 -
gcttggaaataaaaaacaaaca

SEQ ID NO: 144862 - DNA, 22 bp, Artificial Sequence
  Synthetic oligonucleotide; CTT chr11 5222680 5222701 5222685 5222680 -
ggaaataaaaaacaaacagtaa

SEQ ID NO: 144863 - DNA, 22 bp, Artificial Sequence
  Synthetic oligonucleotide; TTG chr11 5222679 5222700 5222684 5222679 -
gaaataaaaaacaaacagtaat

SEQ ID NO: 144864 - DNA, 22 bp, Artificial Sequence
  Synthetic oligonucleotide; TTG chr11 5222655 5222676 5222660 5222655 -
aacaactatactttttgaaaag

SEQ ID NO: 144865 - DNA, 22 bp, Artificial Sequence
  Synthetic oligonucleotide; CTA chr11 5222647 5222668 5222652 5222647 -
tactttttgaaaagagtaaagt

SEQ ID NO: 144866 - DNA, 22 bp, Artificial Sequence
  Synthetic oligonucleotide; CTT chr11 5222642 5222663 5222647 5222642 -
tttgaaaagagtaaagtgaaat

SEQ ID NO: 144867 - DNA, 22 bp, Artificial Sequence
  Synthetic oligonucleotide; TTT chr11 5222641 5222662 5222646 5222641 -
ttgaaaagagtaaagtgaaatg

SEQ ID NO: 144868 - DNA, 22 bp, Artificial Sequence
  Synthetic oligonucleotide; TTT chr11 5222640 5222661 5222645 5222640 -
tgaaaagagtaaagtgaaatgc

SEQ ID NO: 144869 - DNA, 22 bp, Artificial Sequence
  Synthetic oligonucleotide; TTT chr11 5222639 5222660 5222644 5222639 -
gaaaagagtaaagtgaaatgct

SEQ ID NO: 144870 - DNA, 22 bp, Artificial Sequence
  Synthetic oligonucleotide; TTG chr11 5222638 5222659 5222643 5222638 -
aaaagagtaaagtgaaatgctt

SEQ ID NO: 144871 - DNA, 22 bp, Artificial Sequence
  Synthetic oligonucleotide; CTT chr11 5222616 5222637 5222621 5222616 -
aactgcatataccacaatcgat

SEQ ID NO: 144872 - DNA, 22 bp, Artificial Sequence
  Synthetic oligonucleotide; TTA chr11 5222615 5222636 5222620 5222615 -
actgcatataccacaatcgatt

SEQ ID NO: 144873 - DNA, 22 bp, Artificial Sequence
  Synthetic oligonucleotide; CTG chr11 5222611 5222632 5222616 5222611 -
catataccacaatcgattacac

SEQ ID NO: 144874 - DNA, 22 bp, Artificial Sequence
  Synthetic oligonucleotide; TTA chr11 5222592 5222613 5222597 5222592 -
cacaattaggtgtgaaggtaaa

SEQ ID NO: 144875 - DNA, 22 bp, Artificial Sequence
  Synthetic oligonucleotide; TTA chr11 5222584 5222605 5222589 5222584 -
ggtgtgaaggtaaaattcagtc

SEQ ID NO: 144876 - DNA, 22 bp, Artificial Sequence
  Synthetic oligonucleotide; TTC chr11 5222566 5222587 5222571 5222566 -
agtcacgaaaaaactagaataa

SEQ ID NO: 144877 - DNA, 22 bp, Artificial Sequence
  Synthetic oligonucleotide; CTA chr11 5222550 5222571 5222555 5222550 -
gaataaaaatatgggaagacat

SEQ ID NO: 144878 - DNA, 22 bp, Artificial Sequence
  Synthetic oligonucleotide; CTT chr11 5222516 5222537 5222521 5222516 -
agagataacactgttatttaat

SEQ ID NO: 144879 - DNA, 22 bp, Artificial Sequence
  Synthetic oligonucleotide; TTA chr11 5222515 5222536 5222520 5222515 -
gagataacactgttatttaatt

SEQ ID NO: 144880 - DNA, 22 bp, Artificial Sequence
  Synthetic oligonucleotide; CTG chr11 5222503 5222524 5222508 5222503 -
ttatttaattatcaacccaaag

SEQ ID NO: 144881 - DNA, 22 bp, Artificial Sequence
  Synthetic oligonucleotide; TTA chr11 5222500 5222521 5222505 5222500 -
tttaattatcaacccaaagtag

SEQ ID NO: 144882 - DNA, 22 bp, Artificial Sequence
  Synthetic oligonucleotide; TTT chr11 5222497 5222518 5222502 5222497 -
aattatcaacccaaagtagaaa

SEQ ID NO: 144883 - DNA, 22 bp, Artificial Sequence
  Synthetic oligonucleotide; TTA chr11 5222496 5222517 5222501 5222496 -
attatcaacccaaagtagaaac

SEQ ID NO: 144884 - DNA, 22 bp, Artificial Sequence
  Synthetic oligonucleotide; TTA chr11 5222492 5222513 5222497 5222492 -
tcaacccaaagtagaaactatc

SEQ ID NO: 144885 - DNA, 22 bp, Artificial Sequence
  Synthetic oligonucleotide; CTA chr11 5222472 5222493 5222477 5222472 -
tcaagggagaaataaattcagt

SEQ ID NO: 144886 - DNA, 22 bp, Artificial Sequence
  Synthetic oligonucleotide; TTC chr11 5222453 5222474 5222458 5222453 -
agtcaacaataaaagcatttaa

SEQ ID NO: 144887 - DNA, 22 bp, Artificial Sequence
  Synthetic oligonucleotide; TTT chr11 5222433 5222454 5222438 5222433 -
aagaagttattctaggctggga

SEQ ID NO: 144888 - DNA, 22 bp, Artificial Sequence
  Synthetic oligonucleotide; TTA chr11 5222432 5222453 5222437 5222432 -
agaagttattctaggctgggag

SEQ ID NO: 144889 - DNA, 22 bp, Artificial Sequence
  Synthetic oligonucleotide; TTA chr11 5222424 5222445 5222429 5222424 -
ttctaggctgggagcggtggct

SEQ ID NO: 144890 - DNA, 22 bp, Artificial Sequence
  Synthetic oligonucleotide; TTC chr11 5222421 5222442 5222426 5222421 -
taggctgggagcggtggctcac

SEQ ID NO: 144891 - DNA, 22 bp, Artificial Sequence
  Synthetic oligonucleotide; CTA chr11 5222419 5222440 5222424 5222419 -
ggctgggagcggtggctcacac

SEQ ID NO: 144892 - DNA, 22 bp, Artificial Sequence
  Synthetic oligonucleotide; CTG chr11 5222414 5222435 5222419 5222414 -
ggagcggtggctcacacctgca

SEQ ID NO: 144893 - DNA, 22 bp, Artificial Sequence
  Synthetic oligonucleotide; CTC chr11 5222401 5222422 5222406 5222401 -
acacctgcaattgcagcacttt

SEQ ID NO: 144894 - DNA, 22 bp, Artificial Sequence
  Synthetic oligonucleotide; CTG chr11 5222394 5222415 5222399 5222394 -
caattgcagcactttgggaggc

SEQ ID NO: 144895 - DNA, 22 bp, Artificial Sequence
  Synthetic oligonucleotide; TTG chr11 5222388 5222409 5222393 5222388 -
cagcactttgggaggcctagac

SEQ ID NO: 144896 - DNA, 22 bp, Artificial Sequence
  Synthetic oligonucleotide; CTT chr11 5222380 5222401 5222385 5222380 -
tgggaggcctagacaggcggat

SEQ ID NO: 144897 - DNA, 22 bp, Artificial Sequence
  Synthetic oligonucleotide; TTT chr11 5222379 5222400 5222384 5222379 -
gggaggcctagacaggcggatc

SEQ ID NO: 144898 - DNA, 22 bp, Artificial Sequence
  Synthetic oligonucleotide; TTG chr11 5222378 5222399 5222383 5222378 -
ggaggcctagacaggcggatca

SEQ ID NO: 144899 - DNA, 22 bp, Artificial Sequence
  Synthetic oligonucleotide; CTA chr11 5222369 5222390 5222374 5222369 -
gacaggcggatcacgacgtcag

SEQ ID NO: 144900 - DNA, 22 bp, Artificial Sequence
  Synthetic oligonucleotide; TTC chr11 5222341 5222362 5222346 5222341 -
aagatcagcctggccaacatag

SEQ ID NO: 144901 - DNA, 22 bp, Artificial Sequence
  Synthetic oligonucleotide; CTG chr11 5222329 5222350 5222334 5222329 -
gccaacatagtgaaacctcatc

SEQ ID NO: 144902 - DNA, 22 bp, Artificial Sequence
  Synthetic oligonucleotide; CTC chr11 5222310 5222331 5222315 5222310 -
atcgctactaaaaatataaaaa

SEQ ID NO: 144903 - DNA, 22 bp, Artificial Sequence
  Synthetic oligonucleotide; CTA chr11 5222303 5222324 5222308 5222303 -
ctaaaaatataaaaacttagcc

SEQ ID NO: 144904 - DNA, 22 bp, Artificial Sequence
  Synthetic oligonucleotide; CTA chr11 5222300 5222321 5222305 5222300 -
aaaatataaaaacttagcctgg

SEQ ID NO: 144905 - DNA, 22 bp, Artificial Sequence
  Synthetic oligonucleotide; CTT chr11 5222285 5222306 5222290 5222285 -
agcctggcgtggtggcaggcat

SEQ ID NO: 144906 - DNA, 22 bp, Artificial Sequence
  Synthetic oligonucleotide; TTA chr11 5222284 5222305 5222289 5222284 -
gcctggcgtggtggcaggcatg

SEQ ID NO: 144907 - DNA, 22 bp, Artificial Sequence
  Synthetic oligonucleotide; CTG chr11 5222279 5222300 5222284 5222279 -
gcgtggtggcaggcatgtgtaa

SEQ ID NO: 144908 - DNA, 22 bp, Artificial Sequence
  Synthetic oligonucleotide; TTT chr11 5222245 5222266 5222250 5222245 -
gggaggctgaggcaggagaatc

SEQ ID NO: 144909 - DNA, 22 bp, Artificial Sequence
  Synthetic oligonucleotide; TTG chr11 5222244 5222265 5222249 5222244 -
ggaggctgaggcaggagaatcg

SEQ ID NO: 144910 - DNA, 22 bp, Artificial Sequence
  Synthetic oligonucleotide; CTG chr11 5222236 5222257 5222241 5222236 -
aggcaggagaatcgcttgatcc

SEQ ID NO: 144911 - DNA, 22 bp, Artificial Sequence
  Synthetic oligonucleotide; CTT chr11 5222219 5222240 5222224 5222219 -
gatcctgggaggcagaggttgc

SEQ ID NO: 144912 - DNA, 22 bp, Artificial Sequence
  Synthetic oligonucleotide; TTG chr11 5222218 5222239 5222223 5222218 -
atcctgggaggcagaggttgca

SEQ ID NO: 144913 - DNA, 22 bp, Artificial Sequence
  Synthetic oligonucleotide; CTG chr11 5222212 5222233 5222217 5222212 -
ggaggcagaggttgcagtgagc

SEQ ID NO: 144914 - DNA, 22 bp, Artificial Sequence
  Synthetic oligonucleotide; TTG chr11 5222198 5222219 5222203 5222198 -
cagtgagccaagattgtgccac

SEQ ID NO: 144915 - DNA, 22 bp, Artificial Sequence
  Synthetic oligonucleotide; TTG chr11 5222182 5222203 5222187 5222182 -
tgccactgcattccagcccagg

SEQ ID NO: 144916 - DNA, 22 bp, Artificial Sequence
  Synthetic oligonucleotide; CTG chr11 5222174 5222195 5222179 5222174 -
cattccagcccaggtgacagca

SEQ ID NO: 144917 - DNA, 22 bp, Artificial Sequence
  Synthetic oligonucleotide; TTC chr11 5222169 5222190 5222174 5222169 -
cagcccaggtgacagcatgaga

SEQ ID NO: 144918 - DNA, 22 bp, Artificial Sequence
  Synthetic oligonucleotide; CTC chr11 5222144 5222165 5222149 5222144 -
cgtcacaaaaaaaaaagaaaaa

SEQ ID NO: 144919 - DNA, 22 bp, Artificial Sequence
  Synthetic oligonucleotide; CTC chr11 5222071 5222092 5222076 5222071 -
cagtctatagctcccatcgtga

SEQ ID NO: 144920 - DNA, 22 bp, Artificial Sequence
  Synthetic oligonucleotide; CTA chr11 5222064 5222085 5222069 5222064 -
tagctcccatcgtgagtgacgc

SEQ ID NO: 144921 - DNA, 22 bp, Artificial Sequence
  Synthetic oligonucleotide; CTC chr11 5222058 5222079 5222063 5222058 -
ccatcgtgagtgacgcagaaga

SEQ ID NO: 144922 - DNA, 22 bp, Artificial Sequence
  Synthetic oligonucleotide; TTT chr11 5222026 5222047 5222031 5222026 -
ctgcatttccaactgaggtacc

SEQ ID NO: 144923 - DNA, 22 bp, Artificial Sequence
  Synthetic oligonucleotide; TTC chr11 5222025 5222046 5222030 5222025 -
tgcatttccaactgaggtacca

SEQ ID NO: 144924 - DNA, 22 bp, Artificial Sequence
  Synthetic oligonucleotide; CTG chr11 5222023 5222044 5222028 5222023 -
catttccaactgaggtaccagg

SEQ ID NO: 144925 - DNA, 22 bp, Artificial Sequence
  Synthetic oligonucleotide; TTT chr11 5222018 5222039 5222023 5222018 -
ccaactgaggtaccaggttcat

SEQ ID NO: 144926 - DNA, 22 bp, Artificial Sequence
  Synthetic oligonucleotide; TTC chr11 5222017 5222038 5222022 5222017 -
caactgaggtaccaggttcatc

SEQ ID NO: 144927 - DNA, 22 bp, Artificial Sequence
  Synthetic oligonucleotide; CTG chr11 5222011 5222032 5222016 5222011 -
aggtaccaggttcatctcacag

SEQ ID NO: 144928 - DNA, 22 bp, Artificial Sequence
  Synthetic oligonucleotide; TTC chr11 5221998 5222019 5222003 5221998 -
atctcacagggaagtgccaggc

SEQ ID NO: 144929 - DNA, 22 bp, Artificial Sequence
  Synthetic oligonucleotide; CTC chr11 5221993 5222014 5221998 5221993 -
acagggaagtgccaggcagtgg

SEQ ID NO: 144930 - DNA, 22 bp, Artificial Sequence
  Synthetic oligonucleotide; CTG chr11 5221944 5221965 5221949 5221944 -
tgcatgagccaaagcagggcga

SEQ ID NO: 144931 - DNA, 22 bp, Artificial Sequence
  Synthetic oligonucleotide; CTC chr11 5221911 5221932 5221916 5221911 -
acccgggaagcacaaggggtca

SEQ ID NO: 144932 - DNA, 22 bp, Artificial Sequence
  Synthetic oligonucleotide; TTC chr11 5221881 5221902 5221886 5221881 -
cctttcctagtcaaagaaaagg

SEQ ID NO: 144933 - DNA, 22 bp, Artificial Sequence
  Synthetic oligonucleotide; CTT chr11 5221877 5221898 5221882 5221877 -
tcctagtcaaagaaaagggtga

SEQ ID NO: 144934 - DNA, 22 bp, Artificial Sequence
  Synthetic oligonucleotide; TTT chr11 5221876 5221897 5221881 5221876 -
cctagtcaaagaaaagggtgac

SEQ ID NO: 144935 - DNA, 22 bp, Artificial Sequence
  Synthetic oligonucleotide; TTC chr11 5221875 5221896 5221880 5221875 -
ctagtcaaagaaaagggtgaca

SEQ ID NO: 144936 - DNA, 22 bp, Artificial Sequence
  Synthetic oligonucleotide; CTA chr11 5221872 5221893 5221877 5221872 -
gtcaaagaaaagggtgacagat

SEQ ID NO: 144937 - DNA, 22 bp, Artificial Sequence
  Synthetic oligonucleotide; CTG chr11 5221842 5221863 5221847 5221842 -
gaaaatcgggtcactcccgccc

SEQ ID NO: 144938 - DNA, 22 bp, Artificial Sequence
  Synthetic oligonucleotide; CTC chr11 5221826 5221847 5221831 5221826 -
ccgccctaatactgcgctcttc

SEQ ID NO: 144939 - DNA, 22 bp, Artificial Sequence
  Synthetic oligonucleotide; CTA chr11 5221818 5221839 5221823 5221818 -
atactgcgctcttccaacaagc

SEQ ID NO: 144940 - DNA, 22 bp, Artificial Sequence
  Synthetic oligonucleotide; CTG chr11 5221812 5221833 5221817 5221812 -
cgctcttccaacaagcttaaca

SEQ ID NO: 144941 - DNA, 22 bp, Artificial Sequence
  Synthetic oligonucleotide; CTC chr11 5221807 5221828 5221812 5221807 -
ttccaacaagcttaacaaatgg

SEQ ID NO: 144942 - DNA, 22 bp, Artificial Sequence
  Synthetic oligonucleotide; CTT chr11 5221805 5221826 5221810 5221805 -
ccaacaagcttaacaaatggca

SEQ ID NO: 144943 - DNA, 22 bp, Artificial Sequence
  Synthetic oligonucleotide; TTC chr11 5221804 5221825 5221809 5221804 -
caacaagcttaacaaatggcac

SEQ ID NO: 144944 - DNA, 22 bp, Artificial Sequence
  Synthetic oligonucleotide; CTT chr11 5221794 5221815 5221799 5221794 -
aacaaatggcacaccaggagat

SEQ ID NO: 144945 - DNA, 22 bp, Artificial Sequence
  Synthetic oligonucleotide; TTA chr11 5221793 5221814 5221798 5221793 -
acaaatggcacaccaggagatt

SEQ ID NO: 144946 - DNA, 22 bp, Artificial Sequence
  Synthetic oligonucleotide; TTA chr11 5221770 5221791 5221775 5221770 -
tatcccatgcctggctcagagg

SEQ ID NO: 144947 - DNA, 22 bp, Artificial Sequence
  Synthetic oligonucleotide; CTG chr11 5221757 5221778 5221762 5221757 -
gctcagagggtcctacgcccat

SEQ ID NO: 144948 - DNA, 22 bp, Artificial Sequence
  Synthetic oligonucleotide; CTC chr11 5221753 5221774 5221758 5221753 -
agagggtcctacgcccatggag

SEQ ID NO: 144949 - DNA, 22 bp, Artificial Sequence
  Synthetic oligonucleotide; CTA chr11 5221742 5221763 5221747 5221742 -
cgcccatggagcctcgctcatt

SEQ ID NO: 144950 - DNA, 22 bp, Artificial Sequence
  Synthetic oligonucleotide; CTC chr11 5221727 5221748 5221732 5221727 -
gctcattgctagcacagcagtc

SEQ ID NO: 144951 - DNA, 22 bp, Artificial Sequence
  Synthetic oligonucleotide; CTC chr11 5221723 5221744 5221728 5221723 -
attgctagcacagcagtctgag

SEQ ID NO: 144952 - DNA, 22 bp, Artificial Sequence
  Synthetic oligonucleotide; TTG chr11 5221719 5221740 5221724 5221719 -
ctagcacagcagtctgaggtca

SEQ ID NO: 144953 - DNA, 22 bp, Artificial Sequence
  Synthetic oligonucleotide; CTA chr11 5221716 5221737 5221721 5221716 -
gcacagcagtctgaggtcaaac

SEQ ID NO: 144954 - DNA, 22 bp, Artificial Sequence
  Synthetic oligonucleotide; CTG chr11 5221703 5221724 5221708 5221703 -
aggtcaaactgcaaggtggcag

SEQ ID NO: 144955 - DNA, 22 bp, Artificial Sequence
  Synthetic oligonucleotide; CTG chr11 5221692 5221713 5221697 5221692 -
caaggtggcagtgaggctgggg

SEQ ID NO: 144956 - DNA, 22 bp, Artificial Sequence
  Synthetic oligonucleotide; CTG chr11 5221673 5221694 5221678 5221673 -
ggggaggggtgcccaccattgt

SEQ ID NO: 144957 - DNA, 22 bp, Artificial Sequence
  Synthetic oligonucleotide; TTG chr11 5221652 5221673 5221657 5221652 -
tccaggcttgagcaggtaaaca

SEQ ID NO: 144958 - DNA, 22 bp, Artificial Sequence
  Synthetic oligonucleotide; CTT chr11 5221643 5221664 5221648 5221643 -
gagcaggtaaacaaagccgcct

SEQ ID NO: 144959 - DNA, 22 bp, Artificial Sequence
  Synthetic oligonucleotide; TTG chr11 5221642 5221663 5221647 5221642 -
agcaggtaaacaaagccgcctg

SEQ ID NO: 144960 - DNA, 22 bp, Artificial Sequence
  Synthetic oligonucleotide; CTG chr11 5221620 5221641 5221625 5221620 -
gaagctcgaactgggtggagcc

SEQ ID NO: 144961 - DNA, 22 bp, Artificial Sequence
  Synthetic oligonucleotide; CTC chr11 5221613 5221634 5221618 5221613 -
gaactgggtggagcccaccaca

SEQ ID NO: 144962 - DNA, 22 bp, Artificial Sequence
  Synthetic oligonucleotide; CTG chr11 5221607 5221628 5221612 5221607 -
ggtggagcccaccacagctcaa

SEQ ID NO: 144963 - DNA, 22 bp, Artificial Sequence
  Synthetic oligonucleotide; CTC chr11 5221587 5221608 5221592 5221587 -
aaggaggcctgcctgcctctgt

SEQ ID NO: 144964 - DNA, 22 bp, Artificial Sequence
  Synthetic oligonucleotide; CTG chr11 5221576 5221597 5221581 5221576 -
cctgcctctgtaggctccacct

SEQ ID NO: 144965 - DNA, 22 bp, Artificial Sequence
  Synthetic oligonucleotide; CTG chr11 5221572 5221593 5221577 5221572 -
cctctgtaggctccacctctag

SEQ ID NO: 144966 - DNA, 22 bp, Artificial Sequence
  Synthetic oligonucleotide; CTC chr11 5221568 5221589 5221573 5221568 -
tgtaggctccacctctaggggc

SEQ ID NO: 144967 - DNA, 22 bp, Artificial Sequence
  Synthetic oligonucleotide; CTG chr11 5221566 5221587 5221571 5221566 -
taggctccacctctaggggcag

SEQ ID NO: 144968 - DNA, 22 bp, Artificial Sequence
  Synthetic oligonucleotide; CTC chr11 5221559 5221580 5221564 5221559 -
cacctctaggggcagggcacag

SEQ ID NO: 144969 - DNA, 22 bp, Artificial Sequence
  Synthetic oligonucleotide; CTC chr11 5221553 5221574 5221558 5221553 -
taggggcagggcacagacaaac

SEQ ID NO: 144970 - DNA, 22 bp, Artificial Sequence
  Synthetic oligonucleotide; CTA chr11 5221551 5221572 5221556 5221551 -
ggggcagggcacagacaaacaa

SEQ ID NO: 144971 - DNA, 22 bp, Artificial Sequence
  Synthetic oligonucleotide; CTC chr11 5221512 5221533 5221517 5221512 -
tgcagacttaaatgtccctgtc

SEQ ID NO: 144972 - DNA, 22 bp, Artificial Sequence
  Synthetic oligonucleotide; CTG chr11 5221510 5221531 5221515 5221510 -
cagacttaaatgtccctgtctg

SEQ ID NO: 144973 - DNA, 22 bp, Artificial Sequence
  Synthetic oligonucleotide; CTT chr11 5221503 5221524 5221508 5221503 -
aaatgtccctgtctgacagctt

SEQ ID NO: 144974 - DNA, 22 bp, Artificial Sequence
  Synthetic oligonucleotide; TTA chr11 5221502 5221523 5221507 5221502 -
aatgtccctgtctgacagcttt

SEQ ID NO: 144975 - DNA, 22 bp, Artificial Sequence
  Synthetic oligonucleotide; CTG chr11 5221492 5221513 5221497 5221492 -
tctgacagctttgaagagagta

SEQ ID NO: 144976 - DNA, 22 bp, Artificial Sequence
  Synthetic oligonucleotide; CTG chr11 5221488 5221509 5221493 5221488 -
acagctttgaagagagtagtgg

SEQ ID NO: 144977 - DNA, 22 bp, Artificial Sequence
  Synthetic oligonucleotide; CTT chr11 5221481 5221502 5221486 5221481 -
tgaagagagtagtggttctccc

SEQ ID NO: 144978 - DNA, 22 bp, Artificial Sequence
  Synthetic oligonucleotide; TTT chr11 5221480 5221501 5221485 5221480 -
gaagagagtagtggttctccca

SEQ ID NO: 144979 - DNA, 22 bp, Artificial Sequence
  Synthetic oligonucleotide; TTG chr11 5221479 5221500 5221484 5221479 -
aagagagtagtggttctcccag

SEQ ID NO: 144980 - DNA, 22 bp, Artificial Sequence
  Synthetic oligonucleotide; TTC chr11 5221463 5221484 5221468 5221463 -
tcccagcacatagcttcagatc

SEQ ID NO: 144981 - DNA, 22 bp, Artificial Sequence
  Synthetic oligonucleotide; CTC chr11 5221461 5221482 5221466 5221461 -
ccagcacatagcttcagatctg

SEQ ID NO: 144982 - DNA, 22 bp, Artificial Sequence
  Synthetic oligonucleotide; CTT chr11 5221447 5221468 5221452 5221447 -
cagatctgagaacaggcagact

SEQ ID NO: 144983 - DNA, 22 bp, Artificial Sequence
  Synthetic oligonucleotide; TTC chr11 5221446 5221467 5221451 5221446 -
agatctgagaacaggcagactg

SEQ ID NO: 144984 - DNA, 22 bp, Artificial Sequence
  Synthetic oligonucleotide; CTG chr11 5221439 5221460 5221444 5221439 -
agaacaggcagactgcctcctc

SEQ ID NO: 144985 - DNA, 22 bp, Artificial Sequence
  Synthetic oligonucleotide; CTG chr11 5221424 5221445 5221429 5221424 -
cctcctcaagtgggtccctgac

SEQ ID NO: 144986 - DNA, 22 bp, Artificial Sequence
  Synthetic oligonucleotide; CTC chr11 5221420 5221441 5221425 5221420 -
ctcaagtgggtccctgaccccc

SEQ ID NO: 144987 - DNA, 22 bp, Artificial Sequence
  Synthetic oligonucleotide; CTC chr11 5221417 5221438 5221422 5221417 -
aagtgggtccctgacccccgag

SEQ ID NO: 144988 - DNA, 22 bp, Artificial Sequence
  Synthetic oligonucleotide; CTG chr11 5221404 5221425 5221409 5221404 -
acccccgagtagcctaactggg

SEQ ID NO: 144989 - DNA, 22 bp, Artificial Sequence
  Synthetic oligonucleotide; CTA chr11 5221388 5221409 5221393 5221388 -
actgggaggcatcccccagtag

SEQ ID NO: 144990 - DNA, 22 bp, Artificial Sequence
  Synthetic oligonucleotide; CTG chr11 5221384 5221405 5221389 5221384 -
ggaggcatcccccagtaggggc

SEQ ID NO: 144991 - DNA, 22 bp, Artificial Sequence
  Synthetic oligonucleotide; CTG chr11 5221356 5221377 5221361 5221356 -
acacctcacatggctggtactc

SEQ ID NO: 144992 - DNA, 22 bp, Artificial Sequence
  Synthetic oligonucleotide; CTC chr11 5221349 5221370 5221354 5221349 -
acatggctggtactcctctaag

SEQ ID NO: 144993 - DNA, 22 bp, Artificial Sequence
  Synthetic oligonucleotide; CTG chr11 5221340 5221361 5221345 5221340 -
gtactcctctaagacaaaactt

SEQ ID NO: 144994 - DNA, 22 bp, Artificial Sequence
  Synthetic oligonucleotide; CTC chr11 5221334 5221355 5221339 5221334 -
ctctaagacaaaacttccagag

SEQ ID NO: 144995 - DNA, 22 bp, Artificial Sequence
  Synthetic oligonucleotide; CTC chr11 5221331 5221352 5221336 5221331 -
taagacaaaacttccagaggaa

SEQ ID NO: 144996 - DNA, 22 bp, Artificial Sequence
  Synthetic oligonucleotide; CTA chr11 5221329 5221350 5221334 5221329 -
agacaaaacttccagaggaatg

SEQ ID NO: 144997 - DNA, 22 bp, Artificial Sequence
  Synthetic oligonucleotide; CTT chr11 5221318 5221339 5221323 5221318 -
ccagaggaatgatcaggcagca

SEQ ID NO: 144998 - DNA, 22 bp, Artificial Sequence
  Synthetic oligonucleotide; TTC chr11 5221317 5221338 5221322 5221317 -
cagaggaatgatcaggcagcag

SEQ ID NO: 144999 - DNA, 22 bp, Artificial Sequence
  Synthetic oligonucleotide; TTT chr11 5221290 5221311 5221295 5221290 -
gcggttcaccaatatccactgt

SEQ ID NO: 145000 - DNA, 22 bp, Artificial Sequence
  Synthetic oligonucleotide; TTG chr11 5221289 5221310 5221294 5221289 -
cggttcaccaatatccactgtt

SEQ ID NO: 145001 - DNA, 22 bp, Artificial Sequence
  Synthetic oligonucleotide; TTC chr11 5221283 5221304 5221288 5221283 -
accaatatccactgttctgcag

SEQ ID NO: 145002 - DNA, 22 bp, Artificial Sequence
  Synthetic oligonucleotide; CTG chr11 5221269 5221290 5221274 5221269 -
ttctgcagccaccgctgttgat

SEQ ID NO: 145003 - DNA, 22 bp, Artificial Sequence
  Synthetic oligonucleotide; TTC chr11 5221266 5221287 5221271 5221266 -
tgcagccaccgctgttgatacc

SEQ ID NO: 145004 - DNA, 22 bp, Artificial Sequence
  Synthetic oligonucleotide; CTG chr11 5221264 5221285 5221269 5221264 -
cagccaccgctgttgataccca

SEQ ID NO: 145005 - DNA, 22 bp, Artificial Sequence
  Synthetic oligonucleotide; CTG chr11 5221252 5221273 5221257 5221252 -
ttgatacccaggaaaacagctt

SEQ ID NO: 145006 - DNA, 22 bp, Artificial Sequence
  Synthetic oligonucleotide; TTG chr11 5221249 5221270 5221254 5221249 -
atacccaggaaaacagcttctg

SEQ ID NO: 145007 - DNA, 22 bp, Artificial Sequence
  Synthetic oligonucleotide; CTT chr11 5221230 5221251 5221235 5221230 -
ctggagtggacctccagtaaac

SEQ ID NO: 145008 - DNA, 22 bp, Artificial Sequence
  Synthetic oligonucleotide; TTC chr11 5221229 5221250 5221234 5221229 -
tggagtggacctccagtaaact

SEQ ID NO: 145009 - DNA, 22 bp, Artificial Sequence
  Synthetic oligonucleotide; CTG chr11 5221227 5221248 5221232 5221227 -
gagtggacctccagtaaactcc

SEQ ID NO: 145010 - DNA, 22 bp, Artificial Sequence
  Synthetic oligonucleotide; CTC chr11 5221216 5221237 5221221 5221216 -
cagtaaactccaacagacctgc

SEQ ID NO: 145011 - DNA, 22 bp, Artificial Sequence
  Synthetic oligonucleotide; CTC chr11 5221206 5221227 5221211 5221206 -
caacagacctgcagctgagggt

SEQ ID NO: 145012 - DNA, 22 bp, Artificial Sequence
  Synthetic oligonucleotide; CTG chr11 5221195 5221216 5221200 5221195 -
cagctgagggtcctgactgtta

SEQ ID NO: 145013 - DNA, 22 bp, Artificial Sequence
  Synthetic oligonucleotide; CTG chr11 5221189 5221210 5221194 5221189 -
agggtcctgactgttagaagga

SEQ ID NO: 145014 - DNA, 22 bp, Artificial Sequence
  Synthetic oligonucleotide; CTG chr11 5221180 5221201 5221185 5221180 -
actgttagaaggaaaactaaca

SEQ ID NO: 145015 - DNA, 22 bp, Artificial Sequence
  Synthetic oligonucleotide; CTG chr11 5221176 5221197 5221181 5221176 -
ttagaaggaaaactaacaaaca

SEQ ID NO: 145016 - DNA, 22 bp, Artificial Sequence
  Synthetic oligonucleotide; TTA chr11 5221173 5221194 5221178 5221173 -
gaaggaaaactaacaaacagaa

SEQ ID NO: 145017 - DNA, 22 bp, Artificial Sequence
  Synthetic oligonucleotide; CTA chr11 5221161 5221182 5221166 5221161 -
acaaacagaaaggacatccaca

SEQ ID NO: 145018 - DNA, 22 bp, Artificial Sequence
  Synthetic oligonucleotide; CTG chr11 5221124 5221145 5221129 5221124 -
tacatcgccatcatcaaagacc

SEQ ID NO: 145019 - DNA, 22 bp, Artificial Sequence
  Synthetic oligonucleotide; CTG chr11 5221052 5221073 5221057 5221052 -
gacactctaaaaatgagagtgc

SEQ ID NO: 145020 - DNA, 22 bp, Artificial Sequence
  Synthetic oligonucleotide; CTC chr11 5221045 5221066 5221050 5221045 -
taaaaatgagagtgcctctcct

SEQ ID NO: 145021 - DNA, 22 bp, Artificial Sequence
  Synthetic oligonucleotide; CTA chr11 5221043 5221064 5221048 5221043 -
aaaatgagagtgcctctcctcc

SEQ ID NO: 145022 - DNA, 22 bp, Artificial Sequence
  Synthetic oligonucleotide; CTC chr11 5221027 5221048 5221032 5221027 -
tcctcctccaaagtaacgcagc

SEQ ID NO: 145023 - DNA, 22 bp, Artificial Sequence
  Synthetic oligonucleotide; CTC chr11 5221025 5221046 5221030 5221025 -
ctcctccaaagtaacgcagctc

SEQ ID NO: 145024 - DNA, 22 bp, Artificial Sequence
  Synthetic oligonucleotide; CTC chr11 5221022 5221043 5221027 5221022 -
ctccaaagtaacgcagctcctc

SEQ ID NO: 145025 - DNA, 22 bp, Artificial Sequence
  Synthetic oligonucleotide; CTC chr11 5221019 5221040 5221024 5221019 -
caaagtaacgcagctcctcacc

SEQ ID NO: 145026 - DNA, 22 bp, Artificial Sequence
  Synthetic oligonucleotide; CTC chr11 5221003 5221024 5221008 5221003 -
ctcaccagcaatggaacaaagc

SEQ ID NO: 145027 - DNA, 22 bp, Artificial Sequence
  Synthetic oligonucleotide; CTC chr11 5221000 5221021 5221005 5221000 -
accagcaatggaacaaagctgg

SEQ ID NO: 145028 - DNA, 22 bp, Artificial Sequence
  Synthetic oligonucleotide; CTG chr11 5220979 5221000 5220984 5220979 -
ggcagagaatgactttgacgag

SEQ ID NO: 145029 - DNA, 22 bp, Artificial Sequence
  Synthetic oligonucleotide; CTT chr11 5220964 5220985 5220969 5220964 -
tgacgagttgagagaggaaggc

SEQ ID NO: 145030 - DNA, 22 bp, Artificial Sequence
  Synthetic oligonucleotide; TTT chr11 5220963 5220984 5220968 5220963 -
gacgagttgagagaggaaggct

SEQ ID NO: 145031 - DNA, 22 bp, Artificial Sequence
  Synthetic oligonucleotide; TTG chr11 5220962 5220983 5220967 5220962 -
acgagttgagagaggaaggctt

SEQ ID NO: 145032 - DNA, 22 bp, Artificial Sequence
  Synthetic oligonucleotide; TTG chr11 5220954 5220975 5220959 5220954 -
agagaggaaggcttcagaagat

SEQ ID NO: 145033 - DNA, 22 bp, Artificial Sequence
  Synthetic oligonucleotide; CTT chr11 5220940 5220961 5220945 5220940 -
cagaagatcaaactactccaag

SEQ ID NO: 145034 - DNA, 22 bp, Artificial Sequence
  Synthetic oligonucleotide; TTC chr11 5220939 5220960 5220944 5220939 -
agaagatcaaactactccaagc

SEQ ID NO: 145035 - DNA, 22 bp, Artificial Sequence
  Synthetic oligonucleotide; CTA chr11 5220925 5220946 5220930 5220925 -
ctccaagctaaaggaggaagtt

SEQ ID NO: 145036 - DNA, 22 bp, Artificial Sequence
  Synthetic oligonucleotide; CTC chr11 5220922 5220943 5220927 5220922 -
caagctaaaggaggaagttcga

SEQ ID NO: 145037 - DNA, 22 bp, Artificial Sequence
  Synthetic oligonucleotide; CTA chr11 5220915 5220936 5220920 5220915 -
aaggaggaagttcgaacaaacg

SEQ ID NO: 145038 - DNA, 22 bp, Artificial Sequence
  Synthetic oligonucleotide; TTC chr11 5220902 5220923 5220907 5220902 -
gaacaaacggcaaagaagtaaa

SEQ ID NO: 145039 - DNA, 22 bp, Artificial Sequence
  Synthetic oligonucleotide; CTT chr11 5220874 5220895 5220879 5220874 -
tgaaaaaaaattagatgaatgg

SEQ ID NO: 145040 - DNA, 22 bp, Artificial Sequence
  Synthetic oligonucleotide; TTT chr11 5220873 5220894 5220878 5220873 -
gaaaaaaaattagatgaatgga

SEQ ID NO: 145041 - DNA, 22 bp, Artificial Sequence
  Synthetic oligonucleotide; TTG chr11 5220872 5220893 5220877 5220872 -
aaaaaaaattagatgaatggat

SEQ ID NO: 145042 - DNA, 22 bp, Artificial Sequence
  Synthetic oligonucleotide; TTA chr11 5220861 5220882 5220866 5220861 -
gatgaatggataactagaataa

SEQ ID NO: 145043 - DNA, 22 bp, Artificial Sequence
  Synthetic oligonucleotide; CTA chr11 5220845 5220866 5220850 5220845 -
gaataaccaatgcacagaagtc

SEQ ID NO: 145044 - DNA, 22 bp, Artificial Sequence
  Synthetic oligonucleotide; CTT chr11 5220820 5220841 5220825 5220820 -
aaaggacctgatggagctgaaa

SEQ ID NO: 145045 - DNA, 22 bp, Artificial Sequence
  Synthetic oligonucleotide; TTA chr11 5220819 5220840 5220824 5220819 -
aaggacctgatggagctgaaaa

SEQ ID NO: 145046 - DNA, 22 bp, Artificial Sequence
  Synthetic oligonucleotide; CTG chr11 5220810 5220831 5220815 5220810 -
atggagctgaaaaccaaggcag

SEQ ID NO: 145047 - DNA, 22 bp, Artificial Sequence
  Synthetic oligonucleotide; CTG chr11 5220801 5220822 5220806 5220801 -
aaaaccaaggcaggagaactac

SEQ ID NO: 145048 - DNA, 22 bp, Artificial Sequence
  Synthetic oligonucleotide; CTA chr11 5220780 5220801 5220785 5220780 -
cgtgacaaatacacaagcctca

SEQ ID NO: 145049 - DNA, 22 bp, Artificial Sequence
  Synthetic oligonucleotide; CTC chr11 5220759 5220780 5220764 5220759 -
agtaaccgatgagatcaactgg

SEQ ID NO: 145050 - DNA, 22 bp, Artificial Sequence
  Synthetic oligonucleotide; CTG chr11 5220738 5220759 5220743 5220738 -
gaagaaagggtatcaatgacga

SEQ ID NO: 145051 - DNA, 22 bp, Artificial Sequence
  Synthetic oligonucleotide; TTT chr11 5220678 5220699 5220683 5220678 -
agagaaaaaagaataaaaagaa

SEQ ID NO: 145052 - DNA, 22 bp, Artificial Sequence
  Synthetic oligonucleotide; TTA chr11 5220677 5220698 5220682 5220677 -
gagaaaaaagaataaaaagaaa

SEQ ID NO: 145053 - DNA, 22 bp, Artificial Sequence
  Synthetic oligonucleotide; CTC chr11 5220642 5220663 5220647 5220642 -
caagaaatatgggactatgtga

SEQ ID NO: 145054 - DNA, 22 bp, Artificial Sequence
  Synthetic oligonucleotide; CTA chr11 5220625 5220646 5220630 5220625 -
tgtgaaaagaccaaatctacat

SEQ ID NO: 145055 - DNA, 22 bp, Artificial Sequence
  Synthetic oligonucleotide; CTA chr11 5220606 5220627 5220611 5220606 -
catctaattggtgtagctgaaa

SEQ ID NO: 145056 - DNA, 22 bp, Artificial Sequence
  Synthetic oligonucleotide; CTA chr11 5220600 5220621 5220605 5220600 -
attggtgtagctgaaagtgatg

SEQ ID NO: 145057 - DNA, 22 bp, Artificial Sequence
  Synthetic oligonucleotide; TTG chr11 5220596 5220617 5220601 5220596 -
gtgtagctgaaagtgatgggga

SEQ ID NO: 145058 - DNA, 22 bp, Artificial Sequence
  Synthetic oligonucleotide; CTG chr11 5220587 5220608 5220592 5220587 -
aaagtgatggggagaatggaac

SEQ ID NO: 145059 - DNA, 22 bp, Artificial Sequence
  Synthetic oligonucleotide; TTG chr11 5220558 5220579 5220563 5220558 -
gaaaacactctgcaggatatta

SEQ ID NO: 145060 - DNA, 22 bp, Artificial Sequence
  Synthetic oligonucleotide; CTC chr11 5220548 5220569 5220553 5220548 -
tgcaggatattatccaggagaa

SEQ ID NO: 145061 - DNA, 22 bp, Artificial Sequence
  Synthetic oligonucleotide; CTG chr11 5220546 5220567 5220551 5220546 -
caggatattatccaggagaact

SEQ ID NO: 145062 - DNA, 22 bp, Artificial Sequence
  Synthetic oligonucleotide; TTA chr11 5220536 5220557 5220541 5220536 -
tccaggagaacttccccaatct

SEQ ID NO: 145063 - DNA, 22 bp, Artificial Sequence
  Synthetic oligonucleotide; CTT chr11 5220523 5220544 5220528 5220523 -
ccccaatctagcaaggcaagcc

SEQ ID NO: 145064 - DNA, 22 bp, Artificial Sequence
  Synthetic oligonucleotide; TTC chr11 5220522 5220543 5220527 5220522 -
cccaatctagcaaggcaagccc

SEQ ID NO: 145065 - DNA, 22 bp, Artificial Sequence
  Synthetic oligonucleotide; CTA chr11 5220513 5220534 5220518 5220513 -
gcaaggcaagcccaaattcaca

SEQ ID NO: 145066 - DNA, 22 bp, Artificial Sequence
  Synthetic oligonucleotide; TTC chr11 5220494 5220515 5220499 5220494 -
acattcaggaaatacagagaac

SEQ ID NO: 145067 - DNA, 22 bp, Artificial Sequence
  Synthetic oligonucleotide; TTC chr11 5220488 5220509 5220493 5220488 -
aggaaatacagagaacgccaca

SEQ ID NO: 145068 - DNA, 22 bp, Artificial Sequence
  Synthetic oligonucleotide; CTC chr11 5220457 5220478 5220462 5220457 -
ctagagaaaagcaactccaaga

SEQ ID NO: 145069 - DNA, 22 bp, Artificial Sequence
  Synthetic oligonucleotide; CTA chr11 5220454 5220475 5220459 5220454 -
gagaaaagcaactccaagacac

SEQ ID NO: 145070 - DNA, 22 bp, Artificial Sequence
  Synthetic oligonucleotide; CTC chr11 5220440 5220461 5220445 5220440 -
caagacacataactgtcagatt

SEQ ID NO: 145071 - DNA, 22 bp, Artificial Sequence
  Synthetic oligonucleotide; CTG chr11 5220425 5220446 5220430 5220425 -
tcagattcaccaaagttgaaat

SEQ ID NO: 145072 - DNA, 22 bp, Artificial Sequence
  Synthetic oligonucleotide; TTC chr11 5220417 5220438 5220422 5220417 -
accaaagttgaaatgaaggaaa

SEQ ID NO: 145073 - DNA, 22 bp, Artificial Sequence
  Synthetic oligonucleotide; TTG chr11 5220407 5220428 5220412 5220407 -
aaatgaaggaaaaaatgttaag

SEQ ID NO: 145074 - DNA, 22 bp, Artificial Sequence
  Synthetic oligonucleotide; TTA chr11 5220387 5220408 5220392 5220387 -
agggcagccagagagaaaggtc

SEQ ID NO: 145075 - DNA, 22 bp, Artificial Sequence
  Synthetic oligonucleotide; TTA chr11 5220359 5220380 5220364 5220359 -
cccacaaagggaagcccatcag

SEQ ID NO: 145076 - DNA, 22 bp, Artificial Sequence
  Synthetic oligonucleotide; CTA chr11 5220333 5220354 5220338 5220333 -
acagctgatctatcggcagaaa

SEQ ID NO: 145077 - DNA, 22 bp, Artificial Sequence
  Synthetic oligonucleotide; CTG chr11 5220326 5220347 5220331 5220326 -
atctatcggcagaaactctaca

SEQ ID NO: 145078 - DNA, 22 bp, Artificial Sequence
  Synthetic oligonucleotide; CTA chr11 5220321 5220342 5220326 5220321 -
tcggcagaaactctacaagcca

SEQ ID NO: 145079 - DNA, 22 bp, Artificial Sequence
  Synthetic oligonucleotide; CTC chr11 5220308 5220329 5220313 5220308 -
tacaagccagaagaaagtgggg

SEQ ID NO: 145080 - DNA, 22 bp, Artificial Sequence
  Synthetic oligonucleotide; CTA chr11 5220306 5220327 5220311 5220306 -
caagccagaagaaagtgggggc

SEQ ID NO: 145081 - DNA, 22 bp, Artificial Sequence
  Synthetic oligonucleotide; TTC chr11 5220276 5220297 5220281 5220276 -
aacattgttaaagaaaagaatt

SEQ ID NO: 145082 - DNA, 22 bp, Artificial Sequence
  Synthetic oligonucleotide; TTG chr11 5220269 5220290 5220274 5220269 -
ttaaagaaaagaattttcaacc

SEQ ID NO: 145083 - DNA, 22 bp, Artificial Sequence
  Synthetic oligonucleotide; TTA chr11 5220266 5220287 5220271 5220266 -
aagaaaagaattttcaacccag

SEQ ID NO: 145084 - DNA, 22 bp, Artificial Sequence
  Synthetic oligonucleotide; TTT chr11 5220253 5220274 5220258 5220253 -
tcaacccagaatttcatatcca

SEQ ID NO: 145085 - DNA, 22 bp, Artificial Sequence
  Synthetic oligonucleotide; TTT chr11 5220252 5220273 5220257 5220252 -
caacccagaatttcatatccag

SEQ ID NO: 145086 - DNA, 22 bp, Artificial Sequence
  Synthetic oligonucleotide; TTC chr11 5220251 5220272 5220256 5220251 -
aacccagaatttcatatccagc

SEQ ID NO: 145087 - DNA, 22 bp, Artificial Sequence
  Synthetic oligonucleotide; TTT chr11 5220239 5220260 5220244 5220239 -
catatccagccaaactaagctt

SEQ ID NO: 145088 - DNA, 22 bp, Artificial Sequence
  Synthetic oligonucleotide; TTC chr11 5220238 5220259 5220243 5220238 -
atatccagccaaactaagcttc

SEQ ID NO: 145089 - DNA, 22 bp, Artificial Sequence
  Synthetic oligonucleotide; CTA chr11 5220222 5220243 5220227 5220222 -
agcttcataagtgaaggagaaa

SEQ ID NO: 145090 - DNA, 22 bp, Artificial Sequence
  Synthetic oligonucleotide; CTT chr11 5220217 5220238 5220222 5220217 -
cataagtgaaggagaaataaaa

SEQ ID NO: 145091 - DNA, 22 bp, Artificial Sequence
  Synthetic oligonucleotide; TTC chr11 5220216 5220237 5220221 5220216 -
ataagtgaaggagaaataaaat

SEQ ID NO: 145092 - DNA, 22 bp, Artificial Sequence
  Synthetic oligonucleotide; CTT chr11 5220190 5220211 5220195 5220190 -
tacagacaagcaaatgctgaga

SEQ ID NO: 145093 - DNA, 22 bp, Artificial Sequence
  Synthetic oligonucleotide; TTT chr11 5220189 5220210 5220194 5220189 -
acagacaagcaaatgctgagag

SEQ ID NO: 145094 - DNA, 22 bp, Artificial Sequence
  Synthetic oligonucleotide; TTA chr11 5220188 5220209 5220193 5220188 -
cagacaagcaaatgctgagaga

SEQ ID NO: 145095 - DNA, 22 bp, Artificial Sequence
  Synthetic oligonucleotide; CTG chr11 5220171 5220192 5220176 5220171 -
agagattttgtcaccaccaggc

SEQ ID NO: 145096 - DNA, 22 bp, Artificial Sequence
  Synthetic oligonucleotide; TTT chr11 5220163 5220184 5220168 5220163 -
tgtcaccaccaggcctgcccta

SEQ ID NO: 145097 - DNA, 22 bp, Artificial Sequence
  Synthetic oligonucleotide; TTT chr11 5220162 5220183 5220167 5220162 -
gtcaccaccaggcctgccctac

SEQ ID NO: 145098 - DNA, 22 bp, Artificial Sequence
  Synthetic oligonucleotide; TTG chr11 5220161 5220182 5220166 5220161 -
tcaccaccaggcctgccctaca

SEQ ID NO: 145099 - DNA, 22 bp, Artificial Sequence
  Synthetic oligonucleotide; CTG chr11 5220146 5220167 5220151 5220146 -
ccctacaagagctcctgaagga

SEQ ID NO: 145100 - DNA, 22 bp, Artificial Sequence
  Synthetic oligonucleotide; CTA chr11 5220141 5220162 5220146 5220141 -
caagagctcctgaaggaagcac

SEQ ID NO: 145101 - DNA, 22 bp, Artificial Sequence
  Synthetic oligonucleotide; CTC chr11 5220132 5220153 5220137 5220132 -
ctgaaggaagcactaaacatgg

SEQ ID NO: 145102 - DNA, 22 bp, Artificial Sequence
  Synthetic oligonucleotide; CTG chr11 5220129 5220150 5220134 5220129 -
aaggaagcactaaacatggaaa

SEQ ID NO: 145103 - DNA, 22 bp, Artificial Sequence
  Synthetic oligonucleotide; CTA chr11 5220117 5220138 5220122 5220117 -
aacatggaaaggaacaactagt

SEQ ID NO: 145104 - DNA, 22 bp, Artificial Sequence
  Synthetic oligonucleotide; CTA chr11 5220097 5220118 5220102 5220097 -
gtatcagccactgcaaaaacat

SEQ ID NO: 145105 - DNA, 22 bp, Artificial Sequence
  Synthetic oligonucleotide; CTG chr11 5220084 5220105 5220089 5220084 -
caaaaacatgccaaattgtaaa

SEQ ID NO: 145106 - DNA, 22 bp, Artificial Sequence
  Synthetic oligonucleotide; TTG chr11 5220066 5220087 5220071 5220066 -
taaagaccatcaaggctaggaa

SEQ ID NO: 145107 - DNA, 22 bp, Artificial Sequence
  Synthetic oligonucleotide; CTA chr11 5220048 5220069 5220053 5220048 -
ggaagaaactgcatcaacgagc

SEQ ID NO: 145108 - DNA, 22 bp, Artificial Sequence
  Synthetic oligonucleotide; CTG chr11 5220037 5220058 5220042 5220037 -
catcaacgagcaaaataaccag

SEQ ID NO: 145109 - DNA, 22 bp, Artificial Sequence
  Synthetic oligonucleotide; CTA chr11 5220012 5220033 5220017 5220012 -
acatcataatgacaggatcaaa

SEQ ID NO: 145110 - DNA, 22 bp, Artificial Sequence
  Synthetic oligonucleotide; TTC chr11 5219987 5220008 5219992 5219987 -
atacataacaatactcacctta

SEQ ID NO: 145111 - DNA, 22 bp, Artificial Sequence
  Synthetic oligonucleotide; CTC chr11 5219971 5219992 5219976 5219971 -
accttaaatgtaaataggctaa

SEQ ID NO: 145112 - DNA, 22 bp, Artificial Sequence
  Synthetic oligonucleotide; CTT chr11 5219966 5219987 5219971 5219966 -
aaatgtaaataggctaaatgct

SEQ ID NO: 145113 - DNA, 22 bp, Artificial Sequence
  Synthetic oligonucleotide; TTA chr11 5219965 5219986 5219970 5219965 -
aatgtaaataggctaaatgctc

SEQ ID NO: 145114 - DNA, 22 bp, Artificial Sequence
  Synthetic oligonucleotide; CTA chr11 5219950 5219971 5219955 5219950 -
aatgctccaattaaaagacaca

SEQ ID NO: 145115 - DNA, 22 bp, Artificial Sequence
  Synthetic oligonucleotide; CTC chr11 5219943 5219964 5219948 5219943 -
caattaaaagacacagactggc

SEQ ID NO: 145116 - DNA, 22 bp, Artificial Sequence
  Synthetic oligonucleotide; TTA chr11 5219937 5219958 5219942 5219937 -
aaagacacagactggcaaattg

SEQ ID NO: 145117 - DNA, 22 bp, Artificial Sequence
  Synthetic oligonucleotide; CTG chr11 5219923 5219944 5219928 5219923 -
gcaaattggataaggagtcaag

SEQ ID NO: 145118 - DNA, 22 bp, Artificial Sequence
  Synthetic oligonucleotide; TTG chr11 5219915 5219936 5219920 5219915 -
gataaggagtcaagacccatct

SEQ ID NO: 145119 - DNA, 22 bp, Artificial Sequence
  Synthetic oligonucleotide; CTG chr11 5219892 5219913 5219897 5219892 -
tgttctgtattcaggaaaccca

SEQ ID NO: 145120 - DNA, 22 bp, Artificial Sequence
  Synthetic oligonucleotide; TTC chr11 5219887 5219908 5219892 5219887 -
tgtattcaggaaacccatctca

SEQ ID NO: 145121 - DNA, 22 bp, Artificial Sequence
  Synthetic oligonucleotide; CTG chr11 5219885 5219906 5219890 5219885 -
tattcaggaaacccatctcacg

SEQ ID NO: 145122 - DNA, 22 bp, Artificial Sequence
  Synthetic oligonucleotide; TTC chr11 5219880 5219901 5219885 5219880 -
aggaaacccatctcacgtgcag

SEQ ID NO: 145123 - DNA, 22 bp, Artificial Sequence
  Synthetic oligonucleotide; CTC chr11 5219866 5219887 5219871 5219866 -
acgtgcagagacacacataggc

SEQ ID NO: 145124 - DNA, 22 bp, Artificial Sequence
  Synthetic oligonucleotide; CTC chr11 5219842 5219863 5219847 5219842 -
gaaataaaaggatggaggaata

SEQ ID NO: 145125 - DNA, 22 bp, Artificial Sequence
  Synthetic oligonucleotide; CTA chr11 5219816 5219837 5219821 5219816 -
ccaagcaaatggaaaacaaaaa

SEQ ID NO: 145126 - DNA, 22 bp, Artificial Sequence
  Synthetic oligonucleotide; TTG chr11 5219781 5219802 5219786 5219781 -
caatcctagtctctgataaaac

SEQ ID NO: 145127 - DNA, 22 bp, Artificial Sequence
  Synthetic oligonucleotide; CTA chr11 5219773 5219794 5219778 5219773 -
gtctctgataaaacagatttta

SEQ ID NO: 145128 - DNA, 22 bp, Artificial Sequence
  Synthetic oligonucleotide; CTC chr11 5219768 5219789 5219773 5219768 -
tgataaaacagattttaaacca

SEQ ID NO: 145129 - DNA, 22 bp, Artificial Sequence
  Synthetic oligonucleotide; CTG chr11 5219766 5219787 5219771 5219766 -
ataaaacagattttaaaccaac

SEQ ID NO: 145130 - DNA, 22 bp, Artificial Sequence
  Synthetic oligonucleotide; TTT chr11 5219753 5219774 5219758 5219753 -
taaaccaacaaagatcaaaaga

SEQ ID NO: 145131 - DNA, 22 bp, Artificial Sequence
  Synthetic oligonucleotide; TTT chr11 5219752 5219773 5219757 5219752 -
aaaccaacaaagatcaaaagag

SEQ ID NO: 145132 - DNA, 22 bp, Artificial Sequence
  Synthetic oligonucleotide; TTA chr11 5219751 5219772 5219756 5219751 -
aaccaacaaagatcaaaagaga

SEQ ID NO: 145133 - DNA, 22 bp, Artificial Sequence
  Synthetic oligonucleotide; TTA chr11 5219714 5219735 5219719 5219714 -
cataatggcaaagggatctatt

SEQ ID NO: 145134 - DNA, 22 bp, Artificial Sequence
  Synthetic oligonucleotide; CTA chr11 5219694 5219715 5219699 5219694 -
ttcaagaagaagaactaactat

SEQ ID NO: 145135 - DNA, 22 bp, Artificial Sequence
  Synthetic oligonucleotide; TTC chr11 5219691 5219712 5219696 5219691 -
aagaagaagaactaactatact

SEQ ID NO: 145136 - DNA, 22 bp, Artificial Sequence
  Synthetic oligonucleotide; CTA chr11 5219677 5219698 5219682 5219677 -
actatactaaatatatatgcac

SEQ ID NO: 145137 - DNA, 22 bp, Artificial Sequence
  Synthetic oligonucleotide; CTA chr11 5219673 5219694 5219678 5219673 -
tactaaatatatatgcacccaa

SEQ ID NO: 145138 - DNA, 22 bp, Artificial Sequence
  Synthetic oligonucleotide; CTA chr11 5219668 5219689 5219673 5219668 -
aatatatatgcacccaatacag

SEQ ID NO: 145139 - DNA, 22 bp, Artificial Sequence
  Synthetic oligonucleotide; TTC chr11 5219632 5219653 5219637 5219632 -
ataaaacaagtcctgagtgacc

SEQ ID NO: 145140 - DNA, 22 bp, Artificial Sequence
  Synthetic oligonucleotide; CTG chr11 5219617 5219638 5219622 5219617 -
agtgacctacaaagagacttag

SEQ ID NO: 145141 - DNA, 22 bp, Artificial Sequence
  Synthetic oligonucleotide; CTA chr11 5219608 5219629 5219613 5219608 -
caaagagacttagatgcccaca

SEQ ID NO: 145142 - DNA, 22 bp, Artificial Sequence
  Synthetic oligonucleotide; CTT chr11 5219597 5219618 5219602 5219597 -
agatgcccacacaataataatg

SEQ ID NO: 145143 - DNA, 22 bp, Artificial Sequence
  Synthetic oligonucleotide; TTA chr11 5219596 5219617 5219601 5219596 -
gatgcccacacaataataatgg

SEQ ID NO: 145144 - DNA, 22 bp, Artificial Sequence
  Synthetic oligonucleotide; CTT chr11 5219567 5219588 5219572 5219567 -
taacaccccactgtcaacatta

SEQ ID NO: 145145 - DNA, 22 bp, Artificial Sequence
  Synthetic oligonucleotide; TTT chr11 5219566 5219587 5219571 5219566 -
aacaccccactgtcaacattag

SEQ ID NO: 145146 - DNA, 22 bp, Artificial Sequence
  Synthetic oligonucleotide; TTA chr11 5219565 5219586 5219570 5219565 -
acaccccactgtcaacattaga

SEQ ID NO: 145147 - DNA, 22 bp, Artificial Sequence
  Synthetic oligonucleotide; CTG chr11 5219554 5219575 5219559 5219554 -
tcaacattagacagatcaacga

SEQ ID NO: 145148 - DNA, 22 bp, Artificial Sequence
  Synthetic oligonucleotide; TTA chr11 5219545 5219566 5219550 5219545 -
gacagatcaacgagacagaaag

SEQ ID NO: 145149 - DNA, 22 bp, Artificial Sequence
  Synthetic oligonucleotide; TTA chr11 5219520 5219541 5219525 5219520 -
acaaggatatccaggaattgga

SEQ ID NO: 145150 - DNA, 22 bp, Artificial Sequence
  Synthetic oligonucleotide; TTG chr11 5219500 5219521 5219505 5219500 -
gactcagctctgcaccaagcag

SEQ ID NO: 145151 - DNA, 22 bp, Artificial Sequence
  Synthetic oligonucleotide; CTC chr11 5219495 5219516 5219500 5219495 -
agctctgcaccaagcagaccta

SEQ ID NO: 145152 - DNA, 22 bp, Artificial Sequence
  Synthetic oligonucleotide; CTC chr11 5219490 5219511 5219495 5219490 -
tgcaccaagcagacctaataga

SEQ ID NO: 145153 - DNA, 22 bp, Artificial Sequence
  Synthetic oligonucleotide; CTG chr11 5219488 5219509 5219493 5219488 -
caccaagcagacctaatagaca

SEQ ID NO: 145154 - DNA, 22 bp, Artificial Sequence
  Synthetic oligonucleotide; CTA chr11 5219473 5219494 5219478 5219473 -
atagacatctacagaactctcc

SEQ ID NO: 145155 - DNA, 22 bp, Artificial Sequence
  Synthetic oligonucleotide; CTA chr11 5219462 5219483 5219467 5219462 -
cagaactctccaccccaaatca

SEQ ID NO: 145156 - DNA, 22 bp, Artificial Sequence
  Synthetic oligonucleotide; CTC chr11 5219454 5219475 5219459 5219454 -
tccaccccaaatcaacagaata

SEQ ID NO: 145157 - DNA, 22 bp, Artificial Sequence
  Synthetic oligonucleotide; CTC chr11 5219452 5219473 5219457 5219452 -
caccccaaatcaacagaatata

SEQ ID NO: 145158 - DNA, 22 bp, Artificial Sequence
  Synthetic oligonucleotide; TTC chr11 5219425 5219446 5219430 5219425 -
ttttcagcaccacaccacacct

SEQ ID NO: 145159 - DNA, 22 bp, Artificial Sequence
  Synthetic oligonucleotide; CTT chr11 5219423 5219444 5219428 5219423 -
ttcagcaccacaccacacctat

SEQ ID NO: 145160 - DNA, 22 bp, Artificial Sequence
  Synthetic oligonucleotide; TTT chr11 5219422 5219443 5219427 5219422 -
tcagcaccacaccacacctatt

SEQ ID NO: 145161 - DNA, 22 bp, Artificial Sequence
  Synthetic oligonucleotide; TTT chr11 5219421 5219442 5219426 5219421 -
cagcaccacaccacacctattc

SEQ ID NO: 145162 - DNA, 22 bp, Artificial Sequence
  Synthetic oligonucleotide; TTC chr11 5219420 5219441 5219425 5219420 -
agcaccacaccacacctattcc

SEQ ID NO: 145163 - DNA, 22 bp, Artificial Sequence
  Synthetic oligonucleotide; CTA chr11 5219402 5219423 5219407 5219402 -
ttccaaaactgaccacatagtt

SEQ ID NO: 145164 - DNA, 22 bp, Artificial Sequence
  Synthetic oligonucleotide; TTC chr11 5219399 5219420 5219404 5219399 -
caaaactgaccacatagttgga

SEQ ID NO: 145165 - DNA, 22 bp, Artificial Sequence
  Synthetic oligonucleotide; CTG chr11 5219391 5219412 5219396 5219391 -
accacatagttggaagtaaagc

SEQ ID NO: 145166 - DNA, 22 bp, Artificial Sequence
  Synthetic oligonucleotide; TTG chr11 5219379 5219400 5219384 5219379 -
gaagtaaagctctcctcagcaa

SEQ ID NO: 145167 - DNA, 22 bp, Artificial Sequence
  Synthetic oligonucleotide; CTC chr11 5219367 5219388 5219372 5219367 -
tcctcagcaaatgtaaaagaac

SEQ ID NO: 145168 - DNA, 22 bp, Artificial Sequence
  Synthetic oligonucleotide; CTC chr11 5219365 5219386 5219370 5219365 -
ctcagcaaatgtaaaagaacag

SEQ ID NO: 145169 - DNA, 22 bp, Artificial Sequence
  Synthetic oligonucleotide; CTC chr11 5219362 5219383 5219367 5219362 -
agcaaatgtaaaagaacagaaa

SEQ ID NO: 145170 - DNA, 22 bp, Artificial Sequence
  Synthetic oligonucleotide; CTA chr11 5219337 5219358 5219342 5219337 -
taacaaactgtctctcagacca

SEQ ID NO: 145171 - DNA, 22 bp, Artificial Sequence
  Synthetic oligonucleotide; CTG chr11 5219327 5219348 5219332 5219327 -
tctctcagaccacagtgcaatc

SEQ ID NO: 145172 - DNA, 22 bp, Artificial Sequence
  Synthetic oligonucleotide; CTC chr11 5219323 5219344 5219328 5219323 -
tcagaccacagtgcaatcaaac

SEQ ID NO: 145173 - DNA, 22 bp, Artificial Sequence
  Synthetic oligonucleotide; CTC chr11 5219321 5219342 5219326 5219321 -
agaccacagtgcaatcaaacta

SEQ ID NO: 145174 - DNA, 22 bp, Artificial Sequence
  Synthetic oligonucleotide; CTA chr11 5219299 5219320 5219304 5219299 -
gaactcaggattaagaaactca

SEQ ID NO: 145175 - DNA, 22 bp, Artificial Sequence
  Synthetic oligonucleotide; CTC chr11 5219293 5219314 5219298 5219293 -
aggattaagaaactcactcaaa

SEQ ID NO: 145176 - DNA, 22 bp, Artificial Sequence
  Synthetic oligonucleotide; TTA chr11 5219286 5219307 5219291 5219286 -
agaaactcactcaaaaccactc

SEQ ID NO: 145177 - DNA, 22 bp, Artificial Sequence
  Synthetic oligonucleotide; CTC chr11 5219278 5219299 5219283 5219278 -
actcaaaaccactcagctacat

SEQ ID NO: 145178 - DNA, 22 bp, Artificial Sequence
  Synthetic oligonucleotide; CTC chr11 5219274 5219295 5219279 5219274 -
aaaaccactcagctacatggaa

SEQ ID NO: 145179 - DNA, 22 bp, Artificial Sequence
  Synthetic oligonucleotide; CTC chr11 5219264 5219285 5219269 5219264 -
agctacatggaaactgaacagc

SEQ ID NO: 145180 - DNA, 22 bp, Artificial Sequence
  Synthetic oligonucleotide; CTA chr11 5219259 5219280 5219264 5219259 -
catggaaactgaacagcctgct

SEQ ID NO: 145181 - DNA, 22 bp, Artificial Sequence
  Synthetic oligonucleotide; CTG chr11 5219248 5219269 5219253 5219248 -
aacagcctgctcctgaatgact

SEQ ID NO: 145182 - DNA, 22 bp, Artificial Sequence
  Synthetic oligonucleotide; CTG chr11 5219239 5219260 5219244 5219239 -
ctcctgaatgactactgggtac

SEQ ID NO: 145183 - DNA, 22 bp, Artificial Sequence
  Synthetic oligonucleotide; CTC chr11 5219236 5219257 5219241 5219236 -
ctgaatgactactgggtacata

SEQ ID NO: 145184 - DNA, 22 bp, Artificial Sequence
  Synthetic oligonucleotide; CTG chr11 5219233 5219254 5219238 5219233 -
aatgactactgggtacataaca

SEQ ID NO: 145185 - DNA, 22 bp, Artificial Sequence
  Synthetic oligonucleotide; CTA chr11 5219225 5219246 5219230 5219225 -
ctgggtacataacaaaatgaag

SEQ ID NO: 145186 - DNA, 22 bp, Artificial Sequence
  Synthetic oligonucleotide; CTG chr11 5219222 5219243 5219227 5219222 -
ggtacataacaaaatgaaggca

SEQ ID NO: 145187 - DNA, 22 bp, Artificial Sequence
  Synthetic oligonucleotide; TTC chr11 5219185 5219206 5219190 5219185 -
tttgaaaccaacgagaacaaag

SEQ ID NO: 145188 - DNA, 22 bp, Artificial Sequence
  Synthetic oligonucleotide; CTT chr11 5219183 5219204 5219188 5219183 -
tgaaaccaacgagaacaaagac

SEQ ID NO: 145189 - DNA, 22 bp, Artificial Sequence
  Synthetic oligonucleotide; TTT chr11 5219182 5219203 5219187 5219182 -
gaaaccaacgagaacaaagaca

SEQ ID NO: 145190 - DNA, 22 bp, Artificial Sequence
  Synthetic oligonucleotide; TTG chr11 5219181 5219202 5219186 5219181 -
aaaccaacgagaacaaagacac

SEQ ID NO: 145191 - DNA, 22 bp, Artificial Sequence
  Synthetic oligonucleotide; CTC chr11 5219143 5219164 5219148 5219143 -
tgagacacattcaaagcagtgt

SEQ ID NO: 145192 - DNA, 22 bp, Artificial Sequence
  Synthetic oligonucleotide; CTG chr11 5219141 5219162 5219146 5219141 -
agacacattcaaagcagtgtgt

SEQ ID NO: 145193 - DNA, 22 bp, Artificial Sequence
  Synthetic oligonucleotide; TTC chr11 5219131 5219152 5219136 5219131 -
aaagcagtgtgtagagggaaat

SEQ ID NO: 145194 - DNA, 22 bp, Artificial Sequence
  Synthetic oligonucleotide; TTT chr11 5219107 5219128 5219112 5219107 -
atagcactaaatgcccacaagg

SEQ ID NO: 145195 - DNA, 22 bp, Artificial Sequence
  Synthetic oligonucleotide; TTA chr11 5219106 5219127 5219111 5219106 -
tagcactaaatgcccacaaggg

SEQ ID NO: 145196 - DNA, 22 bp, Artificial Sequence
  Synthetic oligonucleotide; CTA chr11 5219098 5219119 5219103 5219098 -
aatgcccacaagggaaagcagg

SEQ ID NO: 145197 - DNA, 22 bp, Artificial Sequence
  Synthetic oligonucleotide; CTA chr11 5219067 5219088 5219072 5219067 -
aaattgacaccctaacatcaca

SEQ ID NO: 145198 - DNA, 22 bp, Artificial Sequence
  Synthetic oligonucleotide; TTG chr11 5219061 5219082 5219066 5219061 -
acaccctaacatcacaattaaa

SEQ ID NO: 145199 - DNA, 22 bp, Artificial Sequence
  Synthetic oligonucleotide; CTA chr11 5219053 5219074 5219058 5219053 -
acatcacaattaaaaaactaga

SEQ ID NO: 145200 - DNA, 22 bp, Artificial Sequence
  Synthetic oligonucleotide; TTA chr11 5219041 5219062 5219046 5219041 -
aaaaactagagaagcaggagca

SEQ ID NO: 145201 - DNA, 22 bp, Artificial Sequence
  Synthetic oligonucleotide; CTA chr11 5219033 5219054 5219038 5219033 -
gagaagcaggagcaaacacatt

SEQ ID NO: 145202 - DNA, 22 bp, Artificial Sequence
  Synthetic oligonucleotide; TTC chr11 5219010 5219031 5219015 5219010 -
aaaagctaacagaagacaagaa

SEQ ID NO: 145203 - DNA, 22 bp, Artificial Sequence
  Synthetic oligonucleotide; CTA chr11 5219002 5219023 5219007 5219002 -
acagaagacaagaaataactaa

SEQ ID NO: 145204 - DNA, 22 bp, Artificial Sequence
  Synthetic oligonucleotide; CTA chr11 5218981 5219002 5218986 5218981 -
agatcagagcagaagtgaagga

SEQ ID NO: 145205 - DNA, 22 bp, Artificial Sequence
  Synthetic oligonucleotide; CTT chr11 5218936 5218957 5218941 5218936 -
caaaaaaatcaatgaatccaga

SEQ ID NO: 145206 - DNA, 22 bp, Artificial Sequence
  Synthetic oligonucleotide; TTC chr11 5218935 5218956 5218940 5218935 -
aaaaaaatcaatgaatccagaa

SEQ ID NO: 145207 - DNA, 22 bp, Artificial Sequence
  Synthetic oligonucleotide; CTG chr11 5218909 5218930 5218914 5218909 -
tttttttgaaaagatcaacaaa

SEQ ID NO: 145208 - DNA, 22 bp, Artificial Sequence
  Synthetic oligonucleotide; TTT chr11 5218906 5218927 5218911 5218906 -
ttttgaaaagatcaacaaaatt

SEQ ID NO: 145209 - DNA, 22 bp, Artificial Sequence
  Synthetic oligonucleotide; TTT chr11 5218905 5218926 5218910 5218905 -
tttgaaaagatcaacaaaattg

SEQ ID NO: 145210 - DNA, 22 bp, Artificial Sequence
  Synthetic oligonucleotide; TTT chr11 5218904 5218925 5218909 5218904 -
ttgaaaagatcaacaaaattga

SEQ ID NO: 145211 - DNA, 22 bp, Artificial Sequence
  Synthetic oligonucleotide; TTT chr11 5218903 5218924 5218908 5218903 -
tgaaaagatcaacaaaattgat

SEQ ID NO: 145212 - DNA, 22 bp, Artificial Sequence
  Synthetic oligonucleotide; TTT chr11 5218902 5218923 5218907 5218902 -
gaaaagatcaacaaaattgata

SEQ ID NO: 145213 - DNA, 22 bp, Artificial Sequence
  Synthetic oligonucleotide; TTG chr11 5218901 5218922 5218906 5218901 -
aaaagatcaacaaaattgatag

SEQ ID NO: 145214 - DNA, 22 bp, Artificial Sequence
  Synthetic oligonucleotide; TTG chr11 5218883 5218904 5218888 5218883 -
atagactgctagcaagactaat

SEQ ID NO: 145215 - DNA, 22 bp, Artificial Sequence
  Synthetic oligonucleotide; CTG chr11 5218875 5218896 5218880 5218875 -
ctagcaagactaataaagaaga

SEQ ID NO: 145216 - DNA, 22 bp, Artificial Sequence
  Synthetic oligonucleotide; CTA chr11 5218872 5218893 5218877 5218872 -
gcaagactaataaagaagaaaa

SEQ ID NO: 145217 - DNA, 22 bp, Artificial Sequence
  Synthetic oligonucleotide; CTA chr11 5218863 5218884 5218868 5218863 -
ataaagaagaaaagagagaaga

SEQ ID NO: 145218 - DNA, 22 bp, Artificial Sequence
  Synthetic oligonucleotide; CTG chr11 5218798 5218819 5218803 5218798 -
atcccacagaaatacaaactac

SEQ ID NO: 145219 - DNA, 22 bp, Artificial Sequence
  Synthetic oligonucleotide; CTA chr11 5218777 5218798 5218782 5218777 -
ccgtcagagaatactataaaca

SEQ ID NO: 145220 - DNA, 22 bp, Artificial Sequence
  Synthetic oligonucleotide; CTA chr11 5218761 5218782 5218766 5218761 -
taaacacctctacgcaaataaa

SEQ ID NO: 145221 - DNA, 22 bp, Artificial Sequence
  Synthetic oligonucleotide; CTC chr11 5218751 5218772 5218756 5218751 -
tacgcaaataaactagaaaatc

SEQ ID NO: 145222 - DNA, 22 bp, Artificial Sequence
  Synthetic oligonucleotide; CTA chr11 5218749 5218770 5218754 5218749 -
cgcaaataaactagaaaatcta

SEQ ID NO: 145223 - DNA, 22 bp, Artificial Sequence
  Synthetic oligonucleotide; CTA chr11 5218736 5218757 5218741 5218736 -
gaaaatctagaagaaatggata

SEQ ID NO: 145224 - DNA, 22 bp, Artificial Sequence
  Synthetic oligonucleotide; CTA chr11 5218727 5218748 5218732 5218727 -
gaagaaatggataaattcctcg

SEQ ID NO: 145225 - DNA, 22 bp, Artificial Sequence
  Synthetic oligonucleotide; TTC chr11 5218709 5218730 5218714 5218709 -
ctcgacacatacactctgccaa

SEQ ID NO: 145226 - DNA, 22 bp, Artificial Sequence
  Synthetic oligonucleotide; CTC chr11 5218706 5218727 5218711 5218706 -
gacacatacactctgccaagac

SEQ ID NO: 145227 - DNA, 22 bp, Artificial Sequence
  Synthetic oligonucleotide; CTC chr11 5218693 5218714 5218698 5218693 -
tgccaagactaaaccaggaaga

SEQ ID NO: 145228 - DNA, 22 bp, Artificial Sequence
  Synthetic oligonucleotide; CTG chr11 5218691 5218712 5218696 5218691 -
ccaagactaaaccaggaagaag

SEQ ID NO: 145229 - DNA, 22 bp, Artificial Sequence
  Synthetic oligonucleotide; CTA chr11 5218682 5218703 5218687 5218682 -
aaccaggaagaagttgtatctc

SEQ ID NO: 145230 - DNA, 22 bp, Artificial Sequence
  Synthetic oligonucleotide; TTG chr11 5218666 5218687 5218671 5218666 -
tatctctgaatagaccaataac

SEQ ID NO: 145231 - DNA, 22 bp, Artificial Sequence
  Synthetic oligonucleotide; CTC chr11 5218660 5218681 5218665 5218660 -
tgaatagaccaataacaggctc

SEQ ID NO: 145232 - DNA, 22 bp, Artificial Sequence
  Synthetic oligonucleotide; CTG chr11 5218658 5218679 5218663 5218658 -
aatagaccaataacaggctctg

SEQ ID NO: 145233 - DNA, 22 bp, Artificial Sequence
  Synthetic oligonucleotide; CTC chr11 5218638 5218659 5218643 5218638 -
tgaaattgaggcaataattaat

SEQ ID NO: 145234 - DNA, 22 bp, Artificial Sequence
  Synthetic oligonucleotide; CTG chr11 5218636 5218657 5218641 5218636 -
aaattgaggcaataattaatag

SEQ ID NO: 145235 - DNA, 22 bp, Artificial Sequence
  Synthetic oligonucleotide; TTG chr11 5218630 5218651 5218635 5218630 -
aggcaataattaatagcttatc

SEQ ID NO: 145236 - DNA, 22 bp, Artificial Sequence
  Synthetic oligonucleotide; TTA chr11 5218618 5218639 5218623 5218618 -
atagcttatcaaccaaaaaaag

SEQ ID NO: 145237 - DNA, 22 bp, Artificial Sequence
  Synthetic oligonucleotide; CTT chr11 5218611 5218632 5218616 5218611 -
atcaaccaaaaaaagtccggga

SEQ ID NO: 145238 - DNA, 22 bp, Artificial Sequence
  Synthetic oligonucleotide; TTA chr11 5218610 5218631 5218615 5218610 -
tcaaccaaaaaaagtccgggac

SEQ ID NO: 145239 - DNA, 22 bp, Artificial Sequence
  Synthetic oligonucleotide; TTC chr11 5218577 5218598 5218582 5218577 -
atagccgaattctaccagaggt

SEQ ID NO: 145240 - DNA, 22 bp, Artificial Sequence
  Synthetic oligonucleotide; TTC chr11 5218565 5218586 5218570 5218565 -
taccagaggtacaaggaggagc

SEQ ID NO: 145241 - DNA, 22 bp, Artificial Sequence
  Synthetic oligonucleotide; CTA chr11 5218563 5218584 5218568 5218563 -
ccagaggtacaaggaggagctg

SEQ ID NO: 145242 - DNA, 22 bp, Artificial Sequence
  Synthetic oligonucleotide; CTG chr11 5218541 5218562 5218546 5218541 -
gtaccattccttctgaaactat

SEQ ID NO: 145243 - DNA, 22 bp, Artificial Sequence
  Synthetic oligonucleotide; TTC chr11 5218532 5218553 5218537 5218532 -
cttctgaaactattccaatcaa

SEQ ID NO: 145244 - DNA, 22 bp, Artificial Sequence
  Synthetic oligonucleotide; CTT chr11 5218529 5218550 5218534 5218529 -
ctgaaactattccaatcaatag

SEQ ID NO: 145245 - DNA, 22 bp, Artificial Sequence
  Synthetic oligonucleotide; TTC chr11 5218528 5218549 5218533 5218528 -
tgaaactattccaatcaataga

SEQ ID NO: 145246 - DNA, 22 bp, Artificial Sequence
  Synthetic oligonucleotide; CTG chr11 5218526 5218547 5218531 5218526 -
aaactattccaatcaatagaaa

SEQ ID NO: 145247 - DNA, 22 bp, Artificial Sequence
  Synthetic oligonucleotide; CTA chr11 5218520 5218541 5218525 5218520 -
ttccaatcaatagaaaaagagg

SEQ ID NO: 145248 - DNA, 22 bp, Artificial Sequence
  Synthetic oligonucleotide; TTC chr11 5218517 5218538 5218522 5218517 -
caatcaatagaaaaagagggaa

SEQ ID NO: 145249 - DNA, 22 bp, Artificial Sequence
  Synthetic oligonucleotide; CTC chr11 5218490 5218511 5218495 5218490 -
cctaactcattttatgaggcca

SEQ ID NO: 145250 - DNA, 22 bp, Artificial Sequence
  Synthetic oligonucleotide; CTA chr11 5218486 5218507 5218491 5218486 -
actcattttatgaggccagcat

SEQ ID NO: 145251 - DNA, 22 bp, Artificial Sequence
  Synthetic oligonucleotide; CTC chr11 5218482 5218503 5218487 5218482 -
attttatgaggccagcatcatc

SEQ ID NO: 145252 - DNA, 22 bp, Artificial Sequence
  Synthetic oligonucleotide; TTT chr11 5218478 5218499 5218483 5218478 -
tatgaggccagcatcatcctga

SEQ ID NO: 145253 - DNA, 22 bp, Artificial Sequence
  Synthetic oligonucleotide; TTT chr11 5218477 5218498 5218482 5218477 -
atgaggccagcatcatcctgat

SEQ ID NO: 145254 - DNA, 22 bp, Artificial Sequence
  Synthetic oligonucleotide; TTA chr11 5218476 5218497 5218481 5218476 -
tgaggccagcatcatcctgata

SEQ ID NO: 145255 - DNA, 22 bp, Artificial Sequence
  Synthetic oligonucleotide; CTG chr11 5218457 5218478 5218462 5218457 -
ataccaaagcctgacagagaca

SEQ ID NO: 145256 - DNA, 22 bp, Artificial Sequence
  Synthetic oligonucleotide; CTG chr11 5218444 5218465 5218449 5218444 -
acagagacacaacaaaaaaaga

SEQ ID NO: 145257 - DNA, 22 bp, Artificial Sequence
  Synthetic oligonucleotide; TTA chr11 5218414 5218435 5218419 5218414 -
caccaatatccttgatgaacat

SEQ ID NO: 145258 - DNA, 22 bp, Artificial Sequence
  Synthetic oligonucleotide; CTT chr11 5218401 5218422 5218406 5218401 -
gatgaacattgatgcaaaaatc

SEQ ID NO: 145259 - DNA, 22 bp, Artificial Sequence
  Synthetic oligonucleotide; TTG chr11 5218400 5218421 5218405 5218400 -
atgaacattgatgcaaaaatcc

SEQ ID NO: 145260 - DNA, 22 bp, Artificial Sequence
  Synthetic oligonucleotide; TTG chr11 5218390 5218411 5218395 5218390 -
atgcaaaaatcctcaataaaat

SEQ ID NO: 145261 - DNA, 22 bp, Artificial Sequence
  Synthetic oligonucleotide; CTC chr11 5218376 5218397 5218381 5218376 -
aataaaatactggcaaactgat

SEQ ID NO: 145262 - DNA, 22 bp, Artificial Sequence
  Synthetic oligonucleotide; CTG chr11 5218364 5218385 5218369 5218364 -
gcaaactgatccaccatgatca

SEQ ID NO: 145263 - DNA, 22 bp, Artificial Sequence
  Synthetic oligonucleotide; CTG chr11 5218356 5218377 5218361 5218356 -
atccaccatgatcaagtgggct

SEQ ID NO: 145264 - DNA, 22 bp, Artificial Sequence
  Synthetic oligonucleotide; CTT chr11 5218333 5218354 5218338 5218333 -
catccctgccatgcaaggctgg

SEQ ID NO: 145265 - DNA, 22 bp, Artificial Sequence
  Synthetic oligonucleotide; TTC chr11 5218332 5218353 5218337 5218332 -
atccctgccatgcaaggctggt

SEQ ID NO: 145266 - DNA, 22 bp, Artificial Sequence
  Synthetic oligonucleotide; CTG chr11 5218325 5218346 5218330 5218325 -
ccatgcaaggctggttcaacat

SEQ ID NO: 145267 - DNA, 22 bp, Artificial Sequence
  Synthetic oligonucleotide; CTG chr11 5218312 5218333 5218317 5218312 -
gttcaacatacgaaaatcaata

SEQ ID NO: 145268 - DNA, 22 bp, Artificial Sequence
  Synthetic oligonucleotide; TTC chr11 5218308 5218329 5218313 5218308 -
aacatacgaaaatcaataaaca

SEQ ID NO: 145269 - DNA, 22 bp, Artificial Sequence
  Synthetic oligonucleotide; TTA chr11 5218241 5218262 5218246 5218241 -
tctcaatagatgcagaaaaggc

SEQ ID NO: 145270 - DNA, 22 bp, Artificial Sequence
  Synthetic oligonucleotide; CTC chr11 5218237 5218258 5218242 5218237 -
aatagatgcagaaaaggccttt

SEQ ID NO: 145271 - DNA, 22 bp, Artificial Sequence
  Synthetic oligonucleotide; CTT chr11 5218216 5218237 5218221 5218216 -
tgacaaaattcaacaacgcttc

SEQ ID NO: 145272 - DNA, 22 bp, Artificial Sequence
  Synthetic oligonucleotide; TTT chr11 5218215 5218236 5218220 5218215 -
gacaaaattcaacaacgcttca

SEQ ID NO: 145273 - DNA, 22 bp, Artificial Sequence
  Synthetic oligonucleotide; TTG chr11 5218214 5218235 5218219 5218214 -
acaaaattcaacaacgcttcat

SEQ ID NO: 145274 - DNA, 22 bp, Artificial Sequence
  Synthetic oligonucleotide; TTC chr11 5218205 5218226 5218210 5218205 -
aacaacgcttcatgctaaaaac

SEQ ID NO: 145275 - DNA, 22 bp, Artificial Sequence
  Synthetic oligonucleotide; CTT chr11 5218195 5218216 5218200 5218195 -
catgctaaaaactctcaataaa

SEQ ID NO: 145276 - DNA, 22 bp, Artificial Sequence
  Synthetic oligonucleotide; TTC chr11 5218194 5218215 5218199 5218194 -
atgctaaaaactctcaataaat

SEQ ID NO: 145277 - DNA, 22 bp, Artificial Sequence
  Synthetic oligonucleotide; CTA chr11 5218188 5218209 5218193 5218188 -
aaaactctcaataaattaggta

SEQ ID NO: 145278 - DNA, 22 bp, Artificial Sequence
  Synthetic oligonucleotide; CTC chr11 5218181 5218202 5218186 5218181 -
tcaataaattaggtattgatgg

SEQ ID NO: 145279 - DNA, 22 bp, Artificial Sequence
  Synthetic oligonucleotide; CTC chr11 5218179 5218200 5218184 5218179 -
aataaattaggtattgatggga

SEQ ID NO: 145280 - DNA, 22 bp, Artificial Sequence
  Synthetic oligonucleotide; TTA chr11 5218170 5218191 5218175 5218170 -
ggtattgatgggacatatctca

SEQ ID NO: 145281 - DNA, 22 bp, Artificial Sequence
  Synthetic oligonucleotide; TTG chr11 5218163 5218184 5218168 5218163 -
atgggacatatctcaaaataat

SEQ ID NO: 145282 - DNA, 22 bp, Artificial Sequence
  Synthetic oligonucleotide; CTC chr11 5218149 5218170 5218154 5218149 -
aaaataataagagctatctatg

SEQ ID NO: 145283 - DNA, 22 bp, Artificial Sequence
  Synthetic oligonucleotide; CTA chr11 5218133 5218154 5218138 5218133 -
tctatgacaaacccacagccaa

SEQ ID NO: 145284 - DNA, 22 bp, Artificial Sequence
  Synthetic oligonucleotide; CTA chr11 5218129 5218150 5218134 5218129 -
tgacaaacccacagccaatatc

SEQ ID NO: 145285 - DNA, 22 bp, Artificial Sequence
  Synthetic oligonucleotide; CTG chr11 5218101 5218122 5218106 5218101 -
agtggacaaaaactggaagcat

SEQ ID NO: 145286 - DNA, 22 bp, Artificial Sequence
  Synthetic oligonucleotide; CTG chr11 5218086 5218107 5218091 5218086 -
gaagcattccctttgaaaactg

SEQ ID NO: 145287 - DNA, 22 bp, Artificial Sequence
  Synthetic oligonucleotide; TTC chr11 5218077 5218098 5218082 5218077 -
cctttgaaaactggcacaaggc

SEQ ID NO: 145288 - DNA, 22 bp, Artificial Sequence
  Synthetic oligonucleotide; CTT chr11 5218073 5218094 5218078 5218073 -
tgaaaactggcacaaggcaggg

SEQ ID NO: 145289 - DNA, 22 bp, Artificial Sequence
  Synthetic oligonucleotide; TTT chr11 5218072 5218093 5218077 5218072 -
gaaaactggcacaaggcaggga

SEQ ID NO: 145290 - DNA, 22 bp, Artificial Sequence
  Synthetic oligonucleotide; TTG chr11 5218071 5218092 5218076 5218071 -
aaaactggcacaaggcagggat

SEQ ID NO: 145291 - DNA, 22 bp, Artificial Sequence
  Synthetic oligonucleotide; CTG chr11 5218064 5218085 5218069 5218064 -
gcacaaggcagggatgccctct

SEQ ID NO: 145292 - DNA, 22 bp, Artificial Sequence
  Synthetic oligonucleotide; CTC chr11 5218043 5218064 5218048 5218043 -
tctcaccactcctattcaacat

SEQ ID NO: 145293 - DNA, 22 bp, Artificial Sequence
  Synthetic oligonucleotide; CTC chr11 5218041 5218062 5218046 5218041 -
tcaccactcctattcaacatag

SEQ ID NO: 145294 - DNA, 22 bp, Artificial Sequence
  Synthetic oligonucleotide; CTC chr11 5218039 5218060 5218044 5218039 -
accactcctattcaacatagtg

SEQ ID NO: 145295 - DNA, 22 bp, Artificial Sequence
  Synthetic oligonucleotide; CTC chr11 5218032 5218053 5218037 5218032 -
ctattcaacatagtgttgtaag

SEQ ID NO: 145296 - DNA, 22 bp, Artificial Sequence
  Synthetic oligonucleotide; CTA chr11 5218029 5218050 5218034 5218029 -
ttcaacatagtgttgtaagttc

SEQ ID NO: 145297 - DNA, 22 bp, Artificial Sequence
  Synthetic oligonucleotide; TTC chr11 5218026 5218047 5218031 5218026 -
aacatagtgttgtaagttctgg

SEQ ID NO: 145298 - DNA, 22 bp, Artificial Sequence
  Synthetic oligonucleotide; TTG chr11 5218014 5218035 5218019 5218014 -
taagttctggccagggcaatca

SEQ ID NO: 145299 - DNA, 22 bp, Artificial Sequence
  Synthetic oligonucleotide; TTC chr11 5218007 5218028 5218012 5218007 -
tggccagggcaatcaggcagga

SEQ ID NO: 145300 - DNA, 22 bp, Artificial Sequence
  Synthetic oligonucleotide; CTG chr11 5218005 5218026 5218010 5218005 -
gccagggcaatcaggcaggaga

SEQ ID NO: 145301 - DNA, 22 bp, Artificial Sequence
  Synthetic oligonucleotide; TTC chr11 5217965 5217986 5217970 5217965 -
aattaggaaaagaggaagtgaa

SEQ ID NO: 145302 - DNA, 22 bp, Artificial Sequence
  Synthetic oligonucleotide; TTA chr11 5217960 5217981 5217965 5217960 -
ggaaaagaggaagtgaaattgt

SEQ ID NO: 145303 - DNA, 22 bp, Artificial Sequence
  Synthetic oligonucleotide; TTG chr11 5217939 5217960 5217944 5217939 -
tccctgtttgcagatgacatga

SEQ ID NO: 145304 - DNA, 22 bp, Artificial Sequence
  Synthetic oligonucleotide; CTG chr11 5217933 5217954 5217938 5217933 -
tttgcagatgacatgattgtat

SEQ ID NO: 145305 - DNA, 22 bp, Artificial Sequence
  Synthetic oligonucleotide; TTT chr11 5217930 5217951 5217935 5217930 -
gcagatgacatgattgtatatc

SEQ ID NO: 145306 - DNA, 22 bp, Artificial Sequence
  Synthetic oligonucleotide; TTG chr11 5217929 5217950 5217934 5217929 -
cagatgacatgattgtatatct

SEQ ID NO: 145307 - DNA, 22 bp, Artificial Sequence
  Synthetic oligonucleotide; TTG chr11 5217914 5217935 5217919 5217914 -
tatatctagaaaaccccattgt

SEQ ID NO: 145308 - DNA, 22 bp, Artificial Sequence
  Synthetic oligonucleotide; CTA chr11 5217906 5217927 5217911 5217906 -
gaaaaccccattgtctcagccc

SEQ ID NO: 145309 - DNA, 22 bp, Artificial Sequence
  Synthetic oligonucleotide; TTG chr11 5217893 5217914 5217898 5217893 -
tctcagcccaaaatctccttaa

SEQ ID NO: 145310 - DNA, 22 bp, Artificial Sequence
  Synthetic oligonucleotide; CTC chr11 5217889 5217910 5217894 5217889 -
agcccaaaatctccttaagctg

SEQ ID NO: 145311 - DNA, 22 bp, Artificial Sequence
  Synthetic oligonucleotide; CTC chr11 5217876 5217897 5217881 5217876 -
cttaagctgataagcaacttca

SEQ ID NO: 145312 - DNA, 22 bp, Artificial Sequence
  Synthetic oligonucleotide; CTT chr11 5217873 5217894 5217878 5217873 -
aagctgataagcaacttcagca

SEQ ID NO: 145313 - DNA, 22 bp, Artificial Sequence
  Synthetic oligonucleotide; TTA chr11 5217872 5217893 5217877 5217872 -
agctgataagcaacttcagcaa

SEQ ID NO: 145314 - DNA, 22 bp, Artificial Sequence
  Synthetic oligonucleotide; CTG chr11 5217867 5217888 5217872 5217867 -
ataagcaacttcagcaaagtct

SEQ ID NO: 145315 - DNA, 22 bp, Artificial Sequence
  Synthetic oligonucleotide; CTT chr11 5217856 5217877 5217861 5217856 -
cagcaaagtctcaggatataaa

SEQ ID NO: 145316 - DNA, 22 bp, Artificial Sequence
  Synthetic oligonucleotide; TTC chr11 5217855 5217876 5217860 5217855 -
agcaaagtctcaggatataaaa

SEQ ID NO: 145317 - DNA, 22 bp, Artificial Sequence
  Synthetic oligonucleotide; CTC chr11 5217844 5217865 5217849 5217844 -
aggatataaaatcagtgtgcaa

SEQ ID NO: 145318 - DNA, 22 bp, Artificial Sequence
  Synthetic oligonucleotide; TTC chr11 5217807 5217828 5217812 5217807 -
ctatgcaccaataacagacaaa

SEQ ID NO: 145319 - DNA, 22 bp, Artificial Sequence
  Synthetic oligonucleotide; CTA chr11 5217804 5217825 5217809 5217804 -
tgcaccaataacagacaaacag

SEQ ID NO: 145320 - DNA, 22 bp, Artificial Sequence
  Synthetic oligonucleotide; CTC chr11 5217759 5217780 5217764 5217759 -
ccattcacaattgcttcaaaga

SEQ ID NO: 145321 - DNA, 22 bp, Artificial Sequence
  Synthetic oligonucleotide; TTC chr11 5217753 5217774 5217758 5217753 -
acaattgcttcaaagagaataa

SEQ ID NO: 145322 - DNA, 22 bp, Artificial Sequence
  Synthetic oligonucleotide; TTG chr11 5217746 5217767 5217751 5217746 -
cttcaaagagaataaaatacct

SEQ ID NO: 145323 - DNA, 22 bp, Artificial Sequence
  Synthetic oligonucleotide; CTT chr11 5217743 5217764 5217748 5217743 -
caaagagaataaaatacctagg

SEQ ID NO: 145324 - DNA, 22 bp, Artificial Sequence
  Synthetic oligonucleotide; TTC chr11 5217742 5217763 5217747 5217742 -
aaagagaataaaatacctagga

SEQ ID NO: 145325 - DNA, 22 bp, Artificial Sequence
  Synthetic oligonucleotide; CTA chr11 5217723 5217744 5217728 5217723 -
ggaatccaacttacaagggatg

SEQ ID NO: 145326 - DNA, 22 bp, Artificial Sequence
  Synthetic oligonucleotide; CTT chr11 5217711 5217732 5217716 5217711 -
acaagggatgtgaaggacctct

SEQ ID NO: 145327 - DNA, 22 bp, Artificial Sequence
  Synthetic oligonucleotide; TTA chr11 5217710 5217731 5217715 5217710 -
caagggatgtgaaggacctctt

SEQ ID NO: 145328 - DNA, 22 bp, Artificial Sequence
  Synthetic oligonucleotide; CTC chr11 5217690 5217711 5217695 5217690 -
ttcaaggagaactacaaaccac

SEQ ID NO: 145329 - DNA, 22 bp, Artificial Sequence
  Synthetic oligonucleotide; CTT chr11 5217688 5217709 5217693 5217688 -
caaggagaactacaaaccactg

SEQ ID NO: 145330 - DNA, 22 bp, Artificial Sequence
  Synthetic oligonucleotide; TTC chr11 5217687 5217708 5217692 5217687 -
aaggagaactacaaaccactgc

SEQ ID NO: 145331 - DNA, 22 bp, Artificial Sequence
  Synthetic oligonucleotide; CTA chr11 5217676 5217697 5217681 5217676 -
caaaccactgctcaatgaaata

SEQ ID NO: 145332 - DNA, 22 bp, Artificial Sequence
  Synthetic oligonucleotide; CTG chr11 5217666 5217687 5217671 5217666 -
ctcaatgaaataaaagaggata

SEQ ID NO: 145333 - DNA, 22 bp, Artificial Sequence
  Synthetic oligonucleotide; CTC chr11 5217663 5217684 5217668 5217663 -
aatgaaataaaagaggatacaa

SEQ ID NO: 145334 - DNA, 22 bp, Artificial Sequence
  Synthetic oligonucleotide; TTC chr11 5217623 5217644 5217628 5217623 -
catgctcatgggtaggaagaat

SEQ ID NO: 145335 - DNA, 22 bp, Artificial Sequence
  Synthetic oligonucleotide; CTC chr11 5217616 5217637 5217621 5217616 -
atgggtaggaagaatcaatatc

SEQ ID NO: 145336 - DNA, 22 bp, Artificial Sequence
  Synthetic oligonucleotide; CTG chr11 5217576 5217597 5217581 5217576 -
cccaaggtaatttatagattca

SEQ ID NO: 145337 - DNA, 22 bp, Artificial Sequence
  Synthetic oligonucleotide; TTT chr11 5217563 5217584 5217568 5217563 -
atagattcaatgccatccccat

SEQ ID NO: 145338 - DNA, 22 bp, Artificial Sequence
  Synthetic oligonucleotide; TTA chr11 5217562 5217583 5217567 5217562 -
tagattcaatgccatccccatc

SEQ ID NO: 145339 - DNA, 22 bp, Artificial Sequence
  Synthetic oligonucleotide; TTC chr11 5217555 5217576 5217560 5217555 -
aatgccatccccatcaagctac

SEQ ID NO: 145340 - DNA, 22 bp, Artificial Sequence
  Synthetic oligonucleotide; CTA chr11 5217534 5217555 5217539 5217534 -
ccaatgactttcttcacagaac

SEQ ID NO: 145341 - DNA, 22 bp, Artificial Sequence
  Synthetic oligonucleotide; CTT chr11 5217524 5217545 5217529 5217524 -
tcttcacagaactggaaaaaac

SEQ ID NO: 145342 - DNA, 22 bp, Artificial Sequence
  Synthetic oligonucleotide; TTT chr11 5217523 5217544 5217528 5217523 -
cttcacagaactggaaaaaact

SEQ ID NO: 145343 - DNA, 22 bp, Artificial Sequence
  Synthetic oligonucleotide; TTC chr11 5217522 5217543 5217527 5217522 -
ttcacagaactggaaaaaacta

SEQ ID NO: 145344 - DNA, 22 bp, Artificial Sequence
  Synthetic oligonucleotide; CTT chr11 5217520 5217541 5217525 5217520 -
cacagaactggaaaaaactact

SEQ ID NO: 145345 - DNA, 22 bp, Artificial Sequence
  Synthetic oligonucleotide; TTC chr11 5217519 5217540 5217524 5217519 -
acagaactggaaaaaactactt

SEQ ID NO: 145346 - DNA, 22 bp, Artificial Sequence
  Synthetic oligonucleotide; CTG chr11 5217510 5217531 5217515 5217510 -
gaaaaaactactttaaagttca

SEQ ID NO: 145347 - DNA, 22 bp, Artificial Sequence
  Synthetic oligonucleotide; CTA chr11 5217500 5217521 5217505 5217500 -
ctttaaagttcatatggaacca

SEQ ID NO: 145348 - DNA, 22 bp, Artificial Sequence
  Synthetic oligonucleotide; CTT chr11 5217497 5217518 5217502 5217497 -
taaagttcatatggaaccaaaa

SEQ ID NO: 145349 - DNA, 22 bp, Artificial Sequence
  Synthetic oligonucleotide; TTT chr11 5217496 5217517 5217501 5217496 -
aaagttcatatggaaccaaaaa

SEQ ID NO: 145350 - DNA, 22 bp, Artificial Sequence
  Synthetic oligonucleotide; TTA chr11 5217495 5217516 5217500 5217495 -
aagttcatatggaaccaaaaaa

SEQ ID NO: 145351 - DNA, 22 bp, Artificial Sequence
  Synthetic oligonucleotide; TTC chr11 5217489 5217510 5217494 5217489 -
atatggaaccaaaaaagagccc

SEQ ID NO: 145352 - DNA, 22 bp, Artificial Sequence
  Synthetic oligonucleotide; CTA chr11 5217447 5217468 5217452 5217447 -
agccaaaagaacaaagctggag

SEQ ID NO: 145353 - DNA, 22 bp, Artificial Sequence
  Synthetic oligonucleotide; CTG chr11 5217428 5217449 5217433 5217428 -
gaggcatcacgctacctgactt

SEQ ID NO: 145354 - DNA, 22 bp, Artificial Sequence
  Synthetic oligonucleotide; CTA chr11 5217414 5217435 5217419 5217414 -
cctgacttcaaactatactaca

SEQ ID NO: 145355 - DNA, 22 bp, Artificial Sequence
  Synthetic oligonucleotide; CTG chr11 5217410 5217431 5217415 5217410 -
acttcaaactatactacaatgc

SEQ ID NO: 145356 - DNA, 22 bp, Artificial Sequence
  Synthetic oligonucleotide; CTT chr11 5217406 5217427 5217411 5217406 -
caaactatactacaatgctacg

SEQ ID NO: 145357 - DNA, 22 bp, Artificial Sequence
  Synthetic oligonucleotide; TTC chr11 5217405 5217426 5217410 5217405 -
aaactatactacaatgctacgg

SEQ ID NO: 145358 - DNA, 22 bp, Artificial Sequence
  Synthetic oligonucleotide; CTA chr11 5217399 5217420 5217404 5217399 -
tactacaatgctacggtaacca

SEQ ID NO: 145359 - DNA, 22 bp, Artificial Sequence
  Synthetic oligonucleotide; CTA chr11 5217394 5217415 5217399 5217394 -
caatgctacggtaaccaaaaca

SEQ ID NO: 145360 - DNA, 22 bp, Artificial Sequence
  Synthetic oligonucleotide; CTA chr11 5217386 5217407 5217391 5217386 -
cggtaaccaaaacagcatggta

SEQ ID NO: 145361 - DNA, 22 bp, Artificial Sequence
  Synthetic oligonucleotide; CTG chr11 5217361 5217382 5217366 5217361 -
gtaccaaaacagagatctagac

SEQ ID NO: 145362 - DNA, 22 bp, Artificial Sequence
  Synthetic oligonucleotide; CTA chr11 5217342 5217363 5217347 5217342 -
gaccaatggaacagaacagagc

SEQ ID NO: 145363 - DNA, 22 bp, Artificial Sequence
  Synthetic oligonucleotide; CTC chr11 5217316 5217337 5217321 5217316 -
agaaataatgccgcatatctac

SEQ ID NO: 145364 - DNA, 22 bp, Artificial Sequence
  Synthetic oligonucleotide; CTA chr11 5217295 5217316 5217300 5217295 -
caactatctgatctttgacaaa

SEQ ID NO: 145365 - DNA, 22 bp, Artificial Sequence
  Synthetic oligonucleotide; CTA chr11 5217289 5217310 5217294 5217289 -
tctgatctttgacaaacctgag

SEQ ID NO: 145366 - DNA, 22 bp, Artificial Sequence
  Synthetic oligonucleotide; CTG chr11 5217285 5217306 5217290 5217285 -
atctttgacaaacctgagagaa

SEQ ID NO: 145367 - DNA, 22 bp, Artificial Sequence
  Synthetic oligonucleotide; CTT chr11 5217280 5217301 5217285 5217280 -
tgacaaacctgagagaaacaag

SEQ ID NO: 145368 - DNA, 22 bp, Artificial Sequence
  Synthetic oligonucleotide; TTT chr11 5217279 5217300 5217284 5217279 -
gacaaacctgagagaaacaagc

SEQ ID NO: 145369 - DNA, 22 bp, Artificial Sequence
  Synthetic oligonucleotide; TTG chr11 5217278 5217299 5217283 5217278 -
acaaacctgagagaaacaagca

SEQ ID NO: 145370 - DNA, 22 bp, Artificial Sequence
  Synthetic oligonucleotide; CTG chr11 5217269 5217290 5217274 5217269 -
agagaaacaagcaatggggaaa

SEQ ID NO: 145371 - DNA, 22 bp, Artificial Sequence
  Synthetic oligonucleotide; TTC chr11 5217241 5217262 5217246 5217241 -
cctatttaataaatggtgctgg

SEQ ID NO: 145372 - DNA, 22 bp, Artificial Sequence
  Synthetic oligonucleotide; CTA chr11 5217237 5217258 5217242 5217237 -
tttaataaatggtgctgggaaa

SEQ ID NO: 145373 - DNA, 22 bp, Artificial Sequence
  Synthetic oligonucleotide; TTT chr11 5217234 5217255 5217239 5217234 -
aataaatggtgctgggaaaact

SEQ ID NO: 145374 - DNA, 22 bp, Artificial Sequence
  Synthetic oligonucleotide; TTA chr11 5217233 5217254 5217238 5217233 -
ataaatggtgctgggaaaactg

SEQ ID NO: 145375 - DNA, 22 bp, Artificial Sequence
  Synthetic oligonucleotide; CTG chr11 5217220 5217241 5217225 5217220 -
ggaaaactggctagccatatgt

SEQ ID NO: 145376 - DNA, 22 bp, Artificial Sequence
  Synthetic oligonucleotide; CTG chr11 5217211 5217232 5217216 5217211 -
gctagccatatgtagaaagctg

SEQ ID NO: 145377 - DNA, 22 bp, Artificial Sequence
  Synthetic oligonucleotide; CTA chr11 5217207 5217228 5217212 5217207 -
gccatatgtagaaagctgaaac

SEQ ID NO: 145378 - DNA, 22 bp, Artificial Sequence
  Synthetic oligonucleotide; CTG chr11 5217189 5217210 5217194 5217189 -
aaactggatcccttccttacac

SEQ ID NO: 145379 - DNA, 22 bp, Artificial Sequence
  Synthetic oligonucleotide; CTG chr11 5217183 5217204 5217188 5217183 -
gatcccttccttacaccttata

SEQ ID NO: 145380 - DNA, 22 bp, Artificial Sequence
  Synthetic oligonucleotide; CTT chr11 5217175 5217196 5217180 5217175 -
ccttacaccttatacaaaaatt

SEQ ID NO: 145381 - DNA, 22 bp, Artificial Sequence
  Synthetic oligonucleotide; TTC chr11 5217174 5217195 5217179 5217174 -
cttacaccttatacaaaaatta

SEQ ID NO: 145382 - DNA, 22 bp, Artificial Sequence
  Synthetic oligonucleotide; CTT chr11 5217171 5217192 5217176 5217171 -
acaccttatacaaaaattaatt

SEQ ID NO: 145383 - DNA, 22 bp, Artificial Sequence
  Synthetic oligonucleotide; TTA chr11 5217170 5217191 5217175 5217170 -
caccttatacaaaaattaattc

SEQ ID NO: 145384 - DNA, 22 bp, Artificial Sequence
  Synthetic oligonucleotide; CTT chr11 5217164 5217185 5217169 5217164 -
atacaaaaattaattcaagatg

SEQ ID NO: 145385 - DNA, 22 bp, Artificial Sequence
  Synthetic oligonucleotide; TTA chr11 5217163 5217184 5217168 5217163 -
tacaaaaattaattcaagatgg

SEQ ID NO: 145386 - DNA, 22 bp, Artificial Sequence
  Synthetic oligonucleotide; TTA chr11 5217152 5217173 5217157 5217152 -
attcaagatggattaaagactt

SEQ ID NO: 145387 - DNA, 22 bp, Artificial Sequence
  Synthetic oligonucleotide; TTC chr11 5217148 5217169 5217153 5217148 -
aagatggattaaagacttacat

SEQ ID NO: 145388 - DNA, 22 bp, Artificial Sequence
  Synthetic oligonucleotide; TTA chr11 5217137 5217158 5217142 5217137 -
aagacttacatgttagacctaa

SEQ ID NO: 145389 - DNA, 22 bp, Artificial Sequence
  Synthetic oligonucleotide; CTT chr11 5217130 5217151 5217135 5217130 -
acatgttagacctaaaaccata

SEQ ID NO: 145390 - DNA, 22 bp, Artificial Sequence
  Synthetic oligonucleotide; TTA chr11 5217129 5217150 5217134 5217129 -
catgttagacctaaaaccataa

SEQ ID NO: 145391 - DNA, 22 bp, Artificial Sequence
  Synthetic oligonucleotide; TTA chr11 5217122 5217143 5217127 5217122 -
gacctaaaaccataaaaaccct

SEQ ID NO: 145392 - DNA, 22 bp, Artificial Sequence
  Synthetic oligonucleotide; CTA chr11 5217116 5217137 5217121 5217116 -
aaaccataaaaaccctagaaaa

SEQ ID NO: 145393 - DNA, 22 bp, Artificial Sequence
  Synthetic oligonucleotide; CTA chr11 5217099 5217120 5217104 5217099 -
gaaaaaaacctaggcaatacca

SEQ ID NO: 145394 - DNA, 22 bp, Artificial Sequence
  Synthetic oligonucleotide; CTA chr11 5217087 5217108 5217092 5217087 -
ggcaataccattcaggacatag

SEQ ID NO: 145395 - DNA, 22 bp, Artificial Sequence
  Synthetic oligonucleotide; TTC chr11 5217074 5217095 5217079 5217074 -
aggacataggcatgggcaagga

SEQ ID NO: 145396 - DNA, 22 bp, Artificial Sequence
  Synthetic oligonucleotide; CTT chr11 5217049 5217070 5217054 5217049 -
catgtctaaaacaccaaaagca

SEQ ID NO: 145397 - DNA, 22 bp, Artificial Sequence
  Synthetic oligonucleotide; TTC chr11 5217048 5217069 5217053 5217048 -
atgtctaaaacaccaaaagcaa

SEQ ID NO: 145398 - DNA, 22 bp, Artificial Sequence
  Synthetic oligonucleotide; CTA chr11 5217041 5217062 5217046 5217041 -
aaacaccaaaagcaatggcaac

SEQ ID NO: 145399 - DNA, 22 bp, Artificial Sequence
  Synthetic oligonucleotide; CTA chr11 5216991 5217012 5216996 5216991 -
attaaactaaagagcttctgca

SEQ ID NO: 145400 - DNA, 22 bp, Artificial Sequence
  Synthetic oligonucleotide; TTA chr11 5216987 5217008 5216992 5216987 -
aactaaagagcttctgcacagc

SEQ ID NO: 145401 - DNA, 22 bp, Artificial Sequence
  Synthetic oligonucleotide; CTA chr11 5216982 5217003 5216987 5216982 -
aagagcttctgcacagctaaag

SEQ ID NO: 145402 - DNA, 22 bp, Artificial Sequence
  Synthetic oligonucleotide; CTT chr11 5216974 5216995 5216979 5216974 -
ctgcacagctaaagaaactacc

SEQ ID NO: 145403 - DNA, 22 bp, Artificial Sequence
  Synthetic oligonucleotide; TTC chr11 5216973 5216994 5216978 5216973 -
tgcacagctaaagaaactacca

SEQ ID NO: 145404 - DNA, 22 bp, Artificial Sequence
  Synthetic oligonucleotide; CTG chr11 5216971 5216992 5216976 5216971 -
cacagctaaagaaactaccatc

SEQ ID NO: 145405 - DNA, 22 bp, Artificial Sequence
  Synthetic oligonucleotide; CTA chr11 5216963 5216984 5216968 5216963 -
aagaaactaccatcagagtgaa

SEQ ID NO: 145406 - DNA, 22 bp, Artificial Sequence
  Synthetic oligonucleotide; CTA chr11 5216954 5216975 5216959 5216954 -
ccatcagagtgaacaggcaacc

SEQ ID NO: 145407 - DNA, 22 bp, Artificial Sequence
  Synthetic oligonucleotide; CTA chr11 5216930 5216951 5216935 5216930 -
caaaatgggagaaaatttttgc

SEQ ID NO: 145408 - DNA, 22 bp, Artificial Sequence
  Synthetic oligonucleotide; TTT chr11 5216912 5216933 5216917 5216912 -
ttgcaatctactcatctgacaa

SEQ ID NO: 145409 - DNA, 22 bp, Artificial Sequence
  Synthetic oligonucleotide; TTT chr11 5216911 5216932 5216916 5216911 -
tgcaatctactcatctgacaaa

SEQ ID NO: 145410 - DNA, 22 bp, Artificial Sequence
  Synthetic oligonucleotide; TTT chr11 5216910 5216931 5216915 5216910 -
gcaatctactcatctgacaaag

SEQ ID NO: 145411 - DNA, 22 bp, Artificial Sequence
  Synthetic oligonucleotide; TTG chr11 5216909 5216930 5216914 5216909 -
caatctactcatctgacaaagg

SEQ ID NO: 145412 - DNA, 22 bp, Artificial Sequence
  Synthetic oligonucleotide; CTA chr11 5216902 5216923 5216907 5216902 -
ctcatctgacaaagggctaata

SEQ ID NO: 145413 - DNA, 22 bp, Artificial Sequence
  Synthetic oligonucleotide; CTC chr11 5216899 5216920 5216904 5216899 -
atctgacaaagggctaatatcc

SEQ ID NO: 145414 - DNA, 22 bp, Artificial Sequence
  Synthetic oligonucleotide; CTG chr11 5216894 5216915 5216899 5216894 -
acaaagggctaatatccagaat

SEQ ID NO: 145415 - DNA, 22 bp, Artificial Sequence
  Synthetic oligonucleotide; CTA chr11 5216883 5216904 5216888 5216883 -
atatccagaatctacaatgaac

SEQ ID NO: 145416 - DNA, 22 bp, Artificial Sequence
  Synthetic oligonucleotide; CTA chr11 5216869 5216890 5216874 5216869 -
caatgaactcaaacaaatttac

SEQ ID NO: 145417 - DNA, 22 bp, Artificial Sequence
  Synthetic oligonucleotide; CTC chr11 5216859 5216880 5216864 5216859 -
aaacaaatttacaagaaaaaac

SEQ ID NO: 145418 - DNA, 22 bp, Artificial Sequence
  Synthetic oligonucleotide; TTT chr11 5216849 5216870 5216854 5216849 -
acaagaaaaaacaaacaacccc

SEQ ID NO: 145419 - DNA, 22 bp, Artificial Sequence
  Synthetic oligonucleotide; TTA chr11 5216848 5216869 5216853 5216848 -
caagaaaaaacaaacaacccca

SEQ ID NO: 145420 - DNA, 22 bp, Artificial Sequence
  Synthetic oligonucleotide; CTT chr11 5216792 5216813 5216797 5216792 -
cgcaaaagaagacatttatgta

SEQ ID NO: 145421 - DNA, 22 bp, Artificial Sequence
  Synthetic oligonucleotide; TTC chr11 5216791 5216812 5216796 5216791 -
gcaaaagaagacatttatgtaa

SEQ ID NO: 145422 - DNA, 22 bp, Artificial Sequence
  Synthetic oligonucleotide; TTT chr11 5216775 5216796 5216780 5216775 -
atgtaatcaaaaaacacatgaa

SEQ ID NO: 145423 - DNA, 22 bp, Artificial Sequence
  Synthetic oligonucleotide; TTA chr11 5216774 5216795 5216779 5216774 -
tgtaatcaaaaaacacatgaaa

SEQ ID NO: 145424 - DNA, 22 bp, Artificial Sequence
  Synthetic oligonucleotide; CTC chr11 5216744 5216765 5216749 5216744 -
atcatcactagccatcagagaa

SEQ ID NO: 145425 - DNA, 22 bp, Artificial Sequence
  Synthetic oligonucleotide; CTA chr11 5216734 5216755 5216739 5216734 -
gccatcagagaaatgcaaatca

SEQ ID NO: 145426 - DNA, 22 bp, Artificial Sequence
  Synthetic oligonucleotide; CTC chr11 5216689 5216710 5216694 5216689 -
acaccagttagaatggcgatca

SEQ ID NO: 145427 - DNA, 22 bp, Artificial Sequence
  Synthetic oligonucleotide; TTA chr11 5216679 5216700 5216684 5216679 -
gaatggcgatcattaaaaagtc

SEQ ID NO: 145428 - DNA, 22 bp, Artificial Sequence
  Synthetic oligonucleotide; TTA chr11 5216664 5216685 5216669 5216664 -
aaaagtcaggaaacaacaggtg

SEQ ID NO: 145429 - DNA, 22 bp, Artificial Sequence
  Synthetic oligonucleotide; CTG chr11 5216639 5216660 5216644 5216639 -
gagaggatgtggagaaacagga

SEQ ID NO: 145430 - DNA, 22 bp, Artificial Sequence
  Synthetic oligonucleotide; CTT chr11 5216610 5216631 5216615 5216610 -
ttacactgttggtgggactgta

SEQ ID NO: 145431 - DNA, 22 bp, Artificial Sequence
  Synthetic oligonucleotide; TTT chr11 5216609 5216630 5216614 5216609 -
tacactgttggtgggactgtaa

SEQ ID NO: 145432 - DNA, 22 bp, Artificial Sequence
  Synthetic oligonucleotide; TTT chr11 5216608 5216629 5216613 5216608 -
acactgttggtgggactgtaaa

SEQ ID NO: 145433 - DNA, 22 bp, Artificial Sequence
  Synthetic oligonucleotide; TTA chr11 5216607 5216628 5216612 5216607 -
cactgttggtgggactgtaaac

SEQ ID NO: 145434 - DNA, 22 bp, Artificial Sequence
  Synthetic oligonucleotide; CTG chr11 5216602 5216623 5216607 5216602 -
ttggtgggactgtaaactagtt

SEQ ID NO: 145435 - DNA, 22 bp, Artificial Sequence
  Synthetic oligonucleotide; TTG chr11 5216599 5216620 5216604 5216599 -
gtgggactgtaaactagttcaa

SEQ ID NO: 145436 - DNA, 22 bp, Artificial Sequence
  Synthetic oligonucleotide; CTG chr11 5216590 5216611 5216595 5216590 -
taaactagttcaaccattgcgg

SEQ ID NO: 145437 - DNA, 22 bp, Artificial Sequence
  Synthetic oligonucleotide; CTA chr11 5216583 5216604 5216588 5216583 -
gttcaaccattgcggaagtcag

SEQ ID NO: 145438 - DNA, 22 bp, Artificial Sequence
  Synthetic oligonucleotide; TTC chr11 5216579 5216600 5216584 5216579 -
aaccattgcggaagtcagtgtg

SEQ ID NO: 145439 - DNA, 22 bp, Artificial Sequence
  Synthetic oligonucleotide; TTG chr11 5216571 5216592 5216576 5216571 -
cggaagtcagtgtggcaattcc

SEQ ID NO: 145440 - DNA, 22 bp, Artificial Sequence
  Synthetic oligonucleotide; TTC chr11 5216550 5216571 5216555 5216550 -
ctcaggaatctagaactagaaa

SEQ ID NO: 145441 - DNA, 22 bp, Artificial Sequence
  Synthetic oligonucleotide; CTC chr11 5216547 5216568 5216552 5216547 -
aggaatctagaactagaaatac

SEQ ID NO: 145442 - DNA, 22 bp, Artificial Sequence
  Synthetic oligonucleotide; CTA chr11 5216538 5216559 5216543 5216538 -
gaactagaaataccatttgacc

SEQ ID NO: 145443 - DNA, 22 bp, Artificial Sequence
  Synthetic oligonucleotide; CTA chr11 5216532 5216553 5216537 5216532 -
gaaataccatttgacccagcca

SEQ ID NO: 145444 - DNA, 22 bp, Artificial Sequence
  Synthetic oligonucleotide; TTT chr11 5216520 5216541 5216525 5216520 -
gacccagccatcccattactgg

SEQ ID NO: 145445 - DNA, 22 bp, Artificial Sequence
  Synthetic oligonucleotide; TTG chr11 5216519 5216540 5216524 5216519 -
acccagccatcccattactggg

SEQ ID NO: 145446 - DNA, 22 bp, Artificial Sequence
  Synthetic oligonucleotide; TTA chr11 5216502 5216523 5216507 5216502 -
ctgggtacatacccaaaggatt

SEQ ID NO: 145447 - DNA, 22 bp, Artificial Sequence
  Synthetic oligonucleotide; CTG chr11 5216499 5216520 5216504 5216499 -
ggtacatacccaaaggattata

SEQ ID NO: 145448 - DNA, 22 bp, Artificial Sequence
  Synthetic oligonucleotide; TTA chr11 5216479 5216500 5216484 5216479 -
taaatcatgctgctataaagac

SEQ ID NO: 145449 - DNA, 22 bp, Artificial Sequence
  Synthetic oligonucleotide; CTG chr11 5216467 5216488 5216472 5216467 -
ctataaagacacatgcacacgt

SEQ ID NO: 145450 - DNA, 22 bp, Artificial Sequence
  Synthetic oligonucleotide; CTA chr11 5216464 5216485 5216469 5216464 -
taaagacacatgcacacgtatg

SEQ ID NO: 145451 - DNA, 22 bp, Artificial Sequence
  Synthetic oligonucleotide; TTT chr11 5216439 5216460 5216444 5216439 -
attgcagcactattcacaatag

SEQ ID NO: 145452 - DNA, 22 bp, Artificial Sequence
  Synthetic oligonucleotide; TTA chr11 5216438 5216459 5216443 5216438 -
ttgcagcactattcacaatagc

SEQ ID NO: 145453 - DNA, 22 bp, Artificial Sequence
  Synthetic oligonucleotide; TTG chr11 5216435 5216456 5216440 5216435 -
cagcactattcacaatagcaaa

SEQ ID NO: 145454 - DNA, 22 bp, Artificial Sequence
  Synthetic oligonucleotide; CTA chr11 5216427 5216448 5216432 5216427 -
ttcacaatagcaaagacttgga

SEQ ID NO: 145455 - DNA, 22 bp, Artificial Sequence
  Synthetic oligonucleotide; TTC chr11 5216424 5216445 5216429 5216424 -
acaatagcaaagacttggaacc

SEQ ID NO: 145456 - DNA, 22 bp, Artificial Sequence
  Synthetic oligonucleotide; CTT chr11 5216408 5216429 5216413 5216408 -
ggaaccaacccaaatgtccaac

SEQ ID NO: 145457 - DNA, 22 bp, Artificial Sequence
  Synthetic oligonucleotide; TTG chr11 5216407 5216428 5216412 5216407 -
gaaccaacccaaatgtccaaca

SEQ ID NO: 145458 - DNA, 22 bp, Artificial Sequence
  Synthetic oligonucleotide; CTG chr11 5216374 5216395 5216379 5216374 -
gattaagaaaatgtggcacata

SEQ ID NO: 145459 - DNA, 22 bp, Artificial Sequence
  Synthetic oligonucleotide; TTA chr11 5216369 5216390 5216374 5216369 -
agaaaatgtggcacatatacac

SEQ ID NO: 145460 - DNA, 22 bp, Artificial Sequence
  Synthetic oligonucleotide; CTA chr11 5216335 5216356 5216340 5216335 -
tgcagccataaaaaatgatgag

SEQ ID NO: 145461 - DNA, 22 bp, Artificial Sequence
  Synthetic oligonucleotide; TTC chr11 5216310 5216331 5216315 5216310 -
atgtcctttgtagggacatgga

SEQ ID NO: 145462 - DNA, 22 bp, Artificial Sequence
  Synthetic oligonucleotide; CTT chr11 5216302 5216323 5216307 5216302 -
tgtagggacatggatgaagctg

SEQ ID NO: 145463 - DNA, 22 bp, Artificial Sequence
  Synthetic oligonucleotide; TTT chr11 5216301 5216322 5216306 5216301 -
gtagggacatggatgaagctgg

SEQ ID NO: 145464 - DNA, 22 bp, Artificial Sequence
  Synthetic oligonucleotide; TTG chr11 5216300 5216321 5216305 5216300 -
tagggacatggatgaagctgga

SEQ ID NO: 145465 - DNA, 22 bp, Artificial Sequence
  Synthetic oligonucleotide; CTG chr11 5216280 5216301 5216285 5216280 -
gaaactatcattctcagcaaac

SEQ ID NO: 145466 - DNA, 22 bp, Artificial Sequence
  Synthetic oligonucleotide; CTA chr11 5216273 5216294 5216278 5216273 -
tcattctcagcaaactatcaca

SEQ ID NO: 145467 - DNA, 22 bp, Artificial Sequence
  Synthetic oligonucleotide; TTC chr11 5216267 5216288 5216272 5216267 -
tcagcaaactatcacaaggaga

SEQ ID NO: 145468 - DNA, 22 bp, Artificial Sequence
  Synthetic oligonucleotide; CTC chr11 5216265 5216286 5216270 5216265 -
agcaaactatcacaaggagaat

SEQ ID NO: 145469 - DNA, 22 bp, Artificial Sequence
  Synthetic oligonucleotide; CTA chr11 5216256 5216277 5216261 5216256 -
tcacaaggagaataaaccaaac

SEQ ID NO: 145470 - DNA, 22 bp, Artificial Sequence
  Synthetic oligonucleotide; TTC chr11 5216223 5216244 5216228 5216223 -
tcactcataggtgggaattgaa

SEQ ID NO: 145471 - DNA, 22 bp, Artificial Sequence
  Synthetic oligonucleotide; CTC chr11 5216221 5216242 5216226 5216221 -
actcataggtgggaattgaaca

SEQ ID NO: 145472 - DNA, 22 bp, Artificial Sequence
  Synthetic oligonucleotide; CTC chr11 5216217 5216238 5216222 5216217 -
ataggtgggaattgaacaatga

SEQ ID NO: 145473 - DNA, 22 bp, Artificial Sequence
  Synthetic oligonucleotide; TTG chr11 5216203 5216224 5216208 5216203 -
aacaatgagaacacatggacac

SEQ ID NO: 145474 - DNA, 22 bp, Artificial Sequence
  Synthetic oligonucleotide; CTC chr11 5216160 5216181 5216165 5216160 -
tggggactgttatggggtgggg

SEQ ID NO: 145475 - DNA, 22 bp, Artificial Sequence
  Synthetic oligonucleotide; CTG chr11 5216158 5216179 5216163 5216158 -
gggactgttatggggtgggggg

SEQ ID NO: 145476 - DNA, 22 bp, Artificial Sequence
  Synthetic oligonucleotide; CTG chr11 5216151 5216172 5216156 5216151 -
ttatggggtggggggcaggggc

SEQ ID NO: 145477 - DNA, 22 bp, Artificial Sequence
  Synthetic oligonucleotide; TTA chr11 5216148 5216169 5216153 5216148 -
tggggtggggggcaggggcagg

SEQ ID NO: 145478 - DNA, 22 bp, Artificial Sequence
  Synthetic oligonucleotide; CTA chr11 5216116 5216137 5216121 5216116 -
ggagatatacctaatgctaaat

SEQ ID NO: 145479 - DNA, 22 bp, Artificial Sequence
  Synthetic oligonucleotide; CTA chr11 5216103 5216124 5216108 5216103 -
atgctaaatgacgagttaatgg

SEQ ID NO: 145480 - DNA, 22 bp, Artificial Sequence
  Synthetic oligonucleotide; CTA chr11 5216097 5216118 5216102 5216097 -
aatgacgagttaatgggtgcag

SEQ ID NO: 145481 - DNA, 22 bp, Artificial Sequence
  Synthetic oligonucleotide; TTA chr11 5216085 5216106 5216090 5216085 -
atgggtgcagcacaccaacatg

SEQ ID NO: 145482 - DNA, 22 bp, Artificial Sequence
  Synthetic oligonucleotide; CTG chr11 5216035 5216056 5216040 5216035 -
catgttgtgcacatgtacccta

SEQ ID NO: 145483 - DNA, 22 bp, Artificial Sequence
  Synthetic oligonucleotide; TTG chr11 5216028 5216049 5216033 5216028 -
tgcacatgtaccctaaaacttg

SEQ ID NO: 145484 - DNA, 22 bp, Artificial Sequence
  Synthetic oligonucleotide; CTA chr11 5216013 5216034 5216018 5216013 -
aaacttgaagtataataataaa

SEQ ID NO: 145485 - DNA, 22 bp, Artificial Sequence
  Synthetic oligonucleotide; CTT chr11 5216007 5216028 5216012 5216007 -
gaagtataataataaaaaaaag

SEQ ID NO: 145486 - DNA, 22 bp, Artificial Sequence
  Synthetic oligonucleotide; TTG chr11 5216006 5216027 5216011 5216006 -
aagtataataataaaaaaaagt

SEQ ID NO: 145487 - DNA, 22 bp, Artificial Sequence
  Synthetic oligonucleotide; TTA chr11 5215982 5216003 5215987 5215982 -
tcctattaaaactgatctcaca

SEQ ID NO: 145488 - DNA, 22 bp, Artificial Sequence
  Synthetic oligonucleotide; CTA chr11 5215977 5215998 5215982 5215977 -
ttaaaactgatctcacacatcc

SEQ ID NO: 145489 - DNA, 22 bp, Artificial Sequence
  Synthetic oligonucleotide; TTA chr11 5215974 5215995 5215979 5215974 -
aaactgatctcacacatccgta

SEQ ID NO: 145490 - DNA, 22 bp, Artificial Sequence
  Synthetic oligonucleotide; CTG chr11 5215968 5215989 5215973 5215968 -
atctcacacatccgtagagcca

SEQ ID NO: 145491 - DNA, 22 bp, Artificial Sequence
  Synthetic oligonucleotide; CTC chr11 5215963 5215984 5215968 5215963 -
acacatccgtagagccattatc

SEQ ID NO: 145492 - DNA, 22 bp, Artificial Sequence
  Synthetic oligonucleotide; TTA chr11 5215943 5215964 5215948 5215943 -
tcaagtctttctctttgaaata

SEQ ID NO: 145493 - DNA, 22 bp, Artificial Sequence
  Synthetic oligonucleotide; CTT chr11 5215934 5215955 5215939 5215934 -
tctctttgaaatagacagaaat

SEQ ID NO: 145494 - DNA, 22 bp, Artificial Sequence
  Synthetic oligonucleotide; TTT chr11 5215933 5215954 5215938 5215933 -
ctctttgaaatagacagaaatt

SEQ ID NO: 145495 - DNA, 22 bp, Artificial Sequence
  Synthetic oligonucleotide; TTC chr11 5215932 5215953 5215937 5215932 -
tctttgaaatagacagaaattt

SEQ ID NO: 145496 - DNA, 22 bp, Artificial Sequence
  Synthetic oligonucleotide; CTC chr11 5215930 5215951 5215935 5215930 -
tttgaaatagacagaaatttag

SEQ ID NO: 145497 - DNA, 22 bp, Artificial Sequence
  Synthetic oligonucleotide; CTT chr11 5215928 5215949 5215933 5215928 -
tgaaatagacagaaatttagtg

SEQ ID NO: 145498 - DNA, 22 bp, Artificial Sequence
  Synthetic oligonucleotide; TTT chr11 5215927 5215948 5215932 5215927 -
gaaatagacagaaatttagtgt

SEQ ID NO: 145499 - DNA, 22 bp, Artificial Sequence
  Synthetic oligonucleotide; TTG chr11 5215926 5215947 5215931 5215926 -
aaatagacagaaatttagtgtt

SEQ ID NO: 145500 - DNA, 22 bp, Artificial Sequence
  Synthetic oligonucleotide; TTT chr11 5215910 5215931 5215915 5215910 -
agtgttttctcagtcagttaac

SEQ ID NO: 145501 - DNA, 22 bp, Artificial Sequence
  Synthetic oligonucleotide; TTA chr11 5215909 5215930 5215914 5215909 -
gtgttttctcagtcagttaaca

SEQ ID NO: 145502 - DNA, 22 bp, Artificial Sequence
  Synthetic oligonucleotide; TTT chr11 5215903 5215924 5215908 5215903 -
tctcagtcagttaacattcctt

SEQ ID NO: 145503 - DNA, 22 bp, Artificial Sequence
  Synthetic oligonucleotide; TTT chr11 5215902 5215923 5215907 5215902 -
ctcagtcagttaacattccttc

SEQ ID NO: 145504 - DNA, 22 bp, Artificial Sequence
  Synthetic oligonucleotide; TTC chr11 5215901 5215922 5215906 5215901 -
tcagtcagttaacattccttca

SEQ ID NO: 145505 - DNA, 22 bp, Artificial Sequence
  Synthetic oligonucleotide; CTC chr11 5215899 5215920 5215904 5215899 -
agtcagttaacattccttcaac

SEQ ID NO: 145506 - DNA, 22 bp, Artificial Sequence
  Synthetic oligonucleotide; TTA chr11 5215890 5215911 5215895 5215890 -
acattccttcaactagattagt

SEQ ID NO: 145507 - DNA, 22 bp, Artificial Sequence
  Synthetic oligonucleotide; TTC chr11 5215884 5215905 5215889 5215884 -
cttcaactagattagttgtgac

SEQ ID NO: 145508 - DNA, 22 bp, Artificial Sequence
  Synthetic oligonucleotide; CTT chr11 5215881 5215902 5215886 5215881 -
caactagattagttgtgacaaa

SEQ ID NO: 145509 - DNA, 22 bp, Artificial Sequence
  Synthetic oligonucleotide; TTC chr11 5215880 5215901 5215885 5215880 -
aactagattagttgtgacaaaa

SEQ ID NO: 145510 - DNA, 22 bp, Artificial Sequence
  Synthetic oligonucleotide; CTA chr11 5215875 5215896 5215880 5215875 -
gattagttgtgacaaaatttca

SEQ ID NO: 145511 - DNA, 22 bp, Artificial Sequence
  Synthetic oligonucleotide; TTA chr11 5215870 5215891 5215875 5215870 -
gttgtgacaaaatttcaggcct

SEQ ID NO: 145512 - DNA, 22 bp, Artificial Sequence
  Synthetic oligonucleotide; TTG chr11 5215866 5215887 5215871 5215866 -
tgacaaaatttcaggccttgct

SEQ ID NO: 145513 - DNA, 22 bp, Artificial Sequence
  Synthetic oligonucleotide; TTT chr11 5215855 5215876 5215860 5215855 -
caggccttgctcaactctaacc

SEQ ID NO: 145514 - DNA, 22 bp, Artificial Sequence
  Synthetic oligonucleotide; TTC chr11 5215854 5215875 5215859 5215854 -
aggccttgctcaactctaacct

SEQ ID NO: 145515 - DNA, 22 bp, Artificial Sequence
  Synthetic oligonucleotide; CTT chr11 5215847 5215868 5215852 5215847 -
gctcaactctaacctcagtctc

SEQ ID NO: 145516 - DNA, 22 bp, Artificial Sequence
  Synthetic oligonucleotide; TTG chr11 5215846 5215867 5215851 5215846 -
ctcaactctaacctcagtctct

SEQ ID NO: 145517 - DNA, 22 bp, Artificial Sequence
  Synthetic oligonucleotide; CTC chr11 5215843 5215864 5215848 5215843 -
aactctaacctcagtctctcca

SEQ ID NO: 145518 - DNA, 22 bp, Artificial Sequence
  Synthetic oligonucleotide; CTC chr11 5215838 5215859 5215843 5215838 -
taacctcagtctctccatatat

SEQ ID NO: 145519 - DNA, 22 bp, Artificial Sequence
  Synthetic oligonucleotide; CTA chr11 5215836 5215857 5215841 5215836 -
acctcagtctctccatatattt

SEQ ID NO: 145520 - DNA, 22 bp, Artificial Sequence
  Synthetic oligonucleotide; CTC chr11 5215831 5215852 5215836 5215831 -
agtctctccatatatttctgag

SEQ ID NO: 145521 - DNA, 22 bp, Artificial Sequence
  Synthetic oligonucleotide; CTC chr11 5215825 5215846 5215830 5215825 -
tccatatatttctgagagtctt

SEQ ID NO: 145522 - DNA, 22 bp, Artificial Sequence
  Synthetic oligonucleotide; CTC chr11 5215823 5215844 5215828 5215823 -
catatatttctgagagtcttcc

SEQ ID NO: 145523 - DNA, 22 bp, Artificial Sequence
  Synthetic oligonucleotide; TTT chr11 5215814 5215835 5215819 5215814 -
ctgagagtcttccttcttattt

SEQ ID NO: 145524 - DNA, 22 bp, Artificial Sequence
  Synthetic oligonucleotide; TTC chr11 5215813 5215834 5215818 5215813 -
tgagagtcttccttcttatttg

SEQ ID NO: 145525 - DNA, 22 bp, Artificial Sequence
  Synthetic oligonucleotide; CTG chr11 5215811 5215832 5215816 5215811 -
agagtcttccttcttatttgtt

SEQ ID NO: 145526 - DNA, 22 bp, Artificial Sequence
  Synthetic oligonucleotide; CTT chr11 5215803 5215824 5215808 5215803 -
ccttcttatttgtttataagaa

SEQ ID NO: 145527 - DNA, 22 bp, Artificial Sequence
  Synthetic oligonucleotide; TTC chr11 5215802 5215823 5215807 5215802 -
cttcttatttgtttataagaat

SEQ ID NO: 145528 - DNA, 22 bp, Artificial Sequence
  Synthetic oligonucleotide; CTT chr11 5215799 5215820 5215804 5215799 -
cttatttgtttataagaattta

SEQ ID NO: 145529 - DNA, 22 bp, Artificial Sequence
  Synthetic oligonucleotide; TTC chr11 5215798 5215819 5215803 5215798 -
ttatttgtttataagaatttag

SEQ ID NO: 145530 - DNA, 22 bp, Artificial Sequence
  Synthetic oligonucleotide; CTT chr11 5215796 5215817 5215801 5215796 -
atttgtttataagaatttagta

SEQ ID NO: 145531 - DNA, 22 bp, Artificial Sequence
  Synthetic oligonucleotide; TTA chr11 5215795 5215816 5215800 5215795 -
tttgtttataagaatttagtaa

SEQ ID NO: 145532 - DNA, 22 bp, Artificial Sequence
  Synthetic oligonucleotide; TTT chr11 5215792 5215813 5215797 5215792 -
gtttataagaatttagtaaatg

SEQ ID NO: 145533 - DNA, 22 bp, Artificial Sequence
  Synthetic oligonucleotide; TTG chr11 5215791 5215812 5215796 5215791 -
tttataagaatttagtaaatgg

SEQ ID NO: 145534 - DNA, 22 bp, Artificial Sequence
  Synthetic oligonucleotide; TTT chr11 5215788 5215809 5215793 5215788 -
ataagaatttagtaaatggcaa

SEQ ID NO: 145535 - DNA, 22 bp, Artificial Sequence
  Synthetic oligonucleotide; TTA chr11 5215787 5215808 5215792 5215787 -
taagaatttagtaaatggcaat

SEQ ID NO: 145536 - DNA, 22 bp, Artificial Sequence
  Synthetic oligonucleotide; TTT chr11 5215778 5215799 5215783 5215778 -
agtaaatggcaatattgagaag

SEQ ID NO: 145537 - DNA, 22 bp, Artificial Sequence
  Synthetic oligonucleotide; TTA chr11 5215777 5215798 5215782 5215777 -
gtaaatggcaatattgagaagt

SEQ ID NO: 145538 - DNA, 22 bp, Artificial Sequence
  Synthetic oligonucleotide; TTG chr11 5215761 5215782 5215766 5215761 -
agaagtagaaaattttggagac

SEQ ID NO: 145539 - DNA, 22 bp, Artificial Sequence
  Synthetic oligonucleotide; TTT chr11 5215746 5215767 5215751 5215746 -
tggagacttgtttttcatgaac

SEQ ID NO: 145540 - DNA, 22 bp, Artificial Sequence
  Synthetic oligonucleotide; TTT chr11 5215745 5215766 5215750 5215745 -
ggagacttgtttttcatgaacc

SEQ ID NO: 145541 - DNA, 22 bp, Artificial Sequence
  Synthetic oligonucleotide; TTG chr11 5215744 5215765 5215749 5215744 -
gagacttgtttttcatgaacca

SEQ ID NO: 145542 - DNA, 22 bp, Artificial Sequence
  Synthetic oligonucleotide; CTT chr11 5215737 5215758 5215742 5215737 -
gtttttcatgaaccagaacaat

SEQ ID NO: 145543 - DNA, 22 bp, Artificial Sequence
  Synthetic oligonucleotide; TTG chr11 5215736 5215757 5215741 5215736 -
tttttcatgaaccagaacaatc

SEQ ID NO: 145544 - DNA, 22 bp, Artificial Sequence
  Synthetic oligonucleotide; TTT chr11 5215733 5215754 5215738 5215733 -
ttcatgaaccagaacaatctca

SEQ ID NO: 145545 - DNA, 22 bp, Artificial Sequence
  Synthetic oligonucleotide; TTT chr11 5215732 5215753 5215737 5215732 -
tcatgaaccagaacaatctcaa

SEQ ID NO: 145546 - DNA, 22 bp, Artificial Sequence
  Synthetic oligonucleotide; TTT chr11 5215731 5215752 5215736 5215731 -
catgaaccagaacaatctcaaa

SEQ ID NO: 145547 - DNA, 22 bp, Artificial Sequence
  Synthetic oligonucleotide; TTC chr11 5215730 5215751 5215735 5215730 -
atgaaccagaacaatctcaaag

SEQ ID NO: 145548 - DNA, 22 bp, Artificial Sequence
  Synthetic oligonucleotide; CTC chr11 5215712 5215733 5215717 5215712 -
aaagcagcaatactaaacagga

SEQ ID NO: 145549 - DNA, 22 bp, Artificial Sequence
  Synthetic oligonucleotide; CTA chr11 5215697 5215718 5215702 5215697 -
aacaggagccaagcctagaata

SEQ ID NO: 145550 - DNA, 22 bp, Artificial Sequence
  Synthetic oligonucleotide; CTA chr11 5215680 5215701 5215685 5215680 -
gaataaagttgaatttctggaa

SEQ ID NO: 145551 - DNA, 22 bp, Artificial Sequence
  Synthetic oligonucleotide; TTG chr11 5215669 5215690 5215674 5215669 -
aatttctggaatcaacaagcta

SEQ ID NO: 145552 - DNA, 22 bp, Artificial Sequence
  Synthetic oligonucleotide; TTT chr11 5215664 5215685 5215669 5215664 -
ctggaatcaacaagctagggga

SEQ ID NO: 145553 - DNA, 22 bp, Artificial Sequence
  Synthetic oligonucleotide; TTC chr11 5215663 5215684 5215668 5215663 -
tggaatcaacaagctaggggaa

SEQ ID NO: 145554 - DNA, 22 bp, Artificial Sequence
  Synthetic oligonucleotide; CTG chr11 5215661 5215682 5215666 5215661 -
gaatcaacaagctaggggaaag

SEQ ID NO: 145555 - DNA, 22 bp, Artificial Sequence
  Synthetic oligonucleotide; CTA chr11 5215647 5215668 5215652 5215647 -
ggggaaagtctcccattaagtc

SEQ ID NO: 145556 - DNA, 22 bp, Artificial Sequence
  Synthetic oligonucleotide; CTC chr11 5215635 5215656 5215640 5215635 -
ccattaagtcaaatatttgaca

SEQ ID NO: 145557 - DNA, 22 bp, Artificial Sequence
  Synthetic oligonucleotide; TTA chr11 5215629 5215650 5215634 5215629 -
agtcaaatatttgacaactggg

SEQ ID NO: 145558 - DNA, 22 bp, Artificial Sequence
  Synthetic oligonucleotide; TTT chr11 5215617 5215638 5215622 5215617 -
gacaactgggaggtcaagtcag

SEQ ID NO: 145559 - DNA, 22 bp, Artificial Sequence
  Synthetic oligonucleotide; TTG chr11 5215616 5215637 5215621 5215616 -
acaactgggaggtcaagtcaga

SEQ ID NO: 145560 - DNA, 22 bp, Artificial Sequence
  Synthetic oligonucleotide; CTG chr11 5215609 5215630 5215614 5215609 -
ggaggtcaagtcagaggtgaaa

SEQ ID NO: 145561 - DNA, 22 bp, Artificial Sequence
  Synthetic oligonucleotide; TTA chr11 5215579 5215600 5215584 5215579 -
aagataacaagaggtctgaaaa

SEQ ID NO: 145562 - DNA, 22 bp, Artificial Sequence
  Synthetic oligonucleotide; CTG chr11 5215561 5215582 5215566 5215561 -
aaaacaaagtgaccaattaaaa

SEQ ID NO: 145563 - DNA, 22 bp, Artificial Sequence
  Synthetic oligonucleotide; TTA chr11 5215542 5215563 5215547 5215542 -
aaataaaaagaaagagccaagc

SEQ ID NO: 145564 - DNA, 22 bp, Artificial Sequence
  Synthetic oligonucleotide; CTG chr11 5215518 5215539 5215523 5215518 -
ggcacagtggcttgcatctgta

SEQ ID NO: 145565 - DNA, 22 bp, Artificial Sequence
  Synthetic oligonucleotide; CTT chr11 5215505 5215526 5215510 5215505 -
gcatctgtagtcccagtaaccc

SEQ ID NO: 145566 - DNA, 22 bp, Artificial Sequence
  Synthetic oligonucleotide; TTG chr11 5215504 5215525 5215509 5215504 -
catctgtagtcccagtaaccca

SEQ ID NO: 145567 - DNA, 22 bp, Artificial Sequence
  Synthetic oligonucleotide; CTG chr11 5215498 5215519 5215503 5215498 -
tagtcccagtaacccaggaggc

SEQ ID NO: 145568 - DNA, 22 bp, Artificial Sequence
  Synthetic oligonucleotide; CTG chr11 5215474 5215495 5215479 5215474 -
aagtgataggatcacttgagcc

SEQ ID NO: 145569 - DNA, 22 bp, Artificial Sequence
  Synthetic oligonucleotide; CTT chr11 5215457 5215478 5215462 5215457 -
gagcccaggatttcagggttgc

SEQ ID NO: 145570 - DNA, 22 bp, Artificial Sequence
  Synthetic oligonucleotide; TTG chr11 5215456 5215477 5215461 5215456 -
agcccaggatttcagggttgca

SEQ ID NO: 145571 - DNA, 22 bp, Artificial Sequence
  Synthetic oligonucleotide; TTT chr11 5215444 5215465 5215449 5215444 -
cagggttgcagtgagcaataat

SEQ ID NO: 145572 - DNA, 22 bp, Artificial Sequence
  Synthetic oligonucleotide; TTC chr11 5215443 5215464 5215448 5215443 -
agggttgcagtgagcaataatg

SEQ ID NO: 145573 - DNA, 22 bp, Artificial Sequence
  Synthetic oligonucleotide; TTG chr11 5215436 5215457 5215441 5215436 -
cagtgagcaataatgacaccac

SEQ ID NO: 145574 - DNA, 22 bp, Artificial Sequence
  Synthetic oligonucleotide; CTG chr11 5215412 5215433 5215417 5215412 -
ctctctagccttggtgactgag

SEQ ID NO: 145575 - DNA, 22 bp, Artificial Sequence
  Synthetic oligonucleotide; CTC chr11 5215409 5215430 5215414 5215409 -
tctagccttggtgactgagatc

SEQ ID NO: 145576 - DNA, 22 bp, Artificial Sequence
  Synthetic oligonucleotide; CTC chr11 5215407 5215428 5215412 5215407 -
tagccttggtgactgagatcct

SEQ ID NO: 145577 - DNA, 22 bp, Artificial Sequence
  Synthetic oligonucleotide; CTA chr11 5215405 5215426 5215410 5215405 -
gccttggtgactgagatcctgt

SEQ ID NO: 145578 - DNA, 22 bp, Artificial Sequence
  Synthetic oligonucleotide; CTT chr11 5215400 5215421 5215405 5215400 -
ggtgactgagatcctgtctctg

SEQ ID NO: 145579 - DNA, 22 bp, Artificial Sequence
  Synthetic oligonucleotide; TTG chr11 5215399 5215420 5215404 5215399 -
gtgactgagatcctgtctctga

SEQ ID NO: 145580 - DNA, 22 bp, Artificial Sequence
  Synthetic oligonucleotide; CTG chr11 5215392 5215413 5215397 5215392 -
agatcctgtctctgaggaaaaa

SEQ ID NO: 145581 - DNA, 22 bp, Artificial Sequence
  Synthetic oligonucleotide; CTG chr11 5215384 5215405 5215389 5215384 -
tctctgaggaaaaacaaacaaa

SEQ ID NO: 145582 - DNA, 22 bp, Artificial Sequence
  Synthetic oligonucleotide; CTC chr11 5215380 5215401 5215385 5215380 -
tgaggaaaaacaaacaaacaag

SEQ ID NO: 145583 - DNA, 22 bp, Artificial Sequence
  Synthetic oligonucleotide; CTG chr11 5215378 5215399 5215383 5215378 -
aggaaaaacaaacaaacaagca

SEQ ID NO: 145584 - DNA, 22 bp, Artificial Sequence
  Synthetic oligonucleotide; TTA chr11 5215326 5215347 5215331 5215326 -
agaacatagaagttttgttacg

SEQ ID NO: 145585 - DNA, 22 bp, Artificial Sequence
  Synthetic oligonucleotide; TTT chr11 5215311 5215332 5215316 5215311 -
tgttacggtgatgatattctcc

SEQ ID NO: 145586 - DNA, 22 bp, Artificial Sequence
  Synthetic oligonucleotide; TTT chr11 5215310 5215331 5215315 5215310 -
gttacggtgatgatattctcca

SEQ ID NO: 145587 - DNA, 22 bp, Artificial Sequence
  Synthetic oligonucleotide; TTG chr11 5215309 5215330 5215314 5215309 -
ttacggtgatgatattctccaa

SEQ ID NO: 145588 - DNA, 22 bp, Artificial Sequence
  Synthetic oligonucleotide; TTA chr11 5215306 5215327 5215311 5215306 -
cggtgatgatattctccaacac

SEQ ID NO: 145589 - DNA, 22 bp, Artificial Sequence
  Synthetic oligonucleotide; TTC chr11 5215292 5215313 5215297 5215292 -
tccaacacaggtctgaacccct

SEQ ID NO: 145590 - DNA, 22 bp, Artificial Sequence
  Synthetic oligonucleotide; CTC chr11 5215290 5215311 5215295 5215290 -
caacacaggtctgaaccccttg

SEQ ID NO: 145591 - DNA, 22 bp, Artificial Sequence
  Synthetic oligonucleotide; CTG chr11 5215277 5215298 5215282 5215277 -
aaccccttgcagtgcctcgggg

SEQ ID NO: 145592 - DNA, 22 bp, Artificial Sequence
  Synthetic oligonucleotide; CTT chr11 5215269 5215290 5215274 5215269 -
gcagtgcctcggggctgtttct

SEQ ID NO: 145593 - DNA, 22 bp, Artificial Sequence
  Synthetic oligonucleotide; TTG chr11 5215268 5215289 5215273 5215268 -
cagtgcctcggggctgtttctc

SEQ ID NO: 145594 - DNA, 22 bp, Artificial Sequence
  Synthetic oligonucleotide; CTC chr11 5215259 5215280 5215264 5215259 -
ggggctgtttctccagtggatt

SEQ ID NO: 145595 - DNA, 22 bp, Artificial Sequence
  Synthetic oligonucleotide; CTG chr11 5215252 5215273 5215257 5215252 -
tttctccagtggattcttgggt

SEQ ID NO: 145596 - DNA, 22 bp, Artificial Sequence
  Synthetic oligonucleotide; TTT chr11 5215249 5215270 5215254 5215249 -
ctccagtggattcttgggttct

SEQ ID NO: 145597 - DNA, 22 bp, Artificial Sequence
  Synthetic oligonucleotide; TTC chr11 5215248 5215269 5215253 5215248 -
tccagtggattcttgggttctt

SEQ ID NO: 145598 - DNA, 22 bp, Artificial Sequence
  Synthetic oligonucleotide; CTC chr11 5215246 5215267 5215251 5215246 -
cagtggattcttgggttcttca

SEQ ID NO: 145599 - DNA, 22 bp, Artificial Sequence
  Synthetic oligonucleotide; TTC chr11 5215236 5215257 5215241 5215236 -
ttgggttcttcacatcttctca

SEQ ID NO: 145600 - DNA, 22 bp, Artificial Sequence
  Synthetic oligonucleotide; CTT chr11 5215234 5215255 5215239 5215234 -
gggttcttcacatcttctcaac

SEQ ID NO: 145601 - DNA, 22 bp, Artificial Sequence
  Synthetic oligonucleotide; TTG chr11 5215233 5215254 5215238 5215233 -
ggttcttcacatcttctcaact

SEQ ID NO: 145602 - DNA, 22 bp, Artificial Sequence
  Synthetic oligonucleotide; TTC chr11 5215228 5215249 5215233 5215228 -
ttcacatcttctcaactttgtg

SEQ ID NO: 145603 - DNA, 22 bp, Artificial Sequence
  Synthetic oligonucleotide; CTT chr11 5215226 5215247 5215231 5215226 -
cacatcttctcaactttgtgaa

SEQ ID NO: 145604 - DNA, 22 bp, Artificial Sequence
  Synthetic oligonucleotide; TTC chr11 5215225 5215246 5215230 5215225 -
acatcttctcaactttgtgaaa

SEQ ID NO: 145605 - DNA, 22 bp, Artificial Sequence
  Synthetic oligonucleotide; CTT chr11 5215218 5215239 5215223 5215218 -
ctcaactttgtgaaaagatatt

SEQ ID NO: 145606 - DNA, 22 bp, Artificial Sequence
  Synthetic oligonucleotide; TTC chr11 5215217 5215238 5215222 5215217 -
tcaactttgtgaaaagatattc

SEQ ID NO: 145607 - DNA, 22 bp, Artificial Sequence
  Synthetic oligonucleotide; CTC chr11 5215215 5215236 5215220 5215215 -
aactttgtgaaaagatattcat

SEQ ID NO: 145608 - DNA, 22 bp, Artificial Sequence
  Synthetic oligonucleotide; CTT chr11 5215210 5215231 5215215 5215210 -
tgtgaaaagatattcatccaaa

SEQ ID NO: 145609 - DNA, 22 bp, Artificial Sequence
  Synthetic oligonucleotide; TTT chr11 5215209 5215230 5215214 5215209 -
gtgaaaagatattcatccaaag

SEQ ID NO: 145610 - DNA, 22 bp, Artificial Sequence
  Synthetic oligonucleotide; TTG chr11 5215208 5215229 5215213 5215208 -
tgaaaagatattcatccaaagg

SEQ ID NO: 145611 - DNA, 22 bp, Artificial Sequence
  Synthetic oligonucleotide; TTC chr11 5215195 5215216 5215200 5215195 -
atccaaaggtctcacctgtctt

SEQ ID NO: 145612 - DNA, 22 bp, Artificial Sequence
  Synthetic oligonucleotide; CTC chr11 5215182 5215203 5215187 5215182 -
acctgtcttattcagagcttgg

SEQ ID NO: 145613 - DNA, 22 bp, Artificial Sequence
  Synthetic oligonucleotide; CTG chr11 5215177 5215198 5215182 5215177 -
tcttattcagagcttggatttt

SEQ ID NO: 145614 - DNA, 22 bp, Artificial Sequence
  Synthetic oligonucleotide; CTT chr11 5215173 5215194 5215178 5215173 -
attcagagcttggattttggac

SEQ ID NO: 145615 - DNA, 22 bp, Artificial Sequence
  Synthetic oligonucleotide; TTA chr11 5215172 5215193 5215177 5215172 -
ttcagagcttggattttggact

SEQ ID NO: 145616 - DNA, 22 bp, Artificial Sequence
  Synthetic oligonucleotide; TTC chr11 5215169 5215190 5215174 5215169 -
agagcttggattttggactagc

SEQ ID NO: 145617 - DNA, 22 bp, Artificial Sequence
  Synthetic oligonucleotide; CTT chr11 5215162 5215183 5215167 5215162 -
ggattttggactagctttttct

SEQ ID NO: 145618 - DNA, 22 bp, Artificial Sequence
  Synthetic oligonucleotide; TTG chr11 5215161 5215182 5215166 5215161 -
gattttggactagctttttcta

SEQ ID NO: 145619 - DNA, 22 bp, Artificial Sequence
  Synthetic oligonucleotide; TTT chr11 5215156 5215177 5215161 5215156 -
tggactagctttttctatttct

SEQ ID NO: 145620 - DNA, 22 bp, Artificial Sequence
  Synthetic oligonucleotide; TTT chr11 5215155 5215176 5215160 5215155 -
ggactagctttttctatttctt

SEQ ID NO: 145621 - DNA, 22 bp, Artificial Sequence
  Synthetic oligonucleotide; TTG chr11 5215154 5215175 5215159 5215154 -
gactagctttttctatttcttg

SEQ ID NO: 145622 - DNA, 22 bp, Artificial Sequence
  Synthetic oligonucleotide; CTA chr11 5215149 5215170 5215154 5215149 -
gctttttctatttcttgggatt

SEQ ID NO: 145623 - DNA, 22 bp, Artificial Sequence
  Synthetic oligonucleotide; CTT chr11 5215145 5215166 5215150 5215145 -
tttctatttcttgggattctct

SEQ ID NO: 145624 - DNA, 22 bp, Artificial Sequence
  Synthetic oligonucleotide; TTT chr11 5215144 5215165 5215149 5215144 -
ttctatttcttgggattctcta

SEQ ID NO: 145625 - DNA, 22 bp, Artificial Sequence
  Synthetic oligonucleotide; TTT chr11 5215143 5215164 5215148 5215143 -
tctatttcttgggattctctag

SEQ ID NO: 145626 - DNA, 22 bp, Artificial Sequence
  Synthetic oligonucleotide; TTT chr11 5215142 5215163 5215147 5215142 -
ctatttcttgggattctctaga

SEQ ID NO: 145627 - DNA, 22 bp, Artificial Sequence
  Synthetic oligonucleotide; TTC chr11 5215141 5215162 5215146 5215141 -
tatttcttgggattctctagag

SEQ ID NO: 145628 - DNA, 22 bp, Artificial Sequence
  Synthetic oligonucleotide; CTA chr11 5215139 5215160 5215144 5215139 -
tttcttgggattctctagagcc

SEQ ID NO: 145629 - DNA, 22 bp, Artificial Sequence
  Synthetic oligonucleotide; TTT chr11 5215136 5215157 5215141 5215136 -
cttgggattctctagagccata

SEQ ID NO: 145630 - DNA, 22 bp, Artificial Sequence
  Synthetic oligonucleotide; TTC chr11 5215135 5215156 5215140 5215135 -
ttgggattctctagagccatat

SEQ ID NO: 145631 - DNA, 22 bp, Artificial Sequence
  Synthetic oligonucleotide; CTT chr11 5215133 5215154 5215138 5215133 -
gggattctctagagccatatat

SEQ ID NO: 145632 - DNA, 22 bp, Artificial Sequence
  Synthetic oligonucleotide; TTG chr11 5215132 5215153 5215137 5215132 -
ggattctctagagccatatatt

SEQ ID NO: 145633 - DNA, 22 bp, Artificial Sequence
  Synthetic oligonucleotide; TTC chr11 5215126 5215147 5215131 5215126 -
tctagagccatatattcagata

SEQ ID NO: 145634 - DNA, 22 bp, Artificial Sequence
  Synthetic oligonucleotide; CTC chr11 5215124 5215145 5215129 5215124 -
tagagccatatattcagatata

SEQ ID NO: 145635 - DNA, 22 bp, Artificial Sequence
  Synthetic oligonucleotide; CTA chr11 5215122 5215143 5215127 5215122 -
gagccatatattcagatataac

SEQ ID NO: 145636 - DNA, 22 bp, Artificial Sequence
  Synthetic oligonucleotide; TTC chr11 5215109 5215130 5215114 5215109 -
agatataacacagatataacca

SEQ ID NO: 145637 - DNA, 22 bp, Artificial Sequence
  Synthetic oligonucleotide; CTT chr11 5215054 5215075 5215059 5215054 -
tgtattctggggagggggacat

SEQ ID NO: 145638 - DNA, 22 bp, Artificial Sequence
  Synthetic oligonucleotide; TTT chr11 5215053 5215074 5215058 5215053 -
gtattctggggagggggacata

SEQ ID NO: 145639 - DNA, 22 bp, Artificial Sequence
  Synthetic oligonucleotide; TTG chr11 5215052 5215073 5215057 5215052 -
tattctggggagggggacatag

SEQ ID NO: 145640 - DNA, 22 bp, Artificial Sequence
  Synthetic oligonucleotide; TTC chr11 5215047 5215068 5215052 5215047 -
tggggagggggacatagagttg

SEQ ID NO: 145641 - DNA, 22 bp, Artificial Sequence
  Synthetic oligonucleotide; CTG chr11 5215045 5215066 5215050 5215045 -
gggagggggacatagagttgag

SEQ ID NO: 145642 - DNA, 22 bp, Artificial Sequence
  Synthetic oligonucleotide; TTG chr11 5215025 5215046 5215030 5215025 -
agagaaatacaggaatttatag

SEQ ID NO: 145643 - DNA, 22 bp, Artificial Sequence
  Synthetic oligonucleotide; TTT chr11 5215007 5215028 5215012 5215007 -
ataggactctactcaaagagcc

SEQ ID NO: 145644 - DNA, 22 bp, Artificial Sequence
  Synthetic oligonucleotide; TTA chr11 5215006 5215027 5215011 5215006 -
taggactctactcaaagagccc

SEQ ID NO: 145645 - DNA, 22 bp, Artificial Sequence
  Synthetic oligonucleotide; CTC chr11 5214998 5215019 5215003 5214998 -
tactcaaagagccctcaaataa

SEQ ID NO: 145646 - DNA, 22 bp, Artificial Sequence
  Synthetic oligonucleotide; CTA chr11 5214996 5215017 5215001 5214996 -
ctcaaagagccctcaaataaag

SEQ ID NO: 145647 - DNA, 22 bp, Artificial Sequence
  Synthetic oligonucleotide; CTC chr11 5214993 5215014 5214998 5214993 -
aaagagccctcaaataaagtac

SEQ ID NO: 145648 - DNA, 22 bp, Artificial Sequence
  Synthetic oligonucleotide; CTC chr11 5214982 5215003 5214987 5214982 -
aaataaagtacggctagtcttc

SEQ ID NO: 145649 - DNA, 22 bp, Artificial Sequence
  Synthetic oligonucleotide; CTA chr11 5214966 5214987 5214971 5214966 -
gtcttctttgcctaagacaatg

SEQ ID NO: 145650 - DNA, 22 bp, Artificial Sequence
  Synthetic oligonucleotide; CTT chr11 5214961 5214982 5214966 5214961 -
ctttgcctaagacaatgagcag

SEQ ID NO: 145651 - DNA, 22 bp, Artificial Sequence
  Synthetic oligonucleotide; TTC chr11 5214960 5214981 5214965 5214960 -
tttgcctaagacaatgagcagt

SEQ ID NO: 145652 - DNA, 22 bp, Artificial Sequence
  Synthetic oligonucleotide; CTT chr11 5214958 5214979 5214963 5214958 -
tgcctaagacaatgagcagtcc

SEQ ID NO: 145653 - DNA, 22 bp, Artificial Sequence
  Synthetic oligonucleotide; TTT chr11 5214957 5214978 5214962 5214957 -
gcctaagacaatgagcagtcca

SEQ ID NO: 145654 - DNA, 22 bp, Artificial Sequence
  Synthetic oligonucleotide; TTG chr11 5214956 5214977 5214961 5214956 -
cctaagacaatgagcagtccag

SEQ ID NO: 145655 - DNA, 22 bp, Artificial Sequence
  Synthetic oligonucleotide; CTA chr11 5214952 5214973 5214957 5214952 -
agacaatgagcagtccaggaag

SEQ ID NO: 145656 - DNA, 22 bp, Artificial Sequence
  Synthetic oligonucleotide; TTA chr11 5214927 5214948 5214932 5214927 -
tccatttcttttagattttcta

SEQ ID NO: 145657 - DNA, 22 bp, Artificial Sequence
  Synthetic oligonucleotide; TTT chr11 5214920 5214941 5214925 5214920 -
cttttagattttctagtttatg

SEQ ID NO: 145658 - DNA, 22 bp, Artificial Sequence
  Synthetic oligonucleotide; TTC chr11 5214919 5214940 5214924 5214919 -
ttttagattttctagtttatgt

SEQ ID NO: 145659 - DNA, 22 bp, Artificial Sequence
  Synthetic oligonucleotide; CTT chr11 5214917 5214938 5214922 5214917 -
ttagattttctagtttatgtac

SEQ ID NO: 145660 - DNA, 22 bp, Artificial Sequence
  Synthetic oligonucleotide; TTT chr11 5214916 5214937 5214921 5214916 -
tagattttctagtttatgtaca

SEQ ID NO: 145661 - DNA, 22 bp, Artificial Sequence
  Synthetic oligonucleotide; TTT chr11 5214915 5214936 5214920 5214915 -
agattttctagtttatgtacat

SEQ ID NO: 145662 - DNA, 22 bp, Artificial Sequence
  Synthetic oligonucleotide; TTA chr11 5214914 5214935 5214919 5214914 -
gattttctagtttatgtacata

SEQ ID NO: 145663 - DNA, 22 bp, Artificial Sequence
  Synthetic oligonucleotide; TTT chr11 5214909 5214930 5214914 5214909 -
tctagtttatgtacatagagat

SEQ ID NO: 145664 - DNA, 22 bp, Artificial Sequence
  Synthetic oligonucleotide; TTT chr11 5214908 5214929 5214913 5214908 -
ctagtttatgtacatagagatg

SEQ ID NO: 145665 - DNA, 22 bp, Artificial Sequence
  Synthetic oligonucleotide; TTC chr11 5214907 5214928 5214912 5214907 -
tagtttatgtacatagagatgt

SEQ ID NO: 145666 - DNA, 22 bp, Artificial Sequence
  Synthetic oligonucleotide; CTA chr11 5214905 5214926 5214910 5214905 -
gtttatgtacatagagatgttc

SEQ ID NO: 145667 - DNA, 22 bp, Artificial Sequence
  Synthetic oligonucleotide; TTT chr11 5214901 5214922 5214906 5214901 -
atgtacatagagatgttcatag

SEQ ID NO: 145668 - DNA, 22 bp, Artificial Sequence
  Synthetic oligonucleotide; TTA chr11 5214900 5214921 5214905 5214900 -
tgtacatagagatgttcatagt

SEQ ID NO: 145669 - DNA, 22 bp, Artificial Sequence
  Synthetic oligonucleotide; TTC chr11 5214883 5214904 5214888 5214883 -
atagtagtttttgatgattatt

SEQ ID NO: 145670 - DNA, 22 bp, Artificial Sequence
  Synthetic oligonucleotide; TTT chr11 5214873 5214894 5214878 5214873 -
ttgatgattatttgtatttctg

SEQ ID NO: 145671 - DNA, 22 bp, Artificial Sequence
  Synthetic oligonucleotide; TTT chr11 5214872 5214893 5214877 5214872 -
tgatgattatttgtatttctgt

SEQ ID NO: 145672 - DNA, 22 bp, Artificial Sequence
  Synthetic oligonucleotide; TTT chr11 5214871 5214892 5214876 5214871 -
gatgattatttgtatttctgtg

SEQ ID NO: 145673 - DNA, 22 bp, Artificial Sequence
  Synthetic oligonucleotide; TTG chr11 5214870 5214891 5214875 5214870 -
atgattatttgtatttctgtgg

SEQ ID NO: 145674 - DNA, 22 bp, Artificial Sequence
  Synthetic oligonucleotide; TTA chr11 5214863 5214884 5214868 5214863 -
tttgtatttctgtggggtgagt

SEQ ID NO: 145675 - DNA, 22 bp, Artificial Sequence
  Synthetic oligonucleotide; TTT chr11 5214860 5214881 5214865 5214860 -
gtatttctgtggggtgagtgat

SEQ ID NO: 145676 - DNA, 22 bp, Artificial Sequence
  Synthetic oligonucleotide; TTG chr11 5214859 5214880 5214864 5214859 -
tatttctgtggggtgagtgata

SEQ ID NO: 145677 - DNA, 22 bp, Artificial Sequence
  Synthetic oligonucleotide; TTT chr11 5214854 5214875 5214859 5214854 -
ctgtggggtgagtgataatatt

SEQ ID NO: 145678 - DNA, 22 bp, Artificial Sequence
  Synthetic oligonucleotide; TTC chr11 5214853 5214874 5214858 5214853 -
tgtggggtgagtgataatattc

SEQ ID NO: 145679 - DNA, 22 bp, Artificial Sequence
  Synthetic oligonucleotide; CTG chr11 5214851 5214872 5214856 5214851 -
tggggtgagtgataatattccc

SEQ ID NO: 145680 - DNA, 22 bp, Artificial Sequence
  Synthetic oligonucleotide; TTC chr11 5214831 5214852 5214836 5214831 -
cctttttcatttctaactgtgc

SEQ ID NO: 145681 - DNA, 22 bp, Artificial Sequence
  Synthetic oligonucleotide; CTT chr11 5214827 5214848 5214832 5214827 -
tttcatttctaactgtgcttat

SEQ ID NO: 145682 - DNA, 22 bp, Artificial Sequence
  Synthetic oligonucleotide; TTT chr11 5214826 5214847 5214831 5214826 -
ttcatttctaactgtgcttatt

SEQ ID NO: 145683 - DNA, 22 bp, Artificial Sequence
  Synthetic oligonucleotide; TTT chr11 5214825 5214846 5214830 5214825 -
tcatttctaactgtgcttattt

SEQ ID NO: 145684 - DNA, 22 bp, Artificial Sequence
  Synthetic oligonucleotide; TTT chr11 5214824 5214845 5214829 5214824 -
catttctaactgtgcttatttg

SEQ ID NO: 145685 - DNA, 22 bp, Artificial Sequence
  Synthetic oligonucleotide; TTC chr11 5214823 5214844 5214828 5214823 -
atttctaactgtgcttatttgg

SEQ ID NO: 145686 - DNA, 22 bp, Artificial Sequence
  Synthetic oligonucleotide; TTT chr11 5214819 5214840 5214824 5214819 -
ctaactgtgcttatttggatct

SEQ ID NO: 145687 - DNA, 22 bp, Artificial Sequence
  Synthetic oligonucleotide; TTC chr11 5214818 5214839 5214823 5214818 -
taactgtgcttatttggatctt

SEQ ID NO: 145688 - DNA, 22 bp, Artificial Sequence
  Synthetic oligonucleotide; CTA chr11 5214816 5214837 5214821 5214816 -
actgtgcttatttggatcttct

SEQ ID NO: 145689 - DNA, 22 bp, Artificial Sequence
  Synthetic oligonucleotide; CTG chr11 5214812 5214833 5214817 5214812 -
tgcttatttggatcttctctct

SEQ ID NO: 145690 - DNA, 22 bp, Artificial Sequence
  Synthetic oligonucleotide; CTT chr11 5214807 5214828 5214812 5214807 -
atttggatcttctctcttgtct

SEQ ID NO: 145691 - DNA, 22 bp, Artificial Sequence
  Synthetic oligonucleotide; TTA chr11 5214806 5214827 5214811 5214806 -
tttggatcttctctcttgtctt

SEQ ID NO: 145692 - DNA, 22 bp, Artificial Sequence
  Synthetic oligonucleotide; TTT chr11 5214803 5214824 5214808 5214803 -
ggatcttctctcttgtcttctt

SEQ ID NO: 145693 - DNA, 22 bp, Artificial Sequence
  Synthetic oligonucleotide; TTG chr11 5214802 5214823 5214807 5214802 -
gatcttctctcttgtcttcttt

SEQ ID NO: 145694 - DNA, 22 bp, Artificial Sequence
  Synthetic oligonucleotide; CTT chr11 5214796 5214817 5214801 5214796 -
ctctcttgtcttctttattagt

SEQ ID NO: 145695 - DNA, 22 bp, Artificial Sequence
  Synthetic oligonucleotide; TTC chr11 5214795 5214816 5214800 5214795 -
tctcttgtcttctttattagtc

SEQ ID NO: 145696 - DNA, 22 bp, Artificial Sequence
  Synthetic oligonucleotide; CTC chr11 5214793 5214814 5214798 5214793 -
tcttgtcttctttattagtcta

SEQ ID NO: 145697 - DNA, 22 bp, Artificial Sequence
  Synthetic oligonucleotide; CTC chr11 5214791 5214812 5214796 5214791 -
ttgtcttctttattagtctagc

SEQ ID NO: 145698 - DNA, 22 bp, Artificial Sequence
  Synthetic oligonucleotide; CTT chr11 5214789 5214810 5214794 5214789 -
gtcttctttattagtctagcta

SEQ ID NO: 145699 - DNA, 22 bp, Artificial Sequence
  Synthetic oligonucleotide; TTG chr11 5214788 5214809 5214793 5214788 -
tcttctttattagtctagctag

SEQ ID NO: 145700 - DNA, 22 bp, Artificial Sequence
  Synthetic oligonucleotide; CTT chr11 5214784 5214805 5214789 5214784 -
ctttattagtctagctagtgat

SEQ ID NO: 145701 - DNA, 22 bp, Artificial Sequence
  Synthetic oligonucleotide; TTC chr11 5214783 5214804 5214788 5214783 -
tttattagtctagctagtgatc

SEQ ID NO: 145702 - DNA, 22 bp, Artificial Sequence
  Synthetic oligonucleotide; CTT chr11 5214781 5214802 5214786 5214781 -
tattagtctagctagtgatcta

SEQ ID NO: 145703 - DNA, 22 bp, Artificial Sequence
  Synthetic oligonucleotide; TTT chr11 5214780 5214801 5214785 5214780 -
attagtctagctagtgatctac

SEQ ID NO: 145704 - DNA, 22 bp, Artificial Sequence
  Synthetic oligonucleotide; TTA chr11 5214779 5214800 5214784 5214779 -
ttagtctagctagtgatctacc

SEQ ID NO: 145705 - DNA, 22 bp, Artificial Sequence
  Synthetic oligonucleotide; TTA chr11 5214776 5214797 5214781 5214776 -
gtctagctagtgatctacctta

SEQ ID NO: 145706 - DNA, 22 bp, Artificial Sequence
  Synthetic oligonucleotide; CTA chr11 5214771 5214792 5214776 5214771 -
gctagtgatctaccttattaat

SEQ ID NO: 145707 - DNA, 22 bp, Artificial Sequence
  Synthetic oligonucleotide; CTA chr11 5214767 5214788 5214772 5214767 -
gtgatctaccttattaattttt

SEQ ID NO: 145708 - DNA, 22 bp, Artificial Sequence
  Synthetic oligonucleotide; CTA chr11 5214759 5214780 5214764 5214759 -
ccttattaattttttcacaaaa

SEQ ID NO: 145709 - DNA, 22 bp, Artificial Sequence
  Synthetic oligonucleotide; CTT chr11 5214755 5214776 5214760 5214755 -
attaattttttcacaaaaccag

SEQ ID NO: 145710 - DNA, 22 bp, Artificial Sequence
  Synthetic oligonucleotide; TTA chr11 5214754 5214775 5214759 5214754 -
ttaattttttcacaaaaccagc

SEQ ID NO: 145711 - DNA, 22 bp, Artificial Sequence
  Synthetic oligonucleotide; TTA chr11 5214751 5214772 5214756 5214751 -
attttttcacaaaaccagctct

SEQ ID NO: 145712 - DNA, 22 bp, Artificial Sequence
  Synthetic oligonucleotide; TTT chr11 5214747 5214768 5214752 5214747 -
tttcacaaaaccagctcttgga

SEQ ID NO: 145713 - DNA, 22 bp, Artificial Sequence
  Synthetic oligonucleotide; TTT chr11 5214746 5214767 5214751 5214746 -
ttcacaaaaccagctcttggac

SEQ ID NO: 145714 - DNA, 22 bp, Artificial Sequence
  Synthetic oligonucleotide; TTT chr11 5214745 5214766 5214750 5214745 -
tcacaaaaccagctcttggact

SEQ ID NO: 145715 - DNA, 22 bp, Artificial Sequence
  Synthetic oligonucleotide; TTT chr11 5214744 5214765 5214749 5214744 -
cacaaaaccagctcttggactc

SEQ ID NO: 145716 - DNA, 22 bp, Artificial Sequence
  Synthetic oligonucleotide; TTC chr11 5214743 5214764 5214748 5214743 -
acaaaaccagctcttggactca

SEQ ID NO: 145717 - DNA, 22 bp, Artificial Sequence
  Synthetic oligonucleotide; CTC chr11 5214730 5214751 5214735 5214730 -
ttggactcattaatcttttgaa

SEQ ID NO: 145718 - DNA, 22 bp, Artificial Sequence
  Synthetic oligonucleotide; CTT chr11 5214728 5214749 5214733 5214728 -
ggactcattaatcttttgaatg

SEQ ID NO: 145719 - DNA, 22 bp, Artificial Sequence
  Synthetic oligonucleotide; TTG chr11 5214727 5214748 5214732 5214727 -
gactcattaatcttttgaatgg

SEQ ID NO: 145720 - DNA, 22 bp, Artificial Sequence
  Synthetic oligonucleotide; CTC chr11 5214722 5214743 5214727 5214722 -
attaatcttttgaatggtattt

SEQ ID NO: 145721 - DNA, 22 bp, Artificial Sequence
  Synthetic oligonucleotide; TTA chr11 5214718 5214739 5214723 5214718 -
atcttttgaatggtattttgtg

SEQ ID NO: 145722 - DNA, 22 bp, Artificial Sequence
  Synthetic oligonucleotide; CTT chr11 5214713 5214734 5214718 5214713 -
ttgaatggtattttgtgtttta

SEQ ID NO: 145723 - DNA, 22 bp, Artificial Sequence
  Synthetic oligonucleotide; TTT chr11 5214712 5214733 5214717 5214712 -
tgaatggtattttgtgttttaa

SEQ ID NO: 145724 - DNA, 22 bp, Artificial Sequence
  Synthetic oligonucleotide; TTT chr11 5214711 5214732 5214716 5214711 -
gaatggtattttgtgttttaat

SEQ ID NO: 145725 - DNA, 22 bp, Artificial Sequence
  Synthetic oligonucleotide; TTG chr11 5214710 5214731 5214715 5214710 -
aatggtattttgtgttttaata

SEQ ID NO: 145726 - DNA, 22 bp, Artificial Sequence
  Synthetic oligonucleotide; TTT chr11 5214700 5214721 5214705 5214700 -
tgtgttttaatatccttcagtt

SEQ ID NO: 145727 - DNA, 22 bp, Artificial Sequence
  Synthetic oligonucleotide; TTT chr11 5214699 5214720 5214704 5214699 -
gtgttttaatatccttcagtta

SEQ ID NO: 145728 - DNA, 22 bp, Artificial Sequence
  Synthetic oligonucleotide; TTG chr11 5214698 5214719 5214703 5214698 -
tgttttaatatccttcagttag

SEQ ID NO: 145729 - DNA, 22 bp, Artificial Sequence
  Synthetic oligonucleotide; TTT chr11 5214693 5214714 5214698 5214693 -
taatatccttcagttagctttg

SEQ ID NO: 145730 - DNA, 22 bp, Artificial Sequence
  Synthetic oligonucleotide; TTT chr11 5214692 5214713 5214697 5214692 -
aatatccttcagttagctttga

SEQ ID NO: 145731 - DNA, 22 bp, Artificial Sequence
  Synthetic oligonucleotide; TTA chr11 5214691 5214712 5214696 5214691 -
atatccttcagttagctttgat

SEQ ID NO: 145732 - DNA, 22 bp, Artificial Sequence
  Synthetic oligonucleotide; CTT chr11 5214683 5214704 5214688 5214683 -
cagttagctttgatcttgttta

SEQ ID NO: 145733 - DNA, 22 bp, Artificial Sequence
  Synthetic oligonucleotide; TTC chr11 5214682 5214703 5214687 5214682 -
agttagctttgatcttgtttat

SEQ ID NO: 145734 - DNA, 22 bp, Artificial Sequence
  Synthetic oligonucleotide; TTA chr11 5214677 5214698 5214682 5214677 -
gctttgatcttgtttatttctt

SEQ ID NO: 145735 - DNA, 22 bp, Artificial Sequence
  Synthetic oligonucleotide; CTT chr11 5214673 5214694 5214678 5214673 -
tgatcttgtttatttcttgtct

SEQ ID NO: 145736 - DNA, 22 bp, Artificial Sequence
  Synthetic oligonucleotide; TTT chr11 5214672 5214693 5214677 5214672 -
gatcttgtttatttcttgtctt

SEQ ID NO: 145737 - DNA, 22 bp, Artificial Sequence
  Synthetic oligonucleotide; TTG chr11 5214671 5214692 5214676 5214671 -
atcttgtttatttcttgtcttc

SEQ ID NO: 145738 - DNA, 22 bp, Artificial Sequence
  Synthetic oligonucleotide; CTT chr11 5214666 5214687 5214671 5214666 -
gtttatttcttgtcttctgcta

SEQ ID NO: 145739 - DNA, 22 bp, Artificial Sequence
  Synthetic oligonucleotide; TTG chr11 5214665 5214686 5214670 5214665 -
tttatttcttgtcttctgctag

SEQ ID NO: 145740 - DNA, 22 bp, Artificial Sequence
  Synthetic oligonucleotide; TTT chr11 5214662 5214683 5214667 5214662 -
atttcttgtcttctgctagatt

SEQ ID NO: 145741 - DNA, 22 bp, Artificial Sequence
  Synthetic oligonucleotide; TTA chr11 5214661 5214682 5214666 5214661 -
tttcttgtcttctgctagattt

SEQ ID NO: 145742 - DNA, 22 bp, Artificial Sequence
  Synthetic oligonucleotide; TTT chr11 5214658 5214679 5214663 5214658 -
cttgtcttctgctagatttagg

SEQ ID NO: 145743 - DNA, 22 bp, Artificial Sequence
  Synthetic oligonucleotide; TTC chr11 5214657 5214678 5214662 5214657 -
ttgtcttctgctagatttaggg

SEQ ID NO: 145744 - DNA, 22 bp, Artificial Sequence
  Synthetic oligonucleotide; CTT chr11 5214655 5214676 5214660 5214655 -
gtcttctgctagatttagggtt

SEQ ID NO: 145745 - DNA, 22 bp, Artificial Sequence
  Synthetic oligonucleotide; TTG chr11 5214654 5214675 5214659 5214654 -
tcttctgctagatttagggttg

SEQ ID NO: 145746 - DNA, 22 bp, Artificial Sequence
  Synthetic oligonucleotide; CTT chr11 5214650 5214671 5214655 5214650 -
ctgctagatttagggttggttt

SEQ ID NO: 145747 - DNA, 22 bp, Artificial Sequence
  Synthetic oligonucleotide; TTC chr11 5214649 5214670 5214654 5214649 -
tgctagatttagggttggtttg

SEQ ID NO: 145748 - DNA, 22 bp, Artificial Sequence
  Synthetic oligonucleotide; CTG chr11 5214647 5214668 5214652 5214647 -
ctagatttagggttggtttgct

SEQ ID NO: 145749 - DNA, 22 bp, Artificial Sequence
  Synthetic oligonucleotide; CTA chr11 5214644 5214665 5214649 5214644 -
gatttagggttggtttgctctt

SEQ ID NO: 145750 - DNA, 22 bp, Artificial Sequence
  Synthetic oligonucleotide; TTT chr11 5214639 5214660 5214644 5214639 -
agggttggtttgctcttggttc

SEQ ID NO: 145751 - DNA, 22 bp, Artificial Sequence
  Synthetic oligonucleotide; TTA chr11 5214638 5214659 5214643 5214638 -
gggttggtttgctcttggttct

SEQ ID NO: 145752 - DNA, 22 bp, Artificial Sequence
  Synthetic oligonucleotide; TTG chr11 5214632 5214653 5214637 5214632 -
gtttgctcttggttctctggtt

SEQ ID NO: 145753 - DNA, 22 bp, Artificial Sequence
  Synthetic oligonucleotide; TTT chr11 5214628 5214649 5214633 5214628 -
gctcttggttctctggttcttt

SEQ ID NO: 145754 - DNA, 22 bp, Artificial Sequence
  Synthetic oligonucleotide; TTG chr11 5214627 5214648 5214632 5214627 -
ctcttggttctctggttctttt

SEQ ID NO: 145755 - DNA, 22 bp, Artificial Sequence
  Synthetic oligonucleotide; CTC chr11 5214624 5214645 5214629 5214624 -
ttggttctctggttcttttagt

SEQ ID NO: 145756 - DNA, 22 bp, Artificial Sequence
  Synthetic oligonucleotide; CTT chr11 5214622 5214643 5214627 5214622 -
ggttctctggttcttttagttg

SEQ ID NO: 145757 - DNA, 22 bp, Artificial Sequence
  Synthetic oligonucleotide; TTG chr11 5214621 5214642 5214626 5214621 -
gttctctggttcttttagttgt

SEQ ID NO: 145758 - DNA, 22 bp, Artificial Sequence
  Synthetic oligonucleotide; TTC chr11 5214617 5214638 5214622 5214617 -
tctggttcttttagttgtgaca

SEQ ID NO: 145759 - DNA, 22 bp, Artificial Sequence
  Synthetic oligonucleotide; CTC chr11 5214615 5214636 5214620 5214615 -
tggttcttttagttgtgacatt

SEQ ID NO: 145760 - DNA, 22 bp, Artificial Sequence
  Synthetic oligonucleotide; CTG chr11 5214613 5214634 5214618 5214613 -
gttcttttagttgtgacattag

SEQ ID NO: 145761 - DNA, 22 bp, Artificial Sequence
  Synthetic oligonucleotide; TTC chr11 5214609 5214630 5214614 5214609 -
ttttagttgtgacattaggttg

SEQ ID NO: 145762 - DNA, 22 bp, Artificial Sequence
  Synthetic oligonucleotide; CTT chr11 5214607 5214628 5214612 5214607 -
ttagttgtgacattaggttgtt

SEQ ID NO: 145763 - DNA, 22 bp, Artificial Sequence
  Synthetic oligonucleotide; TTT chr11 5214606 5214627 5214611 5214606 -
tagttgtgacattaggttgtta

SEQ ID NO: 145764 - DNA, 22 bp, Artificial Sequence
  Synthetic oligonucleotide; TTT chr11 5214605 5214626 5214610 5214605 -
agttgtgacattaggttgttaa

SEQ ID NO: 145765 - DNA, 22 bp, Artificial Sequence
  Synthetic oligonucleotide; TTA chr11 5214604 5214625 5214609 5214604 -
gttgtgacattaggttgttaat

SEQ ID NO: 145766 - DNA, 22 bp, Artificial Sequence
  Synthetic oligonucleotide; TTG chr11 5214600 5214621 5214605 5214600 -
tgacattaggttgttaatttga

SEQ ID NO: 145767 - DNA, 22 bp, Artificial Sequence
  Synthetic oligonucleotide; TTA chr11 5214592 5214613 5214597 5214592 -
ggttgttaatttgagggcttta

SEQ ID NO: 145768 - DNA, 22 bp, Artificial Sequence
  Synthetic oligonucleotide; TTG chr11 5214587 5214608 5214592 5214587 -
ttaatttgagggctttaagact

SEQ ID NO: 145769 - DNA, 22 bp, Artificial Sequence
  Synthetic oligonucleotide; TTA chr11 5214584 5214605 5214589 5214584 -
atttgagggctttaagactttt

SEQ ID NO: 145770 - DNA, 22 bp, Artificial Sequence
  Synthetic oligonucleotide; TTT chr11 5214580 5214601 5214585 5214580 -
gagggctttaagactttttgat

SEQ ID NO: 145771 - DNA, 22 bp, Artificial Sequence
  Synthetic oligonucleotide; TTG chr11 5214579 5214600 5214584 5214579 -
agggctttaagactttttgatg

SEQ ID NO: 145772 - DNA, 22 bp, Artificial Sequence
  Synthetic oligonucleotide; CTT chr11 5214572 5214593 5214577 5214572 -
taagactttttgatgtgggcat

SEQ ID NO: 145773 - DNA, 22 bp, Artificial Sequence
  Synthetic oligonucleotide; TTT chr11 5214571 5214592 5214576 5214571 -
aagactttttgatgtgggcatt

SEQ ID NO: 145774 - DNA, 22 bp, Artificial Sequence
  Synthetic oligonucleotide; TTA chr11 5214570 5214591 5214575 5214570 -
agactttttgatgtgggcattt

SEQ ID NO: 145775 - DNA, 22 bp, Artificial Sequence
  Synthetic oligonucleotide; CTT chr11 5214564 5214585 5214569 5214564 -
tttgatgtgggcatttagtgta

SEQ ID NO: 145776 - DNA, 22 bp, Artificial Sequence
  Synthetic oligonucleotide; TTT chr11 5214563 5214584 5214568 5214563 -
ttgatgtgggcatttagtgtat

SEQ ID NO: 145777 - DNA, 22 bp, Artificial Sequence
  Synthetic oligonucleotide; TTT chr11 5214562 5214583 5214567 5214562 -
tgatgtgggcatttagtgtata

SEQ ID NO: 145778 - DNA, 22 bp, Artificial Sequence
  Synthetic oligonucleotide; TTT chr11 5214561 5214582 5214566 5214561 -
gatgtgggcatttagtgtataa

SEQ ID NO: 145779 - DNA, 22 bp, Artificial Sequence
  Synthetic oligonucleotide; TTG chr11 5214560 5214581 5214565 5214560 -
atgtgggcatttagtgtataaa

SEQ ID NO: 145780 - DNA, 22 bp, Artificial Sequence
  Synthetic oligonucleotide; TTT chr11 5214548 5214569 5214553 5214548 -
agtgtataaatttctctcttaa

SEQ ID NO: 145781 - DNA, 22 bp, Artificial Sequence
  Synthetic oligonucleotide; TTA chr11 5214547 5214568 5214552 5214547 -
gtgtataaatttctctcttaac

SEQ ID NO: 145782 - DNA, 22 bp, Artificial Sequence
  Synthetic oligonucleotide; TTT chr11 5214535 5214556 5214540 5214535 -
ctctcttaacactgtctaagct

SEQ ID NO: 145783 - DNA, 22 bp, Artificial Sequence
  Synthetic oligonucleotide; TTC chr11 5214534 5214555 5214539 5214534 -
tctcttaacactgtctaagctg

SEQ ID NO: 145784 - DNA, 22 bp, Artificial Sequence
  Synthetic oligonucleotide; CTC chr11 5214532 5214553 5214537 5214532 -
tcttaacactgtctaagctgtg

SEQ ID NO: 145785 - DNA, 22 bp, Artificial Sequence
  Synthetic oligonucleotide; CTC chr11 5214530 5214551 5214535 5214530 -
ttaacactgtctaagctgtgtc

SEQ ID NO: 145786 - DNA, 22 bp, Artificial Sequence
  Synthetic oligonucleotide; CTT chr11 5214528 5214549 5214533 5214528 -
aacactgtctaagctgtgtccc

SEQ ID NO: 145787 - DNA, 22 bp, Artificial Sequence
  Synthetic oligonucleotide; TTA chr11 5214527 5214548 5214532 5214527 -
acactgtctaagctgtgtccca

SEQ ID NO: 145788 - DNA, 22 bp, Artificial Sequence
  Synthetic oligonucleotide; CTG chr11 5214521 5214542 5214526 5214521 -
tctaagctgtgtcccagagatt

SEQ ID NO: 145789 - DNA, 22 bp, Artificial Sequence
  Synthetic oligonucleotide; CTA chr11 5214517 5214538 5214522 5214517 -
agctgtgtcccagagattccgg

SEQ ID NO: 145790 - DNA, 22 bp, Artificial Sequence
  Synthetic oligonucleotide; CTG chr11 5214512 5214533 5214517 5214512 -
tgtcccagagattccggtatat

SEQ ID NO: 145791 - DNA, 22 bp, Artificial Sequence
  Synthetic oligonucleotide; TTC chr11 5214498 5214519 5214503 5214498 -
cggtatattgtatctttgttct

SEQ ID NO: 145792 - DNA, 22 bp, Artificial Sequence
  Synthetic oligonucleotide; TTG chr11 5214488 5214509 5214493 5214488 -
tatctttgttctcattagtttc

SEQ ID NO: 145793 - DNA, 22 bp, Artificial Sequence
  Synthetic oligonucleotide; CTT chr11 5214482 5214503 5214487 5214482 -
tgttctcattagtttcaaagaa

SEQ ID NO: 145794 - DNA, 22 bp, Artificial Sequence
  Synthetic oligonucleotide; TTT chr11 5214481 5214502 5214486 5214481 -
gttctcattagtttcaaagaac

SEQ ID NO: 145795 - DNA, 22 bp, Artificial Sequence
  Synthetic oligonucleotide; TTG chr11 5214480 5214501 5214485 5214480 -
ttctcattagtttcaaagaact

SEQ ID NO: 145796 - DNA, 22 bp, Artificial Sequence
  Synthetic oligonucleotide; TTC chr11 5214477 5214498 5214482 5214477 -
tcattagtttcaaagaactatt

SEQ ID NO: 145797 - DNA, 22 bp, Artificial Sequence
  Synthetic oligonucleotide; CTC chr11 5214475 5214496 5214480 5214475 -
attagtttcaaagaactatttt

SEQ ID NO: 145798 - DNA, 22 bp, Artificial Sequence
  Synthetic oligonucleotide; TTA chr11 5214471 5214492 5214476 5214471 -
gtttcaaagaactattttattt

SEQ ID NO: 145799 - DNA, 22 bp, Artificial Sequence
  Synthetic oligonucleotide; TTT chr11 5214467 5214488 5214472 5214467 -
caaagaactattttatttttgc

SEQ ID NO: 145800 - DNA, 22 bp, Artificial Sequence
  Synthetic oligonucleotide; TTC chr11 5214466 5214487 5214471 5214466 -
aaagaactattttatttttgcc

SEQ ID NO: 145801 - DNA, 22 bp, Artificial Sequence
  Synthetic oligonucleotide; CTA chr11 5214457 5214478 5214462 5214457 -
ttttatttttgccttagttttc

SEQ ID NO: 145802 - DNA, 22 bp, Artificial Sequence
  Synthetic oligonucleotide; TTT chr11 5214454 5214475 5214459 5214454 -
tatttttgccttagttttcatt

SEQ ID NO: 145803 - DNA, 22 bp, Artificial Sequence
  Synthetic oligonucleotide; TTT chr11 5214453 5214474 5214458 5214453 -
atttttgccttagttttcatta

SEQ ID NO: 145804 - DNA, 22 bp, Artificial Sequence
  Synthetic oligonucleotide; TTA chr11 5214452 5214473 5214457 5214452 -
tttttgccttagttttcattat

SEQ ID NO: 145805 - DNA, 22 bp, Artificial Sequence
  Synthetic oligonucleotide; TTT chr11 5214449 5214470 5214454 5214449 -
ttgccttagttttcattattta

SEQ ID NO: 145806 - DNA, 22 bp, Artificial Sequence
  Synthetic oligonucleotide; TTT chr11 5214448 5214469 5214453 5214448 -
tgccttagttttcattatttac

SEQ ID NO: 145807 - DNA, 22 bp, Artificial Sequence
  Synthetic oligonucleotide; TTT chr11 5214447 5214468 5214452 5214447 -
gccttagttttcattatttacc

SEQ ID NO: 145808 - DNA, 22 bp, Artificial Sequence
  Synthetic oligonucleotide; TTG chr11 5214446 5214467 5214451 5214446 -
ccttagttttcattatttaccc

SEQ ID NO: 145809 - DNA, 22 bp, Artificial Sequence
  Synthetic oligonucleotide; CTT chr11 5214442 5214463 5214447 5214442 -
agttttcattatttacccaaaa

SEQ ID NO: 145810 - DNA, 22 bp, Artificial Sequence
  Synthetic oligonucleotide; TTA chr11 5214441 5214462 5214446 5214441 -
gttttcattatttacccaaaat

SEQ ID NO: 145811 - DNA, 22 bp, Artificial Sequence
  Synthetic oligonucleotide; TTT chr11 5214437 5214458 5214442 5214437 -
tcattatttacccaaaattcat

SEQ ID NO: 145812 - DNA, 22 bp, Artificial Sequence
  Synthetic oligonucleotide; TTT chr11 5214436 5214457 5214441 5214436 -
cattatttacccaaaattcatt

SEQ ID NO: 145813 - DNA, 22 bp, Artificial Sequence
  Synthetic oligonucleotide; TTC chr11 5214435 5214456 5214440 5214435 -
attatttacccaaaattcattc

SEQ ID NO: 145814 - DNA, 22 bp, Artificial Sequence
  Synthetic oligonucleotide; TTA chr11 5214431 5214452 5214436 5214431 -
tttacccaaaattcattcagga

SEQ ID NO: 145815 - DNA, 22 bp, Artificial Sequence
  Synthetic oligonucleotide; TTT chr11 5214428 5214449 5214433 5214428 -
acccaaaattcattcaggagca

SEQ ID NO: 145816 - DNA, 22 bp, Artificial Sequence
  Synthetic oligonucleotide; TTA chr11 5214427 5214448 5214432 5214427 -
cccaaaattcattcaggagcag

SEQ ID NO: 145817 - DNA, 22 bp, Artificial Sequence
  Synthetic oligonucleotide; TTC chr11 5214417 5214438 5214422 5214417 -
attcaggagcaggttgtttaat

SEQ ID NO: 145818 - DNA, 22 bp, Artificial Sequence
  Synthetic oligonucleotide; TTC chr11 5214413 5214434 5214418 5214413 -
aggagcaggttgtttaatttcc

SEQ ID NO: 145819 - DNA, 22 bp, Artificial Sequence
  Synthetic oligonucleotide; TTG chr11 5214401 5214422 5214406 5214401 -
tttaatttccatgtaattgcat

SEQ ID NO: 145820 - DNA, 22 bp, Artificial Sequence
  Synthetic oligonucleotide; TTT chr11 5214398 5214419 5214403 5214398 -
aatttccatgtaattgcatagt

SEQ ID NO: 145821 - DNA, 22 bp, Artificial Sequence
  Synthetic oligonucleotide; TTA chr11 5214397 5214418 5214402 5214397 -
atttccatgtaattgcatagtt

SEQ ID NO: 145822 - DNA, 22 bp, Artificial Sequence
  Synthetic oligonucleotide; TTT chr11 5214393 5214414 5214398 5214393 -
ccatgtaattgcatagttttca

SEQ ID NO: 145823 - DNA, 22 bp, Artificial Sequence
  Synthetic oligonucleotide; TTC chr11 5214392 5214413 5214397 5214392 -
catgtaattgcatagttttcag

SEQ ID NO: 145824 - DNA, 22 bp, Artificial Sequence
  Synthetic oligonucleotide; TTG chr11 5214382 5214403 5214387 5214382 -
catagttttcagctattcatta

SEQ ID NO: 145825 - DNA, 22 bp, Artificial Sequence
  Synthetic oligonucleotide; TTT chr11 5214374 5214395 5214379 5214374 -
tcagctattcattagtcttgaa

SEQ ID NO: 145826 - DNA, 22 bp, Artificial Sequence
  Synthetic oligonucleotide; TTT chr11 5214373 5214394 5214378 5214373 -
cagctattcattagtcttgaaa

SEQ ID NO: 145827 - DNA, 22 bp, Artificial Sequence
  Synthetic oligonucleotide; TTC chr11 5214372 5214393 5214377 5214372 -
agctattcattagtcttgaaat

SEQ ID NO: 145828 - DNA, 22 bp, Artificial Sequence
  Synthetic oligonucleotide; CTA chr11 5214367 5214388 5214372 5214367 -
ttcattagtcttgaaatctatt

SEQ ID NO: 145829 - DNA, 22 bp, Artificial Sequence
  Synthetic oligonucleotide; TTC chr11 5214364 5214385 5214369 5214364 -
attagtcttgaaatctattttt

SEQ ID NO: 145830 - DNA, 22 bp, Artificial Sequence
  Synthetic oligonucleotide; TTA chr11 5214360 5214381 5214365 5214360 -
gtcttgaaatctatttttattc

SEQ ID NO: 145831 - DNA, 22 bp, Artificial Sequence
  Synthetic oligonucleotide; CTT chr11 5214355 5214376 5214360 5214355 -
gaaatctatttttattcctctg

SEQ ID NO: 145832 - DNA, 22 bp, Artificial Sequence
  Synthetic oligonucleotide; TTG chr11 5214354 5214375 5214359 5214354 -
aaatctatttttattcctctgt

SEQ ID NO: 145833 - DNA, 22 bp, Artificial Sequence
  Synthetic oligonucleotide; CTA chr11 5214347 5214368 5214352 5214347 -
tttttattcctctgtggtctga

SEQ ID NO: 145834 - DNA, 22 bp, Artificial Sequence
  Synthetic oligonucleotide; TTT chr11 5214344 5214365 5214349 5214344 -
ttattcctctgtggtctgagag

SEQ ID NO: 145835 - DNA, 22 bp, Artificial Sequence
  Synthetic oligonucleotide; TTT chr11 5214343 5214364 5214348 5214343 -
tattcctctgtggtctgagagt

SEQ ID NO: 145836 - DNA, 22 bp, Artificial Sequence
  Synthetic oligonucleotide; TTT chr11 5214342 5214363 5214347 5214342 -
attcctctgtggtctgagagtg

SEQ ID NO: 145837 - DNA, 22 bp, Artificial Sequence
  Synthetic oligonucleotide; TTA chr11 5214341 5214362 5214346 5214341 -
ttcctctgtggtctgagagtga

SEQ ID NO: 145838 - DNA, 22 bp, Artificial Sequence
  Synthetic oligonucleotide; TTC chr11 5214338 5214359 5214343 5214338 -
ctctgtggtctgagagtgattg

SEQ ID NO: 145839 - DNA, 22 bp, Artificial Sequence
  Synthetic oligonucleotide; CTC chr11 5214335 5214356 5214340 5214335 -
tgtggtctgagagtgattgata

SEQ ID NO: 145840 - DNA, 22 bp, Artificial Sequence
  Synthetic oligonucleotide; CTG chr11 5214333 5214354 5214338 5214333 -
tggtctgagagtgattgatatg

SEQ ID NO: 145841 - DNA, 22 bp, Artificial Sequence
  Synthetic oligonucleotide; CTG chr11 5214326 5214347 5214331 5214326 -
agagtgattgatatgatttttt

SEQ ID NO: 145842 - DNA, 22 bp, Artificial Sequence
  Synthetic oligonucleotide; TTG chr11 5214316 5214337 5214321 5214316 -
atatgattttttttttgcattt

SEQ ID NO: 145843 - DNA, 22 bp, Artificial Sequence
  Synthetic oligonucleotide; TTT chr11 5214307 5214328 5214312 5214307 -
tttttttgcatttgctgaggat

SEQ ID NO: 145844 - DNA, 22 bp, Artificial Sequence
  Synthetic oligonucleotide; TTT chr11 5214306 5214327 5214311 5214306 -
ttttttgcatttgctgaggatt

SEQ ID NO: 145845 - DNA, 22 bp, Artificial Sequence
  Synthetic oligonucleotide; TTT chr11 5214305 5214326 5214310 5214305 -
tttttgcatttgctgaggattg

SEQ ID NO: 145846 - DNA, 22 bp, Artificial Sequence
  Synthetic oligonucleotide; TTT chr11 5214304 5214325 5214309 5214304 -
ttttgcatttgctgaggattgt

SEQ ID NO: 145847 - DNA, 22 bp, Artificial Sequence
  Synthetic oligonucleotide; TTT chr11 5214303 5214324 5214308 5214303 -
tttgcatttgctgaggattgtt

SEQ ID NO: 145848 - DNA, 22 bp, Artificial Sequence
  Synthetic oligonucleotide; TTT chr11 5214302 5214323 5214307 5214302 -
ttgcatttgctgaggattgttt

SEQ ID NO: 145849 - DNA, 22 bp, Artificial Sequence
  Synthetic oligonucleotide; TTT chr11 5214301 5214322 5214306 5214301 -
tgcatttgctgaggattgtttt

SEQ ID NO: 145850 - DNA, 22 bp, Artificial Sequence
  Synthetic oligonucleotide; TTT chr11 5214300 5214321 5214305 5214300 -
gcatttgctgaggattgtttta

SEQ ID NO: 145851 - DNA, 22 bp, Artificial Sequence
  Synthetic oligonucleotide; TTG chr11 5214299 5214320 5214304 5214299 -
catttgctgaggattgttttag

SEQ ID NO: 145852 - DNA, 22 bp, Artificial Sequence
  Synthetic oligonucleotide; TTT chr11 5214294 5214315 5214299 5214294 -
gctgaggattgttttaggtcct

SEQ ID NO: 145853 - DNA, 22 bp, Artificial Sequence
  Synthetic oligonucleotide; TTG chr11 5214293 5214314 5214298 5214293 -
ctgaggattgttttaggtcctc

SEQ ID NO: 145854 - DNA, 22 bp, Artificial Sequence
  Synthetic oligonucleotide; CTG chr11 5214290 5214311 5214295 5214290 -
aggattgttttaggtcctccca

SEQ ID NO: 145855 - DNA, 22 bp, Artificial Sequence
  Synthetic oligonucleotide; TTG chr11 5214283 5214304 5214288 5214283 -
ttttaggtcctcccaaggctga

SEQ ID NO: 145856 - DNA, 22 bp, Artificial Sequence
  Synthetic oligonucleotide; TTT chr11 5214280 5214301 5214285 5214280 -
taggtcctcccaaggctgaacc

SEQ ID NO: 145857 - DNA, 22 bp, Artificial Sequence
  Synthetic oligonucleotide; TTT chr11 5214279 5214300 5214284 5214279 -
aggtcctcccaaggctgaacca

SEQ ID NO: 145858 - DNA, 22 bp, Artificial Sequence
  Synthetic oligonucleotide; TTA chr11 5214278 5214299 5214283 5214278 -
ggtcctcccaaggctgaaccag

SEQ ID NO: 145859 - DNA, 22 bp, Artificial Sequence
  Synthetic oligonucleotide; CTC chr11 5214271 5214292 5214276 5214271 -
ccaaggctgaaccaggaagaaa

SEQ ID NO: 145860 - DNA, 22 bp, Artificial Sequence
  Synthetic oligonucleotide; CTG chr11 5214262 5214283 5214267 5214262 -
aaccaggaagaaatcaatttcc

SEQ ID NO: 145861 - DNA, 22 bp, Artificial Sequence
  Synthetic oligonucleotide; TTT chr11 5214242 5214263 5214247 5214242 -
cctgaagagatccatgatgagc

SEQ ID NO: 145862 - DNA, 22 bp, Artificial Sequence
  Synthetic oligonucleotide; TTC chr11 5214241 5214262 5214246 5214241 -
ctgaagagatccatgatgagct

SEQ ID NO: 145863 - DNA, 22 bp, Artificial Sequence
  Synthetic oligonucleotide; CTG chr11 5214238 5214259 5214243 5214238 -
aagagatccatgatgagctctg

SEQ ID NO: 145864 - DNA, 22 bp, Artificial Sequence
  Synthetic oligonucleotide; CTC chr11 5214218 5214239 5214223 5214218 -
tgaaaatgattcagtaataaat

SEQ ID NO: 145865 - DNA, 22 bp, Artificial Sequence
  Synthetic oligonucleotide; CTG chr11 5214216 5214237 5214221 5214216 -
aaaatgattcagtaataaatag

SEQ ID NO: 145866 - DNA, 22 bp, Artificial Sequence
  Synthetic oligonucleotide; TTC chr11 5214206 5214227 5214211 5214206 -
agtaataaatagcctatcaaac

SEQ ID NO: 145867 - DNA, 22 bp, Artificial Sequence
  Synthetic oligonucleotide; CTA chr11 5214190 5214211 5214195 5214190 -
tcaaacaaaaaaagccctggac

SEQ ID NO: 145868 - DNA, 22 bp, Artificial Sequence
  Synthetic oligonucleotide; CTG chr11 5214171 5214192 5214176 5214171 -
gacaatatgattcacaaccaaa

SEQ ID NO: 145869 - DNA, 22 bp, Artificial Sequence
  Synthetic oligonucleotide; TTC chr11 5214158 5214179 5214163 5214158 -
acaaccaaattctatcagatgc

SEQ ID NO: 145870 - DNA, 22 bp, Artificial Sequence
  Synthetic oligonucleotide; TTC chr11 5214146 5214167 5214151 5214146 -
tatcagatgcacaaagaagagt

SEQ ID NO: 145871 - DNA, 22 bp, Artificial Sequence
  Synthetic oligonucleotide; CTA chr11 5214144 5214165 5214149 5214144 -
tcagatgcacaaagaagagttg

SEQ ID NO: 145872 - DNA, 22 bp, Artificial Sequence
  Synthetic oligonucleotide; TTG chr11 5214122 5214143 5214127 5214122 -
gaaaaattcctactgaagctac

SEQ ID NO: 145873 - DNA, 22 bp, Artificial Sequence
  Synthetic oligonucleotide; TTC chr11 5214113 5214134 5214118 5214113 -
ctactgaagctactccaaaaaa

SEQ ID NO: 145874 - DNA, 22 bp, Artificial Sequence
  Synthetic oligonucleotide; CTA chr11 5214110 5214131 5214115 5214110 -
ctgaagctactccaaaaaattg

SEQ ID NO: 145875 - DNA, 22 bp, Artificial Sequence
  Synthetic oligonucleotide; CTG chr11 5214107 5214128 5214112 5214107 -
aagctactccaaaaaattgagg

SEQ ID NO: 145876 - DNA, 22 bp, Artificial Sequence
  Synthetic oligonucleotide; CTA chr11 5214101 5214122 5214106 5214101 -
ctccaaaaaattgagggggagg

SEQ ID NO: 145877 - DNA, 22 bp, Artificial Sequence
  Synthetic oligonucleotide; CTC chr11 5214098 5214119 5214103 5214098 -
caaaaaattgagggggagggat

SEQ ID NO: 145878 - DNA, 22 bp, Artificial Sequence
  Synthetic oligonucleotide; TTG chr11 5214088 5214109 5214093 5214088 -
agggggagggattcaacctcag

SEQ ID NO: 145879 - DNA, 22 bp, Artificial Sequence
  Synthetic oligonucleotide; TTC chr11 5214074 5214095 5214079 5214074 -
aacctcagctcattttatgagg

SEQ ID NO: 145880 - DNA, 22 bp, Artificial Sequence
  Synthetic oligonucleotide; CTC chr11 5214068 5214089 5214073 5214068 -
agctcattttatgaggccagca

SEQ ID NO: 145881 - DNA, 22 bp, Artificial Sequence
  Synthetic oligonucleotide; CTC chr11 5214063 5214084 5214068 5214063 -
attttatgaggccagcatcatc

SEQ ID NO: 145882 - DNA, 22 bp, Artificial Sequence
  Synthetic oligonucleotide; TTT chr11 5214059 5214080 5214064 5214059 -
tatgaggccagcatcatcctga

SEQ ID NO: 145883 - DNA, 22 bp, Artificial Sequence
  Synthetic oligonucleotide; TTT chr11 5214058 5214079 5214063 5214058 -
atgaggccagcatcatcctgat

SEQ ID NO: 145884 - DNA, 22 bp, Artificial Sequence
  Synthetic oligonucleotide; TTA chr11 5214057 5214078 5214062 5214057 -
tgaggccagcatcatcctgata

SEQ ID NO: 145885 - DNA, 22 bp, Artificial Sequence
  Synthetic oligonucleotide; CTG chr11 5214038 5214059 5214043 5214038 -
ataccaaaacctgatagacaca

SEQ ID NO: 145886 - DNA, 22 bp, Artificial Sequence
  Synthetic oligonucleotide; CTG chr11 5214025 5214046 5214030 5214025 -
atagacacacaacaacaaaaaa

SEQ ID NO: 145887 - DNA, 22 bp, Artificial Sequence
  Synthetic oligonucleotide; CTT chr11 5213994 5214015 5213999 5213994 -
caggccaatatccttgaacatt

SEQ ID NO: 145888 - DNA, 22 bp, Artificial Sequence
  Synthetic oligonucleotide; TTC chr11 5213993 5214014 5213998 5213993 -
aggccaatatccttgaacattg

SEQ ID NO: 145889 - DNA, 22 bp, Artificial Sequence
  Synthetic oligonucleotide; CTT chr11 5213979 5214000 5213984 5213979 -
gaacattgatgcaaaaatacta

SEQ ID NO: 145890 - DNA, 22 bp, Artificial Sequence
  Synthetic oligonucleotide; TTG chr11 5213978 5213999 5213983 5213978 -
aacattgatgcaaaaatactag

SEQ ID NO: 145891 - DNA, 22 bp, Artificial Sequence
  Synthetic oligonucleotide; TTG chr11 5213971 5213992 5213976 5213971 -
atgcaaaaatactagcaagcca

SEQ ID NO: 145892 - DNA, 22 bp, Artificial Sequence
  Synthetic oligonucleotide; CTA chr11 5213957 5213978 5213962 5213957 -
gcaagccaaatccagcaacaca

SEQ ID NO: 145893 - DNA, 22 bp, Artificial Sequence
  Synthetic oligonucleotide; CTA chr11 5213924 5213945 5213929 5213924 -
atccacctcaatcaagtaggct

SEQ ID NO: 145894 - DNA, 22 bp, Artificial Sequence
  Synthetic oligonucleotide; CTC chr11 5213915 5213936 5213920 5213915 -
aatcaagtaggctttatccctg

SEQ ID NO: 145895 - DNA, 22 bp, Artificial Sequence
  Synthetic oligonucleotide; CTT chr11 5213901 5213922 5213906 5213901 -
tatccctgagaagcaagattgg

SEQ ID NO: 145896 - DNA, 22 bp, Artificial Sequence
  Synthetic oligonucleotide; TTT chr11 5213900 5213921 5213905 5213900 -
atccctgagaagcaagattggt

SEQ ID NO: 145897 - DNA, 22 bp, Artificial Sequence
  Synthetic oligonucleotide; TTA chr11 5213899 5213920 5213904 5213899 -
tccctgagaagcaagattggtt

SEQ ID NO: 145898 - DNA, 22 bp, Artificial Sequence
  Synthetic oligonucleotide; CTG chr11 5213893 5213914 5213898 5213893 -
agaagcaagattggttcagcat

SEQ ID NO: 145899 - DNA, 22 bp, Artificial Sequence
  Synthetic oligonucleotide; TTG chr11 5213880 5213901 5213885 5213880 -
gttcagcatatacaaattgata

SEQ ID NO: 145900 - DNA, 22 bp, Artificial Sequence
  Synthetic oligonucleotide; TTC chr11 5213876 5213897 5213881 5213876 -
agcatatacaaattgataaatg

SEQ ID NO: 145901 - DNA, 22 bp, Artificial Sequence
  Synthetic oligonucleotide; TTG chr11 5213861 5213882 5213866 5213861 -
ataaatgtgattcatcatatat

SEQ ID NO: 145902 - DNA, 22 bp, Artificial Sequence
  Synthetic oligonucleotide; TTC chr11 5213848 5213869 5213853 5213848 -
atcatatatacagcactaaaaa

SEQ ID NO: 145903 - DNA, 22 bp, Artificial Sequence
  Synthetic oligonucleotide; CTA chr11 5213830 5213851 5213835 5213830 -
aaaacagaaaccacatgatcat

SEQ ID NO: 145904 - DNA, 22 bp, Artificial Sequence
  Synthetic oligonucleotide; TTT chr11 5213806 5213827 5213811 5213806 -
caatatgtgcaaaaaaagattt

SEQ ID NO: 145905 - DNA, 22 bp, Artificial Sequence
  Synthetic oligonucleotide; TTC chr11 5213805 5213826 5213810 5213805 -
aatatgtgcaaaaaaagatttt

SEQ ID NO: 145906 - DNA, 22 bp, Artificial Sequence
  Synthetic oligonucleotide; TTT chr11 5213784 5213805 5213789 5213784 -
tgataaaattcaacttcacttc

SEQ ID NO: 145907 - DNA, 22 bp, Artificial Sequence
  Synthetic oligonucleotide; TTT chr11 5213783 5213804 5213788 5213783 -
gataaaattcaacttcacttca

SEQ ID NO: 145908 - DNA, 22 bp, Artificial Sequence
  Synthetic oligonucleotide; TTG chr11 5213782 5213803 5213787 5213782 -
ataaaattcaacttcacttcat

SEQ ID NO: 145909 - DNA, 22 bp, Artificial Sequence
  Synthetic oligonucleotide; TTC chr11 5213773 5213794 5213778 5213773 -
aacttcacttcatgttaaaacc

SEQ ID NO: 145910 - DNA, 22 bp, Artificial Sequence
  Synthetic oligonucleotide; CTT chr11 5213768 5213789 5213773 5213768 -
cacttcatgttaaaacctctca

SEQ ID NO: 145911 - DNA, 22 bp, Artificial Sequence
  Synthetic oligonucleotide; TTC chr11 5213767 5213788 5213772 5213767 -
acttcatgttaaaacctctcaa

SEQ ID NO: 145912 - DNA, 22 bp, Artificial Sequence
  Synthetic oligonucleotide; CTT chr11 5213763 5213784 5213768 5213763 -
catgttaaaacctctcaacaaa

SEQ ID NO: 145913 - DNA, 22 bp, Artificial Sequence
  Synthetic oligonucleotide; TTC chr11 5213762 5213783 5213767 5213762 -
atgttaaaacctctcaacaaac

SEQ ID NO: 145914 - DNA, 22 bp, Artificial Sequence
  Synthetic oligonucleotide; TTA chr11 5213756 5213777 5213761 5213756 -
aaacctctcaacaaactagcta

SEQ ID NO: 145915 - DNA, 22 bp, Artificial Sequence
  Synthetic oligonucleotide; CTC chr11 5213749 5213770 5213754 5213749 -
tcaacaaactagctatttaagg

SEQ ID NO: 145916 - DNA, 22 bp, Artificial Sequence
  Synthetic oligonucleotide; CTC chr11 5213747 5213768 5213752 5213747 -
aacaaactagctatttaaggac

SEQ ID NO: 145917 - DNA, 22 bp, Artificial Sequence
  Synthetic oligonucleotide; CTA chr11 5213738 5213759 5213743 5213738 -
gctatttaaggacatgacctca

SEQ ID NO: 145918 - DNA, 22 bp, Artificial Sequence
  Synthetic oligonucleotide; CTA chr11 5213734 5213755 5213739 5213734 -
tttaaggacatgacctcaaaat

SEQ ID NO: 145919 - DNA, 22 bp, Artificial Sequence
  Synthetic oligonucleotide; TTT chr11 5213731 5213752 5213736 5213731 -
aaggacatgacctcaaaataat

SEQ ID NO: 145920 - DNA, 22 bp, Artificial Sequence
  Synthetic oligonucleotide; TTA chr11 5213730 5213751 5213735 5213730 -
aggacatgacctcaaaataata

SEQ ID NO: 145921 - DNA, 22 bp, Artificial Sequence
  Synthetic oligonucleotide; CTC chr11 5213717 5213738 5213722 5213717 -
aaaataatatgagccatctatg

SEQ ID NO: 145922 - DNA, 22 bp, Artificial Sequence
  Synthetic oligonucleotide; CTA chr11 5213697 5213718 5213702 5213697 -
tgacaaacccacagccaacatc

SEQ ID NO: 145923 - DNA, 22 bp, Artificial Sequence
  Synthetic oligonucleotide; CTG chr11 5213654 5213675 5213659 5213654 -
gaagcattcttcttgaaaactg

SEQ ID NO: 145924 - DNA, 22 bp, Artificial Sequence
  Synthetic oligonucleotide; TTC chr11 5213645 5213666 5213650 5213645 -
ttcttgaaaactggcacaagac

SEQ ID NO: 145925 - DNA, 22 bp, Artificial Sequence
  Synthetic oligonucleotide; CTT chr11 5213643 5213664 5213648 5213643 -
cttgaaaactggcacaagacaa

SEQ ID NO: 145926 - DNA, 22 bp, Artificial Sequence
  Synthetic oligonucleotide; TTC chr11 5213642 5213663 5213647 5213642 -
ttgaaaactggcacaagacaag

SEQ ID NO: 145927 - DNA, 22 bp, Artificial Sequence
  Synthetic oligonucleotide; CTT chr11 5213640 5213661 5213645 5213640 -
gaaaactggcacaagacaagga

SEQ ID NO: 145928 - DNA, 22 bp, Artificial Sequence
  Synthetic oligonucleotide; TTG chr11 5213639 5213660 5213644 5213639 -
aaaactggcacaagacaaggat

SEQ ID NO: 145929 - DNA, 22 bp, Artificial Sequence
  Synthetic oligonucleotide; CTG chr11 5213632 5213653 5213637 5213632 -
gcacaagacaaggatgccctct

SEQ ID NO: 145930 - DNA, 22 bp, Artificial Sequence
  Synthetic oligonucleotide; CTC chr11 5213611 5213632 5213616 5213611 -
tctcaccactgctattcagtat

SEQ ID NO: 145931 - DNA, 22 bp, Artificial Sequence
  Synthetic oligonucleotide; CTC chr11 5213609 5213630 5213614 5213609 -
tcaccactgctattcagtatag

SEQ ID NO: 145932 - DNA, 22 bp, Artificial Sequence
  Synthetic oligonucleotide; CTC chr11 5213607 5213628 5213612 5213607 -
accactgctattcagtatagta

SEQ ID NO: 145933 - DNA, 22 bp, Artificial Sequence
  Synthetic oligonucleotide; CTG chr11 5213600 5213621 5213605 5213600 -
ctattcagtatagtactggcag

SEQ ID NO: 145934 - DNA, 22 bp, Artificial Sequence
  Synthetic oligonucleotide; CTA chr11 5213597 5213618 5213602 5213597 -
ttcagtatagtactggcagtcc

SEQ ID NO: 145935 - DNA, 22 bp, Artificial Sequence
  Synthetic oligonucleotide; TTC chr11 5213594 5213615 5213599 5213594 -
agtatagtactggcagtcctgg

SEQ ID NO: 145936 - DNA, 22 bp, Artificial Sequence
  Synthetic oligonucleotide; CTG chr11 5213582 5213603 5213587 5213582 -
gcagtcctggccagagcaatca

SEQ ID NO: 145937 - DNA, 22 bp, Artificial Sequence
  Synthetic oligonucleotide; CTG chr11 5213573 5213594 5213578 5213573 -
gccagagcaatcaggcaagaga

SEQ ID NO: 145938 - DNA, 22 bp, Artificial Sequence
  Synthetic oligonucleotide; CTG chr11 5213501 5213522 5213506 5213501 -
ttttctgtatctagaaaacacc

SEQ ID NO: 145939 - DNA, 22 bp, Artificial Sequence
  Synthetic oligonucleotide; TTT chr11 5213498 5213519 5213503 5213498 -
tctgtatctagaaaacaccata

SEQ ID NO: 145940 - DNA, 22 bp, Artificial Sequence
  Synthetic oligonucleotide; TTT chr11 5213497 5213518 5213502 5213497 -
ctgtatctagaaaacaccatag

SEQ ID NO: 145941 - DNA, 22 bp, Artificial Sequence
  Synthetic oligonucleotide; TTC chr11 5213496 5213517 5213501 5213496 -
tgtatctagaaaacaccatagt

SEQ ID NO: 145942 - DNA, 22 bp, Artificial Sequence
  Synthetic oligonucleotide; CTG chr11 5213494 5213515 5213499 5213494 -
tatctagaaaacaccatagtca

SEQ ID NO: 145943 - DNA, 22 bp, Artificial Sequence
  Synthetic oligonucleotide; CTA chr11 5213488 5213509 5213493 5213488 -
gaaaacaccatagtcaaggccc

SEQ ID NO: 145944 - DNA, 22 bp, Artificial Sequence
  Synthetic oligonucleotide; CTC chr11 5213458 5213479 5213463 5213458 -
cttcagctgataacttcagcaa

SEQ ID NO: 145945 - DNA, 22 bp, Artificial Sequence
  Synthetic oligonucleotide; CTT chr11 5213455 5213476 5213460 5213455 -
cagctgataacttcagcaaagt

SEQ ID NO: 145946 - DNA, 22 bp, Artificial Sequence
  Synthetic oligonucleotide; TTC chr11 5213454 5213475 5213459 5213454 -
agctgataacttcagcaaagtt

SEQ ID NO: 145947 - DNA, 22 bp, Artificial Sequence
  Synthetic oligonucleotide; CTG chr11 5213449 5213470 5213454 5213449 -
ataacttcagcaaagtttcagg

SEQ ID NO: 145948 - DNA, 22 bp, Artificial Sequence
  Synthetic oligonucleotide; CTT chr11 5213442 5213463 5213447 5213442 -
cagcaaagtttcaggatataaa

SEQ ID NO: 145949 - DNA, 22 bp, Artificial Sequence
  Synthetic oligonucleotide; TTC chr11 5213441 5213462 5213446 5213441 -
agcaaagtttcaggatataaaa

SEQ ID NO: 145950 - DNA, 22 bp, Artificial Sequence
  Synthetic oligonucleotide; TTT chr11 5213431 5213452 5213436 5213431 -
caggatataaaatcaatgtaca

SEQ ID NO: 145951 - DNA, 22 bp, Artificial Sequence
  Synthetic oligonucleotide; TTC chr11 5213430 5213451 5213435 5213430 -
aggatataaaatcaatgtacaa

SEQ ID NO: 145952 - DNA, 22 bp, Artificial Sequence
  Synthetic oligonucleotide; CTA chr11 5213399 5213420 5213404 5213399 -
gcattcccatacatcaacaata

SEQ ID NO: 145953 - DNA, 22 bp, Artificial Sequence
  Synthetic oligonucleotide; TTC chr11 5213393 5213414 5213398 5213393 -
ccatacatcaacaatagccaag

SEQ ID NO: 145954 - DNA, 22 bp, Artificial Sequence
  Synthetic oligonucleotide; CTA chr11 5213367 5213388 5213372 5213367 -
gagccaaatcaggaagtcaatc

SEQ ID NO: 145955 - DNA, 22 bp, Artificial Sequence
  Synthetic oligonucleotide; TTT chr11 5213339 5213360 5213344 5213339 -
accgttgccacaaaaagaataa

SEQ ID NO: 145956 - DNA, 22 bp, Artificial Sequence
  Synthetic oligonucleotide; TTA chr11 5213338 5213359 5213343 5213338 -
ccgttgccacaaaaagaataaa

SEQ ID NO: 145957 - DNA, 22 bp, Artificial Sequence
  Synthetic oligonucleotide; TTG chr11 5213332 5213353 5213337 5213332 -
ccacaaaaagaataaaatacct

SEQ ID NO: 145958 - DNA, 22 bp, Artificial Sequence
  Synthetic oligonucleotide; CTA chr11 5213309 5213330 5213314 5213309 -
aggatatatctaaccaagcagt

SEQ ID NO: 145959 - DNA, 22 bp, Artificial Sequence
  Synthetic oligonucleotide; CTA chr11 5213297 5213318 5213302 5213297 -
accaagcagttgaaagatctct

SEQ ID NO: 145960 - DNA, 22 bp, Artificial Sequence
  Synthetic oligonucleotide; TTG chr11 5213285 5213306 5213290 5213285 -
aaagatctctacaatgagattt

SEQ ID NO: 145961 - DNA, 22 bp, Artificial Sequence
  Synthetic oligonucleotide; CTC chr11 5213276 5213297 5213281 5213276 -
tacaatgagatttacaaaacac

SEQ ID NO: 145962 - DNA, 22 bp, Artificial Sequence
  Synthetic oligonucleotide; CTA chr11 5213274 5213295 5213279 5213274 -
caatgagatttacaaaacactg

SEQ ID NO: 145963 - DNA, 22 bp, Artificial Sequence
  Synthetic oligonucleotide; TTT chr11 5213263 5213284 5213268 5213263 -
acaaaacactgctcaaagaaat

SEQ ID NO: 145964 - DNA, 22 bp, Artificial Sequence
  Synthetic oligonucleotide; TTA chr11 5213262 5213283 5213267 5213262 -
caaaacactgctcaaagaaatc

SEQ ID NO: 145965 - DNA, 22 bp, Artificial Sequence
  Synthetic oligonucleotide; CTG chr11 5213252 5213273 5213257 5213252 -
ctcaaagaaatcagagctgata

SEQ ID NO: 145966 - DNA, 22 bp, Artificial Sequence
  Synthetic oligonucleotide; CTC chr11 5213249 5213270 5213254 5213249 -
aaagaaatcagagctgatagaa

SEQ ID NO: 145967 - DNA, 22 bp, Artificial Sequence
  Synthetic oligonucleotide; CTG chr11 5213233 5213254 5213238 5213233 -
atagaaacaaatggaaaaactt

SEQ ID NO: 145968 - DNA, 22 bp, Artificial Sequence
  Synthetic oligonucleotide; CTT chr11 5213211 5213232 5213216 5213211 -
tccatgctcatggataaaaaga

SEQ ID NO: 145969 - DNA, 22 bp, Artificial Sequence
  Synthetic oligonucleotide; TTT chr11 5213210 5213231 5213215 5213210 -
ccatgctcatggataaaaagaa

SEQ ID NO: 145970 - DNA, 22 bp, Artificial Sequence
  Synthetic oligonucleotide; TTC chr11 5213209 5213230 5213214 5213209 -
catgctcatggataaaaagaat

SEQ ID NO: 145971 - DNA, 22 bp, Artificial Sequence
  Synthetic oligonucleotide; CTC chr11 5213202 5213223 5213207 5213202 -
atggataaaaagaatcaatatt

SEQ ID NO: 145972 - DNA, 22 bp, Artificial Sequence
  Synthetic oligonucleotide; TTG chr11 5213179 5213200 5213184 5213179 -
ttaaaatgtccatactgcctag

SEQ ID NO: 145973 - DNA, 22 bp, Artificial Sequence
  Synthetic oligonucleotide; TTA chr11 5213176 5213197 5213181 5213176 -
aaatgtccatactgcctagagc

SEQ ID NO: 145974 - DNA, 22 bp, Artificial Sequence
  Synthetic oligonucleotide; CTG chr11 5213162 5213183 5213167 5213162 -
cctagagcaatttacagtttca

SEQ ID NO: 145975 - DNA, 22 bp, Artificial Sequence
  Synthetic oligonucleotide; CTA chr11 5213158 5213179 5213163 5213158 -
gagcaatttacagtttcaaagc

SEQ ID NO: 145976 - DNA, 22 bp, Artificial Sequence
  Synthetic oligonucleotide; TTT chr11 5213149 5213170 5213154 5213149 -
acagtttcaaagctattcctat

SEQ ID NO: 145977 - DNA, 22 bp, Artificial Sequence
  Synthetic oligonucleotide; TTA chr11 5213148 5213169 5213153 5213148 -
cagtttcaaagctattcctatc

SEQ ID NO: 145978 - DNA, 22 bp, Artificial Sequence
  Synthetic oligonucleotide; TTT chr11 5213142 5213163 5213147 5213142 -
caaagctattcctatcaaacta

SEQ ID NO: 145979 - DNA, 22 bp, Artificial Sequence
  Synthetic oligonucleotide; TTC chr11 5213141 5213162 5213146 5213141 -
aaagctattcctatcaaactac

SEQ ID NO: 145980 - DNA, 22 bp, Artificial Sequence
  Synthetic oligonucleotide; CTA chr11 5213134 5213155 5213139 5213134 -
ttcctatcaaactaccaatgac

SEQ ID NO: 145981 - DNA, 22 bp, Artificial Sequence
  Synthetic oligonucleotide; TTC chr11 5213131 5213152 5213136 5213131 -
ctatcaaactaccaatgacatt

SEQ ID NO: 145982 - DNA, 22 bp, Artificial Sequence
  Synthetic oligonucleotide; CTA chr11 5213128 5213149 5213133 5213128 -
tcaaactaccaatgacattctt

SEQ ID NO: 145983 - DNA, 22 bp, Artificial Sequence
  Synthetic oligonucleotide; CTA chr11 5213120 5213141 5213125 5213120 -
ccaatgacattcttcacagaac

SEQ ID NO: 145984 - DNA, 22 bp, Artificial Sequence
  Synthetic oligonucleotide; TTC chr11 5213108 5213129 5213113 5213108 -
ttcacagaactagaaaaataca

SEQ ID NO: 145985 - DNA, 22 bp, Artificial Sequence
  Synthetic oligonucleotide; CTT chr11 5213106 5213127 5213111 5213106 -
cacagaactagaaaaatacact

SEQ ID NO: 145986 - DNA, 22 bp, Artificial Sequence
  Synthetic oligonucleotide; TTC chr11 5213105 5213126 5213110 5213105 -
acagaactagaaaaatacactt

SEQ ID NO: 145987 - DNA, 22 bp, Artificial Sequence
  Synthetic oligonucleotide; CTA chr11 5213096 5213117 5213101 5213096 -
gaaaaatacactttaaagttca

SEQ ID NO: 145988 - DNA, 22 bp, Artificial Sequence
  Synthetic oligonucleotide; CTT chr11 5213083 5213104 5213088 5213083 -
taaagttcatatggaacaacaa

SEQ ID NO: 145989 - DNA, 22 bp, Artificial Sequence
  Synthetic oligonucleotide; TTT chr11 5213082 5213103 5213087 5213082 -
aaagttcatatggaacaacaac

SEQ ID NO: 145990 - DNA, 22 bp, Artificial Sequence
  Synthetic oligonucleotide; TTA chr11 5213081 5213102 5213086 5213081 -
aagttcatatggaacaacaaca

SEQ ID NO: 145991 - DNA, 22 bp, Artificial Sequence
  Synthetic oligonucleotide; TTC chr11 5213075 5213096 5213080 5213075 -
atatggaacaacaacaaaaaaa

SEQ ID NO: 145992 - DNA, 22 bp, Artificial Sequence
  Synthetic oligonucleotide; CTA chr11 5213039 5213060 5213044 5213039 -
ggaaatcctaatactcacaggt

SEQ ID NO: 145993 - DNA, 22 bp, Artificial Sequence
  Synthetic oligonucleotide; CTA chr11 5213029 5213050 5213034 5213029 -
atactcacaggtgggaattgaa

SEQ ID NO: 145994 - DNA, 22 bp, Artificial Sequence
  Synthetic oligonucleotide; CTC chr11 5213023 5213044 5213028 5213023 -
acaggtgggaattgaaaaatga

SEQ ID NO: 145995 - DNA, 22 bp, Artificial Sequence
  Synthetic oligonucleotide; TTG chr11 5213009 5213030 5213014 5213009 -
aaaaatgagaacacttggacac

SEQ ID NO: 145996 - DNA, 22 bp, Artificial Sequence
  Synthetic oligonucleotide; CTT chr11 5212993 5213014 5212998 5212993 -
ggacacagggtggggaacatca

SEQ ID NO: 145997 - DNA, 22 bp, Artificial Sequence
  Synthetic oligonucleotide; TTG chr11 5212992 5213013 5212997 5212992 -
gacacagggtggggaacatcac

SEQ ID NO: 145998 - DNA, 22 bp, Artificial Sequence
  Synthetic oligonucleotide; CTG chr11 5212957 5212978 5212962 5212957 -
tcgtggggtggtaggagagagg

SEQ ID NO: 145999 - DNA, 22 bp, Artificial Sequence
  Synthetic oligonucleotide; TTA chr11 5212922 5212943 5212927 5212922 -
ggagatatatctaatgtaaatg

SEQ ID NO: 146000 - DNA, 22 bp, Artificial Sequence
  Synthetic oligonucleotide; CTA chr11 5212909 5212930 5212914 5212909 -
atgtaaatgacgagttaacggg

SEQ ID NO: 146001 - DNA, 22 bp, Artificial Sequence
  Synthetic oligonucleotide; TTA chr11 5212892 5212913 5212897 5212892 -
acgggtgcagcacaccaatatg

SEQ ID NO: 146002 - DNA, 22 bp, Artificial Sequence
  Synthetic oligonucleotide; CTG chr11 5212843 5212864 5212848 5212843 -
cacaggtaccgtagaacttaga

SEQ ID NO: 146003 - DNA, 22 bp, Artificial Sequence
  Synthetic oligonucleotide; CTT chr11 5212824 5212845 5212829 5212824 -
agagtacaaaaaaaaaaaaaga

SEQ ID NO: 146004 - DNA, 22 bp, Artificial Sequence
  Synthetic oligonucleotide; TTA chr11 5212823 5212844 5212828 5212823 -
gagtacaaaaaaaaaaaaagag

SEQ ID NO: 146005 - DNA, 22 bp, Artificial Sequence
  Synthetic oligonucleotide; CTG chr11 5212785 5212806 5212790 5212785 -
gagataatacattgcctaactt

SEQ ID NO: 146006 - DNA, 22 bp, Artificial Sequence
  Synthetic oligonucleotide; TTG chr11 5212771 5212792 5212776 5212771 -
cctaacttcaaaccataccaca

SEQ ID NO: 146007 - DNA, 22 bp, Artificial Sequence
  Synthetic oligonucleotide; CTA chr11 5212767 5212788 5212772 5212767 -
acttcaaaccataccacagggc

SEQ ID NO: 146008 - DNA, 22 bp, Artificial Sequence
  Synthetic oligonucleotide; CTT chr11 5212763 5212784 5212768 5212763 -
caaaccataccacagggctaca

SEQ ID NO: 146009 - DNA, 22 bp, Artificial Sequence
  Synthetic oligonucleotide; TTC chr11 5212762 5212783 5212767 5212762 -
aaaccataccacagggctacag

SEQ ID NO: 146010 - DNA, 22 bp, Artificial Sequence
  Synthetic oligonucleotide; CTA chr11 5212743 5212764 5212748 5212743 -
cagtaaccaaaacagtgtggta

SEQ ID NO: 146011 - DNA, 22 bp, Artificial Sequence
  Synthetic oligonucleotide; CTG chr11 5212718 5212739 5212723 5212718 -
ttacagaaaagacacacagaca

SEQ ID NO: 146012 - DNA, 22 bp, Artificial Sequence
  Synthetic oligonucleotide; TTA chr11 5212715 5212736 5212720 5212715 -
cagaaaagacacacagacaaat

SEQ ID NO: 146013 - DNA, 22 bp, Artificial Sequence
  Synthetic oligonucleotide; CTA chr11 5212653 5212674 5212658 5212653 -
caaccatctgatctttgacaaa

SEQ ID NO: 146014 - DNA, 22 bp, Artificial Sequence
  Synthetic oligonucleotide; CTG chr11 5212643 5212664 5212648 5212643 -
atctttgacaaagctgataaaa

SEQ ID NO: 146015 - DNA, 22 bp, Artificial Sequence
  Synthetic oligonucleotide; CTT chr11 5212638 5212659 5212643 5212638 -
tgacaaagctgataaaaacaag

SEQ ID NO: 146016 - DNA, 22 bp, Artificial Sequence
  Synthetic oligonucleotide; TTT chr11 5212637 5212658 5212642 5212637 -
gacaaagctgataaaaacaagc

SEQ ID NO: 146017 - DNA, 22 bp, Artificial Sequence
  Synthetic oligonucleotide; TTG chr11 5212636 5212657 5212641 5212636 -
acaaagctgataaaaacaagca

SEQ ID NO: 146018 - DNA, 22 bp, Artificial Sequence
  Synthetic oligonucleotide; CTG chr11 5212627 5212648 5212632 5212627 -
ataaaaacaagcaatgaggaaa

SEQ ID NO: 146019 - DNA, 22 bp, Artificial Sequence
  Synthetic oligonucleotide; CTA chr11 5212595 5212616 5212600 5212595 -
ttcaacaagtggtgttgggata

SEQ ID NO: 146020 - DNA, 22 bp, Artificial Sequence
  Synthetic oligonucleotide; TTC chr11 5212592 5212613 5212597 5212592 -
aacaagtggtgttgggataact

SEQ ID NO: 146021 - DNA, 22 bp, Artificial Sequence
  Synthetic oligonucleotide; TTG chr11 5212578 5212599 5212583 5212578 -
ggataactgactaaccgtatgt

SEQ ID NO: 146022 - DNA, 22 bp, Artificial Sequence
  Synthetic oligonucleotide; CTG chr11 5212569 5212590 5212574 5212569 -
actaaccgtatgtagaagattg

SEQ ID NO: 146023 - DNA, 22 bp, Artificial Sequence
  Synthetic oligonucleotide; CTA chr11 5212565 5212586 5212570 5212565 -
accgtatgtagaagattgaaac

SEQ ID NO: 146024 - DNA, 22 bp, Artificial Sequence
  Synthetic oligonucleotide; TTG chr11 5212547 5212568 5212552 5212547 -
aaaccagaccccgttctatatc

SEQ ID NO: 146025 - DNA, 22 bp, Artificial Sequence
  Synthetic oligonucleotide; TTC chr11 5212531 5212552 5212536 5212531 -
tatatcatatacacaaataaac

SEQ ID NO: 146026 - DNA, 22 bp, Artificial Sequence
  Synthetic oligonucleotide; CTA chr11 5212529 5212550 5212534 5212529 -
tatcatatacacaaataaactc

SEQ ID NO: 146027 - DNA, 22 bp, Artificial Sequence
  Synthetic oligonucleotide; CTC chr11 5212507 5212528 5212512 5212507 -
aagatggattagagacttaaat

SEQ ID NO: 146028 - DNA, 22 bp, Artificial Sequence
  Synthetic oligonucleotide; TTA chr11 5212496 5212517 5212501 5212496 -
gagacttaaatgcaaaacccaa

SEQ ID NO: 146029 - DNA, 22 bp, Artificial Sequence
  Synthetic oligonucleotide; CTT chr11 5212489 5212510 5212494 5212489 -
aaatgcaaaacccaaactataa

SEQ ID NO: 146030 - DNA, 22 bp, Artificial Sequence
  Synthetic oligonucleotide; TTA chr11 5212488 5212509 5212493 5212488 -
aatgcaaaacccaaactataaa

SEQ ID NO: 146031 - DNA, 22 bp, Artificial Sequence
  Synthetic oligonucleotide; CTA chr11 5212470 5212491 5212475 5212470 -
taaaaatgcttgaaagcaacct

SEQ ID NO: 146032 - DNA, 22 bp, Artificial Sequence
  Synthetic oligonucleotide; CTT chr11 5212459 5212480 5212464 5212459 -
gaaagcaacctaggcaatacca

SEQ ID NO: 146033 - DNA, 22 bp, Artificial Sequence
  Synthetic oligonucleotide; TTG chr11 5212458 5212479 5212463 5212458 -
aaagcaacctaggcaataccat

SEQ ID NO: 146034 - DNA, 22 bp, Artificial Sequence
  Synthetic oligonucleotide; CTA chr11 5212447 5212468 5212452 5212447 -
ggcaataccattccggacataa

SEQ ID NO: 146035 - DNA, 22 bp, Artificial Sequence
  Synthetic oligonucleotide; TTC chr11 5212434 5212455 5212439 5212434 -
cggacataagcaggggcaaaga

SEQ ID NO: 146036 - DNA, 22 bp, Artificial Sequence
  Synthetic oligonucleotide; TTT chr11 5212409 5212430 5212414 5212409 -
catgacaaagatgccaacagtc

SEQ ID NO: 146037 - DNA, 22 bp, Artificial Sequence
  Synthetic oligonucleotide; TTC chr11 5212408 5212429 5212413 5212408 -
atgacaaagatgccaacagtca

SEQ ID NO: 146038 - DNA, 22 bp, Artificial Sequence
  Synthetic oligonucleotide; TTG chr11 5212383 5212404 5212388 5212383 -
cagcaaaagcaaaaattgacaa

SEQ ID NO: 146039 - DNA, 22 bp, Artificial Sequence
  Synthetic oligonucleotide; TTG chr11 5212365 5212386 5212370 5212365 -
acaaataggatctaattaaaat

SEQ ID NO: 146040 - DNA, 22 bp, Artificial Sequence
  Synthetic oligonucleotide; CTA chr11 5212351 5212372 5212356 5212351 -
attaaaataaagtttctgcaca

SEQ ID NO: 146041 - DNA, 22 bp, Artificial Sequence
  Synthetic oligonucleotide; TTA chr11 5212347 5212368 5212352 5212347 -
aaataaagtttctgcacagcaa

SEQ ID NO: 146042 - DNA, 22 bp, Artificial Sequence
  Synthetic oligonucleotide; TTT chr11 5212336 5212357 5212341 5212336 -
ctgcacagcaaaagaaactatc

SEQ ID NO: 146043 - DNA, 22 bp, Artificial Sequence
  Synthetic oligonucleotide; TTC chr11 5212335 5212356 5212340 5212335 -
tgcacagcaaaagaaactatca

SEQ ID NO: 146044 - DNA, 22 bp, Artificial Sequence
  Synthetic oligonucleotide; CTG chr11 5212333 5212354 5212338 5212333 -
cacagcaaaagaaactatcaac

SEQ ID NO: 146045 - DNA, 22 bp, Artificial Sequence
  Synthetic oligonucleotide; CTA chr11 5212316 5212337 5212321 5212316 -
tcaactgagtaaacaacctata

SEQ ID NO: 146046 - DNA, 22 bp, Artificial Sequence
  Synthetic oligonucleotide; CTG chr11 5212309 5212330 5212314 5212309 -
agtaaacaacctatagaatggg

SEQ ID NO: 146047 - DNA, 22 bp, Artificial Sequence
  Synthetic oligonucleotide; CTA chr11 5212296 5212317 5212301 5212296 -
tagaatgggagaaaatttttgc

SEQ ID NO: 146048 - DNA, 22 bp, Artificial Sequence
  Synthetic oligonucleotide; TTT chr11 5212278 5212299 5212283 5212278 -
ttgcaaactatgcatccaacaa

SEQ ID NO: 146049 - DNA, 22 bp, Artificial Sequence
  Synthetic oligonucleotide; TTT chr11 5212277 5212298 5212282 5212277 -
tgcaaactatgcatccaacaaa

SEQ ID NO: 146050 - DNA, 22 bp, Artificial Sequence
  Synthetic oligonucleotide; TTT chr11 5212276 5212297 5212281 5212276 -
gcaaactatgcatccaacaaag

SEQ ID NO: 146051 - DNA, 22 bp, Artificial Sequence
  Synthetic oligonucleotide; TTG chr11 5212275 5212296 5212280 5212275 -
caaactatgcatccaacaaagg

SEQ ID NO: 146052 - DNA, 22 bp, Artificial Sequence
  Synthetic oligonucleotide; CTA chr11 5212268 5212289 5212273 5212268 -
tgcatccaacaaaggcctaata

SEQ ID NO: 146053 - DNA, 22 bp, Artificial Sequence
  Synthetic oligonucleotide; CTA chr11 5212249 5212270 5212254 5212249 -
atattcagaatctataaggaac

SEQ ID NO: 146054 - DNA, 22 bp, Artificial Sequence
  Synthetic oligonucleotide; TTC chr11 5212243 5212264 5212248 5212243 -
agaatctataaggaacttaaat

SEQ ID NO: 146055 - DNA, 22 bp, Artificial Sequence
  Synthetic oligonucleotide; CTA chr11 5212235 5212256 5212240 5212235 -
taaggaacttaaatgaatctac

SEQ ID NO: 146056 - DNA, 22 bp, Artificial Sequence
  Synthetic oligonucleotide; CTT chr11 5212225 5212246 5212230 5212225 -
aaatgaatctacaagaacaaaa

SEQ ID NO: 146057 - DNA, 22 bp, Artificial Sequence
  Synthetic oligonucleotide; TTA chr11 5212224 5212245 5212229 5212224 -
aatgaatctacaagaacaaaac

SEQ ID NO: 146058 - DNA, 22 bp, Artificial Sequence
  Synthetic oligonucleotide; CTA chr11 5212214 5212235 5212219 5212214 -
caagaacaaaacaaacaatgcc

SEQ ID NO: 146059 - DNA, 22 bp, Artificial Sequence
  Synthetic oligonucleotide; TTC chr11 5212155 5212176 5212160 5212155 -
aaaagaagacatacatgtggcc

SEQ ID NO: 146060 - DNA, 22 bp, Artificial Sequence
  Synthetic oligonucleotide; CTC chr11 5212111 5212132 5212116 5212111 -
agtgtcactgatcattagagaa

SEQ ID NO: 146061 - DNA, 22 bp, Artificial Sequence
  Synthetic oligonucleotide; CTG chr11 5212101 5212122 5212106 5212101 -
atcattagagaaatgccaatca

SEQ ID NO: 146062 - DNA, 22 bp, Artificial Sequence
  Synthetic oligonucleotide; TTA chr11 5212094 5212115 5212099 5212094 -
gagaaatgccaatcaaacccaa

SEQ ID NO: 146063 - DNA, 22 bp, Artificial Sequence
  Synthetic oligonucleotide; CTA chr11 5212060 5212081 5212065 5212060 -
tctcacatcacttaaaatatct

SEQ ID NO: 146064 - DNA, 22 bp, Artificial Sequence
  Synthetic oligonucleotide; CTC chr11 5212056 5212077 5212061 5212056 -
acatcacttaaaatatctataa

SEQ ID NO: 146065 - DNA, 22 bp, Artificial Sequence
  Synthetic oligonucleotide; CTT chr11 5212047 5212068 5212052 5212047 -
aaaatatctataattaaatagt

SEQ ID NO: 146066 - DNA, 22 bp, Artificial Sequence
  Synthetic oligonucleotide; TTA chr11 5212046 5212067 5212051 5212046 -
aaatatctataattaaatagtc

SEQ ID NO: 146067 - DNA, 22 bp, Artificial Sequence
  Synthetic oligonucleotide; CTA chr11 5212037 5212058 5212042 5212037 -
taattaaatagtcaaaaaataa

SEQ ID NO: 146068 - DNA, 22 bp, Artificial Sequence
  Synthetic oligonucleotide; TTA chr11 5212031 5212052 5212036 5212031 -
aatagtcaaaaaataacagatg

SEQ ID NO: 146069 - DNA, 22 bp, Artificial Sequence
  Synthetic oligonucleotide; TTG chr11 5211997 5212018 5212002 5211997 -
tggagaaaagggaatgtttata

SEQ ID NO: 146070 - DNA, 22 bp, Artificial Sequence
  Synthetic oligonucleotide; TTT chr11 5211978 5211999 5211983 5211978 -
atacaccattggtggcaatata

SEQ ID NO: 146071 - DNA, 22 bp, Artificial Sequence
  Synthetic oligonucleotide; TTA chr11 5211977 5211998 5211982 5211977 -
tacaccattggtggcaatataa

SEQ ID NO: 146072 - DNA, 22 bp, Artificial Sequence
  Synthetic oligonucleotide; TTG chr11 5211967 5211988 5211972 5211967 -
gtggcaatataaattagttcga

SEQ ID NO: 146073 - DNA, 22 bp, Artificial Sequence
  Synthetic oligonucleotide; TTA chr11 5211951 5211972 5211956 5211951 -
gttcgaccattgtagacagcag

SEQ ID NO: 146074 - DNA, 22 bp, Artificial Sequence
  Synthetic oligonucleotide; TTC chr11 5211947 5211968 5211952 5211947 -
gaccattgtagacagcagtgtg

SEQ ID NO: 146075 - DNA, 22 bp, Artificial Sequence
  Synthetic oligonucleotide; TTG chr11 5211939 5211960 5211944 5211939 -
tagacagcagtgtggcaattcc

SEQ ID NO: 146076 - DNA, 22 bp, Artificial Sequence
  Synthetic oligonucleotide; TTC chr11 5211918 5211939 5211923 5211918 -
cctaaagacctaaaaacagaaa

SEQ ID NO: 146077 - DNA, 22 bp, Artificial Sequence
  Synthetic oligonucleotide; CTA chr11 5211914 5211935 5211919 5211914 -
aagacctaaaaacagaaatacc

SEQ ID NO: 146078 - DNA, 22 bp, Artificial Sequence
  Synthetic oligonucleotide; CTA chr11 5211906 5211927 5211911 5211906 -
aaaacagaaataccatttaacc

SEQ ID NO: 146079 - DNA, 22 bp, Artificial Sequence
  Synthetic oligonucleotide; TTT chr11 5211888 5211909 5211893 5211888 -
aacccaacaatcctattattga

SEQ ID NO: 146080 - DNA, 22 bp, Artificial Sequence
  Synthetic oligonucleotide; TTA chr11 5211887 5211908 5211892 5211887 -
acccaacaatcctattattgag

SEQ ID NO: 146081 - DNA, 22 bp, Artificial Sequence
  Synthetic oligonucleotide; CTA chr11 5211873 5211894 5211878 5211873 -
ttattgagtatatacctaaagg

SEQ ID NO: 146082 - DNA, 22 bp, Artificial Sequence
  Synthetic oligonucleotide; TTA chr11 5211870 5211891 5211875 5211870 -
ttgagtatatacctaaaggaaa

SEQ ID NO: 146083 - DNA, 22 bp, Artificial Sequence
  Synthetic oligonucleotide; TTG chr11 5211867 5211888 5211872 5211867 -
agtatatacctaaaggaaaata

SEQ ID NO: 146084 - DNA, 22 bp, Artificial Sequence
  Synthetic oligonucleotide; CTA chr11 5211855 5211876 5211860 5211855 -
aaggaaaataaaccattctatc

SEQ ID NO: 146085 - DNA, 22 bp, Artificial Sequence
  Synthetic oligonucleotide; TTC chr11 5211837 5211858 5211842 5211837 -
tatcacaaagacacatgcacac

SEQ ID NO: 146086 - DNA, 22 bp, Artificial Sequence
  Synthetic oligonucleotide; CTA chr11 5211835 5211856 5211840 5211835 -
tcacaaagacacatgcacacct

SEQ ID NO: 146087 - DNA, 22 bp, Artificial Sequence
  Synthetic oligonucleotide; CTG chr11 5211812 5211833 5211817 5211812 -
tgtccattgcagcataatcaca

SEQ ID NO: 146088 - DNA, 22 bp, Artificial Sequence
  Synthetic oligonucleotide; TTG chr11 5211803 5211824 5211808 5211803 -
cagcataatcacaatagcaaag

SEQ ID NO: 146089 - DNA, 22 bp, Artificial Sequence
  Synthetic oligonucleotide; CTG chr11 5211765 5211786 5211770 5211765 -
aaggcccattagtggtataccg

SEQ ID NO: 146090 - DNA, 22 bp, Artificial Sequence
  Synthetic oligonucleotide; TTA chr11 5211754 5211775 5211759 5211754 -
gtggtataccgataaagaacat

SEQ ID NO: 146091 - DNA, 22 bp, Artificial Sequence
  Synthetic oligonucleotide; CTA chr11 5211708 5211729 5211713 5211708 -
tgtggccataaaaaagaatgag

SEQ ID NO: 146092 - DNA, 22 bp, Artificial Sequence
  Synthetic oligonucleotide; CTT chr11 5211675 5211696 5211680 5211675 -
tgcaggaacatggatggagccg

SEQ ID NO: 146093 - DNA, 22 bp, Artificial Sequence
  Synthetic oligonucleotide; TTT chr11 5211674 5211695 5211679 5211674 -
gcaggaacatggatggagccgg

SEQ ID NO: 146094 - DNA, 22 bp, Artificial Sequence
  Synthetic oligonucleotide; TTG chr11 5211673 5211694 5211678 5211673 -
caggaacatggatggagccgga

SEQ ID NO: 146095 - DNA, 22 bp, Artificial Sequence
  Synthetic oligonucleotide; TTA chr11 5211643 5211664 5211648 5211643 -
tccttaacaaactaatgtaaga

SEQ ID NO: 146096 - DNA, 22 bp, Artificial Sequence
  Synthetic oligonucleotide; CTT chr11 5211638 5211659 5211643 5211638 -
aacaaactaatgtaagaacaga

SEQ ID NO: 146097 - DNA, 22 bp, Artificial Sequence
  Synthetic oligonucleotide; TTA chr11 5211637 5211658 5211642 5211637 -
acaaactaatgtaagaacagaa

SEQ ID NO: 146098 - DNA, 22 bp, Artificial Sequence
  Synthetic oligonucleotide; CTA chr11 5211629 5211650 5211634 5211629 -
atgtaagaacagaaaaccaaat

SEQ ID NO: 146099 - DNA, 22 bp, Artificial Sequence
  Synthetic oligonucleotide; CTA chr11 5211603 5211624 5211608 5211603 -
catattatcacttacaagtagg

SEQ ID NO: 146100 - DNA, 22 bp, Artificial Sequence
  Synthetic oligonucleotide; TTA chr11 5211596 5211617 5211601 5211596 -
tcacttacaagtaggaactaaa

SEQ ID NO: 146101 - DNA, 22 bp, Artificial Sequence
  Synthetic oligonucleotide; CTT chr11 5211590 5211611 5211595 5211590 -
acaagtaggaactaaatgatga

SEQ ID NO: 146102 - DNA, 22 bp, Artificial Sequence
  Synthetic oligonucleotide; TTA chr11 5211589 5211610 5211594 5211589 -
caagtaggaactaaatgatgag

SEQ ID NO: 146103 - DNA, 22 bp, Artificial Sequence
  Synthetic oligonucleotide; CTA chr11 5211576 5211597 5211581 5211576 -
aatgatgagaaaacatgcacac

SEQ ID NO: 146104 - DNA, 22 bp, Artificial Sequence
  Synthetic oligonucleotide; CTG chr11 5211532 5211553 5211537 5211532 -
cagcctaattgagtttggaggg

SEQ ID NO: 146105 - DNA, 22 bp, Artificial Sequence
  Synthetic oligonucleotide; CTA chr11 5211525 5211546 5211530 5211525 -
attgagtttggagggtgggaac

SEQ ID NO: 146106 - DNA, 22 bp, Artificial Sequence
  Synthetic oligonucleotide; TTG chr11 5211521 5211542 5211526 5211521 -
agtttggagggtgggaacgggg

SEQ ID NO: 146107 - DNA, 22 bp, Artificial Sequence
  Synthetic oligonucleotide; TTT chr11 5211516 5211537 5211521 5211516 -
ggagggtgggaacggggagaag

SEQ ID NO: 146108 - DNA, 22 bp, Artificial Sequence
  Synthetic oligonucleotide; TTG chr11 5211515 5211536 5211520 5211515 -
gagggtgggaacggggagaaga

SEQ ID NO: 146109 - DNA, 22 bp, Artificial Sequence
  Synthetic oligonucleotide; CTA chr11 5211477 5211498 5211482 5211477 -
ttgagtactgggagatgaaata

SEQ ID NO: 146110 - DNA, 22 bp, Artificial Sequence
  Synthetic oligonucleotide; TTG chr11 5211474 5211495 5211479 5211474 -
agtactgggagatgaaataatc

SEQ ID NO: 146111 - DNA, 22 bp, Artificial Sequence
  Synthetic oligonucleotide; CTG chr11 5211467 5211488 5211472 5211467 -
ggagatgaaataatctgtacga

SEQ ID NO: 146112 - DNA, 22 bp, Artificial Sequence
  Synthetic oligonucleotide; CTG chr11 5211450 5211471 5211455 5211450 -
tacgacaaacccatgacatgtg

SEQ ID NO: 146113 - DNA, 22 bp, Artificial Sequence
  Synthetic oligonucleotide; TTT chr11 5211425 5211446 5211430 5211425 -
agctatgtaacaaaccatcgtg

SEQ ID NO: 146114 - DNA, 22 bp, Artificial Sequence
  Synthetic oligonucleotide; TTA chr11 5211424 5211445 5211429 5211424 -
gctatgtaacaaaccatcgtga

SEQ ID NO: 146115 - DNA, 22 bp, Artificial Sequence
  Synthetic oligonucleotide; CTA chr11 5211420 5211441 5211425 5211420 -
tgtaacaaaccatcgtgagtct

SEQ ID NO: 146116 - DNA, 22 bp, Artificial Sequence
  Synthetic oligonucleotide; CTT chr11 5211397 5211418 5211402 5211397 -
tagcagttctttcctcccattt

SEQ ID NO: 146117 - DNA, 22 bp, Artificial Sequence
  Synthetic oligonucleotide; TTT chr11 5211396 5211417 5211401 5211396 -
agcagttctttcctcccatttt

SEQ ID NO: 146118 - DNA, 22 bp, Artificial Sequence
  Synthetic oligonucleotide; TTA chr11 5211395 5211416 5211400 5211395 -
gcagttctttcctcccatttta

SEQ ID NO: 146119 - DNA, 22 bp, Artificial Sequence
  Synthetic oligonucleotide; TTC chr11 5211388 5211409 5211393 5211388 -
tttcctcccattttattcttcc

SEQ ID NO: 146120 - DNA, 22 bp, Artificial Sequence
  Synthetic oligonucleotide; CTT chr11 5211386 5211407 5211391 5211386 -
tcctcccattttattcttcctt

SEQ ID NO: 146121 - DNA, 22 bp, Artificial Sequence
  Synthetic oligonucleotide; TTT chr11 5211385 5211406 5211390 5211385 -
cctcccattttattcttccttg

SEQ ID NO: 146122 - DNA, 22 bp, Artificial Sequence
  Synthetic oligonucleotide; TTC chr11 5211384 5211405 5211389 5211384 -
ctcccattttattcttccttgc

SEQ ID NO: 146123 - DNA, 22 bp, Artificial Sequence
  Synthetic oligonucleotide; CTC chr11 5211381 5211402 5211386 5211381 -
ccattttattcttccttgctcc

SEQ ID NO: 146124 - DNA, 22 bp, Artificial Sequence
  Synthetic oligonucleotide; TTT chr11 5211375 5211396 5211380 5211375 -
tattcttccttgctcctctttc

SEQ ID NO: 146125 - DNA, 22 bp, Artificial Sequence
  Synthetic oligonucleotide; TTT chr11 5211374 5211395 5211379 5211374 -
attcttccttgctcctctttcc

SEQ ID NO: 146126 - DNA, 22 bp, Artificial Sequence
  Synthetic oligonucleotide; TTA chr11 5211373 5211394 5211378 5211373 -
ttcttccttgctcctctttcca

SEQ ID NO: 146127 - DNA, 22 bp, Artificial Sequence
  Synthetic oligonucleotide; TTC chr11 5211370 5211391 5211375 5211370 -
ttccttgctcctctttccacct

SEQ ID NO: 146128 - DNA, 22 bp, Artificial Sequence
  Synthetic oligonucleotide; CTT chr11 5211368 5211389 5211373 5211368 -
ccttgctcctctttccacctat

SEQ ID NO: 146129 - DNA, 22 bp, Artificial Sequence
  Synthetic oligonucleotide; TTC chr11 5211367 5211388 5211372 5211367 -
cttgctcctctttccacctatt

SEQ ID NO: 146130 - DNA, 22 bp, Artificial Sequence
  Synthetic oligonucleotide; CTT chr11 5211364 5211385 5211369 5211364 -
gctcctctttccacctattagt

SEQ ID NO: 146131 - DNA, 22 bp, Artificial Sequence
  Synthetic oligonucleotide; TTG chr11 5211363 5211384 5211368 5211363 -
ctcctctttccacctattagtc

SEQ ID NO: 146132 - DNA, 22 bp, Artificial Sequence
  Synthetic oligonucleotide; CTC chr11 5211360 5211381 5211365 5211360 -
ctctttccacctattagtcaca

SEQ ID NO: 146133 - DNA, 22 bp, Artificial Sequence
  Synthetic oligonucleotide; CTC chr11 5211357 5211378 5211362 5211357 -
tttccacctattagtcacatat

SEQ ID NO: 146134 - DNA, 22 bp, Artificial Sequence
  Synthetic oligonucleotide; CTT chr11 5211355 5211376 5211360 5211355 -
tccacctattagtcacatatct

SEQ ID NO: 146135 - DNA, 22 bp, Artificial Sequence
  Synthetic oligonucleotide; TTT chr11 5211354 5211375 5211359 5211354 -
ccacctattagtcacatatctt

SEQ ID NO: 146136 - DNA, 22 bp, Artificial Sequence
  Synthetic oligonucleotide; TTC chr11 5211353 5211374 5211358 5211353 -
cacctattagtcacatatcttt

SEQ ID NO: 146137 - DNA, 22 bp, Artificial Sequence
  Synthetic oligonucleotide; CTA chr11 5211347 5211368 5211352 5211347 -
ttagtcacatatctttttatag

SEQ ID NO: 146138 - DNA, 22 bp, Artificial Sequence
  Synthetic oligonucleotide; TTA chr11 5211344 5211365 5211349 5211344 -
gtcacatatctttttatagtta

SEQ ID NO: 146139 - DNA, 22 bp, Artificial Sequence
  Synthetic oligonucleotide; CTT chr11 5211332 5211353 5211337 5211332 -
tttatagttataatcagcttgt

SEQ ID NO: 146140 - DNA, 22 bp, Artificial Sequence
  Synthetic oligonucleotide; TTT chr11 5211331 5211352 5211336 5211331 -
ttatagttataatcagcttgtt

SEQ ID NO: 146141 - DNA, 22 bp, Artificial Sequence
  Synthetic oligonucleotide; TTT chr11 5211330 5211351 5211335 5211330 -
tatagttataatcagcttgttt

SEQ ID NO: 146142 - DNA, 22 bp, Artificial Sequence
  Synthetic oligonucleotide; TTT chr11 5211329 5211350 5211334 5211329 -
atagttataatcagcttgtttt

SEQ ID NO: 146143 - DNA, 22 bp, Artificial Sequence
  Synthetic oligonucleotide; TTA chr11 5211328 5211349 5211333 5211328 -
tagttataatcagcttgttttt

SEQ ID NO: 146144 - DNA, 22 bp, Artificial Sequence
  Synthetic oligonucleotide; TTA chr11 5211322 5211343 5211327 5211322 -
taatcagcttgtttttaagtct

SEQ ID NO: 146145 - DNA, 22 bp, Artificial Sequence
  Synthetic oligonucleotide; CTT chr11 5211312 5211333 5211317 5211312 -
gtttttaagtctaacaaaatgt

SEQ ID NO: 146146 - DNA, 22 bp, Artificial Sequence
  Synthetic oligonucleotide; TTG chr11 5211311 5211332 5211316 5211311 -
tttttaagtctaacaaaatgtt

SEQ ID NO: 146147 - DNA, 22 bp, Artificial Sequence
  Synthetic oligonucleotide; TTT chr11 5211308 5211329 5211313 5211308 -
ttaagtctaacaaaatgttgtt

SEQ ID NO: 146148 - DNA, 22 bp, Artificial Sequence
  Synthetic oligonucleotide; TTT chr11 5211307 5211328 5211312 5211307 -
taagtctaacaaaatgttgttt

SEQ ID NO: 146149 - DNA, 22 bp, Artificial Sequence
  Synthetic oligonucleotide; TTT chr11 5211306 5211327 5211311 5211306 -
aagtctaacaaaatgttgtttt

SEQ ID NO: 146150 - DNA, 22 bp, Artificial Sequence
  Synthetic oligonucleotide; TTA chr11 5211305 5211326 5211310 5211305 -
agtctaacaaaatgttgtttta

SEQ ID NO: 146151 - DNA, 22 bp, Artificial Sequence
  Synthetic oligonucleotide; CTA chr11 5211299 5211320 5211304 5211299 -
acaaaatgttgttttatgcgca

SEQ ID NO: 146152 - DNA, 22 bp, Artificial Sequence
  Synthetic oligonucleotide; TTG chr11 5211288 5211309 5211293 5211288 -
ttttatgcgcattatgaaagta

SEQ ID NO: 146153 - DNA, 22 bp, Artificial Sequence
  Synthetic oligonucleotide; TTT chr11 5211285 5211306 5211290 5211285 -
tatgcgcattatgaaagtaatt

SEQ ID NO: 146154 - DNA, 22 bp, Artificial Sequence
  Synthetic oligonucleotide; TTT chr11 5211284 5211305 5211289 5211284 -
atgcgcattatgaaagtaattt

SEQ ID NO: 146155 - DNA, 22 bp, Artificial Sequence
  Synthetic oligonucleotide; TTA chr11 5211283 5211304 5211288 5211283 -
tgcgcattatgaaagtaattta

SEQ ID NO: 146156 - DNA, 22 bp, Artificial Sequence
  Synthetic oligonucleotide; TTA chr11 5211274 5211295 5211279 5211274 -
tgaaagtaatttaatgattctc

SEQ ID NO: 146157 - DNA, 22 bp, Artificial Sequence
  Synthetic oligonucleotide; TTT chr11 5211262 5211283 5211267 5211262 -
aatgattctctgtccttctttg

SEQ ID NO: 146158 - DNA, 22 bp, Artificial Sequence
  Synthetic oligonucleotide; TTA chr11 5211261 5211282 5211266 5211261 -
atgattctctgtccttctttgt

SEQ ID NO: 146159 - DNA, 22 bp, Artificial Sequence
  Synthetic oligonucleotide; TTC chr11 5211254 5211275 5211259 5211254 -
tctgtccttctttgtaatttga

SEQ ID NO: 146160 - DNA, 22 bp, Artificial Sequence
  Synthetic oligonucleotide; CTC chr11 5211252 5211273 5211257 5211252 -
tgtccttctttgtaatttgatt

SEQ ID NO: 146161 - DNA, 22 bp, Artificial Sequence
  Synthetic oligonucleotide; CTG chr11 5211250 5211271 5211255 5211250 -
tccttctttgtaatttgatttt

SEQ ID NO: 146162 - DNA, 22 bp, Artificial Sequence
  Synthetic oligonucleotide; CTT chr11 5211245 5211266 5211250 5211245 -
ctttgtaatttgattttatgca

SEQ ID NO: 146163 - DNA, 22 bp, Artificial Sequence
  Synthetic oligonucleotide; TTC chr11 5211244 5211265 5211249 5211244 -
tttgtaatttgattttatgcaa

SEQ ID NO: 146164 - DNA, 22 bp, Artificial Sequence
  Synthetic oligonucleotide; CTT chr11 5211242 5211263 5211247 5211242 -
tgtaatttgattttatgcaaca

SEQ ID NO: 146165 - DNA, 22 bp, Artificial Sequence
  Synthetic oligonucleotide; TTT chr11 5211241 5211262 5211246 5211241 -
gtaatttgattttatgcaacaa

SEQ ID NO: 146166 - DNA, 22 bp, Artificial Sequence
  Synthetic oligonucleotide; TTG chr11 5211240 5211261 5211245 5211240 -
taatttgattttatgcaacaag

SEQ ID NO: 146167 - DNA, 22 bp, Artificial Sequence
  Synthetic oligonucleotide; TTT chr11 5211234 5211255 5211239 5211234 -
gattttatgcaacaagcattta

SEQ ID NO: 146168 - DNA, 22 bp, Artificial Sequence
  Synthetic oligonucleotide; TTG chr11 5211233 5211254 5211238 5211233 -
attttatgcaacaagcatttat

SEQ ID NO: 146169 - DNA, 22 bp, Artificial Sequence
  Synthetic oligonucleotide; TTT chr11 5211229 5211250 5211234 5211229 -
tatgcaacaagcatttattgtg

SEQ ID NO: 146170 - DNA, 22 bp, Artificial Sequence
  Synthetic oligonucleotide; TTT chr11 5211228 5211249 5211233 5211228 -
atgcaacaagcatttattgtgt

SEQ ID NO: 146171 - DNA, 22 bp, Artificial Sequence
  Synthetic oligonucleotide; TTA chr11 5211227 5211248 5211232 5211227 -
tgcaacaagcatttattgtgtt

SEQ ID NO: 146172 - DNA, 22 bp, Artificial Sequence
  Synthetic oligonucleotide; TTT chr11 5211213 5211234 5211218 5211213 -
attgtgttcctatatagtaaat

SEQ ID NO: 146173 - DNA, 22 bp, Artificial Sequence
  Synthetic oligonucleotide; TTA chr11 5211212 5211233 5211217 5211212 -
ttgtgttcctatatagtaaata

SEQ ID NO: 146174 - DNA, 22 bp, Artificial Sequence
  Synthetic oligonucleotide; TTG chr11 5211209 5211230 5211214 5211209 -
tgttcctatatagtaaatataa

SEQ ID NO: 146175 - DNA, 22 bp, Artificial Sequence
  Synthetic oligonucleotide; TTC chr11 5211204 5211225 5211209 5211204 -
ctatatagtaaatataaaaact

SEQ ID NO: 146176 - DNA, 22 bp, Artificial Sequence
  Synthetic oligonucleotide; CTA chr11 5211201 5211222 5211206 5211201 -
tatagtaaatataaaaactgta

SEQ ID NO: 146177 - DNA, 22 bp, Artificial Sequence
  Synthetic oligonucleotide; CTG chr11 5211181 5211202 5211186 5211181 -
tatatatgttggaggtaaaaaa

SEQ ID NO: 146178 - DNA, 22 bp, Artificial Sequence
  Synthetic oligonucleotide; TTG chr11 5211170 5211191 5211175 5211170 -
gaggtaaaaaataatgacaatg

SEQ ID NO: 146179 - DNA, 22 bp, Artificial Sequence
  Synthetic oligonucleotide; TTT chr11 5211142 5211163 5211147 5211142 -
ttgccctcaaaataatgtgagc

SEQ ID NO: 146180 - DNA, 22 bp, Artificial Sequence
  Synthetic oligonucleotide; TTT chr11 5211141 5211162 5211146 5211141 -
tgccctcaaaataatgtgagca

SEQ ID NO: 146181 - DNA, 22 bp, Artificial Sequence
  Synthetic oligonucleotide; TTT chr11 5211140 5211161 5211145 5211140 -
gccctcaaaataatgtgagcaa

SEQ ID NO: 146182 - DNA, 22 bp, Artificial Sequence
  Synthetic oligonucleotide; TTG chr11 5211139 5211160 5211144 5211139 -
ccctcaaaataatgtgagcaat

SEQ ID NO: 146183 - DNA, 22 bp, Artificial Sequence
  Synthetic oligonucleotide; CTC chr11 5211134 5211155 5211139 5211134 -
aaaataatgtgagcaatttagt

SEQ ID NO: 146184 - DNA, 22 bp, Artificial Sequence
  Synthetic oligonucleotide; TTT chr11 5211115 5211136 5211120 5211115 -
agtcctatggctcctatttgtt

SEQ ID NO: 146185 - DNA, 22 bp, Artificial Sequence
  Synthetic oligonucleotide; TTA chr11 5211114 5211135 5211119 5211114 -
gtcctatggctcctatttgtta

SEQ ID NO: 146186 - DNA, 22 bp, Artificial Sequence
  Synthetic oligonucleotide; CTA chr11 5211108 5211129 5211113 5211108 -
tggctcctatttgttaaagaca

SEQ ID NO: 146187 - DNA, 22 bp, Artificial Sequence
  Synthetic oligonucleotide; CTC chr11 5211102 5211123 5211107 5211102 -
ctatttgttaaagacattcagt

SEQ ID NO: 146188 - DNA, 22 bp, Artificial Sequence
  Synthetic oligonucleotide; CTA chr11 5211099 5211120 5211104 5211099 -
tttgttaaagacattcagttac

SEQ ID NO: 146189 - DNA, 22 bp, Artificial Sequence
  Synthetic oligonucleotide; TTT chr11 5211096 5211117 5211101 5211096 -
gttaaagacattcagttacttc

SEQ ID NO: 146190 - DNA, 22 bp, Artificial Sequence
  Synthetic oligonucleotide; TTG chr11 5211095 5211116 5211100 5211095 -
ttaaagacattcagttacttct

SEQ ID NO: 146191 - DNA, 22 bp, Artificial Sequence
  Synthetic oligonucleotide; TTA chr11 5211092 5211113 5211097 5211092 -
aagacattcagttacttctgac

SEQ ID NO: 146192 - DNA, 22 bp, Artificial Sequence
  Synthetic oligonucleotide; TTC chr11 5211083 5211104 5211088 5211083 -
agttacttctgacaacctgaat

SEQ ID NO: 146193 - DNA, 22 bp, Artificial Sequence
  Synthetic oligonucleotide; TTA chr11 5211078 5211099 5211083 5211078 -
cttctgacaacctgaattgtta

SEQ ID NO: 146194 - DNA, 22 bp, Artificial Sequence
  Synthetic oligonucleotide; CTT chr11 5211075 5211096 5211080 5211075 -
ctgacaacctgaattgttaatt

SEQ ID NO: 146195 - DNA, 22 bp, Artificial Sequence
  Synthetic oligonucleotide; TTC chr11 5211074 5211095 5211079 5211074 -
tgacaacctgaattgttaattt

SEQ ID NO: 146196 - DNA, 22 bp, Artificial Sequence
  Synthetic oligonucleotide; CTG chr11 5211072 5211093 5211077 5211072 -
acaacctgaattgttaatttct

SEQ ID NO: 146197 - DNA, 22 bp, Artificial Sequence
  Synthetic oligonucleotide; CTG chr11 5211064 5211085 5211069 5211064 -
aattgttaatttctttctttct

SEQ ID NO: 146198 - DNA, 22 bp, Artificial Sequence
  Synthetic oligonucleotide; TTG chr11 5211059 5211080 5211064 5211059 -
ttaatttctttctttctagctc

SEQ ID NO: 146199 - DNA, 22 bp, Artificial Sequence
  Synthetic oligonucleotide; TTA chr11 5211056 5211077 5211061 5211056 -
atttctttctttctagctctct

SEQ ID NO: 146200 - DNA, 22 bp, Artificial Sequence
  Synthetic oligonucleotide; TTT chr11 5211052 5211073 5211057 5211052 -
ctttctttctagctctcttttt

SEQ ID NO: 146201 - DNA, 22 bp, Artificial Sequence
  Synthetic oligonucleotide; TTC chr11 5211051 5211072 5211056 5211051 -
tttctttctagctctctttttt

SEQ ID NO: 146202 - DNA, 22 bp, Artificial Sequence
  Synthetic oligonucleotide; CTT chr11 5211049 5211070 5211054 5211049 -
tctttctagctctctttttttt

SEQ ID NO: 146203 - DNA, 22 bp, Artificial Sequence
  Synthetic oligonucleotide; TTT chr11 5211048 5211069 5211053 5211048 -
ctttctagctctcttttttttt

SEQ ID NO: 146204 - DNA, 22 bp, Artificial Sequence
  Synthetic oligonucleotide; TTC chr11 5211047 5211068 5211052 5211047 -
tttctagctctctttttttttt

SEQ ID NO: 146205 - DNA, 22 bp, Artificial Sequence
  Synthetic oligonucleotide; CTT chr11 5211045 5211066 5211050 5211045 -
tctagctctctttttttttttt

SEQ ID NO: 146206 - DNA, 22 bp, Artificial Sequence
  Synthetic oligonucleotide; TTT chr11 5211044 5211065 5211049 5211044 -
ctagctctcttttttttttttt

SEQ ID NO: 146207 - DNA, 22 bp, Artificial Sequence
  Synthetic oligonucleotide; TTC chr11 5211043 5211064 5211048 5211043 -
tagctctctttttttttttttt

SEQ ID NO: 146208 - DNA, 22 bp, Artificial Sequence
  Synthetic oligonucleotide; CTA chr11 5211041 5211062 5211046 5211041 -
gctctcttttttttttttttga

SEQ ID NO: 146209 - DNA, 22 bp, Artificial Sequence
  Synthetic oligonucleotide; CTC chr11 5211037 5211058 5211042 5211037 -
tcttttttttttttttgacagg

SEQ ID NO: 146210 - DNA, 22 bp, Artificial Sequence
  Synthetic oligonucleotide; CTC chr11 5211035 5211056 5211040 5211035 -
ttttttttttttttgacagggt

SEQ ID NO: 146211 - DNA, 22 bp, Artificial Sequence
  Synthetic oligonucleotide; CTT chr11 5211033 5211054 5211038 5211033 -
ttttttttttttgacagggtct

SEQ ID NO: 146212 - DNA, 22 bp, Artificial Sequence
  Synthetic oligonucleotide; TTT chr11 5211032 5211053 5211037 5211032 -
tttttttttttgacagggtctc

SEQ ID NO: 146213 - DNA, 22 bp, Artificial Sequence
  Synthetic oligonucleotide; TTT chr11 5211031 5211052 5211036 5211031 -
ttttttttttgacagggtctcg

SEQ ID NO: 146214 - DNA, 22 bp, Artificial Sequence
  Synthetic oligonucleotide; TTT chr11 5211030 5211051 5211035 5211030 -
tttttttttgacagggtctcgc

SEQ ID NO: 146215 - DNA, 22 bp, Artificial Sequence
  Synthetic oligonucleotide; TTT chr11 5211029 5211050 5211034 5211029 -
ttttttttgacagggtctcgct

SEQ ID NO: 146216 - DNA, 22 bp, Artificial Sequence
  Synthetic oligonucleotide; TTT chr11 5211028 5211049 5211033 5211028 -
tttttttgacagggtctcgctg

SEQ ID NO: 146217 - DNA, 22 bp, Artificial Sequence
  Synthetic oligonucleotide; TTT chr11 5211027 5211048 5211032 5211027 -
ttttttgacagggtctcgctgt

SEQ ID NO: 146218 - DNA, 22 bp, Artificial Sequence
  Synthetic oligonucleotide; TTT chr11 5211026 5211047 5211031 5211026 -
tttttgacagggtctcgctgtg

SEQ ID NO: 146219 - DNA, 22 bp, Artificial Sequence
  Synthetic oligonucleotide; TTT chr11 5211025 5211046 5211030 5211025 -
ttttgacagggtctcgctgtgt

SEQ ID NO: 146220 - DNA, 22 bp, Artificial Sequence
  Synthetic oligonucleotide; TTT chr11 5211024 5211045 5211029 5211024 -
tttgacagggtctcgctgtgtt

SEQ ID NO: 146221 - DNA, 22 bp, Artificial Sequence
  Synthetic oligonucleotide; TTT chr11 5211023 5211044 5211028 5211023 -
ttgacagggtctcgctgtgttg

SEQ ID NO: 146222 - DNA, 22 bp, Artificial Sequence
  Synthetic oligonucleotide; TTT chr11 5211022 5211043 5211027 5211022 -
tgacagggtctcgctgtgttgc

SEQ ID NO: 146223 - DNA, 22 bp, Artificial Sequence
  Synthetic oligonucleotide; TTT chr11 5211021 5211042 5211026 5211021 -
gacagggtctcgctgtgttgcc

SEQ ID NO: 146224 - DNA, 22 bp, Artificial Sequence
  Synthetic oligonucleotide; TTG chr11 5211020 5211041 5211025 5211020 -
acagggtctcgctgtgttgccc

SEQ ID NO: 146225 - DNA, 22 bp, Artificial Sequence
  Synthetic oligonucleotide; CTC chr11 5211010 5211031 5211015 5211010 -
gctgtgttgcccaggttggagt

SEQ ID NO: 146226 - DNA, 22 bp, Artificial Sequence
  Synthetic oligonucleotide; CTG chr11 5211006 5211027 5211011 5211006 -
tgttgcccaggttggagtgcag

SEQ ID NO: 146227 - DNA, 22 bp, Artificial Sequence
  Synthetic oligonucleotide; TTG chr11 5211001 5211022 5211006 5211001 -
cccaggttggagtgcagtggta

SEQ ID NO: 146228 - DNA, 22 bp, Artificial Sequence
  Synthetic oligonucleotide; TTG chr11 5210992 5211013 5210997 5210992 -
gagtgcagtggtacaatctttg

SEQ ID NO: 146229 - DNA, 22 bp, Artificial Sequence
  Synthetic oligonucleotide; CTT chr11 5210972 5210993 5210977 5210972 -
tgctcactgcaatctccccctc

SEQ ID NO: 146230 - DNA, 22 bp, Artificial Sequence
  Synthetic oligonucleotide; TTT chr11 5210971 5210992 5210976 5210971 -
gctcactgcaatctccccctcc

SEQ ID NO: 146231 - DNA, 22 bp, Artificial Sequence
  Synthetic oligonucleotide; TTG chr11 5210970 5210991 5210975 5210970 -
ctcactgcaatctccccctcct

SEQ ID NO: 146232 - DNA, 22 bp, Artificial Sequence
  Synthetic oligonucleotide; CTC chr11 5210967 5210988 5210972 5210967 -
actgcaatctccccctccttgg

SEQ ID NO: 146233 - DNA, 22 bp, Artificial Sequence
  Synthetic oligonucleotide; CTG chr11 5210963 5210984 5210968 5210963 -
caatctccccctccttggctca

SEQ ID NO: 146234 - DNA, 22 bp, Artificial Sequence
  Synthetic oligonucleotide; CTC chr11 5210956 5210977 5210961 5210956 -
cccctccttggctcaagatatc

SEQ ID NO: 146235 - DNA, 22 bp, Artificial Sequence
  Synthetic oligonucleotide; CTC chr11 5210950 5210971 5210955 5210950 -
cttggctcaagatatccttcca

SEQ ID NO: 146236 - DNA, 22 bp, Artificial Sequence
  Synthetic oligonucleotide; CTT chr11 5210947 5210968 5210952 5210947 -
ggctcaagatatccttccacct

SEQ ID NO: 146237 - DNA, 22 bp, Artificial Sequence
  Synthetic oligonucleotide; TTG chr11 5210946 5210967 5210951 5210946 -
gctcaagatatccttccacctc

SEQ ID NO: 146238 - DNA, 22 bp, Artificial Sequence
  Synthetic oligonucleotide; CTC chr11 5210942 5210963 5210947 5210942 -
aagatatccttccacctcagcc

SEQ ID NO: 146239 - DNA, 22 bp, Artificial Sequence
  Synthetic oligonucleotide; CTT chr11 5210931 5210952 5210936 5210931 -
ccacctcagcctcccaagtagc

SEQ ID NO: 146240 - DNA, 22 bp, Artificial Sequence
  Synthetic oligonucleotide; TTC chr11 5210930 5210951 5210935 5210930 -
cacctcagcctcccaagtagct

SEQ ID NO: 146241 - DNA, 22 bp, Artificial Sequence
  Synthetic oligonucleotide; CTC chr11 5210924 5210945 5210929 5210924 -
agcctcccaagtagctgggact

SEQ ID NO: 146242 - DNA, 22 bp, Artificial Sequence
  Synthetic oligonucleotide; CTC chr11 5210918 5210939 5210923 5210918 -
ccaagtagctgggactacaggc

SEQ ID NO: 146243 - DNA, 22 bp, Artificial Sequence
  Synthetic oligonucleotide; CTG chr11 5210907 5210928 5210912 5210907 -
ggactacaggcacgtaacacca

SEQ ID NO: 146244 - DNA, 22 bp, Artificial Sequence
  Synthetic oligonucleotide; CTA chr11 5210901 5210922 5210906 5210901 -
caggcacgtaacaccatattcg

SEQ ID NO: 146245 - DNA, 22 bp, Artificial Sequence
  Synthetic oligonucleotide; TTC chr11 5210880 5210901 5210885 5210880 -
ggctactttttaaaattttttg

SEQ ID NO: 146246 - DNA, 22 bp, Artificial Sequence
  Synthetic oligonucleotide; CTA chr11 5210875 5210896 5210880 5210875 -
ctttttaaaattttttgtagag

SEQ ID NO: 146247 - DNA, 22 bp, Artificial Sequence
  Synthetic oligonucleotide; CTT chr11 5210872 5210893 5210877 5210872 -
tttaaaattttttgtagagagg

SEQ ID NO: 146248 - DNA, 22 bp, Artificial Sequence
  Synthetic oligonucleotide; TTT chr11 5210871 5210892 5210876 5210871 -
ttaaaattttttgtagagaggg

SEQ ID NO: 146249 - DNA, 22 bp, Artificial Sequence
  Synthetic oligonucleotide; TTT chr11 5210870 5210891 5210875 5210870 -
taaaattttttgtagagagggg

SEQ ID NO: 146250 - DNA, 22 bp, Artificial Sequence
  Synthetic oligonucleotide; TTT chr11 5210869 5210890 5210874 5210869 -
aaaattttttgtagagaggggt

SEQ ID NO: 146251 - DNA, 22 bp, Artificial Sequence
  Synthetic oligonucleotide; TTA chr11 5210868 5210889 5210873 5210868 -
aaattttttgtagagaggggtt

SEQ ID NO: 146252 - DNA, 22 bp, Artificial Sequence
  Synthetic oligonucleotide; TTT chr11 5210862 5210883 5210867 5210862 -
tttgtagagaggggtttctcca

SEQ ID NO: 146253 - DNA, 22 bp, Artificial Sequence
  Synthetic oligonucleotide; TTT chr11 5210861 5210882 5210866 5210861 -
ttgtagagaggggtttctccat

SEQ ID NO: 146254 - DNA, 22 bp, Artificial Sequence
  Synthetic oligonucleotide; TTT chr11 5210860 5210881 5210865 5210860 -
tgtagagaggggtttctccatg

SEQ ID NO: 146255 - DNA, 22 bp, Artificial Sequence
  Synthetic oligonucleotide; TTT chr11 5210859 5210880 5210864 5210859 -
gtagagaggggtttctccatgt

SEQ ID NO: 146256 - DNA, 22 bp, Artificial Sequence
  Synthetic oligonucleotide; TTG chr11 5210858 5210879 5210863 5210858 -
tagagaggggtttctccatgtt

SEQ ID NO: 146257 - DNA, 22 bp, Artificial Sequence
  Synthetic oligonucleotide; TTT chr11 5210845 5210866 5210850 5210845 -
ctccatgttgcccaagctggtc

SEQ ID NO: 146258 - DNA, 22 bp, Artificial Sequence
  Synthetic oligonucleotide; TTC chr11 5210844 5210865 5210849 5210844 -
tccatgttgcccaagctggtct

SEQ ID NO: 146259 - DNA, 22 bp, Artificial Sequence
  Synthetic oligonucleotide; CTC chr11 5210842 5210863 5210847 5210842 -
catgttgcccaagctggtctcc

SEQ ID NO: 146260 - DNA, 22 bp, Artificial Sequence
  Synthetic oligonucleotide; TTG chr11 5210835 5210856 5210840 5210835 -
cccaagctggtctccaactcct

SEQ ID NO: 146261 - DNA, 22 bp, Artificial Sequence
  Synthetic oligonucleotide; CTG chr11 5210826 5210847 5210831 5210826 -
gtctccaactcctgagctcaaa

SEQ ID NO: 146262 - DNA, 22 bp, Artificial Sequence
  Synthetic oligonucleotide; CTC chr11 5210821 5210842 5210826 5210821 -
caactcctgagctcaaatcgtt

SEQ ID NO: 146263 - DNA, 22 bp, Artificial Sequence
  Synthetic oligonucleotide; CTC chr11 5210815 5210836 5210820 5210815 -
ctgagctcaaatcgttctccct

SEQ ID NO: 146264 - DNA, 22 bp, Artificial Sequence
  Synthetic oligonucleotide; CTG chr11 5210812 5210833 5210817 5210812 -
agctcaaatcgttctccctccg

SEQ ID NO: 146265 - DNA, 22 bp, Artificial Sequence
  Synthetic oligonucleotide; CTC chr11 5210807 5210828 5210812 5210807 -
aaatcgttctccctccggcctc

SEQ ID NO: 146266 - DNA, 22 bp, Artificial Sequence
  Synthetic oligonucleotide; TTC chr11 5210798 5210819 5210803 5210798 -
tccctccggcctcggctgtgat

SEQ ID NO: 146267 - DNA, 22 bp, Artificial Sequence
  Synthetic oligonucleotide; CTC chr11 5210796 5210817 5210801 5210796 -
cctccggcctcggctgtgatta

SEQ ID NO: 146268 - DNA, 22 bp, Artificial Sequence
  Synthetic oligonucleotide; CTC chr11 5210792 5210813 5210797 5210792 -
cggcctcggctgtgattacagg

SEQ ID NO: 146269 - DNA, 22 bp, Artificial Sequence
  Synthetic oligonucleotide; CTC chr11 5210785 5210806 5210790 5210785 -
ggctgtgattacaggtgtgagc

SEQ ID NO: 146270 - DNA, 22 bp, Artificial Sequence
  Synthetic oligonucleotide; CTG chr11 5210780 5210801 5210785 5210780 -
tgattacaggtgtgagccactg

SEQ ID NO: 146271 - DNA, 22 bp, Artificial Sequence
  Synthetic oligonucleotide; TTA chr11 5210774 5210795 5210779 5210774 -
caggtgtgagccactgtgcttg

SEQ ID NO: 146272 - DNA, 22 bp, Artificial Sequence
  Synthetic oligonucleotide; CTG chr11 5210758 5210779 5210763 5210758 -
tgcttggcccagacaacatgaa

SEQ ID NO: 146273 - DNA, 22 bp, Artificial Sequence
  Synthetic oligonucleotide; CTT chr11 5210753 5210774 5210758 5210753 -
ggcccagacaacatgaactgtt

SEQ ID NO: 146274 - DNA, 22 bp, Artificial Sequence
  Synthetic oligonucleotide; TTG chr11 5210752 5210773 5210757 5210752 -
gcccagacaacatgaactgtta

SEQ ID NO: 146275 - DNA, 22 bp, Artificial Sequence
  Synthetic oligonucleotide; CTG chr11 5210733 5210754 5210738 5210733 -
ttactgttattttctaatcctt

SEQ ID NO: 146276 - DNA, 22 bp, Artificial Sequence
  Synthetic oligonucleotide; TTA chr11 5210730 5210751 5210735 5210730 -
ctgttattttctaatccttcga

SEQ ID NO: 146277 - DNA, 22 bp, Artificial Sequence
  Synthetic oligonucleotide; CTG chr11 5210727 5210748 5210732 5210727 -
ttattttctaatccttcgagga

SEQ ID NO: 146278 - DNA, 22 bp, Artificial Sequence
  Synthetic oligonucleotide; TTA chr11 5210724 5210745 5210729 5210724 -
ttttctaatccttcgaggaact

SEQ ID NO: 146279 - DNA, 22 bp, Artificial Sequence
  Synthetic oligonucleotide; TTT chr11 5210721 5210742 5210726 5210721 -
tctaatccttcgaggaactcaa

SEQ ID NO: 146280 - DNA, 22 bp, Artificial Sequence
  Synthetic oligonucleotide; TTT chr11 5210720 5210741 5210725 5210720 -
ctaatccttcgaggaactcaag

SEQ ID NO: 146281 - DNA, 22 bp, Artificial Sequence
  Synthetic oligonucleotide; TTC chr11 5210719 5210740 5210724 5210719 -
taatccttcgaggaactcaagt

SEQ ID NO: 146282 - DNA, 22 bp, Artificial Sequence
  Synthetic oligonucleotide; CTA chr11 5210717 5210738 5210722 5210717 -
atccttcgaggaactcaagtcc

SEQ ID NO: 146283 - DNA, 22 bp, Artificial Sequence
  Synthetic oligonucleotide; CTT chr11 5210711 5210732 5210716 5210711 -
cgaggaactcaagtcctatctt

SEQ ID NO: 146284 - DNA, 22 bp, Artificial Sequence
  Synthetic oligonucleotide; TTC chr11 5210710 5210731 5210715 5210710 -
gaggaactcaagtcctatcttg

SEQ ID NO: 146285 - DNA, 22 bp, Artificial Sequence
  Synthetic oligonucleotide; CTC chr11 5210701 5210722 5210706 5210701 -
aagtcctatcttgaaaactaat

SEQ ID NO: 146286 - DNA, 22 bp, Artificial Sequence
  Synthetic oligonucleotide; CTA chr11 5210693 5210714 5210698 5210693 -
tcttgaaaactaattcaaaagg

SEQ ID NO: 146287 - DNA, 22 bp, Artificial Sequence
  Synthetic oligonucleotide; CTT chr11 5210689 5210710 5210694 5210689 -
gaaaactaattcaaaaggtact

SEQ ID NO: 146288 - DNA, 22 bp, Artificial Sequence
  Synthetic oligonucleotide; TTG chr11 5210688 5210709 5210693 5210688 -
aaaactaattcaaaaggtacta

SEQ ID NO: 146289 - DNA, 22 bp, Artificial Sequence
  Synthetic oligonucleotide; CTA chr11 5210681 5210702 5210686 5210681 -
attcaaaaggtactaacgagat

SEQ ID NO: 146290 - DNA, 22 bp, Artificial Sequence
  Synthetic oligonucleotide; TTC chr11 5210677 5210698 5210682 5210677 -
aaaaggtactaacgagattagg

SEQ ID NO: 146291 - DNA, 22 bp, Artificial Sequence
  Synthetic oligonucleotide; CTA chr11 5210666 5210687 5210671 5210666 -
acgagattaggaagtgccccga

SEQ ID NO: 146292 - DNA, 22 bp, Artificial Sequence
  Synthetic oligonucleotide; TTA chr11 5210657 5210678 5210662 5210657 -
ggaagtgccccgagagagtgca

SEQ ID NO: 146293 - DNA, 22 bp, Artificial Sequence
  Synthetic oligonucleotide; CTG chr11 5210609 5210630 5210614 5210609 -
ggtttgctttgttagtgaagga

SEQ ID NO: 146294 - DNA, 22 bp, Artificial Sequence
  Synthetic oligonucleotide; TTT chr11 5210604 5210625 5210609 5210604 -
gctttgttagtgaaggaataaa

SEQ ID NO: 146295 - DNA, 22 bp, Artificial Sequence
  Synthetic oligonucleotide; TTG chr11 5210603 5210624 5210608 5210603 -
ctttgttagtgaaggaataaaa

SEQ ID NO: 146296 - DNA, 22 bp, Artificial Sequence
  Synthetic oligonucleotide; CTT chr11 5210600 5210621 5210605 5210600 -
tgttagtgaaggaataaaatgc

SEQ ID NO: 146297 - DNA, 22 bp, Artificial Sequence
  Synthetic oligonucleotide; TTT chr11 5210599 5210620 5210604 5210599 -
gttagtgaaggaataaaatgca

SEQ ID NO: 146298 - DNA, 22 bp, Artificial Sequence
  Synthetic oligonucleotide; TTG chr11 5210598 5210619 5210603 5210598 -
ttagtgaaggaataaaatgcat

SEQ ID NO: 146299 - DNA, 22 bp, Artificial Sequence
  Synthetic oligonucleotide; TTA chr11 5210595 5210616 5210600 5210595 -
gtgaaggaataaaatgcatcag

SEQ ID NO: 146300 - DNA, 22 bp, Artificial Sequence
  Synthetic oligonucleotide; CTT chr11 5210561 5210582 5210566 5210561 -
ctcagcctctgataggccctga

SEQ ID NO: 146301 - DNA, 22 bp, Artificial Sequence
  Synthetic oligonucleotide; TTC chr11 5210560 5210581 5210565 5210560 -
tcagcctctgataggccctgag

SEQ ID NO: 146302 - DNA, 22 bp, Artificial Sequence
  Synthetic oligonucleotide; CTC chr11 5210558 5210579 5210563 5210558 -
agcctctgataggccctgagct

SEQ ID NO: 146303 - DNA, 22 bp, Artificial Sequence
  Synthetic oligonucleotide; CTC chr11 5210552 5210573 5210557 5210552 -
tgataggccctgagctgggagc

SEQ ID NO: 146304 - DNA, 22 bp, Artificial Sequence
  Synthetic oligonucleotide; CTG chr11 5210550 5210571 5210555 5210550 -
ataggccctgagctgggagctg

SEQ ID NO: 146305 - DNA, 22 bp, Artificial Sequence
  Synthetic oligonucleotide; CTG chr11 5210540 5210561 5210545 5210540 -
agctgggagctgctaagccatc

SEQ ID NO: 146306 - DNA, 22 bp, Artificial Sequence
  Synthetic oligonucleotide; CTG chr11 5210535 5210556 5210540 5210535 -
ggagctgctaagccatcctgca

SEQ ID NO: 146307 - DNA, 22 bp, Artificial Sequence
  Synthetic oligonucleotide; CTG chr11 5210528 5210549 5210533 5210528 -
ctaagccatcctgcagagcaag

SEQ ID NO: 146308 - DNA, 22 bp, Artificial Sequence
  Synthetic oligonucleotide; CTA chr11 5210525 5210546 5210530 5210525 -
agccatcctgcagagcaagtgg

SEQ ID NO: 146309 - DNA, 22 bp, Artificial Sequence
  Synthetic oligonucleotide; CTG chr11 5210515 5210536 5210520 5210515 -
cagagcaagtgggagaaacaga

SEQ ID NO: 146310 - DNA, 22 bp, Artificial Sequence
  Synthetic oligonucleotide; TTA chr11 5210485 5210506 5210490 5210485 -
ggtcagacttggcagattctgc

SEQ ID NO: 146311 - DNA, 22 bp, Artificial Sequence
  Synthetic oligonucleotide; CTT chr11 5210475 5210496 5210480 5210475 -
ggcagattctgctcctttttcc

SEQ ID NO: 146312 - DNA, 22 bp, Artificial Sequence
  Synthetic oligonucleotide; TTG chr11 5210474 5210495 5210479 5210474 -
gcagattctgctcctttttccc

SEQ ID NO: 146313 - DNA, 22 bp, Artificial Sequence
  Synthetic oligonucleotide; TTC chr11 5210466 5210487 5210471 5210466 -
tgctcctttttcccttcccttt

SEQ ID NO: 146314 - DNA, 22 bp, Artificial Sequence
  Synthetic oligonucleotide; CTG chr11 5210464 5210485 5210469 5210464 -
ctcctttttcccttcccttttc

SEQ ID NO: 146315 - DNA, 22 bp, Artificial Sequence
  Synthetic oligonucleotide; CTC chr11 5210461 5210482 5210466 5210461 -
ctttttcccttcccttttcccc

SEQ ID NO: 146316 - DNA, 22 bp, Artificial Sequence
  Synthetic oligonucleotide; CTT chr11 5210458 5210479 5210463 5210458 -
tttcccttcccttttccccatc

SEQ ID NO: 146317 - DNA, 22 bp, Artificial Sequence
  Synthetic oligonucleotide; TTT chr11 5210457 5210478 5210462 5210457 -
ttcccttcccttttccccatcc

SEQ ID NO: 146318 - DNA, 22 bp, Artificial Sequence
  Synthetic oligonucleotide; TTT chr11 5210456 5210477 5210461 5210456 -
tcccttcccttttccccatcca

SEQ ID NO: 146319 - DNA, 22 bp, Artificial Sequence
  Synthetic oligonucleotide; TTT chr11 5210455 5210476 5210460 5210455 -
cccttcccttttccccatccac

SEQ ID NO: 146320 - DNA, 22 bp, Artificial Sequence
  Synthetic oligonucleotide; TTC chr11 5210454 5210475 5210459 5210454 -
ccttcccttttccccatccact

SEQ ID NO: 146321 - DNA, 22 bp, Artificial Sequence
  Synthetic oligonucleotide; CTT chr11 5210450 5210471 5210455 5210450 -
cccttttccccatccacttgct

SEQ ID NO: 146322 - DNA, 22 bp, Artificial Sequence
  Synthetic oligonucleotide; TTC chr11 5210449 5210470 5210454 5210449 -
ccttttccccatccacttgctc

SEQ ID NO: 146323 - DNA, 22 bp, Artificial Sequence
  Synthetic oligonucleotide; CTT chr11 5210445 5210466 5210450 5210445 -
ttccccatccacttgctcattc

SEQ ID NO: 146324 - DNA, 22 bp, Artificial Sequence
  Synthetic oligonucleotide; TTT chr11 5210444 5210465 5210449 5210444 -
tccccatccacttgctcattct

SEQ ID NO: 146325 - DNA, 22 bp, Artificial Sequence
  Synthetic oligonucleotide; TTT chr11 5210443 5210464 5210448 5210443 -
ccccatccacttgctcattctg

SEQ ID NO: 146326 - DNA, 22 bp, Artificial Sequence
  Synthetic oligonucleotide; TTC chr11 5210442 5210463 5210447 5210442 -
cccatccacttgctcattctgg

SEQ ID NO: 146327 - DNA, 22 bp, Artificial Sequence
  Synthetic oligonucleotide; CTT chr11 5210431 5210452 5210436 5210431 -
gctcattctggatggcaggatt

SEQ ID NO: 146328 - DNA, 22 bp, Artificial Sequence
  Synthetic oligonucleotide; TTG chr11 5210430 5210451 5210435 5210430 -
ctcattctggatggcaggatta

SEQ ID NO: 146329 - DNA, 22 bp, Artificial Sequence
  Synthetic oligonucleotide; CTC chr11 5210427 5210448 5210432 5210427 -
attctggatggcaggattaggc

SEQ ID NO: 146330 - DNA, 22 bp, Artificial Sequence
  Synthetic oligonucleotide; TTC chr11 5210423 5210444 5210428 5210423 -
tggatggcaggattaggcttta

SEQ ID NO: 146331 - DNA, 22 bp, Artificial Sequence
  Synthetic oligonucleotide; CTG chr11 5210421 5210442 5210426 5210421 -
gatggcaggattaggctttata

SEQ ID NO: 146332 - DNA, 22 bp, Artificial Sequence
  Synthetic oligonucleotide; TTA chr11 5210408 5210429 5210413 5210408 -
ggctttatatttccctaccata

SEQ ID NO: 146333 - DNA, 22 bp, Artificial Sequence
  Synthetic oligonucleotide; CTT chr11 5210403 5210424 5210408 5210403 -
tatatttccctaccatattagc

SEQ ID NO: 146334 - DNA, 22 bp, Artificial Sequence
  Synthetic oligonucleotide; TTT chr11 5210402 5210423 5210407 5210402 -
atatttccctaccatattagct

SEQ ID NO: 146335 - DNA, 22 bp, Artificial Sequence
  Synthetic oligonucleotide; TTA chr11 5210401 5210422 5210406 5210401 -
tatttccctaccatattagctt

SEQ ID NO: 146336 - DNA, 22 bp, Artificial Sequence
  Synthetic oligonucleotide; TTT chr11 5210396 5210417 5210401 5210396 -
ccctaccatattagcttgtgca

SEQ ID NO: 146337 - DNA, 22 bp, Artificial Sequence
  Synthetic oligonucleotide; TTC chr11 5210395 5210416 5210400 5210395 -
cctaccatattagcttgtgcac

SEQ ID NO: 146338 - DNA, 22 bp, Artificial Sequence
  Synthetic oligonucleotide; CTA chr11 5210391 5210412 5210396 5210391 -
ccatattagcttgtgcacttaa

SEQ ID NO: 146339 - DNA, 22 bp, Artificial Sequence
  Synthetic oligonucleotide; TTA chr11 5210383 5210404 5210388 5210383 -
gcttgtgcacttaaaggaagtt

SEQ ID NO: 146340 - DNA, 22 bp, Artificial Sequence
  Synthetic oligonucleotide; CTT chr11 5210379 5210400 5210384 5210379 -
gtgcacttaaaggaagtttaga

SEQ ID NO: 146341 - DNA, 22 bp, Artificial Sequence
  Synthetic oligonucleotide; TTG chr11 5210378 5210399 5210383 5210378 -
tgcacttaaaggaagtttagat

SEQ ID NO: 146342 - DNA, 22 bp, Artificial Sequence
  Synthetic oligonucleotide; CTT chr11 5210371 5210392 5210376 5210371 -
aaaggaagtttagatagccttg

SEQ ID NO: 146343 - DNA, 22 bp, Artificial Sequence
  Synthetic oligonucleotide; TTA chr11 5210370 5210391 5210375 5210370 -
aaggaagtttagatagccttga

SEQ ID NO: 146344 - DNA, 22 bp, Artificial Sequence
  Synthetic oligonucleotide; TTT chr11 5210360 5210381 5210365 5210360 -
agatagccttgactccatgggg

SEQ ID NO: 146345 - DNA, 22 bp, Artificial Sequence
  Synthetic oligonucleotide; TTA chr11 5210359 5210380 5210364 5210359 -
gatagccttgactccatgggga

SEQ ID NO: 146346 - DNA, 22 bp, Artificial Sequence
  Synthetic oligonucleotide; CTT chr11 5210350 5210371 5210355 5210350 -
gactccatggggaaaaggaaaa

SEQ ID NO: 146347 - DNA, 22 bp, Artificial Sequence
  Synthetic oligonucleotide; TTG chr11 5210349 5210370 5210354 5210349 -
actccatggggaaaaggaaaaa

SEQ ID NO: 146348 - DNA, 22 bp, Artificial Sequence
  Synthetic oligonucleotide; CTC chr11 5210345 5210366 5210350 5210345 -
catggggaaaaggaaaaagtac

SEQ ID NO: 146349 - DNA, 22 bp, Artificial Sequence
  Synthetic oligonucleotide; TTT chr11 5210319 5210340 5210324 5210319 -
agtggggtgtgggactgttgga

SEQ ID NO: 146350 - DNA, 22 bp, Artificial Sequence
  Synthetic oligonucleotide; TTA chr11 5210318 5210339 5210323 5210318 -
gtggggtgtgggactgttggat

SEQ ID NO: 146351 - DNA, 22 bp, Artificial Sequence
  Synthetic oligonucleotide; CTG chr11 5210302 5210323 5210307 5210302 -
ttggattattagatgtcttgca

SEQ ID NO: 146352 - DNA, 22 bp, Artificial Sequence
  Synthetic oligonucleotide; TTG chr11 5210299 5210320 5210304 5210299 -
gattattagatgtcttgcattt

SEQ ID NO: 146353 - DNA, 22 bp, Artificial Sequence
  Synthetic oligonucleotide; TTA chr11 5210294 5210315 5210299 5210294 -
ttagatgtcttgcatttctctc

SEQ ID NO: 146354 - DNA, 22 bp, Artificial Sequence
  Synthetic oligonucleotide; TTA chr11 5210291 5210312 5210296 5210291 -
gatgtcttgcatttctctcatt

SEQ ID NO: 146355 - DNA, 22 bp, Artificial Sequence
  Synthetic oligonucleotide; CTT chr11 5210283 5210304 5210288 5210283 -
gcatttctctcattctgttcca

SEQ ID NO: 146356 - DNA, 22 bp, Artificial Sequence
  Synthetic oligonucleotide; TTG chr11 5210282 5210303 5210287 5210282 -
catttctctcattctgttccag

SEQ ID NO: 146357 - DNA, 22 bp, Artificial Sequence
  Synthetic oligonucleotide; TTT chr11 5210277 5210298 5210282 5210277 -
ctctcattctgttccagttgag

SEQ ID NO: 146358 - DNA, 22 bp, Artificial Sequence
  Synthetic oligonucleotide; TTC chr11 5210276 5210297 5210281 5210276 -
tctcattctgttccagttgagg

SEQ ID NO: 146359 - DNA, 22 bp, Artificial Sequence
  Synthetic oligonucleotide; CTC chr11 5210274 5210295 5210279 5210274 -
tcattctgttccagttgaggcc

SEQ ID NO: 146360 - DNA, 22 bp, Artificial Sequence
  Synthetic oligonucleotide; CTC chr11 5210272 5210293 5210277 5210272 -
attctgttccagttgaggccag

SEQ ID NO: 146361 - DNA, 22 bp, Artificial Sequence
  Synthetic oligonucleotide; TTC chr11 5210268 5210289 5210273 5210268 -
tgttccagttgaggccagcttg

SEQ ID NO: 146362 - DNA, 22 bp, Artificial Sequence
  Synthetic oligonucleotide; CTG chr11 5210266 5210287 5210271 5210266 -
ttccagttgaggccagcttgct

SEQ ID NO: 146363 - DNA, 22 bp, Artificial Sequence
  Synthetic oligonucleotide; TTC chr11 5210263 5210284 5210268 5210263 -
cagttgaggccagcttgcttcc

SEQ ID NO: 146364 - DNA, 22 bp, Artificial Sequence
  Synthetic oligonucleotide; TTG chr11 5210257 5210278 5210262 5210257 -
aggccagcttgcttcccactag

SEQ ID NO: 146365 - DNA, 22 bp, Artificial Sequence
  Synthetic oligonucleotide; CTT chr11 5210247 5210268 5210252 5210247 -
gcttcccactagaagaataact

SEQ ID NO: 146366 - DNA, 22 bp, Artificial Sequence
  Synthetic oligonucleotide; TTG chr11 5210246 5210267 5210251 5210246 -
cttcccactagaagaataactg

SEQ ID NO: 146367 - DNA, 22 bp, Artificial Sequence
  Synthetic oligonucleotide; CTT chr11 5210243 5210264 5210248 5210243 -
cccactagaagaataactgttc

SEQ ID NO: 146368 - DNA, 22 bp, Artificial Sequence
  Synthetic oligonucleotide; TTC chr11 5210242 5210263 5210247 5210242 -
ccactagaagaataactgttct

SEQ ID NO: 146369 - DNA, 22 bp, Artificial Sequence
  Synthetic oligonucleotide; CTA chr11 5210236 5210257 5210241 5210236 -
gaagaataactgttctctttat

SEQ ID NO: 146370 - DNA, 22 bp, Artificial Sequence
  Synthetic oligonucleotide; CTG chr11 5210224 5210245 5210229 5210224 -
ttctctttatacaattcctagt

SEQ ID NO: 146371 - DNA, 22 bp, Artificial Sequence
  Synthetic oligonucleotide; TTC chr11 5210221 5210242 5210226 5210221 -
tctttatacaattcctagtcaa

SEQ ID NO: 146372 - DNA, 22 bp, Artificial Sequence
  Synthetic oligonucleotide; CTC chr11 5210219 5210240 5210224 5210219 -
tttatacaattcctagtcaagt

SEQ ID NO: 146373 - DNA, 22 bp, Artificial Sequence
  Synthetic oligonucleotide; CTT chr11 5210217 5210238 5210222 5210217 -
tatacaattcctagtcaagtag

SEQ ID NO: 146374 - DNA, 22 bp, Artificial Sequence
  Synthetic oligonucleotide; TTT chr11 5210216 5210237 5210221 5210216 -
atacaattcctagtcaagtagg

SEQ ID NO: 146375 - DNA, 22 bp, Artificial Sequence
  Synthetic oligonucleotide; TTA chr11 5210215 5210236 5210220 5210215 -
tacaattcctagtcaagtaggg

SEQ ID NO: 146376 - DNA, 22 bp, Artificial Sequence
  Synthetic oligonucleotide; TTC chr11 5210207 5210228 5210212 5210207 -
ctagtcaagtaggggcaaaaag

SEQ ID NO: 146377 - DNA, 22 bp, Artificial Sequence
  Synthetic oligonucleotide; CTA chr11 5210204 5210225 5210209 5210204 -
gtcaagtaggggcaaaaagtat

SEQ ID NO: 146378 - DNA, 22 bp, Artificial Sequence
  Synthetic oligonucleotide; TTT chr11 5210180 5210201 5210185 5210180 -
tcatttattattgtttttctgg

SEQ ID NO: 146379 - DNA, 22 bp, Artificial Sequence
  Synthetic oligonucleotide; TTT chr11 5210179 5210200 5210184 5210179 -
catttattattgtttttctggg

SEQ ID NO: 146380 - DNA, 22 bp, Artificial Sequence
  Synthetic oligonucleotide; TTC chr11 5210178 5210199 5210183 5210178 -
atttattattgtttttctggga

SEQ ID NO: 146381 - DNA, 22 bp, Artificial Sequence
  Synthetic oligonucleotide; TTT chr11 5210174 5210195 5210179 5210174 -
attattgtttttctgggatgta

SEQ ID NO: 146382 - DNA, 22 bp, Artificial Sequence
  Synthetic oligonucleotide; TTA chr11 5210173 5210194 5210178 5210173 -
ttattgtttttctgggatgtag

SEQ ID NO: 146383 - DNA, 22 bp, Artificial Sequence
  Synthetic oligonucleotide; TTA chr11 5210170 5210191 5210175 5210170 -
ttgtttttctgggatgtagcca

SEQ ID NO: 146384 - DNA, 22 bp, Artificial Sequence
  Synthetic oligonucleotide; TTG chr11 5210167 5210188 5210172 5210167 -
tttttctgggatgtagccagga

SEQ ID NO: 146385 - DNA, 22 bp, Artificial Sequence
  Synthetic oligonucleotide; TTT chr11 5210164 5210185 5210169 5210164 -
ttctgggatgtagccaggagca

SEQ ID NO: 146386 - DNA, 22 bp, Artificial Sequence
  Synthetic oligonucleotide; TTT chr11 5210163 5210184 5210168 5210163 -
tctgggatgtagccaggagcaa

SEQ ID NO: 146387 - DNA, 22 bp, Artificial Sequence
  Synthetic oligonucleotide; TTT chr11 5210162 5210183 5210167 5210162 -
ctgggatgtagccaggagcaat

SEQ ID NO: 146388 - DNA, 22 bp, Artificial Sequence
  Synthetic oligonucleotide; TTC chr11 5210161 5210182 5210166 5210161 -
tgggatgtagccaggagcaatt

SEQ ID NO: 146389 - DNA, 22 bp, Artificial Sequence
  Synthetic oligonucleotide; CTG chr11 5210159 5210180 5210164 5210159 -
ggatgtagccaggagcaattta

SEQ ID NO: 146390 - DNA, 22 bp, Artificial Sequence
  Synthetic oligonucleotide; TTT chr11 5210138 5210159 5210143 5210138 -
aaacttgctggagtgcaatttc

SEQ ID NO: 146391 - DNA, 22 bp, Artificial Sequence
  Synthetic oligonucleotide; TTA chr11 5210137 5210158 5210142 5210137 -
aacttgctggagtgcaatttct

SEQ ID NO: 146392 - DNA, 22 bp, Artificial Sequence
  Synthetic oligonucleotide; CTT chr11 5210132 5210153 5210137 5210132 -
gctggagtgcaatttcttcaac

SEQ ID NO: 146393 - DNA, 22 bp, Artificial Sequence
  Synthetic oligonucleotide; TTG chr11 5210131 5210152 5210136 5210131 -
ctggagtgcaatttcttcaact

SEQ ID NO: 146394 - DNA, 22 bp, Artificial Sequence
  Synthetic oligonucleotide; CTG chr11 5210128 5210149 5210133 5210128 -
gagtgcaatttcttcaactaca

SEQ ID NO: 146395 - DNA, 22 bp, Artificial Sequence
  Synthetic oligonucleotide; TTT chr11 5210117 5210138 5210122 5210117 -
cttcaactacaaatgagaataa

SEQ ID NO: 146396 - DNA, 22 bp, Artificial Sequence
  Synthetic oligonucleotide; TTC chr11 5210116 5210137 5210121 5210116 -
ttcaactacaaatgagaataat

SEQ ID NO: 146397 - DNA, 22 bp, Artificial Sequence
  Synthetic oligonucleotide; CTT chr11 5210114 5210135 5210119 5210114 -
caactacaaatgagaataataa

SEQ ID NO: 146398 - DNA, 22 bp, Artificial Sequence
  Synthetic oligonucleotide; TTC chr11 5210113 5210134 5210118 5210113 -
aactacaaatgagaataataat

SEQ ID NO: 146399 - DNA, 22 bp, Artificial Sequence
  Synthetic oligonucleotide; CTA chr11 5210108 5210129 5210113 5210108 -
caaatgagaataataataacag

SEQ ID NO: 146400 - DNA, 22 bp, Artificial Sequence
  Synthetic oligonucleotide; CTA chr11 5210081 5210102 5210086 5210081 -
cgaactaattgtaataatacag

SEQ ID NO: 146401 - DNA, 22 bp, Artificial Sequence
  Synthetic oligonucleotide; CTA chr11 5210074 5210095 5210079 5210074 -
attgtaataatacagaactaaa

SEQ ID NO: 146402 - DNA, 22 bp, Artificial Sequence
  Synthetic oligonucleotide; TTG chr11 5210070 5210091 5210075 5210070 -
taataatacagaactaaatgta

SEQ ID NO: 146403 - DNA, 22 bp, Artificial Sequence
  Synthetic oligonucleotide; CTA chr11 5210054 5210075 5210059 5210054 -
aatgtaaatatacaaaggataa

SEQ ID NO: 146404 - DNA, 22 bp, Artificial Sequence
  Synthetic oligonucleotide; TTC chr11 5210028 5210049 5210033 5210028 -
aaaatctgggcacatgcaggct

SEQ ID NO: 146405 - DNA, 22 bp, Artificial Sequence
  Synthetic oligonucleotide; CTG chr11 5210020 5210041 5210025 5210020 -
ggcacatgcaggctgctataag

SEQ ID NO: 146406 - DNA, 22 bp, Artificial Sequence
  Synthetic oligonucleotide; CTG chr11 5210005 5210026 5210010 5210005 -
ctataagagaaaacatctatga

SEQ ID NO: 146407 - DNA, 22 bp, Artificial Sequence
  Synthetic oligonucleotide; CTA chr11 5210002 5210023 5210007 5210002 -
taagagaaaacatctatgatat

SEQ ID NO: 146408 - DNA, 22 bp, Artificial Sequence
  Synthetic oligonucleotide; CTA chr11 5209986 5210007 5209991 5209986 -
tgatattataggttgaccaaat

SEQ ID NO: 146409 - DNA, 22 bp, Artificial Sequence
  Synthetic oligonucleotide; TTA chr11 5209978 5209999 5209983 5209978 -
taggttgaccaaatgacattaa

SEQ ID NO: 146410 - DNA, 22 bp, Artificial Sequence
  Synthetic oligonucleotide; TTG chr11 5209971 5209992 5209976 5209971 -
accaaatgacattaaattatag

SEQ ID NO: 146411 - DNA, 22 bp, Artificial Sequence
  Synthetic oligonucleotide; TTA chr11 5209957 5209978 5209962 5209957 -
aattatagtggggaggtaaaca

SEQ ID NO: 146412 - DNA, 22 bp, Artificial Sequence
  Synthetic oligonucleotide; TTA chr11 5209952 5209973 5209957 5209952 -
tagtggggaggtaaacaggttg

SEQ ID NO: 146413 - DNA, 22 bp, Artificial Sequence
  Synthetic oligonucleotide; TTG chr11 5209930 5209951 5209935 5209930 -
gcagtgtattttaaagttgaac

SEQ ID NO: 146414 - DNA, 22 bp, Artificial Sequence
  Synthetic oligonucleotide; TTT chr11 5209919 5209940 5209924 5209919 -
taaagttgaacatatgcatatt

SEQ ID NO: 146415 - DNA, 22 bp, Artificial Sequence
  Synthetic oligonucleotide; TTT chr11 5209918 5209939 5209923 5209918 -
aaagttgaacatatgcatattt

SEQ ID NO: 146416 - DNA, 22 bp, Artificial Sequence
  Synthetic oligonucleotide; TTA chr11 5209917 5209938 5209922 5209917 -
aagttgaacatatgcatatttt

SEQ ID NO: 146417 - DNA, 22 bp, Artificial Sequence
  Synthetic oligonucleotide; TTG chr11 5209911 5209932 5209916 5209911 -
aacatatgcatattttatgacc

SEQ ID NO: 146418 - DNA, 22 bp, Artificial Sequence
  Synthetic oligonucleotide; TTT chr11 5209896 5209917 5209901 5209896 -
tatgacctagcaatttacagaa

SEQ ID NO: 146419 - DNA, 22 bp, Artificial Sequence
  Synthetic oligonucleotide; TTT chr11 5209895 5209916 5209900 5209895 -
atgacctagcaatttacagaat

SEQ ID NO: 146420 - DNA, 22 bp, Artificial Sequence
  Synthetic oligonucleotide; TTA chr11 5209894 5209915 5209899 5209894 -
tgacctagcaatttacagaata

SEQ ID NO: 146421 - DNA, 22 bp, Artificial Sequence
  Synthetic oligonucleotide; CTA chr11 5209887 5209908 5209892 5209887 -
gcaatttacagaatatatatac

SEQ ID NO: 146422 - DNA, 22 bp, Artificial Sequence
  Synthetic oligonucleotide; TTT chr11 5209880 5209901 5209885 5209880 -
acagaatatatatacaaaaata

SEQ ID NO: 146423 - DNA, 22 bp, Artificial Sequence
  Synthetic oligonucleotide; TTA chr11 5209879 5209900 5209884 5209879 -
cagaatatatatacaaaaatat

SEQ ID NO: 146424 - DNA, 22 bp, Artificial Sequence
  Synthetic oligonucleotide; CTT chr11 5209846 5209867 5209851 5209846 -
catagcagcaatttatattata

SEQ ID NO: 146425 - DNA, 22 bp, Artificial Sequence
  Synthetic oligonucleotide; TTC chr11 5209845 5209866 5209850 5209845 -
atagcagcaatttatattatag

SEQ ID NO: 146426 - DNA, 22 bp, Artificial Sequence
  Synthetic oligonucleotide; TTT chr11 5209832 5209853 5209837 5209832 -
atattatagccaaaagctagaa

SEQ ID NO: 146427 - DNA, 22 bp, Artificial Sequence
  Synthetic oligonucleotide; TTA chr11 5209831 5209852 5209836 5209831 -
tattatagccaaaagctagaag

SEQ ID NO: 146428 - DNA, 22 bp, Artificial Sequence
  Synthetic oligonucleotide; TTA chr11 5209826 5209847 5209831 5209826 -
tagccaaaagctagaaggtact

SEQ ID NO: 146429 - DNA, 22 bp, Artificial Sequence
  Synthetic oligonucleotide; CTA chr11 5209813 5209834 5209818 5209813 -
gaaggtactcaaatatctatca

SEQ ID NO: 146430 - DNA, 22 bp, Artificial Sequence
  Synthetic oligonucleotide; CTC chr11 5209803 5209824 5209808 5209803 -
aaatatctatcaactgtggagt

SEQ ID NO: 146431 - DNA, 22 bp, Artificial Sequence
  Synthetic oligonucleotide; CTA chr11 5209794 5209815 5209799 5209794 -
tcaactgtggagtcaataaata

SEQ ID NO: 146432 - DNA, 22 bp, Artificial Sequence
  Synthetic oligonucleotide; CTG chr11 5209787 5209808 5209792 5209787 -
tggagtcaataaatatattgtg

SEQ ID NO: 146433 - DNA, 22 bp, Artificial Sequence
  Synthetic oligonucleotide; TTG chr11 5209767 5209788 5209772 5209767 -
tggtatatacataaaatagaat

SEQ ID NO: 146434 - DNA, 22 bp, Artificial Sequence
  Synthetic oligonucleotide; TTC chr11 5209738 5209759 5209743 5209738 -
agaaatgaaaaatcaactacag

SEQ ID NO: 146435 - DNA, 22 bp, Artificial Sequence
  Synthetic oligonucleotide; CTA chr11 5209719 5209740 5209724 5209719 -
cagtcatacactagtatgaatg

SEQ ID NO: 146436 - DNA, 22 bp, Artificial Sequence
  Synthetic oligonucleotide; CTA chr11 5209706 5209727 5209711 5209706 -
gtatgaatgcaattcacaaaca

SEQ ID NO: 146437 - DNA, 22 bp, Artificial Sequence
  Synthetic oligonucleotide; TTC chr11 5209691 5209712 5209696 5209691 -
acaaacataatattgaataaag

SEQ ID NO: 146438 - DNA, 22 bp, Artificial Sequence
  Synthetic oligonucleotide; TTG chr11 5209676 5209697 5209681 5209676 -
aataaagtcagacataagcaac

SEQ ID NO: 146439 - DNA, 22 bp, Artificial Sequence
  Synthetic oligonucleotide; TTC chr11 5209642 5209663 5209647 5209642 -
aatgtatacacacttttaaaaa

SEQ ID NO: 146440 - DNA, 22 bp, Artificial Sequence
  Synthetic oligonucleotide; CTT chr11 5209627 5209648 5209632 5209627 -
ttaaaaaaagggacatgagtca

SEQ ID NO: 146441 - DNA, 22 bp, Artificial Sequence
  Synthetic oligonucleotide; TTT chr11 5209626 5209647 5209631 5209626 -
taaaaaaagggacatgagtcaa

SEQ ID NO: 146442 - DNA, 22 bp, Artificial Sequence
  Synthetic oligonucleotide; TTT chr11 5209625 5209646 5209630 5209625 -
aaaaaaagggacatgagtcaat

SEQ ID NO: 146443 - DNA, 22 bp, Artificial Sequence
  Synthetic oligonucleotide; TTA chr11 5209624 5209645 5209629 5209624 -
aaaaaagggacatgagtcaatc

SEQ ID NO: 146444 - DNA, 22 bp, Artificial Sequence
  Synthetic oligonucleotide; TTA chr11 5209585 5209606 5209590 5209585 -
tatcaggataattattaacttt

SEQ ID NO: 146445 - DNA, 22 bp, Artificial Sequence
  Synthetic oligonucleotide; TTA chr11 5209571 5209592 5209576 5209571 -
ttaactttggagacaattagtg

SEQ ID NO: 146446 - DNA, 22 bp, Artificial Sequence
  Synthetic oligonucleotide; TTA chr11 5209568 5209589 5209573 5209568 -
actttggagacaattagtggaa

SEQ ID NO: 146447 - DNA, 22 bp, Artificial Sequence
  Synthetic oligonucleotide; CTT chr11 5209564 5209585 5209569 5209564 -
tggagacaattagtggaatgat

SEQ ID NO: 146448 - DNA, 22 bp, Artificial Sequence
  Synthetic oligonucleotide; TTT chr11 5209563 5209584 5209568 5209563 -
ggagacaattagtggaatgata

SEQ ID NO: 146449 - DNA, 22 bp, Artificial Sequence
  Synthetic oligonucleotide; TTG chr11 5209562 5209583 5209567 5209562 -
gagacaattagtggaatgataa

SEQ ID NO: 146450 - DNA, 22 bp, Artificial Sequence
  Synthetic oligonucleotide; TTA chr11 5209552 5209573 5209557 5209552 -
gtggaatgataaagagtgagca

SEQ ID NO: 146451 - DNA, 22 bp, Artificial Sequence
  Synthetic oligonucleotide; TTT chr11 5209523 5209544 5209528 5209523 -
actctttaatttcctatcttat

SEQ ID NO: 146452 - DNA, 22 bp, Artificial Sequence
  Synthetic oligonucleotide; TTA chr11 5209522 5209543 5209527 5209522 -
ctctttaatttcctatcttatt

SEQ ID NO: 146453 - DNA, 22 bp, Artificial Sequence
  Synthetic oligonucleotide; CTC chr11 5209519 5209540 5209524 5209519 -
tttaatttcctatcttattagt

SEQ ID NO: 146454 - DNA, 22 bp, Artificial Sequence
  Synthetic oligonucleotide; CTT chr11 5209517 5209538 5209522 5209517 -
taatttcctatcttattagttg

SEQ ID NO: 146455 - DNA, 22 bp, Artificial Sequence
  Synthetic oligonucleotide; TTT chr11 5209516 5209537 5209521 5209516 -
aatttcctatcttattagttgt

SEQ ID NO: 146456 - DNA, 22 bp, Artificial Sequence
  Synthetic oligonucleotide; TTA chr11 5209515 5209536 5209520 5209515 -
atttcctatcttattagttgtt

SEQ ID NO: 146457 - DNA, 22 bp, Artificial Sequence
  Synthetic oligonucleotide; TTT chr11 5209511 5209532 5209516 5209511 -
cctatcttattagttgttacat

SEQ ID NO: 146458 - DNA, 22 bp, Artificial Sequence
  Synthetic oligonucleotide; TTC chr11 5209510 5209531 5209515 5209510 -
ctatcttattagttgttacatg

SEQ ID NO: 146459 - DNA, 22 bp, Artificial Sequence
  Synthetic oligonucleotide; CTA chr11 5209507 5209528 5209512 5209507 -
tcttattagttgttacatgggt

SEQ ID NO: 146460 - DNA, 22 bp, Artificial Sequence
  Synthetic oligonucleotide; CTT chr11 5209503 5209524 5209508 5209503 -
attagttgttacatgggtgtgt

SEQ ID NO: 146461 - DNA, 22 bp, Artificial Sequence
  Synthetic oligonucleotide; TTA chr11 5209502 5209523 5209507 5209502 -
ttagttgttacatgggtgtgtt

SEQ ID NO: 146462 - DNA, 22 bp, Artificial Sequence
  Synthetic oligonucleotide; TTA chr11 5209499 5209520 5209504 5209499 -
gttgttacatgggtgtgttcac

SEQ ID NO: 146463 - DNA, 22 bp, Artificial Sequence
  Synthetic oligonucleotide; TTG chr11 5209495 5209516 5209500 5209495 -
ttacatgggtgtgttcaccttc

SEQ ID NO: 146464 - DNA, 22 bp, Artificial Sequence
  Synthetic oligonucleotide; TTA chr11 5209492 5209513 5209497 5209492 -
catgggtgtgttcaccttccaa

SEQ ID NO: 146465 - DNA, 22 bp, Artificial Sequence
  Synthetic oligonucleotide; TTC chr11 5209479 5209500 5209484 5209479 -
accttccaaaagttaattcagc

SEQ ID NO: 146466 - DNA, 22 bp, Artificial Sequence
  Synthetic oligonucleotide; CTT chr11 5209474 5209495 5209479 5209474 -
ccaaaagttaattcagctgtgc

SEQ ID NO: 146467 - DNA, 22 bp, Artificial Sequence
  Synthetic oligonucleotide; TTC chr11 5209473 5209494 5209478 5209473 -
caaaagttaattcagctgtgca

SEQ ID NO: 146468 - DNA, 22 bp, Artificial Sequence
  Synthetic oligonucleotide; TTA chr11 5209464 5209485 5209469 5209464 -
attcagctgtgcatgtataatt

SEQ ID NO: 146469 - DNA, 22 bp, Artificial Sequence
  Synthetic oligonucleotide; TTC chr11 5209460 5209481 5209465 5209460 -
agctgtgcatgtataatttgtg

SEQ ID NO: 146470 - DNA, 22 bp, Artificial Sequence
  Synthetic oligonucleotide; CTG chr11 5209455 5209476 5209460 5209455 -
tgcatgtataatttgtgtactt

SEQ ID NO: 146471 - DNA, 22 bp, Artificial Sequence
  Synthetic oligonucleotide; TTT chr11 5209441 5209462 5209446 5209441 -
gtgtacttttatatatgcatgc

SEQ ID NO: 146472 - DNA, 22 bp, Artificial Sequence
  Synthetic oligonucleotide; TTG chr11 5209440 5209461 5209445 5209440 -
tgtacttttatatatgcatgct

SEQ ID NO: 146473 - DNA, 22 bp, Artificial Sequence
  Synthetic oligonucleotide; CTT chr11 5209433 5209454 5209438 5209433 -
ttatatatgcatgctgtactta

SEQ ID NO: 146474 - DNA, 22 bp, Artificial Sequence
  Synthetic oligonucleotide; TTT chr11 5209432 5209453 5209437 5209432 -
tatatatgcatgctgtacttaa

SEQ ID NO: 146475 - DNA, 22 bp, Artificial Sequence
  Synthetic oligonucleotide; TTT chr11 5209431 5209452 5209436 5209431 -
atatatgcatgctgtacttaaa

SEQ ID NO: 146476 - DNA, 22 bp, Artificial Sequence
  Synthetic oligonucleotide; TTA chr11 5209430 5209451 5209435 5209430 -
tatatgcatgctgtacttaaaa

SEQ ID NO: 146477 - DNA, 22 bp, Artificial Sequence
  Synthetic oligonucleotide; CTG chr11 5209417 5209438 5209422 5209417 -
tacttaaaatattaaaataaaa

SEQ ID NO: 146478 - DNA, 22 bp, Artificial Sequence
  Synthetic oligonucleotide; CTT chr11 5209412 5209433 5209417 5209412 -
aaaatattaaaataaaaactaa

SEQ ID NO: 146479 - DNA, 22 bp, Artificial Sequence
  Synthetic oligonucleotide; TTA chr11 5209411 5209432 5209416 5209411 -
aaatattaaaataaaaactaaa

SEQ ID NO: 146480 - DNA, 22 bp, Artificial Sequence
  Synthetic oligonucleotide; TTA chr11 5209403 5209424 5209408 5209403 -
aaataaaaactaaatttagaaa

SEQ ID NO: 146481 - DNA, 22 bp, Artificial Sequence
  Synthetic oligonucleotide; CTA chr11 5209391 5209412 5209396 5209391 -
aatttagaaactaaacaatgga

SEQ ID NO: 146482 - DNA, 22 bp, Artificial Sequence
  Synthetic oligonucleotide; TTT chr11 5209386 5209407 5209391 5209386 -
agaaactaaacaatggaaaaaa

SEQ ID NO: 146483 - DNA, 22 bp, Artificial Sequence
  Synthetic oligonucleotide; TTA chr11 5209385 5209406 5209390 5209385 -
gaaactaaacaatggaaaaaag

SEQ ID NO: 146484 - DNA, 22 bp, Artificial Sequence
  Synthetic oligonucleotide; CTA chr11 5209378 5209399 5209383 5209378 -
aacaatggaaaaaagtcagacc

SEQ ID NO: 146485 - DNA, 22 bp, Artificial Sequence
  Synthetic oligonucleotide; TTT chr11 5209352 5209373 5209357 5209352 -
ctttgcatttcaagaagtgcat

SEQ ID NO: 146486 - DNA, 22 bp, Artificial Sequence
  Synthetic oligonucleotide; TTC chr11 5209351 5209372 5209356 5209351 -
tttgcatttcaagaagtgcata

SEQ ID NO: 146487 - DNA, 22 bp, Artificial Sequence
  Synthetic oligonucleotide; CTT chr11 5209349 5209370 5209354 5209349 -
tgcatttcaagaagtgcatact

SEQ ID NO: 146488 - DNA, 22 bp, Artificial Sequence
  Synthetic oligonucleotide; TTT chr11 5209348 5209369 5209353 5209348 -
gcatttcaagaagtgcatacta

SEQ ID NO: 146489 - DNA, 22 bp, Artificial Sequence
  Synthetic oligonucleotide; TTG chr11 5209347 5209368 5209352 5209347 -
catttcaagaagtgcatactaa

SEQ ID NO: 146490 - DNA, 22 bp, Artificial Sequence
  Synthetic oligonucleotide; TTT chr11 5209342 5209363 5209347 5209342 -
caagaagtgcatactaactgag

SEQ ID NO: 146491 - DNA, 22 bp, Artificial Sequence
  Synthetic oligonucleotide; TTC chr11 5209341 5209362 5209346 5209341 -
aagaagtgcatactaactgaga

SEQ ID NO: 146492 - DNA, 22 bp, Artificial Sequence
  Synthetic oligonucleotide; CTA chr11 5209326 5209347 5209331 5209326 -
actgagatattacattcttaaa

SEQ ID NO: 146493 - DNA, 22 bp, Artificial Sequence
  Synthetic oligonucleotide; CTG chr11 5209322 5209343 5209327 5209322 -
agatattacattcttaaatggc

SEQ ID NO: 146494 - DNA, 22 bp, Artificial Sequence
  Synthetic oligonucleotide; TTA chr11 5209314 5209335 5209319 5209314 -
cattcttaaatggctttagtca

SEQ ID NO: 146495 - DNA, 22 bp, Artificial Sequence
  Synthetic oligonucleotide; TTC chr11 5209309 5209330 5209314 5209309 -
ttaaatggctttagtcaattag

SEQ ID NO: 146496 - DNA, 22 bp, Artificial Sequence
  Synthetic oligonucleotide; CTT chr11 5209307 5209328 5209312 5209307 -
aaatggctttagtcaattaggc

SEQ ID NO: 146497 - DNA, 22 bp, Artificial Sequence
  Synthetic oligonucleotide; TTA chr11 5209306 5209327 5209311 5209306 -
aatggctttagtcaattaggct

SEQ ID NO: 146498 - DNA, 22 bp, Artificial Sequence
  Synthetic oligonucleotide; CTT chr11 5209298 5209319 5209303 5209298 -
tagtcaattaggctttaaattt

SEQ ID NO: 146499 - DNA, 22 bp, Artificial Sequence
  Synthetic oligonucleotide; TTT chr11 5209297 5209318 5209302 5209297 -
agtcaattaggctttaaatttc

SEQ ID NO: 146500 - DNA, 22 bp, Artificial Sequence
  Synthetic oligonucleotide; TTA chr11 5209296 5209317 5209301 5209296 -
gtcaattaggctttaaatttca

SEQ ID NO: 146501 - DNA, 22 bp, Artificial Sequence
  Synthetic oligonucleotide; TTA chr11 5209288 5209309 5209293 5209288 -
ggctttaaatttcaccactata

SEQ ID NO: 146502 - DNA, 22 bp, Artificial Sequence
  Synthetic oligonucleotide; CTT chr11 5209283 5209304 5209288 5209283 -
taaatttcaccactatataaac

SEQ ID NO: 146503 - DNA, 22 bp, Artificial Sequence
  Synthetic oligonucleotide; TTT chr11 5209282 5209303 5209287 5209282 -
aaatttcaccactatataaaca

SEQ ID NO: 146504 - DNA, 22 bp, Artificial Sequence
  Synthetic oligonucleotide; TTA chr11 5209281 5209302 5209286 5209281 -
aatttcaccactatataaacat

SEQ ID NO: 146505 - DNA, 22 bp, Artificial Sequence
  Synthetic oligonucleotide; TTT chr11 5209276 5209297 5209281 5209276 -
caccactatataaacatttgct

SEQ ID NO: 146506 - DNA, 22 bp, Artificial Sequence
  Synthetic oligonucleotide; TTC chr11 5209275 5209296 5209280 5209275 -
accactatataaacatttgctt

SEQ ID NO: 146507 - DNA, 22 bp, Artificial Sequence
  Synthetic oligonucleotide; CTA chr11 5209268 5209289 5209273 5209268 -
tataaacatttgcttctaaatc

SEQ ID NO: 146508 - DNA, 22 bp, Artificial Sequence
  Synthetic oligonucleotide; TTT chr11 5209257 5209278 5209262 5209257 -
gcttctaaatctaggtagactg

SEQ ID NO: 146509 - DNA, 22 bp, Artificial Sequence
  Synthetic oligonucleotide; TTG chr11 5209256 5209277 5209261 5209256 -
cttctaaatctaggtagactgt

SEQ ID NO: 146510 - DNA, 22 bp, Artificial Sequence
  Synthetic oligonucleotide; CTT chr11 5209253 5209274 5209258 5209253 -
ctaaatctaggtagactgtctt

SEQ ID NO: 146511 - DNA, 22 bp, Artificial Sequence
  Synthetic oligonucleotide; TTC chr11 5209252 5209273 5209257 5209252 -
taaatctaggtagactgtctta

SEQ ID NO: 146512 - DNA, 22 bp, Artificial Sequence
  Synthetic oligonucleotide; CTA chr11 5209250 5209271 5209255 5209250 -
aatctaggtagactgtcttaac

SEQ ID NO: 146513 - DNA, 22 bp, Artificial Sequence
  Synthetic oligonucleotide; CTA chr11 5209244 5209265 5209249 5209244 -
ggtagactgtcttaacttcctg

SEQ ID NO: 146514 - DNA, 22 bp, Artificial Sequence
  Synthetic oligonucleotide; CTG chr11 5209235 5209256 5209240 5209235 -
tcttaacttcctgaagaagagg

SEQ ID NO: 146515 - DNA, 22 bp, Artificial Sequence
  Synthetic oligonucleotide; CTT chr11 5209231 5209252 5209236 5209231 -
aacttcctgaagaagagggaag

SEQ ID NO: 146516 - DNA, 22 bp, Artificial Sequence
  Synthetic oligonucleotide; TTA chr11 5209230 5209251 5209235 5209230 -
acttcctgaagaagagggaaga

SEQ ID NO: 146517 - DNA, 22 bp, Artificial Sequence
  Synthetic oligonucleotide; CTT chr11 5209226 5209247 5209231 5209226 -
cctgaagaagagggaagaaata

SEQ ID NO: 146518 - DNA, 22 bp, Artificial Sequence
  Synthetic oligonucleotide; TTC chr11 5209225 5209246 5209230 5209225 -
ctgaagaagagggaagaaataa

SEQ ID NO: 146519 - DNA, 22 bp, Artificial Sequence
  Synthetic oligonucleotide; CTG chr11 5209222 5209243 5209227 5209222 -
aagaagagggaagaaataatga

SEQ ID NO: 146520 - DNA, 22 bp, Artificial Sequence
  Synthetic oligonucleotide; CTA chr11 5209174 5209195 5209179 5209174 -
gaggagggaaataaaaagccta

SEQ ID NO: 146521 - DNA, 22 bp, Artificial Sequence
  Synthetic oligonucleotide; CTA chr11 5209152 5209173 5209157 5209152 -
ggaaagcaacatgaaaagatgg

SEQ ID NO: 146522 - DNA, 22 bp, Artificial Sequence
  Synthetic oligonucleotide; CTC chr11 5209125 5209146 5209130 5209125 -
tctggtacatcctgtgcttcct

SEQ ID NO: 146523 - DNA, 22 bp, Artificial Sequence
  Synthetic oligonucleotide; CTC chr11 5209123 5209144 5209128 5209123 -
tggtacatcctgtgcttcctga

SEQ ID NO: 146524 - DNA, 22 bp, Artificial Sequence
  Synthetic oligonucleotide; CTG chr11 5209121 5209142 5209126 5209121 -
gtacatcctgtgcttcctgaga

SEQ ID NO: 146525 - DNA, 22 bp, Artificial Sequence
  Synthetic oligonucleotide; CTG chr11 5209111 5209132 5209116 5209111 -
tgcttcctgagatgttgttatt

SEQ ID NO: 146526 - DNA, 22 bp, Artificial Sequence
  Synthetic oligonucleotide; CTT chr11 5209106 5209127 5209111 5209106 -
cctgagatgttgttattcgtct

SEQ ID NO: 146527 - DNA, 22 bp, Artificial Sequence
  Synthetic oligonucleotide; TTC chr11 5209105 5209126 5209110 5209105 -
ctgagatgttgttattcgtctt

SEQ ID NO: 146528 - DNA, 22 bp, Artificial Sequence
  Synthetic oligonucleotide; CTG chr11 5209102 5209123 5209107 5209102 -
agatgttgttattcgtctttta

SEQ ID NO: 146529 - DNA, 22 bp, Artificial Sequence
  Synthetic oligonucleotide; TTG chr11 5209094 5209115 5209099 5209094 -
ttattcgtcttttacacacact

SEQ ID NO: 146530 - DNA, 22 bp, Artificial Sequence
  Synthetic oligonucleotide; TTA chr11 5209091 5209112 5209096 5209091 -
ttcgtcttttacacacactgtc

SEQ ID NO: 146531 - DNA, 22 bp, Artificial Sequence
  Synthetic oligonucleotide; TTC chr11 5209088 5209109 5209093 5209088 -
gtcttttacacacactgtcttg

SEQ ID NO: 146532 - DNA, 22 bp, Artificial Sequence
  Synthetic oligonucleotide; CTT chr11 5209083 5209104 5209088 5209083 -
ttacacacactgtcttgggatg

SEQ ID NO: 146533 - DNA, 22 bp, Artificial Sequence
  Synthetic oligonucleotide; TTT chr11 5209082 5209103 5209087 5209082 -
tacacacactgtcttgggatgg

SEQ ID NO: 146534 - DNA, 22 bp, Artificial Sequence
  Synthetic oligonucleotide; TTT chr11 5209081 5209102 5209086 5209081 -
acacacactgtcttgggatggg

SEQ ID NO: 146535 - DNA, 22 bp, Artificial Sequence
  Synthetic oligonucleotide; TTA chr11 5209080 5209101 5209085 5209080 -
cacacactgtcttgggatgggc

SEQ ID NO: 146536 - DNA, 22 bp, Artificial Sequence
  Synthetic oligonucleotide; CTG chr11 5209071 5209092 5209076 5209071 -
tcttgggatgggcattaaggtg

SEQ ID NO: 146537 - DNA, 22 bp, Artificial Sequence
  Synthetic oligonucleotide; CTT chr11 5209067 5209088 5209072 5209067 -
gggatgggcattaaggtgttgt

SEQ ID NO: 146538 - DNA, 22 bp, Artificial Sequence
  Synthetic oligonucleotide; TTG chr11 5209066 5209087 5209071 5209066 -
ggatgggcattaaggtgttgta

SEQ ID NO: 146539 - DNA, 22 bp, Artificial Sequence
  Synthetic oligonucleotide; TTA chr11 5209054 5209075 5209059 5209054 -
aggtgttgtagctactcagcta

SEQ ID NO: 146540 - DNA, 22 bp, Artificial Sequence
  Synthetic oligonucleotide; TTG chr11 5209046 5209067 5209051 5209046 -
tagctactcagctagtaagtag

SEQ ID NO: 146541 - DNA, 22 bp, Artificial Sequence
  Synthetic oligonucleotide; CTA chr11 5209040 5209061 5209045 5209040 -
ctcagctagtaagtagctgagc

SEQ ID NO: 146542 - DNA, 22 bp, Artificial Sequence
  Synthetic oligonucleotide; CTC chr11 5209037 5209058 5209042 5209037 -
agctagtaagtagctgagctaa

SEQ ID NO: 146543 - DNA, 22 bp, Artificial Sequence
  Synthetic oligonucleotide; CTA chr11 5209032 5209053 5209037 5209032 -
gtaagtagctgagctaagattc

SEQ ID NO: 146544 - DNA, 22 bp, Artificial Sequence
  Synthetic oligonucleotide; CTG chr11 5209021 5209042 5209026 5209021 -
agctaagattctttcaattcca

SEQ ID NO: 146545 - DNA, 22 bp, Artificial Sequence
  Synthetic oligonucleotide; CTA chr11 5209016 5209037 5209021 5209016 -
agattctttcaattccaaagtc

SEQ ID NO: 146546 - DNA, 22 bp, Artificial Sequence
  Synthetic oligonucleotide; TTC chr11 5209010 5209031 5209015 5209010 -
tttcaattccaaagtcagcagt

SEQ ID NO: 146547 - DNA, 22 bp, Artificial Sequence
  Synthetic oligonucleotide; CTT chr11 5209008 5209029 5209013 5209008 -
tcaattccaaagtcagcagtgt

SEQ ID NO: 146548 - DNA, 22 bp, Artificial Sequence
  Synthetic oligonucleotide; TTT chr11 5209007 5209028 5209012 5209007 -
caattccaaagtcagcagtgtc

SEQ ID NO: 146549 - DNA, 22 bp, Artificial Sequence
  Synthetic oligonucleotide; TTC chr11 5209006 5209027 5209011 5209006 -
aattccaaagtcagcagtgtct

SEQ ID NO: 146550 - DNA, 22 bp, Artificial Sequence
  Synthetic oligonucleotide; TTC chr11 5209001 5209022 5209006 5209001 -
caaagtcagcagtgtcttcact

SEQ ID NO: 146551 - DNA, 22 bp, Artificial Sequence
  Synthetic oligonucleotide; CTT chr11 5208983 5209004 5208988 5208983 -
cactacatggtactatgtcaag

SEQ ID NO: 146552 - DNA, 22 bp, Artificial Sequence
  Synthetic oligonucleotide; TTC chr11 5208982 5209003 5208987 5208982 -
actacatggtactatgtcaaga

SEQ ID NO: 146553 - DNA, 22 bp, Artificial Sequence
  Synthetic oligonucleotide; CTA chr11 5208978 5208999 5208983 5208978 -
catggtactatgtcaagaaaga

SEQ ID NO: 146554 - DNA, 22 bp, Artificial Sequence
  Synthetic oligonucleotide; CTA chr11 5208968 5208989 5208973 5208968 -
tgtcaagaaagagaaactccac

SEQ ID NO: 146555 - DNA, 22 bp, Artificial Sequence
  Synthetic oligonucleotide; CTC chr11 5208949 5208970 5208954 5208949 -
cactaaaaagaacttcattgct

SEQ ID NO: 146556 - DNA, 22 bp, Artificial Sequence
  Synthetic oligonucleotide; CTA chr11 5208944 5208965 5208949 5208944 -
aaaagaacttcattgctctctg

SEQ ID NO: 146557 - DNA, 22 bp, Artificial Sequence
  Synthetic oligonucleotide; CTT chr11 5208934 5208955 5208939 5208934 -
cattgctctctgttagggatac

SEQ ID NO: 146558 - DNA, 22 bp, Artificial Sequence
  Synthetic oligonucleotide; TTC chr11 5208933 5208954 5208938 5208933 -
attgctctctgttagggataca

SEQ ID NO: 146559 - DNA, 22 bp, Artificial Sequence
  Synthetic oligonucleotide; TTG chr11 5208929 5208950 5208934 5208929 -
ctctctgttagggatacattaa

SEQ ID NO: 146560 - DNA, 22 bp, Artificial Sequence
  Synthetic oligonucleotide; CTC chr11 5208926 5208947 5208931 5208926 -
tctgttagggatacattaacat

SEQ ID NO: 146561 - DNA, 22 bp, Artificial Sequence
  Synthetic oligonucleotide; CTC chr11 5208924 5208945 5208929 5208924 -
tgttagggatacattaacattt

SEQ ID NO: 146562 - DNA, 22 bp, Artificial Sequence
  Synthetic oligonucleotide; CTG chr11 5208922 5208943 5208927 5208922 -
ttagggatacattaacattttg

SEQ ID NO: 146563 - DNA, 22 bp, Artificial Sequence
  Synthetic oligonucleotide; TTA chr11 5208919 5208940 5208924 5208919 -
gggatacattaacattttggga

SEQ ID NO: 146564 - DNA, 22 bp, Artificial Sequence
  Synthetic oligonucleotide; TTA chr11 5208908 5208929 5208913 5208908 -
acattttgggacatgaaaaaaa

SEQ ID NO: 146565 - DNA, 22 bp, Artificial Sequence
  Synthetic oligonucleotide; TTT chr11 5208902 5208923 5208907 5208902 -
tgggacatgaaaaaaaaatgtt

SEQ ID NO: 146566 - DNA, 22 bp, Artificial Sequence
  Synthetic oligonucleotide; TTT chr11 5208901 5208922 5208906 5208901 -
gggacatgaaaaaaaaatgtta

SEQ ID NO: 146567 - DNA, 22 bp, Artificial Sequence
  Synthetic oligonucleotide; TTG chr11 5208900 5208921 5208905 5208900 -
ggacatgaaaaaaaaatgttac

SEQ ID NO: 146568 - DNA, 22 bp, Artificial Sequence
  Synthetic oligonucleotide; TTA chr11 5208879 5208900 5208884 5208879 -
caatagcttacaggtcacctcc

SEQ ID NO: 146569 - DNA, 22 bp, Artificial Sequence
  Synthetic oligonucleotide; CTT chr11 5208870 5208891 5208875 5208870 -
acaggtcacctccacttatatg

SEQ ID NO: 146570 - DNA, 22 bp, Artificial Sequence
  Synthetic oligonucleotide; TTA chr11 5208869 5208890 5208874 5208869 -
caggtcacctccacttatatga

SEQ ID NO: 146571 - DNA, 22 bp, Artificial Sequence
  Synthetic oligonucleotide; CTC chr11 5208858 5208879 5208863 5208858 -
cacttatatgacctatggacct

SEQ ID NO: 146572 - DNA, 22 bp, Artificial Sequence
  Synthetic oligonucleotide; CTT chr11 5208853 5208874 5208858 5208853 -
atatgacctatggacctcttaa

SEQ ID NO: 146573 - DNA, 22 bp, Artificial Sequence
  Synthetic oligonucleotide; TTA chr11 5208852 5208873 5208857 5208852 -
tatgacctatggacctcttaaa

SEQ ID NO: 146574 - DNA, 22 bp, Artificial Sequence
  Synthetic oligonucleotide; CTA chr11 5208843 5208864 5208848 5208843 -
tggacctcttaaactcagcgag

SEQ ID NO: 146575 - DNA, 22 bp, Artificial Sequence
  Synthetic oligonucleotide; CTC chr11 5208835 5208856 5208840 5208835 -
ttaaactcagcgagttgaaaag

SEQ ID NO: 146576 - DNA, 22 bp, Artificial Sequence
  Synthetic oligonucleotide; CTT chr11 5208833 5208854 5208838 5208833 -
aaactcagcgagttgaaaagat

SEQ ID NO: 146577 - DNA, 22 bp, Artificial Sequence
  Synthetic oligonucleotide; TTA chr11 5208832 5208853 5208837 5208832 -
aactcagcgagttgaaaagata

SEQ ID NO: 146578 - DNA, 22 bp, Artificial Sequence
  Synthetic oligonucleotide; CTC chr11 5208827 5208848 5208832 5208827 -
agcgagttgaaaagatagtaaa

SEQ ID NO: 146579 - DNA, 22 bp, Artificial Sequence
  Synthetic oligonucleotide; TTG chr11 5208818 5208839 5208823 5208818 -
aaaagatagtaaattatcctcc

SEQ ID NO: 146580 - DNA, 22 bp, Artificial Sequence
  Synthetic oligonucleotide; TTA chr11 5208802 5208823 5208807 5208802 -
tcctccacttctttcagtttcc

SEQ ID NO: 146581 - DNA, 22 bp, Artificial Sequence
  Synthetic oligonucleotide; CTC chr11 5208797 5208818 5208802 5208797 -
cacttctttcagtttcctctaa

SEQ ID NO: 146582 - DNA, 22 bp, Artificial Sequence
  Synthetic oligonucleotide; CTT chr11 5208792 5208813 5208797 5208792 -
ctttcagtttcctctaatgctt

SEQ ID NO: 146583 - DNA, 22 bp, Artificial Sequence
  Synthetic oligonucleotide; TTC chr11 5208791 5208812 5208796 5208791 -
tttcagtttcctctaatgcttc

SEQ ID NO: 146584 - DNA, 22 bp, Artificial Sequence
  Synthetic oligonucleotide; CTT chr11 5208789 5208810 5208794 5208789 -
tcagtttcctctaatgcttcca

SEQ ID NO: 146585 - DNA, 22 bp, Artificial Sequence
  Synthetic oligonucleotide; TTT chr11 5208788 5208809 5208793 5208788 -
cagtttcctctaatgcttccaa

SEQ ID NO: 146586 - DNA, 22 bp, Artificial Sequence
  Synthetic oligonucleotide; TTC chr11 5208787 5208808 5208792 5208787 -
agtttcctctaatgcttccaaa

SEQ ID NO: 146587 - DNA, 22 bp, Artificial Sequence
  Synthetic oligonucleotide; TTT chr11 5208782 5208803 5208787 5208782 -
cctctaatgcttccaaacttga

SEQ ID NO: 146588 - DNA, 22 bp, Artificial Sequence
  Synthetic oligonucleotide; TTC chr11 5208781 5208802 5208786 5208781 -
ctctaatgcttccaaacttgat

SEQ ID NO: 146589 - DNA, 22 bp, Artificial Sequence
  Synthetic oligonucleotide; CTC chr11 5208778 5208799 5208783 5208778 -
taatgcttccaaacttgatgaa

SEQ ID NO: 146590 - DNA, 22 bp, Artificial Sequence
  Synthetic oligonucleotide; CTA chr11 5208776 5208797 5208781 5208776 -
atgcttccaaacttgatgaatg

SEQ ID NO: 146591 - DNA, 22 bp, Artificial Sequence
  Synthetic oligonucleotide; CTT chr11 5208770 5208791 5208775 5208770 -
ccaaacttgatgaatggttcac

SEQ ID NO: 146592 - DNA, 22 bp, Artificial Sequence
  Synthetic oligonucleotide; TTC chr11 5208769 5208790 5208774 5208769 -
caaacttgatgaatggttcact

SEQ ID NO: 146593 - DNA, 22 bp, Artificial Sequence
  Synthetic oligonucleotide; CTT chr11 5208762 5208783 5208767 5208762 -
gatgaatggttcactcagattt

SEQ ID NO: 146594 - DNA, 22 bp, Artificial Sequence
  Synthetic oligonucleotide; TTG chr11 5208761 5208782 5208766 5208761 -
atgaatggttcactcagatttc

SEQ ID NO: 146595 - DNA, 22 bp, Artificial Sequence
  Synthetic oligonucleotide; TTC chr11 5208750 5208771 5208755 5208750 -
actcagatttccaagacaaaat

SEQ ID NO: 146596 - DNA, 22 bp, Artificial Sequence
  Synthetic oligonucleotide; CTC chr11 5208746 5208767 5208751 5208746 -
agatttccaagacaaaattttg

SEQ ID NO: 146597 - DNA, 22 bp, Artificial Sequence
  Synthetic oligonucleotide; TTT chr11 5208740 5208761 5208745 5208740 -
ccaagacaaaattttgtcaatc

SEQ ID NO: 146598 - DNA, 22 bp, Artificial Sequence
  Synthetic oligonucleotide; TTC chr11 5208739 5208760 5208744 5208739 -
caagacaaaattttgtcaatca

SEQ ID NO: 146599 - DNA, 22 bp, Artificial Sequence
  Synthetic oligonucleotide; TTT chr11 5208726 5208747 5208731 5208726 -
tgtcaatcatttttgcctttac

SEQ ID NO: 146600 - DNA, 22 bp, Artificial Sequence
  Synthetic oligonucleotide; TTT chr11 5208725 5208746 5208730 5208725 -
gtcaatcatttttgcctttact

SEQ ID NO: 146601 - DNA, 22 bp, Artificial Sequence
  Synthetic oligonucleotide; TTG chr11 5208724 5208745 5208729 5208724 -
tcaatcatttttgcctttactc

SEQ ID NO: 146602 - DNA, 22 bp, Artificial Sequence
  Synthetic oligonucleotide; TTT chr11 5208714 5208735 5208719 5208714 -
ttgcctttactctccactctct

SEQ ID NO: 146603 - DNA, 22 bp, Artificial Sequence
  Synthetic oligonucleotide; TTT chr11 5208713 5208734 5208718 5208713 -
tgcctttactctccactctctt

SEQ ID NO: 146604 - DNA, 22 bp, Artificial Sequence
  Synthetic oligonucleotide; TTT chr11 5208712 5208733 5208717 5208712 -
gcctttactctccactctcttc

SEQ ID NO: 146605 - DNA, 22 bp, Artificial Sequence
  Synthetic oligonucleotide; TTG chr11 5208711 5208732 5208716 5208711 -
cctttactctccactctcttct

SEQ ID NO: 146606 - DNA, 22 bp, Artificial Sequence
  Synthetic oligonucleotide; CTT chr11 5208707 5208728 5208712 5208707 -
tactctccactctcttctatcc

SEQ ID NO: 146607 - DNA, 22 bp, Artificial Sequence
  Synthetic oligonucleotide; TTT chr11 5208706 5208727 5208711 5208706 -
actctccactctcttctatccc

SEQ ID NO: 146608 - DNA, 22 bp, Artificial Sequence
  Synthetic oligonucleotide; TTA chr11 5208705 5208726 5208710 5208705 -
ctctccactctcttctatccct

SEQ ID NO: 146609 - DNA, 22 bp, Artificial Sequence
  Synthetic oligonucleotide; CTC chr11 5208702 5208723 5208707 5208702 -
tccactctcttctatcccttat

SEQ ID NO: 146610 - DNA, 22 bp, Artificial Sequence
  Synthetic oligonucleotide; CTC chr11 5208700 5208721 5208705 5208700 -
cactctcttctatcccttatat

SEQ ID NO: 146611 - DNA, 22 bp, Artificial Sequence
  Synthetic oligonucleotide; CTC chr11 5208695 5208716 5208700 5208695 -
tcttctatcccttatatatatt

SEQ ID NO: 146612 - DNA, 22 bp, Artificial Sequence
  Synthetic oligonucleotide; CTC chr11 5208693 5208714 5208698 5208693 -
ttctatcccttatatatattta

SEQ ID NO: 146613 - DNA, 22 bp, Artificial Sequence
  Synthetic oligonucleotide; CTT chr11 5208691 5208712 5208696 5208691 -
ctatcccttatatatatttaat

SEQ ID NO: 146614 - DNA, 22 bp, Artificial Sequence
  Synthetic oligonucleotide; TTC chr11 5208690 5208711 5208695 5208690 -
tatcccttatatatatttaata

SEQ ID NO: 146615 - DNA, 22 bp, Artificial Sequence
  Synthetic oligonucleotide; CTA chr11 5208688 5208709 5208693 5208688 -
tcccttatatatatttaataat

SEQ ID NO: 146616 - DNA, 22 bp, Artificial Sequence
  Synthetic oligonucleotide; CTT chr11 5208682 5208703 5208687 5208682 -
atatatatttaataatcaattt

SEQ ID NO: 146617 - DNA, 22 bp, Artificial Sequence
  Synthetic oligonucleotide; TTA chr11 5208681 5208702 5208686 5208681 -
tatatatttaataatcaatttc

SEQ ID NO: 146618 - DNA, 22 bp, Artificial Sequence
  Synthetic oligonucleotide; TTT chr11 5208672 5208693 5208677 5208672 -
aataatcaatttctcacaacta

SEQ ID NO: 146619 - DNA, 22 bp, Artificial Sequence
  Synthetic oligonucleotide; TTA chr11 5208671 5208692 5208676 5208671 -
ataatcaatttctcacaactag

SEQ ID NO: 146620 - DNA, 22 bp, Artificial Sequence
  Synthetic oligonucleotide; TTT chr11 5208660 5208681 5208665 5208660 -
ctcacaactagaattattatca

SEQ ID NO: 146621 - DNA, 22 bp, Artificial Sequence
  Synthetic oligonucleotide; TTC chr11 5208659 5208680 5208664 5208659 -
tcacaactagaattattatcat

SEQ ID NO: 146622 - DNA, 22 bp, Artificial Sequence
  Synthetic oligonucleotide; CTC chr11 5208657 5208678 5208662 5208657 -
acaactagaattattatcataa

SEQ ID NO: 146623 - DNA, 22 bp, Artificial Sequence
  Synthetic oligonucleotide; CTA chr11 5208650 5208671 5208655 5208650 -
gaattattatcataaatactga

SEQ ID NO: 146624 - DNA, 22 bp, Artificial Sequence
  Synthetic oligonucleotide; TTA chr11 5208644 5208665 5208649 5208644 -
ttatcataaatactgatagctt

SEQ ID NO: 146625 - DNA, 22 bp, Artificial Sequence
  Synthetic oligonucleotide; TTA chr11 5208641 5208662 5208646 5208641 -
tcataaatactgatagcttttg

SEQ ID NO: 146626 - DNA, 22 bp, Artificial Sequence
  Synthetic oligonucleotide; CTG chr11 5208629 5208650 5208634 5208629 -
atagcttttgagtggcagataa

SEQ ID NO: 146627 - DNA, 22 bp, Artificial Sequence
  Synthetic oligonucleotide; CTT chr11 5208622 5208643 5208627 5208622 -
ttgagtggcagataatgagccg

SEQ ID NO: 146628 - DNA, 22 bp, Artificial Sequence
  Synthetic oligonucleotide; TTT chr11 5208621 5208642 5208626 5208621 -
tgagtggcagataatgagccgt

SEQ ID NO: 146629 - DNA, 22 bp, Artificial Sequence
  Synthetic oligonucleotide; TTT chr11 5208620 5208641 5208625 5208620 -
gagtggcagataatgagccgtt

SEQ ID NO: 146630 - DNA, 22 bp, Artificial Sequence
  Synthetic oligonucleotide; TTG chr11 5208619 5208640 5208624 5208619 -
agtggcagataatgagccgttt

SEQ ID NO: 146631 - DNA, 22 bp, Artificial Sequence
  Synthetic oligonucleotide; TTT chr11 5208597 5208618 5208602 5208597 -
ttatatattatcatcataccaa

SEQ ID NO: 146632 - DNA, 22 bp, Artificial Sequence
  Synthetic oligonucleotide; TTT chr11 5208596 5208617 5208601 5208596 -
tatatattatcatcataccaac

SEQ ID NO: 146633 - DNA, 22 bp, Artificial Sequence
  Synthetic oligonucleotide; TTT chr11 5208595 5208616 5208600 5208595 -
atatattatcatcataccaaca

SEQ ID NO: 146634 - DNA, 22 bp, Artificial Sequence
  Synthetic oligonucleotide; TTA chr11 5208594 5208615 5208599 5208594 -
tatattatcatcataccaacaa

SEQ ID NO: 146635 - DNA, 22 bp, Artificial Sequence
  Synthetic oligonucleotide; TTA chr11 5208587 5208608 5208592 5208587 -
tcatcataccaacaatattttt

SEQ ID NO: 146636 - DNA, 22 bp, Artificial Sequence
  Synthetic oligonucleotide; TTT chr11 5208567 5208588 5208572 5208567 -
ttaaaaattgtgcagctaagtg

SEQ ID NO: 146637 - DNA, 22 bp, Artificial Sequence
  Synthetic oligonucleotide; TTT chr11 5208566 5208587 5208571 5208566 -
taaaaattgtgcagctaagtgt

SEQ ID NO: 146638 - DNA, 22 bp, Artificial Sequence
  Synthetic oligonucleotide; TTT chr11 5208565 5208586 5208570 5208565 -
aaaaattgtgcagctaagtgtt

SEQ ID NO: 146639 - DNA, 22 bp, Artificial Sequence
  Synthetic oligonucleotide; TTA chr11 5208564 5208585 5208569 5208564 -
aaaattgtgcagctaagtgttg

SEQ ID NO: 146640 - DNA, 22 bp, Artificial Sequence
  Synthetic oligonucleotide; TTG chr11 5208557 5208578 5208562 5208557 -
tgcagctaagtgttgagctaaa

SEQ ID NO: 146641 - DNA, 22 bp, Artificial Sequence
  Synthetic oligonucleotide; CTA chr11 5208549 5208570 5208554 5208549 -
agtgttgagctaaaaattatat

SEQ ID NO: 146642 - DNA, 22 bp, Artificial Sequence
  Synthetic oligonucleotide; TTG chr11 5208542 5208563 5208547 5208542 -
agctaaaaattatatacctaag

SEQ ID NO: 146643 - DNA, 22 bp, Artificial Sequence
  Synthetic oligonucleotide; CTA chr11 5208537 5208558 5208542 5208537 -
aaaattatatacctaagaaatg

SEQ ID NO: 146644 - DNA, 22 bp, Artificial Sequence
  Synthetic oligonucleotide; TTA chr11 5208530 5208551 5208535 5208530 -
tatacctaagaaatgacaaaac

SEQ ID NO: 146645 - DNA, 22 bp, Artificial Sequence
  Synthetic oligonucleotide; CTA chr11 5208522 5208543 5208527 5208522 -
agaaatgacaaaaccaagattt

SEQ ID NO: 146646 - DNA, 22 bp, Artificial Sequence
  Synthetic oligonucleotide; TTT chr11 5208500 5208521 5208505 5208500 -
gaaaccagttctcactgaccag

SEQ ID NO: 146647 - DNA, 22 bp, Artificial Sequence
  Synthetic oligonucleotide; TTG chr11 5208499 5208520 5208504 5208499 -
aaaccagttctcactgaccaga

SEQ ID NO: 146648 - DNA, 22 bp, Artificial Sequence
  Synthetic oligonucleotide; TTC chr11 5208489 5208510 5208494 5208489 -
tcactgaccagaagatcattct

SEQ ID NO: 146649 - DNA, 22 bp, Artificial Sequence
  Synthetic oligonucleotide; CTC chr11 5208487 5208508 5208492 5208487 -
actgaccagaagatcattcttt

SEQ ID NO: 146650 - DNA, 22 bp, Artificial Sequence
  Synthetic oligonucleotide; CTG chr11 5208483 5208504 5208488 5208483 -
accagaagatcattctttcagc

SEQ ID NO: 146651 - DNA, 22 bp, Artificial Sequence
  Synthetic oligonucleotide; TTC chr11 5208468 5208489 5208473 5208468 -
tttcagctaaggagctaattac

SEQ ID NO: 146652 - DNA, 22 bp, Artificial Sequence
  Synthetic oligonucleotide; CTT chr11 5208466 5208487 5208471 5208466 -
tcagctaaggagctaattactg

SEQ ID NO: 146653 - DNA, 22 bp, Artificial Sequence
  Synthetic oligonucleotide; TTT chr11 5208465 5208486 5208470 5208465 -
cagctaaggagctaattactgc

SEQ ID NO: 146654 - DNA, 22 bp, Artificial Sequence
  Synthetic oligonucleotide; TTC chr11 5208464 5208485 5208469 5208464 -
agctaaggagctaattactgcg

SEQ ID NO: 146655 - DNA, 22 bp, Artificial Sequence
  Synthetic oligonucleotide; CTA chr11 5208459 5208480 5208464 5208459 -
aggagctaattactgcgttcct

SEQ ID NO: 146656 - DNA, 22 bp, Artificial Sequence
  Synthetic oligonucleotide; CTA chr11 5208451 5208472 5208456 5208451 -
attactgcgttccttcatagtt

SEQ ID NO: 146657 - DNA, 22 bp, Artificial Sequence
  Synthetic oligonucleotide; TTA chr11 5208447 5208468 5208452 5208447 -
ctgcgttccttcatagtttttt

SEQ ID NO: 146658 - DNA, 22 bp, Artificial Sequence
  Synthetic oligonucleotide; CTG chr11 5208444 5208465 5208449 5208444 -
cgttccttcatagttttttttt

SEQ ID NO: 146659 - DNA, 22 bp, Artificial Sequence
  Synthetic oligonucleotide; TTC chr11 5208439 5208460 5208444 5208439 -
cttcatagtttttttttttcct

SEQ ID NO: 146660 - DNA, 22 bp, Artificial Sequence
  Synthetic oligonucleotide; CTT chr11 5208436 5208457 5208441 5208436 -
catagtttttttttttcctctc

SEQ ID NO: 146661 - DNA, 22 bp, Artificial Sequence
  Synthetic oligonucleotide; TTC chr11 5208435 5208456 5208440 5208435 -
atagtttttttttttcctctca

SEQ ID NO: 146662 - DNA, 22 bp, Artificial Sequence
  Synthetic oligonucleotide; TTT chr11 5208428 5208449 5208433 5208428 -
ttttttttcctctcaggtattc

SEQ ID NO: 146663 - DNA, 22 bp, Artificial Sequence
  Synthetic oligonucleotide; TTT chr11 5208427 5208448 5208432 5208427 -
tttttttcctctcaggtattcc

SEQ ID NO: 146664 - DNA, 22 bp, Artificial Sequence
  Synthetic oligonucleotide; TTT chr11 5208426 5208447 5208431 5208426 -
ttttttcctctcaggtattccc

SEQ ID NO: 146665 - DNA, 22 bp, Artificial Sequence
  Synthetic oligonucleotide; TTT chr11 5208425 5208446 5208430 5208425 -
tttttcctctcaggtattccct

SEQ ID NO: 146666 - DNA, 22 bp, Artificial Sequence
  Synthetic oligonucleotide; TTT chr11 5208424 5208445 5208429 5208424 -
ttttcctctcaggtattccctg

SEQ ID NO: 146667 - DNA, 22 bp, Artificial Sequence
  Synthetic oligonucleotide; TTT chr11 5208423 5208444 5208428 5208423 -
tttcctctcaggtattccctga

SEQ ID NO: 146668 - DNA, 22 bp, Artificial Sequence
  Synthetic oligonucleotide; TTT chr11 5208422 5208443 5208427 5208422 -
ttcctctcaggtattccctgaa

SEQ ID NO: 146669 - DNA, 22 bp, Artificial Sequence
  Synthetic oligonucleotide; TTT chr11 5208421 5208442 5208426 5208421 -
tcctctcaggtattccctgaaa

SEQ ID NO: 146670 - DNA, 22 bp, Artificial Sequence
  Synthetic oligonucleotide; TTT chr11 5208420 5208441 5208425 5208420 -
cctctcaggtattccctgaaat

SEQ ID NO: 146671 - DNA, 22 bp, Artificial Sequence
  Synthetic oligonucleotide; TTC chr11 5208419 5208440 5208424 5208419 -
ctctcaggtattccctgaaata

SEQ ID NO: 146672 - DNA, 22 bp, Artificial Sequence
  Synthetic oligonucleotide; CTC chr11 5208416 5208437 5208421 5208416 -
tcaggtattccctgaaatatgc

SEQ ID NO: 146673 - DNA, 22 bp, Artificial Sequence
  Synthetic oligonucleotide; CTC chr11 5208414 5208435 5208419 5208414 -
aggtattccctgaaatatgcat

SEQ ID NO: 146674 - DNA, 22 bp, Artificial Sequence
  Synthetic oligonucleotide; TTC chr11 5208406 5208427 5208411 5208406 -
cctgaaatatgcattttcttgg

SEQ ID NO: 146675 - DNA, 22 bp, Artificial Sequence
  Synthetic oligonucleotide; CTG chr11 5208402 5208423 5208407 5208402 -
aaatatgcattttcttggtcct

SEQ ID NO: 146676 - DNA, 22 bp, Artificial Sequence
  Synthetic oligonucleotide; TTT chr11 5208390 5208411 5208395 5208390 -
tcttggtcctactctactcaaa

SEQ ID NO: 146677 - DNA, 22 bp, Artificial Sequence
  Synthetic oligonucleotide; TTT chr11 5208389 5208410 5208394 5208389 -
cttggtcctactctactcaaat

SEQ ID NO: 146678 - DNA, 22 bp, Artificial Sequence
  Synthetic oligonucleotide; TTC chr11 5208388 5208409 5208393 5208388 -
ttggtcctactctactcaaatt

SEQ ID NO: 146679 - DNA, 22 bp, Artificial Sequence
  Synthetic oligonucleotide; CTT chr11 5208386 5208407 5208391 5208386 -
ggtcctactctactcaaatttc

SEQ ID NO: 146680 - DNA, 22 bp, Artificial Sequence
  Synthetic oligonucleotide; TTG chr11 5208385 5208406 5208390 5208385 -
gtcctactctactcaaatttca

SEQ ID NO: 146681 - DNA, 22 bp, Artificial Sequence
  Synthetic oligonucleotide; CTA chr11 5208379 5208400 5208384 5208379 -
ctctactcaaatttcaaaccac

SEQ ID NO: 146682 - DNA, 22 bp, Artificial Sequence
  Synthetic oligonucleotide; CTC chr11 5208376 5208397 5208381 5208376 -
tactcaaatttcaaaccactat

SEQ ID NO: 146683 - DNA, 22 bp, Artificial Sequence
  Synthetic oligonucleotide; CTA chr11 5208374 5208395 5208379 5208374 -
ctcaaatttcaaaccactatta

SEQ ID NO: 146684 - DNA, 22 bp, Artificial Sequence
  Synthetic oligonucleotide; CTC chr11 5208371 5208392 5208376 5208371 -
aaatttcaaaccactattattt

SEQ ID NO: 146685 - DNA, 22 bp, Artificial Sequence
  Synthetic oligonucleotide; TTT chr11 5208365 5208386 5208370 5208365 -
caaaccactattatttcatgcc

SEQ ID NO: 146686 - DNA, 22 bp, Artificial Sequence
  Synthetic oligonucleotide; TTC chr11 5208364 5208385 5208369 5208364 -
aaaccactattatttcatgccc

SEQ ID NO: 146687 - DNA, 22 bp, Artificial Sequence
  Synthetic oligonucleotide; CTA chr11 5208355 5208376 5208360 5208355 -
ttatttcatgcccttcaataac

SEQ ID NO: 146688 - DNA, 22 bp, Artificial Sequence
  Synthetic oligonucleotide; TTA chr11 5208352 5208373 5208357 5208352 -
tttcatgcccttcaataacttc

SEQ ID NO: 146689 - DNA, 22 bp, Artificial Sequence
  Synthetic oligonucleotide; TTT chr11 5208349 5208370 5208354 5208349 -
catgcccttcaataacttctaa

SEQ ID NO: 146690 - DNA, 22 bp, Artificial Sequence
  Synthetic oligonucleotide; TTC chr11 5208348 5208369 5208353 5208348 -
atgcccttcaataacttctaac

SEQ ID NO: 146691 - DNA, 22 bp, Artificial Sequence
  Synthetic oligonucleotide; CTT chr11 5208340 5208361 5208345 5208340 -
caataacttctaaccggttcta

SEQ ID NO: 146692 - DNA, 22 bp, Artificial Sequence
  Synthetic oligonucleotide; TTC chr11 5208339 5208360 5208344 5208339 -
aataacttctaaccggttctat

SEQ ID NO: 146693 - DNA, 22 bp, Artificial Sequence
  Synthetic oligonucleotide; CTT chr11 5208331 5208352 5208336 5208331 -
ctaaccggttctattttcctat

SEQ ID NO: 146694 - DNA, 22 bp, Artificial Sequence
  Synthetic oligonucleotide; TTC chr11 5208330 5208351 5208335 5208330 -
taaccggttctattttcctatt

SEQ ID NO: 146695 - DNA, 22 bp, Artificial Sequence
  Synthetic oligonucleotide; CTA chr11 5208328 5208349 5208333 5208328 -
accggttctattttcctatttg

SEQ ID NO: 146696 - DNA, 22 bp, Artificial Sequence
  Synthetic oligonucleotide; TTC chr11 5208320 5208341 5208325 5208320 -
tattttcctatttgtgtcttgc

SEQ ID NO: 146697 - DNA, 22 bp, Artificial Sequence
  Synthetic oligonucleotide; CTA chr11 5208318 5208339 5208323 5208318 -
ttttcctatttgtgtcttgcaa

SEQ ID NO: 146698 - DNA, 22 bp, Artificial Sequence
  Synthetic oligonucleotide; TTT chr11 5208315 5208336 5208320 5208315 -
tcctatttgtgtcttgcaacat

SEQ ID NO: 146699 - DNA, 22 bp, Artificial Sequence
  Synthetic oligonucleotide; TTT chr11 5208314 5208335 5208319 5208314 -
cctatttgtgtcttgcaacatg

SEQ ID NO: 146700 - DNA, 22 bp, Artificial Sequence
  Synthetic oligonucleotide; TTC chr11 5208313 5208334 5208318 5208313 -
ctatttgtgtcttgcaacatgg

SEQ ID NO: 146701 - DNA, 22 bp, Artificial Sequence
  Synthetic oligonucleotide; CTA chr11 5208310 5208331 5208315 5208310 -
tttgtgtcttgcaacatgggat

SEQ ID NO: 146702 - DNA, 22 bp, Artificial Sequence
  Synthetic oligonucleotide; TTT chr11 5208307 5208328 5208312 5208307 -
gtgtcttgcaacatgggataat

SEQ ID NO: 146703 - DNA, 22 bp, Artificial Sequence
  Synthetic oligonucleotide; TTG chr11 5208306 5208327 5208311 5208306 -
tgtcttgcaacatgggataata

SEQ ID NO: 146704 - DNA, 22 bp, Artificial Sequence
  Synthetic oligonucleotide; CTT chr11 5208300 5208321 5208305 5208300 -
gcaacatgggataataggttct

SEQ ID NO: 146705 - DNA, 22 bp, Artificial Sequence
  Synthetic oligonucleotide; TTG chr11 5208299 5208320 5208304 5208299 -
caacatgggataataggttctg

SEQ ID NO: 146706 - DNA, 22 bp, Artificial Sequence
  Synthetic oligonucleotide; TTC chr11 5208279 5208300 5208284 5208279 -
tggcatgagacagcccgggctc

SEQ ID NO: 146707 - DNA, 22 bp, Artificial Sequence
  Synthetic oligonucleotide; CTG chr11 5208277 5208298 5208282 5208277 -
gcatgagacagcccgggctcta

SEQ ID NO: 146708 - DNA, 22 bp, Artificial Sequence
  Synthetic oligonucleotide; CTC chr11 5208257 5208278 5208262 5208257 -
tactctcaggtccataagttaa

SEQ ID NO: 146709 - DNA, 22 bp, Artificial Sequence
  Synthetic oligonucleotide; CTA chr11 5208255 5208276 5208260 5208255 -
ctctcaggtccataagttaata

SEQ ID NO: 146710 - DNA, 22 bp, Artificial Sequence
  Synthetic oligonucleotide; CTC chr11 5208252 5208273 5208257 5208252 -
tcaggtccataagttaatagct

SEQ ID NO: 146711 - DNA, 22 bp, Artificial Sequence
  Synthetic oligonucleotide; CTC chr11 5208250 5208271 5208255 5208250 -
aggtccataagttaatagcttt

SEQ ID NO: 146712 - DNA, 22 bp, Artificial Sequence
  Synthetic oligonucleotide; TTA chr11 5208236 5208257 5208241 5208236 -
atagctttgttttgaggataag

SEQ ID NO: 146713 - DNA, 22 bp, Artificial Sequence
  Synthetic oligonucleotide; CTT chr11 5208229 5208250 5208234 5208229 -
tgttttgaggataagttacttc

SEQ ID NO: 146714 - DNA, 22 bp, Artificial Sequence
  Synthetic oligonucleotide; TTT chr11 5208228 5208249 5208233 5208228 -
gttttgaggataagttacttct

SEQ ID NO: 146715 - DNA, 22 bp, Artificial Sequence
  Synthetic oligonucleotide; TTG chr11 5208227 5208248 5208232 5208227 -
ttttgaggataagttacttctc

SEQ ID NO: 146716 - DNA, 22 bp, Artificial Sequence
  Synthetic oligonucleotide; TTT chr11 5208224 5208245 5208229 5208224 -
tgaggataagttacttctctat

SEQ ID NO: 146717 - DNA, 22 bp, Artificial Sequence
  Synthetic oligonucleotide; TTT chr11 5208223 5208244 5208228 5208223 -
gaggataagttacttctctatg

SEQ ID NO: 146718 - DNA, 22 bp, Artificial Sequence
  Synthetic oligonucleotide; TTG chr11 5208222 5208243 5208227 5208222 -
aggataagttacttctctatgc

SEQ ID NO: 146719 - DNA, 22 bp, Artificial Sequence
  Synthetic oligonucleotide; TTA chr11 5208211 5208232 5208216 5208211 -
cttctctatgccttacattcct

SEQ ID NO: 146720 - DNA, 22 bp, Artificial Sequence
  Synthetic oligonucleotide; CTT chr11 5208208 5208229 5208213 5208208 -
ctctatgccttacattcctcaa

SEQ ID NO: 146721 - DNA, 22 bp, Artificial Sequence
  Synthetic oligonucleotide; TTC chr11 5208207 5208228 5208212 5208207 -
tctatgccttacattcctcaat

SEQ ID NO: 146722 - DNA, 22 bp, Artificial Sequence
  Synthetic oligonucleotide; CTC chr11 5208205 5208226 5208210 5208205 -
tatgccttacattcctcaataa

SEQ ID NO: 146723 - DNA, 22 bp, Artificial Sequence
  Synthetic oligonucleotide; CTA chr11 5208203 5208224 5208208 5208203 -
tgccttacattcctcaataata

SEQ ID NO: 146724 - DNA, 22 bp, Artificial Sequence
  Synthetic oligonucleotide; CTT chr11 5208197 5208218 5208202 5208197 -
acattcctcaataataaattaa

SEQ ID NO: 146725 - DNA, 22 bp, Artificial Sequence
  Synthetic oligonucleotide; TTA chr11 5208196 5208217 5208201 5208196 -
cattcctcaataataaattaag

SEQ ID NO: 146726 - DNA, 22 bp, Artificial Sequence
  Synthetic oligonucleotide; TTC chr11 5208191 5208212 5208196 5208191 -
ctcaataataaattaagagcta

SEQ ID NO: 146727 - DNA, 22 bp, Artificial Sequence
  Synthetic oligonucleotide; CTC chr11 5208188 5208209 5208193 5208188 -
aataataaattaagagctataa

SEQ ID NO: 146728 - DNA, 22 bp, Artificial Sequence
  Synthetic oligonucleotide; TTA chr11 5208176 5208197 5208181 5208176 -
agagctataatggaatctactt

SEQ ID NO: 146729 - DNA, 22 bp, Artificial Sequence
  Synthetic oligonucleotide; CTA chr11 5208169 5208190 5208174 5208169 -
taatggaatctactttataaat

SEQ ID NO: 146730 - DNA, 22 bp, Artificial Sequence
  Synthetic oligonucleotide; CTA chr11 5208157 5208178 5208162 5208157 -
ctttataaatttcttatagtga

SEQ ID NO: 146731 - DNA, 22 bp, Artificial Sequence
  Synthetic oligonucleotide; CTT chr11 5208154 5208175 5208159 5208154 -
tataaatttcttatagtgagta

SEQ ID NO: 146732 - DNA, 22 bp, Artificial Sequence
  Synthetic oligonucleotide; TTT chr11 5208153 5208174 5208158 5208153 -
ataaatttcttatagtgagtaa

SEQ ID NO: 146733 - DNA, 22 bp, Artificial Sequence
  Synthetic oligonucleotide; TTA chr11 5208152 5208173 5208157 5208152 -
taaatttcttatagtgagtaaa

SEQ ID NO: 146734 - DNA, 22 bp, Artificial Sequence
  Synthetic oligonucleotide; TTT chr11 5208145 5208166 5208150 5208145 -
cttatagtgagtaaattaacat

SEQ ID NO: 146735 - DNA, 22 bp, Artificial Sequence
  Synthetic oligonucleotide; TTC chr11 5208144 5208165 5208149 5208144 -
ttatagtgagtaaattaacata

SEQ ID NO: 146736 - DNA, 22 bp, Artificial Sequence
  Synthetic oligonucleotide; CTT chr11 5208142 5208163 5208147 5208142 -
atagtgagtaaattaacataaa

SEQ ID NO: 146737 - DNA, 22 bp, Artificial Sequence
  Synthetic oligonucleotide; TTA chr11 5208141 5208162 5208146 5208141 -
tagtgagtaaattaacataaat

SEQ ID NO: 146738 - DNA, 22 bp, Artificial Sequence
  Synthetic oligonucleotide; TTA chr11 5208127 5208148 5208132 5208127 -
acataaattccttcgaaaaatg

SEQ ID NO: 146739 - DNA, 22 bp, Artificial Sequence
  Synthetic oligonucleotide; TTC chr11 5208117 5208138 5208122 5208117 -
cttcgaaaaatgacaaaccaaa

SEQ ID NO: 146740 - DNA, 22 bp, Artificial Sequence
  Synthetic oligonucleotide; CTT chr11 5208114 5208135 5208119 5208114 -
cgaaaaatgacaaaccaaataa

SEQ ID NO: 146741 - DNA, 22 bp, Artificial Sequence
  Synthetic oligonucleotide; TTC chr11 5208113 5208134 5208118 5208113 -
gaaaaatgacaaaccaaataag

SEQ ID NO: 146742 - DNA, 22 bp, Artificial Sequence
  Synthetic oligonucleotide; TTC chr11 5208088 5208109 5208093 5208088 -
ccagtaaatattaactttttat

SEQ ID NO: 146743 - DNA, 22 bp, Artificial Sequence
  Synthetic oligonucleotide; TTA chr11 5208075 5208096 5208080 5208075 -
actttttatcatgatgatcatg

SEQ ID NO: 146744 - DNA, 22 bp, Artificial Sequence
  Synthetic oligonucleotide; CTT chr11 5208071 5208092 5208076 5208071 -
tttatcatgatgatcatggtga

SEQ ID NO: 146745 - DNA, 22 bp, Artificial Sequence
  Synthetic oligonucleotide; TTT chr11 5208070 5208091 5208075 5208070 -
ttatcatgatgatcatggtgat

SEQ ID NO: 146746 - DNA, 22 bp, Artificial Sequence
  Synthetic oligonucleotide; TTT chr11 5208069 5208090 5208074 5208069 -
tatcatgatgatcatggtgata

SEQ ID NO: 146747 - DNA, 22 bp, Artificial Sequence
  Synthetic oligonucleotide; TTT chr11 5208068 5208089 5208073 5208068 -
atcatgatgatcatggtgatat

SEQ ID NO: 146748 - DNA, 22 bp, Artificial Sequence
  Synthetic oligonucleotide; TTA chr11 5208067 5208088 5208072 5208067 -
tcatgatgatcatggtgatatt

SEQ ID NO: 146749 - DNA, 22 bp, Artificial Sequence
  Synthetic oligonucleotide; TTA chr11 5208044 5208065 5208049 5208044 -
ataataaaactaaaattataat

SEQ ID NO: 146750 - DNA, 22 bp, Artificial Sequence
  Synthetic oligonucleotide; CTA chr11 5208032 5208053 5208037 5208032 -
aaattataatttttttcttcac

SEQ ID NO: 146751 - DNA, 22 bp, Artificial Sequence
  Synthetic oligonucleotide; TTA chr11 5208026 5208047 5208031 5208026 -
taatttttttcttcacctatag

SEQ ID NO: 146752 - DNA, 22 bp, Artificial Sequence
  Synthetic oligonucleotide; TTT chr11 5208020 5208041 5208025 5208020 -
ttttcttcacctatagccacag

SEQ ID NO: 146753 - DNA, 22 bp, Artificial Sequence
  Synthetic oligonucleotide; TTT chr11 5208019 5208040 5208024 5208019 -
tttcttcacctatagccacagt

SEQ ID NO: 146754 - DNA, 22 bp, Artificial Sequence
  Synthetic oligonucleotide; TTT chr11 5208018 5208039 5208023 5208018 -
ttcttcacctatagccacagtc

SEQ ID NO: 146755 - DNA, 22 bp, Artificial Sequence
  Synthetic oligonucleotide; TTT chr11 5208017 5208038 5208022 5208017 -
tcttcacctatagccacagtca

SEQ ID NO: 146756 - DNA, 22 bp, Artificial Sequence
  Synthetic oligonucleotide; TTT chr11 5208016 5208037 5208021 5208016 -
cttcacctatagccacagtcag

SEQ ID NO: 146757 - DNA, 22 bp, Artificial Sequence
  Synthetic oligonucleotide; TTC chr11 5208015 5208036 5208020 5208015 -
ttcacctatagccacagtcagc

SEQ ID NO: 146758 - DNA, 22 bp, Artificial Sequence
  Synthetic oligonucleotide; CTT chr11 5208013 5208034 5208018 5208013 -
cacctatagccacagtcagctt

SEQ ID NO: 146759 - DNA, 22 bp, Artificial Sequence
  Synthetic oligonucleotide; TTC chr11 5208012 5208033 5208017 5208012 -
acctatagccacagtcagcttc

SEQ ID NO: 146760 - DNA, 22 bp, Artificial Sequence
  Synthetic oligonucleotide; CTA chr11 5208007 5208028 5208012 5208007 -
tagccacagtcagcttctcaaa

SEQ ID NO: 146761 - DNA, 22 bp, Artificial Sequence
  Synthetic oligonucleotide; CTT chr11 5207991 5208012 5207996 5207991 -
ctcaaagacaaatatgattatg

SEQ ID NO: 146762 - DNA, 22 bp, Artificial Sequence
  Synthetic oligonucleotide; TTC chr11 5207990 5208011 5207995 5207990 -
tcaaagacaaatatgattatgc

SEQ ID NO: 146763 - DNA, 22 bp, Artificial Sequence
  Synthetic oligonucleotide; CTC chr11 5207988 5208009 5207993 5207988 -
aaagacaaatatgattatgcct

SEQ ID NO: 146764 - DNA, 22 bp, Artificial Sequence
  Synthetic oligonucleotide; TTA chr11 5207971 5207992 5207976 5207971 -
tgcctcacctttttatgatcta

SEQ ID NO: 146765 - DNA, 22 bp, Artificial Sequence
  Synthetic oligonucleotide; CTC chr11 5207965 5207986 5207970 5207965 -
acctttttatgatctaatagct

SEQ ID NO: 146766 - DNA, 22 bp, Artificial Sequence
  Synthetic oligonucleotide; CTT chr11 5207960 5207981 5207965 5207960 -
tttatgatctaatagctactaa

SEQ ID NO: 146767 - DNA, 22 bp, Artificial Sequence
  Synthetic oligonucleotide; TTT chr11 5207959 5207980 5207964 5207959 -
ttatgatctaatagctactaat

SEQ ID NO: 146768 - DNA, 22 bp, Artificial Sequence
  Synthetic oligonucleotide; TTT chr11 5207958 5207979 5207963 5207958 -
tatgatctaatagctactaatt

SEQ ID NO: 146769 - DNA, 22 bp, Artificial Sequence
  Synthetic oligonucleotide; TTT chr11 5207957 5207978 5207962 5207957 -
atgatctaatagctactaattt

SEQ ID NO: 146770 - DNA, 22 bp, Artificial Sequence
  Synthetic oligonucleotide; TTA chr11 5207956 5207977 5207961 5207956 -
tgatctaatagctactaatttc

SEQ ID NO: 146771 - DNA, 22 bp, Artificial Sequence
  Synthetic oligonucleotide; CTA chr11 5207949 5207970 5207954 5207949 -
atagctactaatttctccacgc

SEQ ID NO: 146772 - DNA, 22 bp, Artificial Sequence
  Synthetic oligonucleotide; CTA chr11 5207942 5207963 5207947 5207942 -
ctaatttctccacgctgacgtt

SEQ ID NO: 146773 - DNA, 22 bp, Artificial Sequence
  Synthetic oligonucleotide; CTA chr11 5207939 5207960 5207944 5207939 -
atttctccacgctgacgtttac

SEQ ID NO: 146774 - DNA, 22 bp, Artificial Sequence
  Synthetic oligonucleotide; TTT chr11 5207935 5207956 5207940 5207935 -
ctccacgctgacgtttaccaca

SEQ ID NO: 146775 - DNA, 22 bp, Artificial Sequence
  Synthetic oligonucleotide; TTC chr11 5207934 5207955 5207939 5207934 -
tccacgctgacgtttaccacag

SEQ ID NO: 146776 - DNA, 22 bp, Artificial Sequence
  Synthetic oligonucleotide; CTC chr11 5207932 5207953 5207937 5207932 -
cacgctgacgtttaccacagaa

SEQ ID NO: 146777 - DNA, 22 bp, Artificial Sequence
  Synthetic oligonucleotide; CTG chr11 5207925 5207946 5207930 5207925 -
acgtttaccacagaacctggac

SEQ ID NO: 146778 - DNA, 22 bp, Artificial Sequence
  Synthetic oligonucleotide; TTT chr11 5207919 5207940 5207924 5207919 -
accacagaacctggacataggt

SEQ ID NO: 146779 - DNA, 22 bp, Artificial Sequence
  Synthetic oligonucleotide; TTA chr11 5207918 5207939 5207923 5207918 -
ccacagaacctggacataggtg

SEQ ID NO: 146780 - DNA, 22 bp, Artificial Sequence
  Synthetic oligonucleotide; CTG chr11 5207906 5207927 5207911 5207906 -
gacataggtgttgcacacacta

SEQ ID NO: 146781 - DNA, 22 bp, Artificial Sequence
  Synthetic oligonucleotide; TTG chr11 5207893 5207914 5207898 5207893 -
cacacactatgatctctaataa

SEQ ID NO: 146782 - DNA, 22 bp, Artificial Sequence
  Synthetic oligonucleotide; CTA chr11 5207884 5207905 5207889 5207884 -
tgatctctaataaataaataaa

SEQ ID NO: 146783 - DNA, 22 bp, Artificial Sequence
  Synthetic oligonucleotide; CTC chr11 5207877 5207898 5207882 5207877 -
taataaataaataaaataaata

SEQ ID NO: 146784 - DNA, 22 bp, Artificial Sequence
  Synthetic oligonucleotide; CTA chr11 5207875 5207896 5207880 5207875 -
ataaataaataaaataaataaa

SEQ ID NO: 146785 - DNA, 22 bp, Artificial Sequence
  Synthetic oligonucleotide; TTG chr11 5207817 5207838 5207822 5207817 -
agtgaatatgttatatgctacg

SEQ ID NO: 146786 - DNA, 22 bp, Artificial Sequence
  Synthetic oligonucleotide; TTA chr11 5207804 5207825 5207809 5207804 -
tatgctacggcaccagtggtct

SEQ ID NO: 146787 - DNA, 22 bp, Artificial Sequence
  Synthetic oligonucleotide; CTA chr11 5207797 5207818 5207802 5207797 -
cggcaccagtggtctttctggg

SEQ ID NO: 146788 - DNA, 22 bp, Artificial Sequence
  Synthetic oligonucleotide; CTT chr11 5207781 5207802 5207786 5207781 -
tctgggtattgtacacttgccc

SEQ ID NO: 146789 - DNA, 22 bp, Artificial Sequence
  Synthetic oligonucleotide; TTT chr11 5207780 5207801 5207785 5207780 -
ctgggtattgtacacttgcccc

SEQ ID NO: 146790 - DNA, 22 bp, Artificial Sequence
  Synthetic oligonucleotide; TTC chr11 5207779 5207800 5207784 5207779 -
tgggtattgtacacttgcccca

SEQ ID NO: 146791 - DNA, 22 bp, Artificial Sequence
  Synthetic oligonucleotide; CTG chr11 5207777 5207798 5207782 5207777 -
ggtattgtacacttgccccatt

SEQ ID NO: 146792 - DNA, 22 bp, Artificial Sequence
  Synthetic oligonucleotide; TTG chr11 5207770 5207791 5207775 5207770 -
tacacttgccccattctaggac

SEQ ID NO: 146793 - DNA, 22 bp, Artificial Sequence
  Synthetic oligonucleotide; CTT chr11 5207763 5207784 5207768 5207763 -
gccccattctaggacaatggtt

SEQ ID NO: 146794 - DNA, 22 bp, Artificial Sequence
  Synthetic oligonucleotide; TTG chr11 5207762 5207783 5207767 5207762 -
ccccattctaggacaatggttc

SEQ ID NO: 146795 - DNA, 22 bp, Artificial Sequence
  Synthetic oligonucleotide; TTC chr11 5207754 5207775 5207759 5207754 -
taggacaatggttccttctgat

SEQ ID NO: 146796 - DNA, 22 bp, Artificial Sequence
  Synthetic oligonucleotide; CTA chr11 5207752 5207773 5207757 5207752 -
ggacaatggttccttctgatta

SEQ ID NO: 146797 - DNA, 22 bp, Artificial Sequence
  Synthetic oligonucleotide; TTC chr11 5207740 5207761 5207745 5207740 -
cttctgattagttaccttttcc

SEQ ID NO: 146798 - DNA, 22 bp, Artificial Sequence
  Synthetic oligonucleotide; CTT chr11 5207737 5207758 5207742 5207737 -
ctgattagttaccttttccagt

SEQ ID NO: 146799 - DNA, 22 bp, Artificial Sequence
  Synthetic oligonucleotide; TTC chr11 5207736 5207757 5207741 5207736 -
tgattagttaccttttccagtc

SEQ ID NO: 146800 - DNA, 22 bp, Artificial Sequence
  Synthetic oligonucleotide; CTG chr11 5207734 5207755 5207739 5207734 -
attagttaccttttccagtctg

SEQ ID NO: 146801 - DNA, 22 bp, Artificial Sequence
  Synthetic oligonucleotide; TTA chr11 5207730 5207751 5207735 5207730 -
gttaccttttccagtctgagag

SEQ ID NO: 146802 - DNA, 22 bp, Artificial Sequence
  Synthetic oligonucleotide; TTA chr11 5207726 5207747 5207731 5207726 -
ccttttccagtctgagagacat

SEQ ID NO: 146803 - DNA, 22 bp, Artificial Sequence
  Synthetic oligonucleotide; CTT chr11 5207722 5207743 5207727 5207722 -
ttccagtctgagagacatgcct

SEQ ID NO: 146804 - DNA, 22 bp, Artificial Sequence
  Synthetic oligonucleotide; TTT chr11 5207721 5207742 5207726 5207721 -
tccagtctgagagacatgcctg

SEQ ID NO: 146805 - DNA, 22 bp, Artificial Sequence
  Synthetic oligonucleotide; TTT chr11 5207720 5207741 5207725 5207720 -
ccagtctgagagacatgcctgg

SEQ ID NO: 146806 - DNA, 22 bp, Artificial Sequence
  Synthetic oligonucleotide; TTC chr11 5207719 5207740 5207724 5207719 -
cagtctgagagacatgcctggc

SEQ ID NO: 146807 - DNA, 22 bp, Artificial Sequence
  Synthetic oligonucleotide; CTG chr11 5207712 5207733 5207717 5207712 -
agagacatgcctggctcacacc

SEQ ID NO: 146808 - DNA, 22 bp, Artificial Sequence
  Synthetic oligonucleotide; CTG chr11 5207699 5207720 5207704 5207699 -
gctcacacctgatttgtaaggc

SEQ ID NO: 146809 - DNA, 22 bp, Artificial Sequence
  Synthetic oligonucleotide; CTC chr11 5207695 5207716 5207700 5207695 -
acacctgatttgtaaggcaatg

SEQ ID NO: 146810 - DNA, 22 bp, Artificial Sequence
  Synthetic oligonucleotide; CTG chr11 5207688 5207709 5207693 5207688 -
atttgtaaggcaatggagatgg

SEQ ID NO: 146811 - DNA, 22 bp, Artificial Sequence
  Synthetic oligonucleotide; TTT chr11 5207684 5207705 5207689 5207684 -
gtaaggcaatggagatggagac

SEQ ID NO: 146812 - DNA, 22 bp, Artificial Sequence
  Synthetic oligonucleotide; TTG chr11 5207683 5207704 5207688 5207683 -
taaggcaatggagatggagaca

SEQ ID NO: 146813 - DNA, 22 bp, Artificial Sequence
  Synthetic oligonucleotide; CTC chr11 5207658 5207679 5207663 5207658 -
ttatatccaaaagtacatagct

SEQ ID NO: 146814 - DNA, 22 bp, Artificial Sequence
  Synthetic oligonucleotide; CTT chr11 5207656 5207677 5207661 5207656 -
atatccaaaagtacatagctcc

SEQ ID NO: 146815 - DNA, 22 bp, Artificial Sequence
  Synthetic oligonucleotide; TTA chr11 5207655 5207676 5207660 5207655 -
tatccaaaagtacatagctccg

SEQ ID NO: 146816 - DNA, 22 bp, Artificial Sequence
  Synthetic oligonucleotide; CTC chr11 5207635 5207656 5207640 5207635 -
cggtagcttagataataaacct

SEQ ID NO: 146817 - DNA, 22 bp, Artificial Sequence
  Synthetic oligonucleotide; CTT chr11 5207626 5207647 5207631 5207626 -
agataataaacctttgtcacct

SEQ ID NO: 146818 - DNA, 22 bp, Artificial Sequence
  Synthetic oligonucleotide; TTA chr11 5207625 5207646 5207630 5207625 -
gataataaacctttgtcacctc

SEQ ID NO: 146819 - DNA, 22 bp, Artificial Sequence
  Synthetic oligonucleotide; CTT chr11 5207612 5207633 5207617 5207612 -
tgtcacctctagagaattctaa

SEQ ID NO: 146820 - DNA, 22 bp, Artificial Sequence
  Synthetic oligonucleotide; TTT chr11 5207611 5207632 5207616 5207611 -
gtcacctctagagaattctaaa

SEQ ID NO: 146821 - DNA, 22 bp, Artificial Sequence
  Synthetic oligonucleotide; TTG chr11 5207610 5207631 5207615 5207610 -
tcacctctagagaattctaaaa

SEQ ID NO: 146822 - DNA, 22 bp, Artificial Sequence
  Synthetic oligonucleotide; CTC chr11 5207603 5207624 5207608 5207603 -
tagagaattctaaaaatccaca

SEQ ID NO: 146823 - DNA, 22 bp, Artificial Sequence
  Synthetic oligonucleotide; CTA chr11 5207601 5207622 5207606 5207601 -
gagaattctaaaaatccacaga

SEQ ID NO: 146824 - DNA, 22 bp, Artificial Sequence
  Synthetic oligonucleotide; TTC chr11 5207593 5207614 5207598 5207593 -
taaaaatccacagatttagaaa

SEQ ID NO: 146825 - DNA, 22 bp, Artificial Sequence
  Synthetic oligonucleotide; CTA chr11 5207591 5207612 5207596 5207591 -
aaaatccacagatttagaaatt

SEQ ID NO: 146826 - DNA, 22 bp, Artificial Sequence
  Synthetic oligonucleotide; TTT chr11 5207576 5207597 5207581 5207576 -
agaaattctaggaatccaagaa

SEQ ID NO: 146827 - DNA, 22 bp, Artificial Sequence
  Synthetic oligonucleotide; TTA chr11 5207575 5207596 5207580 5207575 -
gaaattctaggaatccaagaaa

SEQ ID NO: 146828 - DNA, 22 bp, Artificial Sequence
  Synthetic oligonucleotide; TTC chr11 5207568 5207589 5207573 5207568 -
taggaatccaagaaattacaat

SEQ ID NO: 146829 - DNA, 22 bp, Artificial Sequence
  Synthetic oligonucleotide; CTA chr11 5207566 5207587 5207571 5207566 -
ggaatccaagaaattacaattt

SEQ ID NO: 146830 - DNA, 22 bp, Artificial Sequence
  Synthetic oligonucleotide; TTA chr11 5207550 5207571 5207555 5207550 -
caattttagatctactacaatt

SEQ ID NO: 146831 - DNA, 22 bp, Artificial Sequence
  Synthetic oligonucleotide; TTT chr11 5207544 5207565 5207549 5207544 -
tagatctactacaatttcacaa

SEQ ID NO: 146832 - DNA, 22 bp, Artificial Sequence
  Synthetic oligonucleotide; TTT chr11 5207543 5207564 5207548 5207543 -
agatctactacaatttcacaat

SEQ ID NO: 146833 - DNA, 22 bp, Artificial Sequence
  Synthetic oligonucleotide; TTA chr11 5207542 5207563 5207547 5207542 -
gatctactacaatttcacaata

SEQ ID NO: 146834 - DNA, 22 bp, Artificial Sequence
  Synthetic oligonucleotide; CTA chr11 5207536 5207557 5207541 5207536 -
ctacaatttcacaatataacaa

SEQ ID NO: 146835 - DNA, 22 bp, Artificial Sequence
  Synthetic oligonucleotide; CTA chr11 5207533 5207554 5207538 5207533 -
caatttcacaatataacaataa

SEQ ID NO: 146836 - DNA, 22 bp, Artificial Sequence
  Synthetic oligonucleotide; TTT chr11 5207527 5207548 5207532 5207527 -
cacaatataacaataaccaata

SEQ ID NO: 146837 - DNA, 22 bp, Artificial Sequence
  Synthetic oligonucleotide; TTC chr11 5207526 5207547 5207531 5207526 -
acaatataacaataaccaataa

SEQ ID NO: 146838 - DNA, 22 bp, Artificial Sequence
  Synthetic oligonucleotide; TTT chr11 5207492 5207513 5207497 5207492 -
tatttacataaataaaagatgg

SEQ ID NO: 146839 - DNA, 22 bp, Artificial Sequence
  Synthetic oligonucleotide; TTT chr11 5207491 5207512 5207496 5207491 -
atttacataaataaaagatggg

SEQ ID NO: 146840 - DNA, 22 bp, Artificial Sequence
  Synthetic oligonucleotide; TTA chr11 5207490 5207511 5207495 5207490 -
tttacataaataaaagatgggt

SEQ ID NO: 146841 - DNA, 22 bp, Artificial Sequence
  Synthetic oligonucleotide; TTT chr11 5207487 5207508 5207492 5207487 -
acataaataaaagatgggtttg

SEQ ID NO: 146842 - DNA, 22 bp, Artificial Sequence
  Synthetic oligonucleotide; TTA chr11 5207486 5207507 5207491 5207486 -
cataaataaaagatgggtttgt

SEQ ID NO: 146843 - DNA, 22 bp, Artificial Sequence
  Synthetic oligonucleotide; TTT chr11 5207466 5207487 5207471 5207466 -
gtcacacaatttaaaaatctag

SEQ ID NO: 146844 - DNA, 22 bp, Artificial Sequence
  Synthetic oligonucleotide; TTG chr11 5207465 5207486 5207470 5207465 -
tcacacaatttaaaaatctagg

SEQ ID NO: 146845 - DNA, 22 bp, Artificial Sequence
  Synthetic oligonucleotide; TTT chr11 5207454 5207475 5207459 5207454 -
aaaaatctagggtcgaaagcca

SEQ ID NO: 146846 - DNA, 22 bp, Artificial Sequence
  Synthetic oligonucleotide; TTA chr11 5207453 5207474 5207458 5207453 -
aaaatctagggtcgaaagccac

SEQ ID NO: 146847 - DNA, 22 bp, Artificial Sequence
  Synthetic oligonucleotide; CTA chr11 5207445 5207466 5207450 5207445 -
gggtcgaaagccacagcaaagg

SEQ ID NO: 146848 - DNA, 22 bp, Artificial Sequence
  Synthetic oligonucleotide; CTC chr11 5207416 5207437 5207421 5207416 -
ctggcactatatcacaatagat

SEQ ID NO: 146849 - DNA, 22 bp, Artificial Sequence
  Synthetic oligonucleotide; CTG chr11 5207413 5207434 5207418 5207413 -
gcactatatcacaatagatgac

SEQ ID NO: 146850 - DNA, 22 bp, Artificial Sequence
  Synthetic oligonucleotide; CTA chr11 5207407 5207428 5207412 5207407 -
tatcacaatagatgacacctgc

SEQ ID NO: 146851 - DNA, 22 bp, Artificial Sequence
  Synthetic oligonucleotide; CTG chr11 5207386 5207407 5207391 5207386 -
catagagaaagcaaagtggtca

SEQ ID NO: 146852 - DNA, 22 bp, Artificial Sequence
  Synthetic oligonucleotide; TTA chr11 5207359 5207380 5207364 5207359 -
gtcactgattgcctcaaataat

SEQ ID NO: 146853 - DNA, 22 bp, Artificial Sequence
  Synthetic oligonucleotide; CTG chr11 5207352 5207373 5207357 5207352 -
attgcctcaaataatccctgtg

SEQ ID NO: 146854 - DNA, 22 bp, Artificial Sequence
  Synthetic oligonucleotide; TTG chr11 5207348 5207369 5207353 5207348 -
cctcaaataatccctgtgggga

SEQ ID NO: 146855 - DNA, 22 bp, Artificial Sequence
  Synthetic oligonucleotide; CTC chr11 5207344 5207365 5207349 5207344 -
aaataatccctgtggggatgtc

SEQ ID NO: 146856 - DNA, 22 bp, Artificial Sequence
  Synthetic oligonucleotide; CTG chr11 5207332 5207353 5207337 5207332 -
tggggatgtctactcttttgta

SEQ ID NO: 146857 - DNA, 22 bp, Artificial Sequence
  Synthetic oligonucleotide; CTA chr11 5207320 5207341 5207325 5207320 -
ctcttttgtattccatcagctt

SEQ ID NO: 146858 - DNA, 22 bp, Artificial Sequence
  Synthetic oligonucleotide; CTC chr11 5207317 5207338 5207322 5207317 -
ttttgtattccatcagcttttt

SEQ ID NO: 146859 - DNA, 22 bp, Artificial Sequence
  Synthetic oligonucleotide; CTT chr11 5207315 5207336 5207320 5207315 -
ttgtattccatcagcttttttc

SEQ ID NO: 146860 - DNA, 22 bp, Artificial Sequence
  Synthetic oligonucleotide; TTT chr11 5207314 5207335 5207319 5207314 -
tgtattccatcagcttttttcc

SEQ ID NO: 146861 - DNA, 22 bp, Artificial Sequence
  Synthetic oligonucleotide; TTT chr11 5207313 5207334 5207318 5207313 -
gtattccatcagcttttttccc

SEQ ID NO: 146862 - DNA, 22 bp, Artificial Sequence
  Synthetic oligonucleotide; TTG chr11 5207312 5207333 5207317 5207312 -
tattccatcagcttttttccca

SEQ ID NO: 146863 - DNA, 22 bp, Artificial Sequence
  Synthetic oligonucleotide; TTC chr11 5207307 5207328 5207312 5207307 -
catcagcttttttcccagtaac

SEQ ID NO: 146864 - DNA, 22 bp, Artificial Sequence
  Synthetic oligonucleotide; CTT chr11 5207298 5207319 5207303 5207298 -
ttttcccagtaacaacacatcc

SEQ ID NO: 146865 - DNA, 22 bp, Artificial Sequence
  Synthetic oligonucleotide; TTT chr11 5207297 5207318 5207302 5207297 -
tttcccagtaacaacacatcct

SEQ ID NO: 146866 - DNA, 22 bp, Artificial Sequence
  Synthetic oligonucleotide; TTT chr11 5207296 5207317 5207301 5207296 -
ttcccagtaacaacacatccta

SEQ ID NO: 146867 - DNA, 22 bp, Artificial Sequence
  Synthetic oligonucleotide; TTT chr11 5207295 5207316 5207300 5207295 -
tcccagtaacaacacatcctag

SEQ ID NO: 146868 - DNA, 22 bp, Artificial Sequence
  Synthetic oligonucleotide; TTT chr11 5207294 5207315 5207299 5207294 -
cccagtaacaacacatcctagc

SEQ ID NO: 146869 - DNA, 22 bp, Artificial Sequence
  Synthetic oligonucleotide; TTC chr11 5207293 5207314 5207298 5207293 -
ccagtaacaacacatcctagca

SEQ ID NO: 146870 - DNA, 22 bp, Artificial Sequence
  Synthetic oligonucleotide; CTA chr11 5207274 5207295 5207279 5207274 -
gcaataatatcctgacgagttt

SEQ ID NO: 146871 - DNA, 22 bp, Artificial Sequence
  Synthetic oligonucleotide; CTG chr11 5207260 5207281 5207265 5207260 -
acgagtttctataaaaaaaaaa

SEQ ID NO: 146872 - DNA, 22 bp, Artificial Sequence
  Synthetic oligonucleotide; TTT chr11 5207252 5207273 5207257 5207252 -
ctataaaaaaaaaaaactcccc

SEQ ID NO: 146873 - DNA, 22 bp, Artificial Sequence
  Synthetic oligonucleotide; TTC chr11 5207251 5207272 5207256 5207251 -
tataaaaaaaaaaaactcccct

SEQ ID NO: 146874 - DNA, 22 bp, Artificial Sequence
  Synthetic oligonucleotide; CTA chr11 5207249 5207270 5207254 5207249 -
taaaaaaaaaaaactcccctcc

SEQ ID NO: 146875 - DNA, 22 bp, Artificial Sequence
  Synthetic oligonucleotide; CTC chr11 5207233 5207254 5207238 5207233 -
ccctcctaagatacagtatctt

SEQ ID NO: 146876 - DNA, 22 bp, Artificial Sequence
  Synthetic oligonucleotide; CTC chr11 5207228 5207249 5207233 5207228 -
ctaagatacagtatctttgtgg

SEQ ID NO: 146877 - DNA, 22 bp, Artificial Sequence
  Synthetic oligonucleotide; CTA chr11 5207225 5207246 5207230 5207225 -
agatacagtatctttgtggttg

SEQ ID NO: 146878 - DNA, 22 bp, Artificial Sequence
  Synthetic oligonucleotide; CTT chr11 5207211 5207232 5207216 5207211 -
tgtggttgcatccccagccatc

SEQ ID NO: 146879 - DNA, 22 bp, Artificial Sequence
  Synthetic oligonucleotide; TTT chr11 5207210 5207231 5207215 5207210 -
gtggttgcatccccagccatcc

SEQ ID NO: 146880 - DNA, 22 bp, Artificial Sequence
  Synthetic oligonucleotide; TTG chr11 5207209 5207230 5207214 5207209 -
tggttgcatccccagccatccc

SEQ ID NO: 146881 - DNA, 22 bp, Artificial Sequence
  Synthetic oligonucleotide; TTG chr11 5207203 5207224 5207208 5207203 -
catccccagccatccctcattt

SEQ ID NO: 146882 - DNA, 22 bp, Artificial Sequence
  Synthetic oligonucleotide; CTC chr11 5207185 5207206 5207190 5207185 -
atttggttgaggttggaatttc

SEQ ID NO: 146883 - DNA, 22 bp, Artificial Sequence
  Synthetic oligonucleotide; TTT chr11 5207181 5207202 5207186 5207181 -
ggttgaggttggaatttcaatg

SEQ ID NO: 146884 - DNA, 22 bp, Artificial Sequence
  Synthetic oligonucleotide; TTG chr11 5207180 5207201 5207185 5207180 -
gttgaggttggaatttcaatgg

SEQ ID NO: 146885 - DNA, 22 bp, Artificial Sequence
  Synthetic oligonucleotide; TTG chr11 5207176 5207197 5207181 5207176 -
aggttggaatttcaatgggtgg

SEQ ID NO: 146886 - DNA, 22 bp, Artificial Sequence
  Synthetic oligonucleotide; TTG chr11 5207170 5207191 5207175 5207170 -
gaatttcaatgggtgggttgaa

SEQ ID NO: 146887 - DNA, 22 bp, Artificial Sequence
  Synthetic oligonucleotide; TTT chr11 5207164 5207185 5207169 5207164 -
caatgggtgggttgaatttttc

SEQ ID NO: 146888 - DNA, 22 bp, Artificial Sequence
  Synthetic oligonucleotide; TTC chr11 5207163 5207184 5207168 5207163 -
aatgggtgggttgaatttttcc

SEQ ID NO: 146889 - DNA, 22 bp, Artificial Sequence
  Synthetic oligonucleotide; TTG chr11 5207150 5207171 5207155 5207150 -
aatttttccctaaacaaacttg

SEQ ID NO: 146890 - DNA, 22 bp, Artificial Sequence
  Synthetic oligonucleotide; TTT chr11 5207145 5207166 5207150 5207145 -
ttccctaaacaaacttgccatg

SEQ ID NO: 146891 - DNA, 22 bp, Artificial Sequence
  Synthetic oligonucleotide; TTT chr11 5207144 5207165 5207149 5207144 -
tccctaaacaaacttgccatgg

SEQ ID NO: 146892 - DNA, 22 bp, Artificial Sequence
  Synthetic oligonucleotide; TTT chr11 5207143 5207164 5207148 5207143 -
ccctaaacaaacttgccatggt

SEQ ID NO: 146893 - DNA, 22 bp, Artificial Sequence
  Synthetic oligonucleotide; TTC chr11 5207142 5207163 5207147 5207142 -
cctaaacaaacttgccatggta

SEQ ID NO: 146894 - DNA, 22 bp, Artificial Sequence
  Synthetic oligonucleotide; CTA chr11 5207138 5207159 5207143 5207138 -
aacaaacttgccatggtaaaat

SEQ ID NO: 146895 - DNA, 22 bp, Artificial Sequence
  Synthetic oligonucleotide; CTT chr11 5207129 5207150 5207134 5207129 -
gccatggtaaaatcaaggctag

SEQ ID NO: 146896 - DNA, 22 bp, Artificial Sequence
  Synthetic oligonucleotide; TTG chr11 5207128 5207149 5207133 5207128 -
ccatggtaaaatcaaggctagc

SEQ ID NO: 146897 - DNA, 22 bp, Artificial Sequence
  Synthetic oligonucleotide; CTA chr11 5207108 5207129 5207113 5207108 -
gcattactgttcacacaaggca

SEQ ID NO: 146898 - DNA, 22 bp, Artificial Sequence
  Synthetic oligonucleotide; TTA chr11 5207102 5207123 5207107 5207102 -
ctgttcacacaaggcactgtgc

SEQ ID NO: 146899 - DNA, 22 bp, Artificial Sequence
  Synthetic oligonucleotide; CTG chr11 5207099 5207120 5207104 5207099 -
ttcacacaaggcactgtgctaa

SEQ ID NO: 146900 - DNA, 22 bp, Artificial Sequence
  Synthetic oligonucleotide; TTC chr11 5207096 5207117 5207101 5207096 -
acacaaggcactgtgctaagat

SEQ ID NO: 146901 - DNA, 22 bp, Artificial Sequence
  Synthetic oligonucleotide; CTG chr11 5207083 5207104 5207088 5207083 -
tgctaagatccccatccttata

SEQ ID NO: 146902 - DNA, 22 bp, Artificial Sequence
  Synthetic oligonucleotide; CTA chr11 5207078 5207099 5207083 5207078 -
agatccccatccttatagcaat

SEQ ID NO: 146903 - DNA, 22 bp, Artificial Sequence
  Synthetic oligonucleotide; CTT chr11 5207064 5207085 5207069 5207064 -
atagcaatgggagggctcatag

SEQ ID NO: 146904 - DNA, 22 bp, Artificial Sequence
  Synthetic oligonucleotide; TTA chr11 5207063 5207084 5207068 5207063 -
tagcaatgggagggctcatagg

SEQ ID NO: 146905 - DNA, 22 bp, Artificial Sequence
  Synthetic oligonucleotide; CTC chr11 5207046 5207067 5207051 5207046 -
ataggcaagtcatgtcatgcag

SEQ ID NO: 146906 - DNA, 22 bp, Artificial Sequence
  Synthetic oligonucleotide; TTT chr11 5207015 5207036 5207020 5207015 -
catcatcccttcttgtctttgg

SEQ ID NO: 146907 - DNA, 22 bp, Artificial Sequence
  Synthetic oligonucleotide; TTC chr11 5207014 5207035 5207019 5207014 -
atcatcccttcttgtctttggg

SEQ ID NO: 146908 - DNA, 22 bp, Artificial Sequence
  Synthetic oligonucleotide; CTT chr11 5207004 5207025 5207009 5207004 -
cttgtctttggggacttgggtc

SEQ ID NO: 146909 - DNA, 22 bp, Artificial Sequence
  Synthetic oligonucleotide; TTC chr11 5207003 5207024 5207008 5207003 -
ttgtctttggggacttgggtct

SEQ ID NO: 146910 - DNA, 22 bp, Artificial Sequence
  Synthetic oligonucleotide; CTT chr11 5207001 5207022 5207006 5207001 -
gtctttggggacttgggtctct

SEQ ID NO: 146911 - DNA, 22 bp, Artificial Sequence
  Synthetic oligonucleotide; TTG chr11 5207000 5207021 5207005 5207000 -
tctttggggacttgggtctctc

SEQ ID NO: 146912 - DNA, 22 bp, Artificial Sequence
  Synthetic oligonucleotide; CTT chr11 5206996 5207017 5207001 5206996 -
tggggacttgggtctctccggt

SEQ ID NO: 146913 - DNA, 22 bp, Artificial Sequence
  Synthetic oligonucleotide; TTT chr11 5206995 5207016 5207000 5206995 -
ggggacttgggtctctccggtt

SEQ ID NO: 146914 - DNA, 22 bp, Artificial Sequence
  Synthetic oligonucleotide; TTG chr11 5206994 5207015 5206999 5206994 -
gggacttgggtctctccggttg

SEQ ID NO: 146915 - DNA, 22 bp, Artificial Sequence
  Synthetic oligonucleotide; CTT chr11 5206987 5207008 5206992 5206987 -
gggtctctccggttgtatagga

SEQ ID NO: 146916 - DNA, 22 bp, Artificial Sequence
  Synthetic oligonucleotide; TTG chr11 5206986 5207007 5206991 5206986 -
ggtctctccggttgtataggag

SEQ ID NO: 146917 - DNA, 22 bp, Artificial Sequence
  Synthetic oligonucleotide; CTC chr11 5206980 5207001 5206985 5206980 -
tccggttgtataggagatttcg

SEQ ID NO: 146918 - DNA, 22 bp, Artificial Sequence
  Synthetic oligonucleotide; CTC chr11 5206978 5206999 5206983 5206978 -
cggttgtataggagatttcgcc

SEQ ID NO: 146919 - DNA, 22 bp, Artificial Sequence
  Synthetic oligonucleotide; TTG chr11 5206972 5206993 5206977 5206972 -
tataggagatttcgccaggcat

SEQ ID NO: 146920 - DNA, 22 bp, Artificial Sequence
  Synthetic oligonucleotide; TTT chr11 5206960 5206981 5206965 5206960 -
cgccaggcatttgaatccttca

SEQ ID NO: 146921 - DNA, 22 bp, Artificial Sequence
  Synthetic oligonucleotide; TTC chr11 5206959 5206980 5206964 5206959 -
gccaggcatttgaatccttcac

SEQ ID NO: 146922 - DNA, 22 bp, Artificial Sequence
  Synthetic oligonucleotide; TTT chr11 5206948 5206969 5206953 5206948 -
gaatccttcactgctagtcatc

SEQ ID NO: 146923 - DNA, 22 bp, Artificial Sequence
  Synthetic oligonucleotide; TTG chr11 5206947 5206968 5206952 5206947 -
aatccttcactgctagtcatcc

SEQ ID NO: 146924 - DNA, 22 bp, Artificial Sequence
  Synthetic oligonucleotide; CTT chr11 5206940 5206961 5206945 5206940 -
cactgctagtcatcctggactc

SEQ ID NO: 146925 - DNA, 22 bp, Artificial Sequence
  Synthetic oligonucleotide; TTC chr11 5206939 5206960 5206944 5206939 -
actgctagtcatcctggactct

SEQ ID NO: 146926 - DNA, 22 bp, Artificial Sequence
  Synthetic oligonucleotide; CTG chr11 5206935 5206956 5206940 5206935 -
ctagtcatcctggactctgtgg

SEQ ID NO: 146927 - DNA, 22 bp, Artificial Sequence
  Synthetic oligonucleotide; CTA chr11 5206932 5206953 5206937 5206932 -
gtcatcctggactctgtggtgt

SEQ ID NO: 146928 - DNA, 22 bp, Artificial Sequence
  Synthetic oligonucleotide; CTG chr11 5206923 5206944 5206928 5206923 -
gactctgtggtgtacaatatcc

SEQ ID NO: 146929 - DNA, 22 bp, Artificial Sequence
  Synthetic oligonucleotide; CTC chr11 5206918 5206939 5206923 5206918 -
tgtggtgtacaatatccatctc

SEQ ID NO: 146930 - DNA, 22 bp, Artificial Sequence
  Synthetic oligonucleotide; CTG chr11 5206916 5206937 5206921 5206916 -
tggtgtacaatatccatctctc

SEQ ID NO: 146931 - DNA, 22 bp, Artificial Sequence
  Synthetic oligonucleotide; CTC chr11 5206896 5206917 5206901 5206896 -
tcctatgttctgaggtcagaat

SEQ ID NO: 146932 - DNA, 22 bp, Artificial Sequence
  Synthetic oligonucleotide; CTC chr11 5206894 5206915 5206899 5206894 -
ctatgttctgaggtcagaatga

SEQ ID NO: 146933 - DNA, 22 bp, Artificial Sequence
  Synthetic oligonucleotide; CTA chr11 5206891 5206912 5206896 5206891 -
tgttctgaggtcagaatgacct

SEQ ID NO: 146934 - DNA, 22 bp, Artificial Sequence
  Synthetic oligonucleotide; TTC chr11 5206886 5206907 5206891 5206886 -
tgaggtcagaatgacctctctc

SEQ ID NO: 146935 - DNA, 22 bp, Artificial Sequence
  Synthetic oligonucleotide; CTG chr11 5206884 5206905 5206889 5206884 -
aggtcagaatgacctctctctt

SEQ ID NO: 146936 - DNA, 22 bp, Artificial Sequence
  Synthetic oligonucleotide; CTC chr11 5206868 5206889 5206873 5206868 -
tctcttaaccagttgtctgggc

SEQ ID NO: 146937 - DNA, 22 bp, Artificial Sequence
  Synthetic oligonucleotide; CTC chr11 5206866 5206887 5206871 5206866 -
tcttaaccagttgtctgggccc

SEQ ID NO: 146938 - DNA, 22 bp, Artificial Sequence
  Synthetic oligonucleotide; CTC chr11 5206864 5206885 5206869 5206864 -
ttaaccagttgtctgggcccag

SEQ ID NO: 146939 - DNA, 22 bp, Artificial Sequence
  Synthetic oligonucleotide; CTT chr11 5206862 5206883 5206867 5206862 -
aaccagttgtctgggcccaggc

SEQ ID NO: 146940 - DNA, 22 bp, Artificial Sequence
  Synthetic oligonucleotide; TTA chr11 5206861 5206882 5206866 5206861 -
accagttgtctgggcccaggct

SEQ ID NO: 146941 - DNA, 22 bp, Artificial Sequence
  Synthetic oligonucleotide; TTG chr11 5206853 5206874 5206858 5206853 -
tctgggcccaggctccattatt

SEQ ID NO: 146942 - DNA, 22 bp, Artificial Sequence
  Synthetic oligonucleotide; CTG chr11 5206849 5206870 5206854 5206849 -
ggcccaggctccattattgata

SEQ ID NO: 146943 - DNA, 22 bp, Artificial Sequence
  Synthetic oligonucleotide; CTC chr11 5206838 5206859 5206843 5206838 -
cattattgatatagtcatgatc

SEQ ID NO: 146944 - DNA, 22 bp, Artificial Sequence
  Synthetic oligonucleotide; TTA chr11 5206833 5206854 5206838 5206833 -
ttgatatagtcatgatctcctc

SEQ ID NO: 146945 - DNA, 22 bp, Artificial Sequence
  Synthetic oligonucleotide; TTG chr11 5206830 5206851 5206835 5206830 -
atatagtcatgatctcctctgt

SEQ ID NO: 146946 - DNA, 22 bp, Artificial Sequence
  Synthetic oligonucleotide; CTC chr11 5206814 5206835 5206819 5206814 -
ctctgttggggatgaagtaggc

SEQ ID NO: 146947 - DNA, 22 bp, Artificial Sequence
  Synthetic oligonucleotide; CTC chr11 5206811 5206832 5206816 5206811 -
tgttggggatgaagtaggcaaa

SEQ ID NO: 146948 - DNA, 22 bp, Artificial Sequence
  Synthetic oligonucleotide; CTG chr11 5206809 5206830 5206814 5206809 -
ttggggatgaagtaggcaaatt

SEQ ID NO: 146949 - DNA, 22 bp, Artificial Sequence
  Synthetic oligonucleotide; TTG chr11 5206806 5206827 5206811 5206806 -
gggatgaagtaggcaaatttga

SEQ ID NO: 146950 - DNA, 22 bp, Artificial Sequence
  Synthetic oligonucleotide; TTT chr11 5206786 5206807 5206791 5206786 -
gaggcactaatttacttctcac

SEQ ID NO: 146951 - DNA, 22 bp, Artificial Sequence
  Synthetic oligonucleotide; TTG chr11 5206785 5206806 5206790 5206785 -
aggcactaatttacttctcaca

SEQ ID NO: 146952 - DNA, 22 bp, Artificial Sequence
  Synthetic oligonucleotide; CTA chr11 5206777 5206798 5206782 5206777 -
atttacttctcacattcttttc

SEQ ID NO: 146953 - DNA, 22 bp, Artificial Sequence
  Synthetic oligonucleotide; TTT chr11 5206773 5206794 5206778 5206773 -
acttctcacattcttttcttga

SEQ ID NO: 146954 - DNA, 22 bp, Artificial Sequence
  Synthetic oligonucleotide; TTA chr11 5206772 5206793 5206777 5206772 -
cttctcacattcttttcttgaa

SEQ ID NO: 146955 - DNA, 22 bp, Artificial Sequence
  Synthetic oligonucleotide; CTT chr11 5206769 5206790 5206774 5206769 -
ctcacattcttttcttgaacag

SEQ ID NO: 146956 - DNA, 22 bp, Artificial Sequence
  Synthetic oligonucleotide; TTC chr11 5206768 5206789 5206773 5206768 -
tcacattcttttcttgaacaga

SEQ ID NO: 146957 - DNA, 22 bp, Artificial Sequence
  Synthetic oligonucleotide; CTC chr11 5206766 5206787 5206771 5206766 -
acattcttttcttgaacagaaa

SEQ ID NO: 146958 - DNA, 22 bp, Artificial Sequence
  Synthetic oligonucleotide; TTC chr11 5206760 5206781 5206765 5206760 -
ttttcttgaacagaaagataga

SEQ ID NO: 146959 - DNA, 22 bp, Artificial Sequence
  Synthetic oligonucleotide; CTT chr11 5206758 5206779 5206763 5206758 -
ttcttgaacagaaagatagaac

SEQ ID NO: 146960 - DNA, 22 bp, Artificial Sequence
  Synthetic oligonucleotide; TTT chr11 5206757 5206778 5206762 5206757 -
tcttgaacagaaagatagaact

SEQ ID NO: 146961 - DNA, 22 bp, Artificial Sequence
  Synthetic oligonucleotide; TTT chr11 5206756 5206777 5206761 5206756 -
cttgaacagaaagatagaactg

SEQ ID NO: 146962 - DNA, 22 bp, Artificial Sequence
  Synthetic oligonucleotide; TTC chr11 5206755 5206776 5206760 5206755 -
ttgaacagaaagatagaactgg

SEQ ID NO: 146963 - DNA, 22 bp, Artificial Sequence
  Synthetic oligonucleotide; CTT chr11 5206753 5206774 5206758 5206753 -
gaacagaaagatagaactggaa

SEQ ID NO: 146964 - DNA, 22 bp, Artificial Sequence
  Synthetic oligonucleotide; TTG chr11 5206752 5206773 5206757 5206752 -
aacagaaagatagaactggaaa

SEQ ID NO: 146965 - DNA, 22 bp, Artificial Sequence
  Synthetic oligonucleotide; CTG chr11 5206734 5206755 5206739 5206734 -
gaaattaatagtagtatataaa

SEQ ID NO: 146966 - DNA, 22 bp, Artificial Sequence
  Synthetic oligonucleotide; TTA chr11 5206727 5206748 5206732 5206727 -
atagtagtatataaattcaaaa

SEQ ID NO: 146967 - DNA, 22 bp, Artificial Sequence
  Synthetic oligonucleotide; TTC chr11 5206709 5206730 5206714 5206709 -
aaaattttagctttaataacat

SEQ ID NO: 146968 - DNA, 22 bp, Artificial Sequence
  Synthetic oligonucleotide; TTT chr11 5206702 5206723 5206707 5206702 -
tagctttaataacatttaatca

SEQ ID NO: 146969 - DNA, 22 bp, Artificial Sequence
  Synthetic oligonucleotide; TTT chr11 5206701 5206722 5206706 5206701 -
agctttaataacatttaatcag

SEQ ID NO: 146970 - DNA, 22 bp, Artificial Sequence
  Synthetic oligonucleotide; TTA chr11 5206700 5206721 5206705 5206700 -
gctttaataacatttaatcaga

SEQ ID NO: 146971 - DNA, 22 bp, Artificial Sequence
  Synthetic oligonucleotide; CTT chr11 5206696 5206717 5206701 5206696 -
taataacatttaatcagacata

SEQ ID NO: 146972 - DNA, 22 bp, Artificial Sequence
  Synthetic oligonucleotide; TTT chr11 5206695 5206716 5206700 5206695 -
aataacatttaatcagacataa

SEQ ID NO: 146973 - DNA, 22 bp, Artificial Sequence
  Synthetic oligonucleotide; TTA chr11 5206694 5206715 5206699 5206694 -
ataacatttaatcagacataaa

SEQ ID NO: 146974 - DNA, 22 bp, Artificial Sequence
  Synthetic oligonucleotide; TTT chr11 5206685 5206706 5206690 5206685 -
aatcagacataaataattatgg

SEQ ID NO: 146975 - DNA, 22 bp, Artificial Sequence
  Synthetic oligonucleotide; TTA chr11 5206684 5206705 5206689 5206684 -
atcagacataaataattatggt

SEQ ID NO: 146976 - DNA, 22 bp, Artificial Sequence
  Synthetic oligonucleotide; TTA chr11 5206666 5206687 5206671 5206666 -
tggtaatgtgaatttcaataaa

SEQ ID NO: 146977 - DNA, 22 bp, Artificial Sequence
  Synthetic oligonucleotide; TTT chr11 5206651 5206672 5206656 5206651 -
caataaataaattttagttcta

SEQ ID NO: 146978 - DNA, 22 bp, Artificial Sequence
  Synthetic oligonucleotide; TTC chr11 5206650 5206671 5206655 5206650 -
aataaataaattttagttctaa

SEQ ID NO: 146979 - DNA, 22 bp, Artificial Sequence
  Synthetic oligonucleotide; TTT chr11 5206637 5206658 5206642 5206637 -
tagttctaatataagtgtaact

SEQ ID NO: 146980 - DNA, 22 bp, Artificial Sequence
  Synthetic oligonucleotide; TTT chr11 5206636 5206657 5206641 5206636 -
agttctaatataagtgtaactg

SEQ ID NO: 146981 - DNA, 22 bp, Artificial Sequence
  Synthetic oligonucleotide; TTA chr11 5206635 5206656 5206640 5206635 -
gttctaatataagtgtaactgt

SEQ ID NO: 146982 - DNA, 22 bp, Artificial Sequence
  Synthetic oligonucleotide; TTC chr11 5206631 5206652 5206636 5206631 -
taatataagtgtaactgtgtaa

SEQ ID NO: 146983 - DNA, 22 bp, Artificial Sequence
  Synthetic oligonucleotide; CTA chr11 5206629 5206650 5206634 5206629 -
atataagtgtaactgtgtaata

SEQ ID NO: 146984 - DNA, 22 bp, Artificial Sequence
  Synthetic oligonucleotide; CTG chr11 5206614 5206635 5206619 5206614 -
tgtaatattcatactttttctg

SEQ ID NO: 146985 - DNA, 22 bp, Artificial Sequence
  Synthetic oligonucleotide; TTC chr11 5206604 5206625 5206609 5206604 -
atactttttctgaaggctttac

SEQ ID NO: 146986 - DNA, 22 bp, Artificial Sequence
  Synthetic oligonucleotide; CTT chr11 5206598 5206619 5206603 5206598 -
tttctgaaggctttactaattt

SEQ ID NO: 146987 - DNA, 22 bp, Artificial Sequence
  Synthetic oligonucleotide; TTT chr11 5206597 5206618 5206602 5206597 -
ttctgaaggctttactaatttg

SEQ ID NO: 146988 - DNA, 22 bp, Artificial Sequence
  Synthetic oligonucleotide; TTT chr11 5206596 5206617 5206601 5206596 -
tctgaaggctttactaatttga

SEQ ID NO: 146989 - DNA, 22 bp, Artificial Sequence
  Synthetic oligonucleotide; TTT chr11 5206595 5206616 5206600 5206595 -
ctgaaggctttactaatttgat

SEQ ID NO: 146990 - DNA, 22 bp, Artificial Sequence
  Synthetic oligonucleotide; TTC chr11 5206594 5206615 5206599 5206594 -
tgaaggctttactaatttgata

SEQ ID NO: 146991 - DNA, 22 bp, Artificial Sequence
  Synthetic oligonucleotide; CTG chr11 5206592 5206613 5206597 5206592 -
aaggctttactaatttgatatg

SEQ ID NO: 146992 - DNA, 22 bp, Artificial Sequence
  Synthetic oligonucleotide; CTT chr11 5206585 5206606 5206590 5206585 -
tactaatttgatatggcattac

SEQ ID NO: 146993 - DNA, 22 bp, Artificial Sequence
  Synthetic oligonucleotide; TTT chr11 5206584 5206605 5206589 5206584 -
actaatttgatatggcattact

SEQ ID NO: 146994 - DNA, 22 bp, Artificial Sequence
  Synthetic oligonucleotide; TTA chr11 5206583 5206604 5206588 5206583 -
ctaatttgatatggcattactt

SEQ ID NO: 146995 - DNA, 22 bp, Artificial Sequence
  Synthetic oligonucleotide; CTA chr11 5206580 5206601 5206585 5206580 -
atttgatatggcattacttttt

SEQ ID NO: 146996 - DNA, 22 bp, Artificial Sequence
  Synthetic oligonucleotide; TTT chr11 5206576 5206597 5206581 5206576 -
gatatggcattacttttttatt

SEQ ID NO: 146997 - DNA, 22 bp, Artificial Sequence
  Synthetic oligonucleotide; TTG chr11 5206575 5206596 5206580 5206575 -
atatggcattacttttttattg

SEQ ID NO: 146998 - DNA, 22 bp, Artificial Sequence
  Synthetic oligonucleotide; TTA chr11 5206564 5206585 5206569 5206564 -
cttttttattgctgccaaaact

SEQ ID NO: 146999 - DNA, 22 bp, Artificial Sequence
  Synthetic oligonucleotide; CTT chr11 5206561 5206582 5206566 5206561 -
ttttattgctgccaaaactatt

SEQ ID NO: 147000 - DNA, 22 bp, Artificial Sequence
  Synthetic oligonucleotide; TTT chr11 5206560 5206581 5206565 5206560 -
tttattgctgccaaaactattc

SEQ ID NO: 147001 - DNA, 22 bp, Artificial Sequence
  Synthetic oligonucleotide; TTT chr11 5206559 5206580 5206564 5206559 -
ttattgctgccaaaactattct

SEQ ID NO: 147002 - DNA, 22 bp, Artificial Sequence
  Synthetic oligonucleotide; TTT chr11 5206558 5206579 5206563 5206558 -
tattgctgccaaaactattctt

SEQ ID NO: 147003 - DNA, 22 bp, Artificial Sequence
  Synthetic oligonucleotide; TTT chr11 5206557 5206578 5206562 5206557 -
attgctgccaaaactattctta

SEQ ID NO: 147004 - DNA, 22 bp, Artificial Sequence
  Synthetic oligonucleotide; TTA chr11 5206556 5206577 5206561 5206556 -
ttgctgccaaaactattcttat

SEQ ID NO: 147005 - DNA, 22 bp, Artificial Sequence
  Synthetic oligonucleotide; TTG chr11 5206553 5206574 5206558 5206553 -
ctgccaaaactattcttattcc

SEQ ID NO: 147006 - DNA, 22 bp, Artificial Sequence
  Synthetic oligonucleotide; CTG chr11 5206550 5206571 5206555 5206550 -
ccaaaactattcttattccact

SEQ ID NO: 147007 - DNA, 22 bp, Artificial Sequence
  Synthetic oligonucleotide; CTA chr11 5206541 5206562 5206546 5206541 -
ttcttattccactgtgtggtga

SEQ ID NO: 147008 - DNA, 22 bp, Artificial Sequence
  Synthetic oligonucleotide; TTC chr11 5206538 5206559 5206543 5206538 -
ttattccactgtgtggtgatga

SEQ ID NO: 147009 - DNA, 22 bp, Artificial Sequence
  Synthetic oligonucleotide; CTT chr11 5206536 5206557 5206541 5206536 -
attccactgtgtggtgatgaga

SEQ ID NO: 147010 - DNA, 22 bp, Artificial Sequence
  Synthetic oligonucleotide; TTA chr11 5206535 5206556 5206540 5206535 -
ttccactgtgtggtgatgagaa

SEQ ID NO: 147011 - DNA, 22 bp, Artificial Sequence
  Synthetic oligonucleotide; TTC chr11 5206532 5206553 5206537 5206532 -
cactgtgtggtgatgagaaagt

SEQ ID NO: 147012 - DNA, 22 bp, Artificial Sequence
  Synthetic oligonucleotide; CTG chr11 5206527 5206548 5206532 5206527 -
tgtggtgatgagaaagtgagag

SEQ ID NO: 147013 - DNA, 22 bp, Artificial Sequence
  Synthetic oligonucleotide; TTC chr11 5206499 5206520 5206504 5206499 -
tggagatggtgattatagatag

SEQ ID NO: 147014 - DNA, 22 bp, Artificial Sequence
  Synthetic oligonucleotide; CTG chr11 5206497 5206518 5206502 5206497 -
gagatggtgattatagatagct

SEQ ID NO: 147015 - DNA, 22 bp, Artificial Sequence
  Synthetic oligonucleotide; TTA chr11 5206484 5206505 5206489 5206484 -
tagatagcttccctgaagccat

SEQ ID NO: 147016 - DNA, 22 bp, Artificial Sequence
  Synthetic oligonucleotide; CTT chr11 5206474 5206495 5206479 5206474 -
ccctgaagccatagtaaccccc

SEQ ID NO: 147017 - DNA, 22 bp, Artificial Sequence
  Synthetic oligonucleotide; TTC chr11 5206473 5206494 5206478 5206473 -
cctgaagccatagtaaccccct

SEQ ID NO: 147018 - DNA, 22 bp, Artificial Sequence
  Synthetic oligonucleotide; CTG chr11 5206469 5206490 5206474 5206469 -
aagccatagtaaccccctggag

SEQ ID NO: 147019 - DNA, 22 bp, Artificial Sequence
  Synthetic oligonucleotide; CTG chr11 5206450 5206471 5206455 5206450 -
gagaaaaattggacctggagtc

SEQ ID NO: 147020 - DNA, 22 bp, Artificial Sequence
  Synthetic oligonucleotide; TTG chr11 5206439 5206460 5206444 5206439 -
gacctggagtctagcagcctag

SEQ ID NO: 147021 - DNA, 22 bp, Artificial Sequence
  Synthetic oligonucleotide; CTG chr11 5206433 5206454 5206438 5206433 -
gagtctagcagcctaggtatgg

SEQ ID NO: 147022 - DNA, 22 bp, Artificial Sequence
  Synthetic oligonucleotide; CTA chr11 5206426 5206447 5206431 5206426 -
gcagcctaggtatgggtactcg

SEQ ID NO: 147023 - DNA, 22 bp, Artificial Sequence
  Synthetic oligonucleotide; CTA chr11 5206418 5206439 5206423 5206418 -
ggtatgggtactcgatttctta

SEQ ID NO: 147024 - DNA, 22 bp, Artificial Sequence
  Synthetic oligonucleotide; CTC chr11 5206405 5206426 5206410 5206405 -
gatttcttagaaagcctttaca

SEQ ID NO: 147025 - DNA, 22 bp, Artificial Sequence
  Synthetic oligonucleotide; TTT chr11 5206400 5206421 5206405 5206400 -
cttagaaagcctttacaatttc

SEQ ID NO: 147026 - DNA, 22 bp, Artificial Sequence
  Synthetic oligonucleotide; TTC chr11 5206399 5206420 5206404 5206399 -
ttagaaagcctttacaatttcc

SEQ ID NO: 147027 - DNA, 22 bp, Artificial Sequence
  Synthetic oligonucleotide; CTT chr11 5206397 5206418 5206402 5206397 -
agaaagcctttacaatttcctt

SEQ ID NO: 147028 - DNA, 22 bp, Artificial Sequence
  Synthetic oligonucleotide; TTA chr11 5206396 5206417 5206401 5206396 -
gaaagcctttacaatttccttt

SEQ ID NO: 147029 - DNA, 22 bp, Artificial Sequence
  Synthetic oligonucleotide; CTT chr11 5206387 5206408 5206392 5206387 -
tacaatttcctttatcttaaaa

SEQ ID NO: 147030 - DNA, 22 bp, Artificial Sequence
  Synthetic oligonucleotide; TTT chr11 5206386 5206407 5206391 5206386 -
acaatttcctttatcttaaaaa

SEQ ID NO: 147031 - DNA, 22 bp, Artificial Sequence
  Synthetic oligonucleotide; TTA chr11 5206385 5206406 5206390 5206385 -
caatttcctttatcttaaaaat

SEQ ID NO: 147032 - DNA, 22 bp, Artificial Sequence
  Synthetic oligonucleotide; TTT chr11 5206379 5206400 5206384 5206379 -
cctttatcttaaaaataagggt

SEQ ID NO: 147033 - DNA, 22 bp, Artificial Sequence
  Synthetic oligonucleotide; TTC chr11 5206378 5206399 5206383 5206378 -
ctttatcttaaaaataagggta

SEQ ID NO: 147034 - DNA, 22 bp, Artificial Sequence
  Synthetic oligonucleotide; CTT chr11 5206375 5206396 5206380 5206375 -
tatcttaaaaataagggtattg

SEQ ID NO: 147035 - DNA, 22 bp, Artificial Sequence
  Synthetic oligonucleotide; TTT chr11 5206374 5206395 5206379 5206374 -
atcttaaaaataagggtattga

SEQ ID NO: 147036 - DNA, 22 bp, Artificial Sequence
  Synthetic oligonucleotide; TTA chr11 5206373 5206394 5206378 5206373 -
tcttaaaaataagggtattgaa

SEQ ID NO: 147037 - DNA, 22 bp, Artificial Sequence
  Synthetic oligonucleotide; CTT chr11 5206369 5206390 5206374 5206369 -
aaaaataagggtattgaagtag

SEQ ID NO: 147038 - DNA, 22 bp, Artificial Sequence
  Synthetic oligonucleotide; TTA chr11 5206368 5206389 5206373 5206368 -
aaaataagggtattgaagtaga

SEQ ID NO: 147039 - DNA, 22 bp, Artificial Sequence
  Synthetic oligonucleotide; TTG chr11 5206353 5206374 5206358 5206353 -
aagtagaattctagaattttca

SEQ ID NO: 147040 - DNA, 22 bp, Artificial Sequence
  Synthetic oligonucleotide; TTC chr11 5206342 5206363 5206347 5206342 -
tagaattttcagaggacaactt

SEQ ID NO: 147041 - DNA, 22 bp, Artificial Sequence
  Synthetic oligonucleotide; CTA chr11 5206340 5206361 5206345 5206340 -
gaattttcagaggacaacttaa

SEQ ID NO: 147042 - DNA, 22 bp, Artificial Sequence
  Synthetic oligonucleotide; TTT chr11 5206334 5206355 5206339 5206334 -
tcagaggacaacttaaaatatg

SEQ ID NO: 147043 - DNA, 22 bp, Artificial Sequence
  Synthetic oligonucleotide; TTT chr11 5206333 5206354 5206338 5206333 -
cagaggacaacttaaaatatgt

SEQ ID NO: 147044 - DNA, 22 bp, Artificial Sequence
  Synthetic oligonucleotide; TTC chr11 5206332 5206353 5206337 5206332 -
agaggacaacttaaaatatgtg

SEQ ID NO: 147045 - DNA, 22 bp, Artificial Sequence
  Synthetic oligonucleotide; CTT chr11 5206320 5206341 5206325 5206320 -
aaaatatgtgtaatagttttaa

SEQ ID NO: 147046 - DNA, 22 bp, Artificial Sequence
  Synthetic oligonucleotide; TTA chr11 5206319 5206340 5206324 5206319 -
aaatatgtgtaatagttttaat

SEQ ID NO: 147047 - DNA, 22 bp, Artificial Sequence
  Synthetic oligonucleotide; TTT chr11 5206301 5206322 5206306 5206301 -
taattatttatcctcataaatt

SEQ ID NO: 147048 - DNA, 22 bp, Artificial Sequence
  Synthetic oligonucleotide; TTT chr11 5206300 5206321 5206305 5206300 -
aattatttatcctcataaattt

SEQ ID NO: 147049 - DNA, 22 bp, Artificial Sequence
  Synthetic oligonucleotide; TTA chr11 5206299 5206320 5206304 5206299 -
attatttatcctcataaattta

SEQ ID NO: 147050 - DNA, 22 bp, Artificial Sequence
  Synthetic oligonucleotide; TTA chr11 5206295 5206316 5206300 5206295 -
tttatcctcataaatttaactg

SEQ ID NO: 147051 - DNA, 22 bp, Artificial Sequence
  Synthetic oligonucleotide; TTT chr11 5206292 5206313 5206297 5206292 -
atcctcataaatttaactgttc

SEQ ID NO: 147052 - DNA, 22 bp, Artificial Sequence
  Synthetic oligonucleotide; TTA chr11 5206291 5206312 5206296 5206291 -
tcctcataaatttaactgttca

SEQ ID NO: 147053 - DNA, 22 bp, Artificial Sequence
  Synthetic oligonucleotide; CTC chr11 5206286 5206307 5206291 5206286 -
ataaatttaactgttcatttta

SEQ ID NO: 147054 - DNA, 22 bp, Artificial Sequence
  Synthetic oligonucleotide; TTT chr11 5206278 5206299 5206283 5206278 -
aactgttcattttaatatattt

SEQ ID NO: 147055 - DNA, 22 bp, Artificial Sequence
  Synthetic oligonucleotide; TTA chr11 5206277 5206298 5206282 5206277 -
actgttcattttaatatattta

SEQ ID NO: 147056 - DNA, 22 bp, Artificial Sequence
  Synthetic oligonucleotide; CTG chr11 5206273 5206294 5206278 5206273 -
ttcattttaatatatttaagga

SEQ ID NO: 147057 - DNA, 22 bp, Artificial Sequence
  Synthetic oligonucleotide; TTC chr11 5206270 5206291 5206275 5206270 -
attttaatatatttaaggatga

SEQ ID NO: 147058 - DNA, 22 bp, Artificial Sequence
  Synthetic oligonucleotide; TTT chr11 5206266 5206287 5206271 5206266 -
taatatatttaaggatgaattt

SEQ ID NO: 147059 - DNA, 22 bp, Artificial Sequence
  Synthetic oligonucleotide; TTT chr11 5206265 5206286 5206270 5206265 -
aatatatttaaggatgaatttt

SEQ ID NO: 147060 - DNA, 22 bp, Artificial Sequence
  Synthetic oligonucleotide; TTA chr11 5206264 5206285 5206269 5206264 -
atatatttaaggatgaattttt

SEQ ID NO: 147061 - DNA, 22 bp, Artificial Sequence
  Synthetic oligonucleotide; TTT chr11 5206256 5206277 5206261 5206256 -
aaggatgaattttttaaaaagt

SEQ ID NO: 147062 - DNA, 22 bp, Artificial Sequence
  Synthetic oligonucleotide; TTA chr11 5206255 5206276 5206260 5206255 -
aggatgaattttttaaaaagtt

SEQ ID NO: 147063 - DNA, 22 bp, Artificial Sequence
  Synthetic oligonucleotide; TTT chr11 5206244 5206265 5206249 5206244 -
tttaaaaagttgatttcataaa

SEQ ID NO: 147064 - DNA, 22 bp, Artificial Sequence
  Synthetic oligonucleotide; TTT chr11 5206243 5206264 5206248 5206243 -
ttaaaaagttgatttcataaaa

SEQ ID NO: 147065 - DNA, 22 bp, Artificial Sequence
  Synthetic oligonucleotide; TTT chr11 5206242 5206263 5206247 5206242 -
taaaaagttgatttcataaaaa

SEQ ID NO: 147066 - DNA, 22 bp, Artificial Sequence
  Synthetic oligonucleotide; TTT chr11 5206241 5206262 5206246 5206241 -
aaaaagttgatttcataaaaac

SEQ ID NO: 147067 - DNA, 22 bp, Artificial Sequence
  Synthetic oligonucleotide; TTA chr11 5206240 5206261 5206245 5206240 -
aaaagttgatttcataaaaacg

SEQ ID NO: 147068 - DNA, 22 bp, Artificial Sequence
  Synthetic oligonucleotide; TTG chr11 5206232 5206253 5206237 5206232 -
atttcataaaaacgggaataga

SEQ ID NO: 147069 - DNA, 22 bp, Artificial Sequence
  Synthetic oligonucleotide; TTT chr11 5206228 5206249 5206233 5206228 -
cataaaaacgggaatagaaaga

SEQ ID NO: 147070 - DNA, 22 bp, Artificial Sequence
  Synthetic oligonucleotide; TTC chr11 5206227 5206248 5206232 5206227 -
ataaaaacgggaatagaaagat

SEQ ID NO: 147071 - DNA, 22 bp, Artificial Sequence
  Synthetic oligonucleotide; TTC chr11 5206200 5206221 5206205 5206200 -
cataggctgactgagagtgtag

SEQ ID NO: 147072 - DNA, 22 bp, Artificial Sequence
  Synthetic oligonucleotide; CTG chr11 5206191 5206212 5206196 5206191 -
actgagagtgtagaggagggat

SEQ ID NO: 147073 - DNA, 22 bp, Artificial Sequence
  Synthetic oligonucleotide; CTG chr11 5206187 5206208 5206192 5206187 -
agagtgtagaggagggatggga

SEQ ID NO: 147074 - DNA, 22 bp, Artificial Sequence
  Synthetic oligonucleotide; TTG chr11 5206151 5206172 5206156 5206151 -
atcttcagttagactagaggaa

SEQ ID NO: 147075 - DNA, 22 bp, Artificial Sequence
  Synthetic oligonucleotide; CTT chr11 5206146 5206167 5206151 5206146 -
cagttagactagaggaataagt

SEQ ID NO: 147076 - DNA, 22 bp, Artificial Sequence
  Synthetic oligonucleotide; TTC chr11 5206145 5206166 5206150 5206145 -
agttagactagaggaataagtt

SEQ ID NO: 147077 - DNA, 22 bp, Artificial Sequence
  Synthetic oligonucleotide; TTA chr11 5206140 5206161 5206145 5206140 -
gactagaggaataagttttagt

SEQ ID NO: 147078 - DNA, 22 bp, Artificial Sequence
  Synthetic oligonucleotide; CTA chr11 5206135 5206156 5206140 5206135 -
gaggaataagttttagtgatct

SEQ ID NO: 147079 - DNA, 22 bp, Artificial Sequence
  Synthetic oligonucleotide; TTT chr11 5206122 5206143 5206127 5206122 -
tagtgatctctcacactgcata

SEQ ID NO: 147080 - DNA, 22 bp, Artificial Sequence
  Synthetic oligonucleotide; TTT chr11 5206121 5206142 5206126 5206121 -
agtgatctctcacactgcatag

SEQ ID NO: 147081 - DNA, 22 bp, Artificial Sequence
  Synthetic oligonucleotide; TTA chr11 5206120 5206141 5206125 5206120 -
gtgatctctcacactgcatagt

SEQ ID NO: 147082 - DNA, 22 bp, Artificial Sequence
  Synthetic oligonucleotide; CTC chr11 5206112 5206133 5206117 5206112 -
tcacactgcatagtgaacacag

SEQ ID NO: 147083 - DNA, 22 bp, Artificial Sequence
  Synthetic oligonucleotide; CTC chr11 5206110 5206131 5206115 5206110 -
acactgcatagtgaacacagtt

SEQ ID NO: 147084 - DNA, 22 bp, Artificial Sequence
  Synthetic oligonucleotide; CTG chr11 5206104 5206125 5206109 5206104 -
catagtgaacacagttaataat

SEQ ID NO: 147085 - DNA, 22 bp, Artificial Sequence
  Synthetic oligonucleotide; TTA chr11 5206087 5206108 5206092 5206087 -
ataatatattatgtatttaaat

SEQ ID NO: 147086 - DNA, 22 bp, Artificial Sequence
  Synthetic oligonucleotide; TTA chr11 5206076 5206097 5206081 5206076 -
tgtatttaaattaaaaattgct

SEQ ID NO: 147087 - DNA, 22 bp, Artificial Sequence
  Synthetic oligonucleotide; TTT chr11 5206069 5206090 5206074 5206069 -
aaattaaaaattgctaaaaaat

SEQ ID NO: 147088 - DNA, 22 bp, Artificial Sequence
  Synthetic oligonucleotide; TTA chr11 5206068 5206089 5206073 5206068 -
aattaaaaattgctaaaaaata

SEQ ID NO: 147089 - DNA, 22 bp, Artificial Sequence
  Synthetic oligonucleotide; TTA chr11 5206063 5206084 5206068 5206063 -
aaaattgctaaaaaataaatat

SEQ ID NO: 147090 - DNA, 22 bp, Artificial Sequence
  Synthetic oligonucleotide; TTG chr11 5206056 5206077 5206061 5206056 -
ctaaaaaataaatattttatgt

SEQ ID NO: 147091 - DNA, 22 bp, Artificial Sequence
  Synthetic oligonucleotide; CTA chr11 5206053 5206074 5206058 5206053 -
aaaaataaatattttatgttct

SEQ ID NO: 147092 - DNA, 22 bp, Artificial Sequence
  Synthetic oligonucleotide; TTT chr11 5206039 5206060 5206044 5206039 -
tatgttctcaccacaaaaaaag

SEQ ID NO: 147093 - DNA, 22 bp, Artificial Sequence
  Synthetic oligonucleotide; TTT chr11 5206038 5206059 5206043 5206038 -
atgttctcaccacaaaaaaagt

SEQ ID NO: 147094 - DNA, 22 bp, Artificial Sequence
  Synthetic oligonucleotide; TTA chr11 5206037 5206058 5206042 5206037 -
tgttctcaccacaaaaaaagtt

SEQ ID NO: 147095 - DNA, 22 bp, Artificial Sequence
  Synthetic oligonucleotide; TTC chr11 5206032 5206053 5206037 5206032 -
tcaccacaaaaaaagttggaag

SEQ ID NO: 147096 - DNA, 22 bp, Artificial Sequence
  Synthetic oligonucleotide; CTC chr11 5206030 5206051 5206035 5206030 -
accacaaaaaaagttggaaggt

SEQ ID NO: 147097 - DNA, 22 bp, Artificial Sequence
  Synthetic oligonucleotide; TTG chr11 5206014 5206035 5206019 5206014 -
gaaggtgattcatatgctaatt

SEQ ID NO: 147098 - DNA, 22 bp, Artificial Sequence
  Synthetic oligonucleotide; TTC chr11 5206003 5206024 5206008 5206003 -
atatgctaattagcttgataga

SEQ ID NO: 147099 - DNA, 22 bp, Artificial Sequence
  Synthetic oligonucleotide; CTA chr11 5205995 5206016 5206000 5205995 -
attagcttgatagactctctct

SEQ ID NO: 147100 - DNA, 22 bp, Artificial Sequence
  Synthetic oligonucleotide; TTA chr11 5205991 5206012 5205996 5205991 -
gcttgatagactctctctacaa

SEQ ID NO: 147101 - DNA, 22 bp, Artificial Sequence
  Synthetic oligonucleotide; CTT chr11 5205987 5206008 5205992 5205987 -
gatagactctctctacaatgta

SEQ ID NO: 147102 - DNA, 22 bp, Artificial Sequence
  Synthetic oligonucleotide; TTG chr11 5205986 5206007 5205991 5205986 -
atagactctctctacaatgtat

SEQ ID NO: 147103 - DNA, 22 bp, Artificial Sequence
  Synthetic oligonucleotide; CTC chr11 5205978 5205999 5205983 5205978 -
tctctacaatgtatatatagat

SEQ ID NO: 147104 - DNA, 22 bp, Artificial Sequence
  Synthetic oligonucleotide; CTC chr11 5205976 5205997 5205981 5205976 -
tctacaatgtatatatagatca

SEQ ID NO: 147105 - DNA, 22 bp, Artificial Sequence
  Synthetic oligonucleotide; CTC chr11 5205974 5205995 5205979 5205974 -
tacaatgtatatatagatcaaa

SEQ ID NO: 147106 - DNA, 22 bp, Artificial Sequence
  Synthetic oligonucleotide; CTA chr11 5205972 5205993 5205977 5205972 -
caatgtatatatagatcaaaca

SEQ ID NO: 147107 - DNA, 22 bp, Artificial Sequence
  Synthetic oligonucleotide; TTG chr11 5205942 5205963 5205947 5205942 -
tatcccataacatattatatat

SEQ ID NO: 147108 - DNA, 22 bp, Artificial Sequence
  Synthetic oligonucleotide; TTA chr11 5205925 5205946 5205930 5205925 -
tatatattatatatttatatta

SEQ ID NO: 147109 - DNA, 22 bp, Artificial Sequence
  Synthetic oligonucleotide; TTA chr11 5205916 5205937 5205921 5205916 -
tatatttatattatatattatt

SEQ ID NO: 147110 - DNA, 22 bp, Artificial Sequence
  Synthetic oligonucleotide; TTT chr11 5205909 5205930 5205914 5205909 -
atattatatattattattgtat

SEQ ID NO: 147111 - DNA, 22 bp, Artificial Sequence
  Synthetic oligonucleotide; TTA chr11 5205908 5205929 5205913 5205908 -
tattatatattattattgtatc

SEQ ID NO: 147112 - DNA, 22 bp, Artificial Sequence
  Synthetic oligonucleotide; TTA chr11 5205903 5205924 5205908 5205903 -
tatattattattgtatccatta

SEQ ID NO: 147113 - DNA, 22 bp, Artificial Sequence
  Synthetic oligonucleotide; TTA chr11 5205896 5205917 5205901 5205896 -
ttattgtatccattaatatatg

SEQ ID NO: 147114 - DNA, 22 bp, Artificial Sequence
  Synthetic oligonucleotide; TTA chr11 5205893 5205914 5205898 5205893 -
ttgtatccattaatatatgcac

SEQ ID NO: 147115 - DNA, 22 bp, Artificial Sequence
  Synthetic oligonucleotide; TTG chr11 5205890 5205911 5205895 5205890 -
tatccattaatatatgcactta

SEQ ID NO: 147116 - DNA, 22 bp, Artificial Sequence
  Synthetic oligonucleotide; TTA chr11 5205881 5205902 5205886 5205881 -
atatatgcacttattatttgcc

SEQ ID NO: 147117 - DNA, 22 bp, Artificial Sequence
  Synthetic oligonucleotide; CTT chr11 5205869 5205890 5205874 5205869 -
attatttgccaggcaaataaaa

SEQ ID NO: 147118 - DNA, 22 bp, Artificial Sequence
  Synthetic oligonucleotide; TTA chr11 5205868 5205889 5205873 5205868 -
ttatttgccaggcaaataaaaa

SEQ ID NO: 147119 - DNA, 22 bp, Artificial Sequence
  Synthetic oligonucleotide; TTA chr11 5205865 5205886 5205870 5205865 -
tttgccaggcaaataaaaaatg

SEQ ID NO: 147120 - DNA, 22 bp, Artificial Sequence
  Synthetic oligonucleotide; TTT chr11 5205862 5205883 5205867 5205862 -
gccaggcaaataaaaaatgttt

SEQ ID NO: 147121 - DNA, 22 bp, Artificial Sequence
  Synthetic oligonucleotide; TTG chr11 5205861 5205882 5205866 5205861 -
ccaggcaaataaaaaatgtttt

SEQ ID NO: 147122 - DNA, 22 bp, Artificial Sequence
  Synthetic oligonucleotide; TTT chr11 5205840 5205861 5205845 5205840 -
ttaaaatataaatttatttgta

SEQ ID NO: 147123 - DNA, 22 bp, Artificial Sequence
  Synthetic oligonucleotide; TTT chr11 5205839 5205860 5205844 5205839 -
taaaatataaatttatttgtaa

SEQ ID NO: 147124 - DNA, 22 bp, Artificial Sequence
  Synthetic oligonucleotide; TTT chr11 5205838 5205859 5205843 5205838 -
aaaatataaatttatttgtaac

SEQ ID NO: 147125 - DNA, 22 bp, Artificial Sequence
  Synthetic oligonucleotide; TTA chr11 5205837 5205858 5205842 5205837 -
aaatataaatttatttgtaacc

SEQ ID NO: 147126 - DNA, 22 bp, Artificial Sequence
  Synthetic oligonucleotide; TTT chr11 5205825 5205846 5205830 5205825 -
atttgtaacctccttttacttt

SEQ ID NO: 147127 - DNA, 22 bp, Artificial Sequence
  Synthetic oligonucleotide; TTA chr11 5205824 5205845 5205829 5205824 -
tttgtaacctccttttactttt

SEQ ID NO: 147128 - DNA, 22 bp, Artificial Sequence
  Synthetic oligonucleotide; TTT chr11 5205821 5205842 5205826 5205821 -
gtaacctccttttacttttctg

SEQ ID NO: 147129 - DNA, 22 bp, Artificial Sequence
  Synthetic oligonucleotide; TTG chr11 5205820 5205841 5205825 5205820 -
taacctccttttacttttctgc

SEQ ID NO: 147130 - DNA, 22 bp, Artificial Sequence
  Synthetic oligonucleotide; CTC chr11 5205813 5205834 5205818 5205813 -
cttttacttttctgcttggttt

SEQ ID NO: 147131 - DNA, 22 bp, Artificial Sequence
  Synthetic oligonucleotide; CTT chr11 5205810 5205831 5205815 5205810 -
ttacttttctgcttggttttct

SEQ ID NO: 147132 - DNA, 22 bp, Artificial Sequence
  Synthetic oligonucleotide; TTT chr11 5205809 5205830 5205814 5205809 -
tacttttctgcttggttttctt

SEQ ID NO: 147133 - DNA, 22 bp, Artificial Sequence
  Synthetic oligonucleotide; TTT chr11 5205808 5205829 5205813 5205808 -
acttttctgcttggttttcttc

SEQ ID NO: 147134 - DNA, 22 bp, Artificial Sequence
  Synthetic oligonucleotide; TTA chr11 5205807 5205828 5205812 5205807 -
cttttctgcttggttttcttct

SEQ ID NO: 147135 - DNA, 22 bp, Artificial Sequence
  Synthetic oligonucleotide; CTT chr11 5205804 5205825 5205809 5205804 -
ttctgcttggttttcttctttc

SEQ ID NO: 147136 - DNA, 22 bp, Artificial Sequence
  Synthetic oligonucleotide; TTT chr11 5205803 5205824 5205808 5205803 -
tctgcttggttttcttctttca

SEQ ID NO: 147137 - DNA, 22 bp, Artificial Sequence
  Synthetic oligonucleotide; TTT chr11 5205802 5205823 5205807 5205802 -
ctgcttggttttcttctttcat

SEQ ID NO: 147138 - DNA, 22 bp, Artificial Sequence
  Synthetic oligonucleotide; TTC chr11 5205801 5205822 5205806 5205801 -
tgcttggttttcttctttcatt

SEQ ID NO: 147139 - DNA, 22 bp, Artificial Sequence
  Synthetic oligonucleotide; CTG chr11 5205799 5205820 5205804 5205799 -
cttggttttcttctttcattca

SEQ ID NO: 147140 - DNA, 22 bp, Artificial Sequence
  Synthetic oligonucleotide; CTT chr11 5205796 5205817 5205801 5205796 -
ggttttcttctttcattcagtg

SEQ ID NO: 147141 - DNA, 22 bp, Artificial Sequence
  Synthetic oligonucleotide; TTG chr11 5205795 5205816 5205800 5205795 -
gttttcttctttcattcagtgt

SEQ ID NO: 147142 - DNA, 22 bp, Artificial Sequence
  Synthetic oligonucleotide; TTT chr11 5205791 5205812 5205796 5205791 -
tcttctttcattcagtgtttac

SEQ ID NO: 147143 - DNA, 22 bp, Artificial Sequence
  Synthetic oligonucleotide; TTT chr11 5205790 5205811 5205795 5205790 -
cttctttcattcagtgtttacc

SEQ ID NO: 147144 - DNA, 22 bp, Artificial Sequence
  Synthetic oligonucleotide; TTC chr11 5205789 5205810 5205794 5205789 -
ttctttcattcagtgtttacca

SEQ ID NO: 147145 - DNA, 22 bp, Artificial Sequence
  Synthetic oligonucleotide; CTT chr11 5205787 5205808 5205792 5205787 -
ctttcattcagtgtttaccagt

SEQ ID NO: 147146 - DNA, 22 bp, Artificial Sequence
  Synthetic oligonucleotide; TTC chr11 5205786 5205807 5205791 5205786 -
tttcattcagtgtttaccagtt

SEQ ID NO: 147147 - DNA, 22 bp, Artificial Sequence
  Synthetic oligonucleotide; CTT chr11 5205784 5205805 5205789 5205784 -
tcattcagtgtttaccagtttc

SEQ ID NO: 147148 - DNA, 22 bp, Artificial Sequence
  Synthetic oligonucleotide; TTT chr11 5205783 5205804 5205788 5205783 -
cattcagtgtttaccagtttct

SEQ ID NO: 147149 - DNA, 22 bp, Artificial Sequence
  Synthetic oligonucleotide; TTC chr11 5205782 5205803 5205787 5205782 -
attcagtgtttaccagtttctt

SEQ ID NO: 147150 - DNA, 22 bp, Artificial Sequence
  Synthetic oligonucleotide; TTC chr11 5205778 5205799 5205783 5205778 -
agtgtttaccagtttcttatag

SEQ ID NO: 147151 - DNA, 22 bp, Artificial Sequence
  Synthetic oligonucleotide; TTT chr11 5205771 5205792 5205776 5205771 -
accagtttcttatagttaattt

SEQ ID NO: 147152 - DNA, 22 bp, Artificial Sequence
  Synthetic oligonucleotide; TTA chr11 5205770 5205791 5205775 5205770 -
ccagtttcttatagttaatttt

SEQ ID NO: 147153 - DNA, 22 bp, Artificial Sequence
  Synthetic oligonucleotide; TTT chr11 5205763 5205784 5205768 5205763 -
cttatagttaattttattttaa

SEQ ID NO: 147154 - DNA, 22 bp, Artificial Sequence
  Synthetic oligonucleotide; TTC chr11 5205762 5205783 5205767 5205762 -
ttatagttaattttattttaag

SEQ ID NO: 147155 - DNA, 22 bp, Artificial Sequence
  Synthetic oligonucleotide; CTT chr11 5205760 5205781 5205765 5205760 -
atagttaattttattttaagct

SEQ ID NO: 147156 - DNA, 22 bp, Artificial Sequence
  Synthetic oligonucleotide; TTA chr11 5205759 5205780 5205764 5205759 -
tagttaattttattttaagctg

SEQ ID NO: 147157 - DNA, 22 bp, Artificial Sequence
  Synthetic oligonucleotide; TTA chr11 5205753 5205774 5205758 5205753 -
attttattttaagctgtctcac

SEQ ID NO: 147158 - DNA, 22 bp, Artificial Sequence
  Synthetic oligonucleotide; TTT chr11 5205749 5205770 5205754 5205749 -
tattttaagctgtctcacattt

SEQ ID NO: 147159 - DNA, 22 bp, Artificial Sequence
  Synthetic oligonucleotide; TTT chr11 5205748 5205769 5205753 5205748 -
attttaagctgtctcacatttt

SEQ ID NO: 147160 - DNA, 22 bp, Artificial Sequence
  Synthetic oligonucleotide; TTA chr11 5205747 5205768 5205752 5205747 -
ttttaagctgtctcacattttc

SEQ ID NO: 147161 - DNA, 22 bp, Artificial Sequence
  Synthetic oligonucleotide; TTT chr11 5205744 5205765 5205749 5205744 -
taagctgtctcacattttctga

SEQ ID NO: 147162 - DNA, 22 bp, Artificial Sequence
  Synthetic oligonucleotide; TTT chr11 5205743 5205764 5205748 5205743 -
aagctgtctcacattttctgaa

SEQ ID NO: 147163 - DNA, 22 bp, Artificial Sequence
  Synthetic oligonucleotide; TTA chr11 5205742 5205763 5205747 5205742 -
agctgtctcacattttctgaag

SEQ ID NO: 147164 - DNA, 22 bp, Artificial Sequence
  Synthetic oligonucleotide; CTG chr11 5205737 5205758 5205742 5205737 -
tctcacattttctgaagaaaag

SEQ ID NO: 147165 - DNA, 22 bp, Artificial Sequence
  Synthetic oligonucleotide; CTC chr11 5205733 5205754 5205738 5205733 -
acattttctgaagaaaagggaa

SEQ ID NO: 147166 - DNA, 22 bp, Artificial Sequence
  Synthetic oligonucleotide; TTT chr11 5205727 5205748 5205732 5205727 -
tctgaagaaaagggaacatatt

SEQ ID NO: 147167 - DNA, 22 bp, Artificial Sequence
  Synthetic oligonucleotide; TTT chr11 5205726 5205747 5205731 5205726 -
ctgaagaaaagggaacatatta

SEQ ID NO: 147168 - DNA, 22 bp, Artificial Sequence
  Synthetic oligonucleotide; TTC chr11 5205725 5205746 5205730 5205725 -
tgaagaaaagggaacatattaa

SEQ ID NO: 147169 - DNA, 22 bp, Artificial Sequence
  Synthetic oligonucleotide; CTG chr11 5205723 5205744 5205728 5205723 -
aagaaaagggaacatattaaag

SEQ ID NO: 147170 - DNA, 22 bp, Artificial Sequence
  Synthetic oligonucleotide; TTA chr11 5205704 5205725 5205709 5205704 -
aagccaacaaaacaaatacact

SEQ ID NO: 147171 - DNA, 22 bp, Artificial Sequence
  Synthetic oligonucleotide; CTA chr11 5205681 5205702 5205686 5205681 -
tcttgcatgagatgatttatgt

SEQ ID NO: 147172 - DNA, 22 bp, Artificial Sequence
  Synthetic oligonucleotide; CTT chr11 5205677 5205698 5205682 5205677 -
gcatgagatgatttatgtcatg

SEQ ID NO: 147173 - DNA, 22 bp, Artificial Sequence
  Synthetic oligonucleotide; TTG chr11 5205676 5205697 5205681 5205676 -
catgagatgatttatgtcatgg

SEQ ID NO: 147174 - DNA, 22 bp, Artificial Sequence
  Synthetic oligonucleotide; TTT chr11 5205663 5205684 5205668 5205663 -
atgtcatggtacaatcaaatgc

SEQ ID NO: 147175 - DNA, 22 bp, Artificial Sequence
  Synthetic oligonucleotide; TTA chr11 5205662 5205683 5205667 5205662 -
tgtcatggtacaatcaaatgct

SEQ ID NO: 147176 - DNA, 22 bp, Artificial Sequence
  Synthetic oligonucleotide; CTA chr11 5205639 5205660 5205644 5205639 -
taaatcttataaaaacttctca

SEQ ID NO: 147177 - DNA, 22 bp, Artificial Sequence
  Synthetic oligonucleotide; CTT chr11 5205631 5205652 5205636 5205631 -
ataaaaacttctcaaatggtta

SEQ ID NO: 147178 - DNA, 22 bp, Artificial Sequence
  Synthetic oligonucleotide; TTA chr11 5205630 5205651 5205635 5205630 -
taaaaacttctcaaatggttag

SEQ ID NO: 147179 - DNA, 22 bp, Artificial Sequence
  Synthetic oligonucleotide; CTT chr11 5205621 5205642 5205626 5205621 -
ctcaaatggttagatggctaca

SEQ ID NO: 147180 - DNA, 22 bp, Artificial Sequence
  Synthetic oligonucleotide; TTC chr11 5205620 5205641 5205625 5205620 -
tcaaatggttagatggctacag

SEQ ID NO: 147181 - DNA, 22 bp, Artificial Sequence
  Synthetic oligonucleotide; CTC chr11 5205618 5205639 5205623 5205618 -
aaatggttagatggctacagtt

SEQ ID NO: 147182 - DNA, 22 bp, Artificial Sequence
  Synthetic oligonucleotide; TTA chr11 5205609 5205630 5205614 5205609 -
gatggctacagttgaacagatg

SEQ ID NO: 147183 - DNA, 22 bp, Artificial Sequence
  Synthetic oligonucleotide; CTA chr11 5205601 5205622 5205606 5205601 -
cagttgaacagatggaccatgt

SEQ ID NO: 147184 - DNA, 22 bp, Artificial Sequence
  Synthetic oligonucleotide; TTG chr11 5205595 5205616 5205600 5205595 -
aacagatggaccatgtcatata

SEQ ID NO: 147185 - DNA, 22 bp, Artificial Sequence
  Synthetic oligonucleotide; TTT chr11 5205570 5205591 5205575 5205570 -
tttataatgcttctaaggtatg

SEQ ID NO: 147186 - DNA, 22 bp, Artificial Sequence
  Synthetic oligonucleotide; TTT chr11 5205569 5205590 5205574 5205569 -
ttataatgcttctaaggtatgg

SEQ ID NO: 147187 - DNA, 22 bp, Artificial Sequence
  Synthetic oligonucleotide; TTT chr11 5205568 5205589 5205573 5205568 -
tataatgcttctaaggtatggc

SEQ ID NO: 147188 - DNA, 22 bp, Artificial Sequence
  Synthetic oligonucleotide; TTT chr11 5205567 5205588 5205572 5205567 -
ataatgcttctaaggtatggct

SEQ ID NO: 147189 - DNA, 22 bp, Artificial Sequence
  Synthetic oligonucleotide; TTA chr11 5205566 5205587 5205571 5205566 -
taatgcttctaaggtatggcta

SEQ ID NO: 147190 - DNA, 22 bp, Artificial Sequence
  Synthetic oligonucleotide; CTT chr11 5205558 5205579 5205563 5205558 -
ctaaggtatggctaatttttaa

SEQ ID NO: 147191 - DNA, 22 bp, Artificial Sequence
  Synthetic oligonucleotide; TTC chr11 5205557 5205578 5205562 5205557 -
taaggtatggctaatttttaaa

SEQ ID NO: 147192 - DNA, 22 bp, Artificial Sequence
  Synthetic oligonucleotide; CTA chr11 5205555 5205576 5205560 5205555 -
aggtatggctaatttttaaaaa

SEQ ID NO: 147193 - DNA, 22 bp, Artificial Sequence
  Synthetic oligonucleotide; CTA chr11 5205544 5205565 5205549 5205544 -
atttttaaaaaatattttagta

SEQ ID NO: 147194 - DNA, 22 bp, Artificial Sequence
  Synthetic oligonucleotide; TTT chr11 5205540 5205561 5205545 5205540 -
ttaaaaaatattttagtaatga

SEQ ID NO: 147195 - DNA, 22 bp, Artificial Sequence
  Synthetic oligonucleotide; TTT chr11 5205539 5205560 5205544 5205539 -
taaaaaatattttagtaatgat

SEQ ID NO: 147196 - DNA, 22 bp, Artificial Sequence
  Synthetic oligonucleotide; TTT chr11 5205538 5205559 5205543 5205538 -
aaaaaatattttagtaatgatg

SEQ ID NO: 147197 - DNA, 22 bp, Artificial Sequence
  Synthetic oligonucleotide; TTA chr11 5205537 5205558 5205542 5205537 -
aaaaatattttagtaatgatgg

SEQ ID NO: 147198 - DNA, 22 bp, Artificial Sequence
  Synthetic oligonucleotide; TTT chr11 5205527 5205548 5205532 5205527 -
tagtaatgatgggaatattatt

SEQ ID NO: 147199 - DNA, 22 bp, Artificial Sequence
  Synthetic oligonucleotide; TTT chr11 5205526 5205547 5205531 5205526 -
agtaatgatgggaatattattt

SEQ ID NO: 147200 - DNA, 22 bp, Artificial Sequence
  Synthetic oligonucleotide; TTA chr11 5205525 5205546 5205530 5205525 -
gtaatgatgggaatattattta

SEQ ID NO: 147201 - DNA, 22 bp, Artificial Sequence
  Synthetic oligonucleotide; TTA chr11 5205507 5205528 5205512 5205507 -
tttatagaaatcttataaaata

SEQ ID NO: 147202 - DNA, 22 bp, Artificial Sequence
  Synthetic oligonucleotide; TTT chr11 5205504 5205525 5205509 5205504 -
atagaaatcttataaaatatat

SEQ ID NO: 147203 - DNA, 22 bp, Artificial Sequence
  Synthetic oligonucleotide; TTA chr11 5205503 5205524 5205508 5205503 -
tagaaatcttataaaatatata

SEQ ID NO: 147204 - DNA, 22 bp, Artificial Sequence
  Synthetic oligonucleotide; CTT chr11 5205493 5205514 5205498 5205493 -
ataaaatatataatgaaatatg

SEQ ID NO: 147205 - DNA, 22 bp, Artificial Sequence
  Synthetic oligonucleotide; TTA chr11 5205492 5205513 5205497 5205492 -
taaaatatataatgaaatatgt

SEQ ID NO: 147206 - DNA, 22 bp, Artificial Sequence
  Synthetic oligonucleotide; CTA chr11 5205459 5205480 5205464 5205459 -
gataaatgtgtatatacataat

SEQ ID NO: 147207 - DNA, 22 bp, Artificial Sequence
  Synthetic oligonucleotide; TTT chr11 5205429 5205450 5205434 5205429 -
attacataatatataatatata

SEQ ID NO: 147208 - DNA, 22 bp, Artificial Sequence
  Synthetic oligonucleotide; TTA chr11 5205428 5205449 5205433 5205428 -
ttacataatatataatatataa

SEQ ID NO: 147209 - DNA, 22 bp, Artificial Sequence
  Synthetic oligonucleotide; TTA chr11 5205425 5205446 5205430 5205425 -
cataatatataatatataatgt

SEQ ID NO: 147210 - DNA, 22 bp, Artificial Sequence
  Synthetic oligonucleotide; TTT chr11 5205397 5205418 5205402 5205397 -
atatattacatgcattatatat

SEQ ID NO: 147211 - DNA, 22 bp, Artificial Sequence
  Synthetic oligonucleotide; TTA chr11 5205396 5205417 5205401 5205396 -
tatattacatgcattatatatt

SEQ ID NO: 147212 - DNA, 22 bp, Artificial Sequence
  Synthetic oligonucleotide; TTA chr11 5205389 5205410 5205394 5205389 -
catgcattatatattaaatata

SEQ ID NO: 147213 - DNA, 22 bp, Artificial Sequence
  Synthetic oligonucleotide; TTA chr11 5205380 5205401 5205385 5205380 -
tatattaaatataatacatttt

SEQ ID NO: 147214 - DNA, 22 bp, Artificial Sequence
  Synthetic oligonucleotide; TTA chr11 5205373 5205394 5205378 5205373 -
aatataatacattttatatatt

SEQ ID NO: 147215 - DNA, 22 bp, Artificial Sequence
  Synthetic oligonucleotide; TTT chr11 5205359 5205380 5205364 5205359 -
tatatattatatattaaaatat

SEQ ID NO: 147216 - DNA, 22 bp, Artificial Sequence
  Synthetic oligonucleotide; TTT chr11 5205358 5205379 5205363 5205358 -
atatattatatattaaaatatg

SEQ ID NO: 147217 - DNA, 22 bp, Artificial Sequence
  Synthetic oligonucleotide; TTA chr11 5205357 5205378 5205362 5205357 -
tatattatatattaaaatatgt

SEQ ID NO: 147218 - DNA, 22 bp, Artificial Sequence
  Synthetic oligonucleotide; TTA chr11 5205350 5205371 5205355 5205350 -
tatattaaaatatgtaataata

SEQ ID NO: 147219 - DNA, 22 bp, Artificial Sequence
  Synthetic oligonucleotide; TTA chr11 5205343 5205364 5205348 5205343 -
aaatatgtaataatatgttatt

SEQ ID NO: 147220 - DNA, 22 bp, Artificial Sequence
  Synthetic oligonucleotide; TTA chr11 5205323 5205344 5205328 5205323 -
ttaaatatatacaataatctat

SEQ ID NO: 147221 - DNA, 22 bp, Artificial Sequence
  Synthetic oligonucleotide; TTA chr11 5205320 5205341 5205325 5205320 -
aatatatacaataatctattac

SEQ ID NO: 147222 - DNA, 22 bp, Artificial Sequence
  Synthetic oligonucleotide; CTA chr11 5205302 5205323 5205307 5205302 -
ttacattttatgcttatataat

SEQ ID NO: 147223 - DNA, 22 bp, Artificial Sequence
  Synthetic oligonucleotide; TTA chr11 5205299 5205320 5205304 5205299 -
cattttatgcttatataatata

SEQ ID NO: 147224 - DNA, 22 bp, Artificial Sequence
  Synthetic oligonucleotide; TTT chr11 5205294 5205315 5205299 5205294 -
tatgcttatataatatataata

SEQ ID NO: 147225 - DNA, 22 bp, Artificial Sequence
  Synthetic oligonucleotide; TTT chr11 5205293 5205314 5205298 5205293 -
atgcttatataatatataataa

SEQ ID NO: 147226 - DNA, 22 bp, Artificial Sequence
  Synthetic oligonucleotide; TTA chr11 5205292 5205313 5205297 5205292 -
tgcttatataatatataataaa

SEQ ID NO: 147227 - DNA, 22 bp, Artificial Sequence
  Synthetic oligonucleotide; CTT chr11 5205287 5205308 5205292 5205287 -
atataatatataataaatatat

SEQ ID NO: 147228 - DNA, 22 bp, Artificial Sequence
  Synthetic oligonucleotide; TTA chr11 5205286 5205307 5205291 5205286 -
tataatatataataaatatata

SEQ ID NO: 147229 - DNA, 22 bp, Artificial Sequence
  Synthetic oligonucleotide; CTA chr11 5205243 5205264 5205248 5205243 -
tatatttgtatctatatatgtt

SEQ ID NO: 147230 - DNA, 22 bp, Artificial Sequence
  Synthetic oligonucleotide; TTT chr11 5205236 5205257 5205241 5205236 -
gtatctatatatgtttataaag

SEQ ID NO: 147231 - DNA, 22 bp, Artificial Sequence
  Synthetic oligonucleotide; TTG chr11 5205235 5205256 5205240 5205235 -
tatctatatatgtttataaagt

SEQ ID NO: 147232 - DNA, 22 bp, Artificial Sequence
  Synthetic oligonucleotide; CTA chr11 5205229 5205250 5205234 5205229 -
tatatgtttataaagtcattcc

SEQ ID NO: 147233 - DNA, 22 bp, Artificial Sequence
  Synthetic oligonucleotide; TTT chr11 5205220 5205241 5205225 5205220 -
ataaagtcattcctctaattag

SEQ ID NO: 147234 - DNA, 22 bp, Artificial Sequence
  Synthetic oligonucleotide; TTA chr11 5205219 5205240 5205224 5205219 -
taaagtcattcctctaattagg

SEQ ID NO: 147235 - DNA, 22 bp, Artificial Sequence
  Synthetic oligonucleotide; TTC chr11 5205208 5205229 5205213 5205208 -
ctctaattaggtcataaccatt

SEQ ID NO: 147236 - DNA, 22 bp, Artificial Sequence
  Synthetic oligonucleotide; CTC chr11 5205205 5205226 5205210 5205205 -
taattaggtcataaccattcag

SEQ ID NO: 147237 - DNA, 22 bp, Artificial Sequence
  Synthetic oligonucleotide; CTA chr11 5205203 5205224 5205208 5205203 -
attaggtcataaccattcaggt

SEQ ID NO: 147238 - DNA, 22 bp, Artificial Sequence
  Synthetic oligonucleotide; TTA chr11 5205199 5205220 5205204 5205199 -
ggtcataaccattcaggtaaac

SEQ ID NO: 147239 - DNA, 22 bp, Artificial Sequence
  Synthetic oligonucleotide; TTC chr11 5205185 5205206 5205190 5205185 -
aggtaaactggaaatttaagcc

SEQ ID NO: 147240 - DNA, 22 bp, Artificial Sequence
  Synthetic oligonucleotide; CTG chr11 5205175 5205196 5205180 5205175 -
gaaatttaagcctacttcaggt

SEQ ID NO: 147241 - DNA, 22 bp, Artificial Sequence
  Synthetic oligonucleotide; TTT chr11 5205168 5205189 5205173 5205168 -
aagcctacttcaggtttgtggt

SEQ ID NO: 147242 - DNA, 22 bp, Artificial Sequence
  Synthetic oligonucleotide; TTA chr11 5205167 5205188 5205172 5205167 -
agcctacttcaggtttgtggta

SEQ ID NO: 147243 - DNA, 22 bp, Artificial Sequence
  Synthetic oligonucleotide; CTA chr11 5205161 5205182 5205166 5205161 -
cttcaggtttgtggtaaataga

SEQ ID NO: 147244 - DNA, 22 bp, Artificial Sequence
  Synthetic oligonucleotide; CTT chr11 5205158 5205179 5205163 5205158 -
caggtttgtggtaaatagattc

SEQ ID NO: 147245 - DNA, 22 bp, Artificial Sequence
  Synthetic oligonucleotide; TTC chr11 5205157 5205178 5205162 5205157 -
aggtttgtggtaaatagattct

SEQ ID NO: 147246 - DNA, 22 bp, Artificial Sequence
  Synthetic oligonucleotide; TTT chr11 5205151 5205172 5205156 5205151 -
gtggtaaatagattctctctga

SEQ ID NO: 147247 - DNA, 22 bp, Artificial Sequence
  Synthetic oligonucleotide; TTG chr11 5205150 5205171 5205155 5205150 -
tggtaaatagattctctctgaa

SEQ ID NO: 147248 - DNA, 22 bp, Artificial Sequence
  Synthetic oligonucleotide; TTC chr11 5205136 5205157 5205141 5205136 -
tctctgaactagcatattcaga

SEQ ID NO: 147249 - DNA, 22 bp, Artificial Sequence
  Synthetic oligonucleotide; CTC chr11 5205134 5205155 5205139 5205134 -
tctgaactagcatattcagaat

SEQ ID NO: 147250 - DNA, 22 bp, Artificial Sequence
  Synthetic oligonucleotide; CTC chr11 5205132 5205153 5205137 5205132 -
tgaactagcatattcagaatca

SEQ ID NO: 147251 - DNA, 22 bp, Artificial Sequence
  Synthetic oligonucleotide; CTG chr11 5205130 5205151 5205135 5205130 -
aactagcatattcagaatcatt

SEQ ID NO: 147252 - DNA, 22 bp, Artificial Sequence
  Synthetic oligonucleotide; CTA chr11 5205125 5205146 5205130 5205125 -
gcatattcagaatcattaaaca

SEQ ID NO: 147253 - DNA, 22 bp, Artificial Sequence
  Synthetic oligonucleotide; TTC chr11 5205117 5205138 5205122 5205117 -
agaatcattaaacagtcagttc

SEQ ID NO: 147254 - DNA, 22 bp, Artificial Sequence
  Synthetic oligonucleotide; TTA chr11 5205107 5205128 5205112 5205107 -
aacagtcagttctttggacaag

SEQ ID NO: 147255 - DNA, 22 bp, Artificial Sequence
  Synthetic oligonucleotide; TTC chr11 5205095 5205116 5205100 5205095 -
tttggacaagtcttatagaatg

SEQ ID NO: 147256 - DNA, 22 bp, Artificial Sequence
  Synthetic oligonucleotide; CTT chr11 5205093 5205114 5205098 5205093 -
tggacaagtcttatagaatgtt

SEQ ID NO: 147257 - DNA, 22 bp, Artificial Sequence
  Synthetic oligonucleotide; TTT chr11 5205092 5205113 5205097 5205092 -
ggacaagtcttatagaatgttc

SEQ ID NO: 147258 - DNA, 22 bp, Artificial Sequence
  Synthetic oligonucleotide; TTG chr11 5205091 5205112 5205096 5205091 -
gacaagtcttatagaatgttct

SEQ ID NO: 147259 - DNA, 22 bp, Artificial Sequence
  Synthetic oligonucleotide; CTT chr11 5205081 5205102 5205086 5205081 -
atagaatgttcttacctcttca

SEQ ID NO: 147260 - DNA, 22 bp, Artificial Sequence
  Synthetic oligonucleotide; TTA chr11 5205080 5205101 5205085 5205080 -
tagaatgttcttacctcttcag

SEQ ID NO: 147261 - DNA, 22 bp, Artificial Sequence
  Synthetic oligonucleotide; TTC chr11 5205070 5205091 5205075 5205070 -
ttacctcttcagccatcccaag

SEQ ID NO: 147262 - DNA, 22 bp, Artificial Sequence
  Synthetic oligonucleotide; CTT chr11 5205068 5205089 5205073 5205068 -
acctcttcagccatcccaagac

SEQ ID NO: 147263 - DNA, 22 bp, Artificial Sequence
  Synthetic oligonucleotide; TTA chr11 5205067 5205088 5205072 5205067 -
cctcttcagccatcccaagact

SEQ ID NO: 147264 - DNA, 22 bp, Artificial Sequence
  Synthetic oligonucleotide; CTC chr11 5205063 5205084 5205068 5205063 -
ttcagccatcccaagactcttg

SEQ ID NO: 147265 - DNA, 22 bp, Artificial Sequence
  Synthetic oligonucleotide; CTT chr11 5205061 5205082 5205066 5205061 -
cagccatcccaagactcttgag

SEQ ID NO: 147266 - DNA, 22 bp, Artificial Sequence
  Synthetic oligonucleotide; TTC chr11 5205060 5205081 5205065 5205060 -
agccatcccaagactcttgagg

SEQ ID NO: 147267 - DNA, 22 bp, Artificial Sequence
  Synthetic oligonucleotide; CTC chr11 5205044 5205065 5205049 5205044 -
ttgagggcctgacctcgcttac

SEQ ID NO: 147268 - DNA, 22 bp, Artificial Sequence
  Synthetic oligonucleotide; CTT chr11 5205042 5205063 5205047 5205042 -
gagggcctgacctcgcttacac

SEQ ID NO: 147269 - DNA, 22 bp, Artificial Sequence
  Synthetic oligonucleotide; TTG chr11 5205041 5205062 5205046 5205041 -
agggcctgacctcgcttacact

SEQ ID NO: 147270 - DNA, 22 bp, Artificial Sequence
  Synthetic oligonucleotide; CTG chr11 5205033 5205054 5205038 5205033 -
acctcgcttacactaaagcaga

SEQ ID NO: 147271 - DNA, 22 bp, Artificial Sequence
  Synthetic oligonucleotide; CTC chr11 5205028 5205049 5205033 5205028 -
gcttacactaaagcagatctgc

SEQ ID NO: 147272 - DNA, 22 bp, Artificial Sequence
  Synthetic oligonucleotide; CTT chr11 5205024 5205045 5205029 5205024 -
acactaaagcagatctgcctta

SEQ ID NO: 147273 - DNA, 22 bp, Artificial Sequence
  Synthetic oligonucleotide; TTA chr11 5205023 5205044 5205028 5205023 -
cactaaagcagatctgccttat

SEQ ID NO: 147274 - DNA, 22 bp, Artificial Sequence
  Synthetic oligonucleotide; CTA chr11 5205018 5205039 5205023 5205018 -
aagcagatctgccttatgcatc

SEQ ID NO: 147275 - DNA, 22 bp, Artificial Sequence
  Synthetic oligonucleotide; CTG chr11 5205007 5205028 5205012 5205007 -
ccttatgcatcactgaagtagg

SEQ ID NO: 147276 - DNA, 22 bp, Artificial Sequence
  Synthetic oligonucleotide; CTT chr11 5205003 5205024 5205008 5205003 -
atgcatcactgaagtagggagg

SEQ ID NO: 147277 - DNA, 22 bp, Artificial Sequence
  Synthetic oligonucleotide; TTA chr11 5205002 5205023 5205007 5205002 -
tgcatcactgaagtagggaggg

SEQ ID NO: 147278 - DNA, 22 bp, Artificial Sequence
  Synthetic oligonucleotide; CTG chr11 5204992 5205013 5204997 5204992 -
aagtagggagggaagaaagttt

SEQ ID NO: 147279 - DNA, 22 bp, Artificial Sequence
  Synthetic oligonucleotide; TTT chr11 5204970 5204991 5204975 5204970 -
gatgaactacttctgaccccta

SEQ ID NO: 147280 - DNA, 22 bp, Artificial Sequence
  Synthetic oligonucleotide; TTG chr11 5204969 5204990 5204974 5204969 -
atgaactacttctgacccctag

SEQ ID NO: 147281 - DNA, 22 bp, Artificial Sequence
  Synthetic oligonucleotide; CTA chr11 5204961 5204982 5204966 5204961 -
cttctgacccctagtggtgtcc

SEQ ID NO: 147282 - DNA, 22 bp, Artificial Sequence
  Synthetic oligonucleotide; CTT chr11 5204958 5204979 5204963 5204958 -
ctgacccctagtggtgtccaga

SEQ ID NO: 147283 - DNA, 22 bp, Artificial Sequence
  Synthetic oligonucleotide; TTC chr11 5204957 5204978 5204962 5204957 -
tgacccctagtggtgtccagaa

SEQ ID NO: 147284 - DNA, 22 bp, Artificial Sequence
  Synthetic oligonucleotide; CTG chr11 5204955 5204976 5204960 5204955 -
acccctagtggtgtccagaaaa

SEQ ID NO: 147285 - DNA, 22 bp, Artificial Sequence
  Synthetic oligonucleotide; CTA chr11 5204948 5204969 5204953 5204948 -
gtggtgtccagaaaagaccatt

SEQ ID NO: 147286 - DNA, 22 bp, Artificial Sequence
  Synthetic oligonucleotide; TTA chr11 5204925 5204946 5204930 5204925 -
aaggaatgacctttaaaggatg

SEQ ID NO: 147287 - DNA, 22 bp, Artificial Sequence
  Synthetic oligonucleotide; CTT chr11 5204912 5204933 5204917 5204912 -
taaaggatggacatacaatttt

SEQ ID NO: 147288 - DNA, 22 bp, Artificial Sequence
  Synthetic oligonucleotide; TTT chr11 5204911 5204932 5204916 5204911 -
aaaggatggacatacaattttt

SEQ ID NO: 147289 - DNA, 22 bp, Artificial Sequence
  Synthetic oligonucleotide; TTA chr11 5204910 5204931 5204915 5204910 -
aaggatggacatacaatttttt

SEQ ID NO: 147290 - DNA, 22 bp, Artificial Sequence
  Synthetic oligonucleotide; TTT chr11 5204891 5204912 5204896 5204891 -
tttgtccaaggcaggacatgtg

SEQ ID NO: 147291 - DNA, 22 bp, Artificial Sequence
  Synthetic oligonucleotide; TTT chr11 5204890 5204911 5204895 5204890 -
ttgtccaaggcaggacatgtgt

SEQ ID NO: 147292 - DNA, 22 bp, Artificial Sequence
  Synthetic oligonucleotide; TTT chr11 5204889 5204910 5204894 5204889 -
tgtccaaggcaggacatgtgtg

SEQ ID NO: 147293 - DNA, 22 bp, Artificial Sequence
  Synthetic oligonucleotide; TTT chr11 5204888 5204909 5204893 5204888 -
gtccaaggcaggacatgtgtgg

SEQ ID NO: 147294 - DNA, 22 bp, Artificial Sequence
  Synthetic oligonucleotide; TTG chr11 5204887 5204908 5204892 5204887 -
tccaaggcaggacatgtgtggg

SEQ ID NO: 147295 - DNA, 22 bp, Artificial Sequence
  Synthetic oligonucleotide; CTT chr11 5204859 5204880 5204864 5204859 -
tcagtaattatgttctaagaac

SEQ ID NO: 147296 - DNA, 22 bp, Artificial Sequence
  Synthetic oligonucleotide; TTT chr11 5204858 5204879 5204863 5204858 -
cagtaattatgttctaagaaca

SEQ ID NO: 147297 - DNA, 22 bp, Artificial Sequence
  Synthetic oligonucleotide; TTC chr11 5204857 5204878 5204862 5204857 -
agtaattatgttctaagaacag

SEQ ID NO: 147298 - DNA, 22 bp, Artificial Sequence
  Synthetic oligonucleotide; TTA chr11 5204849 5204870 5204854 5204849 -
tgttctaagaacagcaaaaact

SEQ ID NO: 147299 - DNA, 22 bp, Artificial Sequence
  Synthetic oligonucleotide; TTC chr11 5204844 5204865 5204849 5204844 -
taagaacagcaaaaactccact

SEQ ID NO: 147300 - DNA, 22 bp, Artificial Sequence
  Synthetic oligonucleotide; CTA chr11 5204842 5204863 5204847 5204842 -
agaacagcaaaaactccactgc

SEQ ID NO: 147301 - DNA, 22 bp, Artificial Sequence
  Synthetic oligonucleotide; CTC chr11 5204826 5204847 5204831 5204826 -
cactgccttggcaaataggaat

SEQ ID NO: 147302 - DNA, 22 bp, Artificial Sequence
  Synthetic oligonucleotide; CTG chr11 5204821 5204842 5204826 5204821 -
ccttggcaaataggaatgtttt

SEQ ID NO: 147303 - DNA, 22 bp, Artificial Sequence
  Synthetic oligonucleotide; CTT chr11 5204817 5204838 5204822 5204817 -
ggcaaataggaatgttttagtt

SEQ ID NO: 147304 - DNA, 22 bp, Artificial Sequence
  Synthetic oligonucleotide; TTG chr11 5204816 5204837 5204821 5204816 -
gcaaataggaatgttttagttc

SEQ ID NO: 147305 - DNA, 22 bp, Artificial Sequence
  Synthetic oligonucleotide; TTT chr11 5204800 5204821 5204805 5204800 -
tagttctatagaattataaaga

SEQ ID NO: 147306 - DNA, 22 bp, Artificial Sequence
  Synthetic oligonucleotide; TTT chr11 5204799 5204820 5204804 5204799 -
agttctatagaattataaagaa

SEQ ID NO: 147307 - DNA, 22 bp, Artificial Sequence
  Synthetic oligonucleotide; TTA chr11 5204798 5204819 5204803 5204798 -
gttctatagaattataaagaag

SEQ ID NO: 147308 - DNA, 22 bp, Artificial Sequence
  Synthetic oligonucleotide; TTC chr11 5204794 5204815 5204799 5204794 -
tatagaattataaagaagctgt

SEQ ID NO: 147309 - DNA, 22 bp, Artificial Sequence
  Synthetic oligonucleotide; CTA chr11 5204792 5204813 5204797 5204792 -
tagaattataaagaagctgtct

SEQ ID NO: 147310 - DNA, 22 bp, Artificial Sequence
  Synthetic oligonucleotide; TTA chr11 5204784 5204805 5204789 5204784 -
taaagaagctgtcttttaaaca

SEQ ID NO: 147311 - DNA, 22 bp, Artificial Sequence
  Synthetic oligonucleotide; CTG chr11 5204773 5204794 5204778 5204773 -
tcttttaaacacaatatacttt

SEQ ID NO: 147312 - DNA, 22 bp, Artificial Sequence
  Synthetic oligonucleotide; CTT chr11 5204769 5204790 5204774 5204769 -
ttaaacacaatatactttctct

SEQ ID NO: 147313 - DNA, 22 bp, Artificial Sequence
  Synthetic oligonucleotide; TTT chr11 5204768 5204789 5204773 5204768 -
taaacacaatatactttctcta

SEQ ID NO: 147314 - DNA, 22 bp, Artificial Sequence
  Synthetic oligonucleotide; TTT chr11 5204767 5204788 5204772 5204767 -
aaacacaatatactttctctat

SEQ ID NO: 147315 - DNA, 22 bp, Artificial Sequence
  Synthetic oligonucleotide; TTA chr11 5204766 5204787 5204771 5204766 -
aacacaatatactttctctatg

SEQ ID NO: 147316 - DNA, 22 bp, Artificial Sequence
  Synthetic oligonucleotide; CTT chr11 5204752 5204773 5204757 5204752 -
tctctatgtctttggaacaatg

SEQ ID NO: 147317 - DNA, 22 bp, Artificial Sequence
  Synthetic oligonucleotide; TTT chr11 5204751 5204772 5204756 5204751 -
ctctatgtctttggaacaatga

SEQ ID NO: 147318 - DNA, 22 bp, Artificial Sequence
  Synthetic oligonucleotide; TTC chr11 5204750 5204771 5204755 5204750 -
tctatgtctttggaacaatgac

SEQ ID NO: 147319 - DNA, 22 bp, Artificial Sequence
  Synthetic oligonucleotide; CTC chr11 5204748 5204769 5204753 5204748 -
tatgtctttggaacaatgacta

SEQ ID NO: 147320 - DNA, 22 bp, Artificial Sequence
  Synthetic oligonucleotide; CTA chr11 5204746 5204767 5204751 5204746 -
tgtctttggaacaatgactatt

SEQ ID NO: 147321 - DNA, 22 bp, Artificial Sequence
  Synthetic oligonucleotide; CTT chr11 5204740 5204761 5204745 5204740 -
tggaacaatgactattggtcat

SEQ ID NO: 147322 - DNA, 22 bp, Artificial Sequence
  Synthetic oligonucleotide; TTT chr11 5204739 5204760 5204744 5204739 -
ggaacaatgactattggtcatt

SEQ ID NO: 147323 - DNA, 22 bp, Artificial Sequence
  Synthetic oligonucleotide; TTG chr11 5204738 5204759 5204743 5204738 -
gaacaatgactattggtcatta

SEQ ID NO: 147324 - DNA, 22 bp, Artificial Sequence
  Synthetic oligonucleotide; CTA chr11 5204726 5204747 5204731 5204726 -
ttggtcattaccctattttaaa

SEQ ID NO: 147325 - DNA, 22 bp, Artificial Sequence
  Synthetic oligonucleotide; TTG chr11 5204723 5204744 5204728 5204723 -
gtcattaccctattttaaagta

SEQ ID NO: 147326 - DNA, 22 bp, Artificial Sequence
  Synthetic oligonucleotide; TTA chr11 5204716 5204737 5204721 5204716 -
ccctattttaaagtaagcaagt

SEQ ID NO: 147327 - DNA, 22 bp, Artificial Sequence
  Synthetic oligonucleotide; CTA chr11 5204711 5204732 5204716 5204711 -
ttttaaagtaagcaagtaatca

SEQ ID NO: 147328 - DNA, 22 bp, Artificial Sequence
  Synthetic oligonucleotide; TTT chr11 5204708 5204729 5204713 5204708 -
taaagtaagcaagtaatcacac

SEQ ID NO: 147329 - DNA, 22 bp, Artificial Sequence
  Synthetic oligonucleotide; TTT chr11 5204707 5204728 5204712 5204707 -
aaagtaagcaagtaatcacaca

SEQ ID NO: 147330 - DNA, 22 bp, Artificial Sequence
  Synthetic oligonucleotide; TTA chr11 5204706 5204727 5204711 5204706 -
aagtaagcaagtaatcacacag

SEQ ID NO: 147331 - DNA, 22 bp, Artificial Sequence
  Synthetic oligonucleotide; TTA chr11 5204677 5204698 5204682 5204677 -
ttctgaaaagacagaaaaaaaa

SEQ ID NO: 147332 - DNA, 22 bp, Artificial Sequence
  Synthetic oligonucleotide; TTC chr11 5204674 5204695 5204679 5204674 -
tgaaaagacagaaaaaaaaaaa

SEQ ID NO: 147333 - DNA, 22 bp, Artificial Sequence
  Synthetic oligonucleotide; CTG chr11 5204672 5204693 5204677 5204672 -
aaaagacagaaaaaaaaaaaaa

SEQ ID NO: 147334 - DNA, 22 bp, Artificial Sequence
  Synthetic oligonucleotide; TTT chr11 5204638 5204659 5204643 5204638 -
ctgcatatgtaggtcagtttta

SEQ ID NO: 147335 - DNA, 22 bp, Artificial Sequence
  Synthetic oligonucleotide; TTC chr11 5204637 5204658 5204642 5204637 -
tgcatatgtaggtcagttttaa

SEQ ID NO: 147336 - DNA, 22 bp, Artificial Sequence
  Synthetic oligonucleotide; CTG chr11 5204635 5204656 5204640 5204635 -
catatgtaggtcagttttaatc

SEQ ID NO: 147337 - DNA, 22 bp, Artificial Sequence
  Synthetic oligonucleotide; TTT chr11 5204618 5204639 5204623 5204618 -
taatcagagggcatcagaaaag

SEQ ID NO: 147338 - DNA, 22 bp, Artificial Sequence
  Synthetic oligonucleotide; TTT chr11 5204617 5204638 5204622 5204617 -
aatcagagggcatcagaaaaga

SEQ ID NO: 147339 - DNA, 22 bp, Artificial Sequence
  Synthetic oligonucleotide; TTA chr11 5204616 5204637 5204621 5204616 -
atcagagggcatcagaaaagac

SEQ ID NO: 147340 - DNA, 22 bp, Artificial Sequence
  Synthetic oligonucleotide; CTC chr11 5204592 5204613 5204597 5204592 -
ctgaaagaatgacctggttatt

SEQ ID NO: 147341 - DNA, 22 bp, Artificial Sequence
  Synthetic oligonucleotide; CTG chr11 5204589 5204610 5204594 5204589 -
aaagaatgacctggttattata

SEQ ID NO: 147342 - DNA, 22 bp, Artificial Sequence
  Synthetic oligonucleotide; CTG chr11 5204576 5204597 5204581 5204576 -
gttattataatcacagatttgc

SEQ ID NO: 147343 - DNA, 22 bp, Artificial Sequence
  Synthetic oligonucleotide; TTA chr11 5204572 5204593 5204577 5204572 -
ttataatcacagatttgctttc

SEQ ID NO: 147344 - DNA, 22 bp, Artificial Sequence
  Synthetic oligonucleotide; TTA chr11 5204569 5204590 5204574 5204569 -
taatcacagatttgctttccaa

SEQ ID NO: 147345 - DNA, 22 bp, Artificial Sequence
  Synthetic oligonucleotide; TTT chr11 5204556 5204577 5204561 5204556 -
gctttccaagtcaacattccag

SEQ ID NO: 147346 - DNA, 22 bp, Artificial Sequence
  Synthetic oligonucleotide; TTG chr11 5204555 5204576 5204560 5204555 -
ctttccaagtcaacattccaga

SEQ ID NO: 147347 - DNA, 22 bp, Artificial Sequence
  Synthetic oligonucleotide; CTT chr11 5204552 5204573 5204557 5204552 -
tccaagtcaacattccagacag

SEQ ID NO: 147348 - DNA, 22 bp, Artificial Sequence
  Synthetic oligonucleotide; TTT chr11 5204551 5204572 5204556 5204551 -
ccaagtcaacattccagacagt

SEQ ID NO: 147349 - DNA, 22 bp, Artificial Sequence
  Synthetic oligonucleotide; TTC chr11 5204550 5204571 5204555 5204550 -
caagtcaacattccagacagtg

SEQ ID NO: 147350 - DNA, 22 bp, Artificial Sequence
  Synthetic oligonucleotide; TTC chr11 5204537 5204558 5204542 5204537 -
cagacagtgctcagaggggata

SEQ ID NO: 147351 - DNA, 22 bp, Artificial Sequence
  Synthetic oligonucleotide; CTC chr11 5204525 5204546 5204530 5204525 -
agaggggatacgaaaacccttt

SEQ ID NO: 147352 - DNA, 22 bp, Artificial Sequence
  Synthetic oligonucleotide; CTT chr11 5204504 5204525 5204509 5204504 -
ttatttctccagactcaaattc

SEQ ID NO: 147353 - DNA, 22 bp, Artificial Sequence
  Synthetic oligonucleotide; TTT chr11 5204503 5204524 5204508 5204503 -
tatttctccagactcaaattca

SEQ ID NO: 147354 - DNA, 22 bp, Artificial Sequence
  Synthetic oligonucleotide; TTT chr11 5204502 5204523 5204507 5204502 -
atttctccagactcaaattcac

SEQ ID NO: 147355 - DNA, 22 bp, Artificial Sequence
  Synthetic oligonucleotide; TTA chr11 5204501 5204522 5204506 5204501 -
tttctccagactcaaattcact

SEQ ID NO: 147356 - DNA, 22 bp, Artificial Sequence
  Synthetic oligonucleotide; TTT chr11 5204498 5204519 5204503 5204498 -
ctccagactcaaattcactgct

SEQ ID NO: 147357 - DNA, 22 bp, Artificial Sequence
  Synthetic oligonucleotide; TTC chr11 5204497 5204518 5204502 5204497 -
tccagactcaaattcactgcta

SEQ ID NO: 147358 - DNA, 22 bp, Artificial Sequence
  Synthetic oligonucleotide; CTC chr11 5204495 5204516 5204500 5204495 -
cagactcaaattcactgctatt

SEQ ID NO: 147359 - DNA, 22 bp, Artificial Sequence
  Synthetic oligonucleotide; CTC chr11 5204488 5204509 5204493 5204488 -
aaattcactgctatttgtcttc

SEQ ID NO: 147360 - DNA, 22 bp, Artificial Sequence
  Synthetic oligonucleotide; TTC chr11 5204482 5204503 5204487 5204482 -
actgctatttgtcttctctatt

SEQ ID NO: 147361 - DNA, 22 bp, Artificial Sequence
  Synthetic oligonucleotide; CTG chr11 5204478 5204499 5204483 5204478 -
ctatttgtcttctctatttatt

SEQ ID NO: 147362 - DNA, 22 bp, Artificial Sequence
  Synthetic oligonucleotide; CTA chr11 5204475 5204496 5204480 5204475 -
tttgtcttctctatttatttta

SEQ ID NO: 147363 - DNA, 22 bp, Artificial Sequence
  Synthetic oligonucleotide; TTT chr11 5204472 5204493 5204477 5204472 -
gtcttctctatttattttatta

SEQ ID NO: 147364 - DNA, 22 bp, Artificial Sequence
  Synthetic oligonucleotide; TTG chr11 5204471 5204492 5204476 5204471 -
tcttctctatttattttattat

SEQ ID NO: 147365 - DNA, 22 bp, Artificial Sequence
  Synthetic oligonucleotide; CTT chr11 5204467 5204488 5204472 5204467 -
ctctatttattttattataggc

SEQ ID NO: 147366 - DNA, 22 bp, Artificial Sequence
  Synthetic oligonucleotide; TTC chr11 5204466 5204487 5204471 5204466 -
tctatttattttattataggca

SEQ ID NO: 147367 - DNA, 22 bp, Artificial Sequence
  Synthetic oligonucleotide; CTC chr11 5204464 5204485 5204469 5204464 -
tatttattttattataggcatt

SEQ ID NO: 147368 - DNA, 22 bp, Artificial Sequence
  Synthetic oligonucleotide; CTA chr11 5204462 5204483 5204467 5204462 -
tttattttattataggcattgt

SEQ ID NO: 147369 - DNA, 22 bp, Artificial Sequence
  Synthetic oligonucleotide; TTT chr11 5204459 5204480 5204464 5204459 -
attttattataggcattgttct

SEQ ID NO: 147370 - DNA, 22 bp, Artificial Sequence
  Synthetic oligonucleotide; TTA chr11 5204458 5204479 5204463 5204458 -
ttttattataggcattgttctg

SEQ ID NO: 147371 - DNA, 22 bp, Artificial Sequence
  Synthetic oligonucleotide; TTT chr11 5204455 5204476 5204460 5204455 -
tattataggcattgttctggtt

SEQ ID NO: 147372 - DNA, 22 bp, Artificial Sequence
  Synthetic oligonucleotide; TTT chr11 5204454 5204475 5204459 5204454 -
attataggcattgttctggttg

SEQ ID NO: 147373 - DNA, 22 bp, Artificial Sequence
  Synthetic oligonucleotide; TTA chr11 5204453 5204474 5204458 5204453 -
ttataggcattgttctggttgc

SEQ ID NO: 147374 - DNA, 22 bp, Artificial Sequence
  Synthetic oligonucleotide; TTA chr11 5204450 5204471 5204455 5204450 -
taggcattgttctggttgctgg

SEQ ID NO: 147375 - DNA, 22 bp, Artificial Sequence
  Synthetic oligonucleotide; TTG chr11 5204441 5204462 5204446 5204441 -
ttctggttgctgggaactcaga

SEQ ID NO: 147376 - DNA, 22 bp, Artificial Sequence
  Synthetic oligonucleotide; TTC chr11 5204438 5204459 5204443 5204438 -
tggttgctgggaactcagactg

SEQ ID NO: 147377 - DNA, 22 bp, Artificial Sequence
  Synthetic oligonucleotide; CTG chr11 5204436 5204457 5204441 5204436 -
gttgctgggaactcagactgag

SEQ ID NO: 147378 - DNA, 22 bp, Artificial Sequence
  Synthetic oligonucleotide; TTG chr11 5204432 5204453 5204437 5204432 -
ctgggaactcagactgagatac

SEQ ID NO: 147379 - DNA, 22 bp, Artificial Sequence
  Synthetic oligonucleotide; CTG chr11 5204429 5204450 5204434 5204429 -
ggaactcagactgagataccat

SEQ ID NO: 147380 - DNA, 22 bp, Artificial Sequence
  Synthetic oligonucleotide; CTC chr11 5204422 5204443 5204427 5204422 -
agactgagataccatacactga

SEQ ID NO: 147381 - DNA, 22 bp, Artificial Sequence
  Synthetic oligonucleotide; CTG chr11 5204416 5204437 5204421 5204416 -
agataccatacactgactctca

SEQ ID NO: 147382 - DNA, 22 bp, Artificial Sequence
  Synthetic oligonucleotide; CTG chr11 5204401 5204422 5204406 5204401 -
actctcagatagcataacacaa

SEQ ID NO: 147383 - DNA, 22 bp, Artificial Sequence
  Synthetic oligonucleotide; CTC chr11 5204397 5204418 5204402 5204397 -
tcagatagcataacacaacatg

SEQ ID NO: 147384 - DNA, 22 bp, Artificial Sequence
  Synthetic oligonucleotide; CTC chr11 5204395 5204416 5204400 5204395 -
agatagcataacacaacatgat

SEQ ID NO: 147385 - DNA, 22 bp, Artificial Sequence
  Synthetic oligonucleotide; CTT chr11 5204368 5204389 5204373 5204368 -
ggaaaactgtaaatctttttgt

SEQ ID NO: 147386 - DNA, 22 bp, Artificial Sequence
  Synthetic oligonucleotide; TTG chr11 5204367 5204388 5204372 5204367 -
gaaaactgtaaatctttttgtt

SEQ ID NO: 147387 - DNA, 22 bp, Artificial Sequence
  Synthetic oligonucleotide; CTG chr11 5204359 5204380 5204364 5204359 -
taaatctttttgttttttaaat

SEQ ID NO: 147388 - DNA, 22 bp, Artificial Sequence
  Synthetic oligonucleotide; CTT chr11 5204351 5204372 5204356 5204351 -
tttgttttttaaatacaggtgg

SEQ ID NO: 147389 - DNA, 22 bp, Artificial Sequence
  Synthetic oligonucleotide; TTT chr11 5204350 5204371 5204355 5204350 -
ttgttttttaaatacaggtgga

SEQ ID NO: 147390 - DNA, 22 bp, Artificial Sequence
  Synthetic oligonucleotide; TTT chr11 5204349 5204370 5204354 5204349 -
tgttttttaaatacaggtggag

SEQ ID NO: 147391 - DNA, 22 bp, Artificial Sequence
  Synthetic oligonucleotide; TTT chr11 5204348 5204369 5204353 5204348 -
gttttttaaatacaggtggagc

SEQ ID NO: 147392 - DNA, 22 bp, Artificial Sequence
  Synthetic oligonucleotide; TTG chr11 5204347 5204368 5204352 5204347 -
ttttttaaatacaggtggagca

SEQ ID NO: 147393 - DNA, 22 bp, Artificial Sequence
  Synthetic oligonucleotide; TTT chr11 5204344 5204365 5204349 5204344 -
tttaaatacaggtggagcatct

SEQ ID NO: 147394 - DNA, 22 bp, Artificial Sequence
  Synthetic oligonucleotide; TTT chr11 5204343 5204364 5204348 5204343 -
ttaaatacaggtggagcatctg

SEQ ID NO: 147395 - DNA, 22 bp, Artificial Sequence
  Synthetic oligonucleotide; TTT chr11 5204342 5204363 5204347 5204342 -
taaatacaggtggagcatctgg

SEQ ID NO: 147396 - DNA, 22 bp, Artificial Sequence
  Synthetic oligonucleotide; TTT chr11 5204341 5204362 5204346 5204341 -
aaatacaggtggagcatctggc

SEQ ID NO: 147397 - DNA, 22 bp, Artificial Sequence
  Synthetic oligonucleotide; TTA chr11 5204340 5204361 5204345 5204340 -
aatacaggtggagcatctggca

SEQ ID NO: 147398 - DNA, 22 bp, Artificial Sequence
  Synthetic oligonucleotide; CTG chr11 5204321 5204342 5204326 5204321 -
gcacacctgacatattgatctt

SEQ ID NO: 147399 - DNA, 22 bp, Artificial Sequence
  Synthetic oligonucleotide; CTG chr11 5204312 5204333 5204317 5204312 -
acatattgatcttgtttttctt

SEQ ID NO: 147400 - DNA, 22 bp, Artificial Sequence
  Synthetic oligonucleotide; TTG chr11 5204304 5204325 5204309 5204304 -
atcttgtttttctttaaatctt

SEQ ID NO: 147401 - DNA, 22 bp, Artificial Sequence
  Synthetic oligonucleotide; CTT chr11 5204299 5204320 5204304 5204299 -
gtttttctttaaatcttcattt

SEQ ID NO: 147402 - DNA, 22 bp, Artificial Sequence
  Synthetic oligonucleotide; TTG chr11 5204298 5204319 5204303 5204298 -
tttttctttaaatcttcattta

SEQ ID NO: 147403 - DNA, 22 bp, Artificial Sequence
  Synthetic oligonucleotide; TTT chr11 5204295 5204316 5204300 5204295 -
ttctttaaatcttcatttattt

SEQ ID NO: 147404 - DNA, 22 bp, Artificial Sequence
  Synthetic oligonucleotide; TTT chr11 5204294 5204315 5204299 5204294 -
tctttaaatcttcatttattta

SEQ ID NO: 147405 - DNA, 22 bp, Artificial Sequence
  Synthetic oligonucleotide; TTT chr11 5204293 5204314 5204298 5204293 -
ctttaaatcttcatttatttac

SEQ ID NO: 147406 - DNA, 22 bp, Artificial Sequence
  Synthetic oligonucleotide; TTC chr11 5204292 5204313 5204297 5204292 -
tttaaatcttcatttatttacc

SEQ ID NO: 147407 - DNA, 22 bp, Artificial Sequence
  Synthetic oligonucleotide; CTT chr11 5204290 5204311 5204295 5204290 -
taaatcttcatttatttacctt

SEQ ID NO: 147408 - DNA, 22 bp, Artificial Sequence
  Synthetic oligonucleotide; TTT chr11 5204289 5204310 5204294 5204289 -
aaatcttcatttatttacctta

SEQ ID NO: 147409 - DNA, 22 bp, Artificial Sequence
  Synthetic oligonucleotide; TTA chr11 5204288 5204309 5204293 5204288 -
aatcttcatttatttaccttat

SEQ ID NO: 147410 - DNA, 22 bp, Artificial Sequence
  Synthetic oligonucleotide; CTT chr11 5204282 5204303 5204287 5204282 -
catttatttaccttatcaaaac

SEQ ID NO: 147411 - DNA, 22 bp, Artificial Sequence
  Synthetic oligonucleotide; TTC chr11 5204281 5204302 5204286 5204281 -
atttatttaccttatcaaaact

SEQ ID NO: 147412 - DNA, 22 bp, Artificial Sequence
  Synthetic oligonucleotide; TTT chr11 5204277 5204298 5204282 5204277 -
atttaccttatcaaaactatgc

SEQ ID NO: 147413 - DNA, 22 bp, Artificial Sequence
  Synthetic oligonucleotide; TTA chr11 5204276 5204297 5204281 5204276 -
tttaccttatcaaaactatgct

SEQ ID NO: 147414 - DNA, 22 bp, Artificial Sequence
  Synthetic oligonucleotide; TTT chr11 5204273 5204294 5204278 5204273 -
accttatcaaaactatgctctt

SEQ ID NO: 147415 - DNA, 22 bp, Artificial Sequence
  Synthetic oligonucleotide; TTA chr11 5204272 5204293 5204277 5204272 -
ccttatcaaaactatgctcttt

SEQ ID NO: 147416 - DNA, 22 bp, Artificial Sequence
  Synthetic oligonucleotide; CTT chr11 5204268 5204289 5204273 5204268 -
atcaaaactatgctctttcatc

SEQ ID NO: 147417 - DNA, 22 bp, Artificial Sequence
  Synthetic oligonucleotide; TTA chr11 5204267 5204288 5204272 5204267 -
tcaaaactatgctctttcatcc

SEQ ID NO: 147418 - DNA, 22 bp, Artificial Sequence
  Synthetic oligonucleotide; CTA chr11 5204258 5204279 5204263 5204258 -
tgctctttcatcctacctttca

SEQ ID NO: 147419 - DNA, 22 bp, Artificial Sequence
  Synthetic oligonucleotide; CTC chr11 5204253 5204274 5204258 5204253 -
tttcatcctacctttcaaaaca

SEQ ID NO: 147420 - DNA, 22 bp, Artificial Sequence
  Synthetic oligonucleotide; CTT chr11 5204251 5204272 5204256 5204251 -
tcatcctacctttcaaaacata

SEQ ID NO: 147421 - DNA, 22 bp, Artificial Sequence
  Synthetic oligonucleotide; TTT chr11 5204250 5204271 5204255 5204250 -
catcctacctttcaaaacatat

SEQ ID NO: 147422 - DNA, 22 bp, Artificial Sequence
  Synthetic oligonucleotide; TTC chr11 5204249 5204270 5204254 5204249 -
atcctacctttcaaaacatatt

SEQ ID NO: 147423 - DNA, 22 bp, Artificial Sequence
  Synthetic oligonucleotide; CTA chr11 5204243 5204264 5204248 5204243 -
cctttcaaaacatattttaaaa

SEQ ID NO: 147424 - DNA, 22 bp, Artificial Sequence
  Synthetic oligonucleotide; CTT chr11 5204239 5204260 5204244 5204239 -
tcaaaacatattttaaaaaatc

SEQ ID NO: 147425 - DNA, 22 bp, Artificial Sequence
  Synthetic oligonucleotide; TTT chr11 5204238 5204259 5204243 5204238 -
caaaacatattttaaaaaatcc

SEQ ID NO: 147426 - DNA, 22 bp, Artificial Sequence
  Synthetic oligonucleotide; TTC chr11 5204237 5204258 5204242 5204237 -
aaaacatattttaaaaaatcct

SEQ ID NO: 147427 - DNA, 22 bp, Artificial Sequence
  Synthetic oligonucleotide; TTT chr11 5204226 5204247 5204231 5204226 -
taaaaaatcctccaacatgtat

SEQ ID NO: 147428 - DNA, 22 bp, Artificial Sequence
  Synthetic oligonucleotide; TTT chr11 5204225 5204246 5204230 5204225 -
aaaaaatcctccaacatgtatt

SEQ ID NO: 147429 - DNA, 22 bp, Artificial Sequence
  Synthetic oligonucleotide; TTA chr11 5204224 5204245 5204229 5204224 -
aaaaatcctccaacatgtattt

SEQ ID NO: 147430 - DNA, 22 bp, Artificial Sequence
  Synthetic oligonucleotide; CTC chr11 5204214 5204235 5204219 5204214 -
caacatgtattttgctctggta

SEQ ID NO: 147431 - DNA, 22 bp, Artificial Sequence
  Synthetic oligonucleotide; TTT chr11 5204202 5204223 5204207 5204202 -
tgctctggtaatcccaaaaggc

SEQ ID NO: 147432 - DNA, 22 bp, Artificial Sequence
  Synthetic oligonucleotide; TTT chr11 5204201 5204222 5204206 5204201 -
gctctggtaatcccaaaaggct

SEQ ID NO: 147433 - DNA, 22 bp, Artificial Sequence
  Synthetic oligonucleotide; TTG chr11 5204200 5204221 5204205 5204200 -
ctctggtaatcccaaaaggctg

SEQ ID NO: 147434 - DNA, 22 bp, Artificial Sequence
  Synthetic oligonucleotide; CTC chr11 5204197 5204218 5204202 5204197 -
tggtaatcccaaaaggctgata

SEQ ID NO: 147435 - DNA, 22 bp, Artificial Sequence
  Synthetic oligonucleotide; CTG chr11 5204195 5204216 5204200 5204195 -
gtaatcccaaaaggctgatagt

SEQ ID NO: 147436 - DNA, 22 bp, Artificial Sequence
  Synthetic oligonucleotide; CTG chr11 5204178 5204199 5204183 5204178 -
atagtctctatggtggcaacat

SEQ ID NO: 147437 - DNA, 22 bp, Artificial Sequence
  Synthetic oligonucleotide; CTC chr11 5204170 5204191 5204175 5204170 -
tatggtggcaacatggataata

SEQ ID NO: 147438 - DNA, 22 bp, Artificial Sequence
  Synthetic oligonucleotide; CTA chr11 5204168 5204189 5204173 5204168 -
tggtggcaacatggataatact

SEQ ID NO: 147439 - DNA, 22 bp, Artificial Sequence
  Synthetic oligonucleotide; CTG chr11 5204145 5204166 5204150 5204145 -
ttccccatctagatggtctcat

SEQ ID NO: 147440 - DNA, 22 bp, Artificial Sequence
  Synthetic oligonucleotide; TTC chr11 5204142 5204163 5204147 5204142 -
cccatctagatggtctcatttc

SEQ ID NO: 147441 - DNA, 22 bp, Artificial Sequence
  Synthetic oligonucleotide; CTA chr11 5204134 5204155 5204139 5204134 -
gatggtctcatttcttctgtat

SEQ ID NO: 147442 - DNA, 22 bp, Artificial Sequence
  Synthetic oligonucleotide; CTC chr11 5204125 5204146 5204130 5204125 -
atttcttctgtatctagtctga

SEQ ID NO: 147443 - DNA, 22 bp, Artificial Sequence
  Synthetic oligonucleotide; TTT chr11 5204121 5204142 5204126 5204121 -
cttctgtatctagtctgaagaa

SEQ ID NO: 147444 - DNA, 22 bp, Artificial Sequence
  Synthetic oligonucleotide; TTC chr11 5204120 5204141 5204125 5204120 -
ttctgtatctagtctgaagaag

SEQ ID NO: 147445 - DNA, 22 bp, Artificial Sequence
  Synthetic oligonucleotide; CTT chr11 5204118 5204139 5204123 5204118 -
ctgtatctagtctgaagaagcc

SEQ ID NO: 147446 - DNA, 22 bp, Artificial Sequence
  Synthetic oligonucleotide; TTC chr11 5204117 5204138 5204122 5204117 -
tgtatctagtctgaagaagcct

SEQ ID NO: 147447 - DNA, 22 bp, Artificial Sequence
  Synthetic oligonucleotide; CTG chr11 5204115 5204136 5204120 5204115 -
tatctagtctgaagaagcctga

SEQ ID NO: 147448 - DNA, 22 bp, Artificial Sequence
  Synthetic oligonucleotide; CTA chr11 5204109 5204130 5204114 5204109 -
gtctgaagaagcctgaatgaaa

SEQ ID NO: 147449 - DNA, 22 bp, Artificial Sequence
  Synthetic oligonucleotide; CTG chr11 5204104 5204125 5204109 5204104 -
aagaagcctgaatgaaagtaga

SEQ ID NO: 147450 - DNA, 22 bp, Artificial Sequence
  Synthetic oligonucleotide; CTG chr11 5204094 5204115 5204099 5204094 -
aatgaaagtagatttttaagct

SEQ ID NO: 147451 - DNA, 22 bp, Artificial Sequence
  Synthetic oligonucleotide; TTT chr11 5204079 5204100 5204084 5204079 -
ttaagctttgtagctagtctga

SEQ ID NO: 147452 - DNA, 22 bp, Artificial Sequence
  Synthetic oligonucleotide; TTT chr11 5204078 5204099 5204083 5204078 -
taagctttgtagctagtctgaa

SEQ ID NO: 147453 - DNA, 22 bp, Artificial Sequence
  Synthetic oligonucleotide; TTT chr11 5204077 5204098 5204082 5204077 -
aagctttgtagctagtctgaag

SEQ ID NO: 147454 - DNA, 22 bp, Artificial Sequence
  Synthetic oligonucleotide; TTA chr11 5204076 5204097 5204081 5204076 -
agctttgtagctagtctgaagc

SEQ ID NO: 147455 - DNA, 22 bp, Artificial Sequence
  Synthetic oligonucleotide; CTT chr11 5204071 5204092 5204076 5204071 -
tgtagctagtctgaagcctttg

SEQ ID NO: 147456 - DNA, 22 bp, Artificial Sequence
  Synthetic oligonucleotide; TTT chr11 5204070 5204091 5204075 5204070 -
gtagctagtctgaagcctttgt

SEQ ID NO: 147457 - DNA, 22 bp, Artificial Sequence
  Synthetic oligonucleotide; TTG chr11 5204069 5204090 5204074 5204069 -
tagctagtctgaagcctttgta

SEQ ID NO: 147458 - DNA, 22 bp, Artificial Sequence
  Synthetic oligonucleotide; CTA chr11 5204063 5204084 5204068 5204063 -
gtctgaagcctttgtagtcagt

SEQ ID NO: 147459 - DNA, 22 bp, Artificial Sequence
  Synthetic oligonucleotide; CTG chr11 5204058 5204079 5204063 5204058 -
aagcctttgtagtcagtctgaa

SEQ ID NO: 147460 - DNA, 22 bp, Artificial Sequence
  Synthetic oligonucleotide; CTT chr11 5204051 5204072 5204056 5204051 -
tgtagtcagtctgaagaaacct

SEQ ID NO: 147461 - DNA, 22 bp, Artificial Sequence
  Synthetic oligonucleotide; TTT chr11 5204050 5204071 5204055 5204050 -
gtagtcagtctgaagaaacctg

SEQ ID NO: 147462 - DNA, 22 bp, Artificial Sequence
  Synthetic oligonucleotide; TTG chr11 5204049 5204070 5204054 5204049 -
tagtcagtctgaagaaacctgc

SEQ ID NO: 147463 - DNA, 22 bp, Artificial Sequence
  Synthetic oligonucleotide; CTG chr11 5204038 5204059 5204043 5204038 -
aagaaacctgcatgaaaataga

SEQ ID NO: 147464 - DNA, 22 bp, Artificial Sequence
  Synthetic oligonucleotide; CTG chr11 5204028 5204049 5204033 5204028 -
catgaaaatagatttttttttt

SEQ ID NO: 147465 - DNA, 22 bp, Artificial Sequence
  Synthetic oligonucleotide; TTT chr11 5204013 5204034 5204018 5204013 -
tttttttcctttgggacagagt

SEQ ID NO: 147466 - DNA, 22 bp, Artificial Sequence
  Synthetic oligonucleotide; TTT chr11 5204012 5204033 5204017 5204012 -
ttttttcctttgggacagagtc

SEQ ID NO: 147467 - DNA, 22 bp, Artificial Sequence
  Synthetic oligonucleotide; TTT chr11 5204011 5204032 5204016 5204011 -
tttttcctttgggacagagtct

SEQ ID NO: 147468 - DNA, 22 bp, Artificial Sequence
  Synthetic oligonucleotide; TTT chr11 5204010 5204031 5204015 5204010 -
ttttcctttgggacagagtctt

SEQ ID NO: 147469 - DNA, 22 bp, Artificial Sequence
  Synthetic oligonucleotide; TTT chr11 5204009 5204030 5204014 5204009 -
tttcctttgggacagagtcttg

SEQ ID NO: 147470 - DNA, 22 bp, Artificial Sequence
  Synthetic oligonucleotide; TTT chr11 5204008 5204029 5204013 5204008 -
ttcctttgggacagagtcttgc

SEQ ID NO: 147471 - DNA, 22 bp, Artificial Sequence
  Synthetic oligonucleotide; TTT chr11 5204007 5204028 5204012 5204007 -
tcctttgggacagagtcttgct

SEQ ID NO: 147472 - DNA, 22 bp, Artificial Sequence
  Synthetic oligonucleotide; TTT chr11 5204006 5204027 5204011 5204006 -
cctttgggacagagtcttgctc

SEQ ID NO: 147473 - DNA, 22 bp, Artificial Sequence
  Synthetic oligonucleotide; TTC chr11 5204005 5204026 5204010 5204005 -
ctttgggacagagtcttgctct

SEQ ID NO: 147474 - DNA, 22 bp, Artificial Sequence
  Synthetic oligonucleotide; CTT chr11 5204002 5204023 5204007 5204002 -
tgggacagagtcttgctctgtc

SEQ ID NO: 147475 - DNA, 22 bp, Artificial Sequence
  Synthetic oligonucleotide; TTT chr11 5204001 5204022 5204006 5204001 -
gggacagagtcttgctctgtcg

SEQ ID NO: 147476 - DNA, 22 bp, Artificial Sequence
  Synthetic oligonucleotide; TTG chr11 5204000 5204021 5204005 5204000 -
ggacagagtcttgctctgtcgc

SEQ ID NO: 147477 - DNA, 22 bp, Artificial Sequence
  Synthetic oligonucleotide; CTT chr11 5203988 5204009 5203993 5203988 -
gctctgtcgcccagactggagt

SEQ ID NO: 147478 - DNA, 22 bp, Artificial Sequence
  Synthetic oligonucleotide; TTG chr11 5203987 5204008 5203992 5203987 -
ctctgtcgcccagactggagtg

SEQ ID NO: 147479 - DNA, 22 bp, Artificial Sequence
  Synthetic oligonucleotide; CTC chr11 5203984 5204005 5203989 5203984 -
tgtcgcccagactggagtgcaa

SEQ ID NO: 147480 - DNA, 22 bp, Artificial Sequence
  Synthetic oligonucleotide; CTG chr11 5203982 5204003 5203987 5203982 -
tcgcccagactggagtgcaatg

SEQ ID NO: 147481 - DNA, 22 bp, Artificial Sequence
  Synthetic oligonucleotide; CTG chr11 5203970 5203991 5203975 5203970 -
gagtgcaatggcgcgatctcgg

SEQ ID NO: 147482 - DNA, 22 bp, Artificial Sequence
  Synthetic oligonucleotide; CTC chr11 5203950 5203971 5203955 5203950 -
ggctcactgcaacttccacctc

SEQ ID NO: 147483 - DNA, 22 bp, Artificial Sequence
  Synthetic oligonucleotide; CTC chr11 5203945 5203966 5203950 5203945 -
actgcaacttccacctcccagg

SEQ ID NO: 147484 - DNA, 22 bp, Artificial Sequence
  Synthetic oligonucleotide; CTG chr11 5203941 5203962 5203946 5203941 -
caacttccacctcccaggatca

SEQ ID NO: 147485 - DNA, 22 bp, Artificial Sequence
  Synthetic oligonucleotide; CTT chr11 5203935 5203956 5203940 5203935 -
ccacctcccaggatcaagcaat

SEQ ID NO: 147486 - DNA, 22 bp, Artificial Sequence
  Synthetic oligonucleotide; TTC chr11 5203934 5203955 5203939 5203934 -
cacctcccaggatcaagcaatt

SEQ ID NO: 147487 - DNA, 22 bp, Artificial Sequence
  Synthetic oligonucleotide; CTC chr11 5203928 5203949 5203933 5203928 -
ccaggatcaagcaattctcctg

SEQ ID NO: 147488 - DNA, 22 bp, Artificial Sequence
  Synthetic oligonucleotide; TTC chr11 5203911 5203932 5203916 5203911 -
tcctgcctcagtctcccaagta

SEQ ID NO: 147489 - DNA, 22 bp, Artificial Sequence
  Synthetic oligonucleotide; CTC chr11 5203909 5203930 5203914 5203909 -
ctgcctcagtctcccaagtaac

SEQ ID NO: 147490 - DNA, 22 bp, Artificial Sequence
  Synthetic oligonucleotide; CTG chr11 5203906 5203927 5203911 5203906 -
cctcagtctcccaagtaactgg

SEQ ID NO: 147491 - DNA, 22 bp, Artificial Sequence
  Synthetic oligonucleotide; CTC chr11 5203902 5203923 5203907 5203902 -
agtctcccaagtaactgggatt

SEQ ID NO: 147492 - DNA, 22 bp, Artificial Sequence
  Synthetic oligonucleotide; CTC chr11 5203896 5203917 5203901 5203896 -
ccaagtaactgggattacagga

SEQ ID NO: 147493 - DNA, 22 bp, Artificial Sequence
  Synthetic oligonucleotide; CTG chr11 5203885 5203906 5203890 5203885 -
ggattacaggagcacactgcca

SEQ ID NO: 147494 - DNA, 22 bp, Artificial Sequence
  Synthetic oligonucleotide; TTA chr11 5203879 5203900 5203884 5203879 -
caggagcacactgccatgccca

SEQ ID NO: 147495 - DNA, 22 bp, Artificial Sequence
  Synthetic oligonucleotide; CTG chr11 5203866 5203887 5203871 5203866 -
ccatgcccagctaattattttt

SEQ ID NO: 147496 - DNA, 22 bp, Artificial Sequence
  Synthetic oligonucleotide; CTA chr11 5203853 5203874 5203858 5203853 -
attatttttgtgttttagtaga

SEQ ID NO: 147497 - DNA, 22 bp, Artificial Sequence
  Synthetic oligonucleotide; TTA chr11 5203849 5203870 5203854 5203849 -
tttttgtgttttagtagagaca

SEQ ID NO: 147498 - DNA, 22 bp, Artificial Sequence
  Synthetic oligonucleotide; TTT chr11 5203846 5203867 5203851 5203846 -
ttgtgttttagtagagacaggg

SEQ ID NO: 147499 - DNA, 22 bp, Artificial Sequence
  Synthetic oligonucleotide; TTT chr11 5203845 5203866 5203850 5203845 -
tgtgttttagtagagacagggt

SEQ ID NO: 147500 - DNA, 22 bp, Artificial Sequence
  Synthetic oligonucleotide; TTT chr11 5203844 5203865 5203849 5203844 -
gtgttttagtagagacagggtt

SEQ ID NO: 147501 - DNA, 22 bp, Artificial Sequence
  Synthetic oligonucleotide; TTG chr11 5203843 5203864 5203848 5203843 -
tgttttagtagagacagggttt

SEQ ID NO: 147502 - DNA, 22 bp, Artificial Sequence
  Synthetic oligonucleotide; TTT chr11 5203838 5203859 5203843 5203838 -
tagtagagacagggtttcacca

SEQ ID NO: 147503 - DNA, 22 bp, Artificial Sequence
  Synthetic oligonucleotide; TTT chr11 5203837 5203858 5203842 5203837 -
agtagagacagggtttcaccat

SEQ ID NO: 147504 - DNA, 22 bp, Artificial Sequence
  Synthetic oligonucleotide; TTA chr11 5203836 5203857 5203841 5203836 -
gtagagacagggtttcaccatt

SEQ ID NO: 147505 - DNA, 22 bp, Artificial Sequence
  Synthetic oligonucleotide; TTT chr11 5203821 5203842 5203826 5203821 -
caccattttgcccaggttggtc

SEQ ID NO: 147506 - DNA, 22 bp, Artificial Sequence
  Synthetic oligonucleotide; TTC chr11 5203820 5203841 5203825 5203820 -
accattttgcccaggttggtct

SEQ ID NO: 147507 - DNA, 22 bp, Artificial Sequence
  Synthetic oligonucleotide; TTT chr11 5203813 5203834 5203818 5203813 -
tgcccaggttggtctccaactc

SEQ ID NO: 147508 - DNA, 22 bp, Artificial Sequence
  Synthetic oligonucleotide; TTT chr11 5203812 5203833 5203817 5203812 -
gcccaggttggtctccaactcc

SEQ ID NO: 147509 - DNA, 22 bp, Artificial Sequence
  Synthetic oligonucleotide; TTG chr11 5203811 5203832 5203816 5203811 -
cccaggttggtctccaactcct

SEQ ID NO: 147510 - DNA, 22 bp, Artificial Sequence
  Synthetic oligonucleotide; TTG chr11 5203802 5203823 5203807 5203802 -
gtctccaactcctgagctcagc

SEQ ID NO: 147511 - DNA, 22 bp, Artificial Sequence
  Synthetic oligonucleotide; CTC chr11 5203797 5203818 5203802 5203797 -
caactcctgagctcagccaatc

SEQ ID NO: 147512 - DNA, 22 bp, Artificial Sequence
  Synthetic oligonucleotide; CTC chr11 5203791 5203812 5203796 5203791 -
ctgagctcagccaatccacctg

SEQ ID NO: 147513 - DNA, 22 bp, Artificial Sequence
  Synthetic oligonucleotide; CTG chr11 5203788 5203809 5203793 5203788 -
agctcagccaatccacctgcct

SEQ ID NO: 147514 - DNA, 22 bp, Artificial Sequence
  Synthetic oligonucleotide; CTC chr11 5203783 5203804 5203788 5203783 -
agccaatccacctgcctcggcc

SEQ ID NO: 147515 - DNA, 22 bp, Artificial Sequence
  Synthetic oligonucleotide; CTG chr11 5203769 5203790 5203774 5203769 -
cctcggcctcccaaagtgctag

SEQ ID NO: 147516 - DNA, 22 bp, Artificial Sequence
  Synthetic oligonucleotide; CTC chr11 5203765 5203786 5203770 5203765 -
ggcctcccaaagtgctaggatt

SEQ ID NO: 147517 - DNA, 22 bp, Artificial Sequence
  Synthetic oligonucleotide; CTC chr11 5203759 5203780 5203764 5203759 -
ccaaagtgctaggattacaggc

SEQ ID NO: 147518 - DNA, 22 bp, Artificial Sequence
  Synthetic oligonucleotide; CTA chr11 5203748 5203769 5203753 5203748 -
ggattacaggcgtgagccacca

SEQ ID NO: 147519 - DNA, 22 bp, Artificial Sequence
  Synthetic oligonucleotide; TTA chr11 5203742 5203763 5203747 5203742 -
caggcgtgagccaccaagcctg

SEQ ID NO: 147520 - DNA, 22 bp, Artificial Sequence
  Synthetic oligonucleotide; CTG chr11 5203720 5203741 5203725 5203720 -
gctgaaagtagatacttttaac

SEQ ID NO: 147521 - DNA, 22 bp, Artificial Sequence
  Synthetic oligonucleotide; CTG chr11 5203716 5203737 5203721 5203716 -
aaagtagatacttttaacacat

SEQ ID NO: 147522 - DNA, 22 bp, Artificial Sequence
  Synthetic oligonucleotide; CTT chr11 5203703 5203724 5203708 5203703 -
ttaacacatacctacattcaca

SEQ ID NO: 147523 - DNA, 22 bp, Artificial Sequence
  Synthetic oligonucleotide; TTT chr11 5203702 5203723 5203707 5203702 -
taacacatacctacattcacag

SEQ ID NO: 147524 - DNA, 22 bp, Artificial Sequence
  Synthetic oligonucleotide; TTT chr11 5203701 5203722 5203706 5203701 -
aacacatacctacattcacaga

SEQ ID NO: 147525 - DNA, 22 bp, Artificial Sequence
  Synthetic oligonucleotide; TTA chr11 5203700 5203721 5203705 5203700 -
acacatacctacattcacagaa

SEQ ID NO: 147526 - DNA, 22 bp, Artificial Sequence
  Synthetic oligonucleotide; CTA chr11 5203689 5203710 5203694 5203689 -
cattcacagaatattaaatctt

SEQ ID NO: 147527 - DNA, 22 bp, Artificial Sequence
  Synthetic oligonucleotide; TTC chr11 5203684 5203705 5203689 5203684 -
acagaatattaaatcttttgtg

SEQ ID NO: 147528 - DNA, 22 bp, Artificial Sequence
  Synthetic oligonucleotide; TTA chr11 5203673 5203694 5203678 5203673 -
aatcttttgtgatcaatcccag

SEQ ID NO: 147529 - DNA, 22 bp, Artificial Sequence
  Synthetic oligonucleotide; CTT chr11 5203667 5203688 5203672 5203667 -
ttgtgatcaatcccagatcctt

SEQ ID NO: 147530 - DNA, 22 bp, Artificial Sequence
  Synthetic oligonucleotide; TTT chr11 5203666 5203687 5203671 5203666 -
tgtgatcaatcccagatccttg

SEQ ID NO: 147531 - DNA, 22 bp, Artificial Sequence
  Synthetic oligonucleotide; TTT chr11 5203665 5203686 5203670 5203665 -
gtgatcaatcccagatccttga

SEQ ID NO: 147532 - DNA, 22 bp, Artificial Sequence
  Synthetic oligonucleotide; TTG chr11 5203664 5203685 5203669 5203664 -
tgatcaatcccagatccttgac

SEQ ID NO: 147533 - DNA, 22 bp, Artificial Sequence
  Synthetic oligonucleotide; CTT chr11 5203645 5203666 5203650 5203645 -
gacgatatgtctgagtcaggct

SEQ ID NO: 147534 - DNA, 22 bp, Artificial Sequence
  Synthetic oligonucleotide; TTG chr11 5203644 5203665 5203649 5203644 -
acgatatgtctgagtcaggctg

SEQ ID NO: 147535 - DNA, 22 bp, Artificial Sequence
  Synthetic oligonucleotide; CTG chr11 5203632 5203653 5203637 5203632 -
agtcaggctggaaatgagagaa

SEQ ID NO: 147536 - DNA, 22 bp, Artificial Sequence
  Synthetic oligonucleotide; CTG chr11 5203622 5203643 5203627 5203622 -
gaaatgagagaaatcatgtttg

SEQ ID NO: 147537 - DNA, 22 bp, Artificial Sequence
  Synthetic oligonucleotide; TTT chr11 5203601 5203622 5203606 5203601 -
gaaattggagtgttgtattcaa

SEQ ID NO: 147538 - DNA, 22 bp, Artificial Sequence
  Synthetic oligonucleotide; TTG chr11 5203600 5203621 5203605 5203600 -
aaattggagtgttgtattcaag

SEQ ID NO: 147539 - DNA, 22 bp, Artificial Sequence
  Synthetic oligonucleotide; TTG chr11 5203594 5203615 5203599 5203594 -
gagtgttgtattcaaggtcagc

SEQ ID NO: 147540 - DNA, 22 bp, Artificial Sequence
  Synthetic oligonucleotide; TTG chr11 5203586 5203607 5203591 5203586 -
tattcaaggtcagcaagatccc

SEQ ID NO: 147541 - DNA, 22 bp, Artificial Sequence
  Synthetic oligonucleotide; TTC chr11 5203581 5203602 5203586 5203581 -
aaggtcagcaagatccctggag

SEQ ID NO: 147542 - DNA, 22 bp, Artificial Sequence
  Synthetic oligonucleotide; CTG chr11 5203562 5203583 5203567 5203562 -
gagcagcatctgttttataaac

SEQ ID NO: 147543 - DNA, 22 bp, Artificial Sequence
  Synthetic oligonucleotide; CTG chr11 5203550 5203571 5203555 5203550 -
ttttataaaccattcaaacttg

SEQ ID NO: 147544 - DNA, 22 bp, Artificial Sequence
  Synthetic oligonucleotide; TTT chr11 5203547 5203568 5203552 5203547 -
tataaaccattcaaacttggta

SEQ ID NO: 147545 - DNA, 22 bp, Artificial Sequence
  Synthetic oligonucleotide; TTT chr11 5203546 5203567 5203551 5203546 -
ataaaccattcaaacttggtat

SEQ ID NO: 147546 - DNA, 22 bp, Artificial Sequence
  Synthetic oligonucleotide; TTA chr11 5203545 5203566 5203550 5203545 -
taaaccattcaaacttggtata

SEQ ID NO: 147547 - DNA, 22 bp, Artificial Sequence
  Synthetic oligonucleotide; TTC chr11 5203535 5203556 5203540 5203535 -
aaacttggtatatgatgactca

SEQ ID NO: 147548 - DNA, 22 bp, Artificial Sequence
  Synthetic oligonucleotide; CTT chr11 5203529 5203550 5203534 5203529 -
ggtatatgatgactcaattggt

SEQ ID NO: 147549 - DNA, 22 bp, Artificial Sequence
  Synthetic oligonucleotide; TTG chr11 5203528 5203549 5203533 5203528 -
gtatatgatgactcaattggtg

SEQ ID NO: 147550 - DNA, 22 bp, Artificial Sequence
  Synthetic oligonucleotide; CTC chr11 5203514 5203535 5203519 5203514 -
aattggtggccaaaggtcagaa

SEQ ID NO: 147551 - DNA, 22 bp, Artificial Sequence
  Synthetic oligonucleotide; TTG chr11 5203509 5203530 5203514 5203509 -
gtggccaaaggtcagaaaagac

SEQ ID NO: 147552 - DNA, 22 bp, Artificial Sequence
  Synthetic oligonucleotide; CTA chr11 5203485 5203506 5203490 5203485 -
agtgtacacagatgattttaca

SEQ ID NO: 147553 - DNA, 22 bp, Artificial Sequence
  Synthetic oligonucleotide; TTT chr11 5203467 5203488 5203472 5203467 -
tacacacactttgataggagtg

SEQ ID NO: 147554 - DNA, 22 bp, Artificial Sequence
  Synthetic oligonucleotide; TTT chr11 5203466 5203487 5203471 5203466 -
acacacactttgataggagtgt

SEQ ID NO: 147555 - DNA, 22 bp, Artificial Sequence
  Synthetic oligonucleotide; TTA chr11 5203465 5203486 5203470 5203465 -
cacacactttgataggagtgtt

SEQ ID NO: 147556 - DNA, 22 bp, Artificial Sequence
  Synthetic oligonucleotide; CTT chr11 5203456 5203477 5203461 5203456 -
tgataggagtgttcacattcat

SEQ ID NO: 147557 - DNA, 22 bp, Artificial Sequence
  Synthetic oligonucleotide; TTT chr11 5203455 5203476 5203460 5203455 -
gataggagtgttcacattcata

SEQ ID NO: 147558 - DNA, 22 bp, Artificial Sequence
  Synthetic oligonucleotide; TTG chr11 5203454 5203475 5203459 5203454 -
ataggagtgttcacattcatat

SEQ ID NO: 147559 - DNA, 22 bp, Artificial Sequence
  Synthetic oligonucleotide; TTC chr11 5203442 5203463 5203447 5203442 -
acattcatattatctttatatc

SEQ ID NO: 147560 - DNA, 22 bp, Artificial Sequence
  Synthetic oligonucleotide; TTC chr11 5203436 5203457 5203441 5203436 -
atattatctttatatctctgtg

SEQ ID NO: 147561 - DNA, 22 bp, Artificial Sequence
  Synthetic oligonucleotide; TTA chr11 5203430 5203451 5203435 5203430 -
tctttatatctctgtgattgtc

SEQ ID NO: 147562 - DNA, 22 bp, Artificial Sequence
  Synthetic oligonucleotide; CTT chr11 5203426 5203447 5203431 5203426 -
tatatctctgtgattgtctagc

SEQ ID NO: 147563 - DNA, 22 bp, Artificial Sequence
  Synthetic oligonucleotide; TTT chr11 5203425 5203446 5203430 5203425 -
atatctctgtgattgtctagct

SEQ ID NO: 147564 - DNA, 22 bp, Artificial Sequence
  Synthetic oligonucleotide; TTA chr11 5203424 5203445 5203429 5203424 -
tatctctgtgattgtctagctc

SEQ ID NO: 147565 - DNA, 22 bp, Artificial Sequence
  Synthetic oligonucleotide; CTC chr11 5203418 5203439 5203423 5203418 -
tgtgattgtctagctcttattt

SEQ ID NO: 147566 - DNA, 22 bp, Artificial Sequence
  Synthetic oligonucleotide; CTG chr11 5203416 5203437 5203421 5203416 -
tgattgtctagctcttatttca

SEQ ID NO: 147567 - DNA, 22 bp, Artificial Sequence
  Synthetic oligonucleotide; TTG chr11 5203410 5203431 5203415 5203410 -
tctagctcttatttcatagaat

SEQ ID NO: 147568 - DNA, 22 bp, Artificial Sequence
  Synthetic oligonucleotide; CTA chr11 5203406 5203427 5203411 5203406 -
gctcttatttcatagaataatt

SEQ ID NO: 147569 - DNA, 22 bp, Artificial Sequence
  Synthetic oligonucleotide; CTC chr11 5203402 5203423 5203407 5203402 -
ttatttcatagaataattaatt

SEQ ID NO: 147570 - DNA, 22 bp, Artificial Sequence
  Synthetic oligonucleotide; CTT chr11 5203400 5203421 5203405 5203400 -
atttcatagaataattaattaa

SEQ ID NO: 147571 - DNA, 22 bp, Artificial Sequence
  Synthetic oligonucleotide; TTA chr11 5203399 5203420 5203404 5203399 -
tttcatagaataattaattaaa

SEQ ID NO: 147572 - DNA, 22 bp, Artificial Sequence
  Synthetic oligonucleotide; TTT chr11 5203396 5203417 5203401 5203396 -
catagaataattaattaaaaat

SEQ ID NO: 147573 - DNA, 22 bp, Artificial Sequence
  Synthetic oligonucleotide; TTC chr11 5203395 5203416 5203400 5203395 -
atagaataattaattaaaaatt

SEQ ID NO: 147574 - DNA, 22 bp, Artificial Sequence
  Synthetic oligonucleotide; TTA chr11 5203383 5203404 5203388 5203383 -
attaaaaattatttgataagtg

SEQ ID NO: 147575 - DNA, 22 bp, Artificial Sequence
  Synthetic oligonucleotide; TTA chr11 5203379 5203400 5203384 5203379 -
aaaattatttgataagtgccca

SEQ ID NO: 147576 - DNA, 22 bp, Artificial Sequence
  Synthetic oligonucleotide; TTA chr11 5203372 5203393 5203377 5203372 -
tttgataagtgcccattctatg

SEQ ID NO: 147577 - DNA, 22 bp, Artificial Sequence
  Synthetic oligonucleotide; TTT chr11 5203369 5203390 5203374 5203369 -
gataagtgcccattctatgcta

SEQ ID NO: 147578 - DNA, 22 bp, Artificial Sequence
  Synthetic oligonucleotide; TTG chr11 5203368 5203389 5203373 5203368 -
ataagtgcccattctatgctaa

SEQ ID NO: 147579 - DNA, 22 bp, Artificial Sequence
  Synthetic oligonucleotide; TTC chr11 5203354 5203375 5203359 5203354 -
tatgctaacccttatttttcat

SEQ ID NO: 147580 - DNA, 22 bp, Artificial Sequence
  Synthetic oligonucleotide; CTA chr11 5203352 5203373 5203357 5203352 -
tgctaacccttatttttcatat

SEQ ID NO: 147581 - DNA, 22 bp, Artificial Sequence
  Synthetic oligonucleotide; CTA chr11 5203347 5203368 5203352 5203347 -
acccttatttttcatattcttg

SEQ ID NO: 147582 - DNA, 22 bp, Artificial Sequence
  Synthetic oligonucleotide; CTT chr11 5203341 5203362 5203346 5203341 -
atttttcatattcttgagcaaa

SEQ ID NO: 147583 - DNA, 22 bp, Artificial Sequence
  Synthetic oligonucleotide; TTA chr11 5203340 5203361 5203345 5203340 -
tttttcatattcttgagcaaaa

SEQ ID NO: 147584 - DNA, 22 bp, Artificial Sequence
  Synthetic oligonucleotide; TTT chr11 5203337 5203358 5203342 5203337 -
ttcatattcttgagcaaaaaac

SEQ ID NO: 147585 - DNA, 22 bp, Artificial Sequence
  Synthetic oligonucleotide; TTT chr11 5203336 5203357 5203341 5203336 -
tcatattcttgagcaaaaaaca

SEQ ID NO: 147586 - DNA, 22 bp, Artificial Sequence
  Synthetic oligonucleotide; TTT chr11 5203335 5203356 5203340 5203335 -
catattcttgagcaaaaaacag

SEQ ID NO: 147587 - DNA, 22 bp, Artificial Sequence
  Synthetic oligonucleotide; TTC chr11 5203334 5203355 5203339 5203334 -
atattcttgagcaaaaaacaga

SEQ ID NO: 147588 - DNA, 22 bp, Artificial Sequence
  Synthetic oligonucleotide; TTC chr11 5203328 5203349 5203333 5203328 -
ttgagcaaaaaacagatatggt

SEQ ID NO: 147589 - DNA, 22 bp, Artificial Sequence
  Synthetic oligonucleotide; CTT chr11 5203326 5203347 5203331 5203326 -
gagcaaaaaacagatatggttc

SEQ ID NO: 147590 - DNA, 22 bp, Artificial Sequence
  Synthetic oligonucleotide; TTG chr11 5203325 5203346 5203330 5203325 -
agcaaaaaacagatatggttcc

SEQ ID NO: 147591 - DNA, 22 bp, Artificial Sequence
  Synthetic oligonucleotide; TTC chr11 5203304 5203325 5203309 5203304 -
ctaatcttctacagcctctaat

SEQ ID NO: 147592 - DNA, 22 bp, Artificial Sequence
  Synthetic oligonucleotide; CTA chr11 5203301 5203322 5203306 5203301 -
atcttctacagcctctaatgaa

SEQ ID NO: 147593 - DNA, 22 bp, Artificial Sequence
  Synthetic oligonucleotide; CTT chr11 5203296 5203317 5203301 5203296 -
ctacagcctctaatgaatctaa

SEQ ID NO: 147594 - DNA, 22 bp, Artificial Sequence
  Synthetic oligonucleotide; TTC chr11 5203295 5203316 5203300 5203295 -
tacagcctctaatgaatctaat

SEQ ID NO: 147595 - DNA, 22 bp, Artificial Sequence
  Synthetic oligonucleotide; CTA chr11 5203293 5203314 5203298 5203293 -
cagcctctaatgaatctaatgg

SEQ ID NO: 147596 - DNA, 22 bp, Artificial Sequence
  Synthetic oligonucleotide; CTC chr11 5203286 5203307 5203291 5203286 -
taatgaatctaatggaaattca

SEQ ID NO: 147597 - DNA, 22 bp, Artificial Sequence
  Synthetic oligonucleotide; CTA chr11 5203284 5203305 5203289 5203284 -
atgaatctaatggaaattcagt

SEQ ID NO: 147598 - DNA, 22 bp, Artificial Sequence
  Synthetic oligonucleotide; CTA chr11 5203275 5203296 5203280 5203275 -
atggaaattcagtgtataataa

SEQ ID NO: 147599 - DNA, 22 bp, Artificial Sequence
  Synthetic oligonucleotide; TTC chr11 5203265 5203286 5203270 5203265 -
agtgtataataagtggtataaa

SEQ ID NO: 147600 - DNA, 22 bp, Artificial Sequence
  Synthetic oligonucleotide; CTA chr11 5203234 5203255 5203239 5203234 -
gtatactgtgatgagagtaagt

SEQ ID NO: 147601 - DNA, 22 bp, Artificial Sequence
  Synthetic oligonucleotide; CTG chr11 5203226 5203247 5203231 5203226 -
tgatgagagtaagttagttaag

SEQ ID NO: 147602 - DNA, 22 bp, Artificial Sequence
  Synthetic oligonucleotide; TTA chr11 5203210 5203231 5203215 5203210 -
gttaagggggttgaagaaatga

SEQ ID NO: 147603 - DNA, 22 bp, Artificial Sequence
  Synthetic oligonucleotide; TTA chr11 5203206 5203227 5203211 5203206 -
agggggttgaagaaatgagata

SEQ ID NO: 147604 - DNA, 22 bp, Artificial Sequence
  Synthetic oligonucleotide; TTG chr11 5203197 5203218 5203202 5203197 -
aagaaatgagataatctaggtg

SEQ ID NO: 147605 - DNA, 22 bp, Artificial Sequence
  Synthetic oligonucleotide; CTA chr11 5203179 5203200 5203184 5203179 -
ggtggggagcagtattagaaaa

SEQ ID NO: 147606 - DNA, 22 bp, Artificial Sequence
  Synthetic oligonucleotide; TTA chr11 5203162 5203183 5203167 5203162 -
gaaaaatccccctgaggaagta

SEQ ID NO: 147607 - DNA, 22 bp, Artificial Sequence
  Synthetic oligonucleotide; CTG chr11 5203148 5203169 5203153 5203148 -
aggaagtaatcattttaactca

SEQ ID NO: 147608 - DNA, 22 bp, Artificial Sequence
  Synthetic oligonucleotide; TTT chr11 5203133 5203154 5203138 5203133 -
taactcaaaagttaatggtgaa

SEQ ID NO: 147609 - DNA, 22 bp, Artificial Sequence
  Synthetic oligonucleotide; TTT chr11 5203132 5203153 5203137 5203132 -
aactcaaaagttaatggtgaaa

SEQ ID NO: 147610 - DNA, 22 bp, Artificial Sequence
  Synthetic oligonucleotide; TTA chr11 5203131 5203152 5203136 5203131 -
actcaaaagttaatggtgaaag

SEQ ID NO: 147611 - DNA, 22 bp, Artificial Sequence
  Synthetic oligonucleotide; CTC chr11 5203127 5203148 5203132 5203127 -
aaaagttaatggtgaaaggaat

SEQ ID NO: 147612 - DNA, 22 bp, Artificial Sequence
  Synthetic oligonucleotide; TTA chr11 5203119 5203140 5203124 5203119 -
atggtgaaaggaattgctgtgc

SEQ ID NO: 147613 - DNA, 22 bp, Artificial Sequence
  Synthetic oligonucleotide; TTG chr11 5203103 5203124 5203108 5203103 -
ctgtgcaaatacttggggtaga

SEQ ID NO: 147614 - DNA, 22 bp, Artificial Sequence
  Synthetic oligonucleotide; CTG chr11 5203100 5203121 5203105 5203100 -
tgcaaatacttggggtagataa

SEQ ID NO: 147615 - DNA, 22 bp, Artificial Sequence
  Synthetic oligonucleotide; CTT chr11 5203089 5203110 5203094 5203089 -
ggggtagataattcggagcaca

SEQ ID NO: 147616 - DNA, 22 bp, Artificial Sequence
  Synthetic oligonucleotide; TTG chr11 5203088 5203109 5203093 5203088 -
gggtagataattcggagcacag

SEQ ID NO: 147617 - DNA, 22 bp, Artificial Sequence
  Synthetic oligonucleotide; TTC chr11 5203075 5203096 5203080 5203075 -
ggagcacagagaagaccatggg

SEQ ID NO: 147618 - DNA, 22 bp, Artificial Sequence
  Synthetic oligonucleotide; CTG chr11 5203042 5203063 5203047 5203042 -
agacatgcatgtacttagcttg

SEQ ID NO: 147619 - DNA, 22 bp, Artificial Sequence
  Synthetic oligonucleotide; CTT chr11 5203026 5203047 5203031 5203026 -
agcttgttttgaggaagataaa

SEQ ID NO: 147620 - DNA, 22 bp, Artificial Sequence
  Synthetic oligonucleotide; TTA chr11 5203025 5203046 5203030 5203025 -
gcttgttttgaggaagataaag

SEQ ID NO: 147621 - DNA, 22 bp, Artificial Sequence
  Synthetic oligonucleotide; CTT chr11 5203021 5203042 5203026 5203021 -
gttttgaggaagataaagatac

SEQ ID NO: 147622 - DNA, 22 bp, Artificial Sequence
  Synthetic oligonucleotide; TTG chr11 5203020 5203041 5203025 5203020 -
ttttgaggaagataaagatacc

SEQ ID NO: 147623 - DNA, 22 bp, Artificial Sequence
  Synthetic oligonucleotide; TTT chr11 5203017 5203038 5203022 5203017 -
tgaggaagataaagatacctaa

SEQ ID NO: 147624 - DNA, 22 bp, Artificial Sequence
  Synthetic oligonucleotide; TTT chr11 5203016 5203037 5203021 5203016 -
gaggaagataaagatacctaaa

SEQ ID NO: 147625 - DNA, 22 bp, Artificial Sequence
  Synthetic oligonucleotide; TTG chr11 5203015 5203036 5203020 5203015 -
aggaagataaagatacctaaat

SEQ ID NO: 147626 - DNA, 22 bp, Artificial Sequence
  Synthetic oligonucleotide; CTA chr11 5202996 5203017 5203001 5202996 -
aatattaaggagtgtaggcagt

SEQ ID NO: 147627 - DNA, 22 bp, Artificial Sequence
  Synthetic oligonucleotide; TTA chr11 5202989 5203010 5202994 5202989 -
aggagtgtaggcagtagtggtc

SEQ ID NO: 147628 - DNA, 22 bp, Artificial Sequence
  Synthetic oligonucleotide; CTA chr11 5202965 5202986 5202970 5202965 -
aagatgtaatagaagaggcagg

SEQ ID NO: 147629 - DNA, 22 bp, Artificial Sequence
  Synthetic oligonucleotide; TTA chr11 5202931 5202952 5202936 5202931 -
tacaaggctttttgactatgat

SEQ ID NO: 147630 - DNA, 22 bp, Artificial Sequence
  Synthetic oligonucleotide; CTT chr11 5202921 5202942 5202926 5202921 -
tttgactatgataaagaatttg

SEQ ID NO: 147631 - DNA, 22 bp, Artificial Sequence
  Synthetic oligonucleotide; TTT chr11 5202920 5202941 5202925 5202920 -
ttgactatgataaagaatttgt

SEQ ID NO: 147632 - DNA, 22 bp, Artificial Sequence
  Synthetic oligonucleotide; TTT chr11 5202919 5202940 5202924 5202919 -
tgactatgataaagaatttgta

SEQ ID NO: 147633 - DNA, 22 bp, Artificial Sequence
  Synthetic oligonucleotide; TTT chr11 5202918 5202939 5202923 5202918 -
gactatgataaagaatttgtat

SEQ ID NO: 147634 - DNA, 22 bp, Artificial Sequence
  Synthetic oligonucleotide; TTG chr11 5202917 5202938 5202922 5202917 -
actatgataaagaatttgtatt

SEQ ID NO: 147635 - DNA, 22 bp, Artificial Sequence
  Synthetic oligonucleotide; CTA chr11 5202913 5202934 5202918 5202913 -
tgataaagaatttgtattttac

SEQ ID NO: 147636 - DNA, 22 bp, Artificial Sequence
  Synthetic oligonucleotide; TTT chr11 5202900 5202921 5202905 5202900 -
gtattttacattacgagcaatg

SEQ ID NO: 147637 - DNA, 22 bp, Artificial Sequence
  Synthetic oligonucleotide; TTG chr11 5202899 5202920 5202904 5202899 -
tattttacattacgagcaatgg

SEQ ID NO: 147638 - DNA, 22 bp, Artificial Sequence
  Synthetic oligonucleotide; TTT chr11 5202894 5202915 5202899 5202894 -
tacattacgagcaatgggtaag

SEQ ID NO: 147639 - DNA, 22 bp, Artificial Sequence
  Synthetic oligonucleotide; TTT chr11 5202893 5202914 5202898 5202893 -
acattacgagcaatgggtaagt

SEQ ID NO: 147640 - DNA, 22 bp, Artificial Sequence
  Synthetic oligonucleotide; TTA chr11 5202892 5202913 5202897 5202892 -
cattacgagcaatgggtaagtg

SEQ ID NO: 147641 - DNA, 22 bp, Artificial Sequence
  Synthetic oligonucleotide; TTA chr11 5202887 5202908 5202892 5202887 -
cgagcaatgggtaagtgaccat

SEQ ID NO: 147642 - DNA, 22 bp, Artificial Sequence
  Synthetic oligonucleotide; TTT chr11 5202855 5202876 5202860 5202855 -
tttcaacaaaggtttgtgtgat

SEQ ID NO: 147643 - DNA, 22 bp, Artificial Sequence
  Synthetic oligonucleotide; TTT chr11 5202854 5202875 5202859 5202854 -
ttcaacaaaggtttgtgtgatt

SEQ ID NO: 147644 - DNA, 22 bp, Artificial Sequence
  Synthetic oligonucleotide; TTT chr11 5202853 5202874 5202858 5202853 -
tcaacaaaggtttgtgtgattt

SEQ ID NO: 147645 - DNA, 22 bp, Artificial Sequence
  Synthetic oligonucleotide; TTT chr11 5202852 5202873 5202857 5202852 -
caacaaaggtttgtgtgattta

SEQ ID NO: 147646 - DNA, 22 bp, Artificial Sequence
  Synthetic oligonucleotide; TTC chr11 5202851 5202872 5202856 5202851 -
aacaaaggtttgtgtgatttag

SEQ ID NO: 147647 - DNA, 22 bp, Artificial Sequence
  Synthetic oligonucleotide; TTT chr11 5202840 5202861 5202845 5202840 -
gtgtgatttagtagatgtttgt

SEQ ID NO: 147648 - DNA, 22 bp, Artificial Sequence
  Synthetic oligonucleotide; TTG chr11 5202839 5202860 5202844 5202839 -
tgtgatttagtagatgtttgta

SEQ ID NO: 147649 - DNA, 22 bp, Artificial Sequence
  Synthetic oligonucleotide; TTT chr11 5202831 5202852 5202836 5202831 -
agtagatgtttgtagaaaagca

SEQ ID NO: 147650 - DNA, 22 bp, Artificial Sequence
  Synthetic oligonucleotide; TTA chr11 5202830 5202851 5202835 5202830 -
gtagatgtttgtagaaaagcaa

SEQ ID NO: 147651 - DNA, 22 bp, Artificial Sequence
  Synthetic oligonucleotide; TTT chr11 5202820 5202841 5202825 5202820 -
gtagaaaagcaatttggtttcc

SEQ ID NO: 147652 - DNA, 22 bp, Artificial Sequence
  Synthetic oligonucleotide; TTG chr11 5202819 5202840 5202824 5202819 -
tagaaaagcaatttggtttccc

SEQ ID NO: 147653 - DNA, 22 bp, Artificial Sequence
  Synthetic oligonucleotide; TTT chr11 5202805 5202826 5202810 5202805 -
ggtttccctggagataatacat

SEQ ID NO: 147654 - DNA, 22 bp, Artificial Sequence
  Synthetic oligonucleotide; TTG chr11 5202804 5202825 5202809 5202804 -
gtttccctggagataatacatt

SEQ ID NO: 147655 - DNA, 22 bp, Artificial Sequence
  Synthetic oligonucleotide; TTT chr11 5202800 5202821 5202805 5202800 -
ccctggagataatacatttttt

SEQ ID NO: 147656 - DNA, 22 bp, Artificial Sequence
  Synthetic oligonucleotide; TTC chr11 5202799 5202820 5202804 5202799 -
cctggagataatacatttttta

SEQ ID NO: 147657 - DNA, 22 bp, Artificial Sequence
  Synthetic oligonucleotide; CTG chr11 5202795 5202816 5202800 5202795 -
gagataatacattttttagagg

SEQ ID NO: 147658 - DNA, 22 bp, Artificial Sequence
  Synthetic oligonucleotide; TTT chr11 5202781 5202802 5202786 5202781 -
tttagaggacaaacagataaat

SEQ ID NO: 147659 - DNA, 22 bp, Artificial Sequence
  Synthetic oligonucleotide; TTT chr11 5202780 5202801 5202785 5202780 -
ttagaggacaaacagataaatc

SEQ ID NO: 147660 - DNA, 22 bp, Artificial Sequence
  Synthetic oligonucleotide; TTT chr11 5202779 5202800 5202784 5202779 -
tagaggacaaacagataaatca

SEQ ID NO: 147661 - DNA, 22 bp, Artificial Sequence
  Synthetic oligonucleotide; TTT chr11 5202778 5202799 5202783 5202778 -
agaggacaaacagataaatcat

SEQ ID NO: 147662 - DNA, 22 bp, Artificial Sequence
  Synthetic oligonucleotide; TTA chr11 5202777 5202798 5202782 5202777 -
gaggacaaacagataaatcatg

SEQ ID NO: 147663 - DNA, 22 bp, Artificial Sequence
  Synthetic oligonucleotide; TTA chr11 5202749 5202770 5202754 5202749 -
gctagtaataatattaaattat

SEQ ID NO: 147664 - DNA, 22 bp, Artificial Sequence
  Synthetic oligonucleotide; CTA chr11 5202745 5202766 5202750 5202745 -
gtaataatattaaattattatt

SEQ ID NO: 147665 - DNA, 22 bp, Artificial Sequence
  Synthetic oligonucleotide; TTA chr11 5202733 5202754 5202738 5202733 -
aattattattaatttaataaat

SEQ ID NO: 147666 - DNA, 22 bp, Artificial Sequence
  Synthetic oligonucleotide; TTA chr11 5202728 5202749 5202733 5202728 -
ttattaatttaataaattatca

SEQ ID NO: 147667 - DNA, 22 bp, Artificial Sequence
  Synthetic oligonucleotide; TTA chr11 5202725 5202746 5202730 5202725 -
ttaatttaataaattatcatag

SEQ ID NO: 147668 - DNA, 22 bp, Artificial Sequence
  Synthetic oligonucleotide; TTA chr11 5202722 5202743 5202727 5202722 -
atttaataaattatcatagtag

SEQ ID NO: 147669 - DNA, 22 bp, Artificial Sequence
  Synthetic oligonucleotide; TTT chr11 5202718 5202739 5202723 5202718 -
aataaattatcatagtagccag

SEQ ID NO: 147670 - DNA, 22 bp, Artificial Sequence
  Synthetic oligonucleotide; TTA chr11 5202717 5202738 5202722 5202717 -
ataaattatcatagtagccagg

SEQ ID NO: 147671 - DNA, 22 bp, Artificial Sequence
  Synthetic oligonucleotide; TTA chr11 5202709 5202730 5202714 5202709 -
tcatagtagccagggaaacaat

SEQ ID NO: 147672 - DNA, 22 bp, Artificial Sequence
  Synthetic oligonucleotide; TTA chr11 5202680 5202701 5202685 5202680 -
taaaccaagacgggcaatgtgt

SEQ ID NO: 147673 - DNA, 22 bp, Artificial Sequence
  Synthetic oligonucleotide; CTA chr11 5202645 5202666 5202650 5202645 -
tctgggatgtgtttctggtaga

SEQ ID NO: 147674 - DNA, 22 bp, Artificial Sequence
  Synthetic oligonucleotide; CTG chr11 5202641 5202662 5202646 5202641 -
ggatgtgtttctggtagaaatg

SEQ ID NO: 147675 - DNA, 22 bp, Artificial Sequence
  Synthetic oligonucleotide; TTT chr11 5202631 5202652 5202636 5202631 -
ctggtagaaatggtagaaattg

SEQ ID NO: 147676 - DNA, 22 bp, Artificial Sequence
  Synthetic oligonucleotide; TTC chr11 5202630 5202651 5202635 5202630 -
tggtagaaatggtagaaattga

SEQ ID NO: 147677 - DNA, 22 bp, Artificial Sequence
  Synthetic oligonucleotide; CTG chr11 5202628 5202649 5202633 5202628 -
gtagaaatggtagaaattgatg

SEQ ID NO: 147678 - DNA, 22 bp, Artificial Sequence
  Synthetic oligonucleotide; TTG chr11 5202609 5202630 5202614 5202609 -
atgaaagatttgatggagagag

SEQ ID NO: 147679 - DNA, 22 bp, Artificial Sequence
  Synthetic oligonucleotide; TTT chr11 5202598 5202619 5202603 5202598 -
gatggagagaggaaagggaagg

SEQ ID NO: 147680 - DNA, 22 bp, Artificial Sequence
  Synthetic oligonucleotide; TTG chr11 5202597 5202618 5202602 5202597 -
atggagagaggaaagggaagga

SEQ ID NO: 147681 - DNA, 22 bp, Artificial Sequence
  Synthetic oligonucleotide; TTT chr11 5202555 5202576 5202560 5202555 -
taaaaatgactcaagacttgtc

SEQ ID NO: 147682 - DNA, 22 bp, Artificial Sequence
  Synthetic oligonucleotide; TTT chr11 5202554 5202575 5202559 5202554 -
aaaaatgactcaagacttgtct

SEQ ID NO: 147683 - DNA, 22 bp, Artificial Sequence
  Synthetic oligonucleotide; TTA chr11 5202553 5202574 5202558 5202553 -
aaaatgactcaagacttgtctt

SEQ ID NO: 147684 - DNA, 22 bp, Artificial Sequence
  Synthetic oligonucleotide; CTC chr11 5202543 5202564 5202548 5202543 -
aagacttgtcttatgcaattgt

SEQ ID NO: 147685 - DNA, 22 bp, Artificial Sequence
  Synthetic oligonucleotide; CTT chr11 5202536 5202557 5202541 5202536 -
gtcttatgcaattgtgttattg

SEQ ID NO: 147686 - DNA, 22 bp, Artificial Sequence
  Synthetic oligonucleotide; TTG chr11 5202535 5202556 5202540 5202535 -
tcttatgcaattgtgttattgg

SEQ ID NO: 147687 - DNA, 22 bp, Artificial Sequence
  Synthetic oligonucleotide; CTT chr11 5202531 5202552 5202536 5202531 -
atgcaattgtgttattggtgga

SEQ ID NO: 147688 - DNA, 22 bp, Artificial Sequence
  Synthetic oligonucleotide; TTA chr11 5202530 5202551 5202535 5202530 -
tgcaattgtgttattggtggag

SEQ ID NO: 147689 - DNA, 22 bp, Artificial Sequence
  Synthetic oligonucleotide; TTG chr11 5202522 5202543 5202527 5202522 -
tgttattggtggagtcacttta

SEQ ID NO: 147690 - DNA, 22 bp, Artificial Sequence
  Synthetic oligonucleotide; TTA chr11 5202517 5202538 5202522 5202517 -
ttggtggagtcactttataata

SEQ ID NO: 147691 - DNA, 22 bp, Artificial Sequence
  Synthetic oligonucleotide; TTG chr11 5202514 5202535 5202519 5202514 -
gtggagtcactttataatatta

SEQ ID NO: 147692 - DNA, 22 bp, Artificial Sequence
  Synthetic oligonucleotide; CTT chr11 5202502 5202523 5202507 5202502 -
tataatattaggagaaaaggga

SEQ ID NO: 147693 - DNA, 22 bp, Artificial Sequence
  Synthetic oligonucleotide; TTT chr11 5202501 5202522 5202506 5202501 -
ataatattaggagaaaagggac

SEQ ID NO: 147694 - DNA, 22 bp, Artificial Sequence
  Synthetic oligonucleotide; TTA chr11 5202500 5202521 5202505 5202500 -
taatattaggagaaaagggaca

SEQ ID NO: 147695 - DNA, 22 bp, Artificial Sequence
  Synthetic oligonucleotide; TTA chr11 5202492 5202513 5202497 5202492 -
ggagaaaagggacagaaaatag

SEQ ID NO: 147696 - DNA, 22 bp, Artificial Sequence
  Synthetic oligonucleotide; TTT chr11 5202466 5202487 5202471 5202466 -
tggggggaaaatcaagtacttt

SEQ ID NO: 147697 - DNA, 22 bp, Artificial Sequence
  Synthetic oligonucleotide; TTT chr11 5202465 5202486 5202470 5202465 -
ggggggaaaatcaagtacttta

SEQ ID NO: 147698 - DNA, 22 bp, Artificial Sequence
  Synthetic oligonucleotide; TTG chr11 5202464 5202485 5202469 5202464 -
gggggaaaatcaagtactttat

SEQ ID NO: 147699 - DNA, 22 bp, Artificial Sequence
  Synthetic oligonucleotide; CTT chr11 5202445 5202466 5202450 5202445 -
tattggcatcattcttatttta

SEQ ID NO: 147700 - DNA, 22 bp, Artificial Sequence
  Synthetic oligonucleotide; TTT chr11 5202444 5202465 5202449 5202444 -
attggcatcattcttattttaa

SEQ ID NO: 147701 - DNA, 22 bp, Artificial Sequence
  Synthetic oligonucleotide; TTA chr11 5202443 5202464 5202448 5202443 -
ttggcatcattcttattttaag

SEQ ID NO: 147702 - DNA, 22 bp, Artificial Sequence
  Synthetic oligonucleotide; TTG chr11 5202440 5202461 5202445 5202440 -
gcatcattcttattttaagatt

SEQ ID NO: 147703 - DNA, 22 bp, Artificial Sequence
  Synthetic oligonucleotide; TTC chr11 5202431 5202452 5202436 5202431 -
ttattttaagattaaacactca

SEQ ID NO: 147704 - DNA, 22 bp, Artificial Sequence
  Synthetic oligonucleotide; CTT chr11 5202429 5202450 5202434 5202429 -
attttaagattaaacactcaga

SEQ ID NO: 147705 - DNA, 22 bp, Artificial Sequence
  Synthetic oligonucleotide; TTA chr11 5202428 5202449 5202433 5202428 -
ttttaagattaaacactcagat

SEQ ID NO: 147706 - DNA, 22 bp, Artificial Sequence
  Synthetic oligonucleotide; TTT chr11 5202425 5202446 5202430 5202425 -
taagattaaacactcagatgaa

SEQ ID NO: 147707 - DNA, 22 bp, Artificial Sequence
  Synthetic oligonucleotide; TTT chr11 5202424 5202445 5202429 5202424 -
aagattaaacactcagatgaat

SEQ ID NO: 147708 - DNA, 22 bp, Artificial Sequence
  Synthetic oligonucleotide; TTA chr11 5202423 5202444 5202428 5202423 -
agattaaacactcagatgaata

SEQ ID NO: 147709 - DNA, 22 bp, Artificial Sequence
  Synthetic oligonucleotide; TTA chr11 5202417 5202438 5202422 5202417 -
aacactcagatgaatatattaa

SEQ ID NO: 147710 - DNA, 22 bp, Artificial Sequence
  Synthetic oligonucleotide; CTC chr11 5202410 5202431 5202415 5202410 -
agatgaatatattaaatagcca

SEQ ID NO: 147711 - DNA, 22 bp, Artificial Sequence
  Synthetic oligonucleotide; TTA chr11 5202396 5202417 5202401 5202396 -
aatagccagttgtattcatgaa

SEQ ID NO: 147712 - DNA, 22 bp, Artificial Sequence
  Synthetic oligonucleotide; TTG chr11 5202384 5202405 5202389 5202384 -
tattcatgaatttgagctctca

SEQ ID NO: 147713 - DNA, 22 bp, Artificial Sequence
  Synthetic oligonucleotide; TTC chr11 5202379 5202400 5202384 5202379 -
atgaatttgagctctcaggagt

SEQ ID NO: 147714 - DNA, 22 bp, Artificial Sequence
  Synthetic oligonucleotide; TTT chr11 5202371 5202392 5202376 5202371 -
gagctctcaggagtggtcagga

SEQ ID NO: 147715 - DNA, 22 bp, Artificial Sequence
  Synthetic oligonucleotide; TTG chr11 5202370 5202391 5202375 5202370 -
agctctcaggagtggtcaggaa

SEQ ID NO: 147716 - DNA, 22 bp, Artificial Sequence
  Synthetic oligonucleotide; CTC chr11 5202365 5202386 5202370 5202365 -
tcaggagtggtcaggaatcaga

SEQ ID NO: 147717 - DNA, 22 bp, Artificial Sequence
  Synthetic oligonucleotide; CTC chr11 5202363 5202384 5202368 5202363 -
aggagtggtcaggaatcagagg

SEQ ID NO: 147718 - DNA, 22 bp, Artificial Sequence
  Synthetic oligonucleotide; TTA chr11 5202330 5202351 5202335 5202330 -
gtttcaaataataagaaaaagt

SEQ ID NO: 147719 - DNA, 22 bp, Artificial Sequence
  Synthetic oligonucleotide; TTT chr11 5202326 5202347 5202331 5202326 -
caaataataagaaaaagttgac

SEQ ID NO: 147720 - DNA, 22 bp, Artificial Sequence
  Synthetic oligonucleotide; TTC chr11 5202325 5202346 5202330 5202325 -
aaataataagaaaaagttgaca

SEQ ID NO: 147721 - DNA, 22 bp, Artificial Sequence
  Synthetic oligonucleotide; TTG chr11 5202306 5202327 5202311 5202306 -
acatagtctgcacattaaggaa

SEQ ID NO: 147722 - DNA, 22 bp, Artificial Sequence
  Synthetic oligonucleotide; CTG chr11 5202296 5202317 5202301 5202296 -
cacattaaggaactgagaattt

SEQ ID NO: 147723 - DNA, 22 bp, Artificial Sequence
  Synthetic oligonucleotide; TTA chr11 5202289 5202310 5202294 5202289 -
aggaactgagaatttagtttgt

SEQ ID NO: 147724 - DNA, 22 bp, Artificial Sequence
  Synthetic oligonucleotide; CTG chr11 5202281 5202302 5202286 5202281 -
agaatttagtttgtaacagaga

SEQ ID NO: 147725 - DNA, 22 bp, Artificial Sequence
  Synthetic oligonucleotide; TTT chr11 5202274 5202295 5202279 5202274 -
agtttgtaacagagatattagt

SEQ ID NO: 147726 - DNA, 22 bp, Artificial Sequence
  Synthetic oligonucleotide; TTA chr11 5202273 5202294 5202278 5202273 -
gtttgtaacagagatattagtt

SEQ ID NO: 147727 - DNA, 22 bp, Artificial Sequence
  Synthetic oligonucleotide; TTT chr11 5202269 5202290 5202274 5202269 -
gtaacagagatattagttaaat

SEQ ID NO: 147728 - DNA, 22 bp, Artificial Sequence
  Synthetic oligonucleotide; TTG chr11 5202268 5202289 5202273 5202268 -
taacagagatattagttaaata

SEQ ID NO: 147729 - DNA, 22 bp, Artificial Sequence
  Synthetic oligonucleotide; TTA chr11 5202254 5202275 5202259 5202254 -
gttaaatatttagtttaaatat

SEQ ID NO: 147730 - DNA, 22 bp, Artificial Sequence
  Synthetic oligonucleotide; TTA chr11 5202250 5202271 5202255 5202250 -
aatatttagtttaaatattagt

SEQ ID NO: 147731 - DNA, 22 bp, Artificial Sequence
  Synthetic oligonucleotide; TTT chr11 5202243 5202264 5202248 5202243 -
agtttaaatattagttaaatat

SEQ ID NO: 147732 - DNA, 22 bp, Artificial Sequence
  Synthetic oligonucleotide; TTA chr11 5202242 5202263 5202247 5202242 -
gtttaaatattagttaaatatt

SEQ ID NO: 147733 - DNA, 22 bp, Artificial Sequence
  Synthetic oligonucleotide; TTT chr11 5202238 5202259 5202243 5202238 -
aaatattagttaaatatttagc

SEQ ID NO: 147734 - DNA, 22 bp, Artificial Sequence
  Synthetic oligonucleotide; TTA chr11 5202237 5202258 5202242 5202237 -
aatattagttaaatatttagct

SEQ ID NO: 147735 - DNA, 22 bp, Artificial Sequence
  Synthetic oligonucleotide; TTA chr11 5202230 5202251 5202235 5202230 -
gttaaatatttagctaataaat

SEQ ID NO: 147736 - DNA, 22 bp, Artificial Sequence
  Synthetic oligonucleotide; TTA chr11 5202226 5202247 5202231 5202226 -
aatatttagctaataaatacaa

SEQ ID NO: 147737 - DNA, 22 bp, Artificial Sequence
  Synthetic oligonucleotide; TTT chr11 5202219 5202240 5202224 5202219 -
agctaataaatacaaaattata

SEQ ID NO: 147738 - DNA, 22 bp, Artificial Sequence
  Synthetic oligonucleotide; TTA chr11 5202218 5202239 5202223 5202218 -
gctaataaatacaaaattataa

SEQ ID NO: 147739 - DNA, 22 bp, Artificial Sequence
  Synthetic oligonucleotide; CTA chr11 5202214 5202235 5202219 5202214 -
ataaatacaaaattataagttt

SEQ ID NO: 147740 - DNA, 22 bp, Artificial Sequence
  Synthetic oligonucleotide; TTA chr11 5202199 5202220 5202204 5202199 -
taagttttatttaaaattgaaa

SEQ ID NO: 147741 - DNA, 22 bp, Artificial Sequence
  Synthetic oligonucleotide; TTT chr11 5202192 5202213 5202197 5202192 -
tatttaaaattgaaacatgata

SEQ ID NO: 147742 - DNA, 22 bp, Artificial Sequence
  Synthetic oligonucleotide; TTT chr11 5202191 5202212 5202196 5202191 -
atttaaaattgaaacatgatac

SEQ ID NO: 147743 - DNA, 22 bp, Artificial Sequence
  Synthetic oligonucleotide; TTA chr11 5202190 5202211 5202195 5202190 -
tttaaaattgaaacatgatacc

SEQ ID NO: 147744 - DNA, 22 bp, Artificial Sequence
  Synthetic oligonucleotide; TTT chr11 5202187 5202208 5202192 5202187 -
aaaattgaaacatgataccaaa

SEQ ID NO: 147745 - DNA, 22 bp, Artificial Sequence
  Synthetic oligonucleotide; TTA chr11 5202186 5202207 5202191 5202186 -
aaattgaaacatgataccaaaa

SEQ ID NO: 147746 - DNA, 22 bp, Artificial Sequence
  Synthetic oligonucleotide; TTG chr11 5202180 5202201 5202185 5202180 -
aaacatgataccaaaataatag

SEQ ID NO: 147747 - DNA, 22 bp, Artificial Sequence
  Synthetic oligonucleotide; TTT chr11 5202142 5202163 5202147 5202142 -
gtcttaagaaacttcttgaaaa

SEQ ID NO: 147748 - DNA, 22 bp, Artificial Sequence
  Synthetic oligonucleotide; TTG chr11 5202141 5202162 5202146 5202141 -
tcttaagaaacttcttgaaaag

SEQ ID NO: 147749 - DNA, 22 bp, Artificial Sequence
  Synthetic oligonucleotide; CTT chr11 5202137 5202158 5202142 5202137 -
aagaaacttcttgaaaagtgat

SEQ ID NO: 147750 - DNA, 22 bp, Artificial Sequence
  Synthetic oligonucleotide; TTA chr11 5202136 5202157 5202141 5202136 -
agaaacttcttgaaaagtgatt

SEQ ID NO: 147751 - DNA, 22 bp, Artificial Sequence
  Synthetic oligonucleotide; CTT chr11 5202128 5202149 5202133 5202128 -
cttgaaaagtgattgttgagtt

SEQ ID NO: 147752 - DNA, 22 bp, Artificial Sequence
  Synthetic oligonucleotide; TTC chr11 5202127 5202148 5202132 5202127 -
ttgaaaagtgattgttgagttg

SEQ ID NO: 147753 - DNA, 22 bp, Artificial Sequence
  Synthetic oligonucleotide; CTT chr11 5202125 5202146 5202130 5202125 -
gaaaagtgattgttgagttgca

SEQ ID NO: 147754 - DNA, 22 bp, Artificial Sequence
  Synthetic oligonucleotide; TTG chr11 5202124 5202145 5202129 5202124 -
aaaagtgattgttgagttgcaa

SEQ ID NO: 147755 - DNA, 22 bp, Artificial Sequence
  Synthetic oligonucleotide; TTG chr11 5202113 5202134 5202118 5202113 -
ttgagttgcaagatcgttttaa

SEQ ID NO: 147756 - DNA, 22 bp, Artificial Sequence
  Synthetic oligonucleotide; TTG chr11 5202110 5202131 5202115 5202110 -
agttgcaagatcgttttaaaaa

SEQ ID NO: 147757 - DNA, 22 bp, Artificial Sequence
  Synthetic oligonucleotide; TTG chr11 5202105 5202126 5202110 5202105 -
caagatcgttttaaaaagggta

SEQ ID NO: 147758 - DNA, 22 bp, Artificial Sequence
  Synthetic oligonucleotide; TTT chr11 5202094 5202115 5202099 5202094 -
taaaaagggtaggaagaaattg

SEQ ID NO: 147759 - DNA, 22 bp, Artificial Sequence
  Synthetic oligonucleotide; TTT chr11 5202093 5202114 5202098 5202093 -
aaaaagggtaggaagaaattga

SEQ ID NO: 147760 - DNA, 22 bp, Artificial Sequence
  Synthetic oligonucleotide; TTA chr11 5202092 5202113 5202097 5202092 -
aaaagggtaggaagaaattgag

SEQ ID NO: 147761 - DNA, 22 bp, Artificial Sequence
  Synthetic oligonucleotide; TTG chr11 5202072 5202093 5202077 5202072 -
aggaaaagatgatgaataattt

SEQ ID NO: 147762 - DNA, 22 bp, Artificial Sequence
  Synthetic oligonucleotide; TTT chr11 5202050 5202071 5202055 5202050 -
aggcagatagaacatttcgaga

SEQ ID NO: 147763 - DNA, 22 bp, Artificial Sequence
  Synthetic oligonucleotide; TTA chr11 5202049 5202070 5202054 5202049 -
ggcagatagaacatttcgagaa

SEQ ID NO: 147764 - DNA, 22 bp, Artificial Sequence
  Synthetic oligonucleotide; TTT chr11 5202033 5202054 5202038 5202033 -
cgagaaaaattttacgaaagaa

SEQ ID NO: 147765 - DNA, 22 bp, Artificial Sequence
  Synthetic oligonucleotide; TTC chr11 5202032 5202053 5202037 5202032 -
gagaaaaattttacgaaagaag

SEQ ID NO: 147766 - DNA, 22 bp, Artificial Sequence
  Synthetic oligonucleotide; TTT chr11 5202021 5202042 5202026 5202021 -
tacgaaagaagagaaattcgat

SEQ ID NO: 147767 - DNA, 22 bp, Artificial Sequence
  Synthetic oligonucleotide; TTT chr11 5202020 5202041 5202025 5202020 -
acgaaagaagagaaattcgatt

SEQ ID NO: 147768 - DNA, 22 bp, Artificial Sequence
  Synthetic oligonucleotide; TTA chr11 5202019 5202040 5202024 5202019 -
cgaaagaagagaaattcgattt

SEQ ID NO: 147769 - DNA, 22 bp, Artificial Sequence
  Synthetic oligonucleotide; TTC chr11 5202002 5202023 5202007 5202002 -
gatttagagaaatgaaagaaga

SEQ ID NO: 147770 - DNA, 22 bp, Artificial Sequence
  Synthetic oligonucleotide; TTT chr11 5201997 5202018 5202002 5201997 -
agagaaatgaaagaagatacgt

SEQ ID NO: 147771 - DNA, 22 bp, Artificial Sequence
  Synthetic oligonucleotide; TTA chr11 5201996 5202017 5202001 5201996 -
gagaaatgaaagaagatacgta

SEQ ID NO: 147772 - DNA, 22 bp, Artificial Sequence
  Synthetic oligonucleotide; TTC chr11 5201971 5201992 5201976 5201971 -
aaaagactgaaaaatcctctgc

SEQ ID NO: 147773 - DNA, 22 bp, Artificial Sequence
  Synthetic oligonucleotide; CTG chr11 5201962 5201983 5201967 5201962 -
aaaaatcctctgcaagaaacga

SEQ ID NO: 147774 - DNA, 22 bp, Artificial Sequence
  Synthetic oligonucleotide; CTC chr11 5201952 5201973 5201957 5201952 -
tgcaagaaacgaagaaacttca

SEQ ID NO: 147775 - DNA, 22 bp, Artificial Sequence
  Synthetic oligonucleotide; CTG chr11 5201950 5201971 5201955 5201950 -
caagaaacgaagaaacttcaag

SEQ ID NO: 147776 - DNA, 22 bp, Artificial Sequence
  Synthetic oligonucleotide; CTT chr11 5201932 5201953 5201937 5201932 -
caagcattctatggagaaaaaa

SEQ ID NO: 147777 - DNA, 22 bp, Artificial Sequence
  Synthetic oligonucleotide; TTC chr11 5201931 5201952 5201936 5201931 -
aagcattctatggagaaaaaag

SEQ ID NO: 147778 - DNA, 22 bp, Artificial Sequence
  Synthetic oligonucleotide; TTC chr11 5201923 5201944 5201928 5201923 -
tatggagaaaaaagtattaaaa

SEQ ID NO: 147779 - DNA, 22 bp, Artificial Sequence
  Synthetic oligonucleotide; CTA chr11 5201921 5201942 5201926 5201921 -
tggagaaaaaagtattaaaaat

SEQ ID NO: 147780 - DNA, 22 bp, Artificial Sequence
  Synthetic oligonucleotide; TTA chr11 5201904 5201925 5201909 5201904 -
aaaatagtgagctaagttattc

SEQ ID NO: 147781 - DNA, 22 bp, Artificial Sequence
  Synthetic oligonucleotide; CTA chr11 5201890 5201911 5201895 5201890 -
agttattcaatgctgagaagga

SEQ ID NO: 147782 - DNA, 22 bp, Artificial Sequence
  Synthetic oligonucleotide; TTA chr11 5201885 5201906 5201890 5201885 -
ttcaatgctgagaaggagtcag

SEQ ID NO: 147783 - DNA, 22 bp, Artificial Sequence
  Synthetic oligonucleotide; TTC chr11 5201882 5201903 5201887 5201882 -
aatgctgagaaggagtcagggc

SEQ ID NO: 147784 - DNA, 22 bp, Artificial Sequence
  Synthetic oligonucleotide; CTG chr11 5201875 5201896 5201880 5201875 -
agaaggagtcagggcaagaaaa

SEQ ID NO: 147785 - DNA, 22 bp, Artificial Sequence
  Synthetic oligonucleotide; TTA chr11 5201843 5201864 5201848 5201843 -
gactgctagaagacgtcagtgt

SEQ ID NO: 147786 - DNA, 22 bp, Artificial Sequence
  Synthetic oligonucleotide; CTG chr11 5201838 5201859 5201843 5201838 -
ctagaagacgtcagtgtagtat

SEQ ID NO: 147787 - DNA, 22 bp, Artificial Sequence
  Synthetic oligonucleotide; CTA chr11 5201835 5201856 5201840 5201835 -
gaagacgtcagtgtagtataga

SEQ ID NO: 147788 - DNA, 22 bp, Artificial Sequence
  Synthetic oligonucleotide; TTG chr11 5201803 5201824 5201808 5201803 -
agaagaaagtctgtggaactgt

SEQ ID NO: 147789 - DNA, 22 bp, Artificial Sequence
  Synthetic oligonucleotide; CTG chr11 5201790 5201811 5201795 5201790 -
tggaactgtgttgtgaggctaa

SEQ ID NO: 147790 - DNA, 22 bp, Artificial Sequence
  Synthetic oligonucleotide; CTG chr11 5201782 5201803 5201787 5201782 -
tgttgtgaggctaataagacaa

SEQ ID NO: 147791 - DNA, 22 bp, Artificial Sequence
  Synthetic oligonucleotide; TTG chr11 5201777 5201798 5201782 5201777 -
tgaggctaataagacaaagctg

SEQ ID NO: 147792 - DNA, 22 bp, Artificial Sequence
  Synthetic oligonucleotide; CTA chr11 5201769 5201790 5201774 5201769 -
ataagacaaagctgaaaagtag

SEQ ID NO: 147793 - DNA, 22 bp, Artificial Sequence
  Synthetic oligonucleotide; CTG chr11 5201755 5201776 5201760 5201755 -
aaaagtaggacataaagggcag

SEQ ID NO: 147794 - DNA, 22 bp, Artificial Sequence
  Synthetic oligonucleotide; CTG chr11 5201723 5201744 5201728 5201723 -
aagttactttaacatctcgaag

SEQ ID NO: 147795 - DNA, 22 bp, Artificial Sequence
  Synthetic oligonucleotide; TTA chr11 5201717 5201738 5201722 5201717 -
ctttaacatctcgaagttactc

SEQ ID NO: 147796 - DNA, 22 bp, Artificial Sequence
  Synthetic oligonucleotide; CTT chr11 5201714 5201735 5201719 5201714 -
taacatctcgaagttactcaat

SEQ ID NO: 147797 - DNA, 22 bp, Artificial Sequence
  Synthetic oligonucleotide; TTT chr11 5201713 5201734 5201718 5201713 -
aacatctcgaagttactcaatc

SEQ ID NO: 147798 - DNA, 22 bp, Artificial Sequence
  Synthetic oligonucleotide; TTA chr11 5201712 5201733 5201717 5201712 -
acatctcgaagttactcaatca

SEQ ID NO: 147799 - DNA, 22 bp, Artificial Sequence
  Synthetic oligonucleotide; CTC chr11 5201705 5201726 5201710 5201705 -
gaagttactcaatcaaacatga

SEQ ID NO: 147800 - DNA, 22 bp, Artificial Sequence
  Synthetic oligonucleotide; TTA chr11 5201698 5201719 5201703 5201698 -
ctcaatcaaacatgaaagtatg

SEQ ID NO: 147801 - DNA, 22 bp, Artificial Sequence
  Synthetic oligonucleotide; CTC chr11 5201695 5201716 5201700 5201695 -
aatcaaacatgaaagtatggac

SEQ ID NO: 147802 - DNA, 22 bp, Artificial Sequence
  Synthetic oligonucleotide; CTT chr11 5201671 5201692 5201676 5201671 -
ttgaacatctgtttacattatt

SEQ ID NO: 147803 - DNA, 22 bp, Artificial Sequence
  Synthetic oligonucleotide; TTT chr11 5201670 5201691 5201675 5201670 -
tgaacatctgtttacattatta

SEQ ID NO: 147804 - DNA, 22 bp, Artificial Sequence
  Synthetic oligonucleotide; TTT chr11 5201669 5201690 5201674 5201669 -
gaacatctgtttacattattag

SEQ ID NO: 147805 - DNA, 22 bp, Artificial Sequence
  Synthetic oligonucleotide; TTG chr11 5201668 5201689 5201673 5201668 -
aacatctgtttacattattaga

SEQ ID NO: 147806 - DNA, 22 bp, Artificial Sequence
  Synthetic oligonucleotide; CTG chr11 5201660 5201681 5201665 5201660 -
tttacattattagagctttaaa

SEQ ID NO: 147807 - DNA, 22 bp, Artificial Sequence
  Synthetic oligonucleotide; TTT chr11 5201657 5201678 5201662 5201657 -
acattattagagctttaaaaaa

SEQ ID NO: 147808 - DNA, 22 bp, Artificial Sequence
  Synthetic oligonucleotide; TTA chr11 5201656 5201677 5201661 5201656 -
cattattagagctttaaaaaaa

SEQ ID NO: 147809 - DNA, 22 bp, Artificial Sequence
  Synthetic oligonucleotide; TTA chr11 5201651 5201672 5201656 5201651 -
ttagagctttaaaaaaacttat

SEQ ID NO: 147810 - DNA, 22 bp, Artificial Sequence
  Synthetic oligonucleotide; TTA chr11 5201648 5201669 5201653 5201648 -
gagctttaaaaaaacttatgat

SEQ ID NO: 147811 - DNA, 22 bp, Artificial Sequence
  Synthetic oligonucleotide; CTT chr11 5201642 5201663 5201647 5201642 -
taaaaaaacttatgatgattct

SEQ ID NO: 147812 - DNA, 22 bp, Artificial Sequence
  Synthetic oligonucleotide; TTT chr11 5201641 5201662 5201646 5201641 -
aaaaaaacttatgatgattctc

SEQ ID NO: 147813 - DNA, 22 bp, Artificial Sequence
  Synthetic oligonucleotide; TTA chr11 5201640 5201661 5201645 5201640 -
aaaaaacttatgatgattctca

SEQ ID NO: 147814 - DNA, 22 bp, Artificial Sequence
  Synthetic oligonucleotide; CTT chr11 5201631 5201652 5201636 5201631 -
atgatgattctcaggtctggaa

SEQ ID NO: 147815 - DNA, 22 bp, Artificial Sequence
  Synthetic oligonucleotide; TTA chr11 5201630 5201651 5201635 5201630 -
tgatgattctcaggtctggaac

SEQ ID NO: 147816 - DNA, 22 bp, Artificial Sequence
  Synthetic oligonucleotide; TTC chr11 5201621 5201642 5201626 5201621 -
tcaggtctggaacttaaagcag

SEQ ID NO: 147817 - DNA, 22 bp, Artificial Sequence
  Synthetic oligonucleotide; CTC chr11 5201619 5201640 5201624 5201619 -
aggtctggaacttaaagcaggc

SEQ ID NO: 147818 - DNA, 22 bp, Artificial Sequence
  Synthetic oligonucleotide; CTG chr11 5201612 5201633 5201617 5201612 -
gaacttaaagcaggcaaacaat

SEQ ID NO: 147819 - DNA, 22 bp, Artificial Sequence
  Synthetic oligonucleotide; CTT chr11 5201606 5201627 5201611 5201606 -
aaagcaggcaaacaatgtaaag

SEQ ID NO: 147820 - DNA, 22 bp, Artificial Sequence
  Synthetic oligonucleotide; TTA chr11 5201605 5201626 5201610 5201605 -
aagcaggcaaacaatgtaaaga

SEQ ID NO: 147821 - DNA, 22 bp, Artificial Sequence
  Synthetic oligonucleotide; TTG chr11 5201571 5201592 5201576 5201571 -
attctgctaccatgaggctttt

SEQ ID NO: 147822 - DNA, 22 bp, Artificial Sequence
  Synthetic oligonucleotide; TTC chr11 5201567 5201588 5201572 5201567 -
tgctaccatgaggcttttgaaa

SEQ ID NO: 147823 - DNA, 22 bp, Artificial Sequence
  Synthetic oligonucleotide; CTG chr11 5201565 5201586 5201570 5201565 -
ctaccatgaggcttttgaaatt

SEQ ID NO: 147824 - DNA, 22 bp, Artificial Sequence
  Synthetic oligonucleotide; CTA chr11 5201562 5201583 5201567 5201562 -
ccatgaggcttttgaaattata

SEQ ID NO: 147825 - DNA, 22 bp, Artificial Sequence
  Synthetic oligonucleotide; CTT chr11 5201551 5201572 5201556 5201551 -
ttgaaattataagcttgcttgt

SEQ ID NO: 147826 - DNA, 22 bp, Artificial Sequence
  Synthetic oligonucleotide; TTT chr11 5201550 5201571 5201555 5201550 -
tgaaattataagcttgcttgtt

SEQ ID NO: 147827 - DNA, 22 bp, Artificial Sequence
  Synthetic oligonucleotide; TTT chr11 5201549 5201570 5201554 5201549 -
gaaattataagcttgcttgttt

SEQ ID NO: 147828 - DNA, 22 bp, Artificial Sequence
  Synthetic oligonucleotide; TTG chr11 5201548 5201569 5201553 5201548 -
aaattataagcttgcttgtttg

SEQ ID NO: 147829 - DNA, 22 bp, Artificial Sequence
  Synthetic oligonucleotide; TTA chr11 5201542 5201563 5201547 5201542 -
taagcttgcttgtttgagcctg

SEQ ID NO: 147830 - DNA, 22 bp, Artificial Sequence
  Synthetic oligonucleotide; CTT chr11 5201535 5201556 5201540 5201535 -
gcttgtttgagcctggctttgt

SEQ ID NO: 147831 - DNA, 22 bp, Artificial Sequence
  Synthetic oligonucleotide; TTG chr11 5201534 5201555 5201539 5201534 -
cttgtttgagcctggctttgtg

SEQ ID NO: 147832 - DNA, 22 bp, Artificial Sequence
  Synthetic oligonucleotide; CTT chr11 5201531 5201552 5201536 5201531 -
gtttgagcctggctttgtgatc

SEQ ID NO: 147833 - DNA, 22 bp, Artificial Sequence
  Synthetic oligonucleotide; TTG chr11 5201530 5201551 5201535 5201530 -
tttgagcctggctttgtgatct

SEQ ID NO: 147834 - DNA, 22 bp, Artificial Sequence
  Synthetic oligonucleotide; TTT chr11 5201527 5201548 5201532 5201527 -
gagcctggctttgtgatctgta

SEQ ID NO: 147835 - DNA, 22 bp, Artificial Sequence
  Synthetic oligonucleotide; TTG chr11 5201526 5201547 5201531 5201526 -
agcctggctttgtgatctgtag

SEQ ID NO: 147836 - DNA, 22 bp, Artificial Sequence
  Synthetic oligonucleotide; CTG chr11 5201520 5201541 5201525 5201520 -
gctttgtgatctgtagaactgc

SEQ ID NO: 147837 - DNA, 22 bp, Artificial Sequence
  Synthetic oligonucleotide; CTT chr11 5201516 5201537 5201521 5201516 -
tgtgatctgtagaactgcaggt

SEQ ID NO: 147838 - DNA, 22 bp, Artificial Sequence
  Synthetic oligonucleotide; TTT chr11 5201515 5201536 5201520 5201515 -
gtgatctgtagaactgcaggtt

SEQ ID NO: 147839 - DNA, 22 bp, Artificial Sequence
  Synthetic oligonucleotide; TTG chr11 5201514 5201535 5201519 5201514 -
tgatctgtagaactgcaggttc

SEQ ID NO: 147840 - DNA, 22 bp, Artificial Sequence
  Synthetic oligonucleotide; CTG chr11 5201507 5201528 5201512 5201507 -
tagaactgcaggttctaagaaa

SEQ ID NO: 147841 - DNA, 22 bp, Artificial Sequence
  Synthetic oligonucleotide; CTG chr11 5201499 5201520 5201504 5201499 -
caggttctaagaaagaaaacac

SEQ ID NO: 147842 - DNA, 22 bp, Artificial Sequence
  Synthetic oligonucleotide; TTC chr11 5201492 5201513 5201497 5201492 -
taagaaagaaaacacaattggc

SEQ ID NO: 147843 - DNA, 22 bp, Artificial Sequence
  Synthetic oligonucleotide; CTA chr11 5201490 5201511 5201495 5201490 -
agaaagaaaacacaattggcca

SEQ ID NO: 147844 - DNA, 22 bp, Artificial Sequence
  Synthetic oligonucleotide; TTG chr11 5201472 5201493 5201477 5201472 -
gccaatacattgaataaatgta

SEQ ID NO: 147845 - DNA, 22 bp, Artificial Sequence
  Synthetic oligonucleotide; TTG chr11 5201460 5201481 5201465 5201460 -
aataaatgtatattgaataaat

SEQ ID NO: 147846 - DNA, 22 bp, Artificial Sequence
  Synthetic oligonucleotide; TTG chr11 5201445 5201466 5201450 5201445 -
aataaatagttaatcagctcat

SEQ ID NO: 147847 - DNA, 22 bp, Artificial Sequence
  Synthetic oligonucleotide; TTA chr11 5201433 5201454 5201438 5201433 -
atcagctcattaactgaataaa

SEQ ID NO: 147848 - DNA, 22 bp, Artificial Sequence
  Synthetic oligonucleotide; CTC chr11 5201425 5201446 5201430 5201425 -
attaactgaataaataaaggaa

SEQ ID NO: 147849 - DNA, 22 bp, Artificial Sequence
  Synthetic oligonucleotide; TTA chr11 5201421 5201442 5201426 5201421 -
actgaataaataaaggaatggg

SEQ ID NO: 147850 - DNA, 22 bp, Artificial Sequence
  Synthetic oligonucleotide; CTG chr11 5201417 5201438 5201422 5201417 -
aataaataaaggaatgggaagc

SEQ ID NO: 147851 - DNA, 22 bp, Artificial Sequence
  Synthetic oligonucleotide; CTG chr11 5201391 5201412 5201396 5201391 -
agctgctatcaaaggctcagtg

SEQ ID NO: 147852 - DNA, 22 bp, Artificial Sequence
  Synthetic oligonucleotide; CTG chr11 5201386 5201407 5201391 5201386 -
ctatcaaaggctcagtgtcttc

SEQ ID NO: 147853 - DNA, 22 bp, Artificial Sequence
  Synthetic oligonucleotide; CTA chr11 5201383 5201404 5201388 5201383 -
tcaaaggctcagtgtcttcaat

SEQ ID NO: 147854 - DNA, 22 bp, Artificial Sequence
  Synthetic oligonucleotide; CTC chr11 5201373 5201394 5201378 5201373 -
agtgtcttcaatctaattctct

SEQ ID NO: 147855 - DNA, 22 bp, Artificial Sequence
  Synthetic oligonucleotide; CTT chr11 5201365 5201386 5201370 5201365 -
caatctaattctctacatcaca

SEQ ID NO: 147856 - DNA, 22 bp, Artificial Sequence
  Synthetic oligonucleotide; TTC chr11 5201364 5201385 5201369 5201364 -
aatctaattctctacatcacaa

SEQ ID NO: 147857 - DNA, 22 bp, Artificial Sequence
  Synthetic oligonucleotide; CTA chr11 5201358 5201379 5201363 5201358 -
attctctacatcacaaaggcac

SEQ ID NO: 147858 - DNA, 22 bp, Artificial Sequence
  Synthetic oligonucleotide; TTC chr11 5201354 5201375 5201359 5201354 -
tctacatcacaaaggcacaaat

SEQ ID NO: 147859 - DNA, 22 bp, Artificial Sequence
  Synthetic oligonucleotide; CTC chr11 5201352 5201373 5201357 5201352 -
tacatcacaaaggcacaaatga

SEQ ID NO: 147860 - DNA, 22 bp, Artificial Sequence
  Synthetic oligonucleotide; CTA chr11 5201350 5201371 5201355 5201350 -
catcacaaaggcacaaatgagt

SEQ ID NO: 147861 - DNA, 22 bp, Artificial Sequence
  Synthetic oligonucleotide; TTG chr11 5201326 5201347 5201331 5201326 -
aacatctcaagaggccagagct

SEQ ID NO: 147862 - DNA, 22 bp, Artificial Sequence
  Synthetic oligonucleotide; CTC chr11 5201318 5201339 5201323 5201318 -
aagaggccagagctccagtgag

SEQ ID NO: 147863 - DNA, 22 bp, Artificial Sequence
  Synthetic oligonucleotide; CTC chr11 5201303 5201324 5201308 5201303 -
cagtgagaaatcatttacccaa

SEQ ID NO: 147864 - DNA, 22 bp, Artificial Sequence
  Synthetic oligonucleotide; TTT chr11 5201287 5201308 5201292 5201287 -
acccaaggtctcatgcataaat

SEQ ID NO: 147865 - DNA, 22 bp, Artificial Sequence
  Synthetic oligonucleotide; TTA chr11 5201286 5201307 5201291 5201286 -
cccaaggtctcatgcataaata

SEQ ID NO: 147866 - DNA, 22 bp, Artificial Sequence
  Synthetic oligonucleotide; CTC chr11 5201275 5201296 5201280 5201275 -
atgcataaatattcctgtctgc

SEQ ID NO: 147867 - DNA, 22 bp, Artificial Sequence
  Synthetic oligonucleotide; TTC chr11 5201261 5201282 5201266 5201261 -
ctgtctgcttatcaccaatgaa

SEQ ID NO: 147868 - DNA, 22 bp, Artificial Sequence
  Synthetic oligonucleotide; CTG chr11 5201258 5201279 5201263 5201258 -
tctgcttatcaccaatgaagaa

SEQ ID NO: 147869 - DNA, 22 bp, Artificial Sequence
  Synthetic oligonucleotide; CTG chr11 5201254 5201275 5201259 5201254 -
cttatcaccaatgaagaaaaag

SEQ ID NO: 147870 - DNA, 22 bp, Artificial Sequence
  Synthetic oligonucleotide; CTT chr11 5201251 5201272 5201256 5201251 -
atcaccaatgaagaaaaagtaa

SEQ ID NO: 147871 - DNA, 22 bp, Artificial Sequence
  Synthetic oligonucleotide; TTA chr11 5201250 5201271 5201255 5201250 -
tcaccaatgaagaaaaagtaat

SEQ ID NO: 147872 - DNA, 22 bp, Artificial Sequence
  Synthetic oligonucleotide; TTG chr11 5201226 5201247 5201231 5201226 -
ctggctacgtcatctggagggg

SEQ ID NO: 147873 - DNA, 22 bp, Artificial Sequence
  Synthetic oligonucleotide; CTG chr11 5201223 5201244 5201228 5201223 -
gctacgtcatctggagggggag

SEQ ID NO: 147874 - DNA, 22 bp, Artificial Sequence
  Synthetic oligonucleotide; CTA chr11 5201219 5201240 5201224 5201219 -
cgtcatctggagggggagaaaa

SEQ ID NO: 147875 - DNA, 22 bp, Artificial Sequence
  Synthetic oligonucleotide; CTG chr11 5201210 5201231 5201215 5201210 -
gagggggagaaaacaggagtat

SEQ ID NO: 147876 - DNA, 22 bp, Artificial Sequence
  Synthetic oligonucleotide; CTT chr11 5201185 5201206 5201190 5201185 -
cattaaatagtatttggagaaa

SEQ ID NO: 147877 - DNA, 22 bp, Artificial Sequence
  Synthetic oligonucleotide; TTC chr11 5201184 5201205 5201189 5201184 -
attaaatagtatttggagaaaa

SEQ ID NO: 147878 - DNA, 22 bp, Artificial Sequence
  Synthetic oligonucleotide; TTA chr11 5201180 5201201 5201185 5201180 -
aatagtatttggagaaaaaata

SEQ ID NO: 147879 - DNA, 22 bp, Artificial Sequence
  Synthetic oligonucleotide; TTT chr11 5201170 5201191 5201175 5201170 -
ggagaaaaaatatacttggaga

SEQ ID NO: 147880 - DNA, 22 bp, Artificial Sequence
  Synthetic oligonucleotide; TTG chr11 5201169 5201190 5201174 5201169 -
gagaaaaaatatacttggagac

SEQ ID NO: 147881 - DNA, 22 bp, Artificial Sequence
  Synthetic oligonucleotide; CTT chr11 5201153 5201174 5201158 5201153 -
ggagacggcacaaaatggaaaa

SEQ ID NO: 147882 - DNA, 22 bp, Artificial Sequence
  Synthetic oligonucleotide; TTG chr11 5201152 5201173 5201157 5201152 -
gagacggcacaaaatggaaaat

SEQ ID NO: 147883 - DNA, 22 bp, Artificial Sequence
  Synthetic oligonucleotide; CTA chr11 5201114 5201135 5201119 5201114 -
tttaatagacttatgatattta

SEQ ID NO: 147884 - DNA, 22 bp, Artificial Sequence
  Synthetic oligonucleotide; TTT chr11 5201111 5201132 5201116 5201111 -
aatagacttatgatatttaaag

SEQ ID NO: 147885 - DNA, 22 bp, Artificial Sequence
  Synthetic oligonucleotide; TTA chr11 5201110 5201131 5201115 5201110 -
atagacttatgatatttaaagc

SEQ ID NO: 147886 - DNA, 22 bp, Artificial Sequence
  Synthetic oligonucleotide; CTT chr11 5201102 5201123 5201107 5201102 -
atgatatttaaagcccaaagat

SEQ ID NO: 147887 - DNA, 22 bp, Artificial Sequence
  Synthetic oligonucleotide; TTA chr11 5201101 5201122 5201106 5201101 -
tgatatttaaagcccaaagatt

SEQ ID NO: 147888 - DNA, 22 bp, Artificial Sequence
  Synthetic oligonucleotide; TTT chr11 5201093 5201114 5201098 5201093 -
aaagcccaaagattactcttca

SEQ ID NO: 147889 - DNA, 22 bp, Artificial Sequence
  Synthetic oligonucleotide; TTA chr11 5201092 5201113 5201097 5201092 -
aagcccaaagattactcttcac

SEQ ID NO: 147890 - DNA, 22 bp, Artificial Sequence
  Synthetic oligonucleotide; TTA chr11 5201078 5201099 5201083 5201078 -
ctcttcacttcgaatgtttaat

SEQ ID NO: 147891 - DNA, 22 bp, Artificial Sequence
  Synthetic oligonucleotide; CTC chr11 5201075 5201096 5201080 5201075 -
ttcacttcgaatgtttaatgaa

SEQ ID NO: 147892 - DNA, 22 bp, Artificial Sequence
  Synthetic oligonucleotide; CTT chr11 5201073 5201094 5201078 5201073 -
cacttcgaatgtttaatgaatt

SEQ ID NO: 147893 - DNA, 22 bp, Artificial Sequence
  Synthetic oligonucleotide; TTC chr11 5201072 5201093 5201077 5201072 -
acttcgaatgtttaatgaattg

SEQ ID NO: 147894 - DNA, 22 bp, Artificial Sequence
  Synthetic oligonucleotide; CTT chr11 5201068 5201089 5201073 5201068 -
cgaatgtttaatgaattggaga

SEQ ID NO: 147895 - DNA, 22 bp, Artificial Sequence
  Synthetic oligonucleotide; TTC chr11 5201067 5201088 5201072 5201067 -
gaatgtttaatgaattggagag

SEQ ID NO: 147896 - DNA, 22 bp, Artificial Sequence
  Synthetic oligonucleotide; TTT chr11 5201059 5201080 5201064 5201059 -
aatgaattggagagaagaaaat

SEQ ID NO: 147897 - DNA, 22 bp, Artificial Sequence
  Synthetic oligonucleotide; TTA chr11 5201058 5201079 5201063 5201058 -
atgaattggagagaagaaaata

SEQ ID NO: 147898 - DNA, 22 bp, Artificial Sequence
  Synthetic oligonucleotide; TTG chr11 5201050 5201071 5201055 5201050 -
gagagaagaaaataatttttca

SEQ ID NO: 147899 - DNA, 22 bp, Artificial Sequence
  Synthetic oligonucleotide; TTT chr11 5201032 5201053 5201037 5201032 -
ttcaagaacctcggctctttac

SEQ ID NO: 147900 - DNA, 22 bp, Artificial Sequence
  Synthetic oligonucleotide; TTT chr11 5201031 5201052 5201036 5201031 -
tcaagaacctcggctctttact

SEQ ID NO: 147901 - DNA, 22 bp, Artificial Sequence
  Synthetic oligonucleotide; TTT chr11 5201030 5201051 5201035 5201030 -
caagaacctcggctctttactg

SEQ ID NO: 147902 - DNA, 22 bp, Artificial Sequence
  Synthetic oligonucleotide; TTC chr11 5201029 5201050 5201034 5201029 -
aagaacctcggctctttactgg

SEQ ID NO: 147903 - DNA, 22 bp, Artificial Sequence
  Synthetic oligonucleotide; CTC chr11 5201020 5201041 5201025 5201020 -
ggctctttactggtataaaatt

SEQ ID NO: 147904 - DNA, 22 bp, Artificial Sequence
  Synthetic oligonucleotide; CTC chr11 5201015 5201036 5201020 5201015 -
tttactggtataaaatttttac

SEQ ID NO: 147905 - DNA, 22 bp, Artificial Sequence
  Synthetic oligonucleotide; CTT chr11 5201013 5201034 5201018 5201013 -
tactggtataaaatttttacca

SEQ ID NO: 147906 - DNA, 22 bp, Artificial Sequence
  Synthetic oligonucleotide; TTT chr11 5201012 5201033 5201017 5201012 -
actggtataaaatttttaccac

SEQ ID NO: 147907 - DNA, 22 bp, Artificial Sequence
  Synthetic oligonucleotide; TTA chr11 5201011 5201032 5201016 5201011 -
ctggtataaaatttttaccact

SEQ ID NO: 147908 - DNA, 22 bp, Artificial Sequence
  Synthetic oligonucleotide; CTG chr11 5201008 5201029 5201013 5201008 -
gtataaaatttttaccactatc

SEQ ID NO: 147909 - DNA, 22 bp, Artificial Sequence
  Synthetic oligonucleotide; TTT chr11 5200997 5201018 5201002 5200997 -
ttaccactatccttgggaaaat

SEQ ID NO: 147910 - DNA, 22 bp, Artificial Sequence
  Synthetic oligonucleotide; TTT chr11 5200996 5201017 5201001 5200996 -
taccactatccttgggaaaatg

SEQ ID NO: 147911 - DNA, 22 bp, Artificial Sequence
  Synthetic oligonucleotide; TTT chr11 5200995 5201016 5201000 5200995 -
accactatccttgggaaaatgt

SEQ ID NO: 147912 - DNA, 22 bp, Artificial Sequence
  Synthetic oligonucleotide; TTA chr11 5200994 5201015 5200999 5200994 -
ccactatccttgggaaaatgtc

SEQ ID NO: 147913 - DNA, 22 bp, Artificial Sequence
  Synthetic oligonucleotide; CTA chr11 5200988 5201009 5200993 5200988 -
tccttgggaaaatgtctaagca

SEQ ID NO: 147914 - DNA, 22 bp, Artificial Sequence
  Synthetic oligonucleotide; CTT chr11 5200983 5201004 5200988 5200983 -
gggaaaatgtctaagcaacgta

SEQ ID NO: 147915 - DNA, 22 bp, Artificial Sequence
  Synthetic oligonucleotide; TTG chr11 5200982 5201003 5200987 5200982 -
ggaaaatgtctaagcaacgtat

SEQ ID NO: 147916 - DNA, 22 bp, Artificial Sequence
  Synthetic oligonucleotide; CTA chr11 5200970 5200991 5200975 5200970 -
agcaacgtatttttttaaaact

SEQ ID NO: 147917 - DNA, 22 bp, Artificial Sequence
  Synthetic oligonucleotide; TTT chr11 5200958 5200979 5200963 5200958 -
ttttaaaactagccttctcctt

SEQ ID NO: 147918 - DNA, 22 bp, Artificial Sequence
  Synthetic oligonucleotide; TTT chr11 5200957 5200978 5200962 5200957 -
tttaaaactagccttctccttt

SEQ ID NO: 147919 - DNA, 22 bp, Artificial Sequence
  Synthetic oligonucleotide; TTT chr11 5200956 5200977 5200961 5200956 -
ttaaaactagccttctcctttt

SEQ ID NO: 147920 - DNA, 22 bp, Artificial Sequence
  Synthetic oligonucleotide; TTT chr11 5200955 5200976 5200960 5200955 -
taaaactagccttctcctttta

SEQ ID NO: 147921 - DNA, 22 bp, Artificial Sequence
  Synthetic oligonucleotide; TTT chr11 5200954 5200975 5200959 5200954 -
aaaactagccttctccttttac

SEQ ID NO: 147922 - DNA, 22 bp, Artificial Sequence
  Synthetic oligonucleotide; TTA chr11 5200953 5200974 5200958 5200953 -
aaactagccttctccttttact

SEQ ID NO: 147923 - DNA, 22 bp, Artificial Sequence
  Synthetic oligonucleotide; CTA chr11 5200947 5200968 5200952 5200947 -
gccttctccttttactaatctc

SEQ ID NO: 147924 - DNA, 22 bp, Artificial Sequence
  Synthetic oligonucleotide; CTT chr11 5200942 5200963 5200947 5200942 -
ctccttttactaatctcttcct

SEQ ID NO: 147925 - DNA, 22 bp, Artificial Sequence
  Synthetic oligonucleotide; TTC chr11 5200941 5200962 5200946 5200941 -
tccttttactaatctcttcctt

SEQ ID NO: 147926 - DNA, 22 bp, Artificial Sequence
  Synthetic oligonucleotide; CTC chr11 5200939 5200960 5200944 5200939 -
cttttactaatctcttccttat

SEQ ID NO: 147927 - DNA, 22 bp, Artificial Sequence
  Synthetic oligonucleotide; CTT chr11 5200936 5200957 5200941 5200936 -
ttactaatctcttccttatttg

SEQ ID NO: 147928 - DNA, 22 bp, Artificial Sequence
  Synthetic oligonucleotide; TTT chr11 5200935 5200956 5200940 5200935 -
tactaatctcttccttatttgt

SEQ ID NO: 147929 - DNA, 22 bp, Artificial Sequence
  Synthetic oligonucleotide; TTT chr11 5200934 5200955 5200939 5200934 -
actaatctcttccttatttgtt

SEQ ID NO: 147930 - DNA, 22 bp, Artificial Sequence
  Synthetic oligonucleotide; TTA chr11 5200933 5200954 5200938 5200933 -
ctaatctcttccttatttgttt

SEQ ID NO: 147931 - DNA, 22 bp, Artificial Sequence
  Synthetic oligonucleotide; CTA chr11 5200930 5200951 5200935 5200930 -
atctcttccttatttgtttttg

SEQ ID NO: 147932 - DNA, 22 bp, Artificial Sequence
  Synthetic oligonucleotide; CTC chr11 5200925 5200946 5200930 5200925 -
ttccttatttgtttttgcttat

SEQ ID NO: 147933 - DNA, 22 bp, Artificial Sequence
  Synthetic oligonucleotide; CTT chr11 5200923 5200944 5200928 5200923 -
ccttatttgtttttgcttatgg

SEQ ID NO: 147934 - DNA, 22 bp, Artificial Sequence
  Synthetic oligonucleotide; TTC chr11 5200922 5200943 5200927 5200922 -
cttatttgtttttgcttatggc

SEQ ID NO: 147935 - DNA, 22 bp, Artificial Sequence
  Synthetic oligonucleotide; CTT chr11 5200919 5200940 5200924 5200919 -
atttgtttttgcttatggcttc

SEQ ID NO: 147936 - DNA, 22 bp, Artificial Sequence
  Synthetic oligonucleotide; TTA chr11 5200918 5200939 5200923 5200918 -
tttgtttttgcttatggcttct

SEQ ID NO: 147937 - DNA, 22 bp, Artificial Sequence
  Synthetic oligonucleotide; TTT chr11 5200915 5200936 5200920 5200915 -
gtttttgcttatggcttctaag

SEQ ID NO: 147938 - DNA, 22 bp, Artificial Sequence
  Synthetic oligonucleotide; TTG chr11 5200914 5200935 5200919 5200914 -
tttttgcttatggcttctaagg

SEQ ID NO: 147939 - DNA, 22 bp, Artificial Sequence
  Synthetic oligonucleotide; TTT chr11 5200911 5200932 5200916 5200911 -
ttgcttatggcttctaaggata

SEQ ID NO: 147940 - DNA, 22 bp, Artificial Sequence
  Synthetic oligonucleotide; TTT chr11 5200910 5200931 5200915 5200910 -
tgcttatggcttctaaggatat

SEQ ID NO: 147941 - DNA, 22 bp, Artificial Sequence
  Synthetic oligonucleotide; TTT chr11 5200909 5200930 5200914 5200909 -
gcttatggcttctaaggatatg

SEQ ID NO: 147942 - DNA, 22 bp, Artificial Sequence
  Synthetic oligonucleotide; TTG chr11 5200908 5200929 5200913 5200908 -
cttatggcttctaaggatatgt

SEQ ID NO: 147943 - DNA, 22 bp, Artificial Sequence
  Synthetic oligonucleotide; CTT chr11 5200905 5200926 5200910 5200905 -
atggcttctaaggatatgttca

SEQ ID NO: 147944 - DNA, 22 bp, Artificial Sequence
  Synthetic oligonucleotide; TTA chr11 5200904 5200925 5200909 5200904 -
tggcttctaaggatatgttcac

SEQ ID NO: 147945 - DNA, 22 bp, Artificial Sequence
  Synthetic oligonucleotide; CTT chr11 5200898 5200919 5200903 5200898 -
ctaaggatatgttcacatccag

SEQ ID NO: 147946 - DNA, 22 bp, Artificial Sequence
  Synthetic oligonucleotide; TTC chr11 5200897 5200918 5200902 5200897 -
taaggatatgttcacatccaga

SEQ ID NO: 147947 - DNA, 22 bp, Artificial Sequence
  Synthetic oligonucleotide; CTA chr11 5200895 5200916 5200900 5200895 -
aggatatgttcacatccagaca

SEQ ID NO: 147948 - DNA, 22 bp, Artificial Sequence
  Synthetic oligonucleotide; TTC chr11 5200884 5200905 5200889 5200884 -
acatccagacagtgaaaaaata

SEQ ID NO: 147949 - DNA, 22 bp, Artificial Sequence
  Synthetic oligonucleotide; CTT chr11 5200855 5200876 5200860 5200855 -
ttaaatgacatcaaaagaagac

SEQ ID NO: 147950 - DNA, 22 bp, Artificial Sequence
  Synthetic oligonucleotide; TTT chr11 5200854 5200875 5200859 5200854 -
taaatgacatcaaaagaagacc

SEQ ID NO: 147951 - DNA, 22 bp, Artificial Sequence
  Synthetic oligonucleotide; TTT chr11 5200853 5200874 5200858 5200853 -
aaatgacatcaaaagaagacca

SEQ ID NO: 147952 - DNA, 22 bp, Artificial Sequence
  Synthetic oligonucleotide; TTA chr11 5200852 5200873 5200857 5200852 -
aatgacatcaaaagaagaccat

SEQ ID NO: 147953 - DNA, 22 bp, Artificial Sequence
  Synthetic oligonucleotide; TTT chr11 5200828 5200849 5200833 5200828 -
tctcaaaggcaatggatactat

SEQ ID NO: 147954 - DNA, 22 bp, Artificial Sequence
  Synthetic oligonucleotide; TTT chr11 5200827 5200848 5200832 5200827 -
ctcaaaggcaatggatactatg

SEQ ID NO: 147955 - DNA, 22 bp, Artificial Sequence
  Synthetic oligonucleotide; TTC chr11 5200826 5200847 5200831 5200826 -
tcaaaggcaatggatactatgt

SEQ ID NO: 147956 - DNA, 22 bp, Artificial Sequence
  Synthetic oligonucleotide; CTC chr11 5200824 5200845 5200829 5200824 -
aaaggcaatggatactatgtct

SEQ ID NO: 147957 - DNA, 22 bp, Artificial Sequence
  Synthetic oligonucleotide; CTA chr11 5200807 5200828 5200812 5200807 -
tgtctcaaagaaacagaatttc

SEQ ID NO: 147958 - DNA, 22 bp, Artificial Sequence
  Synthetic oligonucleotide; CTC chr11 5200801 5200822 5200806 5200801 -
aaagaaacagaatttctcagct

SEQ ID NO: 147959 - DNA, 22 bp, Artificial Sequence
  Synthetic oligonucleotide; TTT chr11 5200786 5200807 5200791 5200786 -
ctcagctgttttttttaagtca

SEQ ID NO: 147960 - DNA, 22 bp, Artificial Sequence
  Synthetic oligonucleotide; TTC chr11 5200785 5200806 5200790 5200785 -
tcagctgttttttttaagtcag

SEQ ID NO: 147961 - DNA, 22 bp, Artificial Sequence
  Synthetic oligonucleotide; CTC chr11 5200783 5200804 5200788 5200783 -
agctgttttttttaagtcagta

SEQ ID NO: 147962 - DNA, 22 bp, Artificial Sequence
  Synthetic oligonucleotide; CTG chr11 5200778 5200799 5200783 5200778 -
ttttttttaagtcagtaagttt

SEQ ID NO: 147963 - DNA, 22 bp, Artificial Sequence
  Synthetic oligonucleotide; TTT chr11 5200775 5200796 5200780 5200775 -
tttttaagtcagtaagttttag

SEQ ID NO: 147964 - DNA, 22 bp, Artificial Sequence
  Synthetic oligonucleotide; TTT chr11 5200774 5200795 5200779 5200774 -
ttttaagtcagtaagttttagg

SEQ ID NO: 147965 - DNA, 22 bp, Artificial Sequence
  Synthetic oligonucleotide; TTT chr11 5200773 5200794 5200778 5200773 -
tttaagtcagtaagttttaggg

SEQ ID NO: 147966 - DNA, 22 bp, Artificial Sequence
  Synthetic oligonucleotide; TTT chr11 5200772 5200793 5200777 5200772 -
ttaagtcagtaagttttagggt

SEQ ID NO: 147967 - DNA, 22 bp, Artificial Sequence
  Synthetic oligonucleotide; TTT chr11 5200771 5200792 5200776 5200771 -
taagtcagtaagttttagggta

SEQ ID NO: 147968 - DNA, 22 bp, Artificial Sequence
  Synthetic oligonucleotide; TTT chr11 5200770 5200791 5200775 5200770 -
aagtcagtaagttttagggtat

SEQ ID NO: 147969 - DNA, 22 bp, Artificial Sequence
  Synthetic oligonucleotide; TTA chr11 5200769 5200790 5200774 5200769 -
agtcagtaagttttagggtatt

SEQ ID NO: 147970 - DNA, 22 bp, Artificial Sequence
  Synthetic oligonucleotide; TTT chr11 5200756 5200777 5200761 5200756 -
tagggtatttcatttacttaga

SEQ ID NO: 147971 - DNA, 22 bp, Artificial Sequence
  Synthetic oligonucleotide; TTT chr11 5200755 5200776 5200760 5200755 -
agggtatttcatttacttagaa

SEQ ID NO: 147972 - DNA, 22 bp, Artificial Sequence
  Synthetic oligonucleotide; TTA chr11 5200754 5200775 5200759 5200754 -
gggtatttcatttacttagaaa

SEQ ID NO: 147973 - DNA, 22 bp, Artificial Sequence
  Synthetic oligonucleotide; TTT chr11 5200746 5200767 5200751 5200746 -
catttacttagaaatttcattg

SEQ ID NO: 147974 - DNA, 22 bp, Artificial Sequence
  Synthetic oligonucleotide; TTC chr11 5200745 5200766 5200750 5200745 -
atttacttagaaatttcattgt

SEQ ID NO: 147975 - DNA, 22 bp, Artificial Sequence
  Synthetic oligonucleotide; TTT chr11 5200741 5200762 5200746 5200741 -
acttagaaatttcattgtattc

SEQ ID NO: 147976 - DNA, 22 bp, Artificial Sequence
  Synthetic oligonucleotide; TTA chr11 5200740 5200761 5200745 5200740 -
cttagaaatttcattgtattca

SEQ ID NO: 147977 - DNA, 22 bp, Artificial Sequence
  Synthetic oligonucleotide; CTT chr11 5200737 5200758 5200742 5200737 -
agaaatttcattgtattcaggt

SEQ ID NO: 147978 - DNA, 22 bp, Artificial Sequence
  Synthetic oligonucleotide; TTA chr11 5200736 5200757 5200741 5200736 -
gaaatttcattgtattcaggtg

SEQ ID NO: 147979 - DNA, 22 bp, Artificial Sequence
  Synthetic oligonucleotide; TTT chr11 5200729 5200750 5200734 5200729 -
cattgtattcaggtgaaattga

SEQ ID NO: 147980 - DNA, 22 bp, Artificial Sequence
  Synthetic oligonucleotide; TTC chr11 5200728 5200749 5200733 5200728 -
attgtattcaggtgaaattgaa

SEQ ID NO: 147981 - DNA, 22 bp, Artificial Sequence
  Synthetic oligonucleotide; TTG chr11 5200724 5200745 5200729 5200724 -
tattcaggtgaaattgaaacat

SEQ ID NO: 147982 - DNA, 22 bp, Artificial Sequence
  Synthetic oligonucleotide; TTC chr11 5200719 5200740 5200724 5200719 -
aggtgaaattgaaacatttcct

SEQ ID NO: 147983 - DNA, 22 bp, Artificial Sequence
  Synthetic oligonucleotide; TTG chr11 5200708 5200729 5200713 5200708 -
aaacatttcctttgaaaaaata

SEQ ID NO: 147984 - DNA, 22 bp, Artificial Sequence
  Synthetic oligonucleotide; TTT chr11 5200700 5200721 5200705 5200700 -
cctttgaaaaaatactctcaca

SEQ ID NO: 147985 - DNA, 22 bp, Artificial Sequence
  Synthetic oligonucleotide; TTC chr11 5200699 5200720 5200704 5200699 -
ctttgaaaaaatactctcacat

SEQ ID NO: 147986 - DNA, 22 bp, Artificial Sequence
  Synthetic oligonucleotide; CTT chr11 5200696 5200717 5200701 5200696 -
tgaaaaaatactctcacatgtt

SEQ ID NO: 147987 - DNA, 22 bp, Artificial Sequence
  Synthetic oligonucleotide; TTT chr11 5200695 5200716 5200700 5200695 -
gaaaaaatactctcacatgttt

SEQ ID NO: 147988 - DNA, 22 bp, Artificial Sequence
  Synthetic oligonucleotide; TTG chr11 5200694 5200715 5200699 5200694 -
aaaaaatactctcacatgtttc

SEQ ID NO: 147989 - DNA, 22 bp, Artificial Sequence
  Synthetic oligonucleotide; CTC chr11 5200683 5200704 5200688 5200683 -
tcacatgtttctcagttccaga

SEQ ID NO: 147990 - DNA, 22 bp, Artificial Sequence
  Synthetic oligonucleotide; CTC chr11 5200681 5200702 5200686 5200681 -
acatgtttctcagttccagaat

SEQ ID NO: 147991 - DNA, 22 bp, Artificial Sequence
  Synthetic oligonucleotide; TTT chr11 5200673 5200694 5200678 5200673 -
ctcagttccagaatgattactt

SEQ ID NO: 147992 - DNA, 22 bp, Artificial Sequence
  Synthetic oligonucleotide; TTC chr11 5200672 5200693 5200677 5200672 -
tcagttccagaatgattacttc

SEQ ID NO: 147993 - DNA, 22 bp, Artificial Sequence
  Synthetic oligonucleotide; CTC chr11 5200670 5200691 5200675 5200670 -
agttccagaatgattacttcag

SEQ ID NO: 147994 - DNA, 22 bp, Artificial Sequence
  Synthetic oligonucleotide; TTC chr11 5200665 5200686 5200670 5200665 -
cagaatgattacttcagtaagc

SEQ ID NO: 147995 - DNA, 22 bp, Artificial Sequence
  Synthetic oligonucleotide; TTA chr11 5200654 5200675 5200659 5200654 -
cttcagtaagccctagcaccag

SEQ ID NO: 147996 - DNA, 22 bp, Artificial Sequence
  Synthetic oligonucleotide; CTT chr11 5200651 5200672 5200656 5200651 -
cagtaagccctagcaccagcac

SEQ ID NO: 147997 - DNA, 22 bp, Artificial Sequence
  Synthetic oligonucleotide; TTC chr11 5200650 5200671 5200655 5200650 -
agtaagccctagcaccagcacg

SEQ ID NO: 147998 - DNA, 22 bp, Artificial Sequence
  Synthetic oligonucleotide; CTA chr11 5200639 5200660 5200644 5200639 -
gcaccagcacgaattcttcctt

SEQ ID NO: 147999 - DNA, 22 bp, Artificial Sequence
  Synthetic oligonucleotide; TTC chr11 5200623 5200644 5200628 5200623 -
ttcctttcttctcactggattt

SEQ ID NO: 148000 - DNA, 22 bp, Artificial Sequence
  Synthetic oligonucleotide; CTT chr11 5200621 5200642 5200626 5200621 -
cctttcttctcactggattttc

SEQ ID NO: 148001 - DNA, 22 bp, Artificial Sequence
  Synthetic oligonucleotide; TTC chr11 5200620 5200641 5200625 5200620 -
ctttcttctcactggattttct

SEQ ID NO: 148002 - DNA, 22 bp, Artificial Sequence
  Synthetic oligonucleotide; CTT chr11 5200617 5200638 5200622 5200617 -
tcttctcactggattttctggc

SEQ ID NO: 148003 - DNA, 22 bp, Artificial Sequence
  Synthetic oligonucleotide; TTT chr11 5200616 5200637 5200621 5200616 -
cttctcactggattttctggca

SEQ ID NO: 148004 - DNA, 22 bp, Artificial Sequence
  Synthetic oligonucleotide; TTC chr11 5200615 5200636 5200620 5200615 -
ttctcactggattttctggcat

SEQ ID NO: 148005 - DNA, 22 bp, Artificial Sequence
  Synthetic oligonucleotide; CTT chr11 5200613 5200634 5200618 5200613 -
ctcactggattttctggcatgg

SEQ ID NO: 148006 - DNA, 22 bp, Artificial Sequence
  Synthetic oligonucleotide; TTC chr11 5200612 5200633 5200617 5200612 -
tcactggattttctggcatgga

SEQ ID NO: 148007 - DNA, 22 bp, Artificial Sequence
  Synthetic oligonucleotide; CTC chr11 5200610 5200631 5200615 5200610 -
actggattttctggcatggagc

SEQ ID NO: 148008 - DNA, 22 bp, Artificial Sequence
  Synthetic oligonucleotide; CTG chr11 5200606 5200627 5200611 5200606 -
gattttctggcatggagcagca

SEQ ID NO: 148009 - DNA, 22 bp, Artificial Sequence
  Synthetic oligonucleotide; TTT chr11 5200601 5200622 5200606 5200601 -
tctggcatggagcagcaatacc

SEQ ID NO: 148010 - DNA, 22 bp, Artificial Sequence
  Synthetic oligonucleotide; TTT chr11 5200600 5200621 5200605 5200600 -
ctggcatggagcagcaataccc

SEQ ID NO: 148011 - DNA, 22 bp, Artificial Sequence
  Synthetic oligonucleotide; TTC chr11 5200599 5200620 5200604 5200599 -
tggcatggagcagcaatacccc

SEQ ID NO: 148012 - DNA, 22 bp, Artificial Sequence
  Synthetic oligonucleotide; CTG chr11 5200597 5200618 5200602 5200597 -
gcatggagcagcaatacccctg

SEQ ID NO: 148013 - DNA, 22 bp, Artificial Sequence
  Synthetic oligonucleotide; CTG chr11 5200575 5200596 5200580 5200575 -
gctttccatccccttctcctca

SEQ ID NO: 148014 - DNA, 22 bp, Artificial Sequence
  Synthetic oligonucleotide; CTT chr11 5200571 5200592 5200576 5200571 -
tccatccccttctcctcaatct

SEQ ID NO: 148015 - DNA, 22 bp, Artificial Sequence
  Synthetic oligonucleotide; TTT chr11 5200570 5200591 5200575 5200570 -
ccatccccttctcctcaatcta

SEQ ID NO: 148016 - DNA, 22 bp, Artificial Sequence
  Synthetic oligonucleotide; TTC chr11 5200569 5200590 5200574 5200569 -
catccccttctcctcaatctat

SEQ ID NO: 148017 - DNA, 22 bp, Artificial Sequence
  Synthetic oligonucleotide; CTT chr11 5200560 5200581 5200565 5200560 -
ctcctcaatctatgccatggtg

SEQ ID NO: 148018 - DNA, 22 bp, Artificial Sequence
  Synthetic oligonucleotide; TTC chr11 5200559 5200580 5200564 5200559 -
tcctcaatctatgccatggtgc

SEQ ID NO: 148019 - DNA, 22 bp, Artificial Sequence
  Synthetic oligonucleotide; CTC chr11 5200557 5200578 5200562 5200557 -
ctcaatctatgccatggtgctt

SEQ ID NO: 148020 - DNA, 22 bp, Artificial Sequence
  Synthetic oligonucleotide; CTC chr11 5200554 5200575 5200559 5200554 -
aatctatgccatggtgcttttg

SEQ ID NO: 148021 - DNA, 22 bp, Artificial Sequence
  Synthetic oligonucleotide; CTA chr11 5200548 5200569 5200553 5200548 -
tgccatggtgcttttgggcaat

SEQ ID NO: 148022 - DNA, 22 bp, Artificial Sequence
  Synthetic oligonucleotide; CTT chr11 5200535 5200556 5200540 5200535 -
ttgggcaattgcatggttctcc

SEQ ID NO: 148023 - DNA, 22 bp, Artificial Sequence
  Synthetic oligonucleotide; TTT chr11 5200534 5200555 5200539 5200534 -
tgggcaattgcatggttctcca

SEQ ID NO: 148024 - DNA, 22 bp, Artificial Sequence
  Synthetic oligonucleotide; TTT chr11 5200533 5200554 5200538 5200533 -
gggcaattgcatggttctccat

SEQ ID NO: 148025 - DNA, 22 bp, Artificial Sequence
  Synthetic oligonucleotide; TTG chr11 5200532 5200553 5200537 5200532 -
ggcaattgcatggttctccatg

SEQ ID NO: 148026 - DNA, 22 bp, Artificial Sequence
  Synthetic oligonucleotide; TTG chr11 5200524 5200545 5200529 5200524 -
catggttctccatgtgatatgg

SEQ ID NO: 148027 - DNA, 22 bp, Artificial Sequence
  Synthetic oligonucleotide; TTC chr11 5200516 5200537 5200521 5200516 -
tccatgtgatatggactgagcc

SEQ ID NO: 148028 - DNA, 22 bp, Artificial Sequence
  Synthetic oligonucleotide; CTC chr11 5200514 5200535 5200519 5200514 -
catgtgatatggactgagccaa

SEQ ID NO: 148029 - DNA, 22 bp, Artificial Sequence
  Synthetic oligonucleotide; CTG chr11 5200498 5200519 5200503 5200498 -
agccaagcctgcaccagcctat

SEQ ID NO: 148030 - DNA, 22 bp, Artificial Sequence
  Synthetic oligonucleotide; CTG chr11 5200487 5200508 5200492 5200487 -
caccagcctatgttttacttcc

SEQ ID NO: 148031 - DNA, 22 bp, Artificial Sequence
  Synthetic oligonucleotide; CTA chr11 5200477 5200498 5200482 5200477 -
tgttttacttcctgtccatgct

SEQ ID NO: 148032 - DNA, 22 bp, Artificial Sequence
  Synthetic oligonucleotide; TTT chr11 5200472 5200493 5200477 5200472 -
tacttcctgtccatgctggccc

SEQ ID NO: 148033 - DNA, 22 bp, Artificial Sequence
  Synthetic oligonucleotide; TTT chr11 5200471 5200492 5200476 5200471 -
acttcctgtccatgctggccct

SEQ ID NO: 148034 - DNA, 22 bp, Artificial Sequence
  Synthetic oligonucleotide; TTA chr11 5200470 5200491 5200475 5200470 -
cttcctgtccatgctggccctc

SEQ ID NO: 148035 - DNA, 22 bp, Artificial Sequence
  Synthetic oligonucleotide; CTT chr11 5200467 5200488 5200472 5200467 -
cctgtccatgctggccctcact

SEQ ID NO: 148036 - DNA, 22 bp, Artificial Sequence
  Synthetic oligonucleotide; TTC chr11 5200466 5200487 5200471 5200466 -
ctgtccatgctggccctcactg

SEQ ID NO: 148037 - DNA, 22 bp, Artificial Sequence
  Synthetic oligonucleotide; CTG chr11 5200463 5200484 5200468 5200463 -
tccatgctggccctcactgacc

SEQ ID NO: 148038 - DNA, 22 bp, Artificial Sequence
  Synthetic oligonucleotide; CTG chr11 5200454 5200475 5200459 5200454 -
gccctcactgacctgtgcatgg

SEQ ID NO: 148039 - DNA, 22 bp, Artificial Sequence
  Synthetic oligonucleotide; CTC chr11 5200448 5200469 5200453 5200448 -
actgacctgtgcatggggctgt

SEQ ID NO: 148040 - DNA, 22 bp, Artificial Sequence
  Synthetic oligonucleotide; CTG chr11 5200444 5200465 5200449 5200444 -
acctgtgcatggggctgtccac

SEQ ID NO: 148041 - DNA, 22 bp, Artificial Sequence
  Synthetic oligonucleotide; CTG chr11 5200439 5200460 5200444 5200439 -
tgcatggggctgtccactgtgt

SEQ ID NO: 148042 - DNA, 22 bp, Artificial Sequence
  Synthetic oligonucleotide; CTG chr11 5200427 5200448 5200432 5200427 -
tccactgtgtacacagtgctgg

SEQ ID NO: 148043 - DNA, 22 bp, Artificial Sequence
  Synthetic oligonucleotide; CTG chr11 5200420 5200441 5200425 5200420 -
tgtacacagtgctggggatcct

SEQ ID NO: 148044 - DNA, 22 bp, Artificial Sequence
  Synthetic oligonucleotide; CTG chr11 5200406 5200427 5200411 5200406 -
gggatcctgtgggggatcattc

SEQ ID NO: 148045 - DNA, 22 bp, Artificial Sequence
  Synthetic oligonucleotide; CTG chr11 5200397 5200418 5200402 5200397 -
tgggggatcattcgagagatca

SEQ ID NO: 148046 - DNA, 22 bp, Artificial Sequence
  Synthetic oligonucleotide; TTC chr11 5200384 5200405 5200389 5200384 -
gagagatcagcttggattcctg

SEQ ID NO: 148047 - DNA, 22 bp, Artificial Sequence
  Synthetic oligonucleotide; CTT chr11 5200371 5200392 5200376 5200371 -
ggattcctgcattgcccagtcc

SEQ ID NO: 148048 - DNA, 22 bp, Artificial Sequence
  Synthetic oligonucleotide; TTG chr11 5200370 5200391 5200375 5200370 -
gattcctgcattgcccagtcct

SEQ ID NO: 148049 - DNA, 22 bp, Artificial Sequence
  Synthetic oligonucleotide; TTC chr11 5200365 5200386 5200370 5200365 -
ctgcattgcccagtcctatttc

SEQ ID NO: 148050 - DNA, 22 bp, Artificial Sequence
  Synthetic oligonucleotide; CTG chr11 5200362 5200383 5200367 5200362 -
cattgcccagtcctatttcatc

SEQ ID NO: 148051 - DNA, 22 bp, Artificial Sequence
  Synthetic oligonucleotide; TTG chr11 5200357 5200378 5200362 5200357 -
cccagtcctatttcatccatgg

SEQ ID NO: 148052 - DNA, 22 bp, Artificial Sequence
  Synthetic oligonucleotide; CTA chr11 5200347 5200368 5200352 5200347 -
tttcatccatggtctgtccttc

SEQ ID NO: 148053 - DNA, 22 bp, Artificial Sequence
  Synthetic oligonucleotide; TTT chr11 5200344 5200365 5200349 5200344 -
catccatggtctgtccttcatg

SEQ ID NO: 148054 - DNA, 22 bp, Artificial Sequence
  Synthetic oligonucleotide; TTC chr11 5200343 5200364 5200348 5200343 -
atccatggtctgtccttcatgg

SEQ ID NO: 148055 - DNA, 22 bp, Artificial Sequence
  Synthetic oligonucleotide; CTG chr11 5200331 5200352 5200336 5200331 -
tccttcatggagtcctctgtcc

SEQ ID NO: 148056 - DNA, 22 bp, Artificial Sequence
  Synthetic oligonucleotide; CTT chr11 5200326 5200347 5200331 5200326 -
catggagtcctctgtcctcctc

SEQ ID NO: 148057 - DNA, 22 bp, Artificial Sequence
  Synthetic oligonucleotide; TTC chr11 5200325 5200346 5200330 5200325 -
atggagtcctctgtcctcctca

SEQ ID NO: 148058 - DNA, 22 bp, Artificial Sequence
  Synthetic oligonucleotide; CTC chr11 5200314 5200335 5200319 5200314 -
tgtcctcctcactatggccttt

SEQ ID NO: 148059 - DNA, 22 bp, Artificial Sequence
  Synthetic oligonucleotide; CTG chr11 5200312 5200333 5200317 5200312 -
tcctcctcactatggcctttga

SEQ ID NO: 148060 - DNA, 22 bp, Artificial Sequence
  Synthetic oligonucleotide; CTC chr11 5200307 5200328 5200312 5200307 -
ctcactatggcctttgaccggt

SEQ ID NO: 148061 - DNA, 22 bp, Artificial Sequence
  Synthetic oligonucleotide; CTC chr11 5200304 5200325 5200309 5200304 -
actatggcctttgaccggtaca

SEQ ID NO: 148062 - DNA, 22 bp, Artificial Sequence
  Synthetic oligonucleotide; CTA chr11 5200300 5200321 5200305 5200300 -
tggcctttgaccggtacattgc

SEQ ID NO: 148063 - DNA, 22 bp, Artificial Sequence
  Synthetic oligonucleotide; CTT chr11 5200293 5200314 5200298 5200293 -
tgaccggtacattgcaatttgc

SEQ ID NO: 148064 - DNA, 22 bp, Artificial Sequence
  Synthetic oligonucleotide; TTT chr11 5200292 5200313 5200297 5200292 -
gaccggtacattgcaatttgca

SEQ ID NO: 148065 - DNA, 22 bp, Artificial Sequence
  Synthetic oligonucleotide; TTG chr11 5200291 5200312 5200296 5200291 -
accggtacattgcaatttgcaa

SEQ ID NO: 148066 - DNA, 22 bp, Artificial Sequence
  Synthetic oligonucleotide; TTG chr11 5200279 5200300 5200284 5200279 -
caatttgcaatccactacgtta

SEQ ID NO: 148067 - DNA, 22 bp, Artificial Sequence
  Synthetic oligonucleotide; TTT chr11 5200273 5200294 5200278 5200273 -
gcaatccactacgttattcctc

SEQ ID NO: 148068 - DNA, 22 bp, Artificial Sequence
  Synthetic oligonucleotide; TTG chr11 5200272 5200293 5200277 5200272 -
caatccactacgttattcctcc

SEQ ID NO: 148069 - DNA, 22 bp, Artificial Sequence
  Synthetic oligonucleotide; CTA chr11 5200262 5200283 5200267 5200262 -
cgttattcctccatcctgacta

SEQ ID NO: 148070 - DNA, 22 bp, Artificial Sequence
  Synthetic oligonucleotide; TTA chr11 5200257 5200278 5200262 5200257 -
ttcctccatcctgactaattcc

SEQ ID NO: 148071 - DNA, 22 bp, Artificial Sequence
  Synthetic oligonucleotide; TTC chr11 5200254 5200275 5200259 5200254 -
ctccatcctgactaattccaga

SEQ ID NO: 148072 - DNA, 22 bp, Artificial Sequence
  Synthetic oligonucleotide; CTC chr11 5200251 5200272 5200256 5200251 -
catcctgactaattccagaatt

SEQ ID NO: 148073 - DNA, 22 bp, Artificial Sequence
  Synthetic oligonucleotide; CTG chr11 5200244 5200265 5200249 5200244 -
actaattccagaattatcaaaa

SEQ ID NO: 148074 - DNA, 22 bp, Artificial Sequence
  Synthetic oligonucleotide; CTA chr11 5200240 5200261 5200245 5200240 -
attccagaattatcaaaattgg

SEQ ID NO: 148075 - DNA, 22 bp, Artificial Sequence
  Synthetic oligonucleotide; TTC chr11 5200236 5200257 5200241 5200236 -
cagaattatcaaaattgggctc

SEQ ID NO: 148076 - DNA, 22 bp, Artificial Sequence
  Synthetic oligonucleotide; TTA chr11 5200228 5200249 5200233 5200228 -
tcaaaattgggctcactataat

SEQ ID NO: 148077 - DNA, 22 bp, Artificial Sequence
  Synthetic oligonucleotide; TTG chr11 5200219 5200240 5200224 5200219 -
ggctcactataataggtaggag

SEQ ID NO: 148078 - DNA, 22 bp, Artificial Sequence
  Synthetic oligonucleotide; CTC chr11 5200214 5200235 5200219 5200214 -
actataataggtaggagttttt

SEQ ID NO: 148079 - DNA, 22 bp, Artificial Sequence
  Synthetic oligonucleotide; CTA chr11 5200210 5200231 5200215 5200210 -
taataggtaggagttttttctt

SEQ ID NO: 148080 - DNA, 22 bp, Artificial Sequence
  Synthetic oligonucleotide; TTT chr11 5200194 5200215 5200199 5200194 -
tttctttattacaccccccatc

SEQ ID NO: 148081 - DNA, 22 bp, Artificial Sequence
  Synthetic oligonucleotide; TTT chr11 5200193 5200214 5200198 5200193 -
ttctttattacaccccccatca

SEQ ID NO: 148082 - DNA, 22 bp, Artificial Sequence
  Synthetic oligonucleotide; TTT chr11 5200192 5200213 5200197 5200192 -
tctttattacaccccccatcat

SEQ ID NO: 148083 - DNA, 22 bp, Artificial Sequence
  Synthetic oligonucleotide; TTT chr11 5200191 5200212 5200196 5200191 -
ctttattacaccccccatcatc

SEQ ID NO: 148084 - DNA, 22 bp, Artificial Sequence
  Synthetic oligonucleotide; TTC chr11 5200190 5200211 5200195 5200190 -
tttattacaccccccatcatct

SEQ ID NO: 148085 - DNA, 22 bp, Artificial Sequence
  Synthetic oligonucleotide; CTT chr11 5200188 5200209 5200193 5200188 -
tattacaccccccatcatctgt

SEQ ID NO: 148086 - DNA, 22 bp, Artificial Sequence
  Synthetic oligonucleotide; TTT chr11 5200187 5200208 5200192 5200187 -
attacaccccccatcatctgtc

SEQ ID NO: 148087 - DNA, 22 bp, Artificial Sequence
  Synthetic oligonucleotide; TTA chr11 5200186 5200207 5200191 5200186 -
ttacaccccccatcatctgtct

SEQ ID NO: 148088 - DNA, 22 bp, Artificial Sequence
  Synthetic oligonucleotide; TTA chr11 5200183 5200204 5200188 5200183 -
caccccccatcatctgtctgaa

SEQ ID NO: 148089 - DNA, 22 bp, Artificial Sequence
  Synthetic oligonucleotide; CTG chr11 5200167 5200188 5200172 5200167 -
tctgaaattttttaattactgt

SEQ ID NO: 148090 - DNA, 22 bp, Artificial Sequence
  Synthetic oligonucleotide; CTG chr11 5200163 5200184 5200168 5200163 -
aaattttttaattactgtcatt

SEQ ID NO: 148091 - DNA, 22 bp, Artificial Sequence
  Synthetic oligonucleotide; TTT chr11 5200157 5200178 5200162 5200157 -
tttaattactgtcatttccaca

SEQ ID NO: 148092 - DNA, 22 bp, Artificial Sequence
  Synthetic oligonucleotide; TTT chr11 5200156 5200177 5200161 5200156 -
ttaattactgtcatttccacat

SEQ ID NO: 148093 - DNA, 22 bp, Artificial Sequence
  Synthetic oligonucleotide; TTT chr11 5200155 5200176 5200160 5200155 -
taattactgtcatttccacatc

SEQ ID NO: 148094 - DNA, 22 bp, Artificial Sequence
  Synthetic oligonucleotide; TTT chr11 5200154 5200175 5200159 5200154 -
aattactgtcatttccacatcc

SEQ ID NO: 148095 - DNA, 22 bp, Artificial Sequence
  Synthetic oligonucleotide; TTA chr11 5200153 5200174 5200158 5200153 -
attactgtcatttccacatcct

SEQ ID NO: 148096 - DNA, 22 bp, Artificial Sequence
  Synthetic oligonucleotide; TTA chr11 5200149 5200170 5200154 5200149 -
ctgtcatttccacatcctttct

SEQ ID NO: 148097 - DNA, 22 bp, Artificial Sequence
  Synthetic oligonucleotide; CTG chr11 5200146 5200167 5200151 5200146 -
tcatttccacatcctttctcac

SEQ ID NO: 148098 - DNA, 22 bp, Artificial Sequence
  Synthetic oligonucleotide; TTT chr11 5200140 5200161 5200145 5200140 -
ccacatcctttctcactctttc

SEQ ID NO: 148099 - DNA, 22 bp, Artificial Sequence
  Synthetic oligonucleotide; TTC chr11 5200139 5200160 5200144 5200139 -
cacatcctttctcactctttct

SEQ ID NO: 148100 - DNA, 22 bp, Artificial Sequence
  Synthetic oligonucleotide; CTT chr11 5200130 5200151 5200135 5200130 -
tctcactctttctgcctgcacc

SEQ ID NO: 148101 - DNA, 22 bp, Artificial Sequence
  Synthetic oligonucleotide; TTT chr11 5200129 5200150 5200134 5200129 -
ctcactctttctgcctgcacca

SEQ ID NO: 148102 - DNA, 22 bp, Artificial Sequence
  Synthetic oligonucleotide; TTC chr11 5200128 5200149 5200133 5200128 -
tcactctttctgcctgcaccag

SEQ ID NO: 148103 - DNA, 22 bp, Artificial Sequence
  Synthetic oligonucleotide; CTC chr11 5200126 5200147 5200131 5200126 -
actctttctgcctgcaccagga

SEQ ID NO: 148104 - DNA, 22 bp, Artificial Sequence
  Synthetic oligonucleotide; CTC chr11 5200122 5200143 5200127 5200122 -
tttctgcctgcaccaggatctt

SEQ ID NO: 148105 - DNA, 22 bp, Artificial Sequence
  Synthetic oligonucleotide; CTT chr11 5200120 5200141 5200125 5200120 -
tctgcctgcaccaggatcttct

SEQ ID NO: 148106 - DNA, 22 bp, Artificial Sequence
  Synthetic oligonucleotide; TTT chr11 5200119 5200140 5200124 5200119 -
ctgcctgcaccaggatcttctc

SEQ ID NO: 148107 - DNA, 22 bp, Artificial Sequence
  Synthetic oligonucleotide; TTC chr11 5200118 5200139 5200123 5200118 -
tgcctgcaccaggatcttctcc

SEQ ID NO: 148108 - DNA, 22 bp, Artificial Sequence
  Synthetic oligonucleotide; CTG chr11 5200116 5200137 5200121 5200116 -
cctgcaccaggatcttctccgc

SEQ ID NO: 148109 - DNA, 22 bp, Artificial Sequence
  Synthetic oligonucleotide; CTG chr11 5200112 5200133 5200117 5200112 -
caccaggatcttctccgcttag

SEQ ID NO: 148110 - DNA, 22 bp, Artificial Sequence
  Synthetic oligonucleotide; CTT chr11 5200100 5200121 5200105 5200100 -
ctccgcttagcctgttcagaca

SEQ ID NO: 148111 - DNA, 22 bp, Artificial Sequence
  Synthetic oligonucleotide; TTC chr11 5200099 5200120 5200104 5200099 -
tccgcttagcctgttcagacat

SEQ ID NO: 148112 - DNA, 22 bp, Artificial Sequence
  Synthetic oligonucleotide; CTC chr11 5200097 5200118 5200102 5200097 -
cgcttagcctgttcagacatcc

SEQ ID NO: 148113 - DNA, 22 bp, Artificial Sequence
  Synthetic oligonucleotide; CTT chr11 5200092 5200113 5200097 5200092 -
agcctgttcagacatccgattc

SEQ ID NO: 148114 - DNA, 22 bp, Artificial Sequence
  Synthetic oligonucleotide; TTA chr11 5200091 5200112 5200096 5200091 -
gcctgttcagacatccgattca

SEQ ID NO: 148115 - DNA, 22 bp, Artificial Sequence
  Synthetic oligonucleotide; CTG chr11 5200086 5200107 5200091 5200086 -
ttcagacatccgattcaatagt

SEQ ID NO: 148116 - DNA, 22 bp, Artificial Sequence
  Synthetic oligonucleotide; TTC chr11 5200083 5200104 5200088 5200083 -
agacatccgattcaatagttac

SEQ ID NO: 148117 - DNA, 22 bp, Artificial Sequence
  Synthetic oligonucleotide; TTC chr11 5200070 5200091 5200075 5200070 -
aatagttactatgccctgatgc

SEQ ID NO: 148118 - DNA, 22 bp, Artificial Sequence
  Synthetic oligonucleotide; TTA chr11 5200062 5200083 5200067 5200062 -
ctatgccctgatgctggttatt

SEQ ID NO: 148119 - DNA, 22 bp, Artificial Sequence
  Synthetic oligonucleotide; CTA chr11 5200059 5200080 5200064 5200059 -
tgccctgatgctggttatttgc

SEQ ID NO: 148120 - DNA, 22 bp, Artificial Sequence
  Synthetic oligonucleotide; CTG chr11 5200052 5200073 5200057 5200052 -
atgctggttatttgcatactgt

SEQ ID NO: 148121 - DNA, 22 bp, Artificial Sequence
  Synthetic oligonucleotide; CTG chr11 5200046 5200067 5200051 5200046 -
gttatttgcatactgttgttgg

SEQ ID NO: 148122 - DNA, 22 bp, Artificial Sequence
  Synthetic oligonucleotide; TTA chr11 5200042 5200063 5200047 5200042 -
tttgcatactgttgttggatgc

SEQ ID NO: 148123 - DNA, 22 bp, Artificial Sequence
  Synthetic oligonucleotide; TTT chr11 5200039 5200060 5200044 5200039 -
gcatactgttgttggatgctat

SEQ ID NO: 148124 - DNA, 22 bp, Artificial Sequence
  Synthetic oligonucleotide; TTG chr11 5200038 5200059 5200043 5200038 -
catactgttgttggatgctata

SEQ ID NO: 148125 - DNA, 22 bp, Artificial Sequence
  Synthetic oligonucleotide; CTG chr11 5200031 5200052 5200036 5200031 -
ttgttggatgctatactcatcc

SEQ ID NO: 148126 - DNA, 22 bp, Artificial Sequence
  Synthetic oligonucleotide; TTG chr11 5200028 5200049 5200033 5200028 -
ttggatgctatactcatccttt

SEQ ID NO: 148127 - DNA, 22 bp, Artificial Sequence
  Synthetic oligonucleotide; TTG chr11 5200025 5200046 5200030 5200025 -
gatgctatactcatccttttct

SEQ ID NO: 148128 - DNA, 22 bp, Artificial Sequence
  Synthetic oligonucleotide; CTA chr11 5200018 5200039 5200023 5200018 -
tactcatccttttctcctacat

SEQ ID NO: 148129 - DNA, 22 bp, Artificial Sequence
  Synthetic oligonucleotide; CTC chr11 5200013 5200034 5200018 5200013 -
atccttttctcctacatcctga

SEQ ID NO: 148130 - DNA, 22 bp, Artificial Sequence
  Synthetic oligonucleotide; CTT chr11 5200007 5200028 5200012 5200007 -
ttctcctacatcctgattctta

SEQ ID NO: 148131 - DNA, 22 bp, Artificial Sequence
  Synthetic oligonucleotide; TTT chr11 5200006 5200027 5200011 5200006 -
tctcctacatcctgattcttaa

SEQ ID NO: 148132 - DNA, 22 bp, Artificial Sequence
  Synthetic oligonucleotide; TTT chr11 5200005 5200026 5200010 5200005 -
ctcctacatcctgattcttaag

SEQ ID NO: 148133 - DNA, 22 bp, Artificial Sequence
  Synthetic oligonucleotide; TTC chr11 5200004 5200025 5200009 5200004 -
tcctacatcctgattcttaagt

SEQ ID NO: 148134 - DNA, 22 bp, Artificial Sequence
  Synthetic oligonucleotide; CTC chr11 5200002 5200023 5200007 5200002 -
ctacatcctgattcttaagtca

SEQ ID NO: 148135 - DNA, 22 bp, Artificial Sequence
  Synthetic oligonucleotide; CTA chr11 5199999 5200020 5200004 5199999 -
catcctgattcttaagtcagtc

SEQ ID NO: 148136 - DNA, 22 bp, Artificial Sequence
  Synthetic oligonucleotide; CTG chr11 5199992 5200013 5199997 5199992 -
attcttaagtcagtcctggcag

SEQ ID NO: 148137 - DNA, 22 bp, Artificial Sequence
  Synthetic oligonucleotide; TTC chr11 5199988 5200009 5199993 5199988 -
ttaagtcagtcctggcagttgc

SEQ ID NO: 148138 - DNA, 22 bp, Artificial Sequence
  Synthetic oligonucleotide; CTT chr11 5199986 5200007 5199991 5199986 -
aagtcagtcctggcagttgcct

SEQ ID NO: 148139 - DNA, 22 bp, Artificial Sequence
  Synthetic oligonucleotide; TTA chr11 5199985 5200006 5199990 5199985 -
agtcagtcctggcagttgcctc

SEQ ID NO: 148140 - DNA, 22 bp, Artificial Sequence
  Synthetic oligonucleotide; CTG chr11 5199974 5199995 5199979 5199974 -
gcagttgcctctcaggaagaga

SEQ ID NO: 148141 - DNA, 22 bp, Artificial Sequence
  Synthetic oligonucleotide; TTG chr11 5199967 5199988 5199972 5199967 -
cctctcaggaagagaggcataa

SEQ ID NO: 148142 - DNA, 22 bp, Artificial Sequence
  Synthetic oligonucleotide; CTC chr11 5199963 5199984 5199968 5199963 -
tcaggaagagaggcataaatta

SEQ ID NO: 148143 - DNA, 22 bp, Artificial Sequence
  Synthetic oligonucleotide; CTC chr11 5199961 5199982 5199966 5199961 -
aggaagagaggcataaattatt

SEQ ID NO: 148144 - DNA, 22 bp, Artificial Sequence
  Synthetic oligonucleotide; TTA chr11 5199941 5199962 5199946 5199941 -
tttcagacctgcatctcccaca

SEQ ID NO: 148145 - DNA, 22 bp, Artificial Sequence
  Synthetic oligonucleotide; TTT chr11 5199938 5199959 5199943 5199938 -
cagacctgcatctcccacatct

SEQ ID NO: 148146 - DNA, 22 bp, Artificial Sequence
  Synthetic oligonucleotide; TTC chr11 5199937 5199958 5199942 5199937 -
agacctgcatctcccacatctg

SEQ ID NO: 148147 - DNA, 22 bp, Artificial Sequence
  Synthetic oligonucleotide; CTG chr11 5199930 5199951 5199935 5199930 -
catctcccacatctgtgctgtc

SEQ ID NO: 148148 - DNA, 22 bp, Artificial Sequence
  Synthetic oligonucleotide; CTC chr11 5199924 5199945 5199929 5199924 -
ccacatctgtgctgtccttgtg

SEQ ID NO: 148149 - DNA, 22 bp, Artificial Sequence
  Synthetic oligonucleotide; CTG chr11 5199915 5199936 5199920 5199915 -
tgctgtccttgtgttctacatc

SEQ ID NO: 148150 - DNA, 22 bp, Artificial Sequence
  Synthetic oligonucleotide; CTG chr11 5199910 5199931 5199915 5199910 -
tccttgtgttctacatccctat

SEQ ID NO: 148151 - DNA, 22 bp, Artificial Sequence
  Synthetic oligonucleotide; CTT chr11 5199905 5199926 5199910 5199905 -
gtgttctacatccctatcatta

SEQ ID NO: 148152 - DNA, 22 bp, Artificial Sequence
  Synthetic oligonucleotide; TTG chr11 5199904 5199925 5199909 5199904 -
tgttctacatccctatcattag

SEQ ID NO: 148153 - DNA, 22 bp, Artificial Sequence
  Synthetic oligonucleotide; TTC chr11 5199899 5199920 5199904 5199899 -
tacatccctatcattagcctca

SEQ ID NO: 148154 - DNA, 22 bp, Artificial Sequence
  Synthetic oligonucleotide; CTA chr11 5199897 5199918 5199902 5199897 -
catccctatcattagcctcaca

SEQ ID NO: 148155 - DNA, 22 bp, Artificial Sequence
  Synthetic oligonucleotide; CTA chr11 5199889 5199910 5199894 5199889 -
tcattagcctcacaatggtgca

SEQ ID NO: 148156 - DNA, 22 bp, Artificial Sequence
  Synthetic oligonucleotide; TTA chr11 5199883 5199904 5199888 5199883 -
gcctcacaatggtgcaccgttt

SEQ ID NO: 148157 - DNA, 22 bp, Artificial Sequence
  Synthetic oligonucleotide; CTC chr11 5199878 5199899 5199883 5199878 -
acaatggtgcaccgttttggca

SEQ ID NO: 148158 - DNA, 22 bp, Artificial Sequence
  Synthetic oligonucleotide; TTT chr11 5199861 5199882 5199866 5199861 -
tggcaagcacctttcccccgtg

SEQ ID NO: 148159 - DNA, 22 bp, Artificial Sequence
  Synthetic oligonucleotide; TTT chr11 5199860 5199881 5199865 5199860 -
ggcaagcacctttcccccgtgg

SEQ ID NO: 148160 - DNA, 22 bp, Artificial Sequence
  Synthetic oligonucleotide; TTG chr11 5199859 5199880 5199864 5199859 -
gcaagcacctttcccccgtggc

SEQ ID NO: 148161 - DNA, 22 bp, Artificial Sequence
  Synthetic oligonucleotide; CTT chr11 5199848 5199869 5199853 5199848 -
tcccccgtggcccacgttctca

SEQ ID NO: 148162 - DNA, 22 bp, Artificial Sequence
  Synthetic oligonucleotide; TTT chr11 5199847 5199868 5199852 5199847 -
cccccgtggcccacgttctcat

SEQ ID NO: 148163 - DNA, 22 bp, Artificial Sequence
  Synthetic oligonucleotide; TTC chr11 5199846 5199867 5199851 5199846 -
ccccgtggcccacgttctcatt

SEQ ID NO: 148164 - DNA, 22 bp, Artificial Sequence
  Synthetic oligonucleotide; TTC chr11 5199829 5199850 5199834 5199829 -
tcattggcaacatctacatcct

SEQ ID NO: 148165 - DNA, 22 bp, Artificial Sequence
  Synthetic oligonucleotide; CTC chr11 5199827 5199848 5199832 5199827 -
attggcaacatctacatccttt

SEQ ID NO: 148166 - DNA, 22 bp, Artificial Sequence
  Synthetic oligonucleotide; TTG chr11 5199823 5199844 5199828 5199823 -
gcaacatctacatccttttccc

SEQ ID NO: 148167 - DNA, 22 bp, Artificial Sequence
  Synthetic oligonucleotide; CTA chr11 5199813 5199834 5199818 5199813 -
catccttttcccacctttaatg

SEQ ID NO: 148168 - DNA, 22 bp, Artificial Sequence
  Synthetic oligonucleotide; CTT chr11 5199806 5199827 5199811 5199806 -
ttcccacctttaatgaatccca

SEQ ID NO: 148169 - DNA, 22 bp, Artificial Sequence
  Synthetic oligonucleotide; TTT chr11 5199805 5199826 5199810 5199805 -
tcccacctttaatgaatcccat

SEQ ID NO: 148170 - DNA, 22 bp, Artificial Sequence
  Synthetic oligonucleotide; TTT chr11 5199804 5199825 5199809 5199804 -
cccacctttaatgaatcccatc

SEQ ID NO: 148171 - DNA, 22 bp, Artificial Sequence
  Synthetic oligonucleotide; TTC chr11 5199803 5199824 5199808 5199803 -
ccacctttaatgaatcccatca

SEQ ID NO: 148172 - DNA, 22 bp, Artificial Sequence
  Synthetic oligonucleotide; CTT chr11 5199796 5199817 5199801 5199796 -
taatgaatcccatcatctacag

SEQ ID NO: 148173 - DNA, 22 bp, Artificial Sequence
  Synthetic oligonucleotide; TTT chr11 5199795 5199816 5199800 5199795 -
aatgaatcccatcatctacagt

SEQ ID NO: 148174 - DNA, 22 bp, Artificial Sequence
  Synthetic oligonucleotide; TTA chr11 5199794 5199815 5199799 5199794 -
atgaatcccatcatctacagtg

SEQ ID NO: 148175 - DNA, 22 bp, Artificial Sequence
  Synthetic oligonucleotide; CTA chr11 5199777 5199798 5199782 5199777 -
cagtgtcaagacccaacagatt

SEQ ID NO: 148176 - DNA, 22 bp, Artificial Sequence
  Synthetic oligonucleotide; TTC chr11 5199754 5199775 5199759 5199754 -
ataccagaatgcttagactctt

SEQ ID NO: 148177 - DNA, 22 bp, Artificial Sequence
  Synthetic oligonucleotide; CTT chr11 5199740 5199761 5199745 5199740 -
agactcttttctctgaaaagat

SEQ ID NO: 148178 - DNA, 22 bp, Artificial Sequence
  Synthetic oligonucleotide; TTA chr11 5199739 5199760 5199744 5199739 -
gactcttttctctgaaaagata

SEQ ID NO: 148179 - DNA, 22 bp, Artificial Sequence
  Synthetic oligonucleotide; CTC chr11 5199734 5199755 5199739 5199734 -
ttttctctgaaaagatattgag

SEQ ID NO: 148180 - DNA, 22 bp, Artificial Sequence
  Synthetic oligonucleotide; CTT chr11 5199732 5199753 5199737 5199732 -
ttctctgaaaagatattgagag

SEQ ID NO: 148181 - DNA, 22 bp, Artificial Sequence
  Synthetic oligonucleotide; TTT chr11 5199731 5199752 5199736 5199731 -
tctctgaaaagatattgagaga

SEQ ID NO: 148182 - DNA, 22 bp, Artificial Sequence
  Synthetic oligonucleotide; TTT chr11 5199730 5199751 5199735 5199730 -
ctctgaaaagatattgagagat

SEQ ID NO: 148183 - DNA, 22 bp, Artificial Sequence
  Synthetic oligonucleotide; TTC chr11 5199729 5199750 5199734 5199729 -
tctgaaaagatattgagagata

SEQ ID NO: 148184 - DNA, 22 bp, Artificial Sequence
  Synthetic oligonucleotide; CTC chr11 5199727 5199748 5199732 5199727 -
tgaaaagatattgagagatatt

SEQ ID NO: 148185 - DNA, 22 bp, Artificial Sequence
  Synthetic oligonucleotide; CTG chr11 5199725 5199746 5199730 5199725 -
aaaagatattgagagatattga

SEQ ID NO: 148186 - DNA, 22 bp, Artificial Sequence
  Synthetic oligonucleotide; TTG chr11 5199714 5199735 5199719 5199714 -
agagatattgagatgtattgcc

SEQ ID NO: 148187 - DNA, 22 bp, Artificial Sequence
  Synthetic oligonucleotide; TTG chr11 5199704 5199725 5199709 5199704 -
agatgtattgcctaaaaaaaag

SEQ ID NO: 148188 - DNA, 22 bp, Artificial Sequence
  Synthetic oligonucleotide; TTG chr11 5199694 5199715 5199699 5199694 -
cctaaaaaaaagaaagaaaagc

SEQ ID NO: 148189 - DNA, 22 bp, Artificial Sequence
  Synthetic oligonucleotide; CTA chr11 5199690 5199711 5199695 5199690 -
aaaaaaagaaagaaaagcagca

SEQ ID NO: 148190 - DNA, 22 bp, Artificial Sequence
  Synthetic oligonucleotide; TTA chr11 5199625 5199646 5199630 5199625 -
ttaaaattgtagatttactctg

SEQ ID NO: 148191 - DNA, 22 bp, Artificial Sequence
  Synthetic oligonucleotide; TTA chr11 5199622 5199643 5199627 5199622 -
aaattgtagatttactctgagt

SEQ ID NO: 148192 - DNA, 22 bp, Artificial Sequence
  Synthetic oligonucleotide; TTG chr11 5199616 5199637 5199621 5199616 -
tagatttactctgagtccatga

SEQ ID NO: 148193 - DNA, 22 bp, Artificial Sequence
  Synthetic oligonucleotide; TTT chr11 5199609 5199630 5199614 5199609 -
actctgagtccatgacaaatga

SEQ ID NO: 148194 - DNA, 22 bp, Artificial Sequence
  Synthetic oligonucleotide; TTA chr11 5199608 5199629 5199613 5199608 -
ctctgagtccatgacaaatgac

SEQ ID NO: 148195 - DNA, 22 bp, Artificial Sequence
  Synthetic oligonucleotide; CTC chr11 5199605 5199626 5199610 5199605 -
tgagtccatgacaaatgacctt

SEQ ID NO: 148196 - DNA, 22 bp, Artificial Sequence
  Synthetic oligonucleotide; CTG chr11 5199603 5199624 5199608 5199603 -
agtccatgacaaatgaccttaa

SEQ ID NO: 148197 - DNA, 22 bp, Artificial Sequence
  Synthetic oligonucleotide; CTT chr11 5199583 5199604 5199588 5199583 -
aaaaaatatttaaatatagtca

SEQ ID NO: 148198 - DNA, 22 bp, Artificial Sequence
  Synthetic oligonucleotide; TTA chr11 5199582 5199603 5199587 5199582 -
aaaaatatttaaatatagtcag

SEQ ID NO: 148199 - DNA, 22 bp, Artificial Sequence
  Synthetic oligonucleotide; TTT chr11 5199572 5199593 5199577 5199572 -
aaatatagtcagagaatcaaca

SEQ ID NO: 148200 - DNA, 22 bp, Artificial Sequence
  Synthetic oligonucleotide; TTA chr11 5199571 5199592 5199576 5199571 -
aatatagtcagagaatcaacaa

SEQ ID NO: 148201 - DNA, 22 bp, Artificial Sequence
  Synthetic oligonucleotide; TTC chr11 5199541 5199562 5199546 5199541 -
cattgtgtcagcctggacacat

SEQ ID NO: 148202 - DNA, 22 bp, Artificial Sequence
  Synthetic oligonucleotide; TTG chr11 5199536 5199557 5199541 5199536 -
tgtcagcctggacacatgtagg

SEQ ID NO: 148203 - DNA, 22 bp, Artificial Sequence
  Synthetic oligonucleotide; CTG chr11 5199526 5199547 5199531 5199526 -
gacacatgtaggtcactctatc

SEQ ID NO: 148204 - DNA, 22 bp, Artificial Sequence
  Synthetic oligonucleotide; CTC chr11 5199508 5199529 5199513 5199508 -
tatcagtctgaccatatttaag

SEQ ID NO: 148205 - DNA, 22 bp, Artificial Sequence
  Synthetic oligonucleotide; CTA chr11 5199506 5199527 5199511 5199506 -
tcagtctgaccatatttaagaa

SEQ ID NO: 148206 - DNA, 22 bp, Artificial Sequence
  Synthetic oligonucleotide; CTG chr11 5199498 5199519 5199503 5199498 -
accatatttaagaaagaggaaa

SEQ ID NO: 148207 - DNA, 22 bp, Artificial Sequence
  Synthetic oligonucleotide; TTT chr11 5199489 5199510 5199494 5199489 -
aagaaagaggaaaaaattgttt

SEQ ID NO: 148208 - DNA, 22 bp, Artificial Sequence
  Synthetic oligonucleotide; TTA chr11 5199488 5199509 5199493 5199488 -
agaaagaggaaaaaattgttta

SEQ ID NO: 148209 - DNA, 22 bp, Artificial Sequence
  Synthetic oligonucleotide; TTG chr11 5199470 5199491 5199475 5199470 -
tttatttgcctgaaatgtactt

SEQ ID NO: 148210 - DNA, 22 bp, Artificial Sequence
  Synthetic oligonucleotide; TTT chr11 5199467 5199488 5199472 5199467 -
atttgcctgaaatgtacttttg

SEQ ID NO: 148211 - DNA, 22 bp, Artificial Sequence
  Synthetic oligonucleotide; TTA chr11 5199466 5199487 5199471 5199466 -
tttgcctgaaatgtacttttga

SEQ ID NO: 148212 - DNA, 22 bp, Artificial Sequence
  Synthetic oligonucleotide; TTT chr11 5199463 5199484 5199468 5199463 -
gcctgaaatgtacttttgagca

SEQ ID NO: 148213 - DNA, 22 bp, Artificial Sequence
  Synthetic oligonucleotide; TTG chr11 5199462 5199483 5199467 5199462 -
cctgaaatgtacttttgagcat

SEQ ID NO: 148214 - DNA, 22 bp, Artificial Sequence
  Synthetic oligonucleotide; CTG chr11 5199458 5199479 5199463 5199458 -
aaatgtacttttgagcatttcc

SEQ ID NO: 148215 - DNA, 22 bp, Artificial Sequence
  Synthetic oligonucleotide; CTT chr11 5199448 5199469 5199453 5199448 -
ttgagcatttcctttgctgtaa

SEQ ID NO: 148216 - DNA, 22 bp, Artificial Sequence
  Synthetic oligonucleotide; TTT chr11 5199447 5199468 5199452 5199447 -
tgagcatttcctttgctgtaaa

SEQ ID NO: 148217 - DNA, 22 bp, Artificial Sequence
  Synthetic oligonucleotide; TTT chr11 5199446 5199467 5199451 5199446 -
gagcatttcctttgctgtaaaa

SEQ ID NO: 148218 - DNA, 22 bp, Artificial Sequence
  Synthetic oligonucleotide; TTG chr11 5199445 5199466 5199450 5199445 -
agcatttcctttgctgtaaaac

SEQ ID NO: 148219 - DNA, 22 bp, Artificial Sequence
  Synthetic oligonucleotide; TTT chr11 5199438 5199459 5199443 5199438 -
cctttgctgtaaaacaaagctg

SEQ ID NO: 148220 - DNA, 22 bp, Artificial Sequence
  Synthetic oligonucleotide; TTC chr11 5199437 5199458 5199442 5199437 -
ctttgctgtaaaacaaagctgg

SEQ ID NO: 148221 - DNA, 22 bp, Artificial Sequence
  Synthetic oligonucleotide; CTT chr11 5199434 5199455 5199439 5199434 -
tgctgtaaaacaaagctggatt

SEQ ID NO: 148222 - DNA, 22 bp, Artificial Sequence
  Synthetic oligonucleotide; TTT chr11 5199433 5199454 5199438 5199433 -
gctgtaaaacaaagctggatta

SEQ ID NO: 148223 - DNA, 22 bp, Artificial Sequence
  Synthetic oligonucleotide; TTG chr11 5199432 5199453 5199437 5199432 -
ctgtaaaacaaagctggattaa

SEQ ID NO: 148224 - DNA, 22 bp, Artificial Sequence
  Synthetic oligonucleotide; CTG chr11 5199429 5199450 5199434 5199429 -
taaaacaaagctggattaaaaa

SEQ ID NO: 148225 - DNA, 22 bp, Artificial Sequence
  Synthetic oligonucleotide; CTG chr11 5199416 5199437 5199421 5199416 -
gattaaaaacctaggttttcaa

SEQ ID NO: 148226 - DNA, 22 bp, Artificial Sequence
  Synthetic oligonucleotide; TTA chr11 5199411 5199432 5199416 5199411 -
aaaacctaggttttcaagtttc

SEQ ID NO: 148227 - DNA, 22 bp, Artificial Sequence
  Synthetic oligonucleotide; CTA chr11 5199403 5199424 5199408 5199403 -
ggttttcaagtttcaaagtaga

SEQ ID NO: 148228 - DNA, 22 bp, Artificial Sequence
  Synthetic oligonucleotide; TTT chr11 5199398 5199419 5199403 5199398 -
tcaagtttcaaagtagaaaact

SEQ ID NO: 148229 - DNA, 22 bp, Artificial Sequence
  Synthetic oligonucleotide; TTT chr11 5199397 5199418 5199402 5199397 -
caagtttcaaagtagaaaactt

SEQ ID NO: 148230 - DNA, 22 bp, Artificial Sequence
  Synthetic oligonucleotide; TTC chr11 5199396 5199417 5199401 5199396 -
aagtttcaaagtagaaaacttg

SEQ ID NO: 148231 - DNA, 22 bp, Artificial Sequence
  Synthetic oligonucleotide; TTT chr11 5199390 5199411 5199395 5199390 -
caaagtagaaaacttgaagttt

SEQ ID NO: 148232 - DNA, 22 bp, Artificial Sequence
  Synthetic oligonucleotide; TTC chr11 5199389 5199410 5199394 5199389 -
aaagtagaaaacttgaagtttc

SEQ ID NO: 148233 - DNA, 22 bp, Artificial Sequence
  Synthetic oligonucleotide; CTT chr11 5199375 5199396 5199380 5199375 -
gaagtttctttcattctctgag

SEQ ID NO: 148234 - DNA, 22 bp, Artificial Sequence
  Synthetic oligonucleotide; TTG chr11 5199374 5199395 5199379 5199374 -
aagtttctttcattctctgagg

SEQ ID NO: 148235 - DNA, 22 bp, Artificial Sequence
  Synthetic oligonucleotide; TTT chr11 5199368 5199389 5199373 5199368 -
ctttcattctctgaggtttact

SEQ ID NO: 148236 - DNA, 22 bp, Artificial Sequence
  Synthetic oligonucleotide; TTC chr11 5199367 5199388 5199372 5199367 -
tttcattctctgaggtttactt

SEQ ID NO: 148237 - DNA, 22 bp, Artificial Sequence
  Synthetic oligonucleotide; CTT chr11 5199365 5199386 5199370 5199365 -
tcattctctgaggtttacttaa

SEQ ID NO: 148238 - DNA, 22 bp, Artificial Sequence
  Synthetic oligonucleotide; TTT chr11 5199364 5199385 5199369 5199364 -
cattctctgaggtttacttaat

SEQ ID NO: 148239 - DNA, 22 bp, Artificial Sequence
  Synthetic oligonucleotide; TTC chr11 5199363 5199384 5199368 5199363 -
attctctgaggtttacttaatt

SEQ ID NO: 148240 - DNA, 22 bp, Artificial Sequence
  Synthetic oligonucleotide; TTC chr11 5199359 5199380 5199364 5199359 -
tctgaggtttacttaattaacc

SEQ ID NO: 148241 - DNA, 22 bp, Artificial Sequence
  Synthetic oligonucleotide; CTC chr11 5199357 5199378 5199362 5199357 -
tgaggtttacttaattaacctt

SEQ ID NO: 148242 - DNA, 22 bp, Artificial Sequence
  Synthetic oligonucleotide; CTG chr11 5199355 5199376 5199360 5199355 -
aggtttacttaattaaccttca

SEQ ID NO: 148243 - DNA, 22 bp, Artificial Sequence
  Synthetic oligonucleotide; TTT chr11 5199349 5199370 5199354 5199349 -
acttaattaaccttcaaaatgg

SEQ ID NO: 148244 - DNA, 22 bp, Artificial Sequence
  Synthetic oligonucleotide; TTA chr11 5199348 5199369 5199353 5199348 -
cttaattaaccttcaaaatgga

SEQ ID NO: 148245 - DNA, 22 bp, Artificial Sequence
  Synthetic oligonucleotide; CTT chr11 5199345 5199366 5199350 5199345 -
aattaaccttcaaaatggagac

SEQ ID NO: 148246 - DNA, 22 bp, Artificial Sequence
  Synthetic oligonucleotide; TTA chr11 5199344 5199365 5199349 5199344 -
attaaccttcaaaatggagact

SEQ ID NO: 148247 - DNA, 22 bp, Artificial Sequence
  Synthetic oligonucleotide; TTA chr11 5199340 5199361 5199345 5199340 -
accttcaaaatggagactatag

SEQ ID NO: 148248 - DNA, 22 bp, Artificial Sequence
  Synthetic oligonucleotide; CTT chr11 5199335 5199356 5199340 5199335 -
caaaatggagactatagccaac

SEQ ID NO: 148249 - DNA, 22 bp, Artificial Sequence
  Synthetic oligonucleotide; TTC chr11 5199334 5199355 5199339 5199334 -
aaaatggagactatagccaact

SEQ ID NO: 148250 - DNA, 22 bp, Artificial Sequence
  Synthetic oligonucleotide; CTA chr11 5199321 5199342 5199326 5199321 -
tagccaactcacaggaatgttg

SEQ ID NO: 148251 - DNA, 22 bp, Artificial Sequence
  Synthetic oligonucleotide; CTC chr11 5199311 5199332 5199316 5199311 -
acaggaatgttgtgatatctgt

SEQ ID NO: 148252 - DNA, 22 bp, Artificial Sequence
  Synthetic oligonucleotide; TTG chr11 5199299 5199320 5199304 5199299 -
tgatatctgtatggaccagaat

SEQ ID NO: 148253 - DNA, 22 bp, Artificial Sequence
  Synthetic oligonucleotide; CTG chr11 5199290 5199311 5199295 5199290 -
tatggaccagaattgtccaagg

SEQ ID NO: 148254 - DNA, 22 bp, Artificial Sequence
  Synthetic oligonucleotide; TTG chr11 5199275 5199296 5199280 5199275 -
tccaagggaacttttctaaact

SEQ ID NO: 148255 - DNA, 22 bp, Artificial Sequence
  Synthetic oligonucleotide; CTT chr11 5199262 5199283 5199267 5199262 -
ttctaaactgatggcgatgttc

SEQ ID NO: 148256 - DNA, 22 bp, Artificial Sequence
  Synthetic oligonucleotide; TTT chr11 5199261 5199282 5199266 5199261 -
tctaaactgatggcgatgttct

SEQ ID NO: 148257 - DNA, 22 bp, Artificial Sequence
  Synthetic oligonucleotide; TTT chr11 5199260 5199281 5199265 5199260 -
ctaaactgatggcgatgttcta

SEQ ID NO: 148258 - DNA, 22 bp, Artificial Sequence
  Synthetic oligonucleotide; TTC chr11 5199259 5199280 5199264 5199259 -
taaactgatggcgatgttctat

SEQ ID NO: 148259 - DNA, 22 bp, Artificial Sequence
  Synthetic oligonucleotide; CTA chr11 5199257 5199278 5199262 5199257 -
aactgatggcgatgttctataa

SEQ ID NO: 148260 - DNA, 22 bp, Artificial Sequence
  Synthetic oligonucleotide; CTG chr11 5199252 5199273 5199257 5199252 -
atggcgatgttctataaaatac

SEQ ID NO: 148261 - DNA, 22 bp, Artificial Sequence
  Synthetic oligonucleotide; TTC chr11 5199240 5199261 5199245 5199240 -
tataaaataccataaaatggct

SEQ ID NO: 148262 - DNA, 22 bp, Artificial Sequence
  Synthetic oligonucleotide; CTA chr11 5199238 5199259 5199243 5199238 -
taaaataccataaaatggctaa

SEQ ID NO: 148263 - DNA, 22 bp, Artificial Sequence
  Synthetic oligonucleotide; CTA chr11 5199217 5199238 5199222 5199217 -
aagtggaatatatggctcctgt

SEQ ID NO: 148264 - DNA, 22 bp, Artificial Sequence
  Synthetic oligonucleotide; CTC chr11 5199199 5199220 5199204 5199199 -
ctgtgcgcttgaaatgatggta

SEQ ID NO: 148265 - DNA, 22 bp, Artificial Sequence
  Synthetic oligonucleotide; CTG chr11 5199196 5199217 5199201 5199196 -
tgcgcttgaaatgatggtagtg

SEQ ID NO: 148266 - DNA, 22 bp, Artificial Sequence
  Synthetic oligonucleotide; CTT chr11 5199189 5199210 5199194 5199189 -
gaaatgatggtagtgtaattga

SEQ ID NO: 148267 - DNA, 22 bp, Artificial Sequence
  Synthetic oligonucleotide; TTG chr11 5199188 5199209 5199193 5199188 -
aaatgatggtagtgtaattgaa

SEQ ID NO: 148268 - DNA, 22 bp, Artificial Sequence
  Synthetic oligonucleotide; TTG chr11 5199168 5199189 5199173 5199168 -
aacaactgcatttacaatttca

SEQ ID NO: 148269 - DNA, 22 bp, Artificial Sequence
  Synthetic oligonucleotide; CTG chr11 5199160 5199181 5199165 5199160 -
catttacaatttcagttacttt

SEQ ID NO: 148270 - DNA, 22 bp, Artificial Sequence
  Synthetic oligonucleotide; TTT chr11 5199155 5199176 5199160 5199155 -
acaatttcagttactttaagtt

SEQ ID NO: 148271 - DNA, 22 bp, Artificial Sequence
  Synthetic oligonucleotide; TTA chr11 5199154 5199175 5199159 5199154 -
caatttcagttactttaagtta

SEQ ID NO: 148272 - DNA, 22 bp, Artificial Sequence
  Synthetic oligonucleotide; TTT chr11 5199148 5199169 5199153 5199148 -
cagttactttaagttaatttat

SEQ ID NO: 148273 - DNA, 22 bp, Artificial Sequence
  Synthetic oligonucleotide; TTC chr11 5199147 5199168 5199152 5199147 -
agttactttaagttaatttata

SEQ ID NO: 148274 - DNA, 22 bp, Artificial Sequence
  Synthetic oligonucleotide; TTA chr11 5199142 5199163 5199147 5199142 -
ctttaagttaatttatatttaa

SEQ ID NO: 148275 - DNA, 22 bp, Artificial Sequence
  Synthetic oligonucleotide; CTT chr11 5199139 5199160 5199144 5199139 -
taagttaatttatatttaaatg

SEQ ID NO: 148276 - DNA, 22 bp, Artificial Sequence
  Synthetic oligonucleotide; TTT chr11 5199138 5199159 5199143 5199138 -
aagttaatttatatttaaatgt

SEQ ID NO: 148277 - DNA, 22 bp, Artificial Sequence
  Synthetic oligonucleotide; TTA chr11 5199137 5199158 5199142 5199137 -
agttaatttatatttaaatgtt

SEQ ID NO: 148278 - DNA, 22 bp, Artificial Sequence
  Synthetic oligonucleotide; TTA chr11 5199132 5199153 5199137 5199132 -
atttatatttaaatgtttaatg

SEQ ID NO: 148279 - DNA, 22 bp, Artificial Sequence
  Synthetic oligonucleotide; TTT chr11 5199128 5199149 5199133 5199128 -
atatttaaatgtttaatgtcct

SEQ ID NO: 148280 - DNA, 22 bp, Artificial Sequence
  Synthetic oligonucleotide; TTA chr11 5199127 5199148 5199132 5199127 -
tatttaaatgtttaatgtcctt

SEQ ID NO: 148281 - DNA, 22 bp, Artificial Sequence
  Synthetic oligonucleotide; TTT chr11 5199122 5199143 5199127 5199122 -
aaatgtttaatgtccttgtatt

SEQ ID NO: 148282 - DNA, 22 bp, Artificial Sequence
  Synthetic oligonucleotide; TTA chr11 5199121 5199142 5199126 5199121 -
aatgtttaatgtccttgtattg

SEQ ID NO: 148283 - DNA, 22 bp, Artificial Sequence
  Synthetic oligonucleotide; TTT chr11 5199114 5199135 5199119 5199114 -
aatgtccttgtattggacagtt

SEQ ID NO: 148284 - DNA, 22 bp, Artificial Sequence
  Synthetic oligonucleotide; TTA chr11 5199113 5199134 5199118 5199113 -
atgtccttgtattggacagttc

SEQ ID NO: 148285 - DNA, 22 bp, Artificial Sequence
  Synthetic oligonucleotide; CTT chr11 5199105 5199126 5199110 5199105 -
gtattggacagttcagttcagc

SEQ ID NO: 148286 - DNA, 22 bp, Artificial Sequence
  Synthetic oligonucleotide; TTG chr11 5199104 5199125 5199109 5199104 -
tattggacagttcagttcagca

SEQ ID NO: 148287 - DNA, 22 bp, Artificial Sequence
  Synthetic oligonucleotide; TTG chr11 5199099 5199120 5199104 5199099 -
gacagttcagttcagcagccac

SEQ ID NO: 148288 - DNA, 22 bp, Artificial Sequence
  Synthetic oligonucleotide; TTC chr11 5199091 5199112 5199096 5199091 -
agttcagcagccactatattgg

SEQ ID NO: 148289 - DNA, 22 bp, Artificial Sequence
  Synthetic oligonucleotide; TTC chr11 5199086 5199107 5199091 5199086 -
agcagccactatattggacagg

SEQ ID NO: 148290 - DNA, 22 bp, Artificial Sequence
  Synthetic oligonucleotide; CTA chr11 5199075 5199096 5199080 5199075 -
tattggacagggaagctacagt

SEQ ID NO: 148291 - DNA, 22 bp, Artificial Sequence
  Synthetic oligonucleotide; TTG chr11 5199070 5199091 5199075 5199070 -
gacagggaagctacagttcata

SEQ ID NO: 148292 - DNA, 22 bp, Artificial Sequence
  Synthetic oligonucleotide; CTA chr11 5199057 5199078 5199062 5199057 -
cagttcataaagaggacacaaa

SEQ ID NO: 148293 - DNA, 22 bp, Artificial Sequence
  Synthetic oligonucleotide; TTC chr11 5199051 5199072 5199056 5199051 -
ataaagaggacacaaagaaata

SEQ ID NO: 148294 - DNA, 22 bp, Artificial Sequence
  Synthetic oligonucleotide; CTT chr11 5199023 5199044 5199028 5199023 -
tggattcaacttctaccatgtc

SEQ ID NO: 148295 - DNA, 22 bp, Artificial Sequence
  Synthetic oligonucleotide; TTT chr11 5199022 5199043 5199027 5199022 -
ggattcaacttctaccatgtct

SEQ ID NO: 148296 - DNA, 22 bp, Artificial Sequence
  Synthetic oligonucleotide; TTG chr11 5199021 5199042 5199026 5199021 -
gattcaacttctaccatgtcta

SEQ ID NO: 148297 - DNA, 22 bp, Artificial Sequence
  Synthetic oligonucleotide; TTC chr11 5199016 5199037 5199021 5199016 -
aacttctaccatgtctaattta

SEQ ID NO: 148298 - DNA, 22 bp, Artificial Sequence
  Synthetic oligonucleotide; CTT chr11 5199011 5199032 5199016 5199011 -
ctaccatgtctaatttaaatta

SEQ ID NO: 148299 - DNA, 22 bp, Artificial Sequence
  Synthetic oligonucleotide; TTC chr11 5199010 5199031 5199015 5199010 -
taccatgtctaatttaaattag

SEQ ID NO: 148300 - DNA, 22 bp, Artificial Sequence
  Synthetic oligonucleotide; CTA chr11 5199008 5199029 5199013 5199008 -
ccatgtctaatttaaattagaa

SEQ ID NO: 148301 - DNA, 22 bp, Artificial Sequence
  Synthetic oligonucleotide; CTA chr11 5198999 5199020 5199004 5198999 -
atttaaattagaatccttattt

SEQ ID NO: 148302 - DNA, 22 bp, Artificial Sequence
  Synthetic oligonucleotide; TTT chr11 5198995 5199016 5199000 5198995 -
aaattagaatccttatttttta

SEQ ID NO: 148303 - DNA, 22 bp, Artificial Sequence
  Synthetic oligonucleotide; TTA chr11 5198994 5199015 5198999 5198994 -
aattagaatccttattttttag

SEQ ID NO: 148304 - DNA, 22 bp, Artificial Sequence
  Synthetic oligonucleotide; TTA chr11 5198989 5199010 5198994 5198989 -
gaatccttattttttagatttt

SEQ ID NO: 148305 - DNA, 22 bp, Artificial Sequence
  Synthetic oligonucleotide; CTT chr11 5198981 5199002 5198986 5198981 -
attttttagattttatatgtgg

SEQ ID NO: 148306 - DNA, 22 bp, Artificial Sequence
  Synthetic oligonucleotide; TTA chr11 5198980 5199001 5198985 5198980 -
ttttttagattttatatgtgga

SEQ ID NO: 148307 - DNA, 22 bp, Artificial Sequence
  Synthetic oligonucleotide; TTT chr11 5198977 5198998 5198982 5198977 -
tttagattttatatgtggactc

SEQ ID NO: 148308 - DNA, 22 bp, Artificial Sequence
  Synthetic oligonucleotide; TTT chr11 5198976 5198997 5198981 5198976 -
ttagattttatatgtggactcc

SEQ ID NO: 148309 - DNA, 22 bp, Artificial Sequence
  Synthetic oligonucleotide; TTT chr11 5198975 5198996 5198980 5198975 -
tagattttatatgtggactcca

SEQ ID NO: 148310 - DNA, 22 bp, Artificial Sequence
  Synthetic oligonucleotide; TTT chr11 5198974 5198995 5198979 5198974 -
agattttatatgtggactccac

SEQ ID NO: 148311 - DNA, 22 bp, Artificial Sequence
  Synthetic oligonucleotide; TTA chr11 5198973 5198994 5198978 5198973 -
gattttatatgtggactccact

SEQ ID NO: 148312 - DNA, 22 bp, Artificial Sequence
  Synthetic oligonucleotide; TTT chr11 5198968 5198989 5198973 5198968 -
tatatgtggactccactgctac

SEQ ID NO: 148313 - DNA, 22 bp, Artificial Sequence
  Synthetic oligonucleotide; TTT chr11 5198967 5198988 5198972 5198967 -
atatgtggactccactgctaca

SEQ ID NO: 148314 - DNA, 22 bp, Artificial Sequence
  Synthetic oligonucleotide; TTA chr11 5198966 5198987 5198971 5198966 -
tatgtggactccactgctacaa

SEQ ID NO: 148315 - DNA, 22 bp, Artificial Sequence
  Synthetic oligonucleotide; CTC chr11 5198955 5198976 5198960 5198955 -
cactgctacaaggctggaagca

SEQ ID NO: 148316 - DNA, 22 bp, Artificial Sequence
  Synthetic oligonucleotide; CTG chr11 5198950 5198971 5198955 5198950 -
ctacaaggctggaagcagattt

SEQ ID NO: 148317 - DNA, 22 bp, Artificial Sequence
  Synthetic oligonucleotide; CTA chr11 5198947 5198968 5198952 5198947 -
caaggctggaagcagattttgc

SEQ ID NO: 148318 - DNA, 22 bp, Artificial Sequence
  Synthetic oligonucleotide; CTG chr11 5198939 5198960 5198944 5198939 -
gaagcagattttgctctagatc

SEQ ID NO: 148319 - DNA, 22 bp, Artificial Sequence
  Synthetic oligonucleotide; TTT chr11 5198928 5198949 5198933 5198928 -
tgctctagatcttttgctttta

SEQ ID NO: 148320 - DNA, 22 bp, Artificial Sequence
  Synthetic oligonucleotide; TTT chr11 5198927 5198948 5198932 5198927 -
gctctagatcttttgcttttat

SEQ ID NO: 148321 - DNA, 22 bp, Artificial Sequence
  Synthetic oligonucleotide; TTG chr11 5198926 5198947 5198931 5198926 -
ctctagatcttttgcttttata

SEQ ID NO: 148322 - DNA, 22 bp, Artificial Sequence
  Synthetic oligonucleotide; CTC chr11 5198923 5198944 5198928 5198923 -
tagatcttttgcttttatatct

SEQ ID NO: 148323 - DNA, 22 bp, Artificial Sequence
  Synthetic oligonucleotide; CTA chr11 5198921 5198942 5198926 5198921 -
gatcttttgcttttatatctaa

SEQ ID NO: 148324 - DNA, 22 bp, Artificial Sequence
  Synthetic oligonucleotide; CTT chr11 5198915 5198936 5198920 5198915 -
ttgcttttatatctaagtgggg

SEQ ID NO: 148325 - DNA, 22 bp, Artificial Sequence
  Synthetic oligonucleotide; TTT chr11 5198914 5198935 5198919 5198914 -
tgcttttatatctaagtggggg

SEQ ID NO: 148326 - DNA, 22 bp, Artificial Sequence
  Synthetic oligonucleotide; TTT chr11 5198913 5198934 5198918 5198913 -
gcttttatatctaagtggggga

SEQ ID NO: 148327 - DNA, 22 bp, Artificial Sequence
  Synthetic oligonucleotide; TTG chr11 5198912 5198933 5198917 5198912 -
cttttatatctaagtgggggat

SEQ ID NO: 148328 - DNA, 22 bp, Artificial Sequence
  Synthetic oligonucleotide; CTT chr11 5198909 5198930 5198914 5198909 -
ttatatctaagtgggggatctt

SEQ ID NO: 148329 - DNA, 22 bp, Artificial Sequence
  Synthetic oligonucleotide; TTT chr11 5198908 5198929 5198913 5198908 -
tatatctaagtgggggatcttc

SEQ ID NO: 148330 - DNA, 22 bp, Artificial Sequence
  Synthetic oligonucleotide; TTT chr11 5198907 5198928 5198912 5198907 -
atatctaagtgggggatcttct

SEQ ID NO: 148331 - DNA, 22 bp, Artificial Sequence
  Synthetic oligonucleotide; TTA chr11 5198906 5198927 5198911 5198906 -
tatctaagtgggggatcttctg

SEQ ID NO: 148332 - DNA, 22 bp, Artificial Sequence
  Synthetic oligonucleotide; CTA chr11 5198900 5198921 5198905 5198900 -
agtgggggatcttctgaacaga

SEQ ID NO: 148333 - DNA, 22 bp, Artificial Sequence
  Synthetic oligonucleotide; CTT chr11 5198887 5198908 5198892 5198887 -
ctgaacagatgagactgtccgc

SEQ ID NO: 148334 - DNA, 22 bp, Artificial Sequence
  Synthetic oligonucleotide; TTC chr11 5198886 5198907 5198891 5198886 -
tgaacagatgagactgtccgct

SEQ ID NO: 148335 - DNA, 22 bp, Artificial Sequence
  Synthetic oligonucleotide; CTG chr11 5198884 5198905 5198889 5198884 -
aacagatgagactgtccgctac

SEQ ID NO: 148336 - DNA, 22 bp, Artificial Sequence
  Synthetic oligonucleotide; CTG chr11 5198870 5198891 5198875 5198870 -
tccgctaccgacttattctgag

SEQ ID NO: 148337 - DNA, 22 bp, Artificial Sequence
  Synthetic oligonucleotide; CTA chr11 5198863 5198884 5198868 5198863 -
ccgacttattctgagtttaaaa

SEQ ID NO: 148338 - DNA, 22 bp, Artificial Sequence
  Synthetic oligonucleotide; CTT chr11 5198856 5198877 5198861 5198856 -
attctgagtttaaaagaaaaaa

SEQ ID NO: 148339 - DNA, 22 bp, Artificial Sequence
  Synthetic oligonucleotide; TTA chr11 5198855 5198876 5198860 5198855 -
ttctgagtttaaaagaaaaaag

SEQ ID NO: 148340 - DNA, 22 bp, Artificial Sequence
  Synthetic oligonucleotide; TTC chr11 5198852 5198873 5198857 5198852 -
tgagtttaaaagaaaaaagata

SEQ ID NO: 148341 - DNA, 22 bp, Artificial Sequence
  Synthetic oligonucleotide; CTG chr11 5198850 5198871 5198855 5198850 -
agtttaaaagaaaaaagataaa

SEQ ID NO: 148342 - DNA, 22 bp, Artificial Sequence
  Synthetic oligonucleotide; TTT chr11 5198845 5198866 5198850 5198845 -
aaaagaaaaaagataaaagaac

SEQ ID NO: 148343 - DNA, 22 bp, Artificial Sequence
  Synthetic oligonucleotide; TTA chr11 5198844 5198865 5198849 5198844 -
aaagaaaaaagataaaagaaca

SEQ ID NO: 148344 - DNA, 22 bp, Artificial Sequence
  Synthetic oligonucleotide; TTC chr11 5198811 5198832 5198816 5198811 -
ttttctaagtaagctagtgcag

SEQ ID NO: 148345 - DNA, 22 bp, Artificial Sequence
  Synthetic oligonucleotide; CTT chr11 5198809 5198830 5198814 5198809 -
ttctaagtaagctagtgcagct

SEQ ID NO: 148346 - DNA, 22 bp, Artificial Sequence
  Synthetic oligonucleotide; TTT chr11 5198808 5198829 5198813 5198808 -
tctaagtaagctagtgcagctt

SEQ ID NO: 148347 - DNA, 22 bp, Artificial Sequence
  Synthetic oligonucleotide; TTT chr11 5198807 5198828 5198812 5198807 -
ctaagtaagctagtgcagcttt

SEQ ID NO: 148348 - DNA, 22 bp, Artificial Sequence
  Synthetic oligonucleotide; TTC chr11 5198806 5198827 5198811 5198806 -
taagtaagctagtgcagctttc

SEQ ID NO: 148349 - DNA, 22 bp, Artificial Sequence
  Synthetic oligonucleotide; CTA chr11 5198804 5198825 5198809 5198804 -
agtaagctagtgcagctttcca

SEQ ID NO: 148350 - DNA, 22 bp, Artificial Sequence
  Synthetic oligonucleotide; CTA chr11 5198795 5198816 5198800 5198795 -
gtgcagctttccaaagaaggaa

SEQ ID NO: 148351 - DNA, 22 bp, Artificial Sequence
  Synthetic oligonucleotide; CTT chr11 5198786 5198807 5198791 5198786 -
tccaaagaaggaaagaaaggaa

SEQ ID NO: 148352 - DNA, 22 bp, Artificial Sequence
  Synthetic oligonucleotide; TTT chr11 5198785 5198806 5198790 5198785 -
ccaaagaaggaaagaaaggaag

SEQ ID NO: 148353 - DNA, 22 bp, Artificial Sequence
  Synthetic oligonucleotide; TTC chr11 5198784 5198805 5198789 5198784 -
caaagaaggaaagaaaggaagg

SEQ ID NO: 148354 - DNA, 22 bp, Artificial Sequence
  Synthetic oligonucleotide; CTA chr11 5198744 5198765 5198749 5198744 -
tgcatggataacaagaaaataa

SEQ ID NO: 148355 - DNA, 22 bp, Artificial Sequence
  Synthetic oligonucleotide; TTG chr11 5198719 5198740 5198724 5198719 -
ttttaatcttcctatattctat

SEQ ID NO: 148356 - DNA, 22 bp, Artificial Sequence
  Synthetic oligonucleotide; TTT chr11 5198716 5198737 5198721 5198716 -
taatcttcctatattctattag

SEQ ID NO: 148357 - DNA, 22 bp, Artificial Sequence
  Synthetic oligonucleotide; TTT chr11 5198715 5198736 5198720 5198715 -
aatcttcctatattctattagg

SEQ ID NO: 148358 - DNA, 22 bp, Artificial Sequence
  Synthetic oligonucleotide; TTA chr11 5198714 5198735 5198719 5198714 -
atcttcctatattctattaggt

SEQ ID NO: 148359 - DNA, 22 bp, Artificial Sequence
  Synthetic oligonucleotide; CTT chr11 5198709 5198730 5198714 5198709 -
cctatattctattaggtatcta

SEQ ID NO: 148360 - DNA, 22 bp, Artificial Sequence
  Synthetic oligonucleotide; TTC chr11 5198708 5198729 5198713 5198708 -
ctatattctattaggtatctaa

SEQ ID NO: 148361 - DNA, 22 bp, Artificial Sequence
  Synthetic oligonucleotide; CTA chr11 5198705 5198726 5198710 5198705 -
tattctattaggtatctaagaa

SEQ ID NO: 148362 - DNA, 22 bp, Artificial Sequence
  Synthetic oligonucleotide; TTC chr11 5198700 5198721 5198705 5198700 -
tattaggtatctaagaaggtaa

SEQ ID NO: 148363 - DNA, 22 bp, Artificial Sequence
  Synthetic oligonucleotide; CTA chr11 5198698 5198719 5198703 5198698 -
ttaggtatctaagaaggtaagt

SEQ ID NO: 148364 - DNA, 22 bp, Artificial Sequence
  Synthetic oligonucleotide; TTA chr11 5198695 5198716 5198700 5198695 -
ggtatctaagaaggtaagtgtt

SEQ ID NO: 148365 - DNA, 22 bp, Artificial Sequence
  Synthetic oligonucleotide; CTA chr11 5198687 5198708 5198692 5198687 -
agaaggtaagtgttaaaattgg

SEQ ID NO: 148366 - DNA, 22 bp, Artificial Sequence
  Synthetic oligonucleotide; TTA chr11 5198672 5198693 5198677 5198672 -
aaattggacaaattaatgcata

SEQ ID NO: 148367 - DNA, 22 bp, Artificial Sequence
  Synthetic oligonucleotide; TTG chr11 5198666 5198687 5198671 5198666 -
gacaaattaatgcataagagtc

SEQ ID NO: 148368 - DNA, 22 bp, Artificial Sequence
  Synthetic oligonucleotide; TTA chr11 5198657 5198678 5198662 5198657 -
atgcataagagtcattttacac

SEQ ID NO: 148369 - DNA, 22 bp, Artificial Sequence
  Synthetic oligonucleotide; TTT chr11 5198640 5198661 5198645 5198640 -
tacaccaaaaagcaaatattta

SEQ ID NO: 148370 - DNA, 22 bp, Artificial Sequence
  Synthetic oligonucleotide; TTT chr11 5198639 5198660 5198644 5198639 -
acaccaaaaagcaaatatttat

SEQ ID NO: 148371 - DNA, 22 bp, Artificial Sequence
  Synthetic oligonucleotide; TTA chr11 5198638 5198659 5198643 5198638 -
caccaaaaagcaaatatttatt

SEQ ID NO: 148372 - DNA, 22 bp, Artificial Sequence
  Synthetic oligonucleotide; TTT chr11 5198619 5198640 5198624 5198619 -
atttttatttttagatatcaac

SEQ ID NO: 148373 - DNA, 22 bp, Artificial Sequence
  Synthetic oligonucleotide; TTA chr11 5198618 5198639 5198623 5198618 -
tttttatttttagatatcaact

SEQ ID NO: 148374 - DNA, 22 bp, Artificial Sequence
  Synthetic oligonucleotide; TTT chr11 5198615 5198636 5198620 5198615 -
ttatttttagatatcaactaaa

SEQ ID NO: 148375 - DNA, 22 bp, Artificial Sequence
  Synthetic oligonucleotide; TTT chr11 5198614 5198635 5198619 5198614 -
tatttttagatatcaactaaaa

SEQ ID NO: 148376 - DNA, 22 bp, Artificial Sequence
  Synthetic oligonucleotide; TTT chr11 5198613 5198634 5198618 5198613 -
atttttagatatcaactaaaac

SEQ ID NO: 148377 - DNA, 22 bp, Artificial Sequence
  Synthetic oligonucleotide; TTA chr11 5198612 5198633 5198617 5198612 -
tttttagatatcaactaaaaca

SEQ ID NO: 148378 - DNA, 22 bp, Artificial Sequence
  Synthetic oligonucleotide; TTT chr11 5198609 5198630 5198614 5198609 -
ttagatatcaactaaaacaacc

SEQ ID NO: 148379 - DNA, 22 bp, Artificial Sequence
  Synthetic oligonucleotide; TTT chr11 5198608 5198629 5198613 5198608 -
tagatatcaactaaaacaacca

SEQ ID NO: 148380 - DNA, 22 bp, Artificial Sequence
  Synthetic oligonucleotide; TTT chr11 5198607 5198628 5198612 5198607 -
agatatcaactaaaacaaccag

SEQ ID NO: 148381 - DNA, 22 bp, Artificial Sequence
  Synthetic oligonucleotide; TTA chr11 5198606 5198627 5198611 5198606 -
gatatcaactaaaacaaccaga

SEQ ID NO: 148382 - DNA, 22 bp, Artificial Sequence
  Synthetic oligonucleotide; CTA chr11 5198595 5198616 5198600 5198595 -
aaacaaccagatttgtcttcct

SEQ ID NO: 148383 - DNA, 22 bp, Artificial Sequence
  Synthetic oligonucleotide; TTT chr11 5198581 5198602 5198586 5198581 -
gtcttcctgtaattatgccttc

SEQ ID NO: 148384 - DNA, 22 bp, Artificial Sequence
  Synthetic oligonucleotide; TTG chr11 5198580 5198601 5198585 5198580 -
tcttcctgtaattatgccttcc

SEQ ID NO: 148385 - DNA, 22 bp, Artificial Sequence
  Synthetic oligonucleotide; CTT chr11 5198576 5198597 5198581 5198576 -
cctgtaattatgccttcctttc

SEQ ID NO: 148386 - DNA, 22 bp, Artificial Sequence
  Synthetic oligonucleotide; TTC chr11 5198575 5198596 5198580 5198575 -
ctgtaattatgccttcctttcc

SEQ ID NO: 148387 - DNA, 22 bp, Artificial Sequence
  Synthetic oligonucleotide; CTG chr11 5198572 5198593 5198577 5198572 -
taattatgccttcctttccttt

SEQ ID NO: 148388 - DNA, 22 bp, Artificial Sequence
  Synthetic oligonucleotide; TTA chr11 5198566 5198587 5198571 5198566 -
tgccttcctttcctttcacttt

SEQ ID NO: 148389 - DNA, 22 bp, Artificial Sequence
  Synthetic oligonucleotide; CTT chr11 5198560 5198581 5198565 5198560 -
cctttcctttcactttggactt

SEQ ID NO: 148390 - DNA, 22 bp, Artificial Sequence
  Synthetic oligonucleotide; TTC chr11 5198559 5198580 5198564 5198559 -
ctttcctttcactttggacttc

SEQ ID NO: 148391 - DNA, 22 bp, Artificial Sequence
  Synthetic oligonucleotide; CTT chr11 5198556 5198577 5198561 5198556 -
tcctttcactttggacttcatt

SEQ ID NO: 148392 - DNA, 22 bp, Artificial Sequence
  Synthetic oligonucleotide; TTT chr11 5198555 5198576 5198560 5198555 -
cctttcactttggacttcattc

SEQ ID NO: 148393 - DNA, 22 bp, Artificial Sequence
  Synthetic oligonucleotide; TTC chr11 5198554 5198575 5198559 5198554 -
ctttcactttggacttcattca

SEQ ID NO: 148394 - DNA, 22 bp, Artificial Sequence
  Synthetic oligonucleotide; CTT chr11 5198551 5198572 5198556 5198551 -
tcactttggacttcattcaata

SEQ ID NO: 148395 - DNA, 22 bp, Artificial Sequence
  Synthetic oligonucleotide; TTT chr11 5198550 5198571 5198555 5198550 -
cactttggacttcattcaataa

SEQ ID NO: 148396 - DNA, 22 bp, Artificial Sequence
  Synthetic oligonucleotide; TTC chr11 5198549 5198570 5198554 5198549 -
actttggacttcattcaataac

SEQ ID NO: 148397 - DNA, 22 bp, Artificial Sequence
  Synthetic oligonucleotide; CTT chr11 5198545 5198566 5198550 5198545 -
tggacttcattcaataacatag

SEQ ID NO: 148398 - DNA, 22 bp, Artificial Sequence
  Synthetic oligonucleotide; TTT chr11 5198544 5198565 5198549 5198544 -
ggacttcattcaataacatagc

SEQ ID NO: 148399 - DNA, 22 bp, Artificial Sequence
  Synthetic oligonucleotide; TTG chr11 5198543 5198564 5198548 5198543 -
gacttcattcaataacatagcc

SEQ ID NO: 148400 - DNA, 22 bp, Artificial Sequence
  Synthetic oligonucleotide; CTT chr11 5198538 5198559 5198543 5198538 -
cattcaataacatagcctctgt

SEQ ID NO: 148401 - DNA, 22 bp, Artificial Sequence
  Synthetic oligonucleotide; TTC chr11 5198537 5198558 5198542 5198537 -
attcaataacatagcctctgtc

SEQ ID NO: 148402 - DNA, 22 bp, Artificial Sequence
  Synthetic oligonucleotide; TTC chr11 5198533 5198554 5198538 5198533 -
aataacatagcctctgtctact

SEQ ID NO: 148403 - DNA, 22 bp, Artificial Sequence
  Synthetic oligonucleotide; CTC chr11 5198519 5198540 5198524 5198519 -
tgtctacttatttgactcagag

SEQ ID NO: 148404 - DNA, 22 bp, Artificial Sequence
  Synthetic oligonucleotide; CTG chr11 5198517 5198538 5198522 5198517 -
tctacttatttgactcagaggg

SEQ ID NO: 148405 - DNA, 22 bp, Artificial Sequence
  Synthetic oligonucleotide; CTA chr11 5198513 5198534 5198518 5198513 -
cttatttgactcagagggaaac

SEQ ID NO: 148406 - DNA, 22 bp, Artificial Sequence
  Synthetic oligonucleotide; CTT chr11 5198510 5198531 5198515 5198510 -
atttgactcagagggaaacaaa

SEQ ID NO: 148407 - DNA, 22 bp, Artificial Sequence
  Synthetic oligonucleotide; TTA chr11 5198509 5198530 5198514 5198509 -
tttgactcagagggaaacaaaa

SEQ ID NO: 148408 - DNA, 22 bp, Artificial Sequence
  Synthetic oligonucleotide; TTT chr11 5198506 5198527 5198511 5198506 -
gactcagagggaaacaaaaata

SEQ ID NO: 148409 - DNA, 22 bp, Artificial Sequence
  Synthetic oligonucleotide; TTG chr11 5198505 5198526 5198510 5198505 -
actcagagggaaacaaaaatac

SEQ ID NO: 148410 - DNA, 22 bp, Artificial Sequence
  Synthetic oligonucleotide; CTC chr11 5198501 5198522 5198506 5198501 -
agagggaaacaaaaatacaggc

SEQ ID NO: 148411 - DNA, 22 bp, Artificial Sequence
  Synthetic oligonucleotide; CTT chr11 5198477 5198498 5198482 5198477 -
tggtttctaatagcttaagcct

SEQ ID NO: 148412 - DNA, 22 bp, Artificial Sequence
  Synthetic oligonucleotide; TTT chr11 5198476 5198497 5198481 5198476 -
ggtttctaatagcttaagcctc

SEQ ID NO: 148413 - DNA, 22 bp, Artificial Sequence
  Synthetic oligonucleotide; TTG chr11 5198475 5198496 5198480 5198475 -
gtttctaatagcttaagcctca

SEQ ID NO: 148414 - DNA, 22 bp, Artificial Sequence
  Synthetic oligonucleotide; TTT chr11 5198471 5198492 5198476 5198471 -
ctaatagcttaagcctcaaagt

SEQ ID NO: 148415 - DNA, 22 bp, Artificial Sequence
  Synthetic oligonucleotide; TTC chr11 5198470 5198491 5198475 5198470 -
taatagcttaagcctcaaagtg

SEQ ID NO: 148416 - DNA, 22 bp, Artificial Sequence
  Synthetic oligonucleotide; CTA chr11 5198468 5198489 5198473 5198468 -
atagcttaagcctcaaagtgag

SEQ ID NO: 148417 - DNA, 22 bp, Artificial Sequence
  Synthetic oligonucleotide; CTT chr11 5198461 5198482 5198466 5198461 -
aagcctcaaagtgaggaaattg

SEQ ID NO: 148418 - DNA, 22 bp, Artificial Sequence
  Synthetic oligonucleotide; TTA chr11 5198460 5198481 5198465 5198460 -
agcctcaaagtgaggaaattgt

SEQ ID NO: 148419 - DNA, 22 bp, Artificial Sequence
  Synthetic oligonucleotide; CTC chr11 5198454 5198475 5198459 5198454 -
aaagtgaggaaattgtttctgg

SEQ ID NO: 148420 - DNA, 22 bp, Artificial Sequence
  Synthetic oligonucleotide; TTG chr11 5198439 5198460 5198444 5198439 -
tttctggacagagtaaagtatc

SEQ ID NO: 148421 - DNA, 22 bp, Artificial Sequence
  Synthetic oligonucleotide; TTT chr11 5198436 5198457 5198441 5198436 -
ctggacagagtaaagtatctgg

SEQ ID NO: 148422 - DNA, 22 bp, Artificial Sequence
  Synthetic oligonucleotide; TTC chr11 5198435 5198456 5198440 5198435 -
tggacagagtaaagtatctggt

SEQ ID NO: 148423 - DNA, 22 bp, Artificial Sequence
  Synthetic oligonucleotide; CTG chr11 5198433 5198454 5198438 5198433 -
gacagagtaaagtatctggtta

SEQ ID NO: 148424 - DNA, 22 bp, Artificial Sequence
  Synthetic oligonucleotide; CTG chr11 5198415 5198436 5198420 5198415 -
gttagaaagataagtgtaaaat

SEQ ID NO: 148425 - DNA, 22 bp, Artificial Sequence
  Synthetic oligonucleotide; TTA chr11 5198411 5198432 5198416 5198411 -
gaaagataagtgtaaaattatt

SEQ ID NO: 148426 - DNA, 22 bp, Artificial Sequence
  Synthetic oligonucleotide; TTA chr11 5198391 5198412 5198396 5198391 -
ttcctagaacaataaattaggt

SEQ ID NO: 148427 - DNA, 22 bp, Artificial Sequence
  Synthetic oligonucleotide; TTC chr11 5198388 5198409 5198393 5198388 -
ctagaacaataaattaggtctt

SEQ ID NO: 148428 - DNA, 22 bp, Artificial Sequence
  Synthetic oligonucleotide; CTA chr11 5198385 5198406 5198390 5198385 -
gaacaataaattaggtcttctg

SEQ ID NO: 148429 - DNA, 22 bp, Artificial Sequence
  Synthetic oligonucleotide; TTA chr11 5198372 5198393 5198377 5198372 -
ggtcttctgggttacagtataa

SEQ ID NO: 148430 - DNA, 22 bp, Artificial Sequence
  Synthetic oligonucleotide; CTT chr11 5198366 5198387 5198371 5198366 -
ctgggttacagtataaggttaa

SEQ ID NO: 148431 - DNA, 22 bp, Artificial Sequence
  Synthetic oligonucleotide; TTC chr11 5198365 5198386 5198370 5198365 -
tgggttacagtataaggttaat

SEQ ID NO: 148432 - DNA, 22 bp, Artificial Sequence
  Synthetic oligonucleotide; CTG chr11 5198363 5198384 5198368 5198363 -
ggttacagtataaggttaattt

SEQ ID NO: 148433 - DNA, 22 bp, Artificial Sequence
  Synthetic oligonucleotide; TTA chr11 5198358 5198379 5198363 5198358 -
cagtataaggttaatttgaagg

SEQ ID NO: 148434 - DNA, 22 bp, Artificial Sequence
  Synthetic oligonucleotide; TTA chr11 5198345 5198366 5198350 5198345 -
atttgaaggataaaggagtgaa

SEQ ID NO: 148435 - DNA, 22 bp, Artificial Sequence
  Synthetic oligonucleotide; TTT chr11 5198341 5198362 5198346 5198341 -
gaaggataaaggagtgaatttc

SEQ ID NO: 148436 - DNA, 22 bp, Artificial Sequence
  Synthetic oligonucleotide; TTG chr11 5198340 5198361 5198345 5198340 -
aaggataaaggagtgaatttcc

SEQ ID NO: 148437 - DNA, 22 bp, Artificial Sequence
  Synthetic oligonucleotide; TTT chr11 5198320 5198341 5198325 5198320 -
cctgatgtcaaagaggatctag

SEQ ID NO: 148438 - DNA, 22 bp, Artificial Sequence
  Synthetic oligonucleotide; TTC chr11 5198319 5198340 5198324 5198319 -
ctgatgtcaaagaggatctagt

SEQ ID NO: 148439 - DNA, 22 bp, Artificial Sequence
  Synthetic oligonucleotide; CTG chr11 5198316 5198337 5198321 5198316 -
atgtcaaagaggatctagtgca

SEQ ID NO: 148440 - DNA, 22 bp, Artificial Sequence
  Synthetic oligonucleotide; CTA chr11 5198299 5198320 5198304 5198299 -
gtgcatcttctggtatagctat

SEQ ID NO: 148441 - DNA, 22 bp, Artificial Sequence
  Synthetic oligonucleotide; CTT chr11 5198290 5198311 5198295 5198290 -
ctggtatagctatcagaagtga

SEQ ID NO: 148442 - DNA, 22 bp, Artificial Sequence
  Synthetic oligonucleotide; TTC chr11 5198289 5198310 5198294 5198289 -
tggtatagctatcagaagtgaa

SEQ ID NO: 148443 - DNA, 22 bp, Artificial Sequence
  Synthetic oligonucleotide; CTG chr11 5198287 5198308 5198292 5198287 -
gtatagctatcagaagtgaaaa

SEQ ID NO: 148444 - DNA, 22 bp, Artificial Sequence
  Synthetic oligonucleotide; CTA chr11 5198278 5198299 5198283 5198278 -
tcagaagtgaaaactgtgaggt

SEQ ID NO: 148445 - DNA, 22 bp, Artificial Sequence
  Synthetic oligonucleotide; CTG chr11 5198262 5198283 5198267 5198262 -
tgaggtaggttctagaggggaa

SEQ ID NO: 148446 - DNA, 22 bp, Artificial Sequence
  Synthetic oligonucleotide; TTC chr11 5198250 5198271 5198255 5198250 -
tagaggggaaaatgtcaatata

SEQ ID NO: 148447 - DNA, 22 bp, Artificial Sequence
  Synthetic oligonucleotide; CTA chr11 5198248 5198269 5198253 5198248 -
gaggggaaaatgtcaatatata

SEQ ID NO: 148448 - DNA, 22 bp, Artificial Sequence
  Synthetic oligonucleotide; TTT chr11 5198221 5198242 5198226 5198221 -
tttactatataatcatagtagc

SEQ ID NO: 148449 - DNA, 22 bp, Artificial Sequence
  Synthetic oligonucleotide; TTT chr11 5198220 5198241 5198225 5198220 -
ttactatataatcatagtagct

SEQ ID NO: 148450 - DNA, 22 bp, Artificial Sequence
  Synthetic oligonucleotide; TTT chr11 5198219 5198240 5198224 5198219 -
tactatataatcatagtagctg

SEQ ID NO: 148451 - DNA, 22 bp, Artificial Sequence
  Synthetic oligonucleotide; TTT chr11 5198218 5198239 5198223 5198218 -
actatataatcatagtagctgc

SEQ ID NO: 148452 - DNA, 22 bp, Artificial Sequence
  Synthetic oligonucleotide; TTA chr11 5198217 5198238 5198222 5198217 -
ctatataatcatagtagctgcc

SEQ ID NO: 148453 - DNA, 22 bp, Artificial Sequence
  Synthetic oligonucleotide; CTA chr11 5198214 5198235 5198219 5198214 -
tataatcatagtagctgccgag

SEQ ID NO: 148454 - DNA, 22 bp, Artificial Sequence
  Synthetic oligonucleotide; CTG chr11 5198197 5198218 5198202 5198197 -
ccgaggcgggcggatcatgagg

SEQ ID NO: 148455 - DNA, 22 bp, Artificial Sequence
  Synthetic oligonucleotide; CTG chr11 5198153 5198174 5198158 5198153 -
gccagcaatggtgaaaccccgt

SEQ ID NO: 148456 - DNA, 22 bp, Artificial Sequence
  Synthetic oligonucleotide; CTC chr11 5198128 5198149 5198133 5198128 -
tactaaaaaaacacaagaaagt

SEQ ID NO: 148457 - DNA, 22 bp, Artificial Sequence
  Synthetic oligonucleotide; CTA chr11 5198126 5198147 5198131 5198126 -
ctaaaaaaacacaagaaagtat

SEQ ID NO: 148458 - DNA, 22 bp, Artificial Sequence
  Synthetic oligonucleotide; CTA chr11 5198123 5198144 5198128 5198123 -
aaaaaacacaagaaagtatcca

SEQ ID NO: 148459 - DNA, 22 bp, Artificial Sequence
  Synthetic oligonucleotide; CTG chr11 5198081 5198102 5198086 5198081 -
tagtcccaggtactcgggaggc

SEQ ID NO: 148460 - DNA, 22 bp, Artificial Sequence
  Synthetic oligonucleotide; CTC chr11 5198066 5198087 5198071 5198066 -
gggaggctgagacaggagaatg

SEQ ID NO: 148461 - DNA, 22 bp, Artificial Sequence
  Synthetic oligonucleotide; CTG chr11 5198057 5198078 5198062 5198057 -
agacaggagaatggcgtgaacc

SEQ ID NO: 148462 - DNA, 22 bp, Artificial Sequence
  Synthetic oligonucleotide; CTT chr11 5198020 5198041 5198025 5198020 -
gcagtgagtcgagatcacgcca

SEQ ID NO: 148463 - DNA, 22 bp, Artificial Sequence
  Synthetic oligonucleotide; TTG chr11 5198019 5198040 5198024 5198019 -
cagtgagtcgagatcacgccac

SEQ ID NO: 148464 - DNA, 22 bp, Artificial Sequence
  Synthetic oligonucleotide; CTG chr11 5197995 5198016 5198000 5197995 -
cactccagcctgggcgacagag

SEQ ID NO: 148465 - DNA, 22 bp, Artificial Sequence
  Synthetic oligonucleotide; CTC chr11 5197990 5198011 5197995 5197990 -
cagcctgggcgacagagagaga

SEQ ID NO: 148466 - DNA, 22 bp, Artificial Sequence
  Synthetic oligonucleotide; CTG chr11 5197983 5198004 5197988 5197983 -
ggcgacagagagagactctgtc

SEQ ID NO: 148467 - DNA, 22 bp, Artificial Sequence
  Synthetic oligonucleotide; CTC chr11 5197965 5197986 5197970 5197965 -
tgtctcaaaaaaaaaaaaaaaa

SEQ ID NO: 148468 - DNA, 22 bp, Artificial Sequence
  Synthetic oligonucleotide; CTG chr11 5197963 5197984 5197968 5197963 -
tctcaaaaaaaaaaaaaaaaag

SEQ ID NO: 148469 - DNA, 22 bp, Artificial Sequence
  Synthetic oligonucleotide; CTC chr11 5197959 5197980 5197964 5197959 -
aaaaaaaaaaaaaaaaagagaa

SEQ ID NO: 148470 - DNA, 22 bp, Artificial Sequence
  Synthetic oligonucleotide; TTG chr11 5197921 5197942 5197926 5197921 -
atatgaatgtcaggtggtagta

SEQ ID NO: 148471 - DNA, 22 bp, Artificial Sequence
  Synthetic oligonucleotide; CTG chr11 5197896 5197917 5197901 5197896 -
ctccaggttccctaatgataat

SEQ ID NO: 148472 - DNA, 22 bp, Artificial Sequence
  Synthetic oligonucleotide; CTC chr11 5197893 5197914 5197898 5197893 -
caggttccctaatgataataaa

SEQ ID NO: 148473 - DNA, 22 bp, Artificial Sequence
  Synthetic oligonucleotide; TTC chr11 5197886 5197907 5197891 5197886 -
cctaatgataataaatgtctgc

SEQ ID NO: 148474 - DNA, 22 bp, Artificial Sequence
  Synthetic oligonucleotide; CTA chr11 5197882 5197903 5197887 5197882 -
atgataataaatgtctgcatgg

SEQ ID NO: 148475 - DNA, 22 bp, Artificial Sequence
  Synthetic oligonucleotide; CTG chr11 5197865 5197886 5197870 5197865 -
catggtccctcctggccgactg

SEQ ID NO: 148476 - DNA, 22 bp, Artificial Sequence
  Synthetic oligonucleotide; CTC chr11 5197854 5197875 5197859 5197854 -
ctggccgactggaatgtggcca

SEQ ID NO: 148477 - DNA, 22 bp, Artificial Sequence
  Synthetic oligonucleotide; CTG chr11 5197851 5197872 5197856 5197851 -
gccgactggaatgtggccaatc

SEQ ID NO: 148478 - DNA, 22 bp, Artificial Sequence
  Synthetic oligonucleotide; CTG chr11 5197843 5197864 5197848 5197843 -
gaatgtggccaatctgacaaga

SEQ ID NO: 148479 - DNA, 22 bp, Artificial Sequence
  Synthetic oligonucleotide; CTG chr11 5197827 5197848 5197832 5197827 -
acaagattcctatgccccagtt

SEQ ID NO: 148480 - DNA, 22 bp, Artificial Sequence
  Synthetic oligonucleotide; TTC chr11 5197818 5197839 5197823 5197818 -
ctatgccccagttttataatga

SEQ ID NO: 148481 - DNA, 22 bp, Artificial Sequence
  Synthetic oligonucleotide; CTA chr11 5197815 5197836 5197820 5197815 -
tgccccagttttataatgaaaa

SEQ ID NO: 148482 - DNA, 22 bp, Artificial Sequence
  Synthetic oligonucleotide; TTT chr11 5197804 5197825 5197809 5197804 -
tataatgaaaagagaagttagc

SEQ ID NO: 148483 - DNA, 22 bp, Artificial Sequence
  Synthetic oligonucleotide; TTT chr11 5197803 5197824 5197808 5197803 -
ataatgaaaagagaagttagct

SEQ ID NO: 148484 - DNA, 22 bp, Artificial Sequence
  Synthetic oligonucleotide; TTA chr11 5197802 5197823 5197807 5197802 -
taatgaaaagagaagttagctg

SEQ ID NO: 148485 - DNA, 22 bp, Artificial Sequence
  Synthetic oligonucleotide; TTA chr11 5197784 5197805 5197789 5197784 -
gctgctgaatctgtagaggtca

SEQ ID NO: 148486 - DNA, 22 bp, Artificial Sequence
  Synthetic oligonucleotide; CTG chr11 5197780 5197801 5197785 5197780 -
ctgaatctgtagaggtcatgtg

SEQ ID NO: 148487 - DNA, 22 bp, Artificial Sequence
  Synthetic oligonucleotide; CTG chr11 5197777 5197798 5197782 5197777 -
aatctgtagaggtcatgtgaat

SEQ ID NO: 148488 - DNA, 22 bp, Artificial Sequence
  Synthetic oligonucleotide; CTG chr11 5197771 5197792 5197776 5197771 -
tagaggtcatgtgaatgtctca

SEQ ID NO: 148489 - DNA, 22 bp, Artificial Sequence
  Synthetic oligonucleotide; CTC chr11 5197750 5197771 5197755 5197750 -
atagatttctcaatggccaaag

SEQ ID NO: 148490 - DNA, 22 bp, Artificial Sequence
  Synthetic oligonucleotide; TTT chr11 5197742 5197763 5197747 5197742 -
ctcaatggccaaagaagcttcc

SEQ ID NO: 148491 - DNA, 22 bp, Artificial Sequence
  Synthetic oligonucleotide; TTC chr11 5197741 5197762 5197746 5197741 -
tcaatggccaaagaagcttcct

SEQ ID NO: 148492 - DNA, 22 bp, Artificial Sequence
  Synthetic oligonucleotide; CTC chr11 5197739 5197760 5197744 5197739 -
aatggccaaagaagcttccttc

SEQ ID NO: 148493 - DNA, 22 bp, Artificial Sequence
  Synthetic oligonucleotide; CTT chr11 5197722 5197743 5197727 5197722 -
ccttctaatgctttgaaagtga

SEQ ID NO: 148494 - DNA, 22 bp, Artificial Sequence
  Synthetic oligonucleotide; TTC chr11 5197721 5197742 5197726 5197721 -
cttctaatgctttgaaagtgaa

SEQ ID NO: 148495 - DNA, 22 bp, Artificial Sequence
  Synthetic oligonucleotide; CTT chr11 5197718 5197739 5197723 5197718 -
ctaatgctttgaaagtgaataa

SEQ ID NO: 148496 - DNA, 22 bp, Artificial Sequence
  Synthetic oligonucleotide; TTC chr11 5197717 5197738 5197722 5197717 -
taatgctttgaaagtgaataag

SEQ ID NO: 148497 - DNA, 22 bp, Artificial Sequence
  Synthetic oligonucleotide; CTA chr11 5197715 5197736 5197720 5197715 -
atgctttgaaagtgaataagca

SEQ ID NO: 148498 - DNA, 22 bp, Artificial Sequence
  Synthetic oligonucleotide; CTT chr11 5197709 5197730 5197714 5197709 -
tgaaagtgaataagcatccacc

SEQ ID NO: 148499 - DNA, 22 bp, Artificial Sequence
  Synthetic oligonucleotide; TTT chr11 5197708 5197729 5197713 5197708 -
gaaagtgaataagcatccaccc

SEQ ID NO: 148500 - DNA, 22 bp, Artificial Sequence
  Synthetic oligonucleotide; TTG chr11 5197707 5197728 5197712 5197707 -
aaagtgaataagcatccaccct

SEQ ID NO: 148501 - DNA, 22 bp, Artificial Sequence
  Synthetic oligonucleotide; CTC chr11 5197684 5197705 5197689 5197684 -
ccatacgccggagagctgacac

SEQ ID NO: 148502 - DNA, 22 bp, Artificial Sequence
  Synthetic oligonucleotide; CTG chr11 5197666 5197687 5197671 5197666 -
acacaacactggggaagcagag

SEQ ID NO: 148503 - DNA, 22 bp, Artificial Sequence
  Synthetic oligonucleotide; CTG chr11 5197655 5197676 5197660 5197655 -
gggaagcagagaattcttcaac

SEQ ID NO: 148504 - DNA, 22 bp, Artificial Sequence
  Synthetic oligonucleotide; TTC chr11 5197639 5197660 5197644 5197639 -
ttcaacaactgacaatatgttt

SEQ ID NO: 148505 - DNA, 22 bp, Artificial Sequence
  Synthetic oligonucleotide; CTT chr11 5197637 5197658 5197642 5197637 -
caacaactgacaatatgttttc

SEQ ID NO: 148506 - DNA, 22 bp, Artificial Sequence
  Synthetic oligonucleotide; TTC chr11 5197636 5197657 5197641 5197636 -
aacaactgacaatatgttttcc

SEQ ID NO: 148507 - DNA, 22 bp, Artificial Sequence
  Synthetic oligonucleotide; CTG chr11 5197628 5197649 5197633 5197628 -
acaatatgttttccaccagcca

SEQ ID NO: 148508 - DNA, 22 bp, Artificial Sequence
  Synthetic oligonucleotide; TTT chr11 5197617 5197638 5197622 5197617 -
tccaccagccactcatagggaa

SEQ ID NO: 148509 - DNA, 22 bp, Artificial Sequence
  Synthetic oligonucleotide; TTT chr11 5197616 5197637 5197621 5197616 -
ccaccagccactcatagggaag

SEQ ID NO: 148510 - DNA, 22 bp, Artificial Sequence
  Synthetic oligonucleotide; TTC chr11 5197615 5197636 5197620 5197615 -
caccagccactcatagggaagc

SEQ ID NO: 148511 - DNA, 22 bp, Artificial Sequence
  Synthetic oligonucleotide; CTC chr11 5197603 5197624 5197608 5197603 -
atagggaagcatcagaatgaat

SEQ ID NO: 148512 - DNA, 22 bp, Artificial Sequence
  Synthetic oligonucleotide; TTT chr11 5197579 5197600 5197584 5197579 -
atatttattatttgaacaatat

SEQ ID NO: 148513 - DNA, 22 bp, Artificial Sequence
  Synthetic oligonucleotide; TTA chr11 5197578 5197599 5197583 5197578 -
tatttattatttgaacaatatt

SEQ ID NO: 148514 - DNA, 22 bp, Artificial Sequence
  Synthetic oligonucleotide; TTT chr11 5197573 5197594 5197578 5197573 -
attatttgaacaatattacatg

SEQ ID NO: 148515 - DNA, 22 bp, Artificial Sequence
  Synthetic oligonucleotide; TTA chr11 5197572 5197593 5197577 5197572 -
ttatttgaacaatattacatgt

SEQ ID NO: 148516 - DNA, 22 bp, Artificial Sequence
  Synthetic oligonucleotide; TTA chr11 5197569 5197590 5197574 5197569 -
tttgaacaatattacatgtctg

SEQ ID NO: 148517 - DNA, 22 bp, Artificial Sequence
  Synthetic oligonucleotide; TTT chr11 5197566 5197587 5197571 5197566 -
gaacaatattacatgtctgaca

SEQ ID NO: 148518 - DNA, 22 bp, Artificial Sequence
  Synthetic oligonucleotide; TTG chr11 5197565 5197586 5197570 5197565 -
aacaatattacatgtctgacac

SEQ ID NO: 148519 - DNA, 22 bp, Artificial Sequence
  Synthetic oligonucleotide; TTA chr11 5197555 5197576 5197560 5197555 -
catgtctgacacaactgagttg

SEQ ID NO: 148520 - DNA, 22 bp, Artificial Sequence
  Synthetic oligonucleotide; CTG chr11 5197547 5197568 5197552 5197547 -
acacaactgagttgttggtttg

SEQ ID NO: 148521 - DNA, 22 bp, Artificial Sequence
  Synthetic oligonucleotide; CTG chr11 5197538 5197559 5197543 5197538 -
agttgttggtttgagagttatg

SEQ ID NO: 148522 - DNA, 22 bp, Artificial Sequence
  Synthetic oligonucleotide; TTG chr11 5197533 5197554 5197538 5197533 -
ttggtttgagagttatgtttaa

SEQ ID NO: 148523 - DNA, 22 bp, Artificial Sequence
  Synthetic oligonucleotide; TTG chr11 5197530 5197551 5197535 5197530 -
gtttgagagttatgtttaacag

SEQ ID NO: 148524 - DNA, 22 bp, Artificial Sequence
  Synthetic oligonucleotide; TTT chr11 5197526 5197547 5197531 5197526 -
gagagttatgtttaacagggag

SEQ ID NO: 148525 - DNA, 22 bp, Artificial Sequence
  Synthetic oligonucleotide; TTG chr11 5197525 5197546 5197530 5197525 -
agagttatgtttaacagggaga

SEQ ID NO: 148526 - DNA, 22 bp, Artificial Sequence
  Synthetic oligonucleotide; TTA chr11 5197518 5197539 5197523 5197518 -
tgtttaacagggagagtaggaa

SEQ ID NO: 148527 - DNA, 22 bp, Artificial Sequence
  Synthetic oligonucleotide; TTT chr11 5197513 5197534 5197518 5197513 -
aacagggagagtaggaaggctc

SEQ ID NO: 148528 - DNA, 22 bp, Artificial Sequence
  Synthetic oligonucleotide; TTA chr11 5197512 5197533 5197517 5197512 -
acagggagagtaggaaggctca

SEQ ID NO: 148529 - DNA, 22 bp, Artificial Sequence
  Synthetic oligonucleotide; CTC chr11 5197491 5197512 5197496 5197491 -
atctgaagacttcatactatga

SEQ ID NO: 148530 - DNA, 22 bp, Artificial Sequence
  Synthetic oligonucleotide; CTG chr11 5197486 5197507 5197491 5197486 -
aagacttcatactatgagtgtt

SEQ ID NO: 148531 - DNA, 22 bp, Artificial Sequence
  Synthetic oligonucleotide; CTT chr11 5197479 5197500 5197484 5197479 -
catactatgagtgtttgtgctt

SEQ ID NO: 148532 - DNA, 22 bp, Artificial Sequence
  Synthetic oligonucleotide; TTC chr11 5197478 5197499 5197483 5197478 -
atactatgagtgtttgtgcttc

SEQ ID NO: 148533 - DNA, 22 bp, Artificial Sequence
  Synthetic oligonucleotide; CTA chr11 5197472 5197493 5197477 5197472 -
tgagtgtttgtgcttcagatta

SEQ ID NO: 148534 - DNA, 22 bp, Artificial Sequence
  Synthetic oligonucleotide; TTT chr11 5197463 5197484 5197468 5197463 -
gtgcttcagattaggcaaccta

SEQ ID NO: 148535 - DNA, 22 bp, Artificial Sequence
  Synthetic oligonucleotide; TTG chr11 5197462 5197483 5197467 5197462 -
tgcttcagattaggcaacctat

SEQ ID NO: 148536 - DNA, 22 bp, Artificial Sequence
  Synthetic oligonucleotide; CTT chr11 5197457 5197478 5197462 5197457 -
cagattaggcaacctatagaat

SEQ ID NO: 148537 - DNA, 22 bp, Artificial Sequence
  Synthetic oligonucleotide; TTC chr11 5197456 5197477 5197461 5197456 -
agattaggcaacctatagaatg

SEQ ID NO: 148538 - DNA, 22 bp, Artificial Sequence
  Synthetic oligonucleotide; TTA chr11 5197450 5197471 5197455 5197450 -
ggcaacctatagaatgtgaacc

SEQ ID NO: 148539 - DNA, 22 bp, Artificial Sequence
  Synthetic oligonucleotide; CTA chr11 5197441 5197462 5197446 5197441 -
tagaatgtgaaccaaaatagtt

SEQ ID NO: 148540 - DNA, 22 bp, Artificial Sequence
  Synthetic oligonucleotide; TTT chr11 5197418 5197439 5197423 5197418 -
gaaataatggccgtgacaaaac

SEQ ID NO: 148541 - DNA, 22 bp, Artificial Sequence
  Synthetic oligonucleotide; TTG chr11 5197417 5197438 5197422 5197417 -
aaataatggccgtgacaaaaca

SEQ ID NO: 148542 - DNA, 22 bp, Artificial Sequence
  Synthetic oligonucleotide; TTA chr11 5197391 5197412 5197396 5197391 -
ataaaaaatacctaagagtatc

SEQ ID NO: 148543 - DNA, 22 bp, Artificial Sequence
  Synthetic oligonucleotide; CTA chr11 5197377 5197398 5197382 5197377 -
agagtatcctcagaaatcattg

SEQ ID NO: 148544 - DNA, 22 bp, Artificial Sequence
  Synthetic oligonucleotide; CTC chr11 5197366 5197387 5197371 5197366 -
agaaatcattgcttattttaga

SEQ ID NO: 148545 - DNA, 22 bp, Artificial Sequence
  Synthetic oligonucleotide; TTG chr11 5197355 5197376 5197360 5197355 -
cttattttagagctatataatt

SEQ ID NO: 148546 - DNA, 22 bp, Artificial Sequence
  Synthetic oligonucleotide; CTT chr11 5197352 5197373 5197357 5197352 -
attttagagctatataattgta

SEQ ID NO: 148547 - DNA, 22 bp, Artificial Sequence
  Synthetic oligonucleotide; TTA chr11 5197351 5197372 5197356 5197351 -
ttttagagctatataattgtac

SEQ ID NO: 148548 - DNA, 22 bp, Artificial Sequence
  Synthetic oligonucleotide; TTT chr11 5197348 5197369 5197353 5197348 -
tagagctatataattgtactat

SEQ ID NO: 148549 - DNA, 22 bp, Artificial Sequence
  Synthetic oligonucleotide; TTT chr11 5197347 5197368 5197352 5197347 -
agagctatataattgtactatg

SEQ ID NO: 148550 - DNA, 22 bp, Artificial Sequence
  Synthetic oligonucleotide; TTA chr11 5197346 5197367 5197351 5197346 -
gagctatataattgtactatga

SEQ ID NO: 148551 - DNA, 22 bp, Artificial Sequence
  Synthetic oligonucleotide; CTA chr11 5197340 5197361 5197345 5197340 -
tataattgtactatgatgataa

SEQ ID NO: 148552 - DNA, 22 bp, Artificial Sequence
  Synthetic oligonucleotide; TTG chr11 5197332 5197353 5197337 5197332 -
tactatgatgataagatttatg

SEQ ID NO: 148553 - DNA, 22 bp, Artificial Sequence
  Synthetic oligonucleotide; CTA chr11 5197327 5197348 5197332 5197327 -
tgatgataagatttatgaagaa

SEQ ID NO: 148554 - DNA, 22 bp, Artificial Sequence
  Synthetic oligonucleotide; TTT chr11 5197313 5197334 5197318 5197313 -
atgaagaacttcagaatcttta

SEQ ID NO: 148555 - DNA, 22 bp, Artificial Sequence
  Synthetic oligonucleotide; TTA chr11 5197312 5197333 5197317 5197312 -
tgaagaacttcagaatctttac

SEQ ID NO: 148556 - DNA, 22 bp, Artificial Sequence
  Synthetic oligonucleotide; CTT chr11 5197302 5197323 5197307 5197302 -
cagaatctttacaattcagcca

SEQ ID NO: 148557 - DNA, 22 bp, Artificial Sequence
  Synthetic oligonucleotide; TTC chr11 5197301 5197322 5197306 5197301 -
agaatctttacaattcagccaa

SEQ ID NO: 148558 - DNA, 22 bp, Artificial Sequence
  Synthetic oligonucleotide; CTT chr11 5197293 5197314 5197298 5197293 -
tacaattcagccaaagggagga

SEQ ID NO: 148559 - DNA, 22 bp, Artificial Sequence
  Synthetic oligonucleotide; TTT chr11 5197292 5197313 5197297 5197292 -
acaattcagccaaagggaggaa

SEQ ID NO: 148560 - DNA, 22 bp, Artificial Sequence
  Synthetic oligonucleotide; TTA chr11 5197291 5197312 5197296 5197291 -
caattcagccaaagggaggaaa

SEQ ID NO: 148561 - DNA, 22 bp, Artificial Sequence
  Synthetic oligonucleotide; TTC chr11 5197285 5197306 5197290 5197285 -
agccaaagggaggaaaatcagt

SEQ ID NO: 148562 - DNA, 22 bp, Artificial Sequence
  Synthetic oligonucleotide; CTT chr11 5197228 5197249 5197233 5197228 -
tatatgattactgggctttata

SEQ ID NO: 148563 - DNA, 22 bp, Artificial Sequence
  Synthetic oligonucleotide; TTT chr11 5197227 5197248 5197232 5197227 -
atatgattactgggctttatac

SEQ ID NO: 148564 - DNA, 22 bp, Artificial Sequence
  Synthetic oligonucleotide; TTA chr11 5197226 5197247 5197231 5197226 -
tatgattactgggctttataca

SEQ ID NO: 148565 - DNA, 22 bp, Artificial Sequence
  Synthetic oligonucleotide; TTA chr11 5197218 5197239 5197223 5197218 -
ctgggctttatacagaaagaaa

SEQ ID NO: 148566 - DNA, 22 bp, Artificial Sequence
  Synthetic oligonucleotide; CTG chr11 5197215 5197236 5197220 5197215 -
ggctttatacagaaagaaacag

SEQ ID NO: 148567 - DNA, 22 bp, Artificial Sequence
  Synthetic oligonucleotide; CTT chr11 5197210 5197231 5197215 5197210 -
tatacagaaagaaacaggttta

SEQ ID NO: 148568 - DNA, 22 bp, Artificial Sequence
  Synthetic oligonucleotide; TTT chr11 5197209 5197230 5197214 5197209 -
atacagaaagaaacaggtttag

SEQ ID NO: 148569 - DNA, 22 bp, Artificial Sequence
  Synthetic oligonucleotide; TTA chr11 5197208 5197229 5197213 5197208 -
tacagaaagaaacaggtttaga

SEQ ID NO: 148570 - DNA, 22 bp, Artificial Sequence
  Synthetic oligonucleotide; TTT chr11 5197189 5197210 5197194 5197189 -
agaacattagtagtttagattg

SEQ ID NO: 148571 - DNA, 22 bp, Artificial Sequence
  Synthetic oligonucleotide; TTA chr11 5197188 5197209 5197193 5197188 -
gaacattagtagtttagattgt

SEQ ID NO: 148572 - DNA, 22 bp, Artificial Sequence
  Synthetic oligonucleotide; TTA chr11 5197180 5197201 5197185 5197180 -
gtagtttagattgtttgttttg

SEQ ID NO: 148573 - DNA, 22 bp, Artificial Sequence
  Synthetic oligonucleotide; TTT chr11 5197173 5197194 5197178 5197173 -
agattgtttgttttgcaaaggc

SEQ ID NO: 148574 - DNA, 22 bp, Artificial Sequence
  Synthetic oligonucleotide; TTA chr11 5197172 5197193 5197177 5197172 -
gattgtttgttttgcaaaggcc

SEQ ID NO: 148575 - DNA, 22 bp, Artificial Sequence
  Synthetic oligonucleotide; TTG chr11 5197167 5197188 5197172 5197167 -
tttgttttgcaaaggcctctat

SEQ ID NO: 148576 - DNA, 22 bp, Artificial Sequence
  Synthetic oligonucleotide; TTT chr11 5197164 5197185 5197169 5197164 -
gttttgcaaaggcctctatctg

SEQ ID NO: 148577 - DNA, 22 bp, Artificial Sequence
  Synthetic oligonucleotide; TTG chr11 5197163 5197184 5197168 5197163 -
ttttgcaaaggcctctatctgg

SEQ ID NO: 148578 - DNA, 22 bp, Artificial Sequence
  Synthetic oligonucleotide; TTT chr11 5197160 5197181 5197165 5197160 -
tgcaaaggcctctatctggaag

SEQ ID NO: 148579 - DNA, 22 bp, Artificial Sequence
  Synthetic oligonucleotide; TTT chr11 5197159 5197180 5197164 5197159 -
gcaaaggcctctatctggaagc

SEQ ID NO: 148580 - DNA, 22 bp, Artificial Sequence
  Synthetic oligonucleotide; TTG chr11 5197158 5197179 5197163 5197158 -
caaaggcctctatctggaagca

SEQ ID NO: 148581 - DNA, 22 bp, Artificial Sequence
  Synthetic oligonucleotide; CTC chr11 5197148 5197169 5197153 5197148 -
tatctggaagcaattacttaaa

SEQ ID NO: 148582 - DNA, 22 bp, Artificial Sequence
  Synthetic oligonucleotide; CTA chr11 5197146 5197167 5197151 5197146 -
tctggaagcaattacttaaaaa

SEQ ID NO: 148583 - DNA, 22 bp, Artificial Sequence
  Synthetic oligonucleotide; CTG chr11 5197142 5197163 5197147 5197142 -
gaagcaattacttaaaaaaata

SEQ ID NO: 148584 - DNA, 22 bp, Artificial Sequence
  Synthetic oligonucleotide; TTA chr11 5197132 5197153 5197137 5197132 -
cttaaaaaaataactaaacctc

SEQ ID NO: 148585 - DNA, 22 bp, Artificial Sequence
  Synthetic oligonucleotide; CTT chr11 5197129 5197150 5197134 5197129 -
aaaaaaataactaaacctctcc

SEQ ID NO: 148586 - DNA, 22 bp, Artificial Sequence
  Synthetic oligonucleotide; TTA chr11 5197128 5197149 5197133 5197128 -
aaaaaataactaaacctctcct

SEQ ID NO: 148587 - DNA, 22 bp, Artificial Sequence
  Synthetic oligonucleotide; CTA chr11 5197116 5197137 5197121 5197116 -
aacctctcctgaggaagaaaag

SEQ ID NO: 148588 - DNA, 22 bp, Artificial Sequence
  Synthetic oligonucleotide; CTC chr11 5197110 5197131 5197115 5197110 -
tcctgaggaagaaaaggcaatt

SEQ ID NO: 148589 - DNA, 22 bp, Artificial Sequence
  Synthetic oligonucleotide; CTC chr11 5197108 5197129 5197113 5197108 -
ctgaggaagaaaaggcaatttc

SEQ ID NO: 148590 - DNA, 22 bp, Artificial Sequence
  Synthetic oligonucleotide; CTG chr11 5197105 5197126 5197110 5197105 -
aggaagaaaaggcaatttcaga

SEQ ID NO: 148591 - DNA, 22 bp, Artificial Sequence
  Synthetic oligonucleotide; TTT chr11 5197087 5197108 5197092 5197087 -
cagagacatcagcccaggtcct

SEQ ID NO: 148592 - DNA, 22 bp, Artificial Sequence
  Synthetic oligonucleotide; TTC chr11 5197086 5197107 5197091 5197086 -
agagacatcagcccaggtcctg

SEQ ID NO: 148593 - DNA, 22 bp, Artificial Sequence
  Synthetic oligonucleotide; CTG chr11 5197064 5197085 5197069 5197064 -
aaaggaagagcagatggagaca

SEQ ID NO: 148594 - DNA, 22 bp, Artificial Sequence
  Synthetic oligonucleotide; TTT chr11 5197030 5197051 5197035 5197030 -
aaaacactgtctgttttgaaaa

SEQ ID NO: 148595 - DNA, 22 bp, Artificial Sequence
  Synthetic oligonucleotide; TTA chr11 5197029 5197050 5197034 5197029 -
aaacactgtctgttttgaaaag

SEQ ID NO: 148596 - DNA, 22 bp, Artificial Sequence
  Synthetic oligonucleotide; CTG chr11 5197021 5197042 5197026 5197021 -
tctgttttgaaaagctacatag

SEQ ID NO: 148597 - DNA, 22 bp, Artificial Sequence
  Synthetic oligonucleotide; CTG chr11 5197017 5197038 5197022 5197017 -
ttttgaaaagctacatagtagc

SEQ ID NO: 148598 - DNA, 22 bp, Artificial Sequence
  Synthetic oligonucleotide; TTT chr11 5197014 5197035 5197019 5197014 -
tgaaaagctacatagtagccag

SEQ ID NO: 148599 - DNA, 22 bp, Artificial Sequence
  Synthetic oligonucleotide; TTT chr11 5197013 5197034 5197018 5197013 -
gaaaagctacatagtagccagg

SEQ ID NO: 148600 - DNA, 22 bp, Artificial Sequence
  Synthetic oligonucleotide; TTG chr11 5197012 5197033 5197017 5197012 -
aaaagctacatagtagccaggt

SEQ ID NO: 148601 - DNA, 22 bp, Artificial Sequence
  Synthetic oligonucleotide; CTA chr11 5197004 5197025 5197009 5197004 -
catagtagccaggtggagacat

SEQ ID NO: 148602 - DNA, 22 bp, Artificial Sequence
  Synthetic oligonucleotide; TTT chr11 5196980 5197001 5196985 5196980 -
ttccatatatctcaaaaagcca

SEQ ID NO: 148603 - DNA, 22 bp, Artificial Sequence
  Synthetic oligonucleotide; TTT chr11 5196979 5197000 5196984 5196979 -
tccatatatctcaaaaagccag

SEQ ID NO: 148604 - DNA, 22 bp, Artificial Sequence
  Synthetic oligonucleotide; TTT chr11 5196978 5196999 5196983 5196978 -
ccatatatctcaaaaagccagc

SEQ ID NO: 148605 - DNA, 22 bp, Artificial Sequence
  Synthetic oligonucleotide; TTC chr11 5196977 5196998 5196982 5196977 -
catatatctcaaaaagccagct

SEQ ID NO: 148606 - DNA, 22 bp, Artificial Sequence
  Synthetic oligonucleotide; CTC chr11 5196967 5196988 5196972 5196967 -
aaaaagccagcttctaaggaaa

SEQ ID NO: 148607 - DNA, 22 bp, Artificial Sequence
  Synthetic oligonucleotide; CTT chr11 5196954 5196975 5196959 5196954 -
ctaaggaaacttgttttccatg

SEQ ID NO: 148608 - DNA, 22 bp, Artificial Sequence
  Synthetic oligonucleotide; TTC chr11 5196953 5196974 5196958 5196953 -
taaggaaacttgttttccatga

SEQ ID NO: 148609 - DNA, 22 bp, Artificial Sequence
  Synthetic oligonucleotide; CTA chr11 5196951 5196972 5196956 5196951 -
aggaaacttgttttccatgaat

SEQ ID NO: 148610 - DNA, 22 bp, Artificial Sequence
  Synthetic oligonucleotide; CTT chr11 5196942 5196963 5196947 5196942 -
gttttccatgaattaggcaaca

SEQ ID NO: 148611 - DNA, 22 bp, Artificial Sequence
  Synthetic oligonucleotide; TTG chr11 5196941 5196962 5196946 5196941 -
ttttccatgaattaggcaacaa

SEQ ID NO: 148612 - DNA, 22 bp, Artificial Sequence
  Synthetic oligonucleotide; TTT chr11 5196938 5196959 5196943 5196938 -
tccatgaattaggcaacaacag

SEQ ID NO: 148613 - DNA, 22 bp, Artificial Sequence
  Synthetic oligonucleotide; TTT chr11 5196937 5196958 5196942 5196937 -
ccatgaattaggcaacaacagc

SEQ ID NO: 148614 - DNA, 22 bp, Artificial Sequence
  Synthetic oligonucleotide; TTC chr11 5196936 5196957 5196941 5196936 -
catgaattaggcaacaacagct

SEQ ID NO: 148615 - DNA, 22 bp, Artificial Sequence
  Synthetic oligonucleotide; TTA chr11 5196927 5196948 5196932 5196927 -
ggcaacaacagctgaaactgtt

SEQ ID NO: 148616 - DNA, 22 bp, Artificial Sequence
  Synthetic oligonucleotide; CTG chr11 5196913 5196934 5196918 5196913 -
aaactgttgttgatgtggtagc

SEQ ID NO: 148617 - DNA, 22 bp, Artificial Sequence
  Synthetic oligonucleotide; CTG chr11 5196907 5196928 5196912 5196907 -
ttgttgatgtggtagcctgcag

SEQ ID NO: 148618 - DNA, 22 bp, Artificial Sequence
  Synthetic oligonucleotide; TTG chr11 5196904 5196925 5196909 5196904 -
ttgatgtggtagcctgcagagc

SEQ ID NO: 148619 - DNA, 22 bp, Artificial Sequence
  Synthetic oligonucleotide; TTG chr11 5196901 5196922 5196906 5196901 -
atgtggtagcctgcagagccag

SEQ ID NO: 148620 - DNA, 22 bp, Artificial Sequence
  Synthetic oligonucleotide; CTG chr11 5196888 5196909 5196893 5196888 -
cagagccagtgagaagcagtta

SEQ ID NO: 148621 - DNA, 22 bp, Artificial Sequence
  Synthetic oligonucleotide; TTA chr11 5196866 5196887 5196871 5196866 -
tcagattcctttgtaaggcctg

SEQ ID NO: 148622 - DNA, 22 bp, Artificial Sequence
  Synthetic oligonucleotide; TTC chr11 5196858 5196879 5196863 5196858 -
ctttgtaaggcctgcaaggcta

SEQ ID NO: 148623 - DNA, 22 bp, Artificial Sequence
  Synthetic oligonucleotide; CTT chr11 5196855 5196876 5196860 5196855 -
tgtaaggcctgcaaggctacta

SEQ ID NO: 148624 - DNA, 22 bp, Artificial Sequence
  Synthetic oligonucleotide; TTT chr11 5196854 5196875 5196859 5196854 -
gtaaggcctgcaaggctactat

SEQ ID NO: 148625 - DNA, 22 bp, Artificial Sequence
  Synthetic oligonucleotide; TTG chr11 5196853 5196874 5196858 5196853 -
taaggcctgcaaggctactatc

SEQ ID NO: 148626 - DNA, 22 bp, Artificial Sequence
  Synthetic oligonucleotide; CTG chr11 5196844 5196865 5196849 5196844 -
caaggctactatccagcgtcac

SEQ ID NO: 148627 - DNA, 22 bp, Artificial Sequence
  Synthetic oligonucleotide; CTA chr11 5196836 5196857 5196841 5196836 -
ctatccagcgtcactgagaaac

SEQ ID NO: 148628 - DNA, 22 bp, Artificial Sequence
  Synthetic oligonucleotide; CTA chr11 5196833 5196854 5196838 5196833 -
tccagcgtcactgagaaacgtt

SEQ ID NO: 148629 - DNA, 22 bp, Artificial Sequence
  Synthetic oligonucleotide; CTG chr11 5196820 5196841 5196825 5196820 -
agaaacgttacgaaaacagcca

SEQ ID NO: 148630 - DNA, 22 bp, Artificial Sequence
  Synthetic oligonucleotide; TTA chr11 5196810 5196831 5196815 5196810 -
cgaaaacagccacagtgatgtt

SEQ ID NO: 148631 - DNA, 22 bp, Artificial Sequence
  Synthetic oligonucleotide; TTA chr11 5196787 5196808 5196792 5196787 -
gggaaacacagttctcttttgc

SEQ ID NO: 148632 - DNA, 22 bp, Artificial Sequence
  Synthetic oligonucleotide; TTC chr11 5196773 5196794 5196778 5196773 -
tcttttgcctttttttttttaa

SEQ ID NO: 148633 - DNA, 22 bp, Artificial Sequence
  Synthetic oligonucleotide; CTC chr11 5196771 5196792 5196776 5196771 -
ttttgcctttttttttttaata

SEQ ID NO: 148634 - DNA, 22 bp, Artificial Sequence
  Synthetic oligonucleotide; CTT chr11 5196769 5196790 5196774 5196769 -
ttgcctttttttttttaatagg

SEQ ID NO: 148635 - DNA, 22 bp, Artificial Sequence
  Synthetic oligonucleotide; TTT chr11 5196768 5196789 5196773 5196768 -
tgcctttttttttttaataggt

SEQ ID NO: 148636 - DNA, 22 bp, Artificial Sequence
  Synthetic oligonucleotide; TTT chr11 5196767 5196788 5196772 5196767 -
gcctttttttttttaataggta

SEQ ID NO: 148637 - DNA, 22 bp, Artificial Sequence
  Synthetic oligonucleotide; TTG chr11 5196766 5196787 5196771 5196766 -
cctttttttttttaataggtag

SEQ ID NO: 148638 - DNA, 22 bp, Artificial Sequence
  Synthetic oligonucleotide; CTT chr11 5196762 5196783 5196767 5196762 -
tttttttttaataggtagactg

SEQ ID NO: 148639 - DNA, 22 bp, Artificial Sequence
  Synthetic oligonucleotide; TTT chr11 5196761 5196782 5196766 5196761 -
ttttttttaataggtagactgt

SEQ ID NO: 148640 - DNA, 22 bp, Artificial Sequence
  Synthetic oligonucleotide; TTT chr11 5196760 5196781 5196765 5196760 -
tttttttaataggtagactgtc

SEQ ID NO: 148641 - DNA, 22 bp, Artificial Sequence
  Synthetic oligonucleotide; TTT chr11 5196759 5196780 5196764 5196759 -
ttttttaataggtagactgtca

SEQ ID NO: 148642 - DNA, 22 bp, Artificial Sequence
  Synthetic oligonucleotide; TTT chr11 5196758 5196779 5196763 5196758 -
tttttaataggtagactgtcat

SEQ ID NO: 148643 - DNA, 22 bp, Artificial Sequence
  Synthetic oligonucleotide; TTT chr11 5196757 5196778 5196762 5196757 -
ttttaataggtagactgtcata

SEQ ID NO: 148644 - DNA, 22 bp, Artificial Sequence
  Synthetic oligonucleotide; TTT chr11 5196756 5196777 5196761 5196756 -
tttaataggtagactgtcatat

SEQ ID NO: 148645 - DNA, 22 bp, Artificial Sequence
  Synthetic oligonucleotide; TTT chr11 5196755 5196776 5196760 5196755 -
ttaataggtagactgtcatatc

SEQ ID NO: 148646 - DNA, 22 bp, Artificial Sequence
  Synthetic oligonucleotide; TTT chr11 5196754 5196775 5196759 5196754 -
taataggtagactgtcatatca

SEQ ID NO: 148647 - DNA, 22 bp, Artificial Sequence
  Synthetic oligonucleotide; TTT chr11 5196753 5196774 5196758 5196753 -
aataggtagactgtcatatcat

SEQ ID NO: 148648 - DNA, 22 bp, Artificial Sequence
  Synthetic oligonucleotide; TTA chr11 5196752 5196773 5196757 5196752 -
ataggtagactgtcatatcatt

SEQ ID NO: 148649 - DNA, 22 bp, Artificial Sequence
  Synthetic oligonucleotide; CTG chr11 5196740 5196761 5196745 5196740 -
tcatatcattgtaactgctgcc

SEQ ID NO: 148650 - DNA, 22 bp, Artificial Sequence
  Synthetic oligonucleotide; TTG chr11 5196729 5196750 5196734 5196729 -
taactgctgccttaaatgaagt

SEQ ID NO: 148651 - DNA, 22 bp, Artificial Sequence
  Synthetic oligonucleotide; CTG chr11 5196723 5196744 5196728 5196723 -
ctgccttaaatgaagtcacggt

SEQ ID NO: 148652 - DNA, 22 bp, Artificial Sequence
  Synthetic oligonucleotide; CTG chr11 5196720 5196741 5196725 5196720 -
ccttaaatgaagtcacggttat

SEQ ID NO: 148653 - DNA, 22 bp, Artificial Sequence
  Synthetic oligonucleotide; CTT chr11 5196716 5196737 5196721 5196716 -
aaatgaagtcacggttattata

SEQ ID NO: 148654 - DNA, 22 bp, Artificial Sequence
  Synthetic oligonucleotide; TTA chr11 5196715 5196736 5196720 5196715 -
aatgaagtcacggttattataa

SEQ ID NO: 148655 - DNA, 22 bp, Artificial Sequence
  Synthetic oligonucleotide; TTA chr11 5196699 5196720 5196704 5196699 -
ttataataaggagaaaacaaaa

SEQ ID NO: 148656 - DNA, 22 bp, Artificial Sequence
  Synthetic oligonucleotide; TTA chr11 5196696 5196717 5196701 5196696 -
taataaggagaaaacaaaaata

SEQ ID NO: 148657 - DNA, 22 bp, Artificial Sequence
  Synthetic oligonucleotide; TTG chr11 5196671 5196692 5196676 5196671 -
ccgagaacaaggtgacaaaagt

SEQ ID NO: 148658 - DNA, 22 bp, Artificial Sequence
  Synthetic oligonucleotide; TTC chr11 5196642 5196663 5196647 5196642 -
agaaaatcagaaagtctagtcc

SEQ ID NO: 148659 - DNA, 22 bp, Artificial Sequence
  Synthetic oligonucleotide; CTA chr11 5196624 5196645 5196629 5196624 -
gtccattcaattgctattcatt

SEQ ID NO: 148660 - DNA, 22 bp, Artificial Sequence
  Synthetic oligonucleotide; TTC chr11 5196616 5196637 5196621 5196616 -
aattgctattcatttaactctt

SEQ ID NO: 148661 - DNA, 22 bp, Artificial Sequence
  Synthetic oligonucleotide; TTG chr11 5196611 5196632 5196616 5196611 -
ctattcatttaactcttacacc

SEQ ID NO: 148662 - DNA, 22 bp, Artificial Sequence
  Synthetic oligonucleotide; CTA chr11 5196608 5196629 5196613 5196608 -
ttcatttaactcttacaccgaa

SEQ ID NO: 148663 - DNA, 22 bp, Artificial Sequence
  Synthetic oligonucleotide; TTC chr11 5196605 5196626 5196610 5196605 -
atttaactcttacaccgaaaag

SEQ ID NO: 148664 - DNA, 22 bp, Artificial Sequence
  Synthetic oligonucleotide; TTT chr11 5196601 5196622 5196606 5196601 -
aactcttacaccgaaaagctaa

SEQ ID NO: 148665 - DNA, 22 bp, Artificial Sequence
  Synthetic oligonucleotide; TTA chr11 5196600 5196621 5196605 5196600 -
actcttacaccgaaaagctaag

SEQ ID NO: 148666 - DNA, 22 bp, Artificial Sequence
  Synthetic oligonucleotide; CTC chr11 5196596 5196617 5196601 5196596 -
ttacaccgaaaagctaaggtcc

SEQ ID NO: 148667 - DNA, 22 bp, Artificial Sequence
  Synthetic oligonucleotide; CTT chr11 5196594 5196615 5196599 5196594 -
acaccgaaaagctaaggtccag

SEQ ID NO: 148668 - DNA, 22 bp, Artificial Sequence
  Synthetic oligonucleotide; TTA chr11 5196593 5196614 5196598 5196593 -
caccgaaaagctaaggtccagt

SEQ ID NO: 148669 - DNA, 22 bp, Artificial Sequence
  Synthetic oligonucleotide; CTA chr11 5196580 5196601 5196585 5196580 -
aggtccagtgggagaaatcagt

SEQ ID NO: 148670 - DNA, 22 bp, Artificial Sequence
  Synthetic oligonucleotide; TTC chr11 5196553 5196574 5196558 5196553 -
ttagaagtgagaggacatgatt

SEQ ID NO: 148671 - DNA, 22 bp, Artificial Sequence
  Synthetic oligonucleotide; CTT chr11 5196551 5196572 5196556 5196551 -
agaagtgagaggacatgattca

SEQ ID NO: 148672 - DNA, 22 bp, Artificial Sequence
  Synthetic oligonucleotide; TTA chr11 5196550 5196571 5196555 5196550 -
gaagtgagaggacatgattcag

SEQ ID NO: 148673 - DNA, 22 bp, Artificial Sequence
  Synthetic oligonucleotide; TTC chr11 5196530 5196551 5196535 5196530 -
aggattagaaatgtgtttttag

SEQ ID NO: 148674 - DNA, 22 bp, Artificial Sequence
  Synthetic oligonucleotide; TTA chr11 5196523 5196544 5196528 5196523 -
gaaatgtgtttttagtaaaaat

SEQ ID NO: 148675 - DNA, 22 bp, Artificial Sequence
  Synthetic oligonucleotide; TTT chr11 5196512 5196533 5196517 5196512 -
ttagtaaaaatgatctgctaat

SEQ ID NO: 148676 - DNA, 22 bp, Artificial Sequence
  Synthetic oligonucleotide; TTT chr11 5196511 5196532 5196516 5196511 -
tagtaaaaatgatctgctaata

SEQ ID NO: 148677 - DNA, 22 bp, Artificial Sequence
  Synthetic oligonucleotide; TTT chr11 5196510 5196531 5196515 5196510 -
agtaaaaatgatctgctaataa

SEQ ID NO: 148678 - DNA, 22 bp, Artificial Sequence
  Synthetic oligonucleotide; TTA chr11 5196509 5196530 5196514 5196509 -
gtaaaaatgatctgctaataat

SEQ ID NO: 148679 - DNA, 22 bp, Artificial Sequence
  Synthetic oligonucleotide; CTG chr11 5196495 5196516 5196500 5196495 -
ctaataataaatccacaggcag

SEQ ID NO: 148680 - DNA, 22 bp, Artificial Sequence
  Synthetic oligonucleotide; CTA chr11 5196492 5196513 5196497 5196492 -
ataataaatccacaggcagatg

SEQ ID NO: 148681 - DNA, 22 bp, Artificial Sequence
  Synthetic oligonucleotide; TTC chr11 5196467 5196488 5196472 5196467 -
actgtacaccagcagtcttcaa

SEQ ID NO: 148682 - DNA, 22 bp, Artificial Sequence
  Synthetic oligonucleotide; CTG chr11 5196463 5196484 5196468 5196463 -
tacaccagcagtcttcaatgtt

SEQ ID NO: 148683 - DNA, 22 bp, Artificial Sequence
  Synthetic oligonucleotide; CTT chr11 5196448 5196469 5196453 5196448 -
caatgtttttggtaccagggac

SEQ ID NO: 148684 - DNA, 22 bp, Artificial Sequence
  Synthetic oligonucleotide; TTC chr11 5196447 5196468 5196452 5196447 -
aatgtttttggtaccagggact

SEQ ID NO: 148685 - DNA, 22 bp, Artificial Sequence
  Synthetic oligonucleotide; TTT chr11 5196440 5196461 5196445 5196440 -
ttggtaccagggactgcttttg

SEQ ID NO: 148686 - DNA, 22 bp, Artificial Sequence
  Synthetic oligonucleotide; TTT chr11 5196439 5196460 5196444 5196439 -
tggtaccagggactgcttttgt

SEQ ID NO: 148687 - DNA, 22 bp, Artificial Sequence
  Synthetic oligonucleotide; TTT chr11 5196438 5196459 5196443 5196438 -
ggtaccagggactgcttttgtg

SEQ ID NO: 148688 - DNA, 22 bp, Artificial Sequence
  Synthetic oligonucleotide; TTG chr11 5196437 5196458 5196442 5196437 -
gtaccagggactgcttttgtgg

SEQ ID NO: 148689 - DNA, 22 bp, Artificial Sequence
  Synthetic oligonucleotide; CTG chr11 5196424 5196445 5196429 5196424 -
cttttgtggaagacaaggtgca

SEQ ID NO: 148690 - DNA, 22 bp, Artificial Sequence
  Synthetic oligonucleotide; CTT chr11 5196421 5196442 5196426 5196421 -
ttgtggaagacaaggtgcagga

SEQ ID NO: 148691 - DNA, 22 bp, Artificial Sequence
  Synthetic oligonucleotide; TTT chr11 5196420 5196441 5196425 5196420 -
tgtggaagacaaggtgcaggag

SEQ ID NO: 148692 - DNA, 22 bp, Artificial Sequence
  Synthetic oligonucleotide; TTT chr11 5196419 5196440 5196424 5196419 -
gtggaagacaaggtgcaggagg

SEQ ID NO: 148693 - DNA, 22 bp, Artificial Sequence
  Synthetic oligonucleotide; TTG chr11 5196418 5196439 5196423 5196418 -
tggaagacaaggtgcaggaggg

SEQ ID NO: 148694 - DNA, 22 bp, Artificial Sequence
  Synthetic oligonucleotide; TTT chr11 5196388 5196409 5196393 5196388 -
caggatgaaactgttccacctc

SEQ ID NO: 148695 - DNA, 22 bp, Artificial Sequence
  Synthetic oligonucleotide; TTC chr11 5196387 5196408 5196392 5196387 -
aggatgaaactgttccacctca

SEQ ID NO: 148696 - DNA, 22 bp, Artificial Sequence
  Synthetic oligonucleotide; CTG chr11 5196375 5196396 5196380 5196375 -
ttccacctcagagcattaggca

SEQ ID NO: 148697 - DNA, 22 bp, Artificial Sequence
  Synthetic oligonucleotide; TTC chr11 5196372 5196393 5196377 5196372 -
cacctcagagcattaggcatta

SEQ ID NO: 148698 - DNA, 22 bp, Artificial Sequence
  Synthetic oligonucleotide; CTC chr11 5196366 5196387 5196371 5196366 -
agagcattaggcattagattct

SEQ ID NO: 148699 - DNA, 22 bp, Artificial Sequence
  Synthetic oligonucleotide; TTA chr11 5196357 5196378 5196362 5196357 -
ggcattagattctcataagaag

SEQ ID NO: 148700 - DNA, 22 bp, Artificial Sequence
  Synthetic oligonucleotide; TTA chr11 5196350 5196371 5196355 5196350 -
gattctcataagaagccgcaac

SEQ ID NO: 148701 - DNA, 22 bp, Artificial Sequence
  Synthetic oligonucleotide; TTC chr11 5196345 5196366 5196350 5196345 -
tcataagaagccgcaacctaga

SEQ ID NO: 148702 - DNA, 22 bp, Artificial Sequence
  Synthetic oligonucleotide; CTC chr11 5196343 5196364 5196348 5196343 -
ataagaagccgcaacctagatc

SEQ ID NO: 148703 - DNA, 22 bp, Artificial Sequence
  Synthetic oligonucleotide; CTA chr11 5196325 5196346 5196330 5196325 -
gatcccttgcatgcctctatga

SEQ ID NO: 148704 - DNA, 22 bp, Artificial Sequence
  Synthetic oligonucleotide; CTT chr11 5196317 5196338 5196322 5196317 -
gcatgcctctatgagaatctaa

SEQ ID NO: 148705 - DNA, 22 bp, Artificial Sequence
  Synthetic oligonucleotide; TTG chr11 5196316 5196337 5196321 5196316 -
catgcctctatgagaatctaat

SEQ ID NO: 148706 - DNA, 22 bp, Artificial Sequence
  Synthetic oligonucleotide; CTC chr11 5196308 5196329 5196313 5196308 -
tatgagaatctaatgccgccac

SEQ ID NO: 148707 - DNA, 22 bp, Artificial Sequence
  Synthetic oligonucleotide; CTA chr11 5196306 5196327 5196311 5196306 -
tgagaatctaatgccgccactg

SEQ ID NO: 148708 - DNA, 22 bp, Artificial Sequence
  Synthetic oligonucleotide; CTA chr11 5196296 5196317 5196301 5196296 -
atgccgccactgccgatgtgac

SEQ ID NO: 148709 - DNA, 22 bp, Artificial Sequence
  Synthetic oligonucleotide; CTG chr11 5196284 5196305 5196289 5196284 -
ccgatgtgacaggaggaggagc

SEQ ID NO: 148710 - DNA, 22 bp, Artificial Sequence
  Synthetic oligonucleotide; CTC chr11 5196260 5196281 5196265 5196260 -
aggcagtaatgcttgctcatcc

SEQ ID NO: 148711 - DNA, 22 bp, Artificial Sequence
  Synthetic oligonucleotide; CTT chr11 5196246 5196267 5196251 5196246 -
gctcatccccctgctgtgagac

SEQ ID NO: 148712 - DNA, 22 bp, Artificial Sequence
  Synthetic oligonucleotide; TTG chr11 5196245 5196266 5196250 5196245 -
ctcatccccctgctgtgagacc

SEQ ID NO: 148713 - DNA, 22 bp, Artificial Sequence
  Synthetic oligonucleotide; CTC chr11 5196242 5196263 5196247 5196242 -
atccccctgctgtgagaccagg

SEQ ID NO: 148714 - DNA, 22 bp, Artificial Sequence
  Synthetic oligonucleotide; CTG chr11 5196233 5196254 5196238 5196233 -
ctgtgagaccaggttcctagca

SEQ ID NO: 148715 - DNA, 22 bp, Artificial Sequence
  Synthetic oligonucleotide; CTG chr11 5196230 5196251 5196235 5196230 -
tgagaccaggttcctagcaggc

SEQ ID NO: 148716 - DNA, 22 bp, Artificial Sequence
  Synthetic oligonucleotide; TTC chr11 5196217 5196238 5196222 5196217 -
ctagcaggccacggaccagtac

SEQ ID NO: 148717 - DNA, 22 bp, Artificial Sequence
  Synthetic oligonucleotide; CTA chr11 5196214 5196235 5196219 5196214 -
gcaggccacggaccagtactgg

SEQ ID NO: 148718 - DNA, 22 bp, Artificial Sequence
  Synthetic oligonucleotide; CTG chr11 5196193 5196214 5196198 5196193 -
gtaagtggccaggactgctcta

SEQ ID NO: 148719 - DNA, 22 bp, Artificial Sequence
  Synthetic oligonucleotide; CTG chr11 5196176 5196197 5196181 5196176 -
ctctacactatacctccctatt

SEQ ID NO: 148720 - DNA, 22 bp, Artificial Sequence
  Synthetic oligonucleotide; CTC chr11 5196173 5196194 5196178 5196173 -
tacactatacctccctattttc

SEQ ID NO: 148721 - DNA, 22 bp, Artificial Sequence
  Synthetic oligonucleotide; CTA chr11 5196171 5196192 5196176 5196171 -
cactatacctccctattttcct

SEQ ID NO: 148722 - DNA, 22 bp, Artificial Sequence
  Synthetic oligonucleotide; CTA chr11 5196166 5196187 5196171 5196166 -
tacctccctattttcctaggct

SEQ ID NO: 148723 - DNA, 22 bp, Artificial Sequence
  Synthetic oligonucleotide; CTC chr11 5196160 5196181 5196165 5196160 -
cctattttcctaggcttatcaa

SEQ ID NO: 148724 - DNA, 22 bp, Artificial Sequence
  Synthetic oligonucleotide; CTA chr11 5196156 5196177 5196161 5196156 -
ttttcctaggcttatcaaaatc

SEQ ID NO: 148725 - DNA, 22 bp, Artificial Sequence
  Synthetic oligonucleotide; TTT chr11 5196153 5196174 5196158 5196153 -
tcctaggcttatcaaaatcgta

SEQ ID NO: 148726 - DNA, 22 bp, Artificial Sequence
  Synthetic oligonucleotide; TTT chr11 5196152 5196173 5196157 5196152 -
cctaggcttatcaaaatcgtat

SEQ ID NO: 148727 - DNA, 22 bp, Artificial Sequence
  Synthetic oligonucleotide; TTC chr11 5196151 5196172 5196156 5196151 -
ctaggcttatcaaaatcgtatt

SEQ ID NO: 148728 - DNA, 22 bp, Artificial Sequence
  Synthetic oligonucleotide; CTA chr11 5196148 5196169 5196153 5196148 -
ggcttatcaaaatcgtattgtt

SEQ ID NO: 148729 - DNA, 22 bp, Artificial Sequence
  Synthetic oligonucleotide; CTT chr11 5196143 5196164 5196148 5196143 -
atcaaaatcgtattgttaaaca

SEQ ID NO: 148730 - DNA, 22 bp, Artificial Sequence
  Synthetic oligonucleotide; TTA chr11 5196142 5196163 5196147 5196142 -
tcaaaatcgtattgttaaacag

SEQ ID NO: 148731 - DNA, 22 bp, Artificial Sequence
  Synthetic oligonucleotide; TTG chr11 5196128 5196149 5196133 5196128 -
ttaaacagacttaagagatgtt

SEQ ID NO: 148732 - DNA, 22 bp, Artificial Sequence
  Synthetic oligonucleotide; TTA chr11 5196125 5196146 5196130 5196125 -
aacagacttaagagatgttcta

SEQ ID NO: 148733 - DNA, 22 bp, Artificial Sequence
  Synthetic oligonucleotide; CTT chr11 5196116 5196137 5196121 5196116 -
aagagatgttctacttgaggtt

SEQ ID NO: 148734 - DNA, 22 bp, Artificial Sequence
  Synthetic oligonucleotide; TTA chr11 5196115 5196136 5196120 5196115 -
agagatgttctacttgaggttg

SEQ ID NO: 148735 - DNA, 22 bp, Artificial Sequence
  Synthetic oligonucleotide; TTC chr11 5196105 5196126 5196110 5196105 -
tacttgaggttgtgtctccatt

SEQ ID NO: 148736 - DNA, 22 bp, Artificial Sequence
  Synthetic oligonucleotide; CTA chr11 5196103 5196124 5196108 5196103 -
cttgaggttgtgtctccattcc

SEQ ID NO: 148737 - DNA, 22 bp, Artificial Sequence
  Synthetic oligonucleotide; CTT chr11 5196100 5196121 5196105 5196100 -
gaggttgtgtctccattcccta

SEQ ID NO: 148738 - DNA, 22 bp, Artificial Sequence
  Synthetic oligonucleotide; TTG chr11 5196099 5196120 5196104 5196099 -
aggttgtgtctccattccctag

SEQ ID NO: 148739 - DNA, 22 bp, Artificial Sequence
  Synthetic oligonucleotide; TTG chr11 5196093 5196114 5196098 5196093 -
tgtctccattccctaggatatt

SEQ ID NO: 148740 - DNA, 22 bp, Artificial Sequence
  Synthetic oligonucleotide; CTC chr11 5196087 5196108 5196092 5196087 -
cattccctaggatatttgttac

SEQ ID NO: 148741 - DNA, 22 bp, Artificial Sequence
  Synthetic oligonucleotide; TTC chr11 5196082 5196103 5196087 5196082 -
cctaggatatttgttaccatta

SEQ ID NO: 148742 - DNA, 22 bp, Artificial Sequence
  Synthetic oligonucleotide; CTA chr11 5196078 5196099 5196083 5196078 -
ggatatttgttaccattacttg

SEQ ID NO: 148743 - DNA, 22 bp, Artificial Sequence
  Synthetic oligonucleotide; TTT chr11 5196070 5196091 5196075 5196070 -
gttaccattacttgcagaagat

SEQ ID NO: 148744 - DNA, 22 bp, Artificial Sequence
  Synthetic oligonucleotide; TTG chr11 5196069 5196090 5196074 5196069 -
ttaccattacttgcagaagata

SEQ ID NO: 148745 - DNA, 22 bp, Artificial Sequence
  Synthetic oligonucleotide; TTA chr11 5196066 5196087 5196071 5196066 -
ccattacttgcagaagataatt

SEQ ID NO: 148746 - DNA, 22 bp, Artificial Sequence
  Synthetic oligonucleotide; TTA chr11 5196060 5196081 5196065 5196060 -
cttgcagaagataattgctaga

SEQ ID NO: 148747 - DNA, 22 bp, Artificial Sequence
  Synthetic oligonucleotide; CTT chr11 5196057 5196078 5196062 5196057 -
gcagaagataattgctagagta

SEQ ID NO: 148748 - DNA, 22 bp, Artificial Sequence
  Synthetic oligonucleotide; TTG chr11 5196056 5196077 5196061 5196056 -
cagaagataattgctagagtag

SEQ ID NO: 148749 - DNA, 22 bp, Artificial Sequence
  Synthetic oligonucleotide; TTG chr11 5196043 5196064 5196048 5196043 -
ctagagtagtgaatagaggcct

SEQ ID NO: 148750 - DNA, 22 bp, Artificial Sequence
  Synthetic oligonucleotide; CTA chr11 5196040 5196061 5196045 5196040 -
gagtagtgaatagaggcctcca

SEQ ID NO: 148751 - DNA, 22 bp, Artificial Sequence
  Synthetic oligonucleotide; CTC chr11 5196020 5196041 5196025 5196020 -
cagatgaaggaaataaaaatag

SEQ ID NO: 148752 - DNA, 22 bp, Artificial Sequence
  Synthetic oligonucleotide; TTT chr11 5195991 5196012 5195996 5195991 -
tcccagaagtctcttgcagaaa

SEQ ID NO: 148753 - DNA, 22 bp, Artificial Sequence
  Synthetic oligonucleotide; TTT chr11 5195990 5196011 5195995 5195990 -
cccagaagtctcttgcagaaac

SEQ ID NO: 148754 - DNA, 22 bp, Artificial Sequence
  Synthetic oligonucleotide; TTC chr11 5195989 5196010 5195994 5195989 -
ccagaagtctcttgcagaaact

SEQ ID NO: 148755 - DNA, 22 bp, Artificial Sequence
  Synthetic oligonucleotide; CTC chr11 5195978 5195999 5195983 5195978 -
ttgcagaaacttaaaaattaat

SEQ ID NO: 148756 - DNA, 22 bp, Artificial Sequence
  Synthetic oligonucleotide; CTT chr11 5195976 5195997 5195981 5195976 -
gcagaaacttaaaaattaatgc

SEQ ID NO: 148757 - DNA, 22 bp, Artificial Sequence
  Synthetic oligonucleotide; TTG chr11 5195975 5195996 5195980 5195975 -
cagaaacttaaaaattaatgcc

SEQ ID NO: 148758 - DNA, 22 bp, Artificial Sequence
  Synthetic oligonucleotide; CTT chr11 5195966 5195987 5195971 5195966 -
aaaaattaatgccaacctagcc

SEQ ID NO: 148759 - DNA, 22 bp, Artificial Sequence
  Synthetic oligonucleotide; TTA chr11 5195965 5195986 5195970 5195965 -
aaaattaatgccaacctagcca

SEQ ID NO: 148760 - DNA, 22 bp, Artificial Sequence
  Synthetic oligonucleotide; TTA chr11 5195958 5195979 5195963 5195958 -
atgccaacctagccaagaacac

SEQ ID NO: 148761 - DNA, 22 bp, Artificial Sequence
  Synthetic oligonucleotide; CTA chr11 5195947 5195968 5195952 5195947 -
gccaagaacacccctgcagtag

SEQ ID NO: 148762 - DNA, 22 bp, Artificial Sequence
  Synthetic oligonucleotide; CTG chr11 5195931 5195952 5195936 5195931 -
cagtaggagtcgatgtcctaaa

SEQ ID NO: 148763 - DNA, 22 bp, Artificial Sequence
  Synthetic oligonucleotide; CTA chr11 5195911 5195932 5195916 5195911 -
aagcttttccagtaaaagtgtg

SEQ ID NO: 148764 - DNA, 22 bp, Artificial Sequence
  Synthetic oligonucleotide; CTT chr11 5195905 5195926 5195910 5195905 -
ttccagtaaaagtgtggtttct

SEQ ID NO: 148765 - DNA, 22 bp, Artificial Sequence
  Synthetic oligonucleotide; TTT chr11 5195904 5195925 5195909 5195904 -
tccagtaaaagtgtggtttctg

SEQ ID NO: 148766 - DNA, 22 bp, Artificial Sequence
  Synthetic oligonucleotide; TTT chr11 5195903 5195924 5195908 5195903 -
ccagtaaaagtgtggtttctgc

SEQ ID NO: 148767 - DNA, 22 bp, Artificial Sequence
  Synthetic oligonucleotide; TTC chr11 5195902 5195923 5195907 5195902 -
cagtaaaagtgtggtttctgcc

SEQ ID NO: 148768 - DNA, 22 bp, Artificial Sequence
  Synthetic oligonucleotide; TTT chr11 5195885 5195906 5195890 5195885 -
ctgcccctgcagtcttggcacc

SEQ ID NO: 148769 - DNA, 22 bp, Artificial Sequence
  Synthetic oligonucleotide; TTC chr11 5195884 5195905 5195889 5195884 -
tgcccctgcagtcttggcacca

SEQ ID NO: 148770 - DNA, 22 bp, Artificial Sequence
  Synthetic oligonucleotide; CTG chr11 5195882 5195903 5195887 5195882 -
cccctgcagtcttggcaccatg

SEQ ID NO: 148771 - DNA, 22 bp, Artificial Sequence
  Synthetic oligonucleotide; CTG chr11 5195876 5195897 5195881 5195876 -
cagtcttggcaccatgtaatgg

SEQ ID NO: 148772 - DNA, 22 bp, Artificial Sequence
  Synthetic oligonucleotide; CTT chr11 5195869 5195890 5195874 5195869 -
ggcaccatgtaatggcacatag

SEQ ID NO: 148773 - DNA, 22 bp, Artificial Sequence
  Synthetic oligonucleotide; TTG chr11 5195868 5195889 5195873 5195868 -
gcaccatgtaatggcacataga

SEQ ID NO: 148774 - DNA, 22 bp, Artificial Sequence
  Synthetic oligonucleotide; CTT chr11 5195834 5195855 5195839 5195834 -
tcaggttgcagccagaactgag

SEQ ID NO: 148775 - DNA, 22 bp, Artificial Sequence
  Synthetic oligonucleotide; TTT chr11 5195833 5195854 5195838 5195833 -
caggttgcagccagaactgagg

SEQ ID NO: 148776 - DNA, 22 bp, Artificial Sequence
  Synthetic oligonucleotide; TTC chr11 5195832 5195853 5195837 5195832 -
aggttgcagccagaactgagga

SEQ ID NO: 148777 - DNA, 22 bp, Artificial Sequence
  Synthetic oligonucleotide; TTG chr11 5195826 5195847 5195831 5195826 -
cagccagaactgaggaatcaat

SEQ ID NO: 148778 - DNA, 22 bp, Artificial Sequence
  Synthetic oligonucleotide; CTG chr11 5195814 5195835 5195819 5195814 -
aggaatcaatcggtgtttagct

SEQ ID NO: 148779 - DNA, 22 bp, Artificial Sequence
  Synthetic oligonucleotide; TTT chr11 5195796 5195817 5195801 5195796 -
agcttttgagatgctggtaatg

SEQ ID NO: 148780 - DNA, 22 bp, Artificial Sequence
  Synthetic oligonucleotide; TTA chr11 5195795 5195816 5195800 5195795 -
gcttttgagatgctggtaatgt

SEQ ID NO: 148781 - DNA, 22 bp, Artificial Sequence
  Synthetic oligonucleotide; CTT chr11 5195791 5195812 5195796 5195791 -
ttgagatgctggtaatgttctc

SEQ ID NO: 148782 - DNA, 22 bp, Artificial Sequence
  Synthetic oligonucleotide; TTT chr11 5195790 5195811 5195795 5195790 -
tgagatgctggtaatgttctct

SEQ ID NO: 148783 - DNA, 22 bp, Artificial Sequence
  Synthetic oligonucleotide; TTT chr11 5195789 5195810 5195794 5195789 -
gagatgctggtaatgttctctt

SEQ ID NO: 148784 - DNA, 22 bp, Artificial Sequence
  Synthetic oligonucleotide; TTG chr11 5195788 5195809 5195793 5195788 -
agatgctggtaatgttctcttt

SEQ ID NO: 148785 - DNA, 22 bp, Artificial Sequence
  Synthetic oligonucleotide; CTG chr11 5195780 5195801 5195785 5195780 -
gtaatgttctctttcttggtct

SEQ ID NO: 148786 - DNA, 22 bp, Artificial Sequence
  Synthetic oligonucleotide; TTC chr11 5195771 5195792 5195776 5195771 -
tctttcttggtctgagtgtttg

SEQ ID NO: 148787 - DNA, 22 bp, Artificial Sequence
  Synthetic oligonucleotide; CTC chr11 5195769 5195790 5195774 5195769 -
tttcttggtctgagtgtttgtt

SEQ ID NO: 148788 - DNA, 22 bp, Artificial Sequence
  Synthetic oligonucleotide; CTT chr11 5195767 5195788 5195772 5195767 -
tcttggtctgagtgtttgttaa

SEQ ID NO: 148789 - DNA, 22 bp, Artificial Sequence
  Synthetic oligonucleotide; TTT chr11 5195766 5195787 5195771 5195766 -
cttggtctgagtgtttgttaaa

SEQ ID NO: 148790 - DNA, 22 bp, Artificial Sequence
  Synthetic oligonucleotide; TTC chr11 5195765 5195786 5195770 5195765 -
ttggtctgagtgtttgttaaaa

SEQ ID NO: 148791 - DNA, 22 bp, Artificial Sequence
  Synthetic oligonucleotide; CTT chr11 5195763 5195784 5195768 5195763 -
ggtctgagtgtttgttaaaagc

SEQ ID NO: 148792 - DNA, 22 bp, Artificial Sequence
  Synthetic oligonucleotide; TTG chr11 5195762 5195783 5195767 5195762 -
gtctgagtgtttgttaaaagct

SEQ ID NO: 148793 - DNA, 22 bp, Artificial Sequence
  Synthetic oligonucleotide; CTG chr11 5195757 5195778 5195762 5195757 -
agtgtttgttaaaagcttttgc

SEQ ID NO: 148794 - DNA, 22 bp, Artificial Sequence
  Synthetic oligonucleotide; TTT chr11 5195750 5195771 5195755 5195750 -
gttaaaagcttttgctaatttt

SEQ ID NO: 148795 - DNA, 22 bp, Artificial Sequence
  Synthetic oligonucleotide; TTG chr11 5195749 5195770 5195754 5195749 -
ttaaaagcttttgctaattttg

SEQ ID NO: 148796 - DNA, 22 bp, Artificial Sequence
  Synthetic oligonucleotide; TTA chr11 5195746 5195767 5195751 5195746 -
aaagcttttgctaattttgtgt

SEQ ID NO: 148797 - DNA, 22 bp, Artificial Sequence
  Synthetic oligonucleotide; CTT chr11 5195739 5195760 5195744 5195739 -
ttgctaattttgtgtcaattta

SEQ ID NO: 148798 - DNA, 22 bp, Artificial Sequence
  Synthetic oligonucleotide; TTT chr11 5195738 5195759 5195743 5195738 -
tgctaattttgtgtcaatttaa

SEQ ID NO: 148799 - DNA, 22 bp, Artificial Sequence
  Synthetic oligonucleotide; TTT chr11 5195737 5195758 5195742 5195737 -
gctaattttgtgtcaatttaac

SEQ ID NO: 148800 - DNA, 22 bp, Artificial Sequence
  Synthetic oligonucleotide; TTG chr11 5195736 5195757 5195741 5195736 -
ctaattttgtgtcaatttaaca

SEQ ID NO: 148801 - DNA, 22 bp, Artificial Sequence
  Synthetic oligonucleotide; CTA chr11 5195733 5195754 5195738 5195733 -
attttgtgtcaatttaacaaac

SEQ ID NO: 148802 - DNA, 22 bp, Artificial Sequence
  Synthetic oligonucleotide; TTT chr11 5195729 5195750 5195734 5195729 -
tgtgtcaatttaacaaactgta

SEQ ID NO: 148803 - DNA, 22 bp, Artificial Sequence
  Synthetic oligonucleotide; TTT chr11 5195728 5195749 5195733 5195728 -
gtgtcaatttaacaaactgtac

SEQ ID NO: 148804 - DNA, 22 bp, Artificial Sequence
  Synthetic oligonucleotide; TTG chr11 5195727 5195748 5195732 5195727 -
tgtcaatttaacaaactgtact

SEQ ID NO: 148805 - DNA, 22 bp, Artificial Sequence
  Synthetic oligonucleotide; TTT chr11 5195718 5195739 5195723 5195718 -
aacaaactgtacttttatttat

SEQ ID NO: 148806 - DNA, 22 bp, Artificial Sequence
  Synthetic oligonucleotide; TTA chr11 5195717 5195738 5195722 5195717 -
acaaactgtacttttatttatg

SEQ ID NO: 148807 - DNA, 22 bp, Artificial Sequence
  Synthetic oligonucleotide; CTG chr11 5195709 5195730 5195714 5195709 -
tacttttatttatgtatttttc

SEQ ID NO: 148808 - DNA, 22 bp, Artificial Sequence
  Synthetic oligonucleotide; CTT chr11 5195704 5195725 5195709 5195704 -
ttatttatgtatttttctgtac

SEQ ID NO: 148809 - DNA, 22 bp, Artificial Sequence
  Synthetic oligonucleotide; TTT chr11 5195703 5195724 5195708 5195703 -
tatttatgtatttttctgtact

SEQ ID NO: 148810 - DNA, 22 bp, Artificial Sequence
  Synthetic oligonucleotide; TTT chr11 5195702 5195723 5195707 5195702 -
atttatgtatttttctgtactg

SEQ ID NO: 148811 - DNA, 22 bp, Artificial Sequence
  Synthetic oligonucleotide; TTA chr11 5195701 5195722 5195706 5195701 -
tttatgtatttttctgtactga

SEQ ID NO: 148812 - DNA, 22 bp, Artificial Sequence
  Synthetic oligonucleotide; TTT chr11 5195698 5195719 5195703 5195698 -
atgtatttttctgtactgaata

SEQ ID NO: 148813 - DNA, 22 bp, Artificial Sequence
  Synthetic oligonucleotide; TTA chr11 5195697 5195718 5195702 5195697 -
tgtatttttctgtactgaataa

SEQ ID NO: 148814 - DNA, 22 bp, Artificial Sequence
  Synthetic oligonucleotide; TTT chr11 5195690 5195711 5195695 5195690 -
ttctgtactgaataataaaata

SEQ ID NO: 148815 - DNA, 22 bp, Artificial Sequence
  Synthetic oligonucleotide; TTT chr11 5195689 5195710 5195694 5195689 -
tctgtactgaataataaaatat

SEQ ID NO: 148816 - DNA, 22 bp, Artificial Sequence
  Synthetic oligonucleotide; TTT chr11 5195688 5195709 5195693 5195688 -
ctgtactgaataataaaatata

SEQ ID NO: 148817 - DNA, 22 bp, Artificial Sequence
  Synthetic oligonucleotide; TTC chr11 5195687 5195708 5195692 5195687 -
tgtactgaataataaaatataa

SEQ ID NO: 148818 - DNA, 22 bp, Artificial Sequence
  Synthetic oligonucleotide; CTG chr11 5195685 5195706 5195690 5195685 -
tactgaataataaaatataaat

SEQ ID NO: 148819 - DNA, 22 bp, Artificial Sequence
  Synthetic oligonucleotide; CTG chr11 5195680 5195701 5195685 5195680 -
aataataaaatataaatttaag

SEQ ID NO: 148820 - DNA, 22 bp, Artificial Sequence
  Synthetic oligonucleotide; TTT chr11 5195661 5195682 5195666 5195661 -
aagaaatatgagtgaaagtgtc

SEQ ID NO: 148821 - DNA, 22 bp, Artificial Sequence
  Synthetic oligonucleotide; TTA chr11 5195660 5195681 5195665 5195660 -
agaaatatgagtgaaagtgtca

SEQ ID NO: 148822 - DNA, 22 bp, Artificial Sequence
  Synthetic oligonucleotide; TTT chr11 5195634 5195655 5195639 5195634 -
acatataaacctggcagactga

SEQ ID NO: 148823 - DNA, 22 bp, Artificial Sequence
  Synthetic oligonucleotide; TTA chr11 5195633 5195654 5195638 5195633 -
catataaacctggcagactgaa

SEQ ID NO: 148824 - DNA, 22 bp, Artificial Sequence
  Synthetic oligonucleotide; CTG chr11 5195621 5195642 5195626 5195621 -
gcagactgaatatgtgttcatt

SEQ ID NO: 148825 - DNA, 22 bp, Artificial Sequence
  Synthetic oligonucleotide; CTG chr11 5195613 5195634 5195618 5195613 -
aatatgtgttcatttctgctac

SEQ ID NO: 148826 - DNA, 22 bp, Artificial Sequence
  Synthetic oligonucleotide; TTC chr11 5195602 5195623 5195607 5195602 -
atttctgctactttctctaatc

SEQ ID NO: 148827 - DNA, 22 bp, Artificial Sequence
  Synthetic oligonucleotide; TTT chr11 5195598 5195619 5195603 5195598 -
ctgctactttctctaatccact

SEQ ID NO: 148828 - DNA, 22 bp, Artificial Sequence
  Synthetic oligonucleotide; TTC chr11 5195597 5195618 5195602 5195597 -
tgctactttctctaatccacta

SEQ ID NO: 148829 - DNA, 22 bp, Artificial Sequence
  Synthetic oligonucleotide; CTG chr11 5195595 5195616 5195600 5195595 -
ctactttctctaatccactaaa

SEQ ID NO: 148830 - DNA, 22 bp, Artificial Sequence
  Synthetic oligonucleotide; CTA chr11 5195592 5195613 5195597 5195592 -
ctttctctaatccactaaagct

SEQ ID NO: 148831 - DNA, 22 bp, Artificial Sequence
  Synthetic oligonucleotide; CTT chr11 5195589 5195610 5195594 5195589 -
tctctaatccactaaagctata

SEQ ID NO: 148832 - DNA, 22 bp, Artificial Sequence
  Synthetic oligonucleotide; TTT chr11 5195588 5195609 5195593 5195588 -
ctctaatccactaaagctatag

SEQ ID NO: 148833 - DNA, 22 bp, Artificial Sequence
  Synthetic oligonucleotide; TTC chr11 5195587 5195608 5195592 5195587 -
tctaatccactaaagctataga

SEQ ID NO: 148834 - DNA, 22 bp, Artificial Sequence
  Synthetic oligonucleotide; CTC chr11 5195585 5195606 5195590 5195585 -
taatccactaaagctatagatg

SEQ ID NO: 148835 - DNA, 22 bp, Artificial Sequence
  Synthetic oligonucleotide; CTA chr11 5195583 5195604 5195588 5195583 -
atccactaaagctatagatgta

SEQ ID NO: 148836 - DNA, 22 bp, Artificial Sequence
  Synthetic oligonucleotide; CTA chr11 5195575 5195596 5195580 5195575 -
aagctatagatgtacacagaga

SEQ ID NO: 148837 - DNA, 22 bp, Artificial Sequence
  Synthetic oligonucleotide; CTA chr11 5195569 5195590 5195574 5195569 -
tagatgtacacagagacactgt

SEQ ID NO: 148838 - DNA, 22 bp, Artificial Sequence
  Synthetic oligonucleotide; CTG chr11 5195548 5195569 5195553 5195548 -
tgaagaaaatagcacaatatgt

SEQ ID NO: 148839 - DNA, 22 bp, Artificial Sequence
  Synthetic oligonucleotide; TTG chr11 5195514 5195535 5195519 5195514 -
ataagtatatacatttaaatat

SEQ ID NO: 148840 - DNA, 22 bp, Artificial Sequence
  Synthetic oligonucleotide; TTT chr11 5195498 5195519 5195503 5195498 -
aaatatgattttttaaaaaaca

SEQ ID NO: 148841 - DNA, 22 bp, Artificial Sequence
  Synthetic oligonucleotide; TTA chr11 5195497 5195518 5195502 5195497 -
aatatgattttttaaaaaacag

SEQ ID NO: 148842 - DNA, 22 bp, Artificial Sequence
  Synthetic oligonucleotide; TTT chr11 5195487 5195508 5195492 5195487 -
tttaaaaaacagaacaggataa

SEQ ID NO: 148843 - DNA, 22 bp, Artificial Sequence
  Synthetic oligonucleotide; TTT chr11 5195486 5195507 5195491 5195486 -
ttaaaaaacagaacaggataat

SEQ ID NO: 148844 - DNA, 22 bp, Artificial Sequence
  Synthetic oligonucleotide; TTT chr11 5195485 5195506 5195490 5195485 -
taaaaaacagaacaggataatc

SEQ ID NO: 148845 - DNA, 22 bp, Artificial Sequence
  Synthetic oligonucleotide; TTT chr11 5195484 5195505 5195489 5195484 -
aaaaaacagaacaggataatct

SEQ ID NO: 148846 - DNA, 22 bp, Artificial Sequence
  Synthetic oligonucleotide; TTA chr11 5195483 5195504 5195488 5195483 -
aaaaacagaacaggataatctg

SEQ ID NO: 148847 - DNA, 22 bp, Artificial Sequence
  Synthetic oligonucleotide; CTG chr11 5195461 5195482 5195466 5195461 -
aaatctatatgtctacagaaaa

SEQ ID NO: 148848 - DNA, 22 bp, Artificial Sequence
  Synthetic oligonucleotide; CTA chr11 5195454 5195475 5195459 5195454 -
tatgtctacagaaaaggatacc

SEQ ID NO: 148849 - DNA, 22 bp, Artificial Sequence
  Synthetic oligonucleotide; CTA chr11 5195446 5195467 5195451 5195446 -
cagaaaaggataccaatgagaa

SEQ ID NO: 148850 - DNA, 22 bp, Artificial Sequence
  Synthetic oligonucleotide; TTA chr11 5195415 5195436 5195420 5195415 -
tctgcaaagagcattttctgga

SEQ ID NO: 148851 - DNA, 22 bp, Artificial Sequence
  Synthetic oligonucleotide; CTG chr11 5195411 5195432 5195416 5195411 -
caaagagcattttctggaaaaa

SEQ ID NO: 148852 - DNA, 22 bp, Artificial Sequence
  Synthetic oligonucleotide; TTT chr11 5195399 5195420 5195404 5195399 -
tctggaaaaacacagaaattac

SEQ ID NO: 148853 - DNA, 22 bp, Artificial Sequence
  Synthetic oligonucleotide; TTT chr11 5195398 5195419 5195403 5195398 -
ctggaaaaacacagaaattact

SEQ ID NO: 148854 - DNA, 22 bp, Artificial Sequence
  Synthetic oligonucleotide; TTC chr11 5195397 5195418 5195402 5195397 -
tggaaaaacacagaaattactt

SEQ ID NO: 148855 - DNA, 22 bp, Artificial Sequence
  Synthetic oligonucleotide; CTG chr11 5195395 5195416 5195400 5195395 -
gaaaaacacagaaattacttat

SEQ ID NO: 148856 - DNA, 22 bp, Artificial Sequence
  Synthetic oligonucleotide; TTA chr11 5195378 5195399 5195383 5195378 -
cttataaagcattcgtgagggg

SEQ ID NO: 148857 - DNA, 22 bp, Artificial Sequence
  Synthetic oligonucleotide; CTT chr11 5195375 5195396 5195380 5195375 -
ataaagcattcgtgaggggtag

SEQ ID NO: 148858 - DNA, 22 bp, Artificial Sequence
  Synthetic oligonucleotide; TTA chr11 5195374 5195395 5195379 5195374 -
taaagcattcgtgaggggtagg

SEQ ID NO: 148859 - DNA, 22 bp, Artificial Sequence
  Synthetic oligonucleotide; TTC chr11 5195364 5195385 5195369 5195364 -
gtgaggggtagggctaaaaatg

SEQ ID NO: 148860 - DNA, 22 bp, Artificial Sequence
  Synthetic oligonucleotide; CTA chr11 5195348 5195369 5195353 5195348 -
aaaatggtagaaaaggtgaata

SEQ ID NO: 148861 - DNA, 22 bp, Artificial Sequence
  Synthetic oligonucleotide; CTG chr11 5195322 5195343 5195327 5195322 -
tttaaggttgcctaaaagatag

SEQ ID NO: 148862 - DNA, 22 bp, Artificial Sequence
  Synthetic oligonucleotide; TTT chr11 5195319 5195340 5195324 5195319 -
aaggttgcctaaaagatagcca

SEQ ID NO: 148863 - DNA, 22 bp, Artificial Sequence
  Synthetic oligonucleotide; TTA chr11 5195318 5195339 5195323 5195318 -
aggttgcctaaaagatagccag

SEQ ID NO: 148864 - DNA, 22 bp, Artificial Sequence
  Synthetic oligonucleotide; TTG chr11 5195312 5195333 5195317 5195312 -
cctaaaagatagccaggtactc

SEQ ID NO: 148865 - DNA, 22 bp, Artificial Sequence
  Synthetic oligonucleotide; CTA chr11 5195308 5195329 5195313 5195308 -
aaagatagccaggtactcattt

SEQ ID NO: 148866 - DNA, 22 bp, Artificial Sequence
  Synthetic oligonucleotide; CTC chr11 5195290 5195311 5195295 5195290 -
atttctctttagttctggcaaa

SEQ ID NO: 148867 - DNA, 22 bp, Artificial Sequence
  Synthetic oligonucleotide; TTT chr11 5195286 5195307 5195291 5195286 -
ctctttagttctggcaaaatga

SEQ ID NO: 148868 - DNA, 22 bp, Artificial Sequence
  Synthetic oligonucleotide; TTC chr11 5195285 5195306 5195290 5195285 -
tctttagttctggcaaaatgat

SEQ ID NO: 148869 - DNA, 22 bp, Artificial Sequence
  Synthetic oligonucleotide; CTC chr11 5195283 5195304 5195288 5195283 -
tttagttctggcaaaatgatta

SEQ ID NO: 148870 - DNA, 22 bp, Artificial Sequence
  Synthetic oligonucleotide; CTT chr11 5195281 5195302 5195286 5195281 -
tagttctggcaaaatgattagt

SEQ ID NO: 148871 - DNA, 22 bp, Artificial Sequence
  Synthetic oligonucleotide; TTT chr11 5195280 5195301 5195285 5195280 -
agttctggcaaaatgattagtg

SEQ ID NO: 148872 - DNA, 22 bp, Artificial Sequence
  Synthetic oligonucleotide; TTA chr11 5195279 5195300 5195284 5195279 -
gttctggcaaaatgattagtgt

SEQ ID NO: 148873 - DNA, 22 bp, Artificial Sequence
  Synthetic oligonucleotide; TTC chr11 5195275 5195296 5195280 5195275 -
tggcaaaatgattagtgtctgt

SEQ ID NO: 148874 - DNA, 22 bp, Artificial Sequence
  Synthetic oligonucleotide; CTG chr11 5195273 5195294 5195278 5195273 -
gcaaaatgattagtgtctgtag

SEQ ID NO: 148875 - DNA, 22 bp, Artificial Sequence
  Synthetic oligonucleotide; TTA chr11 5195261 5195282 5195266 5195261 -
gtgtctgtagtaaccaaatcaa

SEQ ID NO: 148876 - DNA, 22 bp, Artificial Sequence
  Synthetic oligonucleotide; CTG chr11 5195254 5195275 5195259 5195254 -
tagtaaccaaatcaatgatgat

SEQ ID NO: 148877 - DNA, 22 bp, Artificial Sequence
  Synthetic oligonucleotide; CTG chr11 5195222 5195243 5195227 5195222 -
ggaaattcagtgcaaaggatgc

SEQ ID NO: 148878 - DNA, 22 bp, Artificial Sequence
  Synthetic oligonucleotide; TTC chr11 5195214 5195235 5195219 5195214 -
agtgcaaaggatgccaggacta

SEQ ID NO: 148879 - DNA, 22 bp, Artificial Sequence
  Synthetic oligonucleotide; CTA chr11 5195192 5195213 5195197 5195192 -
aggtgtaatatatgaaacagag

SEQ ID NO: 148880 - DNA, 22 bp, Artificial Sequence
  Synthetic oligonucleotide; TTA chr11 5195164 5195185 5195169 5195164 -
tgcaaaagaatacatattgaat

SEQ ID NO: 148881 - DNA, 22 bp, Artificial Sequence
  Synthetic oligonucleotide; TTG chr11 5195145 5195166 5195150 5195145 -
aatgatgataaactgtctcaag

SEQ ID NO: 148882 - DNA, 22 bp, Artificial Sequence
  Synthetic oligonucleotide; CTG chr11 5195130 5195151 5195135 5195130 -
tctcaagagaaaggactaatag

SEQ ID NO: 148883 - DNA, 22 bp, Artificial Sequence
  Synthetic oligonucleotide; CTC chr11 5195126 5195147 5195131 5195126 -
aagagaaaggactaatagatat

SEQ ID NO: 148884 - DNA, 22 bp, Artificial Sequence
  Synthetic oligonucleotide; CTA chr11 5195112 5195133 5195117 5195112 -
atagatattggcatttgagtat

SEQ ID NO: 148885 - DNA, 22 bp, Artificial Sequence
  Synthetic oligonucleotide; TTG chr11 5195102 5195123 5195107 5195102 -
gcatttgagtattcgcttactg

SEQ ID NO: 148886 - DNA, 22 bp, Artificial Sequence
  Synthetic oligonucleotide; TTT chr11 5195096 5195117 5195101 5195096 -
gagtattcgcttactggattag

SEQ ID NO: 148887 - DNA, 22 bp, Artificial Sequence
  Synthetic oligonucleotide; TTG chr11 5195095 5195116 5195100 5195095 -
agtattcgcttactggattagc

SEQ ID NO: 148888 - DNA, 22 bp, Artificial Sequence
  Synthetic oligonucleotide; TTC chr11 5195088 5195109 5195093 5195088 -
gcttactggattagctaggctt

SEQ ID NO: 148889 - DNA, 22 bp, Artificial Sequence
  Synthetic oligonucleotide; CTT chr11 5195084 5195105 5195089 5195084 -
actggattagctaggcttcttt

SEQ ID NO: 148890 - DNA, 22 bp, Artificial Sequence
  Synthetic oligonucleotide; TTA chr11 5195083 5195104 5195088 5195083 -
ctggattagctaggcttctttc

SEQ ID NO: 148891 - DNA, 22 bp, Artificial Sequence
  Synthetic oligonucleotide; CTG chr11 5195080 5195101 5195085 5195080 -
gattagctaggcttctttctga

SEQ ID NO: 148892 - DNA, 22 bp, Artificial Sequence
  Synthetic oligonucleotide; TTA chr11 5195075 5195096 5195080 5195075 -
gctaggcttctttctgatcagc

SEQ ID NO: 148893 - DNA, 22 bp, Artificial Sequence
  Synthetic oligonucleotide; CTA chr11 5195071 5195092 5195076 5195071 -
ggcttctttctgatcagccttc

SEQ ID NO: 148894 - DNA, 22 bp, Artificial Sequence
  Synthetic oligonucleotide; CTT chr11 5195066 5195087 5195071 5195066 -
ctttctgatcagccttcaaagt

SEQ ID NO: 148895 - DNA, 22 bp, Artificial Sequence
  Synthetic oligonucleotide; TTC chr11 5195065 5195086 5195070 5195065 -
tttctgatcagccttcaaagta

SEQ ID NO: 148896 - DNA, 22 bp, Artificial Sequence
  Synthetic oligonucleotide; CTT chr11 5195063 5195084 5195068 5195063 -
tctgatcagccttcaaagtaac

SEQ ID NO: 148897 - DNA, 22 bp, Artificial Sequence
  Synthetic oligonucleotide; TTT chr11 5195062 5195083 5195067 5195062 -
ctgatcagccttcaaagtaact

SEQ ID NO: 148898 - DNA, 22 bp, Artificial Sequence
  Synthetic oligonucleotide; TTC chr11 5195061 5195082 5195066 5195061 -
tgatcagccttcaaagtaactg

SEQ ID NO: 148899 - DNA, 22 bp, Artificial Sequence
  Synthetic oligonucleotide; CTG chr11 5195059 5195080 5195064 5195059 -
atcagccttcaaagtaactggc

SEQ ID NO: 148900 - DNA, 22 bp, Artificial Sequence
  Synthetic oligonucleotide; CTT chr11 5195050 5195071 5195055 5195050 -
caaagtaactggccagataact

SEQ ID NO: 148901 - DNA, 22 bp, Artificial Sequence
  Synthetic oligonucleotide; TTC chr11 5195049 5195070 5195054 5195049 -
aaagtaactggccagataacta

SEQ ID NO: 148902 - DNA, 22 bp, Artificial Sequence
  Synthetic oligonucleotide; CTG chr11 5195039 5195060 5195044 5195039 -
gccagataactaattgtaccgt

SEQ ID NO: 148903 - DNA, 22 bp, Artificial Sequence
  Synthetic oligonucleotide; CTA chr11 5195027 5195048 5195032 5195027 -
attgtaccgtgttcatagaaat

SEQ ID NO: 148904 - DNA, 22 bp, Artificial Sequence
  Synthetic oligonucleotide; TTG chr11 5195023 5195044 5195028 5195023 -
taccgtgttcatagaaatcccc

SEQ ID NO: 148905 - DNA, 22 bp, Artificial Sequence
  Synthetic oligonucleotide; TTC chr11 5195013 5195034 5195018 5195013 -
atagaaatccccactatactct

SEQ ID NO: 148906 - DNA, 22 bp, Artificial Sequence
  Synthetic oligonucleotide; CTA chr11 5194997 5195018 5195002 5194997 -
tactctttttaaaattatttta

SEQ ID NO: 148907 - DNA, 22 bp, Artificial Sequence
  Synthetic oligonucleotide; CTC chr11 5194992 5195013 5194997 5194992 -
tttttaaaattattttatttta

SEQ ID NO: 148908 - DNA, 22 bp, Artificial Sequence
  Synthetic oligonucleotide; CTT chr11 5194990 5195011 5194995 5194990 -
tttaaaattattttattttatt

SEQ ID NO: 148909 - DNA, 22 bp, Artificial Sequence
  Synthetic oligonucleotide; TTT chr11 5194989 5195010 5194994 5194989 -
ttaaaattattttattttatta

SEQ ID NO: 148910 - DNA, 22 bp, Artificial Sequence
  Synthetic oligonucleotide; TTT chr11 5194988 5195009 5194993 5194988 -
taaaattattttattttattat

SEQ ID NO: 148911 - DNA, 22 bp, Artificial Sequence
  Synthetic oligonucleotide; TTT chr11 5194987 5195008 5194992 5194987 -
aaaattattttattttattatt

SEQ ID NO: 148912 - DNA, 22 bp, Artificial Sequence
  Synthetic oligonucleotide; TTA chr11 5194986 5195007 5194991 5194986 -
aaattattttattttattatta

SEQ ID NO: 148913 - DNA, 22 bp, Artificial Sequence
  Synthetic oligonucleotide; TTA chr11 5194980 5195001 5194985 5194980 -
ttttattttattattattatac

SEQ ID NO: 148914 - DNA, 22 bp, Artificial Sequence
  Synthetic oligonucleotide; TTT chr11 5194977 5194998 5194982 5194977 -
tattttattattattatacttt

SEQ ID NO: 148915 - DNA, 22 bp, Artificial Sequence
  Synthetic oligonucleotide; TTT chr11 5194976 5194997 5194981 5194976 -
attttattattattatacttta

SEQ ID NO: 148916 - DNA, 22 bp, Artificial Sequence
  Synthetic oligonucleotide; TTA chr11 5194975 5194996 5194980 5194975 -
ttttattattattatactttaa

SEQ ID NO: 148917 - DNA, 22 bp, Artificial Sequence
  Synthetic oligonucleotide; TTT chr11 5194972 5194993 5194977 5194972 -
tattattattatactttaagtt

SEQ ID NO: 148918 - DNA, 22 bp, Artificial Sequence
  Synthetic oligonucleotide; TTT chr11 5194971 5194992 5194976 5194971 -
attattattatactttaagttt

SEQ ID NO: 148919 - DNA, 22 bp, Artificial Sequence
  Synthetic oligonucleotide; TTA chr11 5194970 5194991 5194975 5194970 -
ttattattatactttaagtttt

SEQ ID NO: 148920 - DNA, 22 bp, Artificial Sequence
  Synthetic oligonucleotide; TTA chr11 5194967 5194988 5194972 5194967 -
ttattatactttaagttttagg

SEQ ID NO: 148921 - DNA, 22 bp, Artificial Sequence
  Synthetic oligonucleotide; TTA chr11 5194964 5194985 5194969 5194964 -
ttatactttaagttttagggta

SEQ ID NO: 148922 - DNA, 22 bp, Artificial Sequence
  Synthetic oligonucleotide; TTA chr11 5194961 5194982 5194966 5194961 -
tactttaagttttagggtacat

SEQ ID NO: 148923 - DNA, 22 bp, Artificial Sequence
  Synthetic oligonucleotide; CTT chr11 5194956 5194977 5194961 5194956 -
taagttttagggtacatgtgca

SEQ ID NO: 148924 - DNA, 22 bp, Artificial Sequence
  Synthetic oligonucleotide; TTT chr11 5194955 5194976 5194960 5194955 -
aagttttagggtacatgtgcac

SEQ ID NO: 148925 - DNA, 22 bp, Artificial Sequence
  Synthetic oligonucleotide; TTA chr11 5194954 5194975 5194959 5194954 -
agttttagggtacatgtgcaca

SEQ ID NO: 148926 - DNA, 22 bp, Artificial Sequence
  Synthetic oligonucleotide; TTT chr11 5194949 5194970 5194954 5194949 -
tagggtacatgtgcacaatgtg

SEQ ID NO: 148927 - DNA, 22 bp, Artificial Sequence
  Synthetic oligonucleotide; TTT chr11 5194948 5194969 5194953 5194948 -
agggtacatgtgcacaatgtgc

SEQ ID NO: 148928 - DNA, 22 bp, Artificial Sequence
  Synthetic oligonucleotide; TTA chr11 5194947 5194968 5194952 5194947 -
gggtacatgtgcacaatgtgca

SEQ ID NO: 148929 - DNA, 22 bp, Artificial Sequence
  Synthetic oligonucleotide; TTA chr11 5194920 5194941 5194925 5194920 -
gttacatatgtatacatgtgcc

SEQ ID NO: 148930 - DNA, 22 bp, Artificial Sequence
  Synthetic oligonucleotide; TTA chr11 5194916 5194937 5194921 5194916 -
catatgtatacatgtgccatgc

SEQ ID NO: 148931 - DNA, 22 bp, Artificial Sequence
  Synthetic oligonucleotide; CTG chr11 5194892 5194913 5194897 5194892 -
gtgtgcttcacccattaactca

SEQ ID NO: 148932 - DNA, 22 bp, Artificial Sequence
  Synthetic oligonucleotide; CTT chr11 5194884 5194905 5194889 5194884 -
cacccattaactcatcatttag

SEQ ID NO: 148933 - DNA, 22 bp, Artificial Sequence
  Synthetic oligonucleotide; TTC chr11 5194883 5194904 5194888 5194883 -
acccattaactcatcatttagc

SEQ ID NO: 148934 - DNA, 22 bp, Artificial Sequence
  Synthetic oligonucleotide; TTA chr11 5194875 5194896 5194880 5194875 -
actcatcatttagcattaggta

SEQ ID NO: 148935 - DNA, 22 bp, Artificial Sequence
  Synthetic oligonucleotide; CTC chr11 5194871 5194892 5194876 5194871 -
atcatttagcattaggtatatc

SEQ ID NO: 148936 - DNA, 22 bp, Artificial Sequence
  Synthetic oligonucleotide; TTT chr11 5194864 5194885 5194869 5194864 -
agcattaggtatatctcctaat

SEQ ID NO: 148937 - DNA, 22 bp, Artificial Sequence
  Synthetic oligonucleotide; TTA chr11 5194863 5194884 5194868 5194863 -
gcattaggtatatctcctaatg

SEQ ID NO: 148938 - DNA, 22 bp, Artificial Sequence
  Synthetic oligonucleotide; TTA chr11 5194857 5194878 5194862 5194857 -
ggtatatctcctaatgctatcc

SEQ ID NO: 148939 - DNA, 22 bp, Artificial Sequence
  Synthetic oligonucleotide; CTC chr11 5194847 5194868 5194852 5194847 -
ctaatgctatccctcctccctc

SEQ ID NO: 148940 - DNA, 22 bp, Artificial Sequence
  Synthetic oligonucleotide; CTA chr11 5194844 5194865 5194849 5194844 -
atgctatccctcctccctcccc

SEQ ID NO: 148941 - DNA, 22 bp, Artificial Sequence
  Synthetic oligonucleotide; CTA chr11 5194838 5194859 5194843 5194838 -
tccctcctccctccccccaccc

SEQ ID NO: 148942 - DNA, 22 bp, Artificial Sequence
  Synthetic oligonucleotide; CTC chr11 5194832 5194853 5194837 5194832 -
ctccctccccccaccccacaac

SEQ ID NO: 148943 - DNA, 22 bp, Artificial Sequence
  Synthetic oligonucleotide; CTC chr11 5194829 5194850 5194834 5194829 -
cctccccccaccccacaacagt

SEQ ID NO: 148944 - DNA, 22 bp, Artificial Sequence
  Synthetic oligonucleotide; CTC chr11 5194825 5194846 5194830 5194825 -
cccccaccccacaacagtcccc

SEQ ID NO: 148945 - DNA, 22 bp, Artificial Sequence
  Synthetic oligonucleotide; TTC chr11 5194789 5194810 5194794 5194789 -
cccttcctgtgtccatgtgttc

SEQ ID NO: 148946 - DNA, 22 bp, Artificial Sequence
  Synthetic oligonucleotide; CTT chr11 5194784 5194805 5194789 5194784 -
cctgtgtccatgtgttctcatt

SEQ ID NO: 148947 - DNA, 22 bp, Artificial Sequence
  Synthetic oligonucleotide; TTC chr11 5194783 5194804 5194788 5194783 -
ctgtgtccatgtgttctcattg

SEQ ID NO: 148948 - DNA, 22 bp, Artificial Sequence
  Synthetic oligonucleotide; CTG chr11 5194780 5194801 5194785 5194780 -
tgtccatgtgttctcattgttc

SEQ ID NO: 148949 - DNA, 22 bp, Artificial Sequence
  Synthetic oligonucleotide; TTC chr11 5194767 5194788 5194772 5194767 -
tcattgttcaattcccacctat

SEQ ID NO: 148950 - DNA, 22 bp, Artificial Sequence
  Synthetic oligonucleotide; CTC chr11 5194765 5194786 5194770 5194765 -
attgttcaattcccacctatga

SEQ ID NO: 148951 - DNA, 22 bp, Artificial Sequence
  Synthetic oligonucleotide; TTG chr11 5194761 5194782 5194766 5194761 -
ttcaattcccacctatgagtga

SEQ ID NO: 148952 - DNA, 22 bp, Artificial Sequence
  Synthetic oligonucleotide; TTC chr11 5194758 5194779 5194763 5194758 -
aattcccacctatgagtgagaa

SEQ ID NO: 148953 - DNA, 22 bp, Artificial Sequence
  Synthetic oligonucleotide; TTC chr11 5194753 5194774 5194758 5194753 -
ccacctatgagtgagaacatgc

SEQ ID NO: 148954 - DNA, 22 bp, Artificial Sequence
  Synthetic oligonucleotide; CTA chr11 5194746 5194767 5194751 5194746 -
tgagtgagaacatgcagtgttt

SEQ ID NO: 148955 - DNA, 22 bp, Artificial Sequence
  Synthetic oligonucleotide; TTT chr11 5194724 5194745 5194729 5194724 -
ggtttttcgtccttgcgatagt

SEQ ID NO: 148956 - DNA, 22 bp, Artificial Sequence
  Synthetic oligonucleotide; TTG chr11 5194723 5194744 5194728 5194723 -
gtttttcgtccttgcgatagtt

SEQ ID NO: 148957 - DNA, 22 bp, Artificial Sequence
  Synthetic oligonucleotide; TTT chr11 5194719 5194740 5194724 5194719 -
ttcgtccttgcgatagtttact

SEQ ID NO: 148958 - DNA, 22 bp, Artificial Sequence
  Synthetic oligonucleotide; TTT chr11 5194718 5194739 5194723 5194718 -
tcgtccttgcgatagtttactg

SEQ ID NO: 148959 - DNA, 22 bp, Artificial Sequence
  Synthetic oligonucleotide; TTT chr11 5194717 5194738 5194722 5194717 -
cgtccttgcgatagtttactga

SEQ ID NO: 148960 - DNA, 22 bp, Artificial Sequence
  Synthetic oligonucleotide; TTC chr11 5194716 5194737 5194721 5194716 -
gtccttgcgatagtttactgag

SEQ ID NO: 148961 - DNA, 22 bp, Artificial Sequence
  Synthetic oligonucleotide; CTT chr11 5194710 5194731 5194715 5194710 -
gcgatagtttactgagaatgat

SEQ ID NO: 148962 - DNA, 22 bp, Artificial Sequence
  Synthetic oligonucleotide; TTG chr11 5194709 5194730 5194714 5194709 -
cgatagtttactgagaatgatg

SEQ ID NO: 148963 - DNA, 22 bp, Artificial Sequence
  Synthetic oligonucleotide; TTT chr11 5194700 5194721 5194705 5194700 -
actgagaatgatgatttccaat

SEQ ID NO: 148964 - DNA, 22 bp, Artificial Sequence
  Synthetic oligonucleotide; TTA chr11 5194699 5194720 5194704 5194699 -
ctgagaatgatgatttccaatt

SEQ ID NO: 148965 - DNA, 22 bp, Artificial Sequence
  Synthetic oligonucleotide; CTG chr11 5194696 5194717 5194701 5194696 -
agaatgatgatttccaatttca

SEQ ID NO: 148966 - DNA, 22 bp, Artificial Sequence
  Synthetic oligonucleotide; TTT chr11 5194683 5194704 5194688 5194683 -
ccaatttcatccatgtccctac

SEQ ID NO: 148967 - DNA, 22 bp, Artificial Sequence
  Synthetic oligonucleotide; TTC chr11 5194682 5194703 5194687 5194682 -
caatttcatccatgtccctaca

SEQ ID NO: 148968 - DNA, 22 bp, Artificial Sequence
  Synthetic oligonucleotide; TTT chr11 5194676 5194697 5194681 5194676 -
catccatgtccctacaaaggac

SEQ ID NO: 148969 - DNA, 22 bp, Artificial Sequence
  Synthetic oligonucleotide; TTC chr11 5194675 5194696 5194680 5194675 -
atccatgtccctacaaaggaca

SEQ ID NO: 148970 - DNA, 22 bp, Artificial Sequence
  Synthetic oligonucleotide; CTA chr11 5194662 5194683 5194667 5194662 -
caaaggacatgaactcatcctt

SEQ ID NO: 148971 - DNA, 22 bp, Artificial Sequence
  Synthetic oligonucleotide; CTC chr11 5194646 5194667 5194651 5194646 -
atccttttttatggctgcatag

SEQ ID NO: 148972 - DNA, 22 bp, Artificial Sequence
  Synthetic oligonucleotide; CTT chr11 5194640 5194661 5194645 5194640 -
ttttatggctgcatagtattcc

SEQ ID NO: 148973 - DNA, 22 bp, Artificial Sequence
  Synthetic oligonucleotide; TTT chr11 5194639 5194660 5194644 5194639 -
tttatggctgcatagtattcca

SEQ ID NO: 148974 - DNA, 22 bp, Artificial Sequence
  Synthetic oligonucleotide; TTT chr11 5194638 5194659 5194643 5194638 -
ttatggctgcatagtattccat

SEQ ID NO: 148975 - DNA, 22 bp, Artificial Sequence
  Synthetic oligonucleotide; TTT chr11 5194637 5194658 5194642 5194637 -
tatggctgcatagtattccatg

SEQ ID NO: 148976 - DNA, 22 bp, Artificial Sequence
  Synthetic oligonucleotide; TTT chr11 5194636 5194657 5194641 5194636 -
atggctgcatagtattccatgg

SEQ ID NO: 148977 - DNA, 22 bp, Artificial Sequence
  Synthetic oligonucleotide; TTA chr11 5194635 5194656 5194640 5194635 -
tggctgcatagtattccatggt

SEQ ID NO: 148978 - DNA, 22 bp, Artificial Sequence
  Synthetic oligonucleotide; CTG chr11 5194629 5194650 5194634 5194629 -
catagtattccatggtgtgtat

SEQ ID NO: 148979 - DNA, 22 bp, Artificial Sequence
  Synthetic oligonucleotide; TTC chr11 5194619 5194640 5194624 5194619 -
catggtgtgtatgtgccacatt

SEQ ID NO: 148980 - DNA, 22 bp, Artificial Sequence
  Synthetic oligonucleotide; TTT chr11 5194596 5194617 5194601 5194596 -
tcttaatccagtctatcattgt

SEQ ID NO: 148981 - DNA, 22 bp, Artificial Sequence
  Synthetic oligonucleotide; TTT chr11 5194595 5194616 5194600 5194595 -
cttaatccagtctatcattgtt

SEQ ID NO: 148982 - DNA, 22 bp, Artificial Sequence
  Synthetic oligonucleotide; TTC chr11 5194594 5194615 5194599 5194594 -
ttaatccagtctatcattgttg

SEQ ID NO: 148983 - DNA, 22 bp, Artificial Sequence
  Synthetic oligonucleotide; CTT chr11 5194592 5194613 5194597 5194592 -
aatccagtctatcattgttgga

SEQ ID NO: 148984 - DNA, 22 bp, Artificial Sequence
  Synthetic oligonucleotide; TTA chr11 5194591 5194612 5194596 5194591 -
atccagtctatcattgttggac

SEQ ID NO: 148985 - DNA, 22 bp, Artificial Sequence
  Synthetic oligonucleotide; CTA chr11 5194581 5194602 5194586 5194581 -
tcattgttggacatttgggttg

SEQ ID NO: 148986 - DNA, 22 bp, Artificial Sequence
  Synthetic oligonucleotide; TTG chr11 5194575 5194596 5194580 5194575 -
ttggacatttgggttggttcca

SEQ ID NO: 148987 - DNA, 22 bp, Artificial Sequence
  Synthetic oligonucleotide; TTG chr11 5194572 5194593 5194577 5194572 -
gacatttgggttggttccaagt

SEQ ID NO: 148988 - DNA, 22 bp, Artificial Sequence
  Synthetic oligonucleotide; TTT chr11 5194565 5194586 5194570 5194565 -
gggttggttccaagtctttgct

SEQ ID NO: 148989 - DNA, 22 bp, Artificial Sequence
  Synthetic oligonucleotide; TTG chr11 5194564 5194585 5194569 5194564 -
ggttggttccaagtctttgcta

SEQ ID NO: 148990 - DNA, 22 bp, Artificial Sequence
  Synthetic oligonucleotide; TTG chr11 5194559 5194580 5194564 5194559 -
gttccaagtctttgctattgtg

SEQ ID NO: 148991 - DNA, 22 bp, Artificial Sequence
  Synthetic oligonucleotide; TTC chr11 5194555 5194576 5194560 5194555 -
caagtctttgctattgtgaata

SEQ ID NO: 148992 - DNA, 22 bp, Artificial Sequence
  Synthetic oligonucleotide; CTT chr11 5194547 5194568 5194552 5194547 -
tgctattgtgaatagtgccgca

SEQ ID NO: 148993 - DNA, 22 bp, Artificial Sequence
  Synthetic oligonucleotide; TTT chr11 5194546 5194567 5194551 5194546 -
gctattgtgaatagtgccgcaa

SEQ ID NO: 148994 - DNA, 22 bp, Artificial Sequence
  Synthetic oligonucleotide; TTG chr11 5194545 5194566 5194550 5194545 -
ctattgtgaatagtgccgcaat

SEQ ID NO: 148995 - DNA, 22 bp, Artificial Sequence
  Synthetic oligonucleotide; CTA chr11 5194542 5194563 5194547 5194542 -
ttgtgaatagtgccgcaataaa

SEQ ID NO: 148996 - DNA, 22 bp, Artificial Sequence
  Synthetic oligonucleotide; TTG chr11 5194539 5194560 5194544 5194539 -
tgaatagtgccgcaataaattg

SEQ ID NO: 148997 - DNA, 22 bp, Artificial Sequence
  Synthetic oligonucleotide; TTG chr11 5194517 5194538 5194522 5194517 -
catttacaaacctttagctaga

SEQ ID NO: 148998 - DNA, 22 bp, Artificial Sequence
  Synthetic oligonucleotide; TTT chr11 5194512 5194533 5194517 5194512 -
acaaacctttagctagacatga

SEQ ID NO: 148999 - DNA, 22 bp, Artificial Sequence
  Synthetic oligonucleotide; TTA chr11 5194511 5194532 5194516 5194511 -
caaacctttagctagacatgaa

SEQ ID NO: 149000 - DNA, 22 bp, Artificial Sequence
  Synthetic oligonucleotide; CTT chr11 5194503 5194524 5194508 5194503 -
tagctagacatgaaagttctcc

SEQ ID NO: 149001 - DNA, 22 bp, Artificial Sequence
  Synthetic oligonucleotide; TTT chr11 5194502 5194523 5194507 5194502 -
agctagacatgaaagttctcca

SEQ ID NO: 149002 - DNA, 22 bp, Artificial Sequence
  Synthetic oligonucleotide; TTA chr11 5194501 5194522 5194506 5194501 -
gctagacatgaaagttctccag

SEQ ID NO: 149003 - DNA, 22 bp, Artificial Sequence
  Synthetic oligonucleotide; CTA chr11 5194497 5194518 5194502 5194497 -
gacatgaaagttctccagttcc

SEQ ID NO: 149004 - DNA, 22 bp, Artificial Sequence
  Synthetic oligonucleotide; TTC chr11 5194484 5194505 5194489 5194484 -
tccagttccatatttcatggtg

SEQ ID NO: 149005 - DNA, 22 bp, Artificial Sequence
  Synthetic oligonucleotide; CTC chr11 5194482 5194503 5194487 5194482 -
cagttccatatttcatggtgag

SEQ ID NO: 149006 - DNA, 22 bp, Artificial Sequence
  Synthetic oligonucleotide; TTC chr11 5194476 5194497 5194481 5194476 -
catatttcatggtgaggaacaa

SEQ ID NO: 149007 - DNA, 22 bp, Artificial Sequence
  Synthetic oligonucleotide; TTT chr11 5194469 5194490 5194474 5194469 -
catggtgaggaacaaagaatat

SEQ ID NO: 149008 - DNA, 22 bp, Artificial Sequence
  Synthetic oligonucleotide; TTC chr11 5194468 5194489 5194473 5194468 -
atggtgaggaacaaagaatatg

SEQ ID NO: 149009 - DNA, 22 bp, Artificial Sequence
  Synthetic oligonucleotide; CTA chr11 5194430 5194451 5194435 5194430 -
tattctttgttcctcaccatga

SEQ ID NO: 149010 - DNA, 22 bp, Artificial Sequence
  Synthetic oligonucleotide; TTC chr11 5194425 5194446 5194430 5194425 -
tttgttcctcaccatgaaatat

SEQ ID NO: 149011 - DNA, 22 bp, Artificial Sequence
  Synthetic oligonucleotide; CTT chr11 5194423 5194444 5194428 5194423 -
tgttcctcaccatgaaatatgg

SEQ ID NO: 149012 - DNA, 22 bp, Artificial Sequence
  Synthetic oligonucleotide; TTT chr11 5194422 5194443 5194427 5194422 -
gttcctcaccatgaaatatgga

SEQ ID NO: 149013 - DNA, 22 bp, Artificial Sequence
  Synthetic oligonucleotide; TTG chr11 5194421 5194442 5194426 5194421 -
ttcctcaccatgaaatatggaa

SEQ ID NO: 149014 - DNA, 22 bp, Artificial Sequence
  Synthetic oligonucleotide; TTC chr11 5194418 5194439 5194423 5194418 -
ctcaccatgaaatatggaactg

SEQ ID NO: 149015 - DNA, 22 bp, Artificial Sequence
  Synthetic oligonucleotide; CTC chr11 5194415 5194436 5194420 5194415 -
accatgaaatatggaactggag

SEQ ID NO: 149016 - DNA, 22 bp, Artificial Sequence
  Synthetic oligonucleotide; CTG chr11 5194396 5194417 5194401 5194396 -
gagaactttcatgtctagctaa

SEQ ID NO: 149017 - DNA, 22 bp, Artificial Sequence
  Synthetic oligonucleotide; CTT chr11 5194388 5194409 5194393 5194388 -
tcatgtctagctaaaggtttgt

SEQ ID NO: 149018 - DNA, 22 bp, Artificial Sequence
  Synthetic oligonucleotide; TTT chr11 5194387 5194408 5194392 5194387 -
catgtctagctaaaggtttgta

SEQ ID NO: 149019 - DNA, 22 bp, Artificial Sequence
  Synthetic oligonucleotide; TTC chr11 5194386 5194407 5194391 5194386 -
atgtctagctaaaggtttgtaa

SEQ ID NO: 149020 - DNA, 22 bp, Artificial Sequence
  Synthetic oligonucleotide; CTA chr11 5194379 5194400 5194384 5194379 -
gctaaaggtttgtaaatgcacc

SEQ ID NO: 149021 - DNA, 22 bp, Artificial Sequence
  Synthetic oligonucleotide; CTA chr11 5194375 5194396 5194380 5194375 -
aaggtttgtaaatgcaccaatc

SEQ ID NO: 149022 - DNA, 22 bp, Artificial Sequence
  Synthetic oligonucleotide; TTT chr11 5194368 5194389 5194373 5194368 -
gtaaatgcaccaatcagcaatc

SEQ ID NO: 149023 - DNA, 22 bp, Artificial Sequence
  Synthetic oligonucleotide; TTG chr11 5194367 5194388 5194372 5194367 -
taaatgcaccaatcagcaatct

SEQ ID NO: 149024 - DNA, 22 bp, Artificial Sequence
  Synthetic oligonucleotide; CTG chr11 5194344 5194365 5194349 5194344 -
tgtctaactcaaggtttgtaaa

SEQ ID NO: 149025 - DNA, 22 bp, Artificial Sequence
  Synthetic oligonucleotide; CTA chr11 5194338 5194359 5194343 5194338 -
actcaaggtttgtaaatgcacc

SEQ ID NO: 149026 - DNA, 22 bp, Artificial Sequence
  Synthetic oligonucleotide; CTC chr11 5194334 5194355 5194339 5194334 -
aaggtttgtaaatgcaccaatc

SEQ ID NO: 149027 - DNA, 22 bp, Artificial Sequence
  Synthetic oligonucleotide; TTT chr11 5194327 5194348 5194332 5194327 -
gtaaatgcaccaatcagtgctc

SEQ ID NO: 149028 - DNA, 22 bp, Artificial Sequence
  Synthetic oligonucleotide; TTG chr11 5194326 5194347 5194331 5194326 -
taaatgcaccaatcagtgctct

SEQ ID NO: 149029 - DNA, 22 bp, Artificial Sequence
  Synthetic oligonucleotide; CTC chr11 5194305 5194326 5194310 5194305 -
tgtgtctagctaatctagtggg

SEQ ID NO: 149030 - DNA, 22 bp, Artificial Sequence
  Synthetic oligonucleotide; CTG chr11 5194303 5194324 5194308 5194303 -
tgtctagctaatctagtgggga

SEQ ID NO: 149031 - DNA, 22 bp, Artificial Sequence
  Synthetic oligonucleotide; CTA chr11 5194297 5194318 5194302 5194297 -
gctaatctagtggggacttgga

SEQ ID NO: 149032 - DNA, 22 bp, Artificial Sequence
  Synthetic oligonucleotide; CTA chr11 5194293 5194314 5194298 5194293 -
atctagtggggacttggagaac

SEQ ID NO: 149033 - DNA, 22 bp, Artificial Sequence
  Synthetic oligonucleotide; CTA chr11 5194288 5194309 5194293 5194288 -
gtggggacttggagaacttttg

SEQ ID NO: 149034 - DNA, 22 bp, Artificial Sequence
  Synthetic oligonucleotide; CTT chr11 5194278 5194299 5194283 5194278 -
ggagaacttttgtgtctagcta

SEQ ID NO: 149035 - DNA, 22 bp, Artificial Sequence
  Synthetic oligonucleotide; TTG chr11 5194277 5194298 5194282 5194277 -
gagaacttttgtgtctagctaa

SEQ ID NO: 149036 - DNA, 22 bp, Artificial Sequence
  Synthetic oligonucleotide; CTT chr11 5194269 5194290 5194274 5194269 -
ttgtgtctagctaaaggattgt

SEQ ID NO: 149037 - DNA, 22 bp, Artificial Sequence
  Synthetic oligonucleotide; TTT chr11 5194268 5194289 5194273 5194268 -
tgtgtctagctaaaggattgta

SEQ ID NO: 149038 - DNA, 22 bp, Artificial Sequence
  Synthetic oligonucleotide; TTT chr11 5194267 5194288 5194272 5194267 -
gtgtctagctaaaggattgtaa

SEQ ID NO: 149039 - DNA, 22 bp, Artificial Sequence
  Synthetic oligonucleotide; TTG chr11 5194266 5194287 5194271 5194266 -
tgtctagctaaaggattgtaaa

SEQ ID NO: 149040 - DNA, 22 bp, Artificial Sequence
  Synthetic oligonucleotide; CTA chr11 5194260 5194281 5194265 5194260 -
gctaaaggattgtaaatgcact

SEQ ID NO: 149041 - DNA, 22 bp, Artificial Sequence
  Synthetic oligonucleotide; CTA chr11 5194256 5194277 5194261 5194256 -
aaggattgtaaatgcactaatc

SEQ ID NO: 149042 - DNA, 22 bp, Artificial Sequence
  Synthetic oligonucleotide; TTG chr11 5194248 5194269 5194253 5194248 -
taaatgcactaatcagcactct

SEQ ID NO: 149043 - DNA, 22 bp, Artificial Sequence
  Synthetic oligonucleotide; CTA chr11 5194237 5194258 5194242 5194237 -
atcagcactctgtgtctagctc

SEQ ID NO: 149044 - DNA, 22 bp, Artificial Sequence
  Synthetic oligonucleotide; CTC chr11 5194227 5194248 5194232 5194227 -
tgtgtctagctcaaggtttgta

SEQ ID NO: 149045 - DNA, 22 bp, Artificial Sequence
  Synthetic oligonucleotide; CTG chr11 5194225 5194246 5194230 5194225 -
tgtctagctcaaggtttgtaaa

SEQ ID NO: 149046 - DNA, 22 bp, Artificial Sequence
  Synthetic oligonucleotide; CTA chr11 5194219 5194240 5194224 5194219 -
gctcaaggtttgtaaatgcacc

SEQ ID NO: 149047 - DNA, 22 bp, Artificial Sequence
  Synthetic oligonucleotide; CTC chr11 5194215 5194236 5194220 5194215 -
aaggtttgtaaatgcaccaatc

SEQ ID NO: 149048 - DNA, 22 bp, Artificial Sequence
  Synthetic oligonucleotide; TTT chr11 5194208 5194229 5194213 5194208 -
gtaaatgcaccaatcagcactc

SEQ ID NO: 149049 - DNA, 22 bp, Artificial Sequence
  Synthetic oligonucleotide; TTG chr11 5194207 5194228 5194212 5194207 -
taaatgcaccaatcagcactct

SEQ ID NO: 149050 - DNA, 22 bp, Artificial Sequence
  Synthetic oligonucleotide; CTC chr11 5194186 5194207 5194191 5194186 -
tgccaaaacggaccaaccagct

SEQ ID NO: 149051 - DNA, 22 bp, Artificial Sequence
  Synthetic oligonucleotide; CTG chr11 5194184 5194205 5194189 5194184 -
ccaaaacggaccaaccagctct

SEQ ID NO: 149052 - DNA, 22 bp, Artificial Sequence
  Synthetic oligonucleotide; CTC chr11 5194163 5194184 5194168 5194163 -
tctgtaaaatgggccaatcagc

SEQ ID NO: 149053 - DNA, 22 bp, Artificial Sequence
  Synthetic oligonucleotide; CTC chr11 5194161 5194182 5194166 5194161 -
tgtaaaatgggccaatcagctc

SEQ ID NO: 149054 - DNA, 22 bp, Artificial Sequence
  Synthetic oligonucleotide; CTG chr11 5194159 5194180 5194164 5194159 -
taaaatgggccaatcagctctc

SEQ ID NO: 149055 - DNA, 22 bp, Artificial Sequence
  Synthetic oligonucleotide; CTC chr11 5194139 5194160 5194144 5194139 -
tctgtaaaatggaccaatcagc

SEQ ID NO: 149056 - DNA, 22 bp, Artificial Sequence
  Synthetic oligonucleotide; CTC chr11 5194137 5194158 5194142 5194137 -
tgtaaaatggaccaatcagcag

SEQ ID NO: 149057 - DNA, 22 bp, Artificial Sequence
  Synthetic oligonucleotide; CTG chr11 5194135 5194156 5194140 5194135 -
taaaatggaccaatcagcagga

SEQ ID NO: 149058 - DNA, 22 bp, Artificial Sequence
  Synthetic oligonucleotide; CTG chr11 5194076 5194097 5194081 5194076 -
ccggagccagctgtgacaactg

SEQ ID NO: 149059 - DNA, 22 bp, Artificial Sequence
  Synthetic oligonucleotide; CTG chr11 5194063 5194084 5194068 5194063 -
tgacaactgacttgggttccct

SEQ ID NO: 149060 - DNA, 22 bp, Artificial Sequence
  Synthetic oligonucleotide; CTG chr11 5194054 5194075 5194059 5194054 -
acttgggttccctaccatgctg

SEQ ID NO: 149061 - DNA, 22 bp, Artificial Sequence
  Synthetic oligonucleotide; CTT chr11 5194050 5194071 5194055 5194050 -
gggttccctaccatgctgtgga

SEQ ID NO: 149062 - DNA, 22 bp, Artificial Sequence
  Synthetic oligonucleotide; TTG chr11 5194049 5194070 5194054 5194049 -
ggttccctaccatgctgtggaa

SEQ ID NO: 149063 - DNA, 22 bp, Artificial Sequence
  Synthetic oligonucleotide; TTC chr11 5194044 5194065 5194049 5194044 -
cctaccatgctgtggaagcttt

SEQ ID NO: 149064 - DNA, 22 bp, Artificial Sequence
  Synthetic oligonucleotide; CTA chr11 5194040 5194061 5194045 5194040 -
ccatgctgtggaagctttgttc

SEQ ID NO: 149065 - DNA, 22 bp, Artificial Sequence
  Synthetic oligonucleotide; CTG chr11 5194032 5194053 5194037 5194032 -
tggaagctttgttcttttattc

SEQ ID NO: 149066 - DNA, 22 bp, Artificial Sequence
  Synthetic oligonucleotide; CTT chr11 5194023 5194044 5194028 5194023 -
tgttcttttattcttcacaata

SEQ ID NO: 149067 - DNA, 22 bp, Artificial Sequence
  Synthetic oligonucleotide; TTT chr11 5194022 5194043 5194027 5194022 -
gttcttttattcttcacaataa

SEQ ID NO: 149068 - DNA, 22 bp, Artificial Sequence
  Synthetic oligonucleotide; TTG chr11 5194021 5194042 5194026 5194021 -
ttcttttattcttcacaataaa

SEQ ID NO: 149069 - DNA, 22 bp, Artificial Sequence
  Synthetic oligonucleotide; TTC chr11 5194018 5194039 5194023 5194018 -
ttttattcttcacaataaatct

SEQ ID NO: 149070 - DNA, 22 bp, Artificial Sequence
  Synthetic oligonucleotide; CTT chr11 5194016 5194037 5194021 5194016 -
ttattcttcacaataaatctta

SEQ ID NO: 149071 - DNA, 22 bp, Artificial Sequence
  Synthetic oligonucleotide; TTT chr11 5194015 5194036 5194020 5194015 -
tattcttcacaataaatcttac

SEQ ID NO: 149072 - DNA, 22 bp, Artificial Sequence
  Synthetic oligonucleotide; TTT chr11 5194014 5194035 5194019 5194014 -
attcttcacaataaatcttact

SEQ ID NO: 149073 - DNA, 22 bp, Artificial Sequence
  Synthetic oligonucleotide; TTA chr11 5194013 5194034 5194018 5194013 -
ttcttcacaataaatcttactg

SEQ ID NO: 149074 - DNA, 22 bp, Artificial Sequence
  Synthetic oligonucleotide; TTC chr11 5194010 5194031 5194015 5194010 -
ttcacaataaatcttactgctg

SEQ ID NO: 149075 - DNA, 22 bp, Artificial Sequence
  Synthetic oligonucleotide; CTT chr11 5194008 5194029 5194013 5194008 -
cacaataaatcttactgctgct

SEQ ID NO: 149076 - DNA, 22 bp, Artificial Sequence
  Synthetic oligonucleotide; TTC chr11 5194007 5194028 5194012 5194007 -
acaataaatcttactgctgctc

SEQ ID NO: 149077 - DNA, 22 bp, Artificial Sequence
  Synthetic oligonucleotide; CTT chr11 5193995 5194016 5194000 5193995 -
actgctgctcactctttggatc

SEQ ID NO: 149078 - DNA, 22 bp, Artificial Sequence
  Synthetic oligonucleotide; TTA chr11 5193994 5194015 5193999 5193994 -
ctgctgctcactctttggatcc

SEQ ID NO: 149079 - DNA, 22 bp, Artificial Sequence
  Synthetic oligonucleotide; CTG chr11 5193991 5194012 5193996 5193991 -
ctgctcactctttggatccgcg

SEQ ID NO: 149080 - DNA, 22 bp, Artificial Sequence
  Synthetic oligonucleotide; CTG chr11 5193988 5194009 5193993 5193988 -
ctcactctttggatccgcgctg

SEQ ID NO: 149081 - DNA, 22 bp, Artificial Sequence
  Synthetic oligonucleotide; CTC chr11 5193985 5194006 5193990 5193985 -
actctttggatccgcgctgcct

SEQ ID NO: 149082 - DNA, 22 bp, Artificial Sequence
  Synthetic oligonucleotide; CTC chr11 5193981 5194002 5193986 5193981 -
tttggatccgcgctgcctttat

SEQ ID NO: 149083 - DNA, 22 bp, Artificial Sequence
  Synthetic oligonucleotide; CTT chr11 5193979 5194000 5193984 5193979 -
tggatccgcgctgcctttatga

SEQ ID NO: 149084 - DNA, 22 bp, Artificial Sequence
  Synthetic oligonucleotide; TTT chr11 5193978 5193999 5193983 5193978 -
ggatccgcgctgcctttatgag

SEQ ID NO: 149085 - DNA, 22 bp, Artificial Sequence
  Synthetic oligonucleotide; TTG chr11 5193977 5193998 5193982 5193977 -
gatccgcgctgcctttatgagc

SEQ ID NO: 149086 - DNA, 22 bp, Artificial Sequence
  Synthetic oligonucleotide; CTG chr11 5193966 5193987 5193971 5193966 -
cctttatgagctgtaacactca

SEQ ID NO: 149087 - DNA, 22 bp, Artificial Sequence
  Synthetic oligonucleotide; CTT chr11 5193962 5193983 5193967 5193962 -
tatgagctgtaacactcactgc

SEQ ID NO: 149088 - DNA, 22 bp, Artificial Sequence
  Synthetic oligonucleotide; TTT chr11 5193961 5193982 5193966 5193961 -
atgagctgtaacactcactgcg

SEQ ID NO: 149089 - DNA, 22 bp, Artificial Sequence
  Synthetic oligonucleotide; TTA chr11 5193960 5193981 5193965 5193960 -
tgagctgtaacactcactgcga

SEQ ID NO: 149090 - DNA, 22 bp, Artificial Sequence
  Synthetic oligonucleotide; CTG chr11 5193953 5193974 5193958 5193953 -
taacactcactgcgaaggtctg

SEQ ID NO: 149091 - DNA, 22 bp, Artificial Sequence
  Synthetic oligonucleotide; CTC chr11 5193945 5193966 5193950 5193945 -
actgcgaaggtctgcggcttca

SEQ ID NO: 149092 - DNA, 22 bp, Artificial Sequence
  Synthetic oligonucleotide; CTG chr11 5193941 5193962 5193946 5193941 -
cgaaggtctgcggcttcacttc

SEQ ID NO: 149093 - DNA, 22 bp, Artificial Sequence
  Synthetic oligonucleotide; CTG chr11 5193931 5193952 5193936 5193931 -
cggcttcacttctgaagccagc

SEQ ID NO: 149094 - DNA, 22 bp, Artificial Sequence
  Synthetic oligonucleotide; CTT chr11 5193925 5193946 5193930 5193925 -
cacttctgaagccagcaagacc

SEQ ID NO: 149095 - DNA, 22 bp, Artificial Sequence
  Synthetic oligonucleotide; TTC chr11 5193924 5193945 5193929 5193924 -
acttctgaagccagcaagacca

SEQ ID NO: 149096 - DNA, 22 bp, Artificial Sequence
  Synthetic oligonucleotide; CTT chr11 5193920 5193941 5193925 5193920 -
ctgaagccagcaagaccacgaa

SEQ ID NO: 149097 - DNA, 22 bp, Artificial Sequence
  Synthetic oligonucleotide; TTC chr11 5193919 5193940 5193924 5193919 -
tgaagccagcaagaccacgaac

SEQ ID NO: 149098 - DNA, 22 bp, Artificial Sequence
  Synthetic oligonucleotide; CTG chr11 5193917 5193938 5193922 5193917 -
aagccagcaagaccacgaaccc

SEQ ID NO: 149099 - DNA, 22 bp, Artificial Sequence
  Synthetic oligonucleotide; CTC chr11 5193851 5193872 5193856 5193851 -
catacgctccgcctttaagagc

SEQ ID NO: 149100 - DNA, 22 bp, Artificial Sequence
  Synthetic oligonucleotide; CTC chr11 5193842 5193863 5193847 5193842 -
cgcctttaagagctgtaacact

SEQ ID NO: 149101 - DNA, 22 bp, Artificial Sequence
  Synthetic oligonucleotide; CTT chr11 5193836 5193857 5193841 5193836 -
taagagctgtaacactccccgt

SEQ ID NO: 149102 - DNA, 22 bp, Artificial Sequence
  Synthetic oligonucleotide; TTT chr11 5193835 5193856 5193840 5193835 -
aagagctgtaacactccccgtg

SEQ ID NO: 149103 - DNA, 22 bp, Artificial Sequence
  Synthetic oligonucleotide; TTA chr11 5193834 5193855 5193839 5193834 -
agagctgtaacactccccgtgg

SEQ ID NO: 149104 - DNA, 22 bp, Artificial Sequence
  Synthetic oligonucleotide; CTG chr11 5193827 5193848 5193832 5193827 -
taacactccccgtgggggtctg

SEQ ID NO: 149105 - DNA, 22 bp, Artificial Sequence
  Synthetic oligonucleotide; CTC chr11 5193819 5193840 5193824 5193819 -
cccgtgggggtctgcagcttca

SEQ ID NO: 149106 - DNA, 22 bp, Artificial Sequence
  Synthetic oligonucleotide; CTG chr11 5193805 5193826 5193810 5193805 -
cagcttcactcctggagccagc

SEQ ID NO: 149107 - DNA, 22 bp, Artificial Sequence
  Synthetic oligonucleotide; CTT chr11 5193799 5193820 5193804 5193799 -
cactcctggagccagcaagacc

SEQ ID NO: 149108 - DNA, 22 bp, Artificial Sequence
  Synthetic oligonucleotide; TTC chr11 5193798 5193819 5193803 5193798 -
actcctggagccagcaagaccg

SEQ ID NO: 149109 - DNA, 22 bp, Artificial Sequence
  Synthetic oligonucleotide; CTC chr11 5193794 5193815 5193799 5193794 -
ctggagccagcaagaccgtgaa

SEQ ID NO: 149110 - DNA, 22 bp, Artificial Sequence
  Synthetic oligonucleotide; CTG chr11 5193791 5193812 5193796 5193791 -
gagccagcaagaccgtgaacac

SEQ ID NO: 149111 - DNA, 22 bp, Artificial Sequence
  Synthetic oligonucleotide; CTC chr11 5193751 5193772 5193756 5193751 -
tggacacatctgaagtaacaaa

SEQ ID NO: 149112 - DNA, 22 bp, Artificial Sequence
  Synthetic oligonucleotide; CTG chr11 5193749 5193770 5193754 5193749 -
gacacatctgaagtaacaaact

SEQ ID NO: 149113 - DNA, 22 bp, Artificial Sequence
  Synthetic oligonucleotide; CTG chr11 5193739 5193760 5193744 5193739 -
aagtaacaaactttggacacac

SEQ ID NO: 149114 - DNA, 22 bp, Artificial Sequence
  Synthetic oligonucleotide; CTT chr11 5193726 5193747 5193731 5193726 -
tggacacaccatcctttgaaca

SEQ ID NO: 149115 - DNA, 22 bp, Artificial Sequence
  Synthetic oligonucleotide; TTT chr11 5193725 5193746 5193730 5193725 -
ggacacaccatcctttgaacac

SEQ ID NO: 149116 - DNA, 22 bp, Artificial Sequence
  Synthetic oligonucleotide; TTG chr11 5193724 5193745 5193729 5193724 -
gacacaccatcctttgaacaca

SEQ ID NO: 149117 - DNA, 22 bp, Artificial Sequence
  Synthetic oligonucleotide; CTT chr11 5193710 5193731 5193715 5193710 -
tgaacacaccatctttaagaat

SEQ ID NO: 149118 - DNA, 22 bp, Artificial Sequence
  Synthetic oligonucleotide; TTT chr11 5193709 5193730 5193714 5193709 -
gaacacaccatctttaagaatt

SEQ ID NO: 149119 - DNA, 22 bp, Artificial Sequence
  Synthetic oligonucleotide; TTG chr11 5193708 5193729 5193713 5193708 -
aacacaccatctttaagaattg

SEQ ID NO: 149120 - DNA, 22 bp, Artificial Sequence
  Synthetic oligonucleotide; CTT chr11 5193695 5193716 5193700 5193695 -
taagaattgtaacactcaccac

SEQ ID NO: 149121 - DNA, 22 bp, Artificial Sequence
  Synthetic oligonucleotide; TTT chr11 5193694 5193715 5193699 5193694 -
aagaattgtaacactcaccacg

SEQ ID NO: 149122 - DNA, 22 bp, Artificial Sequence
  Synthetic oligonucleotide; TTA chr11 5193693 5193714 5193698 5193693 -
agaattgtaacactcaccacga

SEQ ID NO: 149123 - DNA, 22 bp, Artificial Sequence
  Synthetic oligonucleotide; TTG chr11 5193686 5193707 5193691 5193686 -
taacactcaccacgagggttcg

SEQ ID NO: 149124 - DNA, 22 bp, Artificial Sequence
  Synthetic oligonucleotide; CTC chr11 5193678 5193699 5193683 5193678 -
accacgagggttcgcggcttca

SEQ ID NO: 149125 - DNA, 22 bp, Artificial Sequence
  Synthetic oligonucleotide; TTC chr11 5193665 5193686 5193670 5193665 -
gcggcttcattctttaagtcag

SEQ ID NO: 149126 - DNA, 22 bp, Artificial Sequence
  Synthetic oligonucleotide; CTT chr11 5193658 5193679 5193663 5193658 -
cattctttaagtcagcgagacc

SEQ ID NO: 149127 - DNA, 22 bp, Artificial Sequence
  Synthetic oligonucleotide; TTC chr11 5193657 5193678 5193662 5193657 -
attctttaagtcagcgagacca

SEQ ID NO: 149128 - DNA, 22 bp, Artificial Sequence
  Synthetic oligonucleotide; TTC chr11 5193653 5193674 5193658 5193653 -
tttaagtcagcgagaccaagaa

SEQ ID NO: 149129 - DNA, 22 bp, Artificial Sequence
  Synthetic oligonucleotide; CTT chr11 5193651 5193672 5193656 5193651 -
taagtcagcgagaccaagaacc

SEQ ID NO: 149130 - DNA, 22 bp, Artificial Sequence
  Synthetic oligonucleotide; TTT chr11 5193650 5193671 5193655 5193650 -
aagtcagcgagaccaagaaccc

SEQ ID NO: 149131 - DNA, 22 bp, Artificial Sequence
  Synthetic oligonucleotide; TTA chr11 5193649 5193670 5193654 5193649 -
agtcagcgagaccaagaaccca

SEQ ID NO: 149132 - DNA, 22 bp, Artificial Sequence
  Synthetic oligonucleotide; TTC chr11 5193620 5193641 5193625 5193620 -
cggacacagaaggatggacaaa

SEQ ID NO: 149133 - DNA, 22 bp, Artificial Sequence
  Synthetic oligonucleotide; TTA chr11 5193593 5193614 5193598 5193593 -
tcaggaatgcaattaagtccac

SEQ ID NO: 149134 - DNA, 22 bp, Artificial Sequence
  Synthetic oligonucleotide; TTA chr11 5193578 5193599 5193583 5193578 -
agtccaccaacacaaaaattac

SEQ ID NO: 149135 - DNA, 22 bp, Artificial Sequence
  Synthetic oligonucleotide; TTA chr11 5193557 5193578 5193562 5193557 -
catacctagaatcaattttaat

SEQ ID NO: 149136 - DNA, 22 bp, Artificial Sequence
  Synthetic oligonucleotide; CTA chr11 5193549 5193570 5193554 5193549 -
gaatcaattttaataaagaaaa

SEQ ID NO: 149137 - DNA, 22 bp, Artificial Sequence
  Synthetic oligonucleotide; TTT chr11 5193539 5193560 5193544 5193539 -
taataaagaaaacttatttgga

SEQ ID NO: 149138 - DNA, 22 bp, Artificial Sequence
  Synthetic oligonucleotide; TTT chr11 5193538 5193559 5193543 5193538 -
aataaagaaaacttatttggag

SEQ ID NO: 149139 - DNA, 22 bp, Artificial Sequence
  Synthetic oligonucleotide; TTA chr11 5193537 5193558 5193542 5193537 -
ataaagaaaacttatttggagc

SEQ ID NO: 149140 - DNA, 22 bp, Artificial Sequence
  Synthetic oligonucleotide; CTT chr11 5193524 5193545 5193529 5193524 -
atttggagcacagcttattcag

SEQ ID NO: 149141 - DNA, 22 bp, Artificial Sequence
  Synthetic oligonucleotide; TTA chr11 5193523 5193544 5193528 5193523 -
tttggagcacagcttattcagg

SEQ ID NO: 149142 - DNA, 22 bp, Artificial Sequence
  Synthetic oligonucleotide; TTT chr11 5193520 5193541 5193525 5193520 -
ggagcacagcttattcagggca

SEQ ID NO: 149143 - DNA, 22 bp, Artificial Sequence
  Synthetic oligonucleotide; TTG chr11 5193519 5193540 5193524 5193519 -
gagcacagcttattcagggcag

SEQ ID NO: 149144 - DNA, 22 bp, Artificial Sequence
  Synthetic oligonucleotide; CTT chr11 5193508 5193529 5193513 5193508 -
attcagggcagaaaataaaagc

SEQ ID NO: 149145 - DNA, 22 bp, Artificial Sequence
  Synthetic oligonucleotide; TTA chr11 5193507 5193528 5193512 5193507 -
ttcagggcagaaaataaaagct

SEQ ID NO: 149146 - DNA, 22 bp, Artificial Sequence
  Synthetic oligonucleotide; TTC chr11 5193504 5193525 5193509 5193504 -
agggcagaaaataaaagctaat

SEQ ID NO: 149147 - DNA, 22 bp, Artificial Sequence
  Synthetic oligonucleotide; CTA chr11 5193484 5193505 5193489 5193484 -
ataataaaagaggtgcataata

SEQ ID NO: 149148 - DNA, 22 bp, Artificial Sequence
  Synthetic oligonucleotide; TTC chr11 5193455 5193476 5193460 5193455 -
ttaattaaataaccactcattt

SEQ ID NO: 149149 - DNA, 22 bp, Artificial Sequence
  Synthetic oligonucleotide; CTT chr11 5193453 5193474 5193458 5193453 -
aattaaataaccactcatttta

SEQ ID NO: 149150 - DNA, 22 bp, Artificial Sequence
  Synthetic oligonucleotide; TTA chr11 5193452 5193473 5193457 5193452 -
attaaataaccactcattttag

SEQ ID NO: 149151 - DNA, 22 bp, Artificial Sequence
  Synthetic oligonucleotide; TTA chr11 5193448 5193469 5193453 5193448 -
aataaccactcattttagatcc

SEQ ID NO: 149152 - DNA, 22 bp, Artificial Sequence
  Synthetic oligonucleotide; CTC chr11 5193437 5193458 5193442 5193437 -
attttagatccttgatatttga

SEQ ID NO: 149153 - DNA, 22 bp, Artificial Sequence
  Synthetic oligonucleotide; TTT chr11 5193433 5193454 5193438 5193433 -
tagatccttgatatttgaacag

SEQ ID NO: 149154 - DNA, 22 bp, Artificial Sequence
  Synthetic oligonucleotide; TTT chr11 5193432 5193453 5193437 5193432 -
agatccttgatatttgaacaga

SEQ ID NO: 149155 - DNA, 22 bp, Artificial Sequence
  Synthetic oligonucleotide; TTA chr11 5193431 5193452 5193436 5193431 -
gatccttgatatttgaacagaa

SEQ ID NO: 149156 - DNA, 22 bp, Artificial Sequence
  Synthetic oligonucleotide; CTT chr11 5193424 5193445 5193429 5193424 -
gatatttgaacagaatagtata

SEQ ID NO: 149157 - DNA, 22 bp, Artificial Sequence
  Synthetic oligonucleotide; TTG chr11 5193423 5193444 5193428 5193423 -
atatttgaacagaatagtataa

SEQ ID NO: 149158 - DNA, 22 bp, Artificial Sequence
  Synthetic oligonucleotide; TTT chr11 5193417 5193438 5193422 5193417 -
gaacagaatagtataaaaaata

SEQ ID NO: 149159 - DNA, 22 bp, Artificial Sequence
  Synthetic oligonucleotide; TTG chr11 5193416 5193437 5193421 5193416 -
aacagaatagtataaaaaatag

SEQ ID NO: 149160 - DNA, 22 bp, Artificial Sequence
  Synthetic oligonucleotide; TTT chr11 5193314 5193335 5193319 5193314 -
aagagtgcagaaaaaaaggaca

SEQ ID NO: 149161 - DNA, 22 bp, Artificial Sequence
  Synthetic oligonucleotide; TTA chr11 5193313 5193334 5193318 5193313 -
agagtgcagaaaaaaaggacaa

SEQ ID NO: 149162 - DNA, 22 bp, Artificial Sequence
  Synthetic oligonucleotide; CTC chr11 5193239 5193260 5193244 5193239 -
caaaatcttaactggagttcag

SEQ ID NO: 149163 - DNA, 22 bp, Artificial Sequence
  Synthetic oligonucleotide; CTT chr11 5193230 5193251 5193235 5193230 -
aactggagttcaggagagagtg

SEQ ID NO: 149164 - DNA, 22 bp, Artificial Sequence
  Synthetic oligonucleotide; TTA chr11 5193229 5193250 5193234 5193229 -
actggagttcaggagagagtga

SEQ ID NO: 149165 - DNA, 22 bp, Artificial Sequence
  Synthetic oligonucleotide; CTG chr11 5193225 5193246 5193230 5193225 -
gagttcaggagagagtgaaaat

SEQ ID NO: 149166 - DNA, 22 bp, Artificial Sequence
  Synthetic oligonucleotide; TTC chr11 5193219 5193240 5193224 5193219 -
aggagagagtgaaaatagaaca

SEQ ID NO: 149167 - DNA, 22 bp, Artificial Sequence
  Synthetic oligonucleotide; CTT chr11 5193183 5193204 5193188 5193183 -
actagagatcaatacaagacaa

SEQ ID NO: 149168 - DNA, 22 bp, Artificial Sequence
  Synthetic oligonucleotide; TTA chr11 5193182 5193203 5193187 5193182 -
ctagagatcaatacaagacaat

SEQ ID NO: 149169 - DNA, 22 bp, Artificial Sequence
  Synthetic oligonucleotide; CTA chr11 5193179 5193200 5193184 5193179 -
gagatcaatacaagacaatttt

SEQ ID NO: 149170 - DNA, 22 bp, Artificial Sequence
  Synthetic oligonucleotide; TTT chr11 5193158 5193179 5193163 5193158 -
tctgaacaaaagaacacagcag

SEQ ID NO: 149171 - DNA, 22 bp, Artificial Sequence
  Synthetic oligonucleotide; TTT chr11 5193157 5193178 5193162 5193157 -
ctgaacaaaagaacacagcagt

SEQ ID NO: 149172 - DNA, 22 bp, Artificial Sequence
  Synthetic oligonucleotide; TTC chr11 5193156 5193177 5193161 5193156 -
tgaacaaaagaacacagcagtt

SEQ ID NO: 149173 - DNA, 22 bp, Artificial Sequence
  Synthetic oligonucleotide; CTG chr11 5193154 5193175 5193159 5193154 -
aacaaaagaacacagcagttga

SEQ ID NO: 149174 - DNA, 22 bp, Artificial Sequence
  Synthetic oligonucleotide; TTG chr11 5193133 5193154 5193138 5193133 -
aaattgagagtatccacaaaat

SEQ ID NO: 149175 - DNA, 22 bp, Artificial Sequence
  Synthetic oligonucleotide; TTG chr11 5193127 5193148 5193132 5193127 -
agagtatccacaaaatacccag

SEQ ID NO: 149176 - DNA, 22 bp, Artificial Sequence
  Synthetic oligonucleotide; TTC chr11 5193079 5193100 5193084 5193079 -
atggtaagttaagagaatgaaa

SEQ ID NO: 149177 - DNA, 22 bp, Artificial Sequence
  Synthetic oligonucleotide; TTA chr11 5193068 5193089 5193073 5193068 -
agagaatgaaaaaaacaagcca

SEQ ID NO: 149178 - DNA, 22 bp, Artificial Sequence
  Synthetic oligonucleotide; TTT chr11 5193032 5193053 5193037 5193032 -
gcaaaacatattatctgataaa

SEQ ID NO: 149179 - DNA, 22 bp, Artificial Sequence
  Synthetic oligonucleotide; TTG chr11 5193031 5193052 5193036 5193031 -
caaaacatattatctgataaag

SEQ ID NO: 149180 - DNA, 22 bp, Artificial Sequence
  Synthetic oligonucleotide; TTA chr11 5193019 5193040 5193024 5193019 -
tctgataaaggacttgtataca

SEQ ID NO: 149181 - DNA, 22 bp, Artificial Sequence
  Synthetic oligonucleotide; CTG chr11 5193015 5193036 5193020 5193015 -
ataaaggacttgtatacatatt

SEQ ID NO: 149182 - DNA, 22 bp, Artificial Sequence
  Synthetic oligonucleotide; CTT chr11 5193004 5193025 5193009 5193004 -
gtatacatattatacaaagaac

SEQ ID NO: 149183 - DNA, 22 bp, Artificial Sequence
  Synthetic oligonucleotide; TTG chr11 5193003 5193024 5193008 5193003 -
tatacatattatacaaagaact

SEQ ID NO: 149184 - DNA, 22 bp, Artificial Sequence
  Synthetic oligonucleotide; TTA chr11 5192992 5193013 5192997 5192992 -
tacaaagaacttttaaaattct

SEQ ID NO: 149185 - DNA, 22 bp, Artificial Sequence
  Synthetic oligonucleotide; CTT chr11 5192980 5193001 5192985 5192980 -
ttaaaattctacaataaaaaac

SEQ ID NO: 149186 - DNA, 22 bp, Artificial Sequence
  Synthetic oligonucleotide; TTT chr11 5192979 5193000 5192984 5192979 -
taaaattctacaataaaaaaca

SEQ ID NO: 149187 - DNA, 22 bp, Artificial Sequence
  Synthetic oligonucleotide; TTT chr11 5192978 5192999 5192983 5192978 -
aaaattctacaataaaaaacaa

SEQ ID NO: 149188 - DNA, 22 bp, Artificial Sequence
  Synthetic oligonucleotide; TTA chr11 5192977 5192998 5192982 5192977 -
aaattctacaataaaaaacaaa

SEQ ID NO: 149189 - DNA, 22 bp, Artificial Sequence
  Synthetic oligonucleotide; TTC chr11 5192971 5192992 5192976 5192971 -
tacaataaaaaacaaacaatcc

SEQ ID NO: 149190 - DNA, 22 bp, Artificial Sequence
  Synthetic oligonucleotide; CTA chr11 5192969 5192990 5192974 5192969 -
caataaaaaacaaacaatccaa

SEQ ID NO: 149191 - DNA, 22 bp, Artificial Sequence
  Synthetic oligonucleotide; TTG chr11 5192944 5192965 5192949 5192944 -
caaagtgggcaaaagatctgaa

SEQ ID NO: 149192 - DNA, 22 bp, Artificial Sequence
  Synthetic oligonucleotide; CTG chr11 5192924 5192945 5192929 5192924 -
aacagacactttaccaaagaag

SEQ ID NO: 149193 - DNA, 22 bp, Artificial Sequence
  Synthetic oligonucleotide; CTT chr11 5192913 5192934 5192918 5192913 -
taccaaagaagatatatagatt

SEQ ID NO: 149194 - DNA, 22 bp, Artificial Sequence
  Synthetic oligonucleotide; TTT chr11 5192912 5192933 5192917 5192912 -
accaaagaagatatatagattg

SEQ ID NO: 149195 - DNA, 22 bp, Artificial Sequence
  Synthetic oligonucleotide; TTA chr11 5192911 5192932 5192916 5192911 -
ccaaagaagatatatagattgc

SEQ ID NO: 149196 - DNA, 22 bp, Artificial Sequence
  Synthetic oligonucleotide; TTG chr11 5192890 5192911 5192895 5192890 -
caataagcacatgaaaatatac

SEQ ID NO: 149197 - DNA, 22 bp, Artificial Sequence
  Synthetic oligonucleotide; CTC chr11 5192866 5192887 5192871 5192866 -
agtaacacatgtcattaagaaa

SEQ ID NO: 149198 - DNA, 22 bp, Artificial Sequence
  Synthetic oligonucleotide; TTA chr11 5192849 5192870 5192854 5192849 -
agaaactgcacattaaaacaag

SEQ ID NO: 149199 - DNA, 22 bp, Artificial Sequence
  Synthetic oligonucleotide; CTG chr11 5192841 5192862 5192846 5192841 -
cacattaaaacaagaagatacc

SEQ ID NO: 149200 - DNA, 22 bp, Artificial Sequence
  Synthetic oligonucleotide; TTA chr11 5192834 5192855 5192839 5192834 -
aaacaagaagataccaaccact

SEQ ID NO: 149201 - DNA, 22 bp, Artificial Sequence
  Synthetic oligonucleotide; CTA chr11 5192811 5192832 5192816 5192811 -
cacacatattagaaggccaaat

SEQ ID NO: 149202 - DNA, 22 bp, Artificial Sequence
  Synthetic oligonucleotide; TTA chr11 5192800 5192821 5192805 5192800 -
gaaggccaaattccaaaatact

SEQ ID NO: 149203 - DNA, 22 bp, Artificial Sequence
  Synthetic oligonucleotide; TTC chr11 5192787 5192808 5192792 5192787 -
caaaatactgacatccaccaaa

SEQ ID NO: 149204 - DNA, 22 bp, Artificial Sequence
  Synthetic oligonucleotide; CTG chr11 5192777 5192798 5192782 5192777 -
acatccaccaaacactggcaac

SEQ ID NO: 149205 - DNA, 22 bp, Artificial Sequence
  Synthetic oligonucleotide; CTG chr11 5192760 5192781 5192765 5192760 -
gcaacgaagtggagcaacagta

SEQ ID NO: 149206 - DNA, 22 bp, Artificial Sequence
  Synthetic oligonucleotide; CTC chr11 5192734 5192755 5192739 5192734 -
tcacttattgcttgtagggatg

SEQ ID NO: 149207 - DNA, 22 bp, Artificial Sequence
  Synthetic oligonucleotide; CTC chr11 5192732 5192753 5192737 5192732 -
acttattgcttgtagggatgag

SEQ ID NO: 149208 - DNA, 22 bp, Artificial Sequence
  Synthetic oligonucleotide; CTT chr11 5192728 5192749 5192733 5192728 -
attgcttgtagggatgagaaat

SEQ ID NO: 149209 - DNA, 22 bp, Artificial Sequence
  Synthetic oligonucleotide; TTA chr11 5192727 5192748 5192732 5192727 -
ttgcttgtagggatgagaaata

SEQ ID NO: 149210 - DNA, 22 bp, Artificial Sequence
  Synthetic oligonucleotide; TTG chr11 5192724 5192745 5192729 5192724 -
cttgtagggatgagaaatagtg

SEQ ID NO: 149211 - DNA, 22 bp, Artificial Sequence
  Synthetic oligonucleotide; CTT chr11 5192721 5192742 5192726 5192721 -
gtagggatgagaaatagtgcag

SEQ ID NO: 149212 - DNA, 22 bp, Artificial Sequence
  Synthetic oligonucleotide; TTG chr11 5192720 5192741 5192725 5192720 -
tagggatgagaaatagtgcagc

SEQ ID NO: 149213 - DNA, 22 bp, Artificial Sequence
  Synthetic oligonucleotide; TTG chr11 5192691 5192712 5192696 5192691 -
gaagacagtttacagtttctta

SEQ ID NO: 149214 - DNA, 22 bp, Artificial Sequence
  Synthetic oligonucleotide; TTT chr11 5192680 5192701 5192685 5192680 -
acagtttcttacaaaactagtc

SEQ ID NO: 149215 - DNA, 22 bp, Artificial Sequence
  Synthetic oligonucleotide; TTA chr11 5192679 5192700 5192684 5192679 -
cagtttcttacaaaactagtct

SEQ ID NO: 149216 - DNA, 22 bp, Artificial Sequence
  Synthetic oligonucleotide; TTT chr11 5192673 5192694 5192678 5192673 -
cttacaaaactagtcttttcat

SEQ ID NO: 149217 - DNA, 22 bp, Artificial Sequence
  Synthetic oligonucleotide; TTC chr11 5192672 5192693 5192677 5192672 -
ttacaaaactagtcttttcatg

SEQ ID NO: 149218 - DNA, 22 bp, Artificial Sequence
  Synthetic oligonucleotide; CTT chr11 5192670 5192691 5192675 5192670 -
acaaaactagtcttttcatgtg

SEQ ID NO: 149219 - DNA, 22 bp, Artificial Sequence
  Synthetic oligonucleotide; TTA chr11 5192669 5192690 5192674 5192669 -
caaaactagtcttttcatgtga

SEQ ID NO: 149220 - DNA, 22 bp, Artificial Sequence
  Synthetic oligonucleotide; CTA chr11 5192661 5192682 5192666 5192661 -
gtcttttcatgtgacccaacaa

SEQ ID NO: 149221 - DNA, 22 bp, Artificial Sequence
  Synthetic oligonucleotide; CTT chr11 5192656 5192677 5192661 5192656 -
ttcatgtgacccaacaatcaca

SEQ ID NO: 149222 - DNA, 22 bp, Artificial Sequence
  Synthetic oligonucleotide; TTT chr11 5192655 5192676 5192660 5192655 -
tcatgtgacccaacaatcacac

SEQ ID NO: 149223 - DNA, 22 bp, Artificial Sequence
  Synthetic oligonucleotide; TTT chr11 5192654 5192675 5192659 5192654 -
catgtgacccaacaatcacact

SEQ ID NO: 149224 - DNA, 22 bp, Artificial Sequence
  Synthetic oligonucleotide; TTC chr11 5192653 5192674 5192658 5192653 -
atgtgacccaacaatcacactc

SEQ ID NO: 149225 - DNA, 22 bp, Artificial Sequence
  Synthetic oligonucleotide; CTC chr11 5192631 5192652 5192636 5192631 -
ctatgtatttacccaaatgagt

SEQ ID NO: 149226 - DNA, 22 bp, Artificial Sequence
  Synthetic oligonucleotide; CTA chr11 5192628 5192649 5192633 5192628 -
tgtatttacccaaatgagtcaa

SEQ ID NO: 149227 - DNA, 22 bp, Artificial Sequence
  Synthetic oligonucleotide; TTT chr11 5192621 5192642 5192626 5192621 -
acccaaatgagtcaaaaattta

SEQ ID NO: 149228 - DNA, 22 bp, Artificial Sequence
  Synthetic oligonucleotide; TTA chr11 5192620 5192641 5192625 5192620 -
cccaaatgagtcaaaaatttat

SEQ ID NO: 149229 - DNA, 22 bp, Artificial Sequence
  Synthetic oligonucleotide; TTT chr11 5192600 5192621 5192605 5192600 -
atgtccacacacagacatgaac

SEQ ID NO: 149230 - DNA, 22 bp, Artificial Sequence
  Synthetic oligonucleotide; TTA chr11 5192599 5192620 5192604 5192599 -
tgtccacacacagacatgaact

SEQ ID NO: 149231 - DNA, 22 bp, Artificial Sequence
  Synthetic oligonucleotide; CTA chr11 5192576 5192597 5192581 5192576 -
accaaggtttataggaacttta

SEQ ID NO: 149232 - DNA, 22 bp, Artificial Sequence
  Synthetic oligonucleotide; TTT chr11 5192566 5192587 5192571 5192566 -
ataggaactttactcataattg

SEQ ID NO: 149233 - DNA, 22 bp, Artificial Sequence
  Synthetic oligonucleotide; TTA chr11 5192565 5192586 5192570 5192565 -
taggaactttactcataattgc

SEQ ID NO: 149234 - DNA, 22 bp, Artificial Sequence
  Synthetic oligonucleotide; CTT chr11 5192556 5192577 5192561 5192556 -
tactcataattgccaaaagttg

SEQ ID NO: 149235 - DNA, 22 bp, Artificial Sequence
  Synthetic oligonucleotide; TTT chr11 5192555 5192576 5192560 5192555 -
actcataattgccaaaagttga

SEQ ID NO: 149236 - DNA, 22 bp, Artificial Sequence
  Synthetic oligonucleotide; TTA chr11 5192554 5192575 5192559 5192554 -
ctcataattgccaaaagttgaa

SEQ ID NO: 149237 - DNA, 22 bp, Artificial Sequence
  Synthetic oligonucleotide; CTC chr11 5192551 5192572 5192556 5192551 -
ataattgccaaaagttgaaagt

SEQ ID NO: 149238 - DNA, 22 bp, Artificial Sequence
  Synthetic oligonucleotide; TTG chr11 5192544 5192565 5192549 5192544 -
ccaaaagttgaaagtaaccaag

SEQ ID NO: 149239 - DNA, 22 bp, Artificial Sequence
  Synthetic oligonucleotide; TTG chr11 5192534 5192555 5192539 5192534 -
aaagtaaccaagatgaatggat

SEQ ID NO: 149240 - DNA, 22 bp, Artificial Sequence
  Synthetic oligonucleotide; CTG chr11 5192506 5192527 5192511 5192506 -
tggaacatccataggatagaat

SEQ ID NO: 149241 - DNA, 22 bp, Artificial Sequence
  Synthetic oligonucleotide; TTA chr11 5192480 5192501 5192485 5192480 -
ttcagtgatataaataaaggtc

SEQ ID NO: 149242 - DNA, 22 bp, Artificial Sequence
  Synthetic oligonucleotide; TTC chr11 5192477 5192498 5192482 5192477 -
agtgatataaataaaggtctat

SEQ ID NO: 149243 - DNA, 22 bp, Artificial Sequence
  Synthetic oligonucleotide; CTA chr11 5192456 5192477 5192461 5192456 -
tcaagctgtgaaaagacataaa

SEQ ID NO: 149244 - DNA, 22 bp, Artificial Sequence
  Synthetic oligonucleotide; CTG chr11 5192448 5192469 5192453 5192448 -
tgaaaagacataaagagcttta

SEQ ID NO: 149245 - DNA, 22 bp, Artificial Sequence
  Synthetic oligonucleotide; CTT chr11 5192428 5192449 5192433 5192428 -
taattgtatattgcttaattca

SEQ ID NO: 149246 - DNA, 22 bp, Artificial Sequence
  Synthetic oligonucleotide; TTT chr11 5192427 5192448 5192432 5192427 -
aattgtatattgcttaattcat

SEQ ID NO: 149247 - DNA, 22 bp, Artificial Sequence
  Synthetic oligonucleotide; TTA chr11 5192426 5192447 5192431 5192426 -
attgtatattgcttaattcatt

SEQ ID NO: 149248 - DNA, 22 bp, Artificial Sequence
  Synthetic oligonucleotide; TTG chr11 5192422 5192443 5192427 5192422 -
tatattgcttaattcattttct

SEQ ID NO: 149249 - DNA, 22 bp, Artificial Sequence
  Synthetic oligonucleotide; TTG chr11 5192415 5192436 5192420 5192415 -
cttaattcattttctttaatta

SEQ ID NO: 149250 - DNA, 22 bp, Artificial Sequence
  Synthetic oligonucleotide; CTT chr11 5192412 5192433 5192417 5192412 -
aattcattttctttaattatag

SEQ ID NO: 149251 - DNA, 22 bp, Artificial Sequence
  Synthetic oligonucleotide; TTA chr11 5192411 5192432 5192416 5192411 -
attcattttctttaattatagt

SEQ ID NO: 149252 - DNA, 22 bp, Artificial Sequence
  Synthetic oligonucleotide; TTC chr11 5192407 5192428 5192412 5192407 -
attttctttaattatagtcatc

SEQ ID NO: 149253 - DNA, 22 bp, Artificial Sequence
  Synthetic oligonucleotide; TTT chr11 5192403 5192424 5192408 5192403 -
tctttaattatagtcatcattc

SEQ ID NO: 149254 - DNA, 22 bp, Artificial Sequence
  Synthetic oligonucleotide; TTT chr11 5192402 5192423 5192407 5192402 -
ctttaattatagtcatcattct

SEQ ID NO: 149255 - DNA, 22 bp, Artificial Sequence
  Synthetic oligonucleotide; TTC chr11 5192401 5192422 5192406 5192401 -
tttaattatagtcatcattctc

SEQ ID NO: 149256 - DNA, 22 bp, Artificial Sequence
  Synthetic oligonucleotide; CTT chr11 5192399 5192420 5192404 5192399 -
taattatagtcatcattctcta

SEQ ID NO: 149257 - DNA, 22 bp, Artificial Sequence
  Synthetic oligonucleotide; TTT chr11 5192398 5192419 5192403 5192398 -
aattatagtcatcattctctac

SEQ ID NO: 149258 - DNA, 22 bp, Artificial Sequence
  Synthetic oligonucleotide; TTA chr11 5192397 5192418 5192402 5192397 -
attatagtcatcattctctaca

SEQ ID NO: 149259 - DNA, 22 bp, Artificial Sequence
  Synthetic oligonucleotide; TTA chr11 5192393 5192414 5192398 5192393 -
tagtcatcattctctacatatt

SEQ ID NO: 149260 - DNA, 22 bp, Artificial Sequence
  Synthetic oligonucleotide; TTC chr11 5192381 5192402 5192386 5192381 -
tctacatattactccattaacc

SEQ ID NO: 149261 - DNA, 22 bp, Artificial Sequence
  Synthetic oligonucleotide; CTC chr11 5192379 5192400 5192384 5192379 -
tacatattactccattaaccta

SEQ ID NO: 149262 - DNA, 22 bp, Artificial Sequence
  Synthetic oligonucleotide; CTA chr11 5192377 5192398 5192382 5192377 -
catattactccattaacctatt

SEQ ID NO: 149263 - DNA, 22 bp, Artificial Sequence
  Synthetic oligonucleotide; TTA chr11 5192370 5192391 5192375 5192370 -
ctccattaacctattttatctt

SEQ ID NO: 149264 - DNA, 22 bp, Artificial Sequence
  Synthetic oligonucleotide; CTC chr11 5192367 5192388 5192372 5192367 -
cattaacctattttatcttgct

SEQ ID NO: 149265 - DNA, 22 bp, Artificial Sequence
  Synthetic oligonucleotide; TTA chr11 5192362 5192383 5192367 5192362 -
acctattttatcttgctgttga

SEQ ID NO: 149266 - DNA, 22 bp, Artificial Sequence
  Synthetic oligonucleotide; CTA chr11 5192357 5192378 5192362 5192357 -
ttttatcttgctgttgagaaac

SEQ ID NO: 149267 - DNA, 22 bp, Artificial Sequence
  Synthetic oligonucleotide; TTT chr11 5192354 5192375 5192359 5192354 -
tatcttgctgttgagaaacttc

SEQ ID NO: 149268 - DNA, 22 bp, Artificial Sequence
  Synthetic oligonucleotide; TTT chr11 5192353 5192374 5192358 5192353 -
atcttgctgttgagaaacttcc

SEQ ID NO: 149269 - DNA, 22 bp, Artificial Sequence
  Synthetic oligonucleotide; TTA chr11 5192352 5192373 5192357 5192352 -
tcttgctgttgagaaacttcca

SEQ ID NO: 149270 - DNA, 22 bp, Artificial Sequence
  Synthetic oligonucleotide; CTT chr11 5192348 5192369 5192353 5192348 -
gctgttgagaaacttccattcc

SEQ ID NO: 149271 - DNA, 22 bp, Artificial Sequence
  Synthetic oligonucleotide; TTG chr11 5192347 5192368 5192352 5192347 -
ctgttgagaaacttccattcct

SEQ ID NO: 149272 - DNA, 22 bp, Artificial Sequence
  Synthetic oligonucleotide; CTG chr11 5192344 5192365 5192349 5192344 -
ttgagaaacttccattcctata

SEQ ID NO: 149273 - DNA, 22 bp, Artificial Sequence
  Synthetic oligonucleotide; TTG chr11 5192341 5192362 5192346 5192341 -
agaaacttccattcctatagtc

SEQ ID NO: 149274 - DNA, 22 bp, Artificial Sequence
  Synthetic oligonucleotide; CTT chr11 5192333 5192354 5192338 5192333 -
ccattcctatagtctttcatat

SEQ ID NO: 149275 - DNA, 22 bp, Artificial Sequence
  Synthetic oligonucleotide; TTC chr11 5192332 5192353 5192337 5192332 -
cattcctatagtctttcatatc

SEQ ID NO: 149276 - DNA, 22 bp, Artificial Sequence
  Synthetic oligonucleotide; TTC chr11 5192327 5192348 5192332 5192327 -
ctatagtctttcatatccttct

SEQ ID NO: 149277 - DNA, 22 bp, Artificial Sequence
  Synthetic oligonucleotide; CTA chr11 5192324 5192345 5192329 5192324 -
tagtctttcatatccttctgtt

SEQ ID NO: 149278 - DNA, 22 bp, Artificial Sequence
  Synthetic oligonucleotide; CTT chr11 5192317 5192338 5192322 5192317 -
tcatatccttctgttctgatta

SEQ ID NO: 149279 - DNA, 22 bp, Artificial Sequence
  Synthetic oligonucleotide; TTT chr11 5192316 5192337 5192321 5192316 -
catatccttctgttctgattat

SEQ ID NO: 149280 - DNA, 22 bp, Artificial Sequence
  Synthetic oligonucleotide; TTC chr11 5192315 5192336 5192320 5192315 -
atatccttctgttctgattatt

SEQ ID NO: 149281 - DNA, 22 bp, Artificial Sequence
  Synthetic oligonucleotide; CTT chr11 5192307 5192328 5192312 5192307 -
ctgttctgattattattcctca

SEQ ID NO: 149282 - DNA, 22 bp, Artificial Sequence
  Synthetic oligonucleotide; TTC chr11 5192306 5192327 5192311 5192306 -
tgttctgattattattcctcaa

SEQ ID NO: 149283 - DNA, 22 bp, Artificial Sequence
  Synthetic oligonucleotide; CTG chr11 5192304 5192325 5192309 5192304 -
ttctgattattattcctcaaac

SEQ ID NO: 149284 - DNA, 22 bp, Artificial Sequence
  Synthetic oligonucleotide; TTC chr11 5192301 5192322 5192306 5192301 -
tgattattattcctcaaacaaa

SEQ ID NO: 149285 - DNA, 22 bp, Artificial Sequence
  Synthetic oligonucleotide; CTG chr11 5192299 5192320 5192304 5192299 -
attattattcctcaaacaaata

SEQ ID NO: 149286 - DNA, 22 bp, Artificial Sequence
  Synthetic oligonucleotide; TTA chr11 5192295 5192316 5192300 5192295 -
ttattcctcaaacaaatataga

SEQ ID NO: 149287 - DNA, 22 bp, Artificial Sequence
  Synthetic oligonucleotide; TTA chr11 5192292 5192313 5192297 5192292 -
ttcctcaaacaaatatagatat

SEQ ID NO: 149288 - DNA, 22 bp, Artificial Sequence
  Synthetic oligonucleotide; TTC chr11 5192289 5192310 5192294 5192289 -
ctcaaacaaatatagatattca

SEQ ID NO: 149289 - DNA, 22 bp, Artificial Sequence
  Synthetic oligonucleotide; CTC chr11 5192286 5192307 5192291 5192286 -
aaacaaatatagatattcaata

SEQ ID NO: 149290 - DNA, 22 bp, Artificial Sequence
  Synthetic oligonucleotide; TTC chr11 5192268 5192289 5192273 5192268 -
aataatagacaaatagtgaata

SEQ ID NO: 149291 - DNA, 22 bp, Artificial Sequence
  Synthetic oligonucleotide; TTC chr11 5192231 5192252 5192236 5192231 -
tttgacttagtttcagacagct

SEQ ID NO: 149292 - DNA, 22 bp, Artificial Sequence
  Synthetic oligonucleotide; CTT chr11 5192229 5192250 5192234 5192229 -
tgacttagtttcagacagctat

SEQ ID NO: 149293 - DNA, 22 bp, Artificial Sequence
  Synthetic oligonucleotide; TTT chr11 5192228 5192249 5192233 5192228 -
gacttagtttcagacagctatt

SEQ ID NO: 149294 - DNA, 22 bp, Artificial Sequence
  Synthetic oligonucleotide; TTG chr11 5192227 5192248 5192232 5192227 -
acttagtttcagacagctattg

SEQ ID NO: 149295 - DNA, 22 bp, Artificial Sequence
  Synthetic oligonucleotide; CTT chr11 5192223 5192244 5192228 5192223 -
agtttcagacagctattgcata

SEQ ID NO: 149296 - DNA, 22 bp, Artificial Sequence
  Synthetic oligonucleotide; TTA chr11 5192222 5192243 5192227 5192222 -
gtttcagacagctattgcatag

SEQ ID NO: 149297 - DNA, 22 bp, Artificial Sequence
  Synthetic oligonucleotide; TTT chr11 5192218 5192239 5192223 5192218 -
cagacagctattgcatagaatg

SEQ ID NO: 149298 - DNA, 22 bp, Artificial Sequence
  Synthetic oligonucleotide; TTC chr11 5192217 5192238 5192222 5192217 -
agacagctattgcatagaatga

SEQ ID NO: 149299 - DNA, 22 bp, Artificial Sequence
  Synthetic oligonucleotide; CTA chr11 5192208 5192229 5192213 5192208 -
ttgcatagaatgaaatagatta

SEQ ID NO: 149300 - DNA, 22 bp, Artificial Sequence
  Synthetic oligonucleotide; TTG chr11 5192205 5192226 5192210 5192205 -
catagaatgaaatagattaata

SEQ ID NO: 149301 - DNA, 22 bp, Artificial Sequence
  Synthetic oligonucleotide; TTA chr11 5192186 5192207 5192191 5192186 -
atatttaataacaggtaatgtt

SEQ ID NO: 149302 - DNA, 22 bp, Artificial Sequence
  Synthetic oligonucleotide; TTT chr11 5192180 5192201 5192185 5192180 -
aataacaggtaatgttatgatt

SEQ ID NO: 149303 - DNA, 22 bp, Artificial Sequence
  Synthetic oligonucleotide; TTA chr11 5192179 5192200 5192184 5192179 -
ataacaggtaatgttatgattt

SEQ ID NO: 149304 - DNA, 22 bp, Artificial Sequence
  Synthetic oligonucleotide; TTA chr11 5192163 5192184 5192168 5192163 -
tgatttattaaaaataagatga

SEQ ID NO: 149305 - DNA, 22 bp, Artificial Sequence
  Synthetic oligonucleotide; TTT chr11 5192157 5192178 5192162 5192157 -
attaaaaataagatgataaata

SEQ ID NO: 149306 - DNA, 22 bp, Artificial Sequence
  Synthetic oligonucleotide; TTA chr11 5192156 5192177 5192161 5192156 -
ttaaaaataagatgataaataa

SEQ ID NO: 149307 - DNA, 22 bp, Artificial Sequence
  Synthetic oligonucleotide; TTA chr11 5192153 5192174 5192158 5192153 -
aaaataagatgataaataaaag

SEQ ID NO: 149308 - DNA, 22 bp, Artificial Sequence
  Synthetic oligonucleotide; TTT chr11 5192127 5192148 5192132 5192127 -
agtatcttcccatggagataac

SEQ ID NO: 149309 - DNA, 22 bp, Artificial Sequence
  Synthetic oligonucleotide; TTA chr11 5192126 5192147 5192131 5192126 -
gtatcttcccatggagataaca

SEQ ID NO: 149310 - DNA, 22 bp, Artificial Sequence
  Synthetic oligonucleotide; CTT chr11 5192119 5192140 5192124 5192119 -
cccatggagataacacacttag

SEQ ID NO: 149311 - DNA, 22 bp, Artificial Sequence
  Synthetic oligonucleotide; TTC chr11 5192118 5192139 5192123 5192118 -
ccatggagataacacacttaga

SEQ ID NO: 149312 - DNA, 22 bp, Artificial Sequence
  Synthetic oligonucleotide; CTT chr11 5192099 5192120 5192104 5192099 -
agatacaggtttcatgtcactt

SEQ ID NO: 149313 - DNA, 22 bp, Artificial Sequence
  Synthetic oligonucleotide; TTA chr11 5192098 5192119 5192103 5192098 -
gatacaggtttcatgtcacttt

SEQ ID NO: 149314 - DNA, 22 bp, Artificial Sequence
  Synthetic oligonucleotide; TTT chr11 5192087 5192108 5192092 5192087 -
catgtcactttggacatgagta

SEQ ID NO: 149315 - DNA, 22 bp, Artificial Sequence
  Synthetic oligonucleotide; TTC chr11 5192086 5192107 5192091 5192086 -
atgtcactttggacatgagtaa

SEQ ID NO: 149316 - DNA, 22 bp, Artificial Sequence
  Synthetic oligonucleotide; CTT chr11 5192077 5192098 5192082 5192077 -
tggacatgagtaaagaggagta

SEQ ID NO: 149317 - DNA, 22 bp, Artificial Sequence
  Synthetic oligonucleotide; TTT chr11 5192076 5192097 5192081 5192076 -
ggacatgagtaaagaggagtaa

SEQ ID NO: 149318 - DNA, 22 bp, Artificial Sequence
  Synthetic oligonucleotide; TTG chr11 5192075 5192096 5192080 5192075 -
gacatgagtaaagaggagtaaa

SEQ ID NO: 149319 - DNA, 22 bp, Artificial Sequence
  Synthetic oligonucleotide; TTA chr11 5192046 5192067 5192051 5192046 -
actcccaaatcttgatcacatt

SEQ ID NO: 149320 - DNA, 22 bp, Artificial Sequence
  Synthetic oligonucleotide; CTC chr11 5192042 5192063 5192047 5192042 -
ccaaatcttgatcacattgagt

SEQ ID NO: 149321 - DNA, 22 bp, Artificial Sequence
  Synthetic oligonucleotide; CTT chr11 5192033 5192054 5192038 5192033 -
gatcacattgagtatcaaagga

SEQ ID NO: 149322 - DNA, 22 bp, Artificial Sequence
  Synthetic oligonucleotide; TTG chr11 5192032 5192053 5192037 5192032 -
atcacattgagtatcaaaggaa

SEQ ID NO: 149323 - DNA, 22 bp, Artificial Sequence
  Synthetic oligonucleotide; TTG chr11 5192023 5192044 5192028 5192023 -
agtatcaaaggaaggaagaaga

SEQ ID NO: 149324 - DNA, 22 bp, Artificial Sequence
  Synthetic oligonucleotide; TTA chr11 5191993 5192014 5191998 5191993 -
ttaatggtggcattaaatatca

SEQ ID NO: 149325 - DNA, 22 bp, Artificial Sequence
  Synthetic oligonucleotide; TTA chr11 5191990 5192011 5191995 5191990 -
atggtggcattaaatatcattt

SEQ ID NO: 149326 - DNA, 22 bp, Artificial Sequence
  Synthetic oligonucleotide; TTA chr11 5191978 5191999 5191983 5191978 -
aatatcatttattattggatgt

SEQ ID NO: 149327 - DNA, 22 bp, Artificial Sequence
  Synthetic oligonucleotide; TTT chr11 5191968 5191989 5191973 5191968 -
attattggatgtgttattggca

SEQ ID NO: 149328 - DNA, 22 bp, Artificial Sequence
  Synthetic oligonucleotide; TTA chr11 5191967 5191988 5191972 5191967 -
ttattggatgtgttattggcat

SEQ ID NO: 149329 - DNA, 22 bp, Artificial Sequence
  Synthetic oligonucleotide; TTA chr11 5191964 5191985 5191969 5191964 -
ttggatgtgttattggcattgt

SEQ ID NO: 149330 - DNA, 22 bp, Artificial Sequence
  Synthetic oligonucleotide; TTG chr11 5191961 5191982 5191966 5191961 -
gatgtgttattggcattgtatt

SEQ ID NO: 149331 - DNA, 22 bp, Artificial Sequence
  Synthetic oligonucleotide; TTA chr11 5191952 5191973 5191957 5191952 -
ttggcattgtattggcatgttt

SEQ ID NO: 149332 - DNA, 22 bp, Artificial Sequence
  Synthetic oligonucleotide; TTG chr11 5191949 5191970 5191954 5191949 -
gcattgtattggcatgttttca

SEQ ID NO: 149333 - DNA, 22 bp, Artificial Sequence
  Synthetic oligonucleotide; TTG chr11 5191943 5191964 5191948 5191943 -
tattggcatgttttcacactgc

SEQ ID NO: 149334 - DNA, 22 bp, Artificial Sequence
  Synthetic oligonucleotide; TTG chr11 5191938 5191959 5191943 5191938 -
gcatgttttcacactgctgtaa

SEQ ID NO: 149335 - DNA, 22 bp, Artificial Sequence
  Synthetic oligonucleotide; TTT chr11 5191930 5191951 5191935 5191930 -
tcacactgctgtaaaaaaatac

SEQ ID NO: 149336 - DNA, 22 bp, Artificial Sequence
  Synthetic oligonucleotide; TTT chr11 5191929 5191950 5191934 5191929 -
cacactgctgtaaaaaaatacc

SEQ ID NO: 149337 - DNA, 22 bp, Artificial Sequence
  Synthetic oligonucleotide; TTC chr11 5191928 5191949 5191933 5191928 -
acactgctgtaaaaaaatacct

SEQ ID NO: 149338 - DNA, 22 bp, Artificial Sequence
  Synthetic oligonucleotide; CTG chr11 5191922 5191943 5191927 5191922 -
ctgtaaaaaaatacctgagact

SEQ ID NO: 149339 - DNA, 22 bp, Artificial Sequence
  Synthetic oligonucleotide; CTG chr11 5191919 5191940 5191924 5191919 -
taaaaaaatacctgagactggg

SEQ ID NO: 149340 - DNA, 22 bp, Artificial Sequence
  Synthetic oligonucleotide; CTG chr11 5191905 5191926 5191910 5191905 -
agactgggtaatttataaagaa

SEQ ID NO: 149341 - DNA, 22 bp, Artificial Sequence
  Synthetic oligonucleotide; CTG chr11 5191899 5191920 5191904 5191899 -
ggtaatttataaagaacagagg

SEQ ID NO: 149342 - DNA, 22 bp, Artificial Sequence
  Synthetic oligonucleotide; TTT chr11 5191891 5191912 5191896 5191891 -
ataaagaacagaggtttaattg

SEQ ID NO: 149343 - DNA, 22 bp, Artificial Sequence
  Synthetic oligonucleotide; TTA chr11 5191890 5191911 5191895 5191890 -
taaagaacagaggtttaattgg

SEQ ID NO: 149344 - DNA, 22 bp, Artificial Sequence
  Synthetic oligonucleotide; TTT chr11 5191874 5191895 5191879 5191874 -
aattggctcaaagttcttcagg

SEQ ID NO: 149345 - DNA, 22 bp, Artificial Sequence
  Synthetic oligonucleotide; TTA chr11 5191873 5191894 5191878 5191873 -
attggctcaaagttcttcaggc

SEQ ID NO: 149346 - DNA, 22 bp, Artificial Sequence
  Synthetic oligonucleotide; TTG chr11 5191869 5191890 5191874 5191869 -
gctcaaagttcttcaggctgta

SEQ ID NO: 149347 - DNA, 22 bp, Artificial Sequence
  Synthetic oligonucleotide; CTC chr11 5191865 5191886 5191870 5191865 -
aaagttcttcaggctgtacaag

SEQ ID NO: 149348 - DNA, 22 bp, Artificial Sequence
  Synthetic oligonucleotide; TTC chr11 5191858 5191879 5191863 5191858 -
ttcaggctgtacaagaagcatg

SEQ ID NO: 149349 - DNA, 22 bp, Artificial Sequence
  Synthetic oligonucleotide; CTT chr11 5191856 5191877 5191861 5191856 -
caggctgtacaagaagcatggc

SEQ ID NO: 149350 - DNA, 22 bp, Artificial Sequence
  Synthetic oligonucleotide; TTC chr11 5191855 5191876 5191860 5191855 -
aggctgtacaagaagcatggca

SEQ ID NO: 149351 - DNA, 22 bp, Artificial Sequence
  Synthetic oligonucleotide; CTG chr11 5191849 5191870 5191854 5191849 -
tacaagaagcatggcagcatct

SEQ ID NO: 149352 - DNA, 22 bp, Artificial Sequence
  Synthetic oligonucleotide; CTG chr11 5191826 5191847 5191831 5191826 -
ctcagcttctagggagacctca

SEQ ID NO: 149353 - DNA, 22 bp, Artificial Sequence
  Synthetic oligonucleotide; CTC chr11 5191823 5191844 5191828 5191823 -
agcttctagggagacctcaaga

SEQ ID NO: 149354 - DNA, 22 bp, Artificial Sequence
  Synthetic oligonucleotide; CTT chr11 5191818 5191839 5191823 5191818 -
ctagggagacctcaagaaactt

SEQ ID NO: 149355 - DNA, 22 bp, Artificial Sequence
  Synthetic oligonucleotide; TTC chr11 5191817 5191838 5191822 5191817 -
tagggagacctcaagaaactta

SEQ ID NO: 149356 - DNA, 22 bp, Artificial Sequence
  Synthetic oligonucleotide; CTA chr11 5191815 5191836 5191820 5191815 -
gggagacctcaagaaacttaca

SEQ ID NO: 149357 - DNA, 22 bp, Artificial Sequence
  Synthetic oligonucleotide; CTC chr11 5191805 5191826 5191810 5191805 -
aagaaacttacaatcatggcag

SEQ ID NO: 149358 - DNA, 22 bp, Artificial Sequence
  Synthetic oligonucleotide; CTT chr11 5191796 5191817 5191801 5191796 -
acaatcatggcagaagacaaag

SEQ ID NO: 149359 - DNA, 22 bp, Artificial Sequence
  Synthetic oligonucleotide; TTA chr11 5191795 5191816 5191800 5191795 -
caatcatggcagaagacaaagc

SEQ ID NO: 149360 - DNA, 22 bp, Artificial Sequence
  Synthetic oligonucleotide; CTT chr11 5191758 5191779 5191763 5191758 -
cacatggccaggacagggagaa

SEQ ID NO: 149361 - DNA, 22 bp, Artificial Sequence
  Synthetic oligonucleotide; TTC chr11 5191757 5191778 5191762 5191757 -
acatggccaggacagggagaag

SEQ ID NO: 149362 - DNA, 22 bp, Artificial Sequence
  Synthetic oligonucleotide; CTA chr11 5191718 5191739 5191723 5191718 -
cacactttcaaacaaccagcct

SEQ ID NO: 149363 - DNA, 22 bp, Artificial Sequence
  Synthetic oligonucleotide; CTT chr11 5191711 5191732 5191716 5191711 -
tcaaacaaccagcctcttgaga

SEQ ID NO: 149364 - DNA, 22 bp, Artificial Sequence
  Synthetic oligonucleotide; TTT chr11 5191710 5191731 5191715 5191710 -
caaacaaccagcctcttgagaa

SEQ ID NO: 149365 - DNA, 22 bp, Artificial Sequence
  Synthetic oligonucleotide; TTC chr11 5191709 5191730 5191714 5191709 -
aaacaaccagcctcttgagaac

SEQ ID NO: 149366 - DNA, 22 bp, Artificial Sequence
  Synthetic oligonucleotide; CTC chr11 5191695 5191716 5191700 5191695 -
ttgagaactcactatacagtac

SEQ ID NO: 149367 - DNA, 22 bp, Artificial Sequence
  Synthetic oligonucleotide; CTT chr11 5191693 5191714 5191698 5191693 -
gagaactcactatacagtacca

SEQ ID NO: 149368 - DNA, 22 bp, Artificial Sequence
  Synthetic oligonucleotide; TTG chr11 5191692 5191713 5191697 5191692 -
agaactcactatacagtaccaa

SEQ ID NO: 149369 - DNA, 22 bp, Artificial Sequence
  Synthetic oligonucleotide; CTC chr11 5191685 5191706 5191690 5191685 -
actatacagtaccaagggggat

SEQ ID NO: 149370 - DNA, 22 bp, Artificial Sequence
  Synthetic oligonucleotide; CTA chr11 5191681 5191702 5191686 5191681 -
tacagtaccaagggggatggta

SEQ ID NO: 149371 - DNA, 22 bp, Artificial Sequence
  Synthetic oligonucleotide; CTA chr11 5191656 5191677 5191661 5191656 -
aatcgctgatgagaactctgcc

SEQ ID NO: 149372 - DNA, 22 bp, Artificial Sequence
  Synthetic oligonucleotide; CTG chr11 5191648 5191669 5191653 5191648 -
atgagaactctgccaccatgat

SEQ ID NO: 149373 - DNA, 22 bp, Artificial Sequence
  Synthetic oligonucleotide; CTC chr11 5191638 5191659 5191643 5191638 -
tgccaccatgattgaattacct

SEQ ID NO: 149374 - DNA, 22 bp, Artificial Sequence
  Synthetic oligonucleotide; CTG chr11 5191636 5191657 5191641 5191636 -
ccaccatgattgaattacctcc

SEQ ID NO: 149375 - DNA, 22 bp, Artificial Sequence
  Synthetic oligonucleotide; TTG chr11 5191624 5191645 5191629 5191624 -
aattacctcccacaaggcccca

SEQ ID NO: 149376 - DNA, 22 bp, Artificial Sequence
  Synthetic oligonucleotide; TTA chr11 5191619 5191640 5191624 5191619 -
cctcccacaaggccccacctcc

SEQ ID NO: 149377 - DNA, 22 bp, Artificial Sequence
  Synthetic oligonucleotide; CTC chr11 5191615 5191636 5191620 5191615 -
ccacaaggccccacctccaacg

SEQ ID NO: 149378 - DNA, 22 bp, Artificial Sequence
  Synthetic oligonucleotide; CTC chr11 5191598 5191619 5191603 5191598 -
caacgctggtgattataattta

SEQ ID NO: 149379 - DNA, 22 bp, Artificial Sequence
  Synthetic oligonucleotide; CTG chr11 5191590 5191611 5191595 5191590 -
gtgattataatttaacatgata

SEQ ID NO: 149380 - DNA, 22 bp, Artificial Sequence
  Synthetic oligonucleotide; TTA chr11 5191583 5191604 5191588 5191583 -
taatttaacatgatatttgggt

SEQ ID NO: 149381 - DNA, 22 bp, Artificial Sequence
  Synthetic oligonucleotide; TTT chr11 5191577 5191598 5191582 5191577 -
aacatgatatttgggtggtgac

SEQ ID NO: 149382 - DNA, 22 bp, Artificial Sequence
  Synthetic oligonucleotide; TTA chr11 5191576 5191597 5191581 5191576 -
acatgatatttgggtggtgaca

SEQ ID NO: 149383 - DNA, 22 bp, Artificial Sequence
  Synthetic oligonucleotide; TTT chr11 5191565 5191586 5191570 5191565 -
gggtggtgacacagatccaaac

SEQ ID NO: 149384 - DNA, 22 bp, Artificial Sequence
  Synthetic oligonucleotide; TTG chr11 5191564 5191585 5191569 5191564 -
ggtggtgacacagatccaaacc

SEQ ID NO: 149385 - DNA, 22 bp, Artificial Sequence
  Synthetic oligonucleotide; CTT chr11 5191534 5191555 5191539 5191534 -
ccacctctggccccttccaaat

SEQ ID NO: 149386 - DNA, 22 bp, Artificial Sequence
  Synthetic oligonucleotide; TTC chr11 5191533 5191554 5191538 5191533 -
cacctctggccccttccaaatc

SEQ ID NO: 149387 - DNA, 22 bp, Artificial Sequence
  Synthetic oligonucleotide; CTC chr11 5191527 5191548 5191532 5191527 -
tggccccttccaaatctcatgt

SEQ ID NO: 149388 - DNA, 22 bp, Artificial Sequence
  Synthetic oligonucleotide; CTG chr11 5191525 5191546 5191530 5191525 -
gccccttccaaatctcatgttc

SEQ ID NO: 149389 - DNA, 22 bp, Artificial Sequence
  Synthetic oligonucleotide; CTT chr11 5191518 5191539 5191523 5191518 -
ccaaatctcatgttcttctcac

SEQ ID NO: 149390 - DNA, 22 bp, Artificial Sequence
  Synthetic oligonucleotide; TTC chr11 5191517 5191538 5191522 5191517 -
caaatctcatgttcttctcaca

SEQ ID NO: 149391 - DNA, 22 bp, Artificial Sequence
  Synthetic oligonucleotide; CTC chr11 5191509 5191530 5191514 5191509 -
atgttcttctcacatcacaaaa

SEQ ID NO: 149392 - DNA, 22 bp, Artificial Sequence
  Synthetic oligonucleotide; TTC chr11 5191503 5191524 5191508 5191503 -
ttctcacatcacaaaatacaat

SEQ ID NO: 149393 - DNA, 22 bp, Artificial Sequence
  Synthetic oligonucleotide; CTT chr11 5191501 5191522 5191506 5191501 -
ctcacatcacaaaatacaatca

SEQ ID NO: 149394 - DNA, 22 bp, Artificial Sequence
  Synthetic oligonucleotide; TTC chr11 5191500 5191521 5191505 5191500 -
tcacatcacaaaatacaatcat

SEQ ID NO: 149395 - DNA, 22 bp, Artificial Sequence
  Synthetic oligonucleotide; CTC chr11 5191498 5191519 5191503 5191498 -
acatcacaaaatacaatcatta

SEQ ID NO: 149396 - DNA, 22 bp, Artificial Sequence
  Synthetic oligonucleotide; TTA chr11 5191476 5191497 5191481 5191476 -
cttcccaacagtcctacaaagt

SEQ ID NO: 149397 - DNA, 22 bp, Artificial Sequence
  Synthetic oligonucleotide; CTT chr11 5191473 5191494 5191478 5191473 -
cccaacagtcctacaaagtctt

SEQ ID NO: 149398 - DNA, 22 bp, Artificial Sequence
  Synthetic oligonucleotide; TTC chr11 5191472 5191493 5191477 5191472 -
ccaacagtcctacaaagtctta

SEQ ID NO: 149399 - DNA, 22 bp, Artificial Sequence
  Synthetic oligonucleotide; CTA chr11 5191460 5191481 5191465 5191460 -
caaagtcttaactcattccagc

SEQ ID NO: 149400 - DNA, 22 bp, Artificial Sequence
  Synthetic oligonucleotide; CTT chr11 5191451 5191472 5191456 5191451 -
aactcattccagcattaactca

SEQ ID NO: 149401 - DNA, 22 bp, Artificial Sequence
  Synthetic oligonucleotide; TTA chr11 5191450 5191471 5191455 5191450 -
actcattccagcattaactcaa

SEQ ID NO: 149402 - DNA, 22 bp, Artificial Sequence
  Synthetic oligonucleotide; CTC chr11 5191446 5191467 5191451 5191446 -
attccagcattaactcaaaagt

SEQ ID NO: 149403 - DNA, 22 bp, Artificial Sequence
  Synthetic oligonucleotide; TTC chr11 5191442 5191463 5191447 5191442 -
cagcattaactcaaaagtccaa

SEQ ID NO: 149404 - DNA, 22 bp, Artificial Sequence
  Synthetic oligonucleotide; TTA chr11 5191434 5191455 5191439 5191434 -
actcaaaagtccaaagtccaaa

SEQ ID NO: 149405 - DNA, 22 bp, Artificial Sequence
  Synthetic oligonucleotide; CTC chr11 5191430 5191451 5191435 5191430 -
aaaagtccaaagtccaaagtct

SEQ ID NO: 149406 - DNA, 22 bp, Artificial Sequence
  Synthetic oligonucleotide; CTT chr11 5191407 5191428 5191412 5191407 -
atccaagacaaggcaagtccct

SEQ ID NO: 149407 - DNA, 22 bp, Artificial Sequence
  Synthetic oligonucleotide; TTA chr11 5191406 5191427 5191411 5191406 -
tccaagacaaggcaagtccctt

SEQ ID NO: 149408 - DNA, 22 bp, Artificial Sequence
  Synthetic oligonucleotide; CTT chr11 5191384 5191405 5191389 5191384 -
caacctatgagcctgtaaaatc

SEQ ID NO: 149409 - DNA, 22 bp, Artificial Sequence
  Synthetic oligonucleotide; TTC chr11 5191383 5191404 5191388 5191383 -
aacctatgagcctgtaaaatca

SEQ ID NO: 149410 - DNA, 22 bp, Artificial Sequence
  Synthetic oligonucleotide; CTA chr11 5191377 5191398 5191382 5191377 -
tgagcctgtaaaatcaaaaaca

SEQ ID NO: 149411 - DNA, 22 bp, Artificial Sequence
  Synthetic oligonucleotide; CTG chr11 5191369 5191390 5191374 5191369 -
taaaatcaaaaacaagttagtt

SEQ ID NO: 149412 - DNA, 22 bp, Artificial Sequence
  Synthetic oligonucleotide; TTA chr11 5191350 5191371 5191355 5191350 -
gttacttccaagacataatgga

SEQ ID NO: 149413 - DNA, 22 bp, Artificial Sequence
  Synthetic oligonucleotide; TTA chr11 5191346 5191367 5191351 5191346 -
cttccaagacataatggaggta

SEQ ID NO: 149414 - DNA, 22 bp, Artificial Sequence
  Synthetic oligonucleotide; CTT chr11 5191343 5191364 5191348 5191343 -
ccaagacataatggaggtactg

SEQ ID NO: 149415 - DNA, 22 bp, Artificial Sequence
  Synthetic oligonucleotide; TTC chr11 5191342 5191363 5191347 5191342 -
caagacataatggaggtactgg

SEQ ID NO: 149416 - DNA, 22 bp, Artificial Sequence
  Synthetic oligonucleotide; CTG chr11 5191321 5191342 5191326 5191321 -
gcattgggtacaaattcccatt

SEQ ID NO: 149417 - DNA, 22 bp, Artificial Sequence
  Synthetic oligonucleotide; TTG chr11 5191315 5191336 5191320 5191315 -
ggtacaaattcccattccaaaa

SEQ ID NO: 149418 - DNA, 22 bp, Artificial Sequence
  Synthetic oligonucleotide; TTC chr11 5191304 5191325 5191309 5191304 -
ccattccaaaagagagaaatgc

SEQ ID NO: 149419 - DNA, 22 bp, Artificial Sequence
  Synthetic oligonucleotide; TTC chr11 5191298 5191319 5191303 5191298 -
caaaagagagaaatgcaccaaa

SEQ ID NO: 149420 - DNA, 22 bp, Artificial Sequence
  Synthetic oligonucleotide; CTA chr11 5191264 5191285 5191269 5191264 -
aagatcccacacgagtagaaaa

SEQ ID NO: 149421 - DNA, 22 bp, Artificial Sequence
  Synthetic oligonucleotide; TTA chr11 5191223 5191244 5191228 5191223 -
caccttgatatggtttggcagt

SEQ ID NO: 149422 - DNA, 22 bp, Artificial Sequence
  Synthetic oligonucleotide; CTT chr11 5191217 5191238 5191222 5191217 -
gatatggtttggcagttttccc

SEQ ID NO: 149423 - DNA, 22 bp, Artificial Sequence
  Synthetic oligonucleotide; TTG chr11 5191216 5191237 5191221 5191216 -
atatggtttggcagttttccca

SEQ ID NO: 149424 - DNA, 22 bp, Artificial Sequence
  Synthetic oligonucleotide; TTT chr11 5191207 5191228 5191212 5191207 -
ggcagttttcccacccaaattt

SEQ ID NO: 149425 - DNA, 22 bp, Artificial Sequence
  Synthetic oligonucleotide; TTG chr11 5191206 5191227 5191211 5191206 -
gcagttttcccacccaaatttc

SEQ ID NO: 149426 - DNA, 22 bp, Artificial Sequence
  Synthetic oligonucleotide; TTT chr11 5191199 5191220 5191204 5191199 -
tcccacccaaatttcttcttga

SEQ ID NO: 149427 - DNA, 22 bp, Artificial Sequence
  Synthetic oligonucleotide; TTT chr11 5191198 5191219 5191203 5191198 -
cccacccaaatttcttcttgaa

SEQ ID NO: 149428 - DNA, 22 bp, Artificial Sequence
  Synthetic oligonucleotide; TTC chr11 5191197 5191218 5191202 5191197 -
ccacccaaatttcttcttgaat

SEQ ID NO: 149429 - DNA, 22 bp, Artificial Sequence
  Synthetic oligonucleotide; TTT chr11 5191185 5191206 5191190 5191185 -
cttcttgaatagtaggtcccat

SEQ ID NO: 149430 - DNA, 22 bp, Artificial Sequence
  Synthetic oligonucleotide; TTC chr11 5191184 5191205 5191189 5191184 -
ttcttgaatagtaggtcccata

SEQ ID NO: 149431 - DNA, 22 bp, Artificial Sequence
  Synthetic oligonucleotide; CTT chr11 5191182 5191203 5191187 5191182 -
cttgaatagtaggtcccataat

SEQ ID NO: 149432 - DNA, 22 bp, Artificial Sequence
  Synthetic oligonucleotide; TTC chr11 5191181 5191202 5191186 5191181 -
ttgaatagtaggtcccataatc

SEQ ID NO: 149433 - DNA, 22 bp, Artificial Sequence
  Synthetic oligonucleotide; CTT chr11 5191179 5191200 5191184 5191179 -
gaatagtaggtcccataatccc

SEQ ID NO: 149434 - DNA, 22 bp, Artificial Sequence
  Synthetic oligonucleotide; TTG chr11 5191178 5191199 5191183 5191178 -
aatagtaggtcccataatccct

SEQ ID NO: 149435 - DNA, 22 bp, Artificial Sequence
  Synthetic oligonucleotide; CTG chr11 5191155 5191176 5191160 5191155 -
cctgtcatggaaggaacacact

SEQ ID NO: 149436 - DNA, 22 bp, Artificial Sequence
  Synthetic oligonucleotide; CTG chr11 5191151 5191172 5191156 5191151 -
tcatggaaggaacacactggga

SEQ ID NO: 149437 - DNA, 22 bp, Artificial Sequence
  Synthetic oligonucleotide; CTG chr11 5191132 5191153 5191137 5191132 -
ggatgtaattgaatcatggggg

SEQ ID NO: 149438 - DNA, 22 bp, Artificial Sequence
  Synthetic oligonucleotide; TTG chr11 5191121 5191142 5191126 5191121 -
aatcatgggggtaggtttttca

SEQ ID NO: 149439 - DNA, 22 bp, Artificial Sequence
  Synthetic oligonucleotide; TTT chr11 5191103 5191124 5191108 5191103 -
ttcacatgctgttctcatgata

SEQ ID NO: 149440 - DNA, 22 bp, Artificial Sequence
  Synthetic oligonucleotide; TTT chr11 5191102 5191123 5191107 5191102 -
tcacatgctgttctcatgatag

SEQ ID NO: 149441 - DNA, 22 bp, Artificial Sequence
  Synthetic oligonucleotide; TTT chr11 5191101 5191122 5191106 5191101 -
cacatgctgttctcatgatagt

SEQ ID NO: 149442 - DNA, 22 bp, Artificial Sequence
  Synthetic oligonucleotide; TTC chr11 5191100 5191121 5191105 5191100 -
acatgctgttctcatgatagtg

SEQ ID NO: 149443 - DNA, 22 bp, Artificial Sequence
  Synthetic oligonucleotide; CTG chr11 5191092 5191113 5191097 5191092 -
ttctcatgatagtgagtaagtc

SEQ ID NO: 149444 - DNA, 22 bp, Artificial Sequence
  Synthetic oligonucleotide; TTC chr11 5191089 5191110 5191094 5191089 -
tcatgatagtgagtaagtctca

SEQ ID NO: 149445 - DNA, 22 bp, Artificial Sequence
  Synthetic oligonucleotide; CTC chr11 5191087 5191108 5191092 5191087 -
atgatagtgagtaagtctcaca

SEQ ID NO: 149446 - DNA, 22 bp, Artificial Sequence
  Synthetic oligonucleotide; CTC chr11 5191068 5191089 5191073 5191068 -
acaagatctgatggttttataa

SEQ ID NO: 149447 - DNA, 22 bp, Artificial Sequence
  Synthetic oligonucleotide; CTG chr11 5191058 5191079 5191063 5191058 -
atggttttataaagggcatttc

SEQ ID NO: 149448 - DNA, 22 bp, Artificial Sequence
  Synthetic oligonucleotide; TTT chr11 5191051 5191072 5191056 5191051 -
tataaagggcatttcccttgca

SEQ ID NO: 149449 - DNA, 22 bp, Artificial Sequence
  Synthetic oligonucleotide; TTT chr11 5191050 5191071 5191055 5191050 -
ataaagggcatttcccttgcac

SEQ ID NO: 149450 - DNA, 22 bp, Artificial Sequence
  Synthetic oligonucleotide; TTA chr11 5191049 5191070 5191054 5191049 -
taaagggcatttcccttgcaca

SEQ ID NO: 149451 - DNA, 22 bp, Artificial Sequence
  Synthetic oligonucleotide; TTT chr11 5191037 5191058 5191042 5191037 -
cccttgcacatgctctcttgcc

SEQ ID NO: 149452 - DNA, 22 bp, Artificial Sequence
  Synthetic oligonucleotide; TTC chr11 5191036 5191057 5191041 5191036 -
ccttgcacatgctctcttgcct

SEQ ID NO: 149453 - DNA, 22 bp, Artificial Sequence
  Synthetic oligonucleotide; CTT chr11 5191032 5191053 5191037 5191032 -
gcacatgctctcttgcctgcca

SEQ ID NO: 149454 - DNA, 22 bp, Artificial Sequence
  Synthetic oligonucleotide; TTG chr11 5191031 5191052 5191036 5191031 -
cacatgctctcttgcctgccac

SEQ ID NO: 149455 - DNA, 22 bp, Artificial Sequence
  Synthetic oligonucleotide; CTC chr11 5191022 5191043 5191027 5191022 -
tcttgcctgccaccatgtcaga

SEQ ID NO: 149456 - DNA, 22 bp, Artificial Sequence
  Synthetic oligonucleotide; CTC chr11 5191020 5191041 5191025 5191020 -
ttgcctgccaccatgtcagatg

SEQ ID NO: 149457 - DNA, 22 bp, Artificial Sequence
  Synthetic oligonucleotide; CTT chr11 5191018 5191039 5191023 5191018 -
gcctgccaccatgtcagatgtg

SEQ ID NO: 149458 - DNA, 22 bp, Artificial Sequence
  Synthetic oligonucleotide; TTG chr11 5191017 5191038 5191022 5191017 -
cctgccaccatgtcagatgtga

SEQ ID NO: 149459 - DNA, 22 bp, Artificial Sequence
  Synthetic oligonucleotide; CTG chr11 5191013 5191034 5191018 5191013 -
ccaccatgtcagatgtgacttt

SEQ ID NO: 149460 - DNA, 22 bp, Artificial Sequence
  Synthetic oligonucleotide; CTT chr11 5190992 5191013 5190997 5190992 -
tgctcctccttcaccttccacc

SEQ ID NO: 149461 - DNA, 22 bp, Artificial Sequence
  Synthetic oligonucleotide; TTT chr11 5190991 5191012 5190996 5190991 -
gctcctccttcaccttccacca

SEQ ID NO: 149462 - DNA, 22 bp, Artificial Sequence
  Synthetic oligonucleotide; TTG chr11 5190990 5191011 5190995 5190990 -
ctcctccttcaccttccaccat

SEQ ID NO: 149463 - DNA, 22 bp, Artificial Sequence
  Synthetic oligonucleotide; CTC chr11 5190987 5191008 5190992 5190987 -
ctccttcaccttccaccatgat

SEQ ID NO: 149464 - DNA, 22 bp, Artificial Sequence
  Synthetic oligonucleotide; CTC chr11 5190984 5191005 5190989 5190984 -
cttcaccttccaccatgattgt

SEQ ID NO: 149465 - DNA, 22 bp, Artificial Sequence
  Synthetic oligonucleotide; CTT chr11 5190981 5191002 5190986 5190981 -
caccttccaccatgattgtaag

SEQ ID NO: 149466 - DNA, 22 bp, Artificial Sequence
  Synthetic oligonucleotide; TTC chr11 5190980 5191001 5190985 5190980 -
accttccaccatgattgtaagg

SEQ ID NO: 149467 - DNA, 22 bp, Artificial Sequence
  Synthetic oligonucleotide; CTT chr11 5190975 5190996 5190980 5190975 -
ccaccatgattgtaaggcctcc

SEQ ID NO: 149468 - DNA, 22 bp, Artificial Sequence
  Synthetic oligonucleotide; TTC chr11 5190974 5190995 5190979 5190974 -
caccatgattgtaaggcctccc

SEQ ID NO: 149469 - DNA, 22 bp, Artificial Sequence
  Synthetic oligonucleotide; TTG chr11 5190963 5190984 5190968 5190963 -
taaggcctccccagcaatgtgg

SEQ ID NO: 149470 - DNA, 22 bp, Artificial Sequence
  Synthetic oligonucleotide; CTC chr11 5190954 5190975 5190959 5190954 -
cccagcaatgtggatctatgag

SEQ ID NO: 149471 - DNA, 22 bp, Artificial Sequence
  Synthetic oligonucleotide; CTA chr11 5190936 5190957 5190941 5190936 -
tgagtccattaaatctcttttt

SEQ ID NO: 149472 - DNA, 22 bp, Artificial Sequence
  Synthetic oligonucleotide; TTA chr11 5190925 5190946 5190930 5190925 -
aatctctttttctttataaatt

SEQ ID NO: 149473 - DNA, 22 bp, Artificial Sequence
  Synthetic oligonucleotide; CTC chr11 5190919 5190940 5190924 5190919 -
tttttctttataaattacccag

SEQ ID NO: 149474 - DNA, 22 bp, Artificial Sequence
  Synthetic oligonucleotide; CTT chr11 5190917 5190938 5190922 5190917 -
tttctttataaattacccagtc

SEQ ID NO: 149475 - DNA, 22 bp, Artificial Sequence
  Synthetic oligonucleotide; TTT chr11 5190916 5190937 5190921 5190916 -
ttctttataaattacccagtct

SEQ ID NO: 149476 - DNA, 22 bp, Artificial Sequence
  Synthetic oligonucleotide; TTT chr11 5190915 5190936 5190920 5190915 -
tctttataaattacccagtctc

SEQ ID NO: 149477 - DNA, 22 bp, Artificial Sequence
  Synthetic oligonucleotide; TTT chr11 5190914 5190935 5190919 5190914 -
ctttataaattacccagtctcg

SEQ ID NO: 149478 - DNA, 22 bp, Artificial Sequence
  Synthetic oligonucleotide; TTC chr11 5190913 5190934 5190918 5190913 -
tttataaattacccagtctcgg

SEQ ID NO: 149479 - DNA, 22 bp, Artificial Sequence
  Synthetic oligonucleotide; CTT chr11 5190911 5190932 5190916 5190911 -
tataaattacccagtctcgggt

SEQ ID NO: 149480 - DNA, 22 bp, Artificial Sequence
  Synthetic oligonucleotide; TTT chr11 5190910 5190931 5190915 5190910 -
ataaattacccagtctcgggta

SEQ ID NO: 149481 - DNA, 22 bp, Artificial Sequence
  Synthetic oligonucleotide; TTA chr11 5190909 5190930 5190914 5190909 -
taaattacccagtctcgggtat

SEQ ID NO: 149482 - DNA, 22 bp, Artificial Sequence
  Synthetic oligonucleotide; TTA chr11 5190902 5190923 5190907 5190902 -
cccagtctcgggtatttcttca

SEQ ID NO: 149483 - DNA, 22 bp, Artificial Sequence
  Synthetic oligonucleotide; CTC chr11 5190893 5190914 5190898 5190893 -
gggtatttcttcatagcagttt

SEQ ID NO: 149484 - DNA, 22 bp, Artificial Sequence
  Synthetic oligonucleotide; TTT chr11 5190885 5190906 5190890 5190885 -
cttcatagcagtttaaaacgga

SEQ ID NO: 149485 - DNA, 22 bp, Artificial Sequence
  Synthetic oligonucleotide; TTC chr11 5190884 5190905 5190889 5190884 -
ttcatagcagtttaaaacggac

SEQ ID NO: 149486 - DNA, 22 bp, Artificial Sequence
  Synthetic oligonucleotide; CTT chr11 5190882 5190903 5190887 5190882 -
catagcagtttaaaacggacaa

SEQ ID NO: 149487 - DNA, 22 bp, Artificial Sequence
  Synthetic oligonucleotide; TTC chr11 5190881 5190902 5190886 5190881 -
atagcagtttaaaacggacaaa

SEQ ID NO: 149488 - DNA, 22 bp, Artificial Sequence
  Synthetic oligonucleotide; TTT chr11 5190871 5190892 5190876 5190871 -
aaaacggacaaatacacacctt

SEQ ID NO: 149489 - DNA, 22 bp, Artificial Sequence
  Synthetic oligonucleotide; TTA chr11 5190870 5190891 5190875 5190870 -
aaacggacaaatacacacctta

SEQ ID NO: 149490 - DNA, 22 bp, Artificial Sequence
  Synthetic oligonucleotide; CTT chr11 5190849 5190870 5190854 5190849 -
aacactccaaaataatctcctt

SEQ ID NO: 149491 - DNA, 22 bp, Artificial Sequence
  Synthetic oligonucleotide; TTA chr11 5190848 5190869 5190853 5190848 -
acactccaaaataatctccttt

SEQ ID NO: 149492 - DNA, 22 bp, Artificial Sequence
  Synthetic oligonucleotide; CTC chr11 5190842 5190863 5190847 5190842 -
caaaataatctcctttgacccc

SEQ ID NO: 149493 - DNA, 22 bp, Artificial Sequence
  Synthetic oligonucleotide; CTC chr11 5190830 5190851 5190835 5190830 -
ctttgaccccatgtctcatatc

SEQ ID NO: 149494 - DNA, 22 bp, Artificial Sequence
  Synthetic oligonucleotide; CTT chr11 5190827 5190848 5190832 5190827 -
tgaccccatgtctcatatcagg

SEQ ID NO: 149495 - DNA, 22 bp, Artificial Sequence
  Synthetic oligonucleotide; TTT chr11 5190826 5190847 5190831 5190826 -
gaccccatgtctcatatcaggg

SEQ ID NO: 149496 - DNA, 22 bp, Artificial Sequence
  Synthetic oligonucleotide; TTG chr11 5190825 5190846 5190830 5190825 -
accccatgtctcatatcaggga

SEQ ID NO: 149497 - DNA, 22 bp, Artificial Sequence
  Synthetic oligonucleotide; CTC chr11 5190813 5190834 5190818 5190813 -
atatcagggacacactgatgca

SEQ ID NO: 149498 - DNA, 22 bp, Artificial Sequence
  Synthetic oligonucleotide; CTG chr11 5190796 5190817 5190801 5190796 -
atgcaagaggtgggctcccaag

SEQ ID NO: 149499 - DNA, 22 bp, Artificial Sequence
  Synthetic oligonucleotide; CTC chr11 5190779 5190800 5190784 5190779 -
ccaaggccttgggcagttccac

SEQ ID NO: 149500 - DNA, 22 bp, Artificial Sequence
  Synthetic oligonucleotide; CTT chr11 5190769 5190790 5190774 5190769 -
gggcagttccacccctattgct

SEQ ID NO: 149501 - DNA, 22 bp, Artificial Sequence
  Synthetic oligonucleotide; TTG chr11 5190768 5190789 5190773 5190768 -
ggcagttccacccctattgctt

SEQ ID NO: 149502 - DNA, 22 bp, Artificial Sequence
  Synthetic oligonucleotide; TTC chr11 5190760 5190781 5190765 5190760 -
cacccctattgctttgcacagt

SEQ ID NO: 149503 - DNA, 22 bp, Artificial Sequence
  Synthetic oligonucleotide; CTA chr11 5190752 5190773 5190757 5190752 -
ttgctttgcacagtttagcccc

SEQ ID NO: 149504 - DNA, 22 bp, Artificial Sequence
  Synthetic oligonucleotide; TTG chr11 5190749 5190770 5190754 5190749 -
ctttgcacagtttagcccctgc

SEQ ID NO: 149505 - DNA, 22 bp, Artificial Sequence
  Synthetic oligonucleotide; CTT chr11 5190746 5190767 5190751 5190746 -
tgcacagtttagcccctgctgc

SEQ ID NO: 149506 - DNA, 22 bp, Artificial Sequence
  Synthetic oligonucleotide; TTT chr11 5190745 5190766 5190750 5190745 -
gcacagtttagcccctgctgct

SEQ ID NO: 149507 - DNA, 22 bp, Artificial Sequence
  Synthetic oligonucleotide; TTG chr11 5190744 5190765 5190749 5190744 -
cacagtttagcccctgctgctg

SEQ ID NO: 149508 - DNA, 22 bp, Artificial Sequence
  Synthetic oligonucleotide; TTT chr11 5190736 5190757 5190741 5190736 -
agcccctgctgctgctcttaag

SEQ ID NO: 149509 - DNA, 22 bp, Artificial Sequence
  Synthetic oligonucleotide; TTA chr11 5190735 5190756 5190740 5190735 -
gcccctgctgctgctcttaaga

SEQ ID NO: 149510 - DNA, 22 bp, Artificial Sequence
  Synthetic oligonucleotide; CTG chr11 5190728 5190749 5190733 5190728 -
ctgctgctcttaagagattgta

SEQ ID NO: 149511 - DNA, 22 bp, Artificial Sequence
  Synthetic oligonucleotide; CTG chr11 5190725 5190746 5190730 5190725 -
ctgctcttaagagattgtattg

SEQ ID NO: 149512 - DNA, 22 bp, Artificial Sequence
  Synthetic oligonucleotide; CTG chr11 5190722 5190743 5190727 5190722 -
ctcttaagagattgtattgagt

SEQ ID NO: 149513 - DNA, 22 bp, Artificial Sequence
  Synthetic oligonucleotide; CTC chr11 5190719 5190740 5190724 5190719 -
ttaagagattgtattgagtgtt

SEQ ID NO: 149514 - DNA, 22 bp, Artificial Sequence
  Synthetic oligonucleotide; CTT chr11 5190717 5190738 5190722 5190717 -
aagagattgtattgagtgtttg

SEQ ID NO: 149515 - DNA, 22 bp, Artificial Sequence
  Synthetic oligonucleotide; TTA chr11 5190716 5190737 5190721 5190716 -
agagattgtattgagtgtttgc

SEQ ID NO: 149516 - DNA, 22 bp, Artificial Sequence
  Synthetic oligonucleotide; TTG chr11 5190708 5190729 5190713 5190708 -
tattgagtgtttgcagcttttc

SEQ ID NO: 149517 - DNA, 22 bp, Artificial Sequence
  Synthetic oligonucleotide; TTG chr11 5190703 5190724 5190708 5190703 -
agtgtttgcagcttttctaggt

SEQ ID NO: 149518 - DNA, 22 bp, Artificial Sequence
  Synthetic oligonucleotide; TTT chr11 5190696 5190717 5190701 5190696 -
gcagcttttctaggtgcacggt

SEQ ID NO: 149519 - DNA, 22 bp, Artificial Sequence
  Synthetic oligonucleotide; TTG chr11 5190695 5190716 5190700 5190695 -
cagcttttctaggtgcacggtg

SEQ ID NO: 149520 - DNA, 22 bp, Artificial Sequence
  Synthetic oligonucleotide; CTT chr11 5190689 5190710 5190694 5190689 -
ttctaggtgcacggtgcaaact

SEQ ID NO: 149521 - DNA, 22 bp, Artificial Sequence
  Synthetic oligonucleotide; TTT chr11 5190688 5190709 5190693 5190688 -
tctaggtgcacggtgcaaactg

SEQ ID NO: 149522 - DNA, 22 bp, Artificial Sequence
  Synthetic oligonucleotide; TTT chr11 5190687 5190708 5190692 5190687 -
ctaggtgcacggtgcaaactgt

SEQ ID NO: 149523 - DNA, 22 bp, Artificial Sequence
  Synthetic oligonucleotide; TTC chr11 5190686 5190707 5190691 5190686 -
taggtgcacggtgcaaactgtc

SEQ ID NO: 149524 - DNA, 22 bp, Artificial Sequence
  Synthetic oligonucleotide; CTA chr11 5190684 5190705 5190689 5190684 -
ggtgcacggtgcaaactgtcag

SEQ ID NO: 149525 - DNA, 22 bp, Artificial Sequence
  Synthetic oligonucleotide; CTG chr11 5190666 5190687 5190671 5190666 -
tcagtggatctaccattctggg

SEQ ID NO: 149526 - DNA, 22 bp, Artificial Sequence
  Synthetic oligonucleotide; CTA chr11 5190654 5190675 5190659 5190654 -
ccattctggggtctggaggacg

SEQ ID NO: 149527 - DNA, 22 bp, Artificial Sequence
  Synthetic oligonucleotide; TTC chr11 5190648 5190669 5190653 5190648 -
tggggtctggaggacggtggcc

SEQ ID NO: 149528 - DNA, 22 bp, Artificial Sequence
  Synthetic oligonucleotide; CTG chr11 5190646 5190667 5190651 5190646 -
gggtctggaggacggtggccct

SEQ ID NO: 149529 - DNA, 22 bp, Artificial Sequence
  Synthetic oligonucleotide; CTG chr11 5190639 5190660 5190644 5190639 -
gaggacggtggcccttttctca

SEQ ID NO: 149530 - DNA, 22 bp, Artificial Sequence
  Synthetic oligonucleotide; CTT chr11 5190623 5190644 5190628 5190623 -
ttctcatagctctgctaggcag

SEQ ID NO: 149531 - DNA, 22 bp, Artificial Sequence
  Synthetic oligonucleotide; TTT chr11 5190622 5190643 5190627 5190622 -
tctcatagctctgctaggcagt

SEQ ID NO: 149532 - DNA, 22 bp, Artificial Sequence
  Synthetic oligonucleotide; TTT chr11 5190621 5190642 5190626 5190621 -
ctcatagctctgctaggcagtg

SEQ ID NO: 149533 - DNA, 22 bp, Artificial Sequence
  Synthetic oligonucleotide; TTC chr11 5190620 5190641 5190625 5190620 -
tcatagctctgctaggcagtgc

SEQ ID NO: 149534 - DNA, 22 bp, Artificial Sequence
  Synthetic oligonucleotide; CTC chr11 5190618 5190639 5190623 5190618 -
atagctctgctaggcagtgccc

SEQ ID NO: 149535 - DNA, 22 bp, Artificial Sequence
  Synthetic oligonucleotide; CTC chr11 5190611 5190632 5190616 5190611 -
tgctaggcagtgccccagtgga

SEQ ID NO: 149536 - DNA, 22 bp, Artificial Sequence
  Synthetic oligonucleotide; CTG chr11 5190609 5190630 5190614 5190609 -
ctaggcagtgccccagtggaga

SEQ ID NO: 149537 - DNA, 22 bp, Artificial Sequence
  Synthetic oligonucleotide; CTA chr11 5190606 5190627 5190611 5190606 -
ggcagtgccccagtggagactc

SEQ ID NO: 149538 - DNA, 22 bp, Artificial Sequence
  Synthetic oligonucleotide; CTC chr11 5190584 5190605 5190589 5190584 -
tgtgagggggttccaacctcat

SEQ ID NO: 149539 - DNA, 22 bp, Artificial Sequence
  Synthetic oligonucleotide; CTG chr11 5190582 5190603 5190587 5190582 -
tgagggggttccaacctcatat

SEQ ID NO: 149540 - DNA, 22 bp, Artificial Sequence
  Synthetic oligonucleotide; TTC chr11 5190571 5190592 5190576 5190571 -
caacctcatatttttcctccac

SEQ ID NO: 149541 - DNA, 22 bp, Artificial Sequence
  Synthetic oligonucleotide; CTC chr11 5190564 5190585 5190569 5190564 -
atatttttcctccacattgccc

SEQ ID NO: 149542 - DNA, 22 bp, Artificial Sequence
  Synthetic oligonucleotide; TTT chr11 5190558 5190579 5190563 5190558 -
ttcctccacattgccctattag

SEQ ID NO: 149543 - DNA, 22 bp, Artificial Sequence
  Synthetic oligonucleotide; TTT chr11 5190557 5190578 5190562 5190557 -
tcctccacattgccctattaga

SEQ ID NO: 149544 - DNA, 22 bp, Artificial Sequence
  Synthetic oligonucleotide; TTT chr11 5190556 5190577 5190561 5190556 -
cctccacattgccctattagag

SEQ ID NO: 149545 - DNA, 22 bp, Artificial Sequence
  Synthetic oligonucleotide; TTC chr11 5190555 5190576 5190560 5190555 -
ctccacattgccctattagagg

SEQ ID NO: 149546 - DNA, 22 bp, Artificial Sequence
  Synthetic oligonucleotide; CTC chr11 5190552 5190573 5190557 5190552 -
cacattgccctattagaggttc

SEQ ID NO: 149547 - DNA, 22 bp, Artificial Sequence
  Synthetic oligonucleotide; TTG chr11 5190545 5190566 5190550 5190545 -
ccctattagaggttcttcatga

SEQ ID NO: 149548 - DNA, 22 bp, Artificial Sequence
  Synthetic oligonucleotide; CTA chr11 5190540 5190561 5190545 5190540 -
ttagaggttcttcatgagggtt

SEQ ID NO: 149549 - DNA, 22 bp, Artificial Sequence
  Synthetic oligonucleotide; TTA chr11 5190537 5190558 5190542 5190537 -
gaggttcttcatgagggttctg

SEQ ID NO: 149550 - DNA, 22 bp, Artificial Sequence
  Synthetic oligonucleotide; TTC chr11 5190530 5190551 5190535 5190530 -
ttcatgagggttctgcccctgc

SEQ ID NO: 149551 - DNA, 22 bp, Artificial Sequence
  Synthetic oligonucleotide; CTT chr11 5190528 5190549 5190533 5190528 -
catgagggttctgcccctgcag

SEQ ID NO: 149552 - DNA, 22 bp, Artificial Sequence
  Synthetic oligonucleotide; TTC chr11 5190527 5190548 5190532 5190527 -
atgagggttctgcccctgcagg

SEQ ID NO: 149553 - DNA, 22 bp, Artificial Sequence
  Synthetic oligonucleotide; TTC chr11 5190517 5190538 5190522 5190517 -
tgcccctgcaggaggcttctgc

SEQ ID NO: 149554 - DNA, 22 bp, Artificial Sequence
  Synthetic oligonucleotide; CTG chr11 5190515 5190536 5190520 5190515 -
cccctgcaggaggcttctgcct

SEQ ID NO: 149555 - DNA, 22 bp, Artificial Sequence
  Synthetic oligonucleotide; CTG chr11 5190509 5190530 5190514 5190509 -
caggaggcttctgcctgaacac

SEQ ID NO: 149556 - DNA, 22 bp, Artificial Sequence
  Synthetic oligonucleotide; CTT chr11 5190499 5190520 5190504 5190499 -
ctgcctgaacactcaggctttt

SEQ ID NO: 149557 - DNA, 22 bp, Artificial Sequence
  Synthetic oligonucleotide; TTC chr11 5190498 5190519 5190503 5190498 -
tgcctgaacactcaggcttttc

SEQ ID NO: 149558 - DNA, 22 bp, Artificial Sequence
  Synthetic oligonucleotide; CTG chr11 5190496 5190517 5190501 5190496 -
cctgaacactcaggcttttcta

SEQ ID NO: 149559 - DNA, 22 bp, Artificial Sequence
  Synthetic oligonucleotide; CTG chr11 5190492 5190513 5190497 5190492 -
aacactcaggcttttctacaca

SEQ ID NO: 149560 - DNA, 22 bp, Artificial Sequence
  Synthetic oligonucleotide; CTC chr11 5190485 5190506 5190490 5190485 -
aggcttttctacacatcctctg

SEQ ID NO: 149561 - DNA, 22 bp, Artificial Sequence
  Synthetic oligonucleotide; CTT chr11 5190479 5190500 5190484 5190479 -
ttctacacatcctctgaaatct

SEQ ID NO: 149562 - DNA, 22 bp, Artificial Sequence
  Synthetic oligonucleotide; TTT chr11 5190478 5190499 5190483 5190478 -
tctacacatcctctgaaatcta

SEQ ID NO: 149563 - DNA, 22 bp, Artificial Sequence
  Synthetic oligonucleotide; TTT chr11 5190477 5190498 5190482 5190477 -
ctacacatcctctgaaatctag

SEQ ID NO: 149564 - DNA, 22 bp, Artificial Sequence
  Synthetic oligonucleotide; TTC chr11 5190476 5190497 5190481 5190476 -
tacacatcctctgaaatctagg

SEQ ID NO: 149565 - DNA, 22 bp, Artificial Sequence
  Synthetic oligonucleotide; CTA chr11 5190474 5190495 5190479 5190474 -
cacatcctctgaaatctaggtg

SEQ ID NO: 149566 - DNA, 22 bp, Artificial Sequence
  Synthetic oligonucleotide; CTC chr11 5190465 5190486 5190470 5190465 -
tgaaatctaggtggaggcttac

SEQ ID NO: 149567 - DNA, 22 bp, Artificial Sequence
  Synthetic oligonucleotide; CTG chr11 5190463 5190484 5190468 5190463 -
aaatctaggtggaggcttacaa

SEQ ID NO: 149568 - DNA, 22 bp, Artificial Sequence
  Synthetic oligonucleotide; CTA chr11 5190456 5190477 5190461 5190456 -
ggtggaggcttacaagcctcaa

SEQ ID NO: 149569 - DNA, 22 bp, Artificial Sequence
  Synthetic oligonucleotide; CTT chr11 5190445 5190466 5190450 5190445 -
acaagcctcaactttttgacct

SEQ ID NO: 149570 - DNA, 22 bp, Artificial Sequence
  Synthetic oligonucleotide; TTA chr11 5190444 5190465 5190449 5190444 -
caagcctcaactttttgacctt

SEQ ID NO: 149571 - DNA, 22 bp, Artificial Sequence
  Synthetic oligonucleotide; CTC chr11 5190436 5190457 5190441 5190436 -
aactttttgacctttgcacact

SEQ ID NO: 149572 - DNA, 22 bp, Artificial Sequence
  Synthetic oligonucleotide; CTT chr11 5190431 5190452 5190436 5190431 -
tttgacctttgcacactcccag

SEQ ID NO: 149573 - DNA, 22 bp, Artificial Sequence
  Synthetic oligonucleotide; TTT chr11 5190430 5190451 5190435 5190430 -
ttgacctttgcacactcccaga

SEQ ID NO: 149574 - DNA, 22 bp, Artificial Sequence
  Synthetic oligonucleotide; TTT chr11 5190429 5190450 5190434 5190429 -
tgacctttgcacactcccagat

SEQ ID NO: 149575 - DNA, 22 bp, Artificial Sequence
  Synthetic oligonucleotide; TTT chr11 5190428 5190449 5190433 5190428 -
gacctttgcacactcccagatt

SEQ ID NO: 149576 - DNA, 22 bp, Artificial Sequence
  Synthetic oligonucleotide; TTG chr11 5190427 5190448 5190432 5190427 -
acctttgcacactcccagattt

SEQ ID NO: 149577 - DNA, 22 bp, Artificial Sequence
  Synthetic oligonucleotide; CTT chr11 5190422 5190443 5190427 5190422 -
tgcacactcccagatttatcac

SEQ ID NO: 149578 - DNA, 22 bp, Artificial Sequence
  Synthetic oligonucleotide; TTT chr11 5190421 5190442 5190426 5190421 -
gcacactcccagatttatcacc

SEQ ID NO: 149579 - DNA, 22 bp, Artificial Sequence
  Synthetic oligonucleotide; TTG chr11 5190420 5190441 5190425 5190420 -
cacactcccagatttatcacca

SEQ ID NO: 149580 - DNA, 22 bp, Artificial Sequence
  Synthetic oligonucleotide; CTC chr11 5190413 5190434 5190418 5190413 -
ccagatttatcaccatgtggaa

SEQ ID NO: 149581 - DNA, 22 bp, Artificial Sequence
  Synthetic oligonucleotide; TTT chr11 5190405 5190426 5190410 5190405 -
atcaccatgtggaagcctccaa

SEQ ID NO: 149582 - DNA, 22 bp, Artificial Sequence
  Synthetic oligonucleotide; TTA chr11 5190404 5190425 5190409 5190404 -
tcaccatgtggaagcctccaag

SEQ ID NO: 149583 - DNA, 22 bp, Artificial Sequence
  Synthetic oligonucleotide; CTC chr11 5190386 5190407 5190391 5190386 -
caaggcttatgtcttgcaccct

SEQ ID NO: 149584 - DNA, 22 bp, Artificial Sequence
  Synthetic oligonucleotide; CTT chr11 5190378 5190399 5190383 5190378 -
atgtcttgcaccctctgaagca

SEQ ID NO: 149585 - DNA, 22 bp, Artificial Sequence
  Synthetic oligonucleotide; TTA chr11 5190377 5190398 5190382 5190377 -
tgtcttgcaccctctgaagcag

SEQ ID NO: 149586 - DNA, 22 bp, Artificial Sequence
  Synthetic oligonucleotide; CTT chr11 5190371 5190392 5190376 5190371 -
gcaccctctgaagcagtggcct

SEQ ID NO: 149587 - DNA, 22 bp, Artificial Sequence
  Synthetic oligonucleotide; TTG chr11 5190370 5190391 5190375 5190370 -
caccctctgaagcagtggcctt

SEQ ID NO: 149588 - DNA, 22 bp, Artificial Sequence
  Synthetic oligonucleotide; CTC chr11 5190363 5190384 5190368 5190363 -
tgaagcagtggccttagctgtt

SEQ ID NO: 149589 - DNA, 22 bp, Artificial Sequence
  Synthetic oligonucleotide; CTG chr11 5190361 5190382 5190366 5190361 -
aagcagtggccttagctgttct

SEQ ID NO: 149590 - DNA, 22 bp, Artificial Sequence
  Synthetic oligonucleotide; CTT chr11 5190348 5190369 5190353 5190348 -
agctgttcttgggcccctttga

SEQ ID NO: 149591 - DNA, 22 bp, Artificial Sequence
  Synthetic oligonucleotide; TTA chr11 5190347 5190368 5190352 5190347 -
gctgttcttgggcccctttgag

SEQ ID NO: 149592 - DNA, 22 bp, Artificial Sequence
  Synthetic oligonucleotide; CTG chr11 5190343 5190364 5190348 5190343 -
ttcttgggcccctttgagccac

SEQ ID NO: 149593 - DNA, 22 bp, Artificial Sequence
  Synthetic oligonucleotide; TTC chr11 5190340 5190361 5190345 5190340 -
ttgggcccctttgagccacagc

SEQ ID NO: 149594 - DNA, 22 bp, Artificial Sequence
  Synthetic oligonucleotide; CTT chr11 5190338 5190359 5190343 5190338 -
gggcccctttgagccacagctg

SEQ ID NO: 149595 - DNA, 22 bp, Artificial Sequence
  Synthetic oligonucleotide; TTG chr11 5190337 5190358 5190342 5190337 -
ggcccctttgagccacagctgg

SEQ ID NO: 149596 - DNA, 22 bp, Artificial Sequence
  Synthetic oligonucleotide; CTT chr11 5190329 5190350 5190334 5190329 -
tgagccacagctggtgctggag

SEQ ID NO: 149597 - DNA, 22 bp, Artificial Sequence
  Synthetic oligonucleotide; TTT chr11 5190328 5190349 5190333 5190328 -
gagccacagctggtgctggagc

SEQ ID NO: 149598 - DNA, 22 bp, Artificial Sequence
  Synthetic oligonucleotide; TTG chr11 5190327 5190348 5190332 5190327 -
agccacagctggtgctggagca

SEQ ID NO: 149599 - DNA, 22 bp, Artificial Sequence
  Synthetic oligonucleotide; CTG chr11 5190316 5190337 5190321 5190316 -
gtgctggagcagccaggatgca

SEQ ID NO: 149600 - DNA, 22 bp, Artificial Sequence
  Synthetic oligonucleotide; CTG chr11 5190310 5190331 5190315 5190310 -
gagcagccaggatgcaaggaac

SEQ ID NO: 149601 - DNA, 22 bp, Artificial Sequence
  Synthetic oligonucleotide; CTG chr11 5190279 5190300 5190284 5190279 -
aagctgctcaaggcagcagggt

SEQ ID NO: 149602 - DNA, 22 bp, Artificial Sequence
  Synthetic oligonucleotide; CTG chr11 5190273 5190294 5190278 5190273 -
ctcaaggcagcagggtcctgaa

SEQ ID NO: 149603 - DNA, 22 bp, Artificial Sequence
  Synthetic oligonucleotide; CTC chr11 5190270 5190291 5190275 5190270 -
aaggcagcagggtcctgaatct

SEQ ID NO: 149604 - DNA, 22 bp, Artificial Sequence
  Synthetic oligonucleotide; CTG chr11 5190253 5190274 5190258 5190253 -
aatctcacccacaaaatcattc

SEQ ID NO: 149605 - DNA, 22 bp, Artificial Sequence
  Synthetic oligonucleotide; CTC chr11 5190247 5190268 5190252 5190247 -
acccacaaaatcattcagtact

SEQ ID NO: 149606 - DNA, 22 bp, Artificial Sequence
  Synthetic oligonucleotide; TTC chr11 5190231 5190252 5190236 5190231 -
agtactcctaggccaccaggcc

SEQ ID NO: 149607 - DNA, 22 bp, Artificial Sequence
  Synthetic oligonucleotide; CTC chr11 5190224 5190245 5190229 5190224 -
ctaggccaccaggcctgtgatg

SEQ ID NO: 149608 - DNA, 22 bp, Artificial Sequence
  Synthetic oligonucleotide; CTA chr11 5190221 5190242 5190226 5190221 -
ggccaccaggcctgtgatgtga

SEQ ID NO: 149609 - DNA, 22 bp, Artificial Sequence
  Synthetic oligonucleotide; CTG chr11 5190207 5190228 5190212 5190207 -
tgatgtgaggggctgctacaag

SEQ ID NO: 149610 - DNA, 22 bp, Artificial Sequence
  Synthetic oligonucleotide; CTG chr11 5190192 5190213 5190197 5190192 -
ctacaagggtctctgaaatgtc

SEQ ID NO: 149611 - DNA, 22 bp, Artificial Sequence
  Synthetic oligonucleotide; CTA chr11 5190189 5190210 5190194 5190189 -
caagggtctctgaaatgtcttt

SEQ ID NO: 149612 - DNA, 22 bp, Artificial Sequence
  Synthetic oligonucleotide; CTC chr11 5190179 5190200 5190184 5190179 -
tgaaatgtctttgaggcattct

SEQ ID NO: 149613 - DNA, 22 bp, Artificial Sequence
  Synthetic oligonucleotide; CTG chr11 5190177 5190198 5190182 5190177 -
aaatgtctttgaggcattctcc

SEQ ID NO: 149614 - DNA, 22 bp, Artificial Sequence
  Synthetic oligonucleotide; CTT chr11 5190168 5190189 5190173 5190168 -
tgaggcattctcccctttattt

SEQ ID NO: 149615 - DNA, 22 bp, Artificial Sequence
  Synthetic oligonucleotide; TTT chr11 5190167 5190188 5190172 5190167 -
gaggcattctcccctttatttt

SEQ ID NO: 149616 - DNA, 22 bp, Artificial Sequence
  Synthetic oligonucleotide; TTG chr11 5190166 5190187 5190171 5190166 -
aggcattctcccctttattttg

SEQ ID NO: 149617 - DNA, 22 bp, Artificial Sequence
  Synthetic oligonucleotide; TTC chr11 5190158 5190179 5190163 5190158 -
tcccctttattttggctattag

SEQ ID NO: 149618 - DNA, 22 bp, Artificial Sequence
  Synthetic oligonucleotide; CTC chr11 5190156 5190177 5190161 5190156 -
ccctttattttggctattagaa

SEQ ID NO: 149619 - DNA, 22 bp, Artificial Sequence
  Synthetic oligonucleotide; CTT chr11 5190151 5190172 5190156 5190151 -
tattttggctattagaactcgg

SEQ ID NO: 149620 - DNA, 22 bp, Artificial Sequence
  Synthetic oligonucleotide; TTT chr11 5190150 5190171 5190155 5190150 -
attttggctattagaactcggc

SEQ ID NO: 149621 - DNA, 22 bp, Artificial Sequence
  Synthetic oligonucleotide; TTA chr11 5190149 5190170 5190154 5190149 -
ttttggctattagaactcggct

SEQ ID NO: 149622 - DNA, 22 bp, Artificial Sequence
  Synthetic oligonucleotide; TTT chr11 5190146 5190167 5190151 5190146 -
tggctattagaactcggctcct

SEQ ID NO: 149623 - DNA, 22 bp, Artificial Sequence
  Synthetic oligonucleotide; TTT chr11 5190145 5190166 5190150 5190145 -
ggctattagaactcggctcctc

SEQ ID NO: 149624 - DNA, 22 bp, Artificial Sequence
  Synthetic oligonucleotide; TTG chr11 5190144 5190165 5190149 5190144 -
gctattagaactcggctcctct

SEQ ID NO: 149625 - DNA, 22 bp, Artificial Sequence
  Synthetic oligonucleotide; CTA chr11 5190140 5190161 5190145 5190140 -
ttagaactcggctcctcttcat

SEQ ID NO: 149626 - DNA, 22 bp, Artificial Sequence
  Synthetic oligonucleotide; TTA chr11 5190137 5190158 5190142 5190137 -
gaactcggctcctcttcattta

SEQ ID NO: 149627 - DNA, 22 bp, Artificial Sequence
  Synthetic oligonucleotide; CTC chr11 5190131 5190152 5190136 5190131 -
ggctcctcttcatttatgcaaa

SEQ ID NO: 149628 - DNA, 22 bp, Artificial Sequence
  Synthetic oligonucleotide; CTC chr11 5190126 5190147 5190131 5190126 -
ctcttcatttatgcaaatttct

SEQ ID NO: 149629 - DNA, 22 bp, Artificial Sequence
  Synthetic oligonucleotide; CTC chr11 5190123 5190144 5190128 5190123 -
ttcatttatgcaaatttctaca

SEQ ID NO: 149630 - DNA, 22 bp, Artificial Sequence
  Synthetic oligonucleotide; CTT chr11 5190121 5190142 5190126 5190121 -
catttatgcaaatttctacagc

SEQ ID NO: 149631 - DNA, 22 bp, Artificial Sequence
  Synthetic oligonucleotide; TTC chr11 5190120 5190141 5190125 5190120 -
atttatgcaaatttctacagcc

SEQ ID NO: 149632 - DNA, 22 bp, Artificial Sequence
  Synthetic oligonucleotide; TTT chr11 5190116 5190137 5190121 5190116 -
atgcaaatttctacagcctgct

SEQ ID NO: 149633 - DNA, 22 bp, Artificial Sequence
  Synthetic oligonucleotide; TTA chr11 5190115 5190136 5190120 5190115 -
tgcaaatttctacagcctgctt

SEQ ID NO: 149634 - DNA, 22 bp, Artificial Sequence
  Synthetic oligonucleotide; TTT chr11 5190106 5190127 5190111 5190106 -
ctacagcctgcttgaattgctc

SEQ ID NO: 149635 - DNA, 22 bp, Artificial Sequence
  Synthetic oligonucleotide; TTC chr11 5190105 5190126 5190110 5190105 -
tacagcctgcttgaattgctcc

SEQ ID NO: 149636 - DNA, 22 bp, Artificial Sequence
  Synthetic oligonucleotide; CTA chr11 5190103 5190124 5190108 5190103 -
cagcctgcttgaattgctcctt

SEQ ID NO: 149637 - DNA, 22 bp, Artificial Sequence
  Synthetic oligonucleotide; CTG chr11 5190096 5190117 5190101 5190096 -
cttgaattgctcctttgaaaat

SEQ ID NO: 149638 - DNA, 22 bp, Artificial Sequence
  Synthetic oligonucleotide; CTT chr11 5190093 5190114 5190098 5190093 -
gaattgctcctttgaaaatgag

SEQ ID NO: 149639 - DNA, 22 bp, Artificial Sequence
  Synthetic oligonucleotide; TTG chr11 5190092 5190113 5190097 5190092 -
aattgctcctttgaaaatgagc

SEQ ID NO: 149640 - DNA, 22 bp, Artificial Sequence
  Synthetic oligonucleotide; TTG chr11 5190087 5190108 5190092 5190087 -
ctcctttgaaaatgagcttctg

SEQ ID NO: 149641 - DNA, 22 bp, Artificial Sequence
  Synthetic oligonucleotide; CTC chr11 5190084 5190105 5190089 5190084 -
ctttgaaaatgagcttctgttt

SEQ ID NO: 149642 - DNA, 22 bp, Artificial Sequence
  Synthetic oligonucleotide; CTT chr11 5190081 5190102 5190086 5190081 -
tgaaaatgagcttctgttttct

SEQ ID NO: 149643 - DNA, 22 bp, Artificial Sequence
  Synthetic oligonucleotide; TTT chr11 5190080 5190101 5190085 5190080 -
gaaaatgagcttctgttttcta

SEQ ID NO: 149644 - DNA, 22 bp, Artificial Sequence
  Synthetic oligonucleotide; TTG chr11 5190079 5190100 5190084 5190079 -
aaaatgagcttctgttttctac

SEQ ID NO: 149645 - DNA, 22 bp, Artificial Sequence
  Synthetic oligonucleotide; CTT chr11 5190068 5190089 5190073 5190068 -
ctgttttctaccacatggccga

SEQ ID NO: 149646 - DNA, 22 bp, Artificial Sequence
  Synthetic oligonucleotide; TTC chr11 5190067 5190088 5190072 5190067 -
tgttttctaccacatggccgag

SEQ ID NO: 149647 - DNA, 22 bp, Artificial Sequence
  Synthetic oligonucleotide; CTG chr11 5190065 5190086 5190070 5190065 -
ttttctaccacatggccgagca

SEQ ID NO: 149648 - DNA, 22 bp, Artificial Sequence
  Synthetic oligonucleotide; TTT chr11 5190062 5190083 5190067 5190062 -
tctaccacatggccgagcagat

SEQ ID NO: 149649 - DNA, 22 bp, Artificial Sequence
  Synthetic oligonucleotide; TTT chr11 5190061 5190082 5190066 5190061 -
ctaccacatggccgagcagata

SEQ ID NO: 149650 - DNA, 22 bp, Artificial Sequence
  Synthetic oligonucleotide; TTC chr11 5190060 5190081 5190065 5190060 -
taccacatggccgagcagataa

SEQ ID NO: 149651 - DNA, 22 bp, Artificial Sequence
  Synthetic oligonucleotide; CTA chr11 5190058 5190079 5190063 5190058 -
ccacatggccgagcagataatt

SEQ ID NO: 149652 - DNA, 22 bp, Artificial Sequence
  Synthetic oligonucleotide; TTT chr11 5190035 5190056 5190040 5190035 -
tccaaacttttatgctctgctt

SEQ ID NO: 149653 - DNA, 22 bp, Artificial Sequence
  Synthetic oligonucleotide; TTT chr11 5190034 5190055 5190039 5190034 -
ccaaacttttatgctctgcttc

SEQ ID NO: 149654 - DNA, 22 bp, Artificial Sequence
  Synthetic oligonucleotide; TTC chr11 5190033 5190054 5190038 5190033 -
caaacttttatgctctgcttcc

SEQ ID NO: 149655 - DNA, 22 bp, Artificial Sequence
  Synthetic oligonucleotide; CTT chr11 5190026 5190047 5190031 5190026 -
ttatgctctgcttcccttttaa

SEQ ID NO: 149656 - DNA, 22 bp, Artificial Sequence
  Synthetic oligonucleotide; TTT chr11 5190025 5190046 5190030 5190025 -
tatgctctgcttcccttttaaa

SEQ ID NO: 149657 - DNA, 22 bp, Artificial Sequence
  Synthetic oligonucleotide; TTT chr11 5190024 5190045 5190029 5190024 -
atgctctgcttcccttttaaat

SEQ ID NO: 149658 - DNA, 22 bp, Artificial Sequence
  Synthetic oligonucleotide; TTA chr11 5190023 5190044 5190028 5190023 -
tgctctgcttcccttttaaata

SEQ ID NO: 149659 - DNA, 22 bp, Artificial Sequence
  Synthetic oligonucleotide; CTC chr11 5190018 5190039 5190023 5190018 -
tgcttcccttttaaatataagt

SEQ ID NO: 149660 - DNA, 22 bp, Artificial Sequence
  Synthetic oligonucleotide; CTG chr11 5190016 5190037 5190021 5190016 -
cttcccttttaaatataagttc

SEQ ID NO: 149661 - DNA, 22 bp, Artificial Sequence
  Synthetic oligonucleotide; CTT chr11 5190013 5190034 5190018 5190013 -
cccttttaaatataagttctga

SEQ ID NO: 149662 - DNA, 22 bp, Artificial Sequence
  Synthetic oligonucleotide; TTC chr11 5190012 5190033 5190017 5190012 -
ccttttaaatataagttctgat

SEQ ID NO: 149663 - DNA, 22 bp, Artificial Sequence
  Synthetic oligonucleotide; CTT chr11 5190008 5190029 5190013 5190008 -
ttaaatataagttctgatttta

SEQ ID NO: 149664 - DNA, 22 bp, Artificial Sequence
  Synthetic oligonucleotide; TTT chr11 5190007 5190028 5190012 5190007 -
taaatataagttctgattttat

SEQ ID NO: 149665 - DNA, 22 bp, Artificial Sequence
  Synthetic oligonucleotide; TTT chr11 5190006 5190027 5190011 5190006 -
aaatataagttctgattttatg

SEQ ID NO: 149666 - DNA, 22 bp, Artificial Sequence
  Synthetic oligonucleotide; TTA chr11 5190005 5190026 5190010 5190005 -
aatataagttctgattttatgt

SEQ ID NO: 149667 - DNA, 22 bp, Artificial Sequence
  Synthetic oligonucleotide; TTC chr11 5189994 5190015 5189999 5189994 -
tgattttatgttatttctttgc

SEQ ID NO: 149668 - DNA, 22 bp, Artificial Sequence
  Synthetic oligonucleotide; CTG chr11 5189992 5190013 5189997 5189992 -
attttatgttatttctttgctc

SEQ ID NO: 149669 - DNA, 22 bp, Artificial Sequence
  Synthetic oligonucleotide; TTT chr11 5189988 5190009 5189993 5189988 -
tatgttatttctttgctcacac

SEQ ID NO: 149670 - DNA, 22 bp, Artificial Sequence
  Synthetic oligonucleotide; TTT chr11 5189987 5190008 5189992 5189987 -
atgttatttctttgctcacaca

SEQ ID NO: 149671 - DNA, 22 bp, Artificial Sequence
  Synthetic oligonucleotide; TTA chr11 5189986 5190007 5189991 5189986 -
tgttatttctttgctcacacat

SEQ ID NO: 149672 - DNA, 22 bp, Artificial Sequence
  Synthetic oligonucleotide; TTA chr11 5189981 5190002 5189986 5189981 -
tttctttgctcacacatatgag

SEQ ID NO: 149673 - DNA, 22 bp, Artificial Sequence
  Synthetic oligonucleotide; TTT chr11 5189978 5189999 5189983 5189978 -
ctttgctcacacatatgagcat

SEQ ID NO: 149674 - DNA, 22 bp, Artificial Sequence
  Synthetic oligonucleotide; TTC chr11 5189977 5189998 5189982 5189977 -
tttgctcacacatatgagcata

SEQ ID NO: 149675 - DNA, 22 bp, Artificial Sequence
  Synthetic oligonucleotide; CTT chr11 5189975 5189996 5189980 5189975 -
tgctcacacatatgagcatagg

SEQ ID NO: 149676 - DNA, 22 bp, Artificial Sequence
  Synthetic oligonucleotide; TTT chr11 5189974 5189995 5189979 5189974 -
gctcacacatatgagcataggt

SEQ ID NO: 149677 - DNA, 22 bp, Artificial Sequence
  Synthetic oligonucleotide; TTG chr11 5189973 5189994 5189978 5189973 -
ctcacacatatgagcataggtt

SEQ ID NO: 149678 - DNA, 22 bp, Artificial Sequence
  Synthetic oligonucleotide; CTC chr11 5189970 5189991 5189975 5189970 -
acacatatgagcataggttgtt

SEQ ID NO: 149679 - DNA, 22 bp, Artificial Sequence
  Synthetic oligonucleotide; TTG chr11 5189950 5189971 5189955 5189950 -
ttagaagcagccaggacacatc

SEQ ID NO: 149680 - DNA, 22 bp, Artificial Sequence
  Synthetic oligonucleotide; TTA chr11 5189947 5189968 5189952 5189947 -
gaagcagccaggacacatcttg

SEQ ID NO: 149681 - DNA, 22 bp, Artificial Sequence
  Synthetic oligonucleotide; CTT chr11 5189926 5189947 5189931 5189926 -
gaacaccttgctgcttagaaac

SEQ ID NO: 149682 - DNA, 22 bp, Artificial Sequence
  Synthetic oligonucleotide; TTG chr11 5189925 5189946 5189930 5189925 -
aacaccttgctgcttagaaact

SEQ ID NO: 149683 - DNA, 22 bp, Artificial Sequence
  Synthetic oligonucleotide; CTT chr11 5189917 5189938 5189922 5189917 -
gctgcttagaaacttctgtcac

SEQ ID NO: 149684 - DNA, 22 bp, Artificial Sequence
  Synthetic oligonucleotide; TTG chr11 5189916 5189937 5189921 5189916 -
ctgcttagaaacttctgtcaca

SEQ ID NO: 149685 - DNA, 22 bp, Artificial Sequence
  Synthetic oligonucleotide; CTG chr11 5189913 5189934 5189918 5189913 -
cttagaaacttctgtcacataa

SEQ ID NO: 149686 - DNA, 22 bp, Artificial Sequence
  Synthetic oligonucleotide; CTT chr11 5189910 5189931 5189915 5189910 -
agaaacttctgtcacataactt

SEQ ID NO: 149687 - DNA, 22 bp, Artificial Sequence
  Synthetic oligonucleotide; TTA chr11 5189909 5189930 5189914 5189909 -
gaaacttctgtcacataactta

SEQ ID NO: 149688 - DNA, 22 bp, Artificial Sequence
  Synthetic oligonucleotide; CTT chr11 5189902 5189923 5189907 5189902 -
ctgtcacataacttaaataata

SEQ ID NO: 149689 - DNA, 22 bp, Artificial Sequence
  Synthetic oligonucleotide; TTC chr11 5189901 5189922 5189906 5189901 -
tgtcacataacttaaataatat

SEQ ID NO: 149690 - DNA, 22 bp, Artificial Sequence
  Synthetic oligonucleotide; CTG chr11 5189899 5189920 5189904 5189899 -
tcacataacttaaataatatta

SEQ ID NO: 149691 - DNA, 22 bp, Artificial Sequence
  Synthetic oligonucleotide; CTT chr11 5189888 5189909 5189893 5189888 -
aaataatattatcaacttcgaa

SEQ ID NO: 149692 - DNA, 22 bp, Artificial Sequence
  Synthetic oligonucleotide; TTA chr11 5189887 5189908 5189892 5189887 -
aataatattatcaacttcgaat

SEQ ID NO: 149693 - DNA, 22 bp, Artificial Sequence
  Synthetic oligonucleotide; TTA chr11 5189877 5189898 5189882 5189877 -
tcaacttcgaatttccacagat

SEQ ID NO: 149694 - DNA, 22 bp, Artificial Sequence
  Synthetic oligonucleotide; CTT chr11 5189870 5189891 5189875 5189870 -
cgaatttccacagattctctaa

SEQ ID NO: 149695 - DNA, 22 bp, Artificial Sequence
  Synthetic oligonucleotide; TTC chr11 5189869 5189890 5189874 5189869 -
gaatttccacagattctctaag

SEQ ID NO: 149696 - DNA, 22 bp, Artificial Sequence
  Synthetic oligonucleotide; TTT chr11 5189863 5189884 5189868 5189863 -
ccacagattctctaaggtagag

SEQ ID NO: 149697 - DNA, 22 bp, Artificial Sequence
  Synthetic oligonucleotide; TTC chr11 5189862 5189883 5189867 5189862 -
cacagattctctaaggtagagg

SEQ ID NO: 149698 - DNA, 22 bp, Artificial Sequence
  Synthetic oligonucleotide; TTC chr11 5189853 5189874 5189858 5189853 -
tctaaggtagaggcacagtgca

SEQ ID NO: 149699 - DNA, 22 bp, Artificial Sequence
  Synthetic oligonucleotide; CTC chr11 5189851 5189872 5189856 5189851 -
taaggtagaggcacagtgcagt

SEQ ID NO: 149700 - DNA, 22 bp, Artificial Sequence
  Synthetic oligonucleotide; CTA chr11 5189849 5189870 5189854 5189849 -
aggtagaggcacagtgcagtca

SEQ ID NO: 149701 - DNA, 22 bp, Artificial Sequence
  Synthetic oligonucleotide; CTC chr11 5189822 5189843 5189827 5189822 -
tttgctaatgtataacaaaagt

SEQ ID NO: 149702 - DNA, 22 bp, Artificial Sequence
  Synthetic oligonucleotide; CTT chr11 5189820 5189841 5189825 5189820 -
tgctaatgtataacaaaagtga

SEQ ID NO: 149703 - DNA, 22 bp, Artificial Sequence
  Synthetic oligonucleotide; TTT chr11 5189819 5189840 5189824 5189819 -
gctaatgtataacaaaagtgac

SEQ ID NO: 149704 - DNA, 22 bp, Artificial Sequence
  Synthetic oligonucleotide; TTG chr11 5189818 5189839 5189823 5189818 -
ctaatgtataacaaaagtgacc

SEQ ID NO: 149705 - DNA, 22 bp, Artificial Sequence
  Synthetic oligonucleotide; CTA chr11 5189815 5189836 5189820 5189815 -
atgtataacaaaagtgaccttt

SEQ ID NO: 149706 - DNA, 22 bp, Artificial Sequence
  Synthetic oligonucleotide; CTT chr11 5189794 5189815 5189799 5189794 -
tgctccagtttccaataaattc

SEQ ID NO: 149707 - DNA, 22 bp, Artificial Sequence
  Synthetic oligonucleotide; TTT chr11 5189793 5189814 5189798 5189793 -
gctccagtttccaataaattca

SEQ ID NO: 149708 - DNA, 22 bp, Artificial Sequence
  Synthetic oligonucleotide; TTG chr11 5189792 5189813 5189797 5189792 -
ctccagtttccaataaattcat

SEQ ID NO: 149709 - DNA, 22 bp, Artificial Sequence
  Synthetic oligonucleotide; CTC chr11 5189789 5189810 5189794 5189789 -
cagtttccaataaattcatttc

SEQ ID NO: 149710 - DNA, 22 bp, Artificial Sequence
  Synthetic oligonucleotide; TTT chr11 5189783 5189804 5189788 5189783 -
ccaataaattcatttccatctg

SEQ ID NO: 149711 - DNA, 22 bp, Artificial Sequence
  Synthetic oligonucleotide; TTC chr11 5189782 5189803 5189787 5189782 -
caataaattcatttccatctga

SEQ ID NO: 149712 - DNA, 22 bp, Artificial Sequence
  Synthetic oligonucleotide; TTC chr11 5189772 5189793 5189777 5189772 -
atttccatctgagaccacctca

SEQ ID NO: 149713 - DNA, 22 bp, Artificial Sequence
  Synthetic oligonucleotide; TTT chr11 5189768 5189789 5189773 5189768 -
ccatctgagaccacctcagcct

SEQ ID NO: 149714 - DNA, 22 bp, Artificial Sequence
  Synthetic oligonucleotide; TTC chr11 5189767 5189788 5189772 5189767 -
catctgagaccacctcagcctg

SEQ ID NO: 149715 - DNA, 22 bp, Artificial Sequence
  Synthetic oligonucleotide; CTG chr11 5189761 5189782 5189766 5189761 -
agaccacctcagcctggacttc

SEQ ID NO: 149716 - DNA, 22 bp, Artificial Sequence
  Synthetic oligonucleotide; CTC chr11 5189751 5189772 5189756 5189751 -
agcctggacttcattgtccata

SEQ ID NO: 149717 - DNA, 22 bp, Artificial Sequence
  Synthetic oligonucleotide; CTG chr11 5189745 5189766 5189750 5189745 -
gacttcattgtccatatcacta

SEQ ID NO: 149718 - DNA, 22 bp, Artificial Sequence
  Synthetic oligonucleotide; CTT chr11 5189740 5189761 5189745 5189740 -
cattgtccatatcactatcaga

SEQ ID NO: 149719 - DNA, 22 bp, Artificial Sequence
  Synthetic oligonucleotide; TTC chr11 5189739 5189760 5189744 5189739 -
attgtccatatcactatcagaa

SEQ ID NO: 149720 - DNA, 22 bp, Artificial Sequence
  Synthetic oligonucleotide; TTG chr11 5189735 5189756 5189740 5189735 -
tccatatcactatcagaatttt

SEQ ID NO: 149721 - DNA, 22 bp, Artificial Sequence
  Synthetic oligonucleotide; CTA chr11 5189723 5189744 5189728 5189723 -
tcagaattttggtcacaaccat

SEQ ID NO: 149722 - DNA, 22 bp, Artificial Sequence
  Synthetic oligonucleotide; TTT chr11 5189714 5189735 5189719 5189714 -
tggtcacaaccattccacaagt

SEQ ID NO: 149723 - DNA, 22 bp, Artificial Sequence
  Synthetic oligonucleotide; TTT chr11 5189713 5189734 5189718 5189713 -
ggtcacaaccattccacaagtc

SEQ ID NO: 149724 - DNA, 22 bp, Artificial Sequence
  Synthetic oligonucleotide; TTG chr11 5189712 5189733 5189717 5189712 -
gtcacaaccattccacaagtct

SEQ ID NO: 149725 - DNA, 22 bp, Artificial Sequence
  Synthetic oligonucleotide; TTC chr11 5189699 5189720 5189704 5189699 -
cacaagtctctagaaagttcca

SEQ ID NO: 149726 - DNA, 22 bp, Artificial Sequence
  Synthetic oligonucleotide; CTC chr11 5189689 5189710 5189694 5189689 -
tagaaagttccaaattctccct

SEQ ID NO: 149727 - DNA, 22 bp, Artificial Sequence
  Synthetic oligonucleotide; CTA chr11 5189687 5189708 5189692 5189687 -
gaaagttccaaattctccctca

SEQ ID NO: 149728 - DNA, 22 bp, Artificial Sequence
  Synthetic oligonucleotide; TTC chr11 5189679 5189700 5189684 5189679 -
caaattctccctcatctccctg

SEQ ID NO: 149729 - DNA, 22 bp, Artificial Sequence
  Synthetic oligonucleotide; TTC chr11 5189672 5189693 5189677 5189672 -
tccctcatctccctgtcttctt

SEQ ID NO: 149730 - DNA, 22 bp, Artificial Sequence
  Synthetic oligonucleotide; CTC chr11 5189670 5189691 5189675 5189670 -
cctcatctccctgtcttcttct

SEQ ID NO: 149731 - DNA, 22 bp, Artificial Sequence
  Synthetic oligonucleotide; CTC chr11 5189666 5189687 5189671 5189666 -
atctccctgtcttcttctgagc

SEQ ID NO: 149732 - DNA, 22 bp, Artificial Sequence
  Synthetic oligonucleotide; CTC chr11 5189661 5189682 5189666 5189661 -
cctgtcttcttctgagccgtcc

SEQ ID NO: 149733 - DNA, 22 bp, Artificial Sequence
  Synthetic oligonucleotide; CTG chr11 5189657 5189678 5189662 5189657 -
tcttcttctgagccgtccacac

SEQ ID NO: 149734 - DNA, 22 bp, Artificial Sequence
  Synthetic oligonucleotide; CTT chr11 5189653 5189674 5189658 5189653 -
cttctgagccgtccacactctt

SEQ ID NO: 149735 - DNA, 22 bp, Artificial Sequence
  Synthetic oligonucleotide; TTC chr11 5189652 5189673 5189657 5189652 -
ttctgagccgtccacactcttc

SEQ ID NO: 149736 - DNA, 22 bp, Artificial Sequence
  Synthetic oligonucleotide; CTT chr11 5189650 5189671 5189655 5189650 -
ctgagccgtccacactcttcca

SEQ ID NO: 149737 - DNA, 22 bp, Artificial Sequence
  Synthetic oligonucleotide; TTC chr11 5189649 5189670 5189654 5189649 -
tgagccgtccacactcttccaa

SEQ ID NO: 149738 - DNA, 22 bp, Artificial Sequence
  Synthetic oligonucleotide; CTG chr11 5189647 5189668 5189652 5189647 -
agccgtccacactcttccaact

SEQ ID NO: 149739 - DNA, 22 bp, Artificial Sequence
  Synthetic oligonucleotide; CTC chr11 5189633 5189654 5189638 5189633 -
ttccaacttctgcctgttatcc

SEQ ID NO: 149740 - DNA, 22 bp, Artificial Sequence
  Synthetic oligonucleotide; CTT chr11 5189631 5189652 5189636 5189631 -
ccaacttctgcctgttatccaa

SEQ ID NO: 149741 - DNA, 22 bp, Artificial Sequence
  Synthetic oligonucleotide; TTC chr11 5189630 5189651 5189635 5189630 -
caacttctgcctgttatccaat

SEQ ID NO: 149742 - DNA, 22 bp, Artificial Sequence
  Synthetic oligonucleotide; CTT chr11 5189624 5189645 5189629 5189624 -
ctgcctgttatccaatgccaaa

SEQ ID NO: 149743 - DNA, 22 bp, Artificial Sequence
  Synthetic oligonucleotide; TTC chr11 5189623 5189644 5189628 5189623 -
tgcctgttatccaatgccaaag

SEQ ID NO: 149744 - DNA, 22 bp, Artificial Sequence
  Synthetic oligonucleotide; CTG chr11 5189621 5189642 5189626 5189621 -
cctgttatccaatgccaaagtt

SEQ ID NO: 149745 - DNA, 22 bp, Artificial Sequence
  Synthetic oligonucleotide; CTG chr11 5189617 5189638 5189622 5189617 -
ttatccaatgccaaagttgctt

SEQ ID NO: 149746 - DNA, 22 bp, Artificial Sequence
  Synthetic oligonucleotide; TTA chr11 5189614 5189635 5189619 5189614 -
tccaatgccaaagttgcttcca

SEQ ID NO: 149747 - DNA, 22 bp, Artificial Sequence
  Synthetic oligonucleotide; TTG chr11 5189598 5189619 5189603 5189598 -
cttccacattttcatgtatctt

SEQ ID NO: 149748 - DNA, 22 bp, Artificial Sequence
  Synthetic oligonucleotide; CTT chr11 5189595 5189616 5189600 5189595 -
ccacattttcatgtatctttat

SEQ ID NO: 149749 - DNA, 22 bp, Artificial Sequence
  Synthetic oligonucleotide; TTC chr11 5189594 5189615 5189599 5189594 -
cacattttcatgtatctttata

SEQ ID NO: 149750 - DNA, 22 bp, Artificial Sequence
  Synthetic oligonucleotide; TTT chr11 5189587 5189608 5189592 5189587 -
tcatgtatctttatagcagtac

SEQ ID NO: 149751 - DNA, 22 bp, Artificial Sequence
  Synthetic oligonucleotide; TTT chr11 5189586 5189607 5189591 5189586 -
catgtatctttatagcagtacc

SEQ ID NO: 149752 - DNA, 22 bp, Artificial Sequence
  Synthetic oligonucleotide; TTC chr11 5189585 5189606 5189590 5189585 -
atgtatctttatagcagtaccc

SEQ ID NO: 149753 - DNA, 22 bp, Artificial Sequence
  Synthetic oligonucleotide; CTT chr11 5189576 5189597 5189581 5189576 -
tatagcagtaccccacttttgg

SEQ ID NO: 149754 - DNA, 22 bp, Artificial Sequence
  Synthetic oligonucleotide; TTT chr11 5189575 5189596 5189580 5189575 -
atagcagtaccccacttttggt

SEQ ID NO: 149755 - DNA, 22 bp, Artificial Sequence
  Synthetic oligonucleotide; TTA chr11 5189574 5189595 5189579 5189574 -
tagcagtaccccacttttggta

SEQ ID NO: 149756 - DNA, 22 bp, Artificial Sequence
  Synthetic oligonucleotide; CTT chr11 5189558 5189579 5189563 5189558 -
ttggtaccaattttctgtactg

SEQ ID NO: 149757 - DNA, 22 bp, Artificial Sequence
  Synthetic oligonucleotide; TTT chr11 5189557 5189578 5189562 5189557 -
tggtaccaattttctgtactgg

SEQ ID NO: 149758 - DNA, 22 bp, Artificial Sequence
  Synthetic oligonucleotide; TTT chr11 5189556 5189577 5189561 5189556 -
ggtaccaattttctgtactggt

SEQ ID NO: 149759 - DNA, 22 bp, Artificial Sequence
  Synthetic oligonucleotide; TTG chr11 5189555 5189576 5189560 5189555 -
gtaccaattttctgtactggtc

SEQ ID NO: 149760 - DNA, 22 bp, Artificial Sequence
  Synthetic oligonucleotide; TTT chr11 5189545 5189566 5189550 5189545 -
tctgtactggtccattctcatc

SEQ ID NO: 149761 - DNA, 22 bp, Artificial Sequence
  Synthetic oligonucleotide; TTT chr11 5189544 5189565 5189549 5189544 -
ctgtactggtccattctcatct

SEQ ID NO: 149762 - DNA, 22 bp, Artificial Sequence
  Synthetic oligonucleotide; TTC chr11 5189543 5189564 5189548 5189543 -
tgtactggtccattctcatctt

SEQ ID NO: 149763 - DNA, 22 bp, Artificial Sequence
  Synthetic oligonucleotide; CTG chr11 5189541 5189562 5189546 5189541 -
tactggtccattctcatcttgc

SEQ ID NO: 149764 - DNA, 22 bp, Artificial Sequence
  Synthetic oligonucleotide; CTG chr11 5189536 5189557 5189541 5189536 -
gtccattctcatcttgctataa

SEQ ID NO: 149765 - DNA, 22 bp, Artificial Sequence
  Synthetic oligonucleotide; TTC chr11 5189528 5189549 5189533 5189528 -
tcatcttgctataaggaaatac

SEQ ID NO: 149766 - DNA, 22 bp, Artificial Sequence
  Synthetic oligonucleotide; CTC chr11 5189526 5189547 5189531 5189526 -
atcttgctataaggaaatacct

SEQ ID NO: 149767 - DNA, 22 bp, Artificial Sequence
  Synthetic oligonucleotide; CTT chr11 5189521 5189542 5189526 5189521 -
gctataaggaaatacctgagac

SEQ ID NO: 149768 - DNA, 22 bp, Artificial Sequence
  Synthetic oligonucleotide; TTG chr11 5189520 5189541 5189525 5189520 -
ctataaggaaatacctgagact

SEQ ID NO: 149769 - DNA, 22 bp, Artificial Sequence
  Synthetic oligonucleotide; CTA chr11 5189517 5189538 5189522 5189517 -
taaggaaatacctgagactggg

SEQ ID NO: 149770 - DNA, 22 bp, Artificial Sequence
  Synthetic oligonucleotide; CTG chr11 5189503 5189524 5189508 5189503 -
agactgggtaaatggtgaagaa

SEQ ID NO: 149771 - DNA, 22 bp, Artificial Sequence
  Synthetic oligonucleotide; CTG chr11 5189497 5189518 5189502 5189497 -
ggtaaatggtgaagaacagaga

SEQ ID NO: 149772 - DNA, 22 bp, Artificial Sequence
  Synthetic oligonucleotide; TTT chr11 5189472 5189493 5189477 5189472 -
aattggctcacagttctaaagg

SEQ ID NO: 149773 - DNA, 22 bp, Artificial Sequence
  Synthetic oligonucleotide; TTA chr11 5189471 5189492 5189476 5189471 -
attggctcacagttctaaaggc

SEQ ID NO: 149774 - DNA, 22 bp, Artificial Sequence
  Synthetic oligonucleotide; TTG chr11 5189467 5189488 5189472 5189467 -
gctcacagttctaaaggctgta

SEQ ID NO: 149775 - DNA, 22 bp, Artificial Sequence
  Synthetic oligonucleotide; CTC chr11 5189463 5189484 5189468 5189463 -
acagttctaaaggctgtacagg

SEQ ID NO: 149776 - DNA, 22 bp, Artificial Sequence
  Synthetic oligonucleotide; TTC chr11 5189456 5189477 5189461 5189456 -
taaaggctgtacaggaagcatg

SEQ ID NO: 149777 - DNA, 22 bp, Artificial Sequence
  Synthetic oligonucleotide; CTA chr11 5189454 5189475 5189459 5189454 -
aaggctgtacaggaagcatggc

SEQ ID NO: 149778 - DNA, 22 bp, Artificial Sequence
  Synthetic oligonucleotide; CTG chr11 5189447 5189468 5189452 5189447 -
tacaggaagcatggcaacgtct

SEQ ID NO: 149779 - DNA, 22 bp, Artificial Sequence
  Synthetic oligonucleotide; CTG chr11 5189424 5189445 5189429 5189424 -
ctcagcttctagggaggtttca

SEQ ID NO: 149780 - DNA, 22 bp, Artificial Sequence
  Synthetic oligonucleotide; CTC chr11 5189421 5189442 5189426 5189421 -
agcttctagggaggtttcagga

SEQ ID NO: 149781 - DNA, 22 bp, Artificial Sequence
  Synthetic oligonucleotide; CTT chr11 5189416 5189437 5189421 5189416 -
ctagggaggtttcaggaaactt

SEQ ID NO: 149782 - DNA, 22 bp, Artificial Sequence
  Synthetic oligonucleotide; TTC chr11 5189415 5189436 5189420 5189415 -
tagggaggtttcaggaaactta

SEQ ID NO: 149783 - DNA, 22 bp, Artificial Sequence
  Synthetic oligonucleotide; CTA chr11 5189413 5189434 5189418 5189413 -
gggaggtttcaggaaacttata

SEQ ID NO: 149784 - DNA, 22 bp, Artificial Sequence
  Synthetic oligonucleotide; TTT chr11 5189404 5189425 5189409 5189404 -
caggaaacttataatcatggca

SEQ ID NO: 149785 - DNA, 22 bp, Artificial Sequence
  Synthetic oligonucleotide; TTC chr11 5189403 5189424 5189408 5189403 -
aggaaacttataatcatggcag

SEQ ID NO: 149786 - DNA, 22 bp, Artificial Sequence
  Synthetic oligonucleotide; CTT chr11 5189394 5189415 5189399 5189394 -
ataatcatggcagagagaaaaa

SEQ ID NO: 149787 - DNA, 22 bp, Artificial Sequence
  Synthetic oligonucleotide; TTA chr11 5189393 5189414 5189398 5189393 -
taatcatggcagagagaaaaac

SEQ ID NO: 149788 - DNA, 22 bp, Artificial Sequence
  Synthetic oligonucleotide; CTT chr11 5189356 5189377 5189361 5189356 -
cacatggctggagcaggaagaa

SEQ ID NO: 149789 - DNA, 22 bp, Artificial Sequence
  Synthetic oligonucleotide; TTC chr11 5189355 5189376 5189360 5189355 -
acatggctggagcaggaagaag

SEQ ID NO: 149790 - DNA, 22 bp, Artificial Sequence
  Synthetic oligonucleotide; CTG chr11 5189346 5189367 5189351 5189346 -
gagcaggaagaagaggcaggga

SEQ ID NO: 149791 - DNA, 22 bp, Artificial Sequence
  Synthetic oligonucleotide; CTC chr11 5189303 5189324 5189308 5189303 -
atgagaactcacccactatacg

SEQ ID NO: 149792 - DNA, 22 bp, Artificial Sequence
  Synthetic oligonucleotide; CTC chr11 5189293 5189314 5189298 5189293 -
acccactatacgtaccaaaagg

SEQ ID NO: 149793 - DNA, 22 bp, Artificial Sequence
  Synthetic oligonucleotide; CTA chr11 5189285 5189306 5189290 5189285 -
tacgtaccaaaagggactgata

SEQ ID NO: 149794 - DNA, 22 bp, Artificial Sequence
  Synthetic oligonucleotide; CTG chr11 5189266 5189287 5189271 5189266 -
atattaagctatttatgataac

SEQ ID NO: 149795 - DNA, 22 bp, Artificial Sequence
  Synthetic oligonucleotide; TTA chr11 5189260 5189281 5189265 5189260 -
agctatttatgataactctgct

SEQ ID NO: 149796 - DNA, 22 bp, Artificial Sequence
  Synthetic oligonucleotide; CTA chr11 5189255 5189276 5189260 5189255 -
tttatgataactctgctcctat

SEQ ID NO: 149797 - DNA, 22 bp, Artificial Sequence
  Synthetic oligonucleotide; TTT chr11 5189252 5189273 5189257 5189252 -
atgataactctgctcctatgat

SEQ ID NO: 149798 - DNA, 22 bp, Artificial Sequence
  Synthetic oligonucleotide; TTA chr11 5189251 5189272 5189256 5189251 -
tgataactctgctcctatgatc

SEQ ID NO: 149799 - DNA, 22 bp, Artificial Sequence
  Synthetic oligonucleotide; CTC chr11 5189242 5189263 5189247 5189242 -
tgctcctatgatccaatcactt

SEQ ID NO: 149800 - DNA, 22 bp, Artificial Sequence
  Synthetic oligonucleotide; CTG chr11 5189240 5189261 5189245 5189240 -
ctcctatgatccaatcacttcc

SEQ ID NO: 149801 - DNA, 22 bp, Artificial Sequence
  Synthetic oligonucleotide; CTC chr11 5189237 5189258 5189242 5189237 -
ctatgatccaatcacttcccac

SEQ ID NO: 149802 - DNA, 22 bp, Artificial Sequence
  Synthetic oligonucleotide; CTA chr11 5189234 5189255 5189239 5189234 -
tgatccaatcacttcccaccag

SEQ ID NO: 149803 - DNA, 22 bp, Artificial Sequence
  Synthetic oligonucleotide; CTT chr11 5189220 5189241 5189225 5189220 -
cccaccaggccccatcttcaac

SEQ ID NO: 149804 - DNA, 22 bp, Artificial Sequence
  Synthetic oligonucleotide; TTC chr11 5189219 5189240 5189224 5189219 -
ccaccaggccccatcttcaaca

SEQ ID NO: 149805 - DNA, 22 bp, Artificial Sequence
  Synthetic oligonucleotide; CTT chr11 5189202 5189223 5189207 5189202 -
caacactggggattacagctga

SEQ ID NO: 149806 - DNA, 22 bp, Artificial Sequence
  Synthetic oligonucleotide; TTC chr11 5189201 5189222 5189206 5189201 -
aacactggggattacagctgaa

SEQ ID NO: 149807 - DNA, 22 bp, Artificial Sequence
  Synthetic oligonucleotide; CTG chr11 5189194 5189215 5189199 5189194 -
gggattacagctgaacatgaga

SEQ ID NO: 149808 - DNA, 22 bp, Artificial Sequence
  Synthetic oligonucleotide; TTA chr11 5189187 5189208 5189192 5189187 -
cagctgaacatgagattagggt

SEQ ID NO: 149809 - DNA, 22 bp, Artificial Sequence
  Synthetic oligonucleotide; CTG chr11 5189181 5189202 5189186 5189181 -
aacatgagattagggtggagac

SEQ ID NO: 149810 - DNA, 22 bp, Artificial Sequence
  Synthetic oligonucleotide; TTA chr11 5189169 5189190 5189174 5189169 -
gggtggagacacagatccaaac

SEQ ID NO: 149811 - DNA, 22 bp, Artificial Sequence
  Synthetic oligonucleotide; TTA chr11 5189129 5189150 5189134 5189129 -
ctcttgtgattaaacacaattc

SEQ ID NO: 149812 - DNA, 22 bp, Artificial Sequence
  Synthetic oligonucleotide; CTC chr11 5189126 5189147 5189131 5189126 -
ttgtgattaaacacaattcaac

SEQ ID NO: 149813 - DNA, 22 bp, Artificial Sequence
  Synthetic oligonucleotide; CTT chr11 5189124 5189145 5189129 5189124 -
gtgattaaacacaattcaacaa

SEQ ID NO: 149814 - DNA, 22 bp, Artificial Sequence
  Synthetic oligonucleotide; TTG chr11 5189123 5189144 5189128 5189123 -
tgattaaacacaattcaacaaa

SEQ ID NO: 149815 - DNA, 22 bp, Artificial Sequence
  Synthetic oligonucleotide; TTA chr11 5189117 5189138 5189122 5189117 -
aacacaattcaacaaaatacat

SEQ ID NO: 149816 - DNA, 22 bp, Artificial Sequence
  Synthetic oligonucleotide; TTC chr11 5189107 5189128 5189112 5189107 -
aacaaaatacataaaatgtaag

SEQ ID NO: 149817 - DNA, 22 bp, Artificial Sequence
  Synthetic oligonucleotide; TTA chr11 5189057 5189078 5189062 5189057 -
aactttgtttctttaatacaag

SEQ ID NO: 149818 - DNA, 22 bp, Artificial Sequence
  Synthetic oligonucleotide; CTT chr11 5189052 5189073 5189057 5189052 -
tgtttctttaatacaagcagtc

SEQ ID NO: 149819 - DNA, 22 bp, Artificial Sequence
  Synthetic oligonucleotide; TTT chr11 5189051 5189072 5189056 5189051 -
gtttctttaatacaagcagtcg

SEQ ID NO: 149820 - DNA, 22 bp, Artificial Sequence
  Synthetic oligonucleotide; TTG chr11 5189050 5189071 5189055 5189050 -
tttctttaatacaagcagtcgt

SEQ ID NO: 149821 - DNA, 22 bp, Artificial Sequence
  Synthetic oligonucleotide; TTT chr11 5189047 5189068 5189052 5189047 -
ctttaatacaagcagtcgtatt

SEQ ID NO: 149822 - DNA, 22 bp, Artificial Sequence
  Synthetic oligonucleotide; TTC chr11 5189046 5189067 5189051 5189046 -
tttaatacaagcagtcgtattg

SEQ ID NO: 149823 - DNA, 22 bp, Artificial Sequence
  Synthetic oligonucleotide; CTT chr11 5189044 5189065 5189049 5189044 -
taatacaagcagtcgtattggc

SEQ ID NO: 149824 - DNA, 22 bp, Artificial Sequence
  Synthetic oligonucleotide; TTT chr11 5189043 5189064 5189048 5189043 -
aatacaagcagtcgtattggct

SEQ ID NO: 149825 - DNA, 22 bp, Artificial Sequence
  Synthetic oligonucleotide; TTA chr11 5189042 5189063 5189047 5189042 -
atacaagcagtcgtattggctt

SEQ ID NO: 149826 - DNA, 22 bp, Artificial Sequence
  Synthetic oligonucleotide; TTG chr11 5189024 5189045 5189029 5189024 -
gcttctatacaagtttatctct

SEQ ID NO: 149827 - DNA, 22 bp, Artificial Sequence
  Synthetic oligonucleotide; CTT chr11 5189020 5189041 5189025 5189020 -
ctatacaagtttatctctgcac

SEQ ID NO: 149828 - DNA, 22 bp, Artificial Sequence
  Synthetic oligonucleotide; TTC chr11 5189019 5189040 5189024 5189019 -
tatacaagtttatctctgcacg

SEQ ID NO: 149829 - DNA, 22 bp, Artificial Sequence
  Synthetic oligonucleotide; CTA chr11 5189017 5189038 5189022 5189017 -
tacaagtttatctctgcacgac

SEQ ID NO: 149830 - DNA, 22 bp, Artificial Sequence
  Synthetic oligonucleotide; TTT chr11 5189008 5189029 5189013 5189008 -
atctctgcacgacacacatatt

SEQ ID NO: 149831 - DNA, 22 bp, Artificial Sequence
  Synthetic oligonucleotide; TTA chr11 5189007 5189028 5189012 5189007 -
tctctgcacgacacacatatta

SEQ ID NO: 149832 - DNA, 22 bp, Artificial Sequence
  Synthetic oligonucleotide; CTC chr11 5189003 5189024 5189008 5189003 -
tgcacgacacacatattatgat

SEQ ID NO: 149833 - DNA, 22 bp, Artificial Sequence
  Synthetic oligonucleotide; CTG chr11 5189001 5189022 5189006 5189001 -
cacgacacacatattatgatgt

SEQ ID NO: 149834 - DNA, 22 bp, Artificial Sequence
  Synthetic oligonucleotide; TTA chr11 5188985 5189006 5188990 5188985 -
tgatgtattagaaggaagataa

SEQ ID NO: 149835 - DNA, 22 bp, Artificial Sequence
  Synthetic oligonucleotide; TTA chr11 5188975 5188996 5188980 5188975 -
gaaggaagataaatgtcatcaa

SEQ ID NO: 149836 - DNA, 22 bp, Artificial Sequence
  Synthetic oligonucleotide; CTT chr11 5188948 5188969 5188953 5188948 -
attaaggcaggtcctggtgtat

SEQ ID NO: 149837 - DNA, 22 bp, Artificial Sequence
  Synthetic oligonucleotide; TTA chr11 5188947 5188968 5188952 5188947 -
ttaaggcaggtcctggtgtatc

SEQ ID NO: 149838 - DNA, 22 bp, Artificial Sequence
  Synthetic oligonucleotide; TTA chr11 5188944 5188965 5188949 5188944 -
aggcaggtcctggtgtatcctt

SEQ ID NO: 149839 - DNA, 22 bp, Artificial Sequence
  Synthetic oligonucleotide; CTG chr11 5188932 5188953 5188937 5188932 -
gtgtatccttccttaaagaaaa

SEQ ID NO: 149840 - DNA, 22 bp, Artificial Sequence
  Synthetic oligonucleotide; CTT chr11 5188922 5188943 5188927 5188922 -
ccttaaagaaaagtatctaata

SEQ ID NO: 149841 - DNA, 22 bp, Artificial Sequence
  Synthetic oligonucleotide; TTC chr11 5188921 5188942 5188926 5188921 -
cttaaagaaaagtatctaataa

SEQ ID NO: 149842 - DNA, 22 bp, Artificial Sequence
  Synthetic oligonucleotide; CTT chr11 5188918 5188939 5188923 5188918 -
aaagaaaagtatctaataacct

SEQ ID NO: 149843 - DNA, 22 bp, Artificial Sequence
  Synthetic oligonucleotide; TTA chr11 5188917 5188938 5188922 5188917 -
aagaaaagtatctaataacctt

SEQ ID NO: 149844 - DNA, 22 bp, Artificial Sequence
  Synthetic oligonucleotide; CTA chr11 5188903 5188924 5188908 5188903 -
ataaccttacgttagctaaacg

SEQ ID NO: 149845 - DNA, 22 bp, Artificial Sequence
  Synthetic oligonucleotide; CTT chr11 5188895 5188916 5188900 5188895 -
acgttagctaaacgaagagata

SEQ ID NO: 149846 - DNA, 22 bp, Artificial Sequence
  Synthetic oligonucleotide; TTA chr11 5188894 5188915 5188899 5188894 -
cgttagctaaacgaagagataa

SEQ ID NO: 149847 - DNA, 22 bp, Artificial Sequence
  Synthetic oligonucleotide; TTA chr11 5188889 5188910 5188894 5188889 -
gctaaacgaagagataatatat

SEQ ID NO: 149848 - DNA, 22 bp, Artificial Sequence
  Synthetic oligonucleotide; CTA chr11 5188885 5188906 5188890 5188885 -
aacgaagagataatatattagt

SEQ ID NO: 149849 - DNA, 22 bp, Artificial Sequence
  Synthetic oligonucleotide; TTA chr11 5188865 5188886 5188870 5188865 -
gtaattcttcccagataaagat

SEQ ID NO: 149850 - DNA, 22 bp, Artificial Sequence
  Synthetic oligonucleotide; TTC chr11 5188858 5188879 5188863 5188858 -
ttcccagataaagatcatctct

SEQ ID NO: 149851 - DNA, 22 bp, Artificial Sequence
  Synthetic oligonucleotide; CTT chr11 5188856 5188877 5188861 5188856 -
cccagataaagatcatctctaa

SEQ ID NO: 149852 - DNA, 22 bp, Artificial Sequence
  Synthetic oligonucleotide; TTC chr11 5188855 5188876 5188860 5188855 -
ccagataaagatcatctctaaa

SEQ ID NO: 149853 - DNA, 22 bp, Artificial Sequence
  Synthetic oligonucleotide; CTC chr11 5188837 5188858 5188842 5188837 -
taaagtaattcacaaactccac

SEQ ID NO: 149854 - DNA, 22 bp, Artificial Sequence
  Synthetic oligonucleotide; CTA chr11 5188835 5188856 5188840 5188835 -
aagtaattcacaaactccacct

SEQ ID NO: 149855 - DNA, 22 bp, Artificial Sequence
  Synthetic oligonucleotide; TTC chr11 5188826 5188847 5188831 5188826 -
acaaactccacctggaaagaag

SEQ ID NO: 149856 - DNA, 22 bp, Artificial Sequence
  Synthetic oligonucleotide; CTC chr11 5188818 5188839 5188823 5188818 -
cacctggaaagaagagtggcta

SEQ ID NO: 149857 - DNA, 22 bp, Artificial Sequence
  Synthetic oligonucleotide; CTG chr11 5188812 5188833 5188817 5188812 -
gaaagaagagtggctattgctc

SEQ ID NO: 149858 - DNA, 22 bp, Artificial Sequence
  Synthetic oligonucleotide; CTA chr11 5188796 5188817 5188801 5188796 -
ttgctcaagctattcttcaatg

SEQ ID NO: 149859 - DNA, 22 bp, Artificial Sequence
  Synthetic oligonucleotide; TTG chr11 5188793 5188814 5188798 5188793 -
ctcaagctattcttcaatgtgg

SEQ ID NO: 149860 - DNA, 22 bp, Artificial Sequence
  Synthetic oligonucleotide; CTC chr11 5188790 5188811 5188795 5188790 -
aagctattcttcaatgtggcag

SEQ ID NO: 149861 - DNA, 22 bp, Artificial Sequence
  Synthetic oligonucleotide; CTA chr11 5188784 5188805 5188789 5188784 -
ttcttcaatgtggcaggggaaa

SEQ ID NO: 149862 - DNA, 22 bp, Artificial Sequence
  Synthetic oligonucleotide; TTC chr11 5188781 5188802 5188786 5188781 -
ttcaatgtggcaggggaaaaat

SEQ ID NO: 149863 - DNA, 22 bp, Artificial Sequence
  Synthetic oligonucleotide; CTT chr11 5188779 5188800 5188784 5188779 -
caatgtggcaggggaaaaatct

SEQ ID NO: 149864 - DNA, 22 bp, Artificial Sequence
  Synthetic oligonucleotide; TTC chr11 5188778 5188799 5188783 5188778 -
aatgtggcaggggaaaaatctt

SEQ ID NO: 149865 - DNA, 22 bp, Artificial Sequence
  Synthetic oligonucleotide; CTT chr11 5188756 5188777 5188761 5188756 -
tgaaaaagctacaagactctgc

SEQ ID NO: 149866 - DNA, 22 bp, Artificial Sequence
  Synthetic oligonucleotide; TTT chr11 5188755 5188776 5188760 5188755 -
gaaaaagctacaagactctgca

SEQ ID NO: 149867 - DNA, 22 bp, Artificial Sequence
  Synthetic oligonucleotide; TTG chr11 5188754 5188775 5188759 5188754 -
aaaaagctacaagactctgcaa

SEQ ID NO: 149868 - DNA, 22 bp, Artificial Sequence
  Synthetic oligonucleotide; CTA chr11 5188745 5188766 5188750 5188745 -
caagactctgcaaatattgatt

SEQ ID NO: 149869 - DNA, 22 bp, Artificial Sequence
  Synthetic oligonucleotide; CTC chr11 5188737 5188758 5188742 5188737 -
tgcaaatattgattccaaccac

SEQ ID NO: 149870 - DNA, 22 bp, Artificial Sequence
  Synthetic oligonucleotide; CTG chr11 5188735 5188756 5188740 5188735 -
caaatattgattccaaccactg

SEQ ID NO: 149871 - DNA, 22 bp, Artificial Sequence
  Synthetic oligonucleotide; TTG chr11 5188726 5188747 5188731 5188726 -
attccaaccactgagaaactct

SEQ ID NO: 149872 - DNA, 22 bp, Artificial Sequence
  Synthetic oligonucleotide; TTC chr11 5188722 5188743 5188727 5188722 -
caaccactgagaaactctacag

SEQ ID NO: 149873 - DNA, 22 bp, Artificial Sequence
  Synthetic oligonucleotide; CTG chr11 5188713 5188734 5188718 5188713 -
agaaactctacagcagggatgt

SEQ ID NO: 149874 - DNA, 22 bp, Artificial Sequence
  Synthetic oligonucleotide; CTC chr11 5188705 5188726 5188710 5188705 -
tacagcagggatgtccaatctt

SEQ ID NO: 149875 - DNA, 22 bp, Artificial Sequence
  Synthetic oligonucleotide; CTA chr11 5188703 5188724 5188708 5188703 -
cagcagggatgtccaatctttt

SEQ ID NO: 149876 - DNA, 22 bp, Artificial Sequence
  Synthetic oligonucleotide; CTT chr11 5188683 5188704 5188688 5188683 -
ttggcttccctgggccacacat

SEQ ID NO: 149877 - DNA, 22 bp, Artificial Sequence
  Synthetic oligonucleotide; TTT chr11 5188682 5188703 5188687 5188682 -
tggcttccctgggccacacata

SEQ ID NO: 149878 - DNA, 22 bp, Artificial Sequence
  Synthetic oligonucleotide; TTT chr11 5188681 5188702 5188686 5188681 -
ggcttccctgggccacacataa

SEQ ID NO: 149879 - DNA, 22 bp, Artificial Sequence
  Synthetic oligonucleotide; TTG chr11 5188680 5188701 5188685 5188680 -
gcttccctgggccacacataaa

SEQ ID NO: 149880 - DNA, 22 bp, Artificial Sequence
  Synthetic oligonucleotide; CTT chr11 5188676 5188697 5188681 5188676 -
ccctgggccacacataaaatat

SEQ ID NO: 149881 - DNA, 22 bp, Artificial Sequence
  Synthetic oligonucleotide; TTC chr11 5188675 5188696 5188680 5188675 -
cctgggccacacataaaatata

SEQ ID NO: 149882 - DNA, 22 bp, Artificial Sequence
  Synthetic oligonucleotide; CTG chr11 5188671 5188692 5188676 5188671 -
ggccacacataaaatatactaa

SEQ ID NO: 149883 - DNA, 22 bp, Artificial Sequence
  Synthetic oligonucleotide; CTA chr11 5188650 5188671 5188655 5188650 -
acactaatgacagctcatgagc

SEQ ID NO: 149884 - DNA, 22 bp, Artificial Sequence
  Synthetic oligonucleotide; CTA chr11 5188644 5188665 5188649 5188644 -
atgacagctcatgagccaaaaa

SEQ ID NO: 149885 - DNA, 22 bp, Artificial Sequence
  Synthetic oligonucleotide; CTC chr11 5188634 5188655 5188639 5188634 -
atgagccaaaaaaaaaaaaaaa

SEQ ID NO: 149886 - DNA, 22 bp, Artificial Sequence
  Synthetic oligonucleotide; CTC chr11 5188588 5188609 5188593 5188588 -
ataatgttttaagaaagttgtg

SEQ ID NO: 149887 - DNA, 22 bp, Artificial Sequence
  Synthetic oligonucleotide; TTT chr11 5188579 5188600 5188584 5188579 -
taagaaagttgtgttggatagc

SEQ ID NO: 149888 - DNA, 22 bp, Artificial Sequence
  Synthetic oligonucleotide; TTT chr11 5188578 5188599 5188583 5188578 -
aagaaagttgtgttggatagca

SEQ ID NO: 149889 - DNA, 22 bp, Artificial Sequence
  Synthetic oligonucleotide; TTA chr11 5188577 5188598 5188582 5188577 -
agaaagttgtgttggatagcat

SEQ ID NO: 149890 - DNA, 22 bp, Artificial Sequence
  Synthetic oligonucleotide; TTG chr11 5188568 5188589 5188573 5188568 -
tgttggatagcattcaaagcca

SEQ ID NO: 149891 - DNA, 22 bp, Artificial Sequence
  Synthetic oligonucleotide; TTG chr11 5188563 5188584 5188568 5188563 -
gatagcattcaaagccatcttg

SEQ ID NO: 149892 - DNA, 22 bp, Artificial Sequence
  Synthetic oligonucleotide; TTC chr11 5188553 5188574 5188558 5188553 -
aaagccatcttgggatgcatgc

SEQ ID NO: 149893 - DNA, 22 bp, Artificial Sequence
  Synthetic oligonucleotide; CTT chr11 5188542 5188563 5188547 5188542 -
gggatgcatgcagcccacgggc

SEQ ID NO: 149894 - DNA, 22 bp, Artificial Sequence
  Synthetic oligonucleotide; TTG chr11 5188541 5188562 5188546 5188541 -
ggatgcatgcagcccacgggcc

SEQ ID NO: 149895 - DNA, 22 bp, Artificial Sequence
  Synthetic oligonucleotide; TTG chr11 5188511 5188532 5188516 5188511 -
gacaagcttgctctacagccta

SEQ ID NO: 149896 - DNA, 22 bp, Artificial Sequence
  Synthetic oligonucleotide; CTT chr11 5188502 5188523 5188507 5188502 -
gctctacagcctacaaacaagg

SEQ ID NO: 149897 - DNA, 22 bp, Artificial Sequence
  Synthetic oligonucleotide; TTG chr11 5188501 5188522 5188506 5188501 -
ctctacagcctacaaacaagga

SEQ ID NO: 149898 - DNA, 22 bp, Artificial Sequence
  Synthetic oligonucleotide; CTC chr11 5188498 5188519 5188503 5188498 -
tacagcctacaaacaaggaaga

SEQ ID NO: 149899 - DNA, 22 bp, Artificial Sequence
  Synthetic oligonucleotide; CTA chr11 5188496 5188517 5188501 5188496 -
cagcctacaaacaaggaagaaa

SEQ ID NO: 149900 - DNA, 22 bp, Artificial Sequence
  Synthetic oligonucleotide; CTA chr11 5188489 5188510 5188494 5188489 -
caaacaaggaagaaataaatta

SEQ ID NO: 149901 - DNA, 22 bp, Artificial Sequence
  Synthetic oligonucleotide; TTA chr11 5188467 5188488 5188472 5188467 -
atatttctgttctcttttctgg

SEQ ID NO: 149902 - DNA, 22 bp, Artificial Sequence
  Synthetic oligonucleotide; TTT chr11 5188461 5188482 5188466 5188461 -
ctgttctcttttctggcaccaa

SEQ ID NO: 149903 - DNA, 22 bp, Artificial Sequence
  Synthetic oligonucleotide; TTC chr11 5188460 5188481 5188465 5188460 -
tgttctcttttctggcaccaac

SEQ ID NO: 149904 - DNA, 22 bp, Artificial Sequence
  Synthetic oligonucleotide; CTG chr11 5188458 5188479 5188463 5188458 -
ttctcttttctggcaccaactc

SEQ ID NO: 149905 - DNA, 22 bp, Artificial Sequence
  Synthetic oligonucleotide; TTC chr11 5188455 5188476 5188460 5188455 -
tcttttctggcaccaactccca

SEQ ID NO: 149906 - DNA, 22 bp, Artificial Sequence
  Synthetic oligonucleotide; CTC chr11 5188453 5188474 5188458 5188453 -
ttttctggcaccaactcccagc

SEQ ID NO: 149907 - DNA, 22 bp, Artificial Sequence
  Synthetic oligonucleotide; CTT chr11 5188451 5188472 5188456 5188451 -
ttctggcaccaactcccagctt

SEQ ID NO: 149908 - DNA, 22 bp, Artificial Sequence
  Synthetic oligonucleotide; TTT chr11 5188450 5188471 5188455 5188450 -
tctggcaccaactcccagcttt

SEQ ID NO: 149909 - DNA, 22 bp, Artificial Sequence
  Synthetic oligonucleotide; TTT chr11 5188449 5188470 5188454 5188449 -
ctggcaccaactcccagcttta

SEQ ID NO: 149910 - DNA, 22 bp, Artificial Sequence
  Synthetic oligonucleotide; TTC chr11 5188448 5188469 5188453 5188448 -
tggcaccaactcccagctttac

SEQ ID NO: 149911 - DNA, 22 bp, Artificial Sequence
  Synthetic oligonucleotide; CTG chr11 5188446 5188467 5188451 5188446 -
gcaccaactcccagctttacta

SEQ ID NO: 149912 - DNA, 22 bp, Artificial Sequence
  Synthetic oligonucleotide; CTC chr11 5188436 5188457 5188441 5188436 -
ccagctttactagcaccaactc

SEQ ID NO: 149913 - DNA, 22 bp, Artificial Sequence
  Synthetic oligonucleotide; CTT chr11 5188429 5188450 5188434 5188429 -
tactagcaccaactcccagctt

SEQ ID NO: 149914 - DNA, 22 bp, Artificial Sequence
  Synthetic oligonucleotide; TTT chr11 5188428 5188449 5188433 5188428 -
actagcaccaactcccagcttt

SEQ ID NO: 149915 - DNA, 22 bp, Artificial Sequence
  Synthetic oligonucleotide; TTA chr11 5188427 5188448 5188432 5188427 -
ctagcaccaactcccagcttta

SEQ ID NO: 149916 - DNA, 22 bp, Artificial Sequence
  Synthetic oligonucleotide; CTA chr11 5188424 5188445 5188429 5188424 -
gcaccaactcccagctttacta

SEQ ID NO: 149917 - DNA, 22 bp, Artificial Sequence
  Synthetic oligonucleotide; CTC chr11 5188414 5188435 5188419 5188414 -
ccagctttactaacttacaaat

SEQ ID NO: 149918 - DNA, 22 bp, Artificial Sequence
  Synthetic oligonucleotide; CTT chr11 5188407 5188428 5188412 5188407 -
tactaacttacaaatgagaaga

SEQ ID NO: 149919 - DNA, 22 bp, Artificial Sequence
  Synthetic oligonucleotide; TTT chr11 5188406 5188427 5188411 5188406 -
actaacttacaaatgagaagaa

SEQ ID NO: 149920 - DNA, 22 bp, Artificial Sequence
  Synthetic oligonucleotide; TTA chr11 5188405 5188426 5188410 5188405 -
ctaacttacaaatgagaagaaa

SEQ ID NO: 149921 - DNA, 22 bp, Artificial Sequence
  Synthetic oligonucleotide; CTA chr11 5188402 5188423 5188407 5188402 -
acttacaaatgagaagaaacca

SEQ ID NO: 149922 - DNA, 22 bp, Artificial Sequence
  Synthetic oligonucleotide; CTT chr11 5188398 5188419 5188403 5188398 -
acaaatgagaagaaaccaggtg

SEQ ID NO: 149923 - DNA, 22 bp, Artificial Sequence
  Synthetic oligonucleotide; TTA chr11 5188397 5188418 5188402 5188397 -
caaatgagaagaaaccaggtgt

SEQ ID NO: 149924 - DNA, 22 bp, Artificial Sequence
  Synthetic oligonucleotide; TTA chr11 5188368 5188389 5188373 5188368 -
tgccaaattacttgttcgaaga

SEQ ID NO: 149925 - DNA, 22 bp, Artificial Sequence
  Synthetic oligonucleotide; TTA chr11 5188358 5188379 5188363 5188358 -
cttgttcgaagaaaggatcatc

SEQ ID NO: 149926 - DNA, 22 bp, Artificial Sequence
  Synthetic oligonucleotide; CTT chr11 5188355 5188376 5188360 5188355 -
gttcgaagaaaggatcatctgg

SEQ ID NO: 149927 - DNA, 22 bp, Artificial Sequence
  Synthetic oligonucleotide; TTG chr11 5188354 5188375 5188359 5188354 -
ttcgaagaaaggatcatctgga

SEQ ID NO: 149928 - DNA, 22 bp, Artificial Sequence
  Synthetic oligonucleotide; TTC chr11 5188351 5188372 5188356 5188351 -
gaagaaaggatcatctggaatt

SEQ ID NO: 149929 - DNA, 22 bp, Artificial Sequence
  Synthetic oligonucleotide; CTG chr11 5188334 5188355 5188339 5188334 -
gaattcttttcttggatttcct

SEQ ID NO: 149930 - DNA, 22 bp, Artificial Sequence
  Synthetic oligonucleotide; TTC chr11 5188328 5188349 5188333 5188328 -
ttttcttggatttcctccactc

SEQ ID NO: 149931 - DNA, 22 bp, Artificial Sequence
  Synthetic oligonucleotide; CTT chr11 5188326 5188347 5188331 5188326 -
ttcttggatttcctccactcaa

SEQ ID NO: 149932 - DNA, 22 bp, Artificial Sequence
  Synthetic oligonucleotide; TTT chr11 5188325 5188346 5188330 5188325 -
tcttggatttcctccactcaag

SEQ ID NO: 149933 - DNA, 22 bp, Artificial Sequence
  Synthetic oligonucleotide; TTT chr11 5188324 5188345 5188329 5188324 -
cttggatttcctccactcaagt

SEQ ID NO: 149934 - DNA, 22 bp, Artificial Sequence
  Synthetic oligonucleotide; TTC chr11 5188323 5188344 5188328 5188323 -
ttggatttcctccactcaagtc

SEQ ID NO: 149935 - DNA, 22 bp, Artificial Sequence
  Synthetic oligonucleotide; CTT chr11 5188321 5188342 5188326 5188321 -
ggatttcctccactcaagtccc

SEQ ID NO: 149936 - DNA, 22 bp, Artificial Sequence
  Synthetic oligonucleotide; TTG chr11 5188320 5188341 5188325 5188320 -
gatttcctccactcaagtccca

SEQ ID NO: 149937 - DNA, 22 bp, Artificial Sequence
  Synthetic oligonucleotide; TTT chr11 5188315 5188336 5188320 5188315 -
cctccactcaagtcccatagta

SEQ ID NO: 149938 - DNA, 22 bp, Artificial Sequence
  Synthetic oligonucleotide; TTC chr11 5188314 5188335 5188319 5188314 -
ctccactcaagtcccatagtaa

SEQ ID NO: 149939 - DNA, 22 bp, Artificial Sequence
  Synthetic oligonucleotide; CTC chr11 5188311 5188332 5188316 5188311 -
cactcaagtcccatagtaagat

SEQ ID NO: 149940 - DNA, 22 bp, Artificial Sequence
  Synthetic oligonucleotide; CTC chr11 5188306 5188327 5188311 5188306 -
aagtcccatagtaagataaagg

SEQ ID NO: 149941 - DNA, 22 bp, Artificial Sequence
  Synthetic oligonucleotide; CTT chr11 5188281 5188302 5188286 5188281 -
tcatttaattgtatctttttca

SEQ ID NO: 149942 - DNA, 22 bp, Artificial Sequence
  Synthetic oligonucleotide; TTT chr11 5188280 5188301 5188285 5188280 -
catttaattgtatctttttcat

SEQ ID NO: 149943 - DNA, 22 bp, Artificial Sequence
  Synthetic oligonucleotide; TTC chr11 5188279 5188300 5188284 5188279 -
atttaattgtatctttttcatt

SEQ ID NO: 149944 - DNA, 22 bp, Artificial Sequence
  Synthetic oligonucleotide; TTT chr11 5188275 5188296 5188280 5188275 -
aattgtatctttttcatttttt

SEQ ID NO: 149945 - DNA, 22 bp, Artificial Sequence
  Synthetic oligonucleotide; TTA chr11 5188274 5188295 5188279 5188274 -
attgtatctttttcattttttg

SEQ ID NO: 149946 - DNA, 22 bp, Artificial Sequence
  Synthetic oligonucleotide; TTG chr11 5188270 5188291 5188275 5188270 -
tatctttttcattttttggctg

SEQ ID NO: 149947 - DNA, 22 bp, Artificial Sequence
  Synthetic oligonucleotide; CTT chr11 5188264 5188285 5188269 5188264 -
tttcattttttggctgaagcac

SEQ ID NO: 149948 - DNA, 22 bp, Artificial Sequence
  Synthetic oligonucleotide; TTT chr11 5188263 5188284 5188268 5188263 -
ttcattttttggctgaagcact

SEQ ID NO: 149949 - DNA, 22 bp, Artificial Sequence
  Synthetic oligonucleotide; TTT chr11 5188262 5188283 5188267 5188262 -
tcattttttggctgaagcacta

SEQ ID NO: 149950 - DNA, 22 bp, Artificial Sequence
  Synthetic oligonucleotide; TTT chr11 5188261 5188282 5188266 5188261 -
cattttttggctgaagcactag

SEQ ID NO: 149951 - DNA, 22 bp, Artificial Sequence
  Synthetic oligonucleotide; TTC chr11 5188260 5188281 5188265 5188260 -
attttttggctgaagcactagc

SEQ ID NO: 149952 - DNA, 22 bp, Artificial Sequence
  Synthetic oligonucleotide; TTT chr11 5188256 5188277 5188261 5188256 -
tttggctgaagcactagcatcc

SEQ ID NO: 149953 - DNA, 22 bp, Artificial Sequence
  Synthetic oligonucleotide; TTT chr11 5188255 5188276 5188260 5188255 -
ttggctgaagcactagcatcca

SEQ ID NO: 149954 - DNA, 22 bp, Artificial Sequence
  Synthetic oligonucleotide; TTT chr11 5188254 5188275 5188259 5188254 -
tggctgaagcactagcatccag

SEQ ID NO: 149955 - DNA, 22 bp, Artificial Sequence
  Synthetic oligonucleotide; TTT chr11 5188253 5188274 5188258 5188253 -
ggctgaagcactagcatccagg

SEQ ID NO: 149956 - DNA, 22 bp, Artificial Sequence
  Synthetic oligonucleotide; TTG chr11 5188252 5188273 5188257 5188252 -
gctgaagcactagcatccagga

SEQ ID NO: 149957 - DNA, 22 bp, Artificial Sequence
  Synthetic oligonucleotide; CTG chr11 5188248 5188269 5188253 5188248 -
aagcactagcatccaggacact

SEQ ID NO: 149958 - DNA, 22 bp, Artificial Sequence
  Synthetic oligonucleotide; CTA chr11 5188240 5188261 5188245 5188240 -
gcatccaggacactaatttacc

SEQ ID NO: 149959 - DNA, 22 bp, Artificial Sequence
  Synthetic oligonucleotide; CTA chr11 5188225 5188246 5188230 5188225 -
atttacctatagaacaattatc

SEQ ID NO: 149960 - DNA, 22 bp, Artificial Sequence
  Synthetic oligonucleotide; TTT chr11 5188221 5188242 5188226 5188221 -
acctatagaacaattatctaga

SEQ ID NO: 149961 - DNA, 22 bp, Artificial Sequence
  Synthetic oligonucleotide; TTA chr11 5188220 5188241 5188225 5188220 -
cctatagaacaattatctagac

SEQ ID NO: 149962 - DNA, 22 bp, Artificial Sequence
  Synthetic oligonucleotide; CTA chr11 5188216 5188237 5188221 5188216 -
tagaacaattatctagactcaa

SEQ ID NO: 149963 - DNA, 22 bp, Artificial Sequence
  Synthetic oligonucleotide; TTA chr11 5188205 5188226 5188210 5188205 -
tctagactcaattagaagtatc

SEQ ID NO: 149964 - DNA, 22 bp, Artificial Sequence
  Synthetic oligonucleotide; CTA chr11 5188201 5188222 5188206 5188201 -
gactcaattagaagtatcttac

SEQ ID NO: 149965 - DNA, 22 bp, Artificial Sequence
  Synthetic oligonucleotide; CTC chr11 5188196 5188217 5188201 5188196 -
aattagaagtatcttacatatt

SEQ ID NO: 149966 - DNA, 22 bp, Artificial Sequence
  Synthetic oligonucleotide; TTA chr11 5188191 5188212 5188196 5188191 -
gaagtatcttacatattgaagc

SEQ ID NO: 149967 - DNA, 22 bp, Artificial Sequence
  Synthetic oligonucleotide; CTT chr11 5188181 5188202 5188186 5188181 -
acatattgaagcagagttagag

SEQ ID NO: 149968 - DNA, 22 bp, Artificial Sequence
  Synthetic oligonucleotide; TTA chr11 5188180 5188201 5188185 5188180 -
catattgaagcagagttagagc

SEQ ID NO: 149969 - DNA, 22 bp, Artificial Sequence
  Synthetic oligonucleotide; TTG chr11 5188173 5188194 5188178 5188173 -
aagcagagttagagctaaaatc

SEQ ID NO: 149970 - DNA, 22 bp, Artificial Sequence
  Synthetic oligonucleotide; TTA chr11 5188162 5188183 5188167 5188162 -
gagctaaaatctcaagcaatcc

SEQ ID NO: 149971 - DNA, 22 bp, Artificial Sequence
  Synthetic oligonucleotide; CTA chr11 5188156 5188177 5188161 5188156 -
aaatctcaagcaatccaacatc

SEQ ID NO: 149972 - DNA, 22 bp, Artificial Sequence
  Synthetic oligonucleotide; CTC chr11 5188149 5188170 5188154 5188149 -
aagcaatccaacatccttaatt

SEQ ID NO: 149973 - DNA, 22 bp, Artificial Sequence
  Synthetic oligonucleotide; CTT chr11 5188131 5188152 5188136 5188131 -
aatttacagatactaaatcagt

SEQ ID NO: 149974 - DNA, 22 bp, Artificial Sequence
  Synthetic oligonucleotide; TTA chr11 5188130 5188151 5188135 5188130 -
atttacagatactaaatcagta

SEQ ID NO: 149975 - DNA, 22 bp, Artificial Sequence
  Synthetic oligonucleotide; TTT chr11 5188126 5188147 5188131 5188126 -
acagatactaaatcagtagcca

SEQ ID NO: 149976 - DNA, 22 bp, Artificial Sequence
  Synthetic oligonucleotide; TTA chr11 5188125 5188146 5188130 5188125 -
cagatactaaatcagtagccaa

SEQ ID NO: 149977 - DNA, 22 bp, Artificial Sequence
  Synthetic oligonucleotide; CTA chr11 5188116 5188137 5188121 5188116 -
aatcagtagccaaagccatttt

SEQ ID NO: 149978 - DNA, 22 bp, Artificial Sequence
  Synthetic oligonucleotide; TTT chr11 5188095 5188116 5188100 5188095 -
ttactgctattttggttaacag

SEQ ID NO: 149979 - DNA, 22 bp, Artificial Sequence
  Synthetic oligonucleotide; TTT chr11 5188094 5188115 5188099 5188094 -
tactgctattttggttaacagg

SEQ ID NO: 149980 - DNA, 22 bp, Artificial Sequence
  Synthetic oligonucleotide; TTT chr11 5188093 5188114 5188098 5188093 -
actgctattttggttaacaggg

SEQ ID NO: 149981 - DNA, 22 bp, Artificial Sequence
  Synthetic oligonucleotide; TTA chr11 5188092 5188113 5188097 5188092 -
ctgctattttggttaacagggc

SEQ ID NO: 149982 - DNA, 22 bp, Artificial Sequence
  Synthetic oligonucleotide; CTG chr11 5188089 5188110 5188094 5188089 -
ctattttggttaacagggccac

SEQ ID NO: 149983 - DNA, 22 bp, Artificial Sequence
  Synthetic oligonucleotide; CTA chr11 5188086 5188107 5188091 5188086 -
ttttggttaacagggccacaat

SEQ ID NO: 149984 - DNA, 22 bp, Artificial Sequence
  Synthetic oligonucleotide; TTT chr11 5188083 5188104 5188088 5188083 -
tggttaacagggccacaatcat

SEQ ID NO: 149985 - DNA, 22 bp, Artificial Sequence
  Synthetic oligonucleotide; TTT chr11 5188082 5188103 5188087 5188082 -
ggttaacagggccacaatcatt

SEQ ID NO: 149986 - DNA, 22 bp, Artificial Sequence
  Synthetic oligonucleotide; TTG chr11 5188081 5188102 5188086 5188081 -
gttaacagggccacaatcattt

SEQ ID NO: 149987 - DNA, 22 bp, Artificial Sequence
  Synthetic oligonucleotide; TTA chr11 5188077 5188098 5188082 5188077 -
acagggccacaatcatttatcc

SEQ ID NO: 149988 - DNA, 22 bp, Artificial Sequence
  Synthetic oligonucleotide; TTT chr11 5188059 5188080 5188064 5188059 -
atccatttccttgaaatccata

SEQ ID NO: 149989 - DNA, 22 bp, Artificial Sequence
  Synthetic oligonucleotide; TTA chr11 5188058 5188079 5188063 5188058 -
tccatttccttgaaatccatag

SEQ ID NO: 149990 - DNA, 22 bp, Artificial Sequence
  Synthetic oligonucleotide; TTT chr11 5188051 5188072 5188056 5188051 -
ccttgaaatccatagaaattta

SEQ ID NO: 149991 - DNA, 22 bp, Artificial Sequence
  Synthetic oligonucleotide; TTC chr11 5188050 5188071 5188055 5188050 -
cttgaaatccatagaaatttaa

SEQ ID NO: 149992 - DNA, 22 bp, Artificial Sequence
  Synthetic oligonucleotide; CTT chr11 5188047 5188068 5188052 5188047 -
gaaatccatagaaatttaaaaa

SEQ ID NO: 149993 - DNA, 22 bp, Artificial Sequence
  Synthetic oligonucleotide; TTG chr11 5188046 5188067 5188051 5188046 -
aaatccatagaaatttaaaaac

SEQ ID NO: 149994 - DNA, 22 bp, Artificial Sequence
  Synthetic oligonucleotide; TTT chr11 5188030 5188051 5188035 5188030 -
aaaaactgagtcttttaacagc

SEQ ID NO: 149995 - DNA, 22 bp, Artificial Sequence
  Synthetic oligonucleotide; TTA chr11 5188029 5188050 5188034 5188029 -
aaaactgagtcttttaacagca

SEQ ID NO: 149996 - DNA, 22 bp, Artificial Sequence
  Synthetic oligonucleotide; CTG chr11 5188022 5188043 5188027 5188022 -
agtcttttaacagcacaatctg

SEQ ID NO: 149997 - DNA, 22 bp, Artificial Sequence
  Synthetic oligonucleotide; CTT chr11 5188016 5188037 5188021 5188016 -
ttaacagcacaatctgctctaa

SEQ ID NO: 149998 - DNA, 22 bp, Artificial Sequence
  Synthetic oligonucleotide; TTT chr11 5188015 5188036 5188020 5188015 -
taacagcacaatctgctctaaa

SEQ ID NO: 149999 - DNA, 22 bp, Artificial Sequence
  Synthetic oligonucleotide; TTT chr11 5188014 5188035 5188019 5188014 -
aacagcacaatctgctctaaag

SEQ ID NO: 150000 - DNA, 22 bp, Artificial Sequence
  Synthetic oligonucleotide; TTA chr11 5188013 5188034 5188018 5188013 -
acagcacaatctgctctaaagt

SEQ ID NO: 150001 - DNA, 22 bp, Artificial Sequence
  Synthetic oligonucleotide; CTG chr11 5188000 5188021 5188005 5188000 -
ctctaaagtgatggcaatttct

SEQ ID NO: 150002 - DNA, 22 bp, Artificial Sequence
  Synthetic oligonucleotide; CTC chr11 5187997 5188018 5188002 5187997 -
taaagtgatggcaatttctgac

SEQ ID NO: 150003 - DNA, 22 bp, Artificial Sequence
  Synthetic oligonucleotide; CTA chr11 5187995 5188016 5188000 5187995 -
aagtgatggcaatttctgacat

SEQ ID NO: 150004 - DNA, 22 bp, Artificial Sequence
  Synthetic oligonucleotide; TTT chr11 5187980 5188001 5187985 5187980 -
ctgacatgaacttatgtgagaa

SEQ ID NO: 150005 - DNA, 22 bp, Artificial Sequence
  Synthetic oligonucleotide; TTC chr11 5187979 5188000 5187984 5187979 -
tgacatgaacttatgtgagaat

SEQ ID NO: 150006 - DNA, 22 bp, Artificial Sequence
  Synthetic oligonucleotide; CTG chr11 5187977 5187998 5187982 5187977 -
acatgaacttatgtgagaattt

SEQ ID NO: 150007 - DNA, 22 bp, Artificial Sequence
  Synthetic oligonucleotide; CTT chr11 5187967 5187988 5187972 5187967 -
atgtgagaatttttataatctt

SEQ ID NO: 150008 - DNA, 22 bp, Artificial Sequence
  Synthetic oligonucleotide; TTA chr11 5187966 5187987 5187971 5187966 -
tgtgagaatttttataatcttt

SEQ ID NO: 150009 - DNA, 22 bp, Artificial Sequence
  Synthetic oligonucleotide; TTT chr11 5187955 5187976 5187960 5187955 -
ttataatctttatttattctac

SEQ ID NO: 150010 - DNA, 22 bp, Artificial Sequence
  Synthetic oligonucleotide; TTT chr11 5187954 5187975 5187959 5187954 -
tataatctttatttattctaca

SEQ ID NO: 150011 - DNA, 22 bp, Artificial Sequence
  Synthetic oligonucleotide; TTT chr11 5187953 5187974 5187958 5187953 -
ataatctttatttattctacat

SEQ ID NO: 150012 - DNA, 22 bp, Artificial Sequence
  Synthetic oligonucleotide; TTA chr11 5187952 5187973 5187957 5187952 -
taatctttatttattctacata

SEQ ID NO: 150013 - DNA, 22 bp, Artificial Sequence
  Synthetic oligonucleotide; CTT chr11 5187945 5187966 5187950 5187945 -
tatttattctacataatactta

SEQ ID NO: 150014 - DNA, 22 bp, Artificial Sequence
  Synthetic oligonucleotide; TTT chr11 5187944 5187965 5187949 5187944 -
atttattctacataatacttac

SEQ ID NO: 150015 - DNA, 22 bp, Artificial Sequence
  Synthetic oligonucleotide; TTA chr11 5187943 5187964 5187948 5187943 -
tttattctacataatacttaca

SEQ ID NO: 150016 - DNA, 22 bp, Artificial Sequence
  Synthetic oligonucleotide; TTT chr11 5187940 5187961 5187945 5187940 -
attctacataatacttacatgt

SEQ ID NO: 150017 - DNA, 22 bp, Artificial Sequence
  Synthetic oligonucleotide; TTA chr11 5187939 5187960 5187944 5187939 -
ttctacataatacttacatgtt

SEQ ID NO: 150018 - DNA, 22 bp, Artificial Sequence
  Synthetic oligonucleotide; TTC chr11 5187936 5187957 5187941 5187936 -
tacataatacttacatgttccc

SEQ ID NO: 150019 - DNA, 22 bp, Artificial Sequence
  Synthetic oligonucleotide; CTA chr11 5187934 5187955 5187939 5187934 -
cataatacttacatgttccctg

SEQ ID NO: 150020 - DNA, 22 bp, Artificial Sequence
  Synthetic oligonucleotide; CTT chr11 5187924 5187945 5187929 5187924 -
acatgttccctgcaaaaatatc

SEQ ID NO: 150021 - DNA, 22 bp, Artificial Sequence
  Synthetic oligonucleotide; TTA chr11 5187923 5187944 5187928 5187923 -
catgttccctgcaaaaatatct

SEQ ID NO: 150022 - DNA, 22 bp, Artificial Sequence
  Synthetic oligonucleotide; TTC chr11 5187916 5187937 5187921 5187916 -
cctgcaaaaatatctaggtata

SEQ ID NO: 150023 - DNA, 22 bp, Artificial Sequence
  Synthetic oligonucleotide; CTG chr11 5187912 5187933 5187917 5187912 -
caaaaatatctaggtatattag

SEQ ID NO: 150024 - DNA, 22 bp, Artificial Sequence
  Synthetic oligonucleotide; CTA chr11 5187900 5187921 5187905 5187900 -
ggtatattagataatcatatag

SEQ ID NO: 150025 - DNA, 22 bp, Artificial Sequence
  Synthetic oligonucleotide; TTA chr11 5187891 5187912 5187896 5187891 -
gataatcatatagatatatgat

SEQ ID NO: 150026 - DNA, 22 bp, Artificial Sequence
  Synthetic oligonucleotide; TTA chr11 5187867 5187888 5187872 5187867 -
ttaagggcataccgagattcca

SEQ ID NO: 150027 - DNA, 22 bp, Artificial Sequence
  Synthetic oligonucleotide; TTA chr11 5187864 5187885 5187869 5187864 -
agggcataccgagattccaatg

SEQ ID NO: 150028 - DNA, 22 bp, Artificial Sequence
  Synthetic oligonucleotide; TTC chr11 5187847 5187868 5187852 5187847 -
caatgatattgttacttgatgt

SEQ ID NO: 150029 - DNA, 22 bp, Artificial Sequence
  Synthetic oligonucleotide; TTG chr11 5187836 5187857 5187841 5187836 -
ttacttgatgtcaataatatta

SEQ ID NO: 150030 - DNA, 22 bp, Artificial Sequence
  Synthetic oligonucleotide; TTA chr11 5187833 5187854 5187838 5187833 -
cttgatgtcaataatattatat

SEQ ID NO: 150031 - DNA, 22 bp, Artificial Sequence
  Synthetic oligonucleotide; CTT chr11 5187830 5187851 5187835 5187830 -
gatgtcaataatattatataac

SEQ ID NO: 150032 - DNA, 22 bp, Artificial Sequence
  Synthetic oligonucleotide; TTG chr11 5187829 5187850 5187834 5187829 -
atgtcaataatattatataaca

SEQ ID NO: 150033 - DNA, 22 bp, Artificial Sequence
  Synthetic oligonucleotide; TTA chr11 5187814 5187835 5187819 5187814 -
tataacattcataaaaattgga

SEQ ID NO: 150034 - DNA, 22 bp, Artificial Sequence
  Synthetic oligonucleotide; TTC chr11 5187804 5187825 5187809 5187804 -
ataaaaattggaaaattatttt

SEQ ID NO: 150035 - DNA, 22 bp, Artificial Sequence
  Synthetic oligonucleotide; TTG chr11 5187794 5187815 5187799 5187794 -
gaaaattatttttctaaagcat

SEQ ID NO: 150036 - DNA, 22 bp, Artificial Sequence
  Synthetic oligonucleotide; TTA chr11 5187786 5187807 5187791 5187786 -
tttttctaaagcatgtggctca

SEQ ID NO: 150037 - DNA, 22 bp, Artificial Sequence
  Synthetic oligonucleotide; TTT chr11 5187783 5187804 5187788 5187783 -
ttctaaagcatgtggctcaaag

SEQ ID NO: 150038 - DNA, 22 bp, Artificial Sequence
  Synthetic oligonucleotide; TTT chr11 5187782 5187803 5187787 5187782 -
tctaaagcatgtggctcaaaga

SEQ ID NO: 150039 - DNA, 22 bp, Artificial Sequence
  Synthetic oligonucleotide; TTT chr11 5187781 5187802 5187786 5187781 -
ctaaagcatgtggctcaaagac

SEQ ID NO: 150040 - DNA, 22 bp, Artificial Sequence
  Synthetic oligonucleotide; TTC chr11 5187780 5187801 5187785 5187780 -
taaagcatgtggctcaaagact

SEQ ID NO: 150041 - DNA, 22 bp, Artificial Sequence
  Synthetic oligonucleotide; CTA chr11 5187778 5187799 5187783 5187778 -
aagcatgtggctcaaagactgt

SEQ ID NO: 150042 - DNA, 22 bp, Artificial Sequence
  Synthetic oligonucleotide; CTC chr11 5187765 5187786 5187770 5187765 -
aaagactgtagacttctataag

SEQ ID NO: 150043 - DNA, 22 bp, Artificial Sequence
  Synthetic oligonucleotide; CTG chr11 5187757 5187778 5187762 5187757 -
tagacttctataagaaaactaa

SEQ ID NO: 150044 - DNA, 22 bp, Artificial Sequence
  Synthetic oligonucleotide; CTT chr11 5187750 5187771 5187755 5187750 -
ctataagaaaactaaacatatt

SEQ ID NO: 150045 - DNA, 22 bp, Artificial Sequence
  Synthetic oligonucleotide; TTC chr11 5187749 5187770 5187754 5187749 -
tataagaaaactaaacatatta

SEQ ID NO: 150046 - DNA, 22 bp, Artificial Sequence
  Synthetic oligonucleotide; CTA chr11 5187747 5187768 5187752 5187747 -
taagaaaactaaacatattaaa

SEQ ID NO: 150047 - DNA, 22 bp, Artificial Sequence
  Synthetic oligonucleotide; CTA chr11 5187736 5187757 5187741 5187736 -
aacatattaaattaaacatatc

SEQ ID NO: 150048 - DNA, 22 bp, Artificial Sequence
  Synthetic oligonucleotide; TTA chr11 5187727 5187748 5187732 5187727 -
aattaaacatatcaataactat

SEQ ID NO: 150049 - DNA, 22 bp, Artificial Sequence
  Synthetic oligonucleotide; TTA chr11 5187722 5187743 5187727 5187722 -
aacatatcaataactattattt

SEQ ID NO: 150050 - DNA, 22 bp, Artificial Sequence
  Synthetic oligonucleotide; CTA chr11 5187706 5187727 5187711 5187706 -
ttatttcatctgcatagaatat

SEQ ID NO: 150051 - DNA, 22 bp, Artificial Sequence
  Synthetic oligonucleotide; TTA chr11 5187703 5187724 5187708 5187703 -
tttcatctgcatagaatattgc

SEQ ID NO: 150052 - DNA, 22 bp, Artificial Sequence
  Synthetic oligonucleotide; TTT chr11 5187700 5187721 5187705 5187700 -
catctgcatagaatattgctga

SEQ ID NO: 150053 - DNA, 22 bp, Artificial Sequence
  Synthetic oligonucleotide; TTC chr11 5187699 5187720 5187704 5187699 -
atctgcatagaatattgctgaa

SEQ ID NO: 150054 - DNA, 22 bp, Artificial Sequence
  Synthetic oligonucleotide; CTG chr11 5187694 5187715 5187699 5187694 -
catagaatattgctgaaggtgt

SEQ ID NO: 150055 - DNA, 22 bp, Artificial Sequence
  Synthetic oligonucleotide; TTG chr11 5187682 5187703 5187687 5187682 -
ctgaaggtgtgttttaaagtag

SEQ ID NO: 150056 - DNA, 22 bp, Artificial Sequence
  Synthetic oligonucleotide; CTG chr11 5187679 5187700 5187684 5187679 -
aaggtgtgttttaaagtagtaa

SEQ ID NO: 150057 - DNA, 22 bp, Artificial Sequence
  Synthetic oligonucleotide; TTT chr11 5187668 5187689 5187673 5187668 -
taaagtagtaacatggtacttg

SEQ ID NO: 150058 - DNA, 22 bp, Artificial Sequence
  Synthetic oligonucleotide; TTT chr11 5187667 5187688 5187672 5187667 -
aaagtagtaacatggtacttgt

SEQ ID NO: 150059 - DNA, 22 bp, Artificial Sequence
  Synthetic oligonucleotide; TTA chr11 5187666 5187687 5187671 5187666 -
aagtagtaacatggtacttgta

SEQ ID NO: 150060 - DNA, 22 bp, Artificial Sequence
  Synthetic oligonucleotide; CTT chr11 5187647 5187668 5187652 5187647 -
gtatcacagcagccgtagtttg

SEQ ID NO: 150061 - DNA, 22 bp, Artificial Sequence
  Synthetic oligonucleotide; TTG chr11 5187646 5187667 5187651 5187646 -
tatcacagcagccgtagtttgg

SEQ ID NO: 150062 - DNA, 22 bp, Artificial Sequence
  Synthetic oligonucleotide; TTT chr11 5187626 5187647 5187631 5187626 -
ggatcactgccctcttgcatat

SEQ ID NO: 150063 - DNA, 22 bp, Artificial Sequence
  Synthetic oligonucleotide; TTG chr11 5187625 5187646 5187630 5187625 -
gatcactgccctcttgcatatt

SEQ ID NO: 150064 - DNA, 22 bp, Artificial Sequence
  Synthetic oligonucleotide; CTG chr11 5187617 5187638 5187622 5187617 -
ccctcttgcatattatatttat

SEQ ID NO: 150065 - DNA, 22 bp, Artificial Sequence
  Synthetic oligonucleotide; CTC chr11 5187612 5187633 5187617 5187612 -
ttgcatattatatttatcagaa

SEQ ID NO: 150066 - DNA, 22 bp, Artificial Sequence
  Synthetic oligonucleotide; CTT chr11 5187610 5187631 5187615 5187610 -
gcatattatatttatcagaaat

SEQ ID NO: 150067 - DNA, 22 bp, Artificial Sequence
  Synthetic oligonucleotide; TTG chr11 5187609 5187630 5187614 5187609 -
catattatatttatcagaaatc

SEQ ID NO: 150068 - DNA, 22 bp, Artificial Sequence
  Synthetic oligonucleotide; TTA chr11 5187602 5187623 5187607 5187602 -
tatttatcagaaatcattattt

SEQ ID NO: 150069 - DNA, 22 bp, Artificial Sequence
  Synthetic oligonucleotide; TTT chr11 5187597 5187618 5187602 5187597 -
atcagaaatcattatttactga

SEQ ID NO: 150070 - DNA, 22 bp, Artificial Sequence
  Synthetic oligonucleotide; TTA chr11 5187596 5187617 5187601 5187596 -
tcagaaatcattatttactgaa

SEQ ID NO: 150071 - DNA, 22 bp, Artificial Sequence
  Synthetic oligonucleotide; TTA chr11 5187583 5187604 5187588 5187583 -
tttactgaaaacatttgctcaa

SEQ ID NO: 150072 - DNA, 22 bp, Artificial Sequence
  Synthetic oligonucleotide; TTT chr11 5187580 5187601 5187585 5187580 -
actgaaaacatttgctcaaaaa

SEQ ID NO: 150073 - DNA, 22 bp, Artificial Sequence
  Synthetic oligonucleotide; TTA chr11 5187579 5187600 5187584 5187579 -
ctgaaaacatttgctcaaaaaa

SEQ ID NO: 150074 - DNA, 22 bp, Artificial Sequence
  Synthetic oligonucleotide; CTG chr11 5187576 5187597 5187581 5187576 -
aaaacatttgctcaaaaaaaaa

SEQ ID NO: 150075 - DNA, 22 bp, Artificial Sequence
  Synthetic oligonucleotide; TTT chr11 5187567 5187588 5187572 5187567 -
gctcaaaaaaaaattcttcaag

SEQ ID NO: 150076 - DNA, 22 bp, Artificial Sequence
  Synthetic oligonucleotide; TTG chr11 5187566 5187587 5187571 5187566 -
ctcaaaaaaaaattcttcaagt

SEQ ID NO: 150077 - DNA, 22 bp, Artificial Sequence
  Synthetic oligonucleotide; CTC chr11 5187563 5187584 5187568 5187563 -
aaaaaaaaattcttcaagtttt

SEQ ID NO: 150078 - DNA, 22 bp, Artificial Sequence
  Synthetic oligonucleotide; TTC chr11 5187551 5187572 5187556 5187551 -
ttcaagttttagagtccccaga

SEQ ID NO: 150079 - DNA, 22 bp, Artificial Sequence
  Synthetic oligonucleotide; CTT chr11 5187549 5187570 5187554 5187549 -
caagttttagagtccccagatt

SEQ ID NO: 150080 - DNA, 22 bp, Artificial Sequence
  Synthetic oligonucleotide; TTC chr11 5187548 5187569 5187553 5187548 -
aagttttagagtccccagattt

SEQ ID NO: 150081 - DNA, 22 bp, Artificial Sequence
  Synthetic oligonucleotide; TTT chr11 5187542 5187563 5187547 5187542 -
tagagtccccagatttaaaaac

SEQ ID NO: 150082 - DNA, 22 bp, Artificial Sequence
  Synthetic oligonucleotide; TTT chr11 5187541 5187562 5187546 5187541 -
agagtccccagatttaaaaaca

SEQ ID NO: 150083 - DNA, 22 bp, Artificial Sequence
  Synthetic oligonucleotide; TTA chr11 5187540 5187561 5187545 5187540 -
gagtccccagatttaaaaacat

SEQ ID NO: 150084 - DNA, 22 bp, Artificial Sequence
  Synthetic oligonucleotide; TTT chr11 5187526 5187547 5187531 5187526 -
aaaaacattataataagttatc

SEQ ID NO: 150085 - DNA, 22 bp, Artificial Sequence
  Synthetic oligonucleotide; TTA chr11 5187525 5187546 5187530 5187525 -
aaaacattataataagttatca

SEQ ID NO: 150086 - DNA, 22 bp, Artificial Sequence
  Synthetic oligonucleotide; TTA chr11 5187516 5187537 5187521 5187516 -
taataagttatcagcagagtat

SEQ ID NO: 150087 - DNA, 22 bp, Artificial Sequence
  Synthetic oligonucleotide; TTA chr11 5187506 5187527 5187511 5187506 -
tcagcagagtatacctcttgga

SEQ ID NO: 150088 - DNA, 22 bp, Artificial Sequence
  Synthetic oligonucleotide; CTC chr11 5187489 5187510 5187494 5187489 -
ttggattctattctttgttctt

SEQ ID NO: 150089 - DNA, 22 bp, Artificial Sequence
  Synthetic oligonucleotide; CTT chr11 5187487 5187508 5187492 5187487 -
ggattctattctttgttcttcc

SEQ ID NO: 150090 - DNA, 22 bp, Artificial Sequence
  Synthetic oligonucleotide; TTG chr11 5187486 5187507 5187491 5187486 -
gattctattctttgttcttcct

SEQ ID NO: 150091 - DNA, 22 bp, Artificial Sequence
  Synthetic oligonucleotide; TTC chr11 5187481 5187502 5187486 5187481 -
tattctttgttcttcctgtcac

SEQ ID NO: 150092 - DNA, 22 bp, Artificial Sequence
  Synthetic oligonucleotide; CTA chr11 5187479 5187500 5187484 5187479 -
ttctttgttcttcctgtcacta

SEQ ID NO: 150093 - DNA, 22 bp, Artificial Sequence
  Synthetic oligonucleotide; TTC chr11 5187476 5187497 5187481 5187476 -
tttgttcttcctgtcactatca

SEQ ID NO: 150094 - DNA, 22 bp, Artificial Sequence
  Synthetic oligonucleotide; CTT chr11 5187474 5187495 5187479 5187474 -
tgttcttcctgtcactatcagg

SEQ ID NO: 150095 - DNA, 22 bp, Artificial Sequence
  Synthetic oligonucleotide; TTT chr11 5187473 5187494 5187478 5187473 -
gttcttcctgtcactatcaggt

SEQ ID NO: 150096 - DNA, 22 bp, Artificial Sequence
  Synthetic oligonucleotide; TTG chr11 5187472 5187493 5187477 5187472 -
ttcttcctgtcactatcaggta

SEQ ID NO: 150097 - DNA, 22 bp, Artificial Sequence
  Synthetic oligonucleotide; TTC chr11 5187469 5187490 5187474 5187469 -
ttcctgtcactatcaggtagtc

SEQ ID NO: 150098 - DNA, 22 bp, Artificial Sequence
  Synthetic oligonucleotide; CTT chr11 5187467 5187488 5187472 5187467 -
cctgtcactatcaggtagtcag

SEQ ID NO: 150099 - DNA, 22 bp, Artificial Sequence
  Synthetic oligonucleotide; TTC chr11 5187466 5187487 5187471 5187466 -
ctgtcactatcaggtagtcaga

SEQ ID NO: 150100 - DNA, 22 bp, Artificial Sequence
  Synthetic oligonucleotide; CTG chr11 5187463 5187484 5187468 5187463 -
tcactatcaggtagtcagatgc

SEQ ID NO: 150101 - DNA, 22 bp, Artificial Sequence
  Synthetic oligonucleotide; CTA chr11 5187457 5187478 5187462 5187457 -
tcaggtagtcagatgcagacat

SEQ ID NO: 150102 - DNA, 22 bp, Artificial Sequence
  Synthetic oligonucleotide; TTT chr11 5187429 5187450 5187434 5187429 -
ctgttgtcccctaaattctcct

SEQ ID NO: 150103 - DNA, 22 bp, Artificial Sequence
  Synthetic oligonucleotide; TTC chr11 5187428 5187449 5187433 5187428 -
tgttgtcccctaaattctcctt

SEQ ID NO: 150104 - DNA, 22 bp, Artificial Sequence
  Synthetic oligonucleotide; CTG chr11 5187426 5187447 5187431 5187426 -
ttgtcccctaaattctccttgt

SEQ ID NO: 150105 - DNA, 22 bp, Artificial Sequence
  Synthetic oligonucleotide; TTG chr11 5187423 5187444 5187428 5187423 -
tcccctaaattctccttgtcct

SEQ ID NO: 150106 - DNA, 22 bp, Artificial Sequence
  Synthetic oligonucleotide; CTA chr11 5187416 5187437 5187421 5187416 -
aattctccttgtcctttctcca

SEQ ID NO: 150107 - DNA, 22 bp, Artificial Sequence
  Synthetic oligonucleotide; TTC chr11 5187411 5187432 5187416 5187411 -
tccttgtcctttctccatctct

SEQ ID NO: 150108 - DNA, 22 bp, Artificial Sequence
  Synthetic oligonucleotide; CTC chr11 5187409 5187430 5187414 5187409 -
cttgtcctttctccatctcttt

SEQ ID NO: 150109 - DNA, 22 bp, Artificial Sequence
  Synthetic oligonucleotide; CTT chr11 5187406 5187427 5187411 5187406 -
gtcctttctccatctctttttc

SEQ ID NO: 150110 - DNA, 22 bp, Artificial Sequence
  Synthetic oligonucleotide; TTG chr11 5187405 5187426 5187410 5187405 -
tcctttctccatctctttttct

SEQ ID NO: 150111 - DNA, 22 bp, Artificial Sequence
  Synthetic oligonucleotide; CTT chr11 5187400 5187421 5187405 5187400 -
tctccatctctttttctataat

SEQ ID NO: 150112 - DNA, 22 bp, Artificial Sequence
  Synthetic oligonucleotide; TTT chr11 5187399 5187420 5187404 5187399 -
ctccatctctttttctataata

SEQ ID NO: 150113 - DNA, 22 bp, Artificial Sequence
  Synthetic oligonucleotide; TTC chr11 5187398 5187419 5187403 5187398 -
tccatctctttttctataatat

SEQ ID NO: 150114 - DNA, 22 bp, Artificial Sequence
  Synthetic oligonucleotide; CTC chr11 5187396 5187417 5187401 5187396 -
catctctttttctataatatcc

SEQ ID NO: 150115 - DNA, 22 bp, Artificial Sequence
  Synthetic oligonucleotide; CTC chr11 5187390 5187411 5187395 5187390 -
tttttctataatatcctttgat

SEQ ID NO: 150116 - DNA, 22 bp, Artificial Sequence
  Synthetic oligonucleotide; CTT chr11 5187388 5187409 5187393 5187388 -
tttctataatatcctttgattc

SEQ ID NO: 150117 - DNA, 22 bp, Artificial Sequence
  Synthetic oligonucleotide; TTT chr11 5187387 5187408 5187392 5187387 -
ttctataatatcctttgattcc

SEQ ID NO: 150118 - DNA, 22 bp, Artificial Sequence
  Synthetic oligonucleotide; TTT chr11 5187386 5187407 5187391 5187386 -
tctataatatcctttgattcct

SEQ ID NO: 150119 - DNA, 22 bp, Artificial Sequence
  Synthetic oligonucleotide; TTT chr11 5187385 5187406 5187390 5187385 -
ctataatatcctttgattcctt

SEQ ID NO: 150120 - DNA, 22 bp, Artificial Sequence
  Synthetic oligonucleotide; TTC chr11 5187384 5187405 5187389 5187384 -
tataatatcctttgattccttt

SEQ ID NO: 150121 - DNA, 22 bp, Artificial Sequence
  Synthetic oligonucleotide; CTA chr11 5187382 5187403 5187387 5187382 -
taatatcctttgattcctttaa

SEQ ID NO: 150122 - DNA, 22 bp, Artificial Sequence
  Synthetic oligonucleotide; CTT chr11 5187372 5187393 5187377 5187372 -
tgattcctttaatttcttttcc

SEQ ID NO: 150123 - DNA, 22 bp, Artificial Sequence
  Synthetic oligonucleotide; TTT chr11 5187371 5187392 5187376 5187371 -
gattcctttaatttcttttcca

SEQ ID NO: 150124 - DNA, 22 bp, Artificial Sequence
  Synthetic oligonucleotide; TTG chr11 5187370 5187391 5187375 5187370 -
attcctttaatttcttttccaa

SEQ ID NO: 150125 - DNA, 22 bp, Artificial Sequence
  Synthetic oligonucleotide; TTC chr11 5187366 5187387 5187371 5187366 -
ctttaatttcttttccaaggat

SEQ ID NO: 150126 - DNA, 22 bp, Artificial Sequence
  Synthetic oligonucleotide; CTT chr11 5187363 5187384 5187368 5187363 -
taatttcttttccaaggatagg

SEQ ID NO: 150127 - DNA, 22 bp, Artificial Sequence
  Synthetic oligonucleotide; TTT chr11 5187362 5187383 5187367 5187362 -
aatttcttttccaaggataggt

SEQ ID NO: 150128 - DNA, 22 bp, Artificial Sequence
  Synthetic oligonucleotide; TTA chr11 5187361 5187382 5187366 5187361 -
atttcttttccaaggataggtg

SEQ ID NO: 150129 - DNA, 22 bp, Artificial Sequence
  Synthetic oligonucleotide; TTT chr11 5187357 5187378 5187362 5187357 -
cttttccaaggataggtgggaa

SEQ ID NO: 150130 - DNA, 22 bp, Artificial Sequence
  Synthetic oligonucleotide; TTC chr11 5187356 5187377 5187361 5187356 -
ttttccaaggataggtgggaag

SEQ ID NO: 150131 - DNA, 22 bp, Artificial Sequence
  Synthetic oligonucleotide; CTT chr11 5187354 5187375 5187359 5187354 -
ttccaaggataggtgggaagat

SEQ ID NO: 150132 - DNA, 22 bp, Artificial Sequence
  Synthetic oligonucleotide; TTT chr11 5187353 5187374 5187358 5187353 -
tccaaggataggtgggaagata

SEQ ID NO: 150133 - DNA, 22 bp, Artificial Sequence
  Synthetic oligonucleotide; TTT chr11 5187352 5187373 5187357 5187352 -
ccaaggataggtgggaagataa

SEQ ID NO: 150134 - DNA, 22 bp, Artificial Sequence
  Synthetic oligonucleotide; TTC chr11 5187351 5187372 5187356 5187351 -
caaggataggtgggaagataag

SEQ ID NO: 150135 - DNA, 22 bp, Artificial Sequence
  Synthetic oligonucleotide; CTG chr11 5187324 5187345 5187329 5187324 -
tcctttctttaatgtctaaaaa

SEQ ID NO: 150136 - DNA, 22 bp, Artificial Sequence
  Synthetic oligonucleotide; CTT chr11 5187319 5187340 5187324 5187319 -
tctttaatgtctaaaaaagcaa

SEQ ID NO: 150137 - DNA, 22 bp, Artificial Sequence
  Synthetic oligonucleotide; TTT chr11 5187318 5187339 5187323 5187318 -
ctttaatgtctaaaaaagcaag

SEQ ID NO: 150138 - DNA, 22 bp, Artificial Sequence
  Synthetic oligonucleotide; TTC chr11 5187317 5187338 5187322 5187317 -
tttaatgtctaaaaaagcaagg

SEQ ID NO: 150139 - DNA, 22 bp, Artificial Sequence
  Synthetic oligonucleotide; CTT chr11 5187315 5187336 5187320 5187315 -
taatgtctaaaaaagcaaggtg

SEQ ID NO: 150140 - DNA, 22 bp, Artificial Sequence
  Synthetic oligonucleotide; TTT chr11 5187314 5187335 5187319 5187314 -
aatgtctaaaaaagcaaggtga

SEQ ID NO: 150141 - DNA, 22 bp, Artificial Sequence
  Synthetic oligonucleotide; TTA chr11 5187313 5187334 5187318 5187313 -
atgtctaaaaaagcaaggtgaa

SEQ ID NO: 150142 - DNA, 22 bp, Artificial Sequence
  Synthetic oligonucleotide; CTA chr11 5187306 5187327 5187311 5187306 -
aaaaagcaaggtgaagccatcc

SEQ ID NO: 150143 - DNA, 22 bp, Artificial Sequence
  Synthetic oligonucleotide; TTT chr11 5187279 5187300 5187284 5187279 -
accctcactatggtttcaagac

SEQ ID NO: 150144 - DNA, 22 bp, Artificial Sequence
  Synthetic oligonucleotide; TTA chr11 5187278 5187299 5187283 5187278 -
ccctcactatggtttcaagacc

SEQ ID NO: 150145 - DNA, 22 bp, Artificial Sequence
  Synthetic oligonucleotide; CTC chr11 5187273 5187294 5187278 5187273 -
actatggtttcaagacctttga

SEQ ID NO: 150146 - DNA, 22 bp, Artificial Sequence
  Synthetic oligonucleotide; CTA chr11 5187269 5187290 5187274 5187269 -
tggtttcaagacctttgaatgg

SEQ ID NO: 150147 - DNA, 22 bp, Artificial Sequence
  Synthetic oligonucleotide; TTT chr11 5187263 5187284 5187268 5187263 -
caagacctttgaatggaaagca

SEQ ID NO: 150148 - DNA, 22 bp, Artificial Sequence
  Synthetic oligonucleotide; TTC chr11 5187262 5187283 5187267 5187262 -
aagacctttgaatggaaagcac

SEQ ID NO: 150149 - DNA, 22 bp, Artificial Sequence
  Synthetic oligonucleotide; CTT chr11 5187254 5187275 5187259 5187254 -
tgaatggaaagcacttgaaatg

SEQ ID NO: 150150 - DNA, 22 bp, Artificial Sequence
  Synthetic oligonucleotide; TTT chr11 5187253 5187274 5187258 5187253 -
gaatggaaagcacttgaaatgc

SEQ ID NO: 150151 - DNA, 22 bp, Artificial Sequence
  Synthetic oligonucleotide; TTG chr11 5187252 5187273 5187257 5187252 -
aatggaaagcacttgaaatgca

SEQ ID NO: 150152 - DNA, 22 bp, Artificial Sequence
  Synthetic oligonucleotide; CTT chr11 5187238 5187259 5187243 5187238 -
gaaatgcatgtgataattctta

SEQ ID NO: 150153 - DNA, 22 bp, Artificial Sequence
  Synthetic oligonucleotide; TTG chr11 5187237 5187258 5187242 5187237 -
aaatgcatgtgataattcttat

SEQ ID NO: 150154 - DNA, 22 bp, Artificial Sequence
  Synthetic oligonucleotide; TTC chr11 5187219 5187240 5187224 5187219 -
ttatatctcccaccatatagca

SEQ ID NO: 150155 - DNA, 22 bp, Artificial Sequence
  Synthetic oligonucleotide; CTT chr11 5187217 5187238 5187222 5187217 -
atatctcccaccatatagcact

SEQ ID NO: 150156 - DNA, 22 bp, Artificial Sequence
  Synthetic oligonucleotide; TTA chr11 5187216 5187237 5187221 5187216 -
tatctcccaccatatagcactc

SEQ ID NO: 150157 - DNA, 22 bp, Artificial Sequence
  Synthetic oligonucleotide; CTC chr11 5187210 5187231 5187215 5187210 -
ccaccatatagcactcacactt

SEQ ID NO: 150158 - DNA, 22 bp, Artificial Sequence
  Synthetic oligonucleotide; CTC chr11 5187194 5187215 5187199 5187194 -
acacttacgtaataaaatatga

SEQ ID NO: 150159 - DNA, 22 bp, Artificial Sequence
  Synthetic oligonucleotide; CTT chr11 5187188 5187209 5187193 5187188 -
acgtaataaaatatgacctctc

SEQ ID NO: 150160 - DNA, 22 bp, Artificial Sequence
  Synthetic oligonucleotide; TTA chr11 5187187 5187208 5187192 5187187 -
cgtaataaaatatgacctctct

SEQ ID NO: 150161 - DNA, 22 bp, Artificial Sequence
  Synthetic oligonucleotide; CTC chr11 5187168 5187189 5187173 5187168 -
tcttagccagtgagaactaaga

SEQ ID NO: 150162 - DNA, 22 bp, Artificial Sequence
  Synthetic oligonucleotide; CTC chr11 5187166 5187187 5187171 5187166 -
ttagccagtgagaactaagatg

SEQ ID NO: 150163 - DNA, 22 bp, Artificial Sequence
  Synthetic oligonucleotide; CTT chr11 5187164 5187185 5187169 5187164 -
agccagtgagaactaagatgcc

SEQ ID NO: 150164 - DNA, 22 bp, Artificial Sequence
  Synthetic oligonucleotide; TTA chr11 5187163 5187184 5187168 5187163 -
gccagtgagaactaagatgcct

SEQ ID NO: 150165 - DNA, 22 bp, Artificial Sequence
  Synthetic oligonucleotide; CTA chr11 5187149 5187170 5187154 5187149 -
agatgcctagatgactgattgg

SEQ ID NO: 150166 - DNA, 22 bp, Artificial Sequence
  Synthetic oligonucleotide; CTA chr11 5187140 5187161 5187145 5187140 -
gatgactgattggaggacctgg

SEQ ID NO: 150167 - DNA, 22 bp, Artificial Sequence
  Synthetic oligonucleotide; CTG chr11 5187132 5187153 5187137 5187132 -
attggaggacctgggcacttgc

SEQ ID NO: 150168 - DNA, 22 bp, Artificial Sequence
  Synthetic oligonucleotide; TTG chr11 5187128 5187149 5187133 5187128 -
gaggacctgggcacttgcctag

SEQ ID NO: 150169 - DNA, 22 bp, Artificial Sequence
  Synthetic oligonucleotide; CTG chr11 5187119 5187140 5187124 5187119 -
ggcacttgcctagcatccaatc

SEQ ID NO: 150170 - DNA, 22 bp, Artificial Sequence
  Synthetic oligonucleotide; CTT chr11 5187112 5187133 5187117 5187112 -
gcctagcatccaatcaagatca

SEQ ID NO: 150171 - DNA, 22 bp, Artificial Sequence
  Synthetic oligonucleotide; TTG chr11 5187111 5187132 5187116 5187111 -
cctagcatccaatcaagatcat

SEQ ID NO: 150172 - DNA, 22 bp, Artificial Sequence
  Synthetic oligonucleotide; CTA chr11 5187107 5187128 5187112 5187107 -
gcatccaatcaagatcatccag

SEQ ID NO: 150173 - DNA, 22 bp, Artificial Sequence
  Synthetic oligonucleotide; CTG chr11 5187072 5187093 5187077 5187072 -
atgtcaaacatcatatttatag

SEQ ID NO: 150174 - DNA, 22 bp, Artificial Sequence
  Synthetic oligonucleotide; TTT chr11 5187054 5187075 5187059 5187054 -
atagggaagttttactattttt

SEQ ID NO: 150175 - DNA, 22 bp, Artificial Sequence
  Synthetic oligonucleotide; TTA chr11 5187053 5187074 5187058 5187053 -
tagggaagttttactatttttt

SEQ ID NO: 150176 - DNA, 22 bp, Artificial Sequence
  Synthetic oligonucleotide; TTT chr11 5187042 5187063 5187047 5187042 -
tactatttttttttactaagtt

SEQ ID NO: 150177 - DNA, 22 bp, Artificial Sequence
  Synthetic oligonucleotide; TTT chr11 5187041 5187062 5187046 5187041 -
actatttttttttactaagttt

SEQ ID NO: 150178 - DNA, 22 bp, Artificial Sequence
  Synthetic oligonucleotide; TTA chr11 5187040 5187061 5187045 5187040 -
ctatttttttttactaagtttt

SEQ ID NO: 150179 - DNA, 22 bp, Artificial Sequence
  Synthetic oligonucleotide; CTA chr11 5187037 5187058 5187042 5187037 -
tttttttttactaagttttact

SEQ ID NO: 150180 - DNA, 22 bp, Artificial Sequence
  Synthetic oligonucleotide; TTT chr11 5187034 5187055 5187039 5187034 -
ttttttactaagttttactact

SEQ ID NO: 150181 - DNA, 22 bp, Artificial Sequence
  Synthetic oligonucleotide; TTT chr11 5187033 5187054 5187038 5187033 -
tttttactaagttttactacta

SEQ ID NO: 150182 - DNA, 22 bp, Artificial Sequence
  Synthetic oligonucleotide; TTT chr11 5187032 5187053 5187037 5187032 -
ttttactaagttttactactat

SEQ ID NO: 150183 - DNA, 22 bp, Artificial Sequence
  Synthetic oligonucleotide; TTT chr11 5187031 5187052 5187036 5187031 -
tttactaagttttactactata

SEQ ID NO: 150184 - DNA, 22 bp, Artificial Sequence
  Synthetic oligonucleotide; TTT chr11 5187030 5187051 5187035 5187030 -
ttactaagttttactactatag

SEQ ID NO: 150185 - DNA, 22 bp, Artificial Sequence
  Synthetic oligonucleotide; TTT chr11 5187029 5187050 5187034 5187029 -
tactaagttttactactatagg

SEQ ID NO: 150186 - DNA, 22 bp, Artificial Sequence
  Synthetic oligonucleotide; TTT chr11 5187028 5187049 5187033 5187028 -
actaagttttactactataggt

SEQ ID NO: 150187 - DNA, 22 bp, Artificial Sequence
  Synthetic oligonucleotide; TTA chr11 5187027 5187048 5187032 5187027 -
ctaagttttactactataggtg

SEQ ID NO: 150188 - DNA, 22 bp, Artificial Sequence
  Synthetic oligonucleotide; CTA chr11 5187024 5187045 5187029 5187024 -
agttttactactataggtgaaa

SEQ ID NO: 150189 - DNA, 22 bp, Artificial Sequence
  Synthetic oligonucleotide; TTT chr11 5187019 5187040 5187024 5187019 -
tactactataggtgaaaaaagc

SEQ ID NO: 150190 - DNA, 22 bp, Artificial Sequence
  Synthetic oligonucleotide; TTT chr11 5187018 5187039 5187023 5187018 -
actactataggtgaaaaaagct

SEQ ID NO: 150191 - DNA, 22 bp, Artificial Sequence
  Synthetic oligonucleotide; TTA chr11 5187017 5187038 5187022 5187017 -
ctactataggtgaaaaaagctt

SEQ ID NO: 150192 - DNA, 22 bp, Artificial Sequence
  Synthetic oligonucleotide; CTA chr11 5187014 5187035 5187019 5187014 -
ctataggtgaaaaaagcttcta

SEQ ID NO: 150193 - DNA, 22 bp, Artificial Sequence
  Synthetic oligonucleotide; CTA chr11 5187011 5187032 5187016 5187011 -
taggtgaaaaaagcttctaggg

SEQ ID NO: 150194 - DNA, 22 bp, Artificial Sequence
  Synthetic oligonucleotide; CTT chr11 5186995 5187016 5187000 5186995 -
ctagggattctttgaaaaatat

SEQ ID NO: 150195 - DNA, 22 bp, Artificial Sequence
  Synthetic oligonucleotide; TTC chr11 5186994 5187015 5186999 5186994 -
tagggattctttgaaaaatatc

SEQ ID NO: 150196 - DNA, 22 bp, Artificial Sequence
  Synthetic oligonucleotide; CTA chr11 5186992 5187013 5186997 5186992 -
gggattctttgaaaaatatcag

SEQ ID NO: 150197 - DNA, 22 bp, Artificial Sequence
  Synthetic oligonucleotide; TTC chr11 5186985 5187006 5186990 5186985 -
tttgaaaaatatcagaaaatca

SEQ ID NO: 150198 - DNA, 22 bp, Artificial Sequence
  Synthetic oligonucleotide; CTT chr11 5186983 5187004 5186988 5186983 -
tgaaaaatatcagaaaatcaca

SEQ ID NO: 150199 - DNA, 22 bp, Artificial Sequence
  Synthetic oligonucleotide; TTT chr11 5186982 5187003 5186987 5186982 -
gaaaaatatcagaaaatcacag

SEQ ID NO: 150200 - DNA, 22 bp, Artificial Sequence
  Synthetic oligonucleotide; TTG chr11 5186981 5187002 5186986 5186981 -
aaaaatatcagaaaatcacaga

SEQ ID NO: 150201 - DNA, 22 bp, Artificial Sequence
  Synthetic oligonucleotide; CTC chr11 5186945 5186966 5186950 5186945 -
cacttgagagaataaggaaaca

SEQ ID NO: 150202 - DNA, 22 bp, Artificial Sequence
  Synthetic oligonucleotide; CTT chr11 5186940 5186961 5186945 5186940 -
gagagaataaggaaacatctct

SEQ ID NO: 150203 - DNA, 22 bp, Artificial Sequence
  Synthetic oligonucleotide; TTG chr11 5186939 5186960 5186944 5186939 -
agagaataaggaaacatctctc

SEQ ID NO: 150204 - DNA, 22 bp, Artificial Sequence
  Synthetic oligonucleotide; CTC chr11 5186919 5186940 5186924 5186919 -
tctccataaatctggcttatca

SEQ ID NO: 150205 - DNA, 22 bp, Artificial Sequence
  Synthetic oligonucleotide; CTC chr11 5186917 5186938 5186922 5186917 -
tccataaatctggcttatcagt

SEQ ID NO: 150206 - DNA, 22 bp, Artificial Sequence
  Synthetic oligonucleotide; CTC chr11 5186915 5186936 5186920 5186915 -
cataaatctggcttatcagtgt

SEQ ID NO: 150207 - DNA, 22 bp, Artificial Sequence
  Synthetic oligonucleotide; CTG chr11 5186905 5186926 5186910 5186905 -
gcttatcagtgtgaagccagtt

SEQ ID NO: 150208 - DNA, 22 bp, Artificial Sequence
  Synthetic oligonucleotide; CTT chr11 5186901 5186922 5186906 5186901 -
atcagtgtgaagccagttttta

SEQ ID NO: 150209 - DNA, 22 bp, Artificial Sequence
  Synthetic oligonucleotide; TTA chr11 5186900 5186921 5186905 5186900 -
tcagtgtgaagccagtttttaa

SEQ ID NO: 150210 - DNA, 22 bp, Artificial Sequence
  Synthetic oligonucleotide; TTT chr11 5186882 5186903 5186887 5186882 -
ttaattccatgaatatcatggt

SEQ ID NO: 150211 - DNA, 22 bp, Artificial Sequence
  Synthetic oligonucleotide; TTT chr11 5186881 5186902 5186886 5186881 -
taattccatgaatatcatggta

SEQ ID NO: 150212 - DNA, 22 bp, Artificial Sequence
  Synthetic oligonucleotide; TTT chr11 5186880 5186901 5186885 5186880 -
aattccatgaatatcatggtat

SEQ ID NO: 150213 - DNA, 22 bp, Artificial Sequence
  Synthetic oligonucleotide; TTA chr11 5186879 5186900 5186884 5186879 -
attccatgaatatcatggtatt

SEQ ID NO: 150214 - DNA, 22 bp, Artificial Sequence
  Synthetic oligonucleotide; TTC chr11 5186875 5186896 5186880 5186875 -
catgaatatcatggtatttgtt

SEQ ID NO: 150215 - DNA, 22 bp, Artificial Sequence
  Synthetic oligonucleotide; TTT chr11 5186856 5186877 5186861 5186856 -
gtttctatctttttatcttcat

SEQ ID NO: 150216 - DNA, 22 bp, Artificial Sequence
  Synthetic oligonucleotide; TTG chr11 5186855 5186876 5186860 5186855 -
tttctatctttttatcttcatc

SEQ ID NO: 150217 - DNA, 22 bp, Artificial Sequence
  Synthetic oligonucleotide; TTT chr11 5186852 5186873 5186857 5186852 -
ctatctttttatcttcatctgt

SEQ ID NO: 150218 - DNA, 22 bp, Artificial Sequence
  Synthetic oligonucleotide; TTC chr11 5186851 5186872 5186856 5186851 -
tatctttttatcttcatctgta

SEQ ID NO: 150219 - DNA, 22 bp, Artificial Sequence
  Synthetic oligonucleotide; CTA chr11 5186849 5186870 5186854 5186849 -
tctttttatcttcatctgtatt

SEQ ID NO: 150220 - DNA, 22 bp, Artificial Sequence
  Synthetic oligonucleotide; CTT chr11 5186845 5186866 5186850 5186845 -
tttatcttcatctgtattcctc

SEQ ID NO: 150221 - DNA, 22 bp, Artificial Sequence
  Synthetic oligonucleotide; TTT chr11 5186844 5186865 5186849 5186844 -
ttatcttcatctgtattcctca

SEQ ID NO: 150222 - DNA, 22 bp, Artificial Sequence
  Synthetic oligonucleotide; TTT chr11 5186843 5186864 5186848 5186843 -
tatcttcatctgtattcctcat

SEQ ID NO: 150223 - DNA, 22 bp, Artificial Sequence
  Synthetic oligonucleotide; TTT chr11 5186842 5186863 5186847 5186842 -
atcttcatctgtattcctcatt

SEQ ID NO: 150224 - DNA, 22 bp, Artificial Sequence
  Synthetic oligonucleotide; TTA chr11 5186841 5186862 5186846 5186841 -
tcttcatctgtattcctcatta

SEQ ID NO: 150225 - DNA, 22 bp, Artificial Sequence
  Synthetic oligonucleotide; CTT chr11 5186837 5186858 5186842 5186837 -
catctgtattcctcattaaagt

SEQ ID NO: 150226 - DNA, 22 bp, Artificial Sequence
  Synthetic oligonucleotide; TTC chr11 5186836 5186857 5186841 5186836 -
atctgtattcctcattaaagta

SEQ ID NO: 150227 - DNA, 22 bp, Artificial Sequence
  Synthetic oligonucleotide; CTG chr11 5186831 5186852 5186836 5186831 -
tattcctcattaaagtatcctt

SEQ ID NO: 150228 - DNA, 22 bp, Artificial Sequence
  Synthetic oligonucleotide; TTC chr11 5186826 5186847 5186831 5186826 -
ctcattaaagtatccttcaaga

SEQ ID NO: 150229 - DNA, 22 bp, Artificial Sequence
  Synthetic oligonucleotide; CTC chr11 5186823 5186844 5186828 5186823 -
attaaagtatccttcaagagaa

SEQ ID NO: 150230 - DNA, 22 bp, Artificial Sequence
  Synthetic oligonucleotide; TTA chr11 5186819 5186840 5186824 5186819 -
aagtatccttcaagagaatggg

SEQ ID NO: 150231 - DNA, 22 bp, Artificial Sequence
  Synthetic oligonucleotide; CTT chr11 5186809 5186830 5186814 5186809 -
caagagaatgggatatctacag

SEQ ID NO: 150232 - DNA, 22 bp, Artificial Sequence
  Synthetic oligonucleotide; TTC chr11 5186808 5186829 5186813 5186808 -
aagagaatgggatatctacagt

SEQ ID NO: 150233 - DNA, 22 bp, Artificial Sequence
  Synthetic oligonucleotide; CTA chr11 5186790 5186811 5186795 5186790 -
cagtagctaatataatttcttg

SEQ ID NO: 150234 - DNA, 22 bp, Artificial Sequence
  Synthetic oligonucleotide; CTA chr11 5186781 5186802 5186786 5186781 -
atataatttcttggcccttcag

SEQ ID NO: 150235 - DNA, 22 bp, Artificial Sequence
  Synthetic oligonucleotide; TTT chr11 5186772 5186793 5186777 5186772 -
cttggcccttcagattctgacc

SEQ ID NO: 150236 - DNA, 22 bp, Artificial Sequence
  Synthetic oligonucleotide; TTC chr11 5186771 5186792 5186776 5186771 -
ttggcccttcagattctgaccc

SEQ ID NO: 150237 - DNA, 22 bp, Artificial Sequence
  Synthetic oligonucleotide; CTT chr11 5186769 5186790 5186774 5186769 -
ggcccttcagattctgacccat

SEQ ID NO: 150238 - DNA, 22 bp, Artificial Sequence
  Synthetic oligonucleotide; TTG chr11 5186768 5186789 5186773 5186768 -
gcccttcagattctgacccatt

SEQ ID NO: 150239 - DNA, 22 bp, Artificial Sequence
  Synthetic oligonucleotide; CTT chr11 5186762 5186783 5186767 5186762 -
cagattctgacccatttaccat

SEQ ID NO: 150240 - DNA, 22 bp, Artificial Sequence
  Synthetic oligonucleotide; TTC chr11 5186761 5186782 5186766 5186761 -
agattctgacccatttaccatg

SEQ ID NO: 150241 - DNA, 22 bp, Artificial Sequence
  Synthetic oligonucleotide; TTC chr11 5186755 5186776 5186760 5186755 -
tgacccatttaccatgtgacca

SEQ ID NO: 150242 - DNA, 22 bp, Artificial Sequence
  Synthetic oligonucleotide; CTG chr11 5186753 5186774 5186758 5186753 -
acccatttaccatgtgaccaag

SEQ ID NO: 150243 - DNA, 22 bp, Artificial Sequence
  Synthetic oligonucleotide; TTT chr11 5186745 5186766 5186750 5186745 -
accatgtgaccaagaaaaagca

SEQ ID NO: 150244 - DNA, 22 bp, Artificial Sequence
  Synthetic oligonucleotide; TTA chr11 5186744 5186765 5186749 5186744 -
ccatgtgaccaagaaaaagcag

SEQ ID NO: 150245 - DNA, 22 bp, Artificial Sequence
  Synthetic oligonucleotide; CTT chr11 5186704 5186725 5186709 5186704 -
aaaaattaaagggaaataaaat

SEQ ID NO: 150246 - DNA, 22 bp, Artificial Sequence
  Synthetic oligonucleotide; TTA chr11 5186703 5186724 5186708 5186703 -
aaaattaaagggaaataaaatg

SEQ ID NO: 150247 - DNA, 22 bp, Artificial Sequence
  Synthetic oligonucleotide; TTA chr11 5186696 5186717 5186701 5186696 -
aagggaaataaaatgagagaat

SEQ ID NO: 150248 - DNA, 22 bp, Artificial Sequence
  Synthetic oligonucleotide; TTA chr11 5186672 5186693 5186677 5186672 -
acttttaggtgccatctaagat

SEQ ID NO: 150249 - DNA, 22 bp, Artificial Sequence
  Synthetic oligonucleotide; CTT chr11 5186668 5186689 5186673 5186668 -
ttaggtgccatctaagatgtgt

SEQ ID NO: 150250 - DNA, 22 bp, Artificial Sequence
  Synthetic oligonucleotide; TTT chr11 5186667 5186688 5186672 5186667 -
taggtgccatctaagatgtgta

SEQ ID NO: 150251 - DNA, 22 bp, Artificial Sequence
  Synthetic oligonucleotide; TTT chr11 5186666 5186687 5186671 5186666 -
aggtgccatctaagatgtgtaa

SEQ ID NO: 150252 - DNA, 22 bp, Artificial Sequence
  Synthetic oligonucleotide; TTA chr11 5186665 5186686 5186670 5186665 -
ggtgccatctaagatgtgtaaa

SEQ ID NO: 150253 - DNA, 22 bp, Artificial Sequence
  Synthetic oligonucleotide; CTA chr11 5186654 5186675 5186659 5186654 -
agatgtgtaaagtccttctccc

SEQ ID NO: 150254 - DNA, 22 bp, Artificial Sequence
  Synthetic oligonucleotide; CTT chr11 5186637 5186658 5186642 5186637 -
ctcccacatgtctcctttgcaa

SEQ ID NO: 150255 - DNA, 22 bp, Artificial Sequence
  Synthetic oligonucleotide; TTC chr11 5186636 5186657 5186641 5186636 -
tcccacatgtctcctttgcaac

SEQ ID NO: 150256 - DNA, 22 bp, Artificial Sequence
  Synthetic oligonucleotide; CTC chr11 5186634 5186655 5186639 5186634 -
ccacatgtctcctttgcaacct

SEQ ID NO: 150257 - DNA, 22 bp, Artificial Sequence
  Synthetic oligonucleotide; CTC chr11 5186623 5186644 5186628 5186623 -
ctttgcaacctatatttgccaa

SEQ ID NO: 150258 - DNA, 22 bp, Artificial Sequence
  Synthetic oligonucleotide; CTT chr11 5186620 5186641 5186625 5186620 -
tgcaacctatatttgccaatgg

SEQ ID NO: 150259 - DNA, 22 bp, Artificial Sequence
  Synthetic oligonucleotide; TTT chr11 5186619 5186640 5186624 5186619 -
gcaacctatatttgccaatggc

SEQ ID NO: 150260 - DNA, 22 bp, Artificial Sequence
  Synthetic oligonucleotide; TTG chr11 5186618 5186639 5186623 5186618 -
caacctatatttgccaatggct

SEQ ID NO: 150261 - DNA, 22 bp, Artificial Sequence
  Synthetic oligonucleotide; CTA chr11 5186611 5186632 5186616 5186611 -
tatttgccaatggctcattgga

SEQ ID NO: 150262 - DNA, 22 bp, Artificial Sequence
  Synthetic oligonucleotide; TTT chr11 5186606 5186627 5186611 5186606 -
gccaatggctcattggaaacaa

SEQ ID NO: 150263 - DNA, 22 bp, Artificial Sequence
  Synthetic oligonucleotide; TTG chr11 5186605 5186626 5186610 5186605 -
ccaatggctcattggaaacaat

SEQ ID NO: 150264 - DNA, 22 bp, Artificial Sequence
  Synthetic oligonucleotide; CTC chr11 5186595 5186616 5186600 5186595 -
attggaaacaatatatgacagg

SEQ ID NO: 150265 - DNA, 22 bp, Artificial Sequence
  Synthetic oligonucleotide; TTG chr11 5186591 5186612 5186596 5186591 -
gaaacaatatatgacagggaca

SEQ ID NO: 150266 - DNA, 22 bp, Artificial Sequence
  Synthetic oligonucleotide; CTG chr11 5186560 5186581 5186565 5186560 -
gacatgtagatgtatgtattaa

SEQ ID NO: 150267 - DNA, 22 bp, Artificial Sequence
  Synthetic oligonucleotide; TTA chr11 5186539 5186560 5186544 5186539 -
acttaggtgtcagagagtggtg

SEQ ID NO: 150268 - DNA, 22 bp, Artificial Sequence
  Synthetic oligonucleotide; CTT chr11 5186535 5186556 5186540 5186535 -
aggtgtcagagagtggtggctg

SEQ ID NO: 150269 - DNA, 22 bp, Artificial Sequence
  Synthetic oligonucleotide; TTA chr11 5186534 5186555 5186539 5186534 -
ggtgtcagagagtggtggctga

SEQ ID NO: 150270 - DNA, 22 bp, Artificial Sequence
  Synthetic oligonucleotide; CTG chr11 5186513 5186534 5186518 5186513 -
aagaaaaaaaatgcacaaatta

SEQ ID NO: 150271 - DNA, 22 bp, Artificial Sequence
  Synthetic oligonucleotide; TTA chr11 5186491 5186512 5186496 5186491 -
taatgaaagagaatgcagtatg

SEQ ID NO: 150272 - DNA, 22 bp, Artificial Sequence
  Synthetic oligonucleotide; TTT chr11 5186466 5186487 5186471 5186466 -
ctccctgtggactatgtaccag

SEQ ID NO: 150273 - DNA, 22 bp, Artificial Sequence
  Synthetic oligonucleotide; TTC chr11 5186465 5186486 5186470 5186465 -
tccctgtggactatgtaccaga

SEQ ID NO: 150274 - DNA, 22 bp, Artificial Sequence
  Synthetic oligonucleotide; CTC chr11 5186463 5186484 5186468 5186463 -
cctgtggactatgtaccagaag

SEQ ID NO: 150275 - DNA, 22 bp, Artificial Sequence
  Synthetic oligonucleotide; CTG chr11 5186459 5186480 5186464 5186459 -
tggactatgtaccagaagcagc

SEQ ID NO: 150276 - DNA, 22 bp, Artificial Sequence
  Synthetic oligonucleotide; CTA chr11 5186452 5186473 5186457 5186452 -
tgtaccagaagcagctctgtgt

SEQ ID NO: 150277 - DNA, 22 bp, Artificial Sequence
  Synthetic oligonucleotide; CTC chr11 5186435 5186456 5186440 5186435 -
tgtgtcatctccttccatggga

SEQ ID NO: 150278 - DNA, 22 bp, Artificial Sequence
  Synthetic oligonucleotide; CTG chr11 5186433 5186454 5186438 5186433 -
tgtcatctccttccatgggagg

SEQ ID NO: 150279 - DNA, 22 bp, Artificial Sequence
  Synthetic oligonucleotide; CTC chr11 5186424 5186445 5186429 5186424 -
cttccatgggaggagtaaaatt

SEQ ID NO: 150280 - DNA, 22 bp, Artificial Sequence
  Synthetic oligonucleotide; CTT chr11 5186421 5186442 5186426 5186421 -
ccatgggaggagtaaaattcgt

SEQ ID NO: 150281 - DNA, 22 bp, Artificial Sequence
  Synthetic oligonucleotide; TTC chr11 5186420 5186441 5186425 5186420 -
catgggaggagtaaaattcgtc

SEQ ID NO: 150282 - DNA, 22 bp, Artificial Sequence
  Synthetic oligonucleotide; TTC chr11 5186401 5186422 5186406 5186401 -
gtcctcttaagctgaaaacctt

SEQ ID NO: 150283 - DNA, 22 bp, Artificial Sequence
  Synthetic oligonucleotide; CTC chr11 5186395 5186416 5186400 5186395 -
ttaagctgaaaaccttgggccc

SEQ ID NO: 150284 - DNA, 22 bp, Artificial Sequence
  Synthetic oligonucleotide; CTT chr11 5186393 5186414 5186398 5186393 -
aagctgaaaaccttgggcccaa

SEQ ID NO: 150285 - DNA, 22 bp, Artificial Sequence
  Synthetic oligonucleotide; TTA chr11 5186392 5186413 5186397 5186392 -
agctgaaaaccttgggcccaag

SEQ ID NO: 150286 - DNA, 22 bp, Artificial Sequence
  Synthetic oligonucleotide; CTG chr11 5186387 5186408 5186392 5186387 -
aaaaccttgggcccaagacatg

SEQ ID NO: 150287 - DNA, 22 bp, Artificial Sequence
  Synthetic oligonucleotide; CTT chr11 5186379 5186400 5186384 5186379 -
gggcccaagacatgctttaaaa

SEQ ID NO: 150288 - DNA, 22 bp, Artificial Sequence
  Synthetic oligonucleotide; TTG chr11 5186378 5186399 5186383 5186378 -
ggcccaagacatgctttaaaag

SEQ ID NO: 150289 - DNA, 22 bp, Artificial Sequence
  Synthetic oligonucleotide; CTT chr11 5186362 5186383 5186367 5186362 -
taaaagaagtataaatagttcc

SEQ ID NO: 150290 - DNA, 22 bp, Artificial Sequence
  Synthetic oligonucleotide; TTT chr11 5186361 5186382 5186366 5186361 -
aaaagaagtataaatagttcca

SEQ ID NO: 150291 - DNA, 22 bp, Artificial Sequence
  Synthetic oligonucleotide; TTA chr11 5186360 5186381 5186365 5186360 -
aaagaagtataaatagttccag

SEQ ID NO: 150292 - DNA, 22 bp, Artificial Sequence
  Synthetic oligonucleotide; TTC chr11 5186341 5186362 5186346 5186341 -
cagatttcctaatctctttgca

SEQ ID NO: 150293 - DNA, 22 bp, Artificial Sequence
  Synthetic oligonucleotide; TTT chr11 5186334 5186355 5186339 5186334 -
cctaatctctttgcatttattt

SEQ ID NO: 150294 - DNA, 22 bp, Artificial Sequence
  Synthetic oligonucleotide; TTC chr11 5186333 5186354 5186338 5186333 -
ctaatctctttgcatttatttt

SEQ ID NO: 150295 - DNA, 22 bp, Artificial Sequence
  Synthetic oligonucleotide; CTA chr11 5186330 5186351 5186335 5186330 -
atctctttgcatttattttgtc

SEQ ID NO: 150296 - DNA, 22 bp, Artificial Sequence
  Synthetic oligonucleotide; CTC chr11 5186325 5186346 5186330 5186325 -
tttgcatttattttgtctcctc

SEQ ID NO: 150297 - DNA, 22 bp, Artificial Sequence
  Synthetic oligonucleotide; CTT chr11 5186323 5186344 5186328 5186323 -
tgcatttattttgtctcctctc

SEQ ID NO: 150298 - DNA, 22 bp, Artificial Sequence
  Synthetic oligonucleotide; TTT chr11 5186322 5186343 5186327 5186322 -
gcatttattttgtctcctctca

SEQ ID NO: 150299 - DNA, 22 bp, Artificial Sequence
  Synthetic oligonucleotide; TTG chr11 5186321 5186342 5186326 5186321 -
catttattttgtctcctctcaa

SEQ ID NO: 150300 - DNA, 22 bp, Artificial Sequence
  Synthetic oligonucleotide; TTT chr11 5186316 5186337 5186321 5186316 -
attttgtctcctctcaacctgc

SEQ ID NO: 150301 - DNA, 22 bp, Artificial Sequence
  Synthetic oligonucleotide; TTA chr11 5186315 5186336 5186320 5186315 -
ttttgtctcctctcaacctgct

SEQ ID NO: 150302 - DNA, 22 bp, Artificial Sequence
  Synthetic oligonucleotide; TTT chr11 5186312 5186333 5186317 5186312 -
tgtctcctctcaacctgctaaa

SEQ ID NO: 150303 - DNA, 22 bp, Artificial Sequence
  Synthetic oligonucleotide; TTT chr11 5186311 5186332 5186316 5186311 -
gtctcctctcaacctgctaaat

SEQ ID NO: 150304 - DNA, 22 bp, Artificial Sequence
  Synthetic oligonucleotide; TTG chr11 5186310 5186331 5186315 5186310 -
tctcctctcaacctgctaaata

SEQ ID NO: 150305 - DNA, 22 bp, Artificial Sequence
  Synthetic oligonucleotide; CTC chr11 5186306 5186327 5186311 5186306 -
ctctcaacctgctaaatatctt

SEQ ID NO: 150306 - DNA, 22 bp, Artificial Sequence
  Synthetic oligonucleotide; CTC chr11 5186303 5186324 5186308 5186303 -
tcaacctgctaaatatcttcag

SEQ ID NO: 150307 - DNA, 22 bp, Artificial Sequence
  Synthetic oligonucleotide; CTC chr11 5186301 5186322 5186306 5186301 -
aacctgctaaatatcttcagga

SEQ ID NO: 150308 - DNA, 22 bp, Artificial Sequence
  Synthetic oligonucleotide; CTG chr11 5186295 5186316 5186300 5186295 -
ctaaatatcttcaggattctag

SEQ ID NO: 150309 - DNA, 22 bp, Artificial Sequence
  Synthetic oligonucleotide; CTA chr11 5186292 5186313 5186297 5186292 -
aatatcttcaggattctagaaa

SEQ ID NO: 150310 - DNA, 22 bp, Artificial Sequence
  Synthetic oligonucleotide; CTT chr11 5186284 5186305 5186289 5186284 -
caggattctagaaaatgcaagt

SEQ ID NO: 150311 - DNA, 22 bp, Artificial Sequence
  Synthetic oligonucleotide; TTC chr11 5186283 5186304 5186288 5186283 -
aggattctagaaaatgcaagta

SEQ ID NO: 150312 - DNA, 22 bp, Artificial Sequence
  Synthetic oligonucleotide; TTC chr11 5186276 5186297 5186281 5186276 -
tagaaaatgcaagtaagtaaac

SEQ ID NO: 150313 - DNA, 22 bp, Artificial Sequence
  Synthetic oligonucleotide; CTA chr11 5186274 5186295 5186279 5186274 -
gaaaatgcaagtaagtaaactg

SEQ ID NO: 150314 - DNA, 22 bp, Artificial Sequence
  Synthetic oligonucleotide; CTG chr11 5186252 5186273 5186257 5186252 -
agttatgctcaatgaaaacttg

SEQ ID NO: 150315 - DNA, 22 bp, Artificial Sequence
  Synthetic oligonucleotide; TTA chr11 5186247 5186268 5186252 5186247 -
tgctcaatgaaaacttgtagaa

SEQ ID NO: 150316 - DNA, 22 bp, Artificial Sequence
  Synthetic oligonucleotide; CTC chr11 5186242 5186263 5186247 5186242 -
aatgaaaacttgtagaaaataa

SEQ ID NO: 150317 - DNA, 22 bp, Artificial Sequence
  Synthetic oligonucleotide; CTT chr11 5186231 5186252 5186236 5186231 -
gtagaaaataacaccagaaaaa

SEQ ID NO: 150318 - DNA, 22 bp, Artificial Sequence
  Synthetic oligonucleotide; TTG chr11 5186230 5186251 5186235 5186230 -
tagaaaataacaccagaaaaaa

SEQ ID NO: 150319 - DNA, 22 bp, Artificial Sequence
  Synthetic oligonucleotide; CTG chr11 5186192 5186213 5186197 5186192 -
cagaagcagctcattcttccga

SEQ ID NO: 150320 - DNA, 22 bp, Artificial Sequence
  Synthetic oligonucleotide; CTC chr11 5186180 5186201 5186185 5186180 -
attcttccgataacttaatcat

SEQ ID NO: 150321 - DNA, 22 bp, Artificial Sequence
  Synthetic oligonucleotide; TTC chr11 5186176 5186197 5186181 5186176 -
ttccgataacttaatcatctaa

SEQ ID NO: 150322 - DNA, 22 bp, Artificial Sequence
  Synthetic oligonucleotide; CTT chr11 5186174 5186195 5186179 5186174 -
ccgataacttaatcatctaaca

SEQ ID NO: 150323 - DNA, 22 bp, Artificial Sequence
  Synthetic oligonucleotide; TTC chr11 5186173 5186194 5186178 5186173 -
cgataacttaatcatctaacat

SEQ ID NO: 150324 - DNA, 22 bp, Artificial Sequence
  Synthetic oligonucleotide; CTT chr11 5186164 5186185 5186169 5186164 -
aatcatctaacattttccttga

SEQ ID NO: 150325 - DNA, 22 bp, Artificial Sequence
  Synthetic oligonucleotide; TTA chr11 5186163 5186184 5186168 5186163 -
atcatctaacattttccttgat

SEQ ID NO: 150326 - DNA, 22 bp, Artificial Sequence
  Synthetic oligonucleotide; CTA chr11 5186155 5186176 5186160 5186155 -
acattttccttgatttttgacc

SEQ ID NO: 150327 - DNA, 22 bp, Artificial Sequence
  Synthetic oligonucleotide; TTT chr11 5186149 5186170 5186154 5186149 -
tccttgatttttgacccatgga

SEQ ID NO: 150328 - DNA, 22 bp, Artificial Sequence
  Synthetic oligonucleotide; TTT chr11 5186148 5186169 5186153 5186148 -
ccttgatttttgacccatggaa

SEQ ID NO: 150329 - DNA, 22 bp, Artificial Sequence
  Synthetic oligonucleotide; TTC chr11 5186147 5186168 5186152 5186147 -
cttgatttttgacccatggaat

SEQ ID NO: 150330 - DNA, 22 bp, Artificial Sequence
  Synthetic oligonucleotide; CTT chr11 5186144 5186165 5186149 5186144 -
gatttttgacccatggaatact

SEQ ID NO: 150331 - DNA, 22 bp, Artificial Sequence
  Synthetic oligonucleotide; TTG chr11 5186143 5186164 5186148 5186143 -
atttttgacccatggaatacta

SEQ ID NO: 150332 - DNA, 22 bp, Artificial Sequence
  Synthetic oligonucleotide; TTT chr11 5186139 5186160 5186144 5186139 -
ttgacccatggaatactagact

SEQ ID NO: 150333 - DNA, 22 bp, Artificial Sequence
  Synthetic oligonucleotide; TTT chr11 5186138 5186159 5186143 5186138 -
tgacccatggaatactagactt

SEQ ID NO: 150334 - DNA, 22 bp, Artificial Sequence
  Synthetic oligonucleotide; TTT chr11 5186137 5186158 5186142 5186137 -
gacccatggaatactagacttg

SEQ ID NO: 150335 - DNA, 22 bp, Artificial Sequence
  Synthetic oligonucleotide; TTG chr11 5186136 5186157 5186141 5186136 -
acccatggaatactagacttgg

SEQ ID NO: 150336 - DNA, 22 bp, Artificial Sequence
  Synthetic oligonucleotide; CTA chr11 5186121 5186142 5186126 5186121 -
gacttggctttagctggagttg

SEQ ID NO: 150337 - DNA, 22 bp, Artificial Sequence
  Synthetic oligonucleotide; CTT chr11 5186116 5186137 5186121 5186116 -
ggctttagctggagttgatttg

SEQ ID NO: 150338 - DNA, 22 bp, Artificial Sequence
  Synthetic oligonucleotide; TTG chr11 5186115 5186136 5186120 5186115 -
gctttagctggagttgatttgc

SEQ ID NO: 150339 - DNA, 22 bp, Artificial Sequence
  Synthetic oligonucleotide; CTT chr11 5186111 5186132 5186116 5186111 -
tagctggagttgatttgcaatt

SEQ ID NO: 150340 - DNA, 22 bp, Artificial Sequence
  Synthetic oligonucleotide; TTT chr11 5186110 5186131 5186115 5186110 -
agctggagttgatttgcaattg

SEQ ID NO: 150341 - DNA, 22 bp, Artificial Sequence
  Synthetic oligonucleotide; TTA chr11 5186109 5186130 5186114 5186109 -
gctggagttgatttgcaattgt

SEQ ID NO: 150342 - DNA, 22 bp, Artificial Sequence
  Synthetic oligonucleotide; CTG chr11 5186105 5186126 5186110 5186105 -
gagttgatttgcaattgtagta

SEQ ID NO: 150343 - DNA, 22 bp, Artificial Sequence
  Synthetic oligonucleotide; TTG chr11 5186099 5186120 5186104 5186099 -
atttgcaattgtagtatttttt

SEQ ID NO: 150344 - DNA, 22 bp, Artificial Sequence
  Synthetic oligonucleotide; TTT chr11 5186095 5186116 5186100 5186095 -
gcaattgtagtattttttgtgt

SEQ ID NO: 150345 - DNA, 22 bp, Artificial Sequence
  Synthetic oligonucleotide; TTG chr11 5186094 5186115 5186099 5186094 -
caattgtagtattttttgtgtt

SEQ ID NO: 150346 - DNA, 22 bp, Artificial Sequence
  Synthetic oligonucleotide; TTG chr11 5186088 5186109 5186093 5186088 -
tagtattttttgtgttcttgta

SEQ ID NO: 150347 - DNA, 22 bp, Artificial Sequence
  Synthetic oligonucleotide; TTT chr11 5186080 5186101 5186085 5186080 -
tttgtgttcttgtattaagtaa

SEQ ID NO: 150348 - DNA, 22 bp, Artificial Sequence
  Synthetic oligonucleotide; TTT chr11 5186079 5186100 5186084 5186079 -
ttgtgttcttgtattaagtaag

SEQ ID NO: 150349 - DNA, 22 bp, Artificial Sequence
  Synthetic oligonucleotide; TTT chr11 5186078 5186099 5186083 5186078 -
tgtgttcttgtattaagtaagt

SEQ ID NO: 150350 - DNA, 22 bp, Artificial Sequence
  Synthetic oligonucleotide; TTT chr11 5186077 5186098 5186082 5186077 -
gtgttcttgtattaagtaagtc

SEQ ID NO: 150351 - DNA, 22 bp, Artificial Sequence
  Synthetic oligonucleotide; TTG chr11 5186076 5186097 5186081 5186076 -
tgttcttgtattaagtaagtca

SEQ ID NO: 150352 - DNA, 22 bp, Artificial Sequence
  Synthetic oligonucleotide; TTC chr11 5186071 5186092 5186076 5186071 -
ttgtattaagtaagtcattttc

SEQ ID NO: 150353 - DNA, 22 bp, Artificial Sequence
  Synthetic oligonucleotide; CTT chr11 5186069 5186090 5186074 5186069 -
gtattaagtaagtcattttcaa

SEQ ID NO: 150354 - DNA, 22 bp, Artificial Sequence
  Synthetic oligonucleotide; TTG chr11 5186068 5186089 5186073 5186068 -
tattaagtaagtcattttcaaa

SEQ ID NO: 150355 - DNA, 22 bp, Artificial Sequence
  Synthetic oligonucleotide; TTA chr11 5186063 5186084 5186068 5186063 -
agtaagtcattttcaaaaagaa

SEQ ID NO: 150356 - DNA, 22 bp, Artificial Sequence
  Synthetic oligonucleotide; TTT chr11 5186051 5186072 5186056 5186051 -
tcaaaaagaatattttagtttt

SEQ ID NO: 150357 - DNA, 22 bp, Artificial Sequence
  Synthetic oligonucleotide; TTT chr11 5186050 5186071 5186055 5186050 -
caaaaagaatattttagttttc

SEQ ID NO: 150358 - DNA, 22 bp, Artificial Sequence
  Synthetic oligonucleotide; TTC chr11 5186049 5186070 5186054 5186049 -
aaaaagaatattttagttttct

SEQ ID NO: 150359 - DNA, 22 bp, Artificial Sequence
  Synthetic oligonucleotide; TTT chr11 5186036 5186057 5186041 5186036 -
tagttttctcttagaatatgtt

SEQ ID NO: 150360 - DNA, 22 bp, Artificial Sequence
  Synthetic oligonucleotide; TTT chr11 5186035 5186056 5186040 5186035 -
agttttctcttagaatatgttt

SEQ ID NO: 150361 - DNA, 22 bp, Artificial Sequence
  Synthetic oligonucleotide; TTA chr11 5186034 5186055 5186039 5186034 -
gttttctcttagaatatgttta

SEQ ID NO: 150362 - DNA, 22 bp, Artificial Sequence
  Synthetic oligonucleotide; TTT chr11 5186030 5186051 5186035 5186030 -
tctcttagaatatgtttaaata

SEQ ID NO: 150363 - DNA, 22 bp, Artificial Sequence
  Synthetic oligonucleotide; TTT chr11 5186029 5186050 5186034 5186029 -
ctcttagaatatgtttaaataa

SEQ ID NO: 150364 - DNA, 22 bp, Artificial Sequence
  Synthetic oligonucleotide; TTC chr11 5186028 5186049 5186033 5186028 -
tcttagaatatgtttaaataat

SEQ ID NO: 150365 - DNA, 22 bp, Artificial Sequence
  Synthetic oligonucleotide; CTC chr11 5186026 5186047 5186031 5186026 -
ttagaatatgtttaaataatgc

SEQ ID NO: 150366 - DNA, 22 bp, Artificial Sequence
  Synthetic oligonucleotide; CTT chr11 5186024 5186045 5186029 5186024 -
agaatatgtttaaataatgctc

SEQ ID NO: 150367 - DNA, 22 bp, Artificial Sequence
  Synthetic oligonucleotide; TTA chr11 5186023 5186044 5186028 5186023 -
gaatatgtttaaataatgctca

SEQ ID NO: 150368 - DNA, 22 bp, Artificial Sequence
  Synthetic oligonucleotide; TTT chr11 5186013 5186034 5186018 5186013 -
aaataatgctcattttctttga

SEQ ID NO: 150369 - DNA, 22 bp, Artificial Sequence
  Synthetic oligonucleotide; TTA chr11 5186012 5186033 5186017 5186012 -
aataatgctcattttctttgat

SEQ ID NO: 150370 - DNA, 22 bp, Artificial Sequence
  Synthetic oligonucleotide; CTC chr11 5186002 5186023 5186007 5186002 -
attttctttgatatgcagattt

SEQ ID NO: 150371 - DNA, 22 bp, Artificial Sequence
  Synthetic oligonucleotide; TTT chr11 5185998 5186019 5186003 5185998 -
tctttgatatgcagatttgaat

SEQ ID NO: 150372 - DNA, 22 bp, Artificial Sequence
  Synthetic oligonucleotide; TTT chr11 5185997 5186018 5186002 5185997 -
ctttgatatgcagatttgaatg

SEQ ID NO: 150373 - DNA, 22 bp, Artificial Sequence
  Synthetic oligonucleotide; TTC chr11 5185996 5186017 5186001 5185996 -
tttgatatgcagatttgaatgt

SEQ ID NO: 150374 - DNA, 22 bp, Artificial Sequence
  Synthetic oligonucleotide; CTT chr11 5185994 5186015 5185999 5185994 -
tgatatgcagatttgaatgttg

SEQ ID NO: 150375 - DNA, 22 bp, Artificial Sequence
  Synthetic oligonucleotide; TTT chr11 5185993 5186014 5185998 5185993 -
gatatgcagatttgaatgttgt

SEQ ID NO: 150376 - DNA, 22 bp, Artificial Sequence
  Synthetic oligonucleotide; TTG chr11 5185992 5186013 5185997 5185992 -
atatgcagatttgaatgttgta

SEQ ID NO: 150377 - DNA, 22 bp, Artificial Sequence
  Synthetic oligonucleotide; TTT chr11 5185980 5186001 5185985 5185980 -
gaatgttgtacaaagattcaat

SEQ ID NO: 150378 - DNA, 22 bp, Artificial Sequence
  Synthetic oligonucleotide; TTG chr11 5185979 5186000 5185984 5185979 -
aatgttgtacaaagattcaatg

SEQ ID NO: 150379 - DNA, 22 bp, Artificial Sequence
  Synthetic oligonucleotide; TTG chr11 5185972 5185993 5185977 5185972 -
tacaaagattcaatgaatttat

SEQ ID NO: 150380 - DNA, 22 bp, Artificial Sequence
  Synthetic oligonucleotide; TTC chr11 5185961 5185982 5185966 5185961 -
aatgaatttatattctagtagt

SEQ ID NO: 150381 - DNA, 22 bp, Artificial Sequence
  Synthetic oligonucleotide; TTT chr11 5185952 5185973 5185957 5185952 -
atattctagtagttaaaacaag

SEQ ID NO: 150382 - DNA, 22 bp, Artificial Sequence
  Synthetic oligonucleotide; TTA chr11 5185951 5185972 5185956 5185951 -
tattctagtagttaaaacaagg

SEQ ID NO: 150383 - DNA, 22 bp, Artificial Sequence
  Synthetic oligonucleotide; TTC chr11 5185946 5185967 5185951 5185946 -
tagtagttaaaacaaggctcag

SEQ ID NO: 150384 - DNA, 22 bp, Artificial Sequence
  Synthetic oligonucleotide; CTA chr11 5185944 5185965 5185949 5185944 -
gtagttaaaacaaggctcagta

SEQ ID NO: 150385 - DNA, 22 bp, Artificial Sequence
  Synthetic oligonucleotide; TTA chr11 5185937 5185958 5185942 5185937 -
aaacaaggctcagtaataaaaa

SEQ ID NO: 150386 - DNA, 22 bp, Artificial Sequence
  Synthetic oligonucleotide; CTC chr11 5185926 5185947 5185931 5185926 -
agtaataaaaaattttagtagt

SEQ ID NO: 150387 - DNA, 22 bp, Artificial Sequence
  Synthetic oligonucleotide; TTT chr11 5185911 5185932 5185916 5185911 -
tagtagtttaatgtgtgtgtgt

SEQ ID NO: 150388 - DNA, 22 bp, Artificial Sequence
  Synthetic oligonucleotide; TTT chr11 5185910 5185931 5185915 5185910 -
agtagtttaatgtgtgtgtgtg

SEQ ID NO: 150389 - DNA, 22 bp, Artificial Sequence
  Synthetic oligonucleotide; TTA chr11 5185909 5185930 5185914 5185909 -
gtagtttaatgtgtgtgtgtgt

SEQ ID NO: 150390 - DNA, 22 bp, Artificial Sequence
  Synthetic oligonucleotide; TTT chr11 5185902 5185923 5185907 5185902 -
aatgtgtgtgtgtgtgtgcatc

SEQ ID NO: 150391 - DNA, 22 bp, Artificial Sequence
  Synthetic oligonucleotide; TTA chr11 5185901 5185922 5185906 5185901 -
atgtgtgtgtgtgtgtgcatcg

SEQ ID NO: 150392 - DNA, 22 bp, Artificial Sequence
  Synthetic oligonucleotide; TTC chr11 5185876 5185897 5185881 5185876 -
tgtagtttattgactattactc

SEQ ID NO: 150393 - DNA, 22 bp, Artificial Sequence
  Synthetic oligonucleotide; CTG chr11 5185874 5185895 5185879 5185874 -
tagtttattgactattactcat

SEQ ID NO: 150394 - DNA, 22 bp, Artificial Sequence
  Synthetic oligonucleotide; TTT chr11 5185868 5185889 5185873 5185868 -
attgactattactcatcaggta

SEQ ID NO: 150395 - DNA, 22 bp, Artificial Sequence
  Synthetic oligonucleotide; TTA chr11 5185867 5185888 5185872 5185867 -
ttgactattactcatcaggtaa

SEQ ID NO: 150396 - DNA, 22 bp, Artificial Sequence
  Synthetic oligonucleotide; TTG chr11 5185864 5185885 5185869 5185864 -
actattactcatcaggtaatag

SEQ ID NO: 150397 - DNA, 22 bp, Artificial Sequence
  Synthetic oligonucleotide; CTA chr11 5185860 5185881 5185865 5185860 -
ttactcatcaggtaatagtcta

SEQ ID NO: 150398 - DNA, 22 bp, Artificial Sequence
  Synthetic oligonucleotide; TTA chr11 5185857 5185878 5185862 5185857 -
ctcatcaggtaatagtctaggc

SEQ ID NO: 150399 - DNA, 22 bp, Artificial Sequence
  Synthetic oligonucleotide; CTC chr11 5185854 5185875 5185859 5185854 -
atcaggtaatagtctaggcaca

SEQ ID NO: 150400 - DNA, 22 bp, Artificial Sequence
  Synthetic oligonucleotide; CTA chr11 5185838 5185859 5185843 5185838 -
ggcacagattaagaagctggca

SEQ ID NO: 150401 - DNA, 22 bp, Artificial Sequence
  Synthetic oligonucleotide; TTA chr11 5185827 5185848 5185832 5185827 -
agaagctggcactccaaaattt

SEQ ID NO: 150402 - DNA, 22 bp, Artificial Sequence
  Synthetic oligonucleotide; CTG chr11 5185819 5185840 5185824 5185819 -
gcactccaaaatttttaactct

SEQ ID NO: 150403 - DNA, 22 bp, Artificial Sequence
  Synthetic oligonucleotide; CTC chr11 5185813 5185834 5185818 5185813 -
caaaatttttaactctcttccc

SEQ ID NO: 150404 - DNA, 22 bp, Artificial Sequence
  Synthetic oligonucleotide; TTT chr11 5185805 5185826 5185810 5185805 -
ttaactctcttccctatgtaac

SEQ ID NO: 150405 - DNA, 22 bp, Artificial Sequence
  Synthetic oligonucleotide; TTT chr11 5185804 5185825 5185809 5185804 -
taactctcttccctatgtaaca

SEQ ID NO: 150406 - DNA, 22 bp, Artificial Sequence
  Synthetic oligonucleotide; TTT chr11 5185803 5185824 5185808 5185803 -
aactctcttccctatgtaacaa

SEQ ID NO: 150407 - DNA, 22 bp, Artificial Sequence
  Synthetic oligonucleotide; TTA chr11 5185802 5185823 5185807 5185802 -
actctcttccctatgtaacaaa

SEQ ID NO: 150408 - DNA, 22 bp, Artificial Sequence
  Synthetic oligonucleotide; CTC chr11 5185798 5185819 5185803 5185798 -
tcttccctatgtaacaaagata

SEQ ID NO: 150409 - DNA, 22 bp, Artificial Sequence
  Synthetic oligonucleotide; CTC chr11 5185796 5185817 5185801 5185796 -
ttccctatgtaacaaagatatt

SEQ ID NO: 150410 - DNA, 22 bp, Artificial Sequence
  Synthetic oligonucleotide; CTT chr11 5185794 5185815 5185799 5185794 -
ccctatgtaacaaagatattat

SEQ ID NO: 150411 - DNA, 22 bp, Artificial Sequence
  Synthetic oligonucleotide; TTC chr11 5185793 5185814 5185798 5185793 -
cctatgtaacaaagatattata

SEQ ID NO: 150412 - DNA, 22 bp, Artificial Sequence
  Synthetic oligonucleotide; CTA chr11 5185789 5185810 5185794 5185789 -
tgtaacaaagatattatactgg

SEQ ID NO: 150413 - DNA, 22 bp, Artificial Sequence
  Synthetic oligonucleotide; TTA chr11 5185773 5185794 5185778 5185773 -
tactggtgatggggcaaaaata

SEQ ID NO: 150414 - DNA, 22 bp, Artificial Sequence
  Synthetic oligonucleotide; CTG chr11 5185768 5185789 5185773 5185768 -
gtgatggggcaaaaataaaact

SEQ ID NO: 150415 - DNA, 22 bp, Artificial Sequence
  Synthetic oligonucleotide; CTC chr11 5185745 5185766 5185750 5185745 -
catttcaaaattcatgtgtctg

SEQ ID NO: 150416 - DNA, 22 bp, Artificial Sequence
  Synthetic oligonucleotide; TTT chr11 5185740 5185761 5185745 5185740 -
caaaattcatgtgtctgtcacc

SEQ ID NO: 150417 - DNA, 22 bp, Artificial Sequence
  Synthetic oligonucleotide; TTC chr11 5185739 5185760 5185744 5185739 -
aaaattcatgtgtctgtcacca

SEQ ID NO: 150418 - DNA, 22 bp, Artificial Sequence
  Synthetic oligonucleotide; TTC chr11 5185732 5185753 5185737 5185732 -
atgtgtctgtcaccatgctgaa

SEQ ID NO: 150419 - DNA, 22 bp, Artificial Sequence
  Synthetic oligonucleotide; CTG chr11 5185723 5185744 5185728 5185723 -
tcaccatgctgaactatttgca

SEQ ID NO: 150420 - DNA, 22 bp, Artificial Sequence
  Synthetic oligonucleotide; CTG chr11 5185712 5185733 5185717 5185712 -
aactatttgcaccttataaaag

SEQ ID NO: 150421 - DNA, 22 bp, Artificial Sequence
  Synthetic oligonucleotide; CTA chr11 5185707 5185728 5185712 5185707 -
tttgcaccttataaaagtaaat

SEQ ID NO: 150422 - DNA, 22 bp, Artificial Sequence
  Synthetic oligonucleotide; TTT chr11 5185704 5185725 5185709 5185704 -
gcaccttataaaagtaaatgac

SEQ ID NO: 150423 - DNA, 22 bp, Artificial Sequence
  Synthetic oligonucleotide; TTG chr11 5185703 5185724 5185708 5185703 -
caccttataaaagtaaatgaca

SEQ ID NO: 150424 - DNA, 22 bp, Artificial Sequence
  Synthetic oligonucleotide; CTT chr11 5185697 5185718 5185702 5185697 -
ataaaagtaaatgacagataca

SEQ ID NO: 150425 - DNA, 22 bp, Artificial Sequence
  Synthetic oligonucleotide; TTA chr11 5185696 5185717 5185701 5185696 -
taaaagtaaatgacagatacag

SEQ ID NO: 150426 - DNA, 22 bp, Artificial Sequence
  Synthetic oligonucleotide; TTA chr11 5185663 5185684 5185668 5185663 -
ccaattgataccatgtgcccag

SEQ ID NO: 150427 - DNA, 22 bp, Artificial Sequence
  Synthetic oligonucleotide; TTG chr11 5185656 5185677 5185661 5185656 -
ataccatgtgcccagtataaga

SEQ ID NO: 150428 - DNA, 22 bp, Artificial Sequence
  Synthetic oligonucleotide; TTT chr11 5185629 5185650 5185634 5185629 -
attaaaaaaaaatttattccta

SEQ ID NO: 150429 - DNA, 22 bp, Artificial Sequence
  Synthetic oligonucleotide; TTA chr11 5185628 5185649 5185633 5185628 -
ttaaaaaaaaatttattcctag

SEQ ID NO: 150430 - DNA, 22 bp, Artificial Sequence
  Synthetic oligonucleotide; TTA chr11 5185625 5185646 5185630 5185625 -
aaaaaaaatttattcctagtat

SEQ ID NO: 150431 - DNA, 22 bp, Artificial Sequence
  Synthetic oligonucleotide; TTT chr11 5185614 5185635 5185619 5185614 -
attcctagtatttatggatact

SEQ ID NO: 150432 - DNA, 22 bp, Artificial Sequence
  Synthetic oligonucleotide; TTA chr11 5185613 5185634 5185618 5185613 -
ttcctagtatttatggatactc

SEQ ID NO: 150433 - DNA, 22 bp, Artificial Sequence
  Synthetic oligonucleotide; TTC chr11 5185610 5185631 5185615 5185610 -
ctagtatttatggatactctaa

SEQ ID NO: 150434 - DNA, 22 bp, Artificial Sequence
  Synthetic oligonucleotide; CTA chr11 5185607 5185628 5185612 5185607 -
gtatttatggatactctaaatc

SEQ ID NO: 150435 - DNA, 22 bp, Artificial Sequence
  Synthetic oligonucleotide; TTT chr11 5185601 5185622 5185606 5185601 -
atggatactctaaatcaattca

SEQ ID NO: 150436 - DNA, 22 bp, Artificial Sequence
  Synthetic oligonucleotide; TTA chr11 5185600 5185621 5185605 5185600 -
tggatactctaaatcaattcaa

SEQ ID NO: 150437 - DNA, 22 bp, Artificial Sequence
  Synthetic oligonucleotide; CTC chr11 5185591 5185612 5185596 5185591 -
taaatcaattcaatctcagttt

SEQ ID NO: 150438 - DNA, 22 bp, Artificial Sequence
  Synthetic oligonucleotide; CTA chr11 5185589 5185610 5185594 5185589 -
aatcaattcaatctcagtttga

SEQ ID NO: 150439 - DNA, 22 bp, Artificial Sequence
  Synthetic oligonucleotide; TTC chr11 5185580 5185601 5185585 5185580 -
aatctcagtttgatggataata

SEQ ID NO: 150440 - DNA, 22 bp, Artificial Sequence
  Synthetic oligonucleotide; CTC chr11 5185574 5185595 5185579 5185574 -
agtttgatggataataagcctg

SEQ ID NO: 150441 - DNA, 22 bp, Artificial Sequence
  Synthetic oligonucleotide; TTT chr11 5185569 5185590 5185574 5185569 -
gatggataataagcctgaagtc

SEQ ID NO: 150442 - DNA, 22 bp, Artificial Sequence
  Synthetic oligonucleotide; TTG chr11 5185568 5185589 5185573 5185568 -
atggataataagcctgaagtcc

SEQ ID NO: 150443 - DNA, 22 bp, Artificial Sequence
  Synthetic oligonucleotide; CTG chr11 5185552 5185573 5185557 5185552 -
aagtcctgaaagttaaacttat

SEQ ID NO: 150444 - DNA, 22 bp, Artificial Sequence
  Synthetic oligonucleotide; CTG chr11 5185544 5185565 5185549 5185544 -
aaagttaaacttattccagttg

SEQ ID NO: 150445 - DNA, 22 bp, Artificial Sequence
  Synthetic oligonucleotide; TTA chr11 5185537 5185558 5185542 5185537 -
aacttattccagttgacaataa

SEQ ID NO: 150446 - DNA, 22 bp, Artificial Sequence
  Synthetic oligonucleotide; CTT chr11 5185532 5185553 5185537 5185532 -
attccagttgacaataattttg

SEQ ID NO: 150447 - DNA, 22 bp, Artificial Sequence
  Synthetic oligonucleotide; TTA chr11 5185531 5185552 5185536 5185531 -
ttccagttgacaataattttgg

SEQ ID NO: 150448 - DNA, 22 bp, Artificial Sequence
  Synthetic oligonucleotide; TTC chr11 5185528 5185549 5185533 5185528 -
cagttgacaataattttggtct

SEQ ID NO: 150449 - DNA, 22 bp, Artificial Sequence
  Synthetic oligonucleotide; TTG chr11 5185522 5185543 5185527 5185522 -
acaataattttggtcttaattg

SEQ ID NO: 150450 - DNA, 22 bp, Artificial Sequence
  Synthetic oligonucleotide; TTT chr11 5185512 5185533 5185517 5185512 -
tggtcttaattgctacaatttt

SEQ ID NO: 150451 - DNA, 22 bp, Artificial Sequence
  Synthetic oligonucleotide; TTT chr11 5185511 5185532 5185516 5185511 -
ggtcttaattgctacaattttg

SEQ ID NO: 150452 - DNA, 22 bp, Artificial Sequence
  Synthetic oligonucleotide; TTG chr11 5185510 5185531 5185515 5185510 -
gtcttaattgctacaattttgt

SEQ ID NO: 150453 - DNA, 22 bp, Artificial Sequence
  Synthetic oligonucleotide; CTT chr11 5185505 5185526 5185510 5185505 -
aattgctacaattttgttagtg

SEQ ID NO: 150454 - DNA, 22 bp, Artificial Sequence
  Synthetic oligonucleotide; TTA chr11 5185504 5185525 5185509 5185504 -
attgctacaattttgttagtgt

SEQ ID NO: 150455 - DNA, 22 bp, Artificial Sequence
  Synthetic oligonucleotide; TTG chr11 5185500 5185521 5185505 5185500 -
ctacaattttgttagtgtcctg

SEQ ID NO: 150456 - DNA, 22 bp, Artificial Sequence
  Synthetic oligonucleotide; CTA chr11 5185497 5185518 5185502 5185497 -
caattttgttagtgtcctgatg

SEQ ID NO: 150457 - DNA, 22 bp, Artificial Sequence
  Synthetic oligonucleotide; TTT chr11 5185491 5185512 5185496 5185491 -
tgttagtgtcctgatgtcatct

SEQ ID NO: 150458 - DNA, 22 bp, Artificial Sequence
  Synthetic oligonucleotide; TTT chr11 5185490 5185511 5185495 5185490 -
gttagtgtcctgatgtcatcta

SEQ ID NO: 150459 - DNA, 22 bp, Artificial Sequence
  Synthetic oligonucleotide; TTG chr11 5185489 5185510 5185494 5185489 -
ttagtgtcctgatgtcatctat

SEQ ID NO: 150460 - DNA, 22 bp, Artificial Sequence
  Synthetic oligonucleotide; TTA chr11 5185486 5185507 5185491 5185486 -
gtgtcctgatgtcatctattgt

SEQ ID NO: 150461 - DNA, 22 bp, Artificial Sequence
  Synthetic oligonucleotide; CTG chr11 5185478 5185499 5185483 5185478 -
atgtcatctattgttgggatag

SEQ ID NO: 150462 - DNA, 22 bp, Artificial Sequence
  Synthetic oligonucleotide; CTA chr11 5185468 5185489 5185473 5185468 -
ttgttgggatagagatataaat

SEQ ID NO: 150463 - DNA, 22 bp, Artificial Sequence
  Synthetic oligonucleotide; TTG chr11 5185465 5185486 5185470 5185465 -
ttgggatagagatataaatgac

SEQ ID NO: 150464 - DNA, 22 bp, Artificial Sequence
  Synthetic oligonucleotide; TTG chr11 5185462 5185483 5185467 5185462 -
ggatagagatataaatgactta

SEQ ID NO: 150465 - DNA, 22 bp, Artificial Sequence
  Synthetic oligonucleotide; CTT chr11 5185441 5185462 5185446 5185441 -
atgtagctaccttcctaagaca

SEQ ID NO: 150466 - DNA, 22 bp, Artificial Sequence
  Synthetic oligonucleotide; TTA chr11 5185440 5185461 5185445 5185440 -
tgtagctaccttcctaagacac

SEQ ID NO: 150467 - DNA, 22 bp, Artificial Sequence
  Synthetic oligonucleotide; CTA chr11 5185432 5185453 5185437 5185432 -
ccttcctaagacactgacttca

SEQ ID NO: 150468 - DNA, 22 bp, Artificial Sequence
  Synthetic oligonucleotide; CTT chr11 5185428 5185449 5185433 5185428 -
cctaagacactgacttcagaaa

SEQ ID NO: 150469 - DNA, 22 bp, Artificial Sequence
  Synthetic oligonucleotide; TTC chr11 5185427 5185448 5185432 5185427 -
ctaagacactgacttcagaaaa

SEQ ID NO: 150470 - DNA, 22 bp, Artificial Sequence
  Synthetic oligonucleotide; CTA chr11 5185424 5185445 5185429 5185424 -
agacactgacttcagaaaagac

SEQ ID NO: 150471 - DNA, 22 bp, Artificial Sequence
  Synthetic oligonucleotide; CTG chr11 5185416 5185437 5185421 5185416 -
acttcagaaaagactcacattt

SEQ ID NO: 150472 - DNA, 22 bp, Artificial Sequence
  Synthetic oligonucleotide; CTT chr11 5185412 5185433 5185417 5185412 -
cagaaaagactcacattttaaa

SEQ ID NO: 150473 - DNA, 22 bp, Artificial Sequence
  Synthetic oligonucleotide; TTC chr11 5185411 5185432 5185416 5185411 -
agaaaagactcacattttaaat

SEQ ID NO: 150474 - DNA, 22 bp, Artificial Sequence
  Synthetic oligonucleotide; CTC chr11 5185400 5185421 5185405 5185400 -
acattttaaatttatgcttatt

SEQ ID NO: 150475 - DNA, 22 bp, Artificial Sequence
  Synthetic oligonucleotide; TTT chr11 5185394 5185415 5185399 5185394 -
taaatttatgcttattgttagg

SEQ ID NO: 150476 - DNA, 22 bp, Artificial Sequence
  Synthetic oligonucleotide; TTT chr11 5185393 5185414 5185398 5185393 -
aaatttatgcttattgttaggt

SEQ ID NO: 150477 - DNA, 22 bp, Artificial Sequence
  Synthetic oligonucleotide; TTA chr11 5185392 5185413 5185397 5185392 -
aatttatgcttattgttaggta

SEQ ID NO: 150478 - DNA, 22 bp, Artificial Sequence
  Synthetic oligonucleotide; TTT chr11 5185387 5185408 5185392 5185387 -
atgcttattgttaggtatttta

SEQ ID NO: 150479 - DNA, 22 bp, Artificial Sequence
  Synthetic oligonucleotide; TTA chr11 5185386 5185407 5185391 5185386 -
tgcttattgttaggtattttac

SEQ ID NO: 150480 - DNA, 22 bp, Artificial Sequence
  Synthetic oligonucleotide; CTT chr11 5185381 5185402 5185386 5185381 -
attgttaggtattttacaagca

SEQ ID NO: 150481 - DNA, 22 bp, Artificial Sequence
  Synthetic oligonucleotide; TTA chr11 5185380 5185401 5185385 5185380 -
ttgttaggtattttacaagcaa

SEQ ID NO: 150482 - DNA, 22 bp, Artificial Sequence
  Synthetic oligonucleotide; TTG chr11 5185377 5185398 5185382 5185377 -
ttaggtattttacaagcaagag

SEQ ID NO: 150483 - DNA, 22 bp, Artificial Sequence
  Synthetic oligonucleotide; TTA chr11 5185374 5185395 5185379 5185374 -
ggtattttacaagcaagagaac

SEQ ID NO: 150484 - DNA, 22 bp, Artificial Sequence
  Synthetic oligonucleotide; TTT chr11 5185367 5185388 5185372 5185367 -
tacaagcaagagaactaaagtt

SEQ ID NO: 150485 - DNA, 22 bp, Artificial Sequence
  Synthetic oligonucleotide; TTT chr11 5185366 5185387 5185371 5185366 -
acaagcaagagaactaaagttt

SEQ ID NO: 150486 - DNA, 22 bp, Artificial Sequence
  Synthetic oligonucleotide; TTA chr11 5185365 5185386 5185370 5185365 -
caagcaagagaactaaagttta

SEQ ID NO: 150487 - DNA, 22 bp, Artificial Sequence
  Synthetic oligonucleotide; CTA chr11 5185350 5185371 5185355 5185350 -
aagtttaaattaaatgacgtgt

SEQ ID NO: 150488 - DNA, 22 bp, Artificial Sequence
  Synthetic oligonucleotide; TTT chr11 5185344 5185365 5185349 5185344 -
aaattaaatgacgtgtccaggg

SEQ ID NO: 150489 - DNA, 22 bp, Artificial Sequence
  Synthetic oligonucleotide; TTA chr11 5185343 5185364 5185348 5185343 -
aattaaatgacgtgtccagggt

SEQ ID NO: 150490 - DNA, 22 bp, Artificial Sequence
  Synthetic oligonucleotide; TTA chr11 5185338 5185359 5185343 5185338 -
aatgacgtgtccagggtcatag

SEQ ID NO: 150491 - DNA, 22 bp, Artificial Sequence
  Synthetic oligonucleotide; TTT chr11 5185300 5185321 5185305 5185300 -
agccagtatttaaatacaacta

SEQ ID NO: 150492 - DNA, 22 bp, Artificial Sequence
  Synthetic oligonucleotide; TTA chr11 5185299 5185320 5185304 5185299 -
gccagtatttaaatacaactat

SEQ ID NO: 150493 - DNA, 22 bp, Artificial Sequence
  Synthetic oligonucleotide; TTT chr11 5185289 5185310 5185294 5185289 -
aaatacaactatatatgtcctt

SEQ ID NO: 150494 - DNA, 22 bp, Artificial Sequence
  Synthetic oligonucleotide; TTA chr11 5185288 5185309 5185293 5185288 -
aatacaactatatatgtcctta

SEQ ID NO: 150495 - DNA, 22 bp, Artificial Sequence
  Synthetic oligonucleotide; CTA chr11 5185278 5185299 5185283 5185278 -
tatatgtccttagagctatact

SEQ ID NO: 150496 - DNA, 22 bp, Artificial Sequence
  Synthetic oligonucleotide; CTT chr11 5185267 5185288 5185272 5185267 -
agagctatactgtttctattac

SEQ ID NO: 150497 - DNA, 22 bp, Artificial Sequence
  Synthetic oligonucleotide; TTA chr11 5185266 5185287 5185271 5185266 -
gagctatactgtttctattaca

SEQ ID NO: 150498 - DNA, 22 bp, Artificial Sequence
  Synthetic oligonucleotide; CTA chr11 5185260 5185281 5185265 5185260 -
tactgtttctattacaccacac

SEQ ID NO: 150499 - DNA, 22 bp, Artificial Sequence
  Synthetic oligonucleotide; CTG chr11 5185255 5185276 5185260 5185255 -
tttctattacaccacactatct

SEQ ID NO: 150500 - DNA, 22 bp, Artificial Sequence
  Synthetic oligonucleotide; TTT chr11 5185252 5185273 5185257 5185252 -
ctattacaccacactatctttg

SEQ ID NO: 150501 - DNA, 22 bp, Artificial Sequence
  Synthetic oligonucleotide; TTC chr11 5185251 5185272 5185256 5185251 -
tattacaccacactatctttgc

SEQ ID NO: 150502 - DNA, 22 bp, Artificial Sequence
  Synthetic oligonucleotide; CTA chr11 5185249 5185270 5185254 5185249 -
ttacaccacactatctttgctc

SEQ ID NO: 150503 - DNA, 22 bp, Artificial Sequence
  Synthetic oligonucleotide; TTA chr11 5185246 5185267 5185251 5185246 -
caccacactatctttgctccgt

SEQ ID NO: 150504 - DNA, 22 bp, Artificial Sequence
  Synthetic oligonucleotide; CTA chr11 5185236 5185257 5185241 5185236 -
tctttgctccgtggatacattc

SEQ ID NO: 150505 - DNA, 22 bp, Artificial Sequence
  Synthetic oligonucleotide; CTT chr11 5185232 5185253 5185237 5185232 -
tgctccgtggatacattcatga

SEQ ID NO: 150506 - DNA, 22 bp, Artificial Sequence
  Synthetic oligonucleotide; TTT chr11 5185231 5185252 5185236 5185231 -
gctccgtggatacattcatgat

SEQ ID NO: 150507 - DNA, 22 bp, Artificial Sequence
  Synthetic oligonucleotide; TTG chr11 5185230 5185251 5185235 5185230 -
ctccgtggatacattcatgatt

SEQ ID NO: 150508 - DNA, 22 bp, Artificial Sequence
  Synthetic oligonucleotide; CTC chr11 5185227 5185248 5185232 5185227 -
cgtggatacattcatgattcag

SEQ ID NO: 150509 - DNA, 22 bp, Artificial Sequence
  Synthetic oligonucleotide; TTC chr11 5185214 5185235 5185219 5185214 -
atgattcagtcagaatatgctg

SEQ ID NO: 150510 - DNA, 22 bp, Artificial Sequence
  Synthetic oligonucleotide; TTC chr11 5185207 5185228 5185212 5185207 -
agtcagaatatgctgtcagaaa

SEQ ID NO: 150511 - DNA, 22 bp, Artificial Sequence
  Synthetic oligonucleotide; CTG chr11 5185192 5185213 5185197 5185192 -
tcagaaatatcctagaataatg

SEQ ID NO: 150512 - DNA, 22 bp, Artificial Sequence
  Synthetic oligonucleotide; CTA chr11 5185178 5185199 5185183 5185178 -
gaataatgctacaaggaaccca

SEQ ID NO: 150513 - DNA, 22 bp, Artificial Sequence
  Synthetic oligonucleotide; CTA chr11 5185167 5185188 5185172 5185167 -
caaggaacccaggcctataatt

SEQ ID NO: 150514 - DNA, 22 bp, Artificial Sequence
  Synthetic oligonucleotide; CTA chr11 5185150 5185171 5185155 5185150 -
taatttgggtcatcacatatga

SEQ ID NO: 150515 - DNA, 22 bp, Artificial Sequence
  Synthetic oligonucleotide; TTT chr11 5185144 5185165 5185149 5185144 -
gggtcatcacatatgacaatgt

SEQ ID NO: 150516 - DNA, 22 bp, Artificial Sequence
  Synthetic oligonucleotide; TTG chr11 5185143 5185164 5185148 5185143 -
ggtcatcacatatgacaatgtt

SEQ ID NO: 150517 - DNA, 22 bp, Artificial Sequence
  Synthetic oligonucleotide; TTT chr11 5185120 5185141 5185125 5185120 -
taggaaaaacaaaaaaacaaac

SEQ ID NO: 150518 - DNA, 22 bp, Artificial Sequence
  Synthetic oligonucleotide; TTT chr11 5185119 5185140 5185124 5185119 -
aggaaaaacaaaaaaacaaaca

SEQ ID NO: 150519 - DNA, 22 bp, Artificial Sequence
  Synthetic oligonucleotide; TTA chr11 5185118 5185139 5185123 5185118 -
ggaaaaacaaaaaaacaaacaa

SEQ ID NO: 150520 - DNA, 22 bp, Artificial Sequence
  Synthetic oligonucleotide; TTT chr11 5185090 5185111 5185095 5185090 -
aaaaaccataggtatcacaaaa

SEQ ID NO: 150521 - DNA, 22 bp, Artificial Sequence
  Synthetic oligonucleotide; TTA chr11 5185089 5185110 5185094 5185089 -
aaaaccataggtatcacaaaag

SEQ ID NO: 150522 - DNA, 22 bp, Artificial Sequence
  Synthetic oligonucleotide; TTT chr11 5185050 5185071 5185055 5185050 -
aaaggccagaaaatctgttttc

SEQ ID NO: 150523 - DNA, 22 bp, Artificial Sequence
  Synthetic oligonucleotide; TTA chr11 5185049 5185070 5185054 5185049 -
aaggccagaaaatctgttttct

SEQ ID NO: 150524 - DNA, 22 bp, Artificial Sequence
  Synthetic oligonucleotide; CTG chr11 5185033 5185054 5185038 5185033 -
ttttctttcccccttatcttca

SEQ ID NO: 150525 - DNA, 22 bp, Artificial Sequence
  Synthetic oligonucleotide; TTT chr11 5185030 5185051 5185035 5185030 -
tctttcccccttatcttcattc

SEQ ID NO: 150526 - DNA, 22 bp, Artificial Sequence
  Synthetic oligonucleotide; TTT chr11 5185029 5185050 5185034 5185029 -
ctttcccccttatcttcattcc

SEQ ID NO: 150527 - DNA, 22 bp, Artificial Sequence
  Synthetic oligonucleotide; TTC chr11 5185028 5185049 5185033 5185028 -
tttcccccttatcttcattcct

SEQ ID NO: 150528 - DNA, 22 bp, Artificial Sequence
  Synthetic oligonucleotide; CTT chr11 5185026 5185047 5185031 5185026 -
tcccccttatcttcattcctgt

SEQ ID NO: 150529 - DNA, 22 bp, Artificial Sequence
  Synthetic oligonucleotide; TTT chr11 5185025 5185046 5185030 5185025 -
cccccttatcttcattcctgta

SEQ ID NO: 150530 - DNA, 22 bp, Artificial Sequence
  Synthetic oligonucleotide; TTC chr11 5185024 5185045 5185029 5185024 -
ccccttatcttcattcctgtat

SEQ ID NO: 150531 - DNA, 22 bp, Artificial Sequence
  Synthetic oligonucleotide; CTT chr11 5185018 5185039 5185023 5185018 -
atcttcattcctgtattttttt

SEQ ID NO: 150532 - DNA, 22 bp, Artificial Sequence
  Synthetic oligonucleotide; TTA chr11 5185017 5185038 5185022 5185017 -
tcttcattcctgtatttttttt

SEQ ID NO: 150533 - DNA, 22 bp, Artificial Sequence
  Synthetic oligonucleotide; CTT chr11 5185013 5185034 5185018 5185013 -
cattcctgtatttttttttcac

SEQ ID NO: 150534 - DNA, 22 bp, Artificial Sequence
  Synthetic oligonucleotide; TTC chr11 5185012 5185033 5185017 5185012 -
attcctgtatttttttttcact

SEQ ID NO: 150535 - DNA, 22 bp, Artificial Sequence
  Synthetic oligonucleotide; TTC chr11 5185008 5185029 5185013 5185008 -
ctgtatttttttttcacttaga

SEQ ID NO: 150536 - DNA, 22 bp, Artificial Sequence
  Synthetic oligonucleotide; CTG chr11 5185005 5185026 5185010 5185005 -
tatttttttttcacttagattc

SEQ ID NO: 150537 - DNA, 22 bp, Artificial Sequence
  Synthetic oligonucleotide; TTT chr11 5185000 5185021 5185005 5185000 -
ttttttcacttagattcttctc

SEQ ID NO: 150538 - DNA, 22 bp, Artificial Sequence
  Synthetic oligonucleotide; TTT chr11 5184999 5185020 5185004 5184999 -
tttttcacttagattcttctct

SEQ ID NO: 150539 - DNA, 22 bp, Artificial Sequence
  Synthetic oligonucleotide; TTT chr11 5184998 5185019 5185003 5184998 -
ttttcacttagattcttctctc

SEQ ID NO: 150540 - DNA, 22 bp, Artificial Sequence
  Synthetic oligonucleotide; TTT chr11 5184997 5185018 5185002 5184997 -
tttcacttagattcttctctcc

SEQ ID NO: 150541 - DNA, 22 bp, Artificial Sequence
  Synthetic oligonucleotide; TTT chr11 5184996 5185017 5185001 5184996 -
ttcacttagattcttctctccc

SEQ ID NO: 150542 - DNA, 22 bp, Artificial Sequence
  Synthetic oligonucleotide; TTT chr11 5184995 5185016 5185000 5184995 -
tcacttagattcttctctccca

SEQ ID NO: 150543 - DNA, 22 bp, Artificial Sequence
  Synthetic oligonucleotide; TTT chr11 5184994 5185015 5184999 5184994 -
cacttagattcttctctcccat

SEQ ID NO: 150544 - DNA, 22 bp, Artificial Sequence
  Synthetic oligonucleotide; TTC chr11 5184993 5185014 5184998 5184993 -
acttagattcttctctcccatc

SEQ ID NO: 150545 - DNA, 22 bp, Artificial Sequence
  Synthetic oligonucleotide; CTT chr11 5184989 5185010 5184994 5184989 -
agattcttctctcccatcccta

SEQ ID NO: 150546 - DNA, 22 bp, Artificial Sequence
  Synthetic oligonucleotide; TTA chr11 5184988 5185009 5184993 5184988 -
gattcttctctcccatccctaa

SEQ ID NO: 150547 - DNA, 22 bp, Artificial Sequence
  Synthetic oligonucleotide; TTC chr11 5184983 5185004 5184988 5184983 -
ttctctcccatccctaatgtcc

SEQ ID NO: 150548 - DNA, 22 bp, Artificial Sequence
  Synthetic oligonucleotide; CTT chr11 5184981 5185002 5184986 5184981 -
ctctcccatccctaatgtcctg

SEQ ID NO: 150549 - DNA, 22 bp, Artificial Sequence
  Synthetic oligonucleotide; TTC chr11 5184980 5185001 5184985 5184980 -
tctcccatccctaatgtcctga

SEQ ID NO: 150550 - DNA, 22 bp, Artificial Sequence
  Synthetic oligonucleotide; CTC chr11 5184978 5184999 5184983 5184978 -
tcccatccctaatgtcctgatg

SEQ ID NO: 150551 - DNA, 22 bp, Artificial Sequence
  Synthetic oligonucleotide; CTC chr11 5184976 5184997 5184981 5184976 -
ccatccctaatgtcctgatgaa

SEQ ID NO: 150552 - DNA, 22 bp, Artificial Sequence
  Synthetic oligonucleotide; CTA chr11 5184967 5184988 5184972 5184967 -
atgtcctgatgaagccccagtc

SEQ ID NO: 150553 - DNA, 22 bp, Artificial Sequence
  Synthetic oligonucleotide; CTG chr11 5184959 5184980 5184964 5184959 -
atgaagccccagtcactgtaac

SEQ ID NO: 150554 - DNA, 22 bp, Artificial Sequence
  Synthetic oligonucleotide; CTG chr11 5184941 5184962 5184946 5184941 -
taaccctcacttctataactac

SEQ ID NO: 150555 - DNA, 22 bp, Artificial Sequence
  Synthetic oligonucleotide; CTC chr11 5184933 5184954 5184938 5184933 -
acttctataactacgcttcact

SEQ ID NO: 150556 - DNA, 22 bp, Artificial Sequence
  Synthetic oligonucleotide; CTT chr11 5184929 5184950 5184934 5184929 -
ctataactacgcttcactcaca

SEQ ID NO: 150557 - DNA, 22 bp, Artificial Sequence
  Synthetic oligonucleotide; TTC chr11 5184928 5184949 5184933 5184928 -
tataactacgcttcactcacat

SEQ ID NO: 150558 - DNA, 22 bp, Artificial Sequence
  Synthetic oligonucleotide; CTA chr11 5184926 5184947 5184931 5184926 -
taactacgcttcactcacatgc

SEQ ID NO: 150559 - DNA, 22 bp, Artificial Sequence
  Synthetic oligonucleotide; CTA chr11 5184920 5184941 5184925 5184920 -
cgcttcactcacatgcatggct

SEQ ID NO: 150560 - DNA, 22 bp, Artificial Sequence
  Synthetic oligonucleotide; CTT chr11 5184915 5184936 5184920 5184915 -
cactcacatgcatggctctggc

SEQ ID NO: 150561 - DNA, 22 bp, Artificial Sequence
  Synthetic oligonucleotide; TTC chr11 5184914 5184935 5184919 5184914 -
actcacatgcatggctctggcc

SEQ ID NO: 150562 - DNA, 22 bp, Artificial Sequence
  Synthetic oligonucleotide; CTC chr11 5184910 5184931 5184915 5184910 -
acatgcatggctctggcctaga

SEQ ID NO: 150563 - DNA, 22 bp, Artificial Sequence
  Synthetic oligonucleotide; CTC chr11 5184897 5184918 5184902 5184897 -
tggcctagaactgtgtcaggaa

SEQ ID NO: 150564 - DNA, 22 bp, Artificial Sequence
  Synthetic oligonucleotide; CTG chr11 5184895 5184916 5184900 5184895 -
gcctagaactgtgtcaggaatg

SEQ ID NO: 150565 - DNA, 22 bp, Artificial Sequence
  Synthetic oligonucleotide; CTA chr11 5184890 5184911 5184895 5184890 -
gaactgtgtcaggaatgcttca

SEQ ID NO: 150566 - DNA, 22 bp, Artificial Sequence
  Synthetic oligonucleotide; CTG chr11 5184884 5184905 5184889 5184884 -
tgtcaggaatgcttcaaaatta

SEQ ID NO: 150567 - DNA, 22 bp, Artificial Sequence
  Synthetic oligonucleotide; CTT chr11 5184870 5184891 5184875 5184870 -
caaaattattctttcctttctc

SEQ ID NO: 150568 - DNA, 22 bp, Artificial Sequence
  Synthetic oligonucleotide; TTC chr11 5184869 5184890 5184874 5184869 -
aaaattattctttcctttctct

SEQ ID NO: 150569 - DNA, 22 bp, Artificial Sequence
  Synthetic oligonucleotide; TTA chr11 5184862 5184883 5184867 5184862 -
ttctttcctttctctgaaacat

SEQ ID NO: 150570 - DNA, 22 bp, Artificial Sequence
  Synthetic oligonucleotide; TTC chr11 5184859 5184880 5184864 5184859 -
tttcctttctctgaaacatcaa

SEQ ID NO: 150571 - DNA, 22 bp, Artificial Sequence
  Synthetic oligonucleotide; CTT chr11 5184857 5184878 5184862 5184857 -
tcctttctctgaaacatcaaca

SEQ ID NO: 150572 - DNA, 22 bp, Artificial Sequence
  Synthetic oligonucleotide; TTT chr11 5184856 5184877 5184861 5184856 -
cctttctctgaaacatcaacag

SEQ ID NO: 150573 - DNA, 22 bp, Artificial Sequence
  Synthetic oligonucleotide; TTC chr11 5184855 5184876 5184860 5184855 -
ctttctctgaaacatcaacagt

SEQ ID NO: 150574 - DNA, 22 bp, Artificial Sequence
  Synthetic oligonucleotide; CTT chr11 5184852 5184873 5184857 5184852 -
tctctgaaacatcaacagttta

SEQ ID NO: 150575 - DNA, 22 bp, Artificial Sequence
  Synthetic oligonucleotide; TTT chr11 5184851 5184872 5184856 5184851 -
ctctgaaacatcaacagtttac

SEQ ID NO: 150576 - DNA, 22 bp, Artificial Sequence
  Synthetic oligonucleotide; TTC chr11 5184850 5184871 5184855 5184850 -
tctgaaacatcaacagtttact

SEQ ID NO: 150577 - DNA, 22 bp, Artificial Sequence
  Synthetic oligonucleotide; CTC chr11 5184848 5184869 5184853 5184848 -
tgaaacatcaacagtttactta

SEQ ID NO: 150578 - DNA, 22 bp, Artificial Sequence
  Synthetic oligonucleotide; CTG chr11 5184846 5184867 5184851 5184846 -
aaacatcaacagtttacttaaa

SEQ ID NO: 150579 - DNA, 22 bp, Artificial Sequence
  Synthetic oligonucleotide; TTT chr11 5184831 5184852 5184836 5184831 -
acttaaaatattctaacaatgt

SEQ ID NO: 150580 - DNA, 22 bp, Artificial Sequence
  Synthetic oligonucleotide; TTA chr11 5184830 5184851 5184835 5184830 -
cttaaaatattctaacaatgtg

SEQ ID NO: 150581 - DNA, 22 bp, Artificial Sequence
  Synthetic oligonucleotide; CTT chr11 5184827 5184848 5184832 5184827 -
aaaatattctaacaatgtgaga

SEQ ID NO: 150582 - DNA, 22 bp, Artificial Sequence
  Synthetic oligonucleotide; TTA chr11 5184826 5184847 5184831 5184826 -
aaatattctaacaatgtgagat

SEQ ID NO: 150583 - DNA, 22 bp, Artificial Sequence
  Synthetic oligonucleotide; TTC chr11 5184818 5184839 5184823 5184818 -
taacaatgtgagatatatatta

SEQ ID NO: 150584 - DNA, 22 bp, Artificial Sequence
  Synthetic oligonucleotide; CTA chr11 5184816 5184837 5184821 5184816 -
acaatgtgagatatatattaaa

SEQ ID NO: 150585 - DNA, 22 bp, Artificial Sequence
  Synthetic oligonucleotide; TTA chr11 5184796 5184817 5184801 5184796 -
aatagtaaaacaattagtttat

SEQ ID NO: 150586 - DNA, 22 bp, Artificial Sequence
  Synthetic oligonucleotide; TTA chr11 5184780 5184801 5184785 5184780 -
gtttatgtaaataaagtagatc

SEQ ID NO: 150587 - DNA, 22 bp, Artificial Sequence
  Synthetic oligonucleotide; TTT chr11 5184776 5184797 5184781 5184776 -
atgtaaataaagtagatccaca

SEQ ID NO: 150588 - DNA, 22 bp, Artificial Sequence
  Synthetic oligonucleotide; TTA chr11 5184775 5184796 5184780 5184775 -
tgtaaataaagtagatccacag

SEQ ID NO: 150589 - DNA, 22 bp, Artificial Sequence
  Synthetic oligonucleotide; TTA chr11 5184748 5184769 5184753 5184748 -
aataacttcaaattttatctta

SEQ ID NO: 150590 - DNA, 22 bp, Artificial Sequence
  Synthetic oligonucleotide; CTT chr11 5184740 5184761 5184745 5184740 -
caaattttatcttaatattttt

SEQ ID NO: 150591 - DNA, 22 bp, Artificial Sequence
  Synthetic oligonucleotide; TTC chr11 5184739 5184760 5184744 5184739 -
aaattttatcttaatattttta

SEQ ID NO: 150592 - DNA, 22 bp, Artificial Sequence
  Synthetic oligonucleotide; TTT chr11 5184733 5184754 5184738 5184733 -
tatcttaatatttttaaagaac

SEQ ID NO: 150593 - DNA, 22 bp, Artificial Sequence
  Synthetic oligonucleotide; TTT chr11 5184732 5184753 5184737 5184732 -
atcttaatatttttaaagaacc

SEQ ID NO: 150594 - DNA, 22 bp, Artificial Sequence
  Synthetic oligonucleotide; TTA chr11 5184731 5184752 5184736 5184731 -
tcttaatatttttaaagaacct

SEQ ID NO: 150595 - DNA, 22 bp, Artificial Sequence
  Synthetic oligonucleotide; CTT chr11 5184727 5184748 5184732 5184727 -
aatatttttaaagaacctcatt

SEQ ID NO: 150596 - DNA, 22 bp, Artificial Sequence
  Synthetic oligonucleotide; TTA chr11 5184726 5184747 5184731 5184726 -
atatttttaaagaacctcattc

SEQ ID NO: 150597 - DNA, 22 bp, Artificial Sequence
  Synthetic oligonucleotide; TTT chr11 5184720 5184741 5184725 5184720 -
ttaaagaacctcattccaactt

SEQ ID NO: 150598 - DNA, 22 bp, Artificial Sequence
  Synthetic oligonucleotide; TTT chr11 5184719 5184740 5184724 5184719 -
taaagaacctcattccaactta

SEQ ID NO: 150599 - DNA, 22 bp, Artificial Sequence
  Synthetic oligonucleotide; TTT chr11 5184718 5184739 5184723 5184718 -
aaagaacctcattccaacttaa

SEQ ID NO: 150600 - DNA, 22 bp, Artificial Sequence
  Synthetic oligonucleotide; TTA chr11 5184717 5184738 5184722 5184717 -
aagaacctcattccaacttaaa

SEQ ID NO: 150601 - DNA, 22 bp, Artificial Sequence
  Synthetic oligonucleotide; CTC chr11 5184708 5184729 5184713 5184708 -
attccaacttaaagcaagggta

SEQ ID NO: 150602 - DNA, 22 bp, Artificial Sequence
  Synthetic oligonucleotide; TTC chr11 5184704 5184725 5184709 5184704 -
caacttaaagcaagggtaaatt

SEQ ID NO: 150603 - DNA, 22 bp, Artificial Sequence
  Synthetic oligonucleotide; CTT chr11 5184698 5184719 5184703 5184698 -
aaagcaagggtaaattgctcag

SEQ ID NO: 150604 - DNA, 22 bp, Artificial Sequence
  Synthetic oligonucleotide; TTA chr11 5184697 5184718 5184702 5184697 -
aagcaagggtaaattgctcagc

SEQ ID NO: 150605 - DNA, 22 bp, Artificial Sequence
  Synthetic oligonucleotide; TTG chr11 5184681 5184702 5184686 5184681 -
ctcagctgtgtgggtattttaa

SEQ ID NO: 150606 - DNA, 22 bp, Artificial Sequence
  Synthetic oligonucleotide; CTC chr11 5184678 5184699 5184683 5184678 -
agctgtgtgggtattttaaatt

SEQ ID NO: 150607 - DNA, 22 bp, Artificial Sequence
  Synthetic oligonucleotide; CTG chr11 5184673 5184694 5184678 5184673 -
tgtgggtattttaaattctaaa

SEQ ID NO: 150608 - DNA, 22 bp, Artificial Sequence
  Synthetic oligonucleotide; TTT chr11 5184662 5184683 5184667 5184662 -
taaattctaaactgtaactcaa

SEQ ID NO: 150609 - DNA, 22 bp, Artificial Sequence
  Synthetic oligonucleotide; TTT chr11 5184661 5184682 5184666 5184661 -
aaattctaaactgtaactcaaa

SEQ ID NO: 150610 - DNA, 22 bp, Artificial Sequence
  Synthetic oligonucleotide; TTA chr11 5184660 5184681 5184665 5184660 -
aattctaaactgtaactcaaaa

SEQ ID NO: 150611 - DNA, 22 bp, Artificial Sequence
  Synthetic oligonucleotide; TTC chr11 5184655 5184676 5184660 5184655 -
taaactgtaactcaaaaaatgg

SEQ ID NO: 150612 - DNA, 22 bp, Artificial Sequence
  Synthetic oligonucleotide; CTA chr11 5184653 5184674 5184658 5184653 -
aactgtaactcaaaaaatggga

SEQ ID NO: 150613 - DNA, 22 bp, Artificial Sequence
  Synthetic oligonucleotide; CTG chr11 5184648 5184669 5184653 5184648 -
taactcaaaaaatgggacccaa

SEQ ID NO: 150614 - DNA, 22 bp, Artificial Sequence
  Synthetic oligonucleotide; CTC chr11 5184642 5184663 5184647 5184642 -
aaaaaatgggacccaaacattt

SEQ ID NO: 150615 - DNA, 22 bp, Artificial Sequence
  Synthetic oligonucleotide; TTT chr11 5184620 5184641 5184625 5184620 -
ccatcatataaaatttgagacc

SEQ ID NO: 150616 - DNA, 22 bp, Artificial Sequence
  Synthetic oligonucleotide; TTC chr11 5184619 5184640 5184624 5184619 -
catcatataaaatttgagacca

SEQ ID NO: 150617 - DNA, 22 bp, Artificial Sequence
  Synthetic oligonucleotide; TTT chr11 5184604 5184625 5184609 5184604 -
gagaccagaatatttagcactt

SEQ ID NO: 150618 - DNA, 22 bp, Artificial Sequence
  Synthetic oligonucleotide; TTG chr11 5184603 5184624 5184608 5184603 -
agaccagaatatttagcactta

SEQ ID NO: 150619 - DNA, 22 bp, Artificial Sequence
  Synthetic oligonucleotide; TTT chr11 5184589 5184610 5184594 5184589 -
agcacttagcaaaaacaaaagt

SEQ ID NO: 150620 - DNA, 22 bp, Artificial Sequence
  Synthetic oligonucleotide; TTA chr11 5184588 5184609 5184593 5184588 -
gcacttagcaaaaacaaaagta

SEQ ID NO: 150621 - DNA, 22 bp, Artificial Sequence
  Synthetic oligonucleotide; CTT chr11 5184582 5184603 5184587 5184582 -
agcaaaaacaaaagtaaaggta

SEQ ID NO: 150622 - DNA, 22 bp, Artificial Sequence
  Synthetic oligonucleotide; TTA chr11 5184581 5184602 5184586 5184581 -
gcaaaaacaaaagtaaaggtag

SEQ ID NO: 150623 - DNA, 22 bp, Artificial Sequence
  Synthetic oligonucleotide; CTA chr11 5184552 5184573 5184557 5184552 -
tgctatacaatgatcagtatat

SEQ ID NO: 150624 - DNA, 22 bp, Artificial Sequence
  Synthetic oligonucleotide; CTA chr11 5184547 5184568 5184552 5184547 -
tacaatgatcagtatattgaac

SEQ ID NO: 150625 - DNA, 22 bp, Artificial Sequence
  Synthetic oligonucleotide; TTG chr11 5184528 5184549 5184533 5184528 -
aactgtaatggaatcaagagat

SEQ ID NO: 150626 - DNA, 22 bp, Artificial Sequence
  Synthetic oligonucleotide; CTG chr11 5184523 5184544 5184528 5184523 -
taatggaatcaagagatggggg

SEQ ID NO: 150627 - DNA, 22 bp, Artificial Sequence
  Synthetic oligonucleotide; TTT chr11 5184490 5184511 5184495 5184490 -
cttaagcccctgtgccacctca

SEQ ID NO: 150628 - DNA, 22 bp, Artificial Sequence
  Synthetic oligonucleotide; TTC chr11 5184489 5184510 5184494 5184489 -
ttaagcccctgtgccacctcaa

SEQ ID NO: 150629 - DNA, 22 bp, Artificial Sequence
  Synthetic oligonucleotide; CTT chr11 5184487 5184508 5184492 5184487 -
aagcccctgtgccacctcaaaa

SEQ ID NO: 150630 - DNA, 22 bp, Artificial Sequence
  Synthetic oligonucleotide; TTA chr11 5184486 5184507 5184491 5184486 -
agcccctgtgccacctcaaaaa

SEQ ID NO: 150631 - DNA, 22 bp, Artificial Sequence
  Synthetic oligonucleotide; CTG chr11 5184478 5184499 5184483 5184478 -
tgccacctcaaaaaacaagaac

SEQ ID NO: 150632 - DNA, 22 bp, Artificial Sequence
  Synthetic oligonucleotide; CTC chr11 5184469 5184490 5184474 5184469 -
aaaaaacaagaactttagccag

SEQ ID NO: 150633 - DNA, 22 bp, Artificial Sequence
  Synthetic oligonucleotide; CTT chr11 5184454 5184475 5184459 5184454 -
tagccagcttttacttgagaaa

SEQ ID NO: 150634 - DNA, 22 bp, Artificial Sequence
  Synthetic oligonucleotide; TTT chr11 5184453 5184474 5184458 5184453 -
agccagcttttacttgagaaag

SEQ ID NO: 150635 - DNA, 22 bp, Artificial Sequence
  Synthetic oligonucleotide; TTA chr11 5184452 5184473 5184457 5184452 -
gccagcttttacttgagaaagg

SEQ ID NO: 150636 - DNA, 22 bp, Artificial Sequence
  Synthetic oligonucleotide; CTT chr11 5184444 5184465 5184449 5184444 -
ttacttgagaaagggaacttag

SEQ ID NO: 150637 - DNA, 22 bp, Artificial Sequence
  Synthetic oligonucleotide; TTT chr11 5184443 5184464 5184448 5184443 -
tacttgagaaagggaacttaga

SEQ ID NO: 150638 - DNA, 22 bp, Artificial Sequence
  Synthetic oligonucleotide; TTT chr11 5184442 5184463 5184447 5184442 -
acttgagaaagggaacttagag

SEQ ID NO: 150639 - DNA, 22 bp, Artificial Sequence
  Synthetic oligonucleotide; TTA chr11 5184441 5184462 5184446 5184441 -
cttgagaaagggaacttagaga

SEQ ID NO: 150640 - DNA, 22 bp, Artificial Sequence
  Synthetic oligonucleotide; CTT chr11 5184438 5184459 5184443 5184438 -
gagaaagggaacttagagagta

SEQ ID NO: 150641 - DNA, 22 bp, Artificial Sequence
  Synthetic oligonucleotide; TTG chr11 5184437 5184458 5184442 5184437 -
agaaagggaacttagagagtat

SEQ ID NO: 150642 - DNA, 22 bp, Artificial Sequence
  Synthetic oligonucleotide; CTT chr11 5184424 5184445 5184429 5184424 -
agagagtatagaagccacctgt

SEQ ID NO: 150643 - DNA, 22 bp, Artificial Sequence
  Synthetic oligonucleotide; TTA chr11 5184423 5184444 5184428 5184423 -
gagagtatagaagccacctgtc

SEQ ID NO: 150644 - DNA, 22 bp, Artificial Sequence
  Synthetic oligonucleotide; CTG chr11 5184403 5184424 5184408 5184403 -
tcattcacatattattatctat

SEQ ID NO: 150645 - DNA, 22 bp, Artificial Sequence
  Synthetic oligonucleotide; TTC chr11 5184397 5184418 5184402 5184397 -
acatattattatctatgtttat

SEQ ID NO: 150646 - DNA, 22 bp, Artificial Sequence
  Synthetic oligonucleotide; TTA chr11 5184389 5184410 5184394 5184389 -
ttatctatgtttatacccatgc

SEQ ID NO: 150647 - DNA, 22 bp, Artificial Sequence
  Synthetic oligonucleotide; TTA chr11 5184386 5184407 5184391 5184386 -
tctatgtttatacccatgcatc

SEQ ID NO: 150648 - DNA, 22 bp, Artificial Sequence
  Synthetic oligonucleotide; CTA chr11 5184382 5184403 5184387 5184382 -
tgtttatacccatgcatctatc

SEQ ID NO: 150649 - DNA, 22 bp, Artificial Sequence
  Synthetic oligonucleotide; TTT chr11 5184377 5184398 5184382 5184377 -
atacccatgcatctatctatct

SEQ ID NO: 150650 - DNA, 22 bp, Artificial Sequence
  Synthetic oligonucleotide; TTA chr11 5184376 5184397 5184381 5184376 -
tacccatgcatctatctatcta

SEQ ID NO: 150651 - DNA, 22 bp, Artificial Sequence
  Synthetic oligonucleotide; CTA chr11 5184362 5184383 5184367 5184362 -
tctatctatctatctatctatc

SEQ ID NO: 150652 - DNA, 22 bp, Artificial Sequence
  Synthetic oligonucleotide; CTA chr11 5184358 5184379 5184363 5184358 -
tctatctatctatctatctatc

SEQ ID NO: 150653 - DNA, 22 bp, Artificial Sequence
  Synthetic oligonucleotide; CTA chr11 5184354 5184375 5184359 5184354 -
tctatctatctatctatctatc

SEQ ID NO: 150654 - DNA, 22 bp, Artificial Sequence
  Synthetic oligonucleotide; CTA chr11 5184350 5184371 5184355 5184350 -
tctatctatctatctatctatc

SEQ ID NO: 150655 - DNA, 22 bp, Artificial Sequence
  Synthetic oligonucleotide; CTA chr11 5184346 5184367 5184351 5184346 -
tctatctatctatctatctatc

SEQ ID NO: 150656 - DNA, 22 bp, Artificial Sequence
  Synthetic oligonucleotide; CTA chr11 5184342 5184363 5184347 5184342 -
tctatctatctatctatctatc

SEQ ID NO: 150657 - DNA, 22 bp, Artificial Sequence
  Synthetic oligonucleotide; CTA chr11 5184338 5184359 5184343 5184338 -
tctatctatctatctatctatc

SEQ ID NO: 150658 - DNA, 22 bp, Artificial Sequence
  Synthetic oligonucleotide; CTA chr11 5184334 5184355 5184339 5184334 -
tctatctatctatctatctttc

SEQ ID NO: 150659 - DNA, 22 bp, Artificial Sequence
  Synthetic oligonucleotide; CTA chr11 5184330 5184351 5184335 5184330 -
tctatctatctatctttctagc

SEQ ID NO: 150660 - DNA, 22 bp, Artificial Sequence
  Synthetic oligonucleotide; CTA chr11 5184326 5184347 5184331 5184326 -
tctatctatctttctagctagc

SEQ ID NO: 150661 - DNA, 22 bp, Artificial Sequence
  Synthetic oligonucleotide; CTA chr11 5184322 5184343 5184327 5184322 -
tctatctttctagctagctagc

SEQ ID NO: 150662 - DNA, 22 bp, Artificial Sequence
  Synthetic oligonucleotide; CTA chr11 5184318 5184339 5184323 5184318 -
tctttctagctagctagctagc

SEQ ID NO: 150663 - DNA, 22 bp, Artificial Sequence
  Synthetic oligonucleotide; CTT chr11 5184314 5184335 5184319 5184314 -
tctagctagctagctagctagc

SEQ ID NO: 150664 - DNA, 22 bp, Artificial Sequence
  Synthetic oligonucleotide; TTT chr11 5184313 5184334 5184318 5184313 -
ctagctagctagctagctagct

SEQ ID NO: 150665 - DNA, 22 bp, Artificial Sequence
  Synthetic oligonucleotide; TTC chr11 5184312 5184333 5184317 5184312 -
tagctagctagctagctagcta

SEQ ID NO: 150666 - DNA, 22 bp, Artificial Sequence
  Synthetic oligonucleotide; CTA chr11 5184310 5184331 5184315 5184310 -
gctagctagctagctagctagc

SEQ ID NO: 150667 - DNA, 22 bp, Artificial Sequence
  Synthetic oligonucleotide; CTA chr11 5184306 5184327 5184311 5184306 -
gctagctagctagctagctagc

SEQ ID NO: 150668 - DNA, 22 bp, Artificial Sequence
  Synthetic oligonucleotide; CTA chr11 5184302 5184323 5184307 5184302 -
gctagctagctagctagctatc

SEQ ID NO: 150669 - DNA, 22 bp, Artificial Sequence
  Synthetic oligonucleotide; CTA chr11 5184298 5184319 5184303 5184298 -
gctagctagctagctatctacc

SEQ ID NO: 150670 - DNA, 22 bp, Artificial Sequence
  Synthetic oligonucleotide; CTA chr11 5184294 5184315 5184299 5184294 -
gctagctagctatctacctatc

SEQ ID NO: 150671 - DNA, 22 bp, Artificial Sequence
  Synthetic oligonucleotide; CTA chr11 5184290 5184311 5184295 5184290 -
gctagctatctacctatctaat

SEQ ID NO: 150672 - DNA, 22 bp, Artificial Sequence
  Synthetic oligonucleotide; CTA chr11 5184286 5184307 5184291 5184286 -
gctatctacctatctaatctat

SEQ ID NO: 150673 - DNA, 22 bp, Artificial Sequence
  Synthetic oligonucleotide; CTA chr11 5184282 5184303 5184287 5184282 -
tctacctatctaatctatctct

SEQ ID NO: 150674 - DNA, 22 bp, Artificial Sequence
  Synthetic oligonucleotide; CTA chr11 5184278 5184299 5184283 5184278 -
cctatctaatctatctctgtat

SEQ ID NO: 150675 - DNA, 22 bp, Artificial Sequence
  Synthetic oligonucleotide; CTA chr11 5184274 5184295 5184279 5184274 -
tctaatctatctctgtatatgt

SEQ ID NO: 150676 - DNA, 22 bp, Artificial Sequence
  Synthetic oligonucleotide; CTA chr11 5184270 5184291 5184275 5184270 -
atctatctctgtatatgtcacc

SEQ ID NO: 150677 - DNA, 22 bp, Artificial Sequence
  Synthetic oligonucleotide; CTA chr11 5184265 5184286 5184270 5184265 -
tctctgtatatgtcacctaccc

SEQ ID NO: 150678 - DNA, 22 bp, Artificial Sequence
  Synthetic oligonucleotide; CTC chr11 5184261 5184282 5184266 5184261 -
tgtatatgtcacctaccctggt

SEQ ID NO: 150679 - DNA, 22 bp, Artificial Sequence
  Synthetic oligonucleotide; CTG chr11 5184259 5184280 5184264 5184259 -
tatatgtcacctaccctggtgt

SEQ ID NO: 150680 - DNA, 22 bp, Artificial Sequence
  Synthetic oligonucleotide; CTA chr11 5184246 5184267 5184251 5184246 -
ccctggtgttgcatctcctaat

SEQ ID NO: 150681 - DNA, 22 bp, Artificial Sequence
  Synthetic oligonucleotide; CTG chr11 5184241 5184262 5184246 5184241 -
gtgttgcatctcctaatcttat

SEQ ID NO: 150682 - DNA, 22 bp, Artificial Sequence
  Synthetic oligonucleotide; TTG chr11 5184235 5184256 5184240 5184235 -
catctcctaatcttattttcca

SEQ ID NO: 150683 - DNA, 22 bp, Artificial Sequence
  Synthetic oligonucleotide; CTC chr11 5184229 5184250 5184234 5184229 -
ctaatcttattttccactcaat

SEQ ID NO: 150684 - DNA, 22 bp, Artificial Sequence
  Synthetic oligonucleotide; CTA chr11 5184226 5184247 5184231 5184226 -
atcttattttccactcaatatt

SEQ ID NO: 150685 - DNA, 22 bp, Artificial Sequence
  Synthetic oligonucleotide; CTT chr11 5184221 5184242 5184226 5184221 -
attttccactcaatattaaact

SEQ ID NO: 150686 - DNA, 22 bp, Artificial Sequence
  Synthetic oligonucleotide; TTA chr11 5184220 5184241 5184225 5184220 -
ttttccactcaatattaaactt

SEQ ID NO: 150687 - DNA, 22 bp, Artificial Sequence
  Synthetic oligonucleotide; TTT chr11 5184217 5184238 5184222 5184217 -
tccactcaatattaaacttgct

SEQ ID NO: 150688 - DNA, 22 bp, Artificial Sequence
  Synthetic oligonucleotide; TTT chr11 5184216 5184237 5184221 5184216 -
ccactcaatattaaacttgctt

SEQ ID NO: 150689 - DNA, 22 bp, Artificial Sequence
  Synthetic oligonucleotide; TTC chr11 5184215 5184236 5184220 5184215 -
cactcaatattaaacttgcttc

SEQ ID NO: 150690 - DNA, 22 bp, Artificial Sequence
  Synthetic oligonucleotide; CTC chr11 5184210 5184231 5184215 5184210 -
aatattaaacttgcttctatcc

SEQ ID NO: 150691 - DNA, 22 bp, Artificial Sequence
  Synthetic oligonucleotide; TTA chr11 5184203 5184224 5184208 5184203 -
aacttgcttctatccacatttt

SEQ ID NO: 150692 - DNA, 22 bp, Artificial Sequence
  Synthetic oligonucleotide; CTT chr11 5184198 5184219 5184203 5184198 -
gcttctatccacattttttaga

SEQ ID NO: 150693 - DNA, 22 bp, Artificial Sequence
  Synthetic oligonucleotide; TTG chr11 5184197 5184218 5184202 5184197 -
cttctatccacattttttagaa

SEQ ID NO: 150694 - DNA, 22 bp, Artificial Sequence
  Synthetic oligonucleotide; CTT chr11 5184194 5184215 5184199 5184194 -
ctatccacattttttagaacta

SEQ ID NO: 150695 - DNA, 22 bp, Artificial Sequence
  Synthetic oligonucleotide; TTC chr11 5184193 5184214 5184198 5184193 -
tatccacattttttagaactag

SEQ ID NO: 150696 - DNA, 22 bp, Artificial Sequence
  Synthetic oligonucleotide; CTA chr11 5184191 5184212 5184196 5184191 -
tccacattttttagaactagta

SEQ ID NO: 150697 - DNA, 22 bp, Artificial Sequence
  Synthetic oligonucleotide; TTT chr11 5184182 5184203 5184187 5184182 -
tttagaactagtaattagtaat

SEQ ID NO: 150698 - DNA, 22 bp, Artificial Sequence
  Synthetic oligonucleotide; TTT chr11 5184181 5184202 5184186 5184181 -
ttagaactagtaattagtaata

SEQ ID NO: 150699 - DNA, 22 bp, Artificial Sequence
  Synthetic oligonucleotide; TTT chr11 5184180 5184201 5184185 5184180 -
tagaactagtaattagtaataa

SEQ ID NO: 150700 - DNA, 22 bp, Artificial Sequence
  Synthetic oligonucleotide; TTT chr11 5184179 5184200 5184184 5184179 -
agaactagtaattagtaataac

SEQ ID NO: 150701 - DNA, 22 bp, Artificial Sequence
  Synthetic oligonucleotide; TTA chr11 5184178 5184199 5184183 5184178 -
gaactagtaattagtaataaca

SEQ ID NO: 150702 - DNA, 22 bp, Artificial Sequence
  Synthetic oligonucleotide; CTA chr11 5184172 5184193 5184177 5184172 -
gtaattagtaataacaagtaat

SEQ ID NO: 150703 - DNA, 22 bp, Artificial Sequence
  Synthetic oligonucleotide; TTA chr11 5184165 5184186 5184170 5184165 -
gtaataacaagtaatatattga

SEQ ID NO: 150704 - DNA, 22 bp, Artificial Sequence
  Synthetic oligonucleotide; TTG chr11 5184144 5184165 5184149 5184144 -
aagtaatatagactcctgtttt

SEQ ID NO: 150705 - DNA, 22 bp, Artificial Sequence
  Synthetic oligonucleotide; CTC chr11 5184129 5184150 5184134 5184129 -
ctgttttataatgtgaaaacat

SEQ ID NO: 150706 - DNA, 22 bp, Artificial Sequence
  Synthetic oligonucleotide; CTG chr11 5184126 5184147 5184131 5184126 -
ttttataatgtgaaaacattaa

SEQ ID NO: 150707 - DNA, 22 bp, Artificial Sequence
  Synthetic oligonucleotide; TTT chr11 5184123 5184144 5184128 5184123 -
tataatgtgaaaacattaaatt

SEQ ID NO: 150708 - DNA, 22 bp, Artificial Sequence
  Synthetic oligonucleotide; TTT chr11 5184122 5184143 5184127 5184122 -
ataatgtgaaaacattaaatta

SEQ ID NO: 150709 - DNA, 22 bp, Artificial Sequence
  Synthetic oligonucleotide; TTA chr11 5184121 5184142 5184126 5184121 -
taatgtgaaaacattaaattac

SEQ ID NO: 150710 - DNA, 22 bp, Artificial Sequence
  Synthetic oligonucleotide; TTA chr11 5184105 5184126 5184110 5184105 -
aattacttgctgctgtggtggt

SEQ ID NO: 150711 - DNA, 22 bp, Artificial Sequence
  Synthetic oligonucleotide; TTA chr11 5184100 5184121 5184105 5184100 -
cttgctgctgtggtggtactta

SEQ ID NO: 150712 - DNA, 22 bp, Artificial Sequence
  Synthetic oligonucleotide; CTT chr11 5184097 5184118 5184102 5184097 -
gctgctgtggtggtacttagat

SEQ ID NO: 150713 - DNA, 22 bp, Artificial Sequence
  Synthetic oligonucleotide; TTG chr11 5184096 5184117 5184101 5184096 -
ctgctgtggtggtacttagata

SEQ ID NO: 150714 - DNA, 22 bp, Artificial Sequence
  Synthetic oligonucleotide; CTG chr11 5184093 5184114 5184098 5184093 -
ctgtggtggtacttagatatac

SEQ ID NO: 150715 - DNA, 22 bp, Artificial Sequence
  Synthetic oligonucleotide; CTG chr11 5184090 5184111 5184095 5184090 -
tggtggtacttagatatacaat

SEQ ID NO: 150716 - DNA, 22 bp, Artificial Sequence
  Synthetic oligonucleotide; CTT chr11 5184079 5184100 5184084 5184079 -
agatatacaatgtgtaaactat

SEQ ID NO: 150717 - DNA, 22 bp, Artificial Sequence
  Synthetic oligonucleotide; TTA chr11 5184078 5184099 5184083 5184078 -
gatatacaatgtgtaaactatt

SEQ ID NO: 150718 - DNA, 22 bp, Artificial Sequence
  Synthetic oligonucleotide; CTA chr11 5184058 5184079 5184063 5184058 -
ttaattattgtctcaatttcag

SEQ ID NO: 150719 - DNA, 22 bp, Artificial Sequence
  Synthetic oligonucleotide; TTA chr11 5184055 5184076 5184060 5184055 -
attattgtctcaatttcagagc

SEQ ID NO: 150720 - DNA, 22 bp, Artificial Sequence
  Synthetic oligonucleotide; TTA chr11 5184051 5184072 5184056 5184051 -
ttgtctcaatttcagagcctat

SEQ ID NO: 150721 - DNA, 22 bp, Artificial Sequence
  Synthetic oligonucleotide; TTG chr11 5184048 5184069 5184053 5184048 -
tctcaatttcagagcctattat

SEQ ID NO: 150722 - DNA, 22 bp, Artificial Sequence
  Synthetic oligonucleotide; CTC chr11 5184044 5184065 5184049 5184044 -
aatttcagagcctattatttgt

SEQ ID NO: 150723 - DNA, 22 bp, Artificial Sequence
  Synthetic oligonucleotide; TTT chr11 5184039 5184060 5184044 5184039 -
cagagcctattatttgtctatt

SEQ ID NO: 150724 - DNA, 22 bp, Artificial Sequence
  Synthetic oligonucleotide; TTC chr11 5184038 5184059 5184043 5184038 -
agagcctattatttgtctatta

SEQ ID NO: 150725 - DNA, 22 bp, Artificial Sequence
  Synthetic oligonucleotide; CTA chr11 5184030 5184051 5184035 5184030 -
ttatttgtctattaagagattc

SEQ ID NO: 150726 - DNA, 22 bp, Artificial Sequence
  Synthetic oligonucleotide; TTA chr11 5184027 5184048 5184032 5184027 -
tttgtctattaagagattcaat

SEQ ID NO: 150727 - DNA, 22 bp, Artificial Sequence
  Synthetic oligonucleotide; TTT chr11 5184024 5184045 5184029 5184024 -
gtctattaagagattcaatttc

SEQ ID NO: 150728 - DNA, 22 bp, Artificial Sequence
  Synthetic oligonucleotide; TTG chr11 5184023 5184044 5184028 5184023 -
tctattaagagattcaatttct

SEQ ID NO: 150729 - DNA, 22 bp, Artificial Sequence
  Synthetic oligonucleotide; CTA chr11 5184019 5184040 5184024 5184019 -
ttaagagattcaatttctccct

SEQ ID NO: 150730 - DNA, 22 bp, Artificial Sequence
  Synthetic oligonucleotide; TTA chr11 5184016 5184037 5184021 5184016 -
agagattcaatttctccctggt

SEQ ID NO: 150731 - DNA, 22 bp, Artificial Sequence
  Synthetic oligonucleotide; TTC chr11 5184008 5184029 5184013 5184008 -
aatttctccctggtttagtctt

SEQ ID NO: 150732 - DNA, 22 bp, Artificial Sequence
  Synthetic oligonucleotide; TTT chr11 5184003 5184024 5184008 5184003 -
ctccctggtttagtcttgggag

SEQ ID NO: 150733 - DNA, 22 bp, Artificial Sequence
  Synthetic oligonucleotide; TTC chr11 5184002 5184023 5184007 5184002 -
tccctggtttagtcttgggagg

SEQ ID NO: 150734 - DNA, 22 bp, Artificial Sequence
  Synthetic oligonucleotide; CTC chr11 5184000 5184021 5184005 5184000 -
cctggtttagtcttgggagggt

SEQ ID NO: 150735 - DNA, 22 bp, Artificial Sequence
  Synthetic oligonucleotide; CTG chr11 5183996 5184017 5184001 5183996 -
gtttagtcttgggagggtgtat

SEQ ID NO: 150736 - DNA, 22 bp, Artificial Sequence
  Synthetic oligonucleotide; TTT chr11 5183992 5184013 5183997 5183992 -
agtcttgggagggtgtatgtgt

SEQ ID NO: 150737 - DNA, 22 bp, Artificial Sequence
  Synthetic oligonucleotide; TTA chr11 5183991 5184012 5183996 5183991 -
gtcttgggagggtgtatgtgtc

SEQ ID NO: 150738 - DNA, 22 bp, Artificial Sequence
  Synthetic oligonucleotide; CTT chr11 5183986 5184007 5183991 5183986 -
gggagggtgtatgtgtcgagga

SEQ ID NO: 150739 - DNA, 22 bp, Artificial Sequence
  Synthetic oligonucleotide; TTG chr11 5183985 5184006 5183990 5183985 -
ggagggtgtatgtgtcgaggaa

SEQ ID NO: 150740 - DNA, 22 bp, Artificial Sequence
  Synthetic oligonucleotide; TTT chr11 5183960 5183981 5183965 5183960 -
atccatttctactagattttct

SEQ ID NO: 150741 - DNA, 22 bp, Artificial Sequence
  Synthetic oligonucleotide; TTA chr11 5183959 5183980 5183964 5183959 -
tccatttctactagattttcta

SEQ ID NO: 150742 - DNA, 22 bp, Artificial Sequence
  Synthetic oligonucleotide; TTT chr11 5183952 5183973 5183957 5183952 -
ctactagattttctagtttatt

SEQ ID NO: 150743 - DNA, 22 bp, Artificial Sequence
  Synthetic oligonucleotide; TTC chr11 5183951 5183972 5183956 5183951 -
tactagattttctagtttattt

SEQ ID NO: 150744 - DNA, 22 bp, Artificial Sequence
  Synthetic oligonucleotide; CTA chr11 5183949 5183970 5183954 5183949 -
ctagattttctagtttatttgc

SEQ ID NO: 150745 - DNA, 22 bp, Artificial Sequence
  Synthetic oligonucleotide; CTA chr11 5183946 5183967 5183951 5183946 -
gattttctagtttatttgcgta

SEQ ID NO: 150746 - DNA, 22 bp, Artificial Sequence
  Synthetic oligonucleotide; TTT chr11 5183941 5183962 5183946 5183941 -
tctagtttatttgcgtagaggt

SEQ ID NO: 150747 - DNA, 22 bp, Artificial Sequence
  Synthetic oligonucleotide; TTT chr11 5183940 5183961 5183945 5183940 -
ctagtttatttgcgtagaggtg

SEQ ID NO: 150748 - DNA, 22 bp, Artificial Sequence
  Synthetic oligonucleotide; TTC chr11 5183939 5183960 5183944 5183939 -
tagtttatttgcgtagaggtgt

SEQ ID NO: 150749 - DNA, 22 bp, Artificial Sequence
  Synthetic oligonucleotide; CTA chr11 5183937 5183958 5183942 5183937 -
gtttatttgcgtagaggtgttt

SEQ ID NO: 150750 - DNA, 22 bp, Artificial Sequence
  Synthetic oligonucleotide; TTT chr11 5183933 5183954 5183938 5183933 -
atttgcgtagaggtgtttatag

SEQ ID NO: 150751 - DNA, 22 bp, Artificial Sequence
  Synthetic oligonucleotide; TTA chr11 5183932 5183953 5183937 5183932 -
tttgcgtagaggtgtttatagt

SEQ ID NO: 150752 - DNA, 22 bp, Artificial Sequence
  Synthetic oligonucleotide; TTT chr11 5183929 5183950 5183934 5183929 -
gcgtagaggtgtttatagtatt

SEQ ID NO: 150753 - DNA, 22 bp, Artificial Sequence
  Synthetic oligonucleotide; TTG chr11 5183928 5183949 5183933 5183928 -
cgtagaggtgtttatagtattc

SEQ ID NO: 150754 - DNA, 22 bp, Artificial Sequence
  Synthetic oligonucleotide; TTT chr11 5183915 5183936 5183920 5183915 -
atagtattctctgatggtagtt

SEQ ID NO: 150755 - DNA, 22 bp, Artificial Sequence
  Synthetic oligonucleotide; TTA chr11 5183914 5183935 5183919 5183914 -
tagtattctctgatggtagttt

SEQ ID NO: 150756 - DNA, 22 bp, Artificial Sequence
  Synthetic oligonucleotide; TTC chr11 5183906 5183927 5183911 5183906 -
tctgatggtagtttgtatgtct

SEQ ID NO: 150757 - DNA, 22 bp, Artificial Sequence
  Synthetic oligonucleotide; CTC chr11 5183904 5183925 5183909 5183904 -
tgatggtagtttgtatgtctgt

SEQ ID NO: 150758 - DNA, 22 bp, Artificial Sequence
  Synthetic oligonucleotide; CTG chr11 5183902 5183923 5183907 5183902 -
atggtagtttgtatgtctgtgg

SEQ ID NO: 150759 - DNA, 22 bp, Artificial Sequence
  Synthetic oligonucleotide; TTT chr11 5183892 5183913 5183897 5183892 -
gtatgtctgtgggattggtggt

SEQ ID NO: 150760 - DNA, 22 bp, Artificial Sequence
  Synthetic oligonucleotide; TTG chr11 5183891 5183912 5183896 5183891 -
tatgtctgtgggattggtggtg

SEQ ID NO: 150761 - DNA, 22 bp, Artificial Sequence
  Synthetic oligonucleotide; CTG chr11 5183883 5183904 5183888 5183883 -
tgggattggtggtgatatcccc

SEQ ID NO: 150762 - DNA, 22 bp, Artificial Sequence
  Synthetic oligonucleotide; TTG chr11 5183875 5183896 5183880 5183875 -
gtggtgatatcccctttatcat

SEQ ID NO: 150763 - DNA, 22 bp, Artificial Sequence
  Synthetic oligonucleotide; CTT chr11 5183859 5183880 5183864 5183859 -
tatcatttcttattgcatctat

SEQ ID NO: 150764 - DNA, 22 bp, Artificial Sequence
  Synthetic oligonucleotide; TTT chr11 5183858 5183879 5183863 5183858 -
atcatttcttattgcatctatt

SEQ ID NO: 150765 - DNA, 22 bp, Artificial Sequence
  Synthetic oligonucleotide; TTA chr11 5183857 5183878 5183862 5183857 -
tcatttcttattgcatctattt

SEQ ID NO: 150766 - DNA, 22 bp, Artificial Sequence
  Synthetic oligonucleotide; TTT chr11 5183851 5183872 5183856 5183851 -
cttattgcatctatttgagtct

SEQ ID NO: 150767 - DNA, 22 bp, Artificial Sequence
  Synthetic oligonucleotide; TTC chr11 5183850 5183871 5183855 5183850 -
ttattgcatctatttgagtctt

SEQ ID NO: 150768 - DNA, 22 bp, Artificial Sequence
  Synthetic oligonucleotide; CTT chr11 5183848 5183869 5183853 5183848 -
attgcatctatttgagtcttct

SEQ ID NO: 150769 - DNA, 22 bp, Artificial Sequence
  Synthetic oligonucleotide; TTA chr11 5183847 5183868 5183852 5183847 -
ttgcatctatttgagtcttctc

SEQ ID NO: 150770 - DNA, 22 bp, Artificial Sequence
  Synthetic oligonucleotide; TTG chr11 5183844 5183865 5183849 5183844 -
catctatttgagtcttctctct

SEQ ID NO: 150771 - DNA, 22 bp, Artificial Sequence
  Synthetic oligonucleotide; CTA chr11 5183838 5183859 5183843 5183838 -
tttgagtcttctctcttttctt

SEQ ID NO: 150772 - DNA, 22 bp, Artificial Sequence
  Synthetic oligonucleotide; TTT chr11 5183835 5183856 5183840 5183835 -
gagtcttctctcttttcttctt

SEQ ID NO: 150773 - DNA, 22 bp, Artificial Sequence
  Synthetic oligonucleotide; TTG chr11 5183834 5183855 5183839 5183834 -
agtcttctctcttttcttcttt

SEQ ID NO: 150774 - DNA, 22 bp, Artificial Sequence
  Synthetic oligonucleotide; CTT chr11 5183828 5183849 5183833 5183828 -
ctctcttttcttctttattagt

SEQ ID NO: 150775 - DNA, 22 bp, Artificial Sequence
  Synthetic oligonucleotide; TTC chr11 5183827 5183848 5183832 5183827 -
tctcttttcttctttattagtc

SEQ ID NO: 150776 - DNA, 22 bp, Artificial Sequence
  Synthetic oligonucleotide; CTC chr11 5183825 5183846 5183830 5183825 -
tcttttcttctttattagtctt

SEQ ID NO: 150777 - DNA, 22 bp, Artificial Sequence
  Synthetic oligonucleotide; CTC chr11 5183823 5183844 5183828 5183823 -
ttttcttctttattagtcttgc

SEQ ID NO: 150778 - DNA, 22 bp, Artificial Sequence
  Synthetic oligonucleotide; CTT chr11 5183821 5183842 5183826 5183821 -
ttcttctttattagtcttgcta

SEQ ID NO: 150779 - DNA, 22 bp, Artificial Sequence
  Synthetic oligonucleotide; TTT chr11 5183820 5183841 5183825 5183820 -
tcttctttattagtcttgctag

SEQ ID NO: 150780 - DNA, 22 bp, Artificial Sequence
  Synthetic oligonucleotide; TTT chr11 5183819 5183840 5183824 5183819 -
cttctttattagtcttgctagc

SEQ ID NO: 150781 - DNA, 22 bp, Artificial Sequence
  Synthetic oligonucleotide; TTC chr11 5183818 5183839 5183823 5183818 -
ttctttattagtcttgctagca

SEQ ID NO: 150782 - DNA, 22 bp, Artificial Sequence
  Synthetic oligonucleotide; CTT chr11 5183816 5183837 5183821 5183816 -
ctttattagtcttgctagcagt

SEQ ID NO: 150783 - DNA, 22 bp, Artificial Sequence
  Synthetic oligonucleotide; TTC chr11 5183815 5183836 5183820 5183815 -
tttattagtcttgctagcagtc

SEQ ID NO: 150784 - DNA, 22 bp, Artificial Sequence
  Synthetic oligonucleotide; CTT chr11 5183813 5183834 5183818 5183813 -
tattagtcttgctagcagtcta

SEQ ID NO: 150785 - DNA, 22 bp, Artificial Sequence
  Synthetic oligonucleotide; TTT chr11 5183812 5183833 5183817 5183812 -
attagtcttgctagcagtctat

SEQ ID NO: 150786 - DNA, 22 bp, Artificial Sequence
  Synthetic oligonucleotide; TTA chr11 5183811 5183832 5183816 5183811 -
ttagtcttgctagcagtctatc

SEQ ID NO: 150787 - DNA, 22 bp, Artificial Sequence
  Synthetic oligonucleotide; TTA chr11 5183808 5183829 5183813 5183808 -
gtcttgctagcagtctatcaat

SEQ ID NO: 150788 - DNA, 22 bp, Artificial Sequence
  Synthetic oligonucleotide; CTT chr11 5183803 5183824 5183808 5183803 -
gctagcagtctatcaattttgt

SEQ ID NO: 150789 - DNA, 22 bp, Artificial Sequence
  Synthetic oligonucleotide; TTG chr11 5183802 5183823 5183807 5183802 -
ctagcagtctatcaattttgtt

SEQ ID NO: 150790 - DNA, 22 bp, Artificial Sequence
  Synthetic oligonucleotide; CTA chr11 5183799 5183820 5183804 5183799 -
gcagtctatcaattttgttgat

SEQ ID NO: 150791 - DNA, 22 bp, Artificial Sequence
  Synthetic oligonucleotide; CTA chr11 5183791 5183812 5183796 5183791 -
tcaattttgttgatcttttcaa

SEQ ID NO: 150792 - DNA, 22 bp, Artificial Sequence
  Synthetic oligonucleotide; TTT chr11 5183784 5183805 5183789 5183784 -
tgttgatcttttcaaaaaacca

SEQ ID NO: 150793 - DNA, 22 bp, Artificial Sequence
  Synthetic oligonucleotide; TTT chr11 5183783 5183804 5183788 5183783 -
gttgatcttttcaaaaaaccag

SEQ ID NO: 150794 - DNA, 22 bp, Artificial Sequence
  Synthetic oligonucleotide; TTG chr11 5183782 5183803 5183787 5183782 -
ttgatcttttcaaaaaaccagc

SEQ ID NO: 150795 - DNA, 22 bp, Artificial Sequence
  Synthetic oligonucleotide; TTG chr11 5183779 5183800 5183784 5183779 -
atcttttcaaaaaaccagctcc

SEQ ID NO: 150796 - DNA, 22 bp, Artificial Sequence
  Synthetic oligonucleotide; CTT chr11 5183774 5183795 5183779 5183774 -
ttcaaaaaaccagctcctggat

SEQ ID NO: 150797 - DNA, 22 bp, Artificial Sequence
  Synthetic oligonucleotide; TTT chr11 5183773 5183794 5183778 5183773 -
tcaaaaaaccagctcctggatt

SEQ ID NO: 150798 - DNA, 22 bp, Artificial Sequence
  Synthetic oligonucleotide; TTT chr11 5183772 5183793 5183777 5183772 -
caaaaaaccagctcctggattc

SEQ ID NO: 150799 - DNA, 22 bp, Artificial Sequence
  Synthetic oligonucleotide; TTC chr11 5183771 5183792 5183776 5183771 -
aaaaaaccagctcctggattca

SEQ ID NO: 150800 - DNA, 22 bp, Artificial Sequence
  Synthetic oligonucleotide; CTC chr11 5183758 5183779 5183763 5183758 -
ctggattcattgatttttttaa

SEQ ID NO: 150801 - DNA, 22 bp, Artificial Sequence
  Synthetic oligonucleotide; CTG chr11 5183755 5183776 5183760 5183755 -
gattcattgatttttttaaggg

SEQ ID NO: 150802 - DNA, 22 bp, Artificial Sequence
  Synthetic oligonucleotide; TTC chr11 5183750 5183771 5183755 5183750 -
attgatttttttaagggttttt

SEQ ID NO: 150803 - DNA, 22 bp, Artificial Sequence
  Synthetic oligonucleotide; TTG chr11 5183746 5183767 5183751 5183746 -
atttttttaagggttttttgtg

SEQ ID NO: 150804 - DNA, 22 bp, Artificial Sequence
  Synthetic oligonucleotide; TTT chr11 5183742 5183763 5183747 5183742 -
ttttaagggttttttgtgtctc

SEQ ID NO: 150805 - DNA, 22 bp, Artificial Sequence
  Synthetic oligonucleotide; TTT chr11 5183741 5183762 5183746 5183741 -
tttaagggttttttgtgtctca

SEQ ID NO: 150806 - DNA, 22 bp, Artificial Sequence
  Synthetic oligonucleotide; TTT chr11 5183740 5183761 5183745 5183740 -
ttaagggttttttgtgtctcaa

SEQ ID NO: 150807 - DNA, 22 bp, Artificial Sequence
  Synthetic oligonucleotide; TTT chr11 5183739 5183760 5183744 5183739 -
taagggttttttgtgtctcaat

SEQ ID NO: 150808 - DNA, 22 bp, Artificial Sequence
  Synthetic oligonucleotide; TTT chr11 5183738 5183759 5183743 5183738 -
aagggttttttgtgtctcaatc

SEQ ID NO: 150809 - DNA, 22 bp, Artificial Sequence
  Synthetic oligonucleotide; TTA chr11 5183737 5183758 5183742 5183737 -
agggttttttgtgtctcaatct

SEQ ID NO: 150810 - DNA, 22 bp, Artificial Sequence
  Synthetic oligonucleotide; TTT chr11 5183730 5183751 5183735 5183730 -
tttgtgtctcaatctccttcac

SEQ ID NO: 150811 - DNA, 22 bp, Artificial Sequence
  Synthetic oligonucleotide; TTT chr11 5183729 5183750 5183734 5183729 -
ttgtgtctcaatctccttcact

SEQ ID NO: 150812 - DNA, 22 bp, Artificial Sequence
  Synthetic oligonucleotide; TTT chr11 5183728 5183749 5183733 5183728 -
tgtgtctcaatctccttcactt

SEQ ID NO: 150813 - DNA, 22 bp, Artificial Sequence
  Synthetic oligonucleotide; TTT chr11 5183727 5183748 5183732 5183727 -
gtgtctcaatctccttcacttc

SEQ ID NO: 150814 - DNA, 22 bp, Artificial Sequence
  Synthetic oligonucleotide; TTG chr11 5183726 5183747 5183731 5183726 -
tgtctcaatctccttcacttct

SEQ ID NO: 150815 - DNA, 22 bp, Artificial Sequence
  Synthetic oligonucleotide; CTC chr11 5183720 5183741 5183725 5183720 -
aatctccttcacttctgctctg

SEQ ID NO: 150816 - DNA, 22 bp, Artificial Sequence
  Synthetic oligonucleotide; CTC chr11 5183714 5183735 5183719 5183714 -
cttcacttctgctctgatctta

SEQ ID NO: 150817 - DNA, 22 bp, Artificial Sequence
  Synthetic oligonucleotide; CTT chr11 5183711 5183732 5183716 5183711 -
cacttctgctctgatcttactt

SEQ ID NO: 150818 - DNA, 22 bp, Artificial Sequence
  Synthetic oligonucleotide; TTC chr11 5183710 5183731 5183715 5183710 -
acttctgctctgatcttactta

SEQ ID NO: 150819 - DNA, 22 bp, Artificial Sequence
  Synthetic oligonucleotide; CTT chr11 5183706 5183727 5183711 5183706 -
ctgctctgatcttacttatttc

SEQ ID NO: 150820 - DNA, 22 bp, Artificial Sequence
  Synthetic oligonucleotide; TTC chr11 5183705 5183726 5183710 5183705 -
tgctctgatcttacttatttct

SEQ ID NO: 150821 - DNA, 22 bp, Artificial Sequence
  Synthetic oligonucleotide; CTG chr11 5183703 5183724 5183708 5183703 -
ctctgatcttacttatttcttg

SEQ ID NO: 150822 - DNA, 22 bp, Artificial Sequence
  Synthetic oligonucleotide; CTC chr11 5183700 5183721 5183705 5183700 -
tgatcttacttatttcttgcct

SEQ ID NO: 150823 - DNA, 22 bp, Artificial Sequence
  Synthetic oligonucleotide; CTG chr11 5183698 5183719 5183703 5183698 -
atcttacttatttcttgccttc

SEQ ID NO: 150824 - DNA, 22 bp, Artificial Sequence
  Synthetic oligonucleotide; CTT chr11 5183693 5183714 5183698 5183693 -
acttatttcttgccttccgcta

SEQ ID NO: 150825 - DNA, 22 bp, Artificial Sequence
  Synthetic oligonucleotide; TTA chr11 5183692 5183713 5183697 5183692 -
cttatttcttgccttccgctag

SEQ ID NO: 150826 - DNA, 22 bp, Artificial Sequence
  Synthetic oligonucleotide; CTT chr11 5183689 5183710 5183694 5183689 -
atttcttgccttccgctagctt

SEQ ID NO: 150827 - DNA, 22 bp, Artificial Sequence
  Synthetic oligonucleotide; TTA chr11 5183688 5183709 5183693 5183688 -
tttcttgccttccgctagcttt

SEQ ID NO: 150828 - DNA, 22 bp, Artificial Sequence
  Synthetic oligonucleotide; TTT chr11 5183685 5183706 5183690 5183685 -
cttgccttccgctagcttttga

SEQ ID NO: 150829 - DNA, 22 bp, Artificial Sequence
  Synthetic oligonucleotide; TTC chr11 5183684 5183705 5183689 5183684 -
ttgccttccgctagcttttgaa

SEQ ID NO: 150830 - DNA, 22 bp, Artificial Sequence
  Synthetic oligonucleotide; CTT chr11 5183682 5183703 5183687 5183682 -
gccttccgctagcttttgaaag

SEQ ID NO: 150831 - DNA, 22 bp, Artificial Sequence
  Synthetic oligonucleotide; TTG chr11 5183681 5183702 5183686 5183681 -
ccttccgctagcttttgaaagt

SEQ ID NO: 150832 - DNA, 22 bp, Artificial Sequence
  Synthetic oligonucleotide; CTT chr11 5183677 5183698 5183682 5183677 -
ccgctagcttttgaaagtgttt

SEQ ID NO: 150833 - DNA, 22 bp, Artificial Sequence
  Synthetic oligonucleotide; TTC chr11 5183676 5183697 5183681 5183676 -
cgctagcttttgaaagtgtttg

SEQ ID NO: 150834 - DNA, 22 bp, Artificial Sequence
  Synthetic oligonucleotide; CTA chr11 5183671 5183692 5183676 5183671 -
gcttttgaaagtgtttgctctt

SEQ ID NO: 150835 - DNA, 22 bp, Artificial Sequence
  Synthetic oligonucleotide; CTT chr11 5183667 5183688 5183672 5183667 -
ttgaaagtgtttgctcttgctt

SEQ ID NO: 150836 - DNA, 22 bp, Artificial Sequence
  Synthetic oligonucleotide; TTT chr11 5183666 5183687 5183671 5183666 -
tgaaagtgtttgctcttgcttc

SEQ ID NO: 150837 - DNA, 22 bp, Artificial Sequence
  Synthetic oligonucleotide; TTT chr11 5183665 5183686 5183670 5183665 -
gaaagtgtttgctcttgcttct

SEQ ID NO: 150838 - DNA, 22 bp, Artificial Sequence
  Synthetic oligonucleotide; TTG chr11 5183664 5183685 5183669 5183664 -
aaagtgtttgctcttgcttctc

SEQ ID NO: 150839 - DNA, 22 bp, Artificial Sequence
  Synthetic oligonucleotide; TTT chr11 5183655 5183676 5183660 5183655 -
gctcttgcttctctagttcttt

SEQ ID NO: 150840 - DNA, 22 bp, Artificial Sequence
  Synthetic oligonucleotide; TTG chr11 5183654 5183675 5183659 5183654 -
ctcttgcttctctagttctttt

SEQ ID NO: 150841 - DNA, 22 bp, Artificial Sequence
  Synthetic oligonucleotide; CTC chr11 5183651 5183672 5183656 5183651 -
ttgcttctctagttcttttaat

SEQ ID NO: 150842 - DNA, 22 bp, Artificial Sequence
  Synthetic oligonucleotide; CTT chr11 5183649 5183670 5183654 5183649 -
gcttctctagttcttttaattg

SEQ ID NO: 150843 - DNA, 22 bp, Artificial Sequence
  Synthetic oligonucleotide; TTG chr11 5183648 5183669 5183653 5183648 -
cttctctagttcttttaattgt

SEQ ID NO: 150844 - DNA, 22 bp, Artificial Sequence
  Synthetic oligonucleotide; CTT chr11 5183645 5183666 5183650 5183645 -
ctctagttcttttaattgtgat

SEQ ID NO: 150845 - DNA, 22 bp, Artificial Sequence
  Synthetic oligonucleotide; TTC chr11 5183644 5183665 5183649 5183644 -
tctagttcttttaattgtgatg

SEQ ID NO: 150846 - DNA, 22 bp, Artificial Sequence
  Synthetic oligonucleotide; CTC chr11 5183642 5183663 5183647 5183642 -
tagttcttttaattgtgatgtt

SEQ ID NO: 150847 - DNA, 22 bp, Artificial Sequence
  Synthetic oligonucleotide; CTA chr11 5183640 5183661 5183645 5183640 -
gttcttttaattgtgatgttag

SEQ ID NO: 150848 - DNA, 22 bp, Artificial Sequence
  Synthetic oligonucleotide; TTC chr11 5183636 5183657 5183641 5183636 -
ttttaattgtgatgttagggtg

SEQ ID NO: 150849 - DNA, 22 bp, Artificial Sequence
  Synthetic oligonucleotide; CTT chr11 5183634 5183655 5183639 5183634 -
ttaattgtgatgttagggtgtc

SEQ ID NO: 150850 - DNA, 22 bp, Artificial Sequence
  Synthetic oligonucleotide; TTT chr11 5183633 5183654 5183638 5183633 -
taattgtgatgttagggtgtca

SEQ ID NO: 150851 - DNA, 22 bp, Artificial Sequence
  Synthetic oligonucleotide; TTT chr11 5183632 5183653 5183637 5183632 -
aattgtgatgttagggtgtcaa

SEQ ID NO: 150852 - DNA, 22 bp, Artificial Sequence
  Synthetic oligonucleotide; TTA chr11 5183631 5183652 5183636 5183631 -
attgtgatgttagggtgtcaat

SEQ ID NO: 150853 - DNA, 22 bp, Artificial Sequence
  Synthetic oligonucleotide; TTG chr11 5183627 5183648 5183632 5183627 -
tgatgttagggtgtcaatttta

SEQ ID NO: 150854 - DNA, 22 bp, Artificial Sequence
  Synthetic oligonucleotide; TTA chr11 5183619 5183640 5183624 5183619 -
gggtgtcaattttagatctttc

SEQ ID NO: 150855 - DNA, 22 bp, Artificial Sequence
  Synthetic oligonucleotide; TTT chr11 5183607 5183628 5183612 5183607 -
tagatctttcctgctttctttt

SEQ ID NO: 150856 - DNA, 22 bp, Artificial Sequence
  Synthetic oligonucleotide; TTT chr11 5183606 5183627 5183611 5183606 -
agatctttcctgctttcttttg

SEQ ID NO: 150857 - DNA, 22 bp, Artificial Sequence
  Synthetic oligonucleotide; TTA chr11 5183605 5183626 5183610 5183605 -
gatctttcctgctttcttttgt

SEQ ID NO: 150858 - DNA, 22 bp, Artificial Sequence
  Synthetic oligonucleotide; CTT chr11 5183599 5183620 5183604 5183599 -
tcctgctttcttttgtgggcat

SEQ ID NO: 150859 - DNA, 22 bp, Artificial Sequence
  Synthetic oligonucleotide; TTT chr11 5183598 5183619 5183603 5183598 -
cctgctttcttttgtgggcatt

SEQ ID NO: 150860 - DNA, 22 bp, Artificial Sequence
  Synthetic oligonucleotide; TTC chr11 5183597 5183618 5183602 5183597 -
ctgctttcttttgtgggcattt

SEQ ID NO: 150861 - DNA, 22 bp, Artificial Sequence
  Synthetic oligonucleotide; CTG chr11 5183594 5183615 5183599 5183594 -
ctttcttttgtgggcatttagt

SEQ ID NO: 150862 - DNA, 22 bp, Artificial Sequence
  Synthetic oligonucleotide; CTT chr11 5183591 5183612 5183596 5183591 -
tcttttgtgggcatttagtgct

SEQ ID NO: 150863 - DNA, 22 bp, Artificial Sequence
  Synthetic oligonucleotide; TTT chr11 5183590 5183611 5183595 5183590 -
cttttgtgggcatttagtgcta

SEQ ID NO: 150864 - DNA, 22 bp, Artificial Sequence
  Synthetic oligonucleotide; TTC chr11 5183589 5183610 5183594 5183589 -
ttttgtgggcatttagtgctat

SEQ ID NO: 150865 - DNA, 22 bp, Artificial Sequence
  Synthetic oligonucleotide; CTT chr11 5183587 5183608 5183592 5183587 -
ttgtgggcatttagtgctataa

SEQ ID NO: 150866 - DNA, 22 bp, Artificial Sequence
  Synthetic oligonucleotide; TTT chr11 5183586 5183607 5183591 5183586 -
tgtgggcatttagtgctataaa

SEQ ID NO: 150867 - DNA, 22 bp, Artificial Sequence
  Synthetic oligonucleotide; TTT chr11 5183585 5183606 5183590 5183585 -
gtgggcatttagtgctataaat

SEQ ID NO: 150868 - DNA, 22 bp, Artificial Sequence
  Synthetic oligonucleotide; TTG chr11 5183584 5183605 5183589 5183584 -
tgggcatttagtgctataaatt

SEQ ID NO: 150869 - DNA, 22 bp, Artificial Sequence
  Synthetic oligonucleotide; TTT chr11 5183575 5183596 5183580 5183575 -
agtgctataaatttccctctac

SEQ ID NO: 150870 - DNA, 22 bp, Artificial Sequence
  Synthetic oligonucleotide; TTA chr11 5183574 5183595 5183579 5183574 -
gtgctataaatttccctctaca

SEQ ID NO: 150871 - DNA, 22 bp, Artificial Sequence
  Synthetic oligonucleotide; CTA chr11 5183568 5183589 5183573 5183568 -
taaatttccctctacacactgc

SEQ ID NO: 150872 - DNA, 22 bp, Artificial Sequence
  Synthetic oligonucleotide; TTT chr11 5183561 5183582 5183566 5183561 -
ccctctacacactgctttaaat

SEQ ID NO: 150873 - DNA, 22 bp, Artificial Sequence
  Synthetic oligonucleotide; TTC chr11 5183560 5183581 5183565 5183560 -
cctctacacactgctttaaatg

SEQ ID NO: 150874 - DNA, 22 bp, Artificial Sequence
  Synthetic oligonucleotide; CTC chr11 5183556 5183577 5183561 5183556 -
tacacactgctttaaatgtgtc

SEQ ID NO: 150875 - DNA, 22 bp, Artificial Sequence
  Synthetic oligonucleotide; CTA chr11 5183554 5183575 5183559 5183554 -
cacactgctttaaatgtgtccc

SEQ ID NO: 150876 - DNA, 22 bp, Artificial Sequence
  Synthetic oligonucleotide; CTG chr11 5183547 5183568 5183552 5183547 -
ctttaaatgtgtcccagagatt

SEQ ID NO: 150877 - DNA, 22 bp, Artificial Sequence
  Synthetic oligonucleotide; CTT chr11 5183544 5183565 5183549 5183544 -
taaatgtgtcccagagattctg

SEQ ID NO: 150878 - DNA, 22 bp, Artificial Sequence
  Synthetic oligonucleotide; TTT chr11 5183543 5183564 5183548 5183543 -
aaatgtgtcccagagattctgt

SEQ ID NO: 150879 - DNA, 22 bp, Artificial Sequence
  Synthetic oligonucleotide; TTA chr11 5183542 5183563 5183547 5183542 -
aatgtgtcccagagattctgtt

SEQ ID NO: 150880 - DNA, 22 bp, Artificial Sequence
  Synthetic oligonucleotide; TTC chr11 5183524 5183545 5183529 5183524 -
tgttttgttgtatctttattct

SEQ ID NO: 150881 - DNA, 22 bp, Artificial Sequence
  Synthetic oligonucleotide; CTG chr11 5183522 5183543 5183527 5183522 -
ttttgttgtatctttattctcg

SEQ ID NO: 150882 - DNA, 22 bp, Artificial Sequence
  Synthetic oligonucleotide; TTT chr11 5183519 5183540 5183524 5183519 -
tgttgtatctttattctcgttg

SEQ ID NO: 150883 - DNA, 22 bp, Artificial Sequence
  Synthetic oligonucleotide; TTT chr11 5183518 5183539 5183523 5183518 -
gttgtatctttattctcgttgg

SEQ ID NO: 150884 - DNA, 22 bp, Artificial Sequence
  Synthetic oligonucleotide; TTG chr11 5183517 5183538 5183522 5183517 -
ttgtatctttattctcgttggt

SEQ ID NO: 150885 - DNA, 22 bp, Artificial Sequence
  Synthetic oligonucleotide; TTG chr11 5183514 5183535 5183519 5183514 -
tatctttattctcgttggtttc

SEQ ID NO: 150886 - DNA, 22 bp, Artificial Sequence
  Synthetic oligonucleotide; CTT chr11 5183508 5183529 5183513 5183508 -
tattctcgttggtttcaaagaa

SEQ ID NO: 150887 - DNA, 22 bp, Artificial Sequence
  Synthetic oligonucleotide; TTT chr11 5183507 5183528 5183512 5183507 -
attctcgttggtttcaaagaac

SEQ ID NO: 150888 - DNA, 22 bp, Artificial Sequence
  Synthetic oligonucleotide; TTA chr11 5183506 5183527 5183511 5183506 -
ttctcgttggtttcaaagaaca

SEQ ID NO: 150889 - DNA, 22 bp, Artificial Sequence
  Synthetic oligonucleotide; TTC chr11 5183503 5183524 5183508 5183503 -
tcgttggtttcaaagaacatct

SEQ ID NO: 150890 - DNA, 22 bp, Artificial Sequence
  Synthetic oligonucleotide; CTC chr11 5183501 5183522 5183506 5183501 -
gttggtttcaaagaacatcttt

SEQ ID NO: 150891 - DNA, 22 bp, Artificial Sequence
  Synthetic oligonucleotide; TTG chr11 5183497 5183518 5183502 5183497 -
gtttcaaagaacatctttattt

SEQ ID NO: 150892 - DNA, 22 bp, Artificial Sequence
  Synthetic oligonucleotide; TTT chr11 5183493 5183514 5183498 5183493 -
caaagaacatctttatttctgc

SEQ ID NO: 150893 - DNA, 22 bp, Artificial Sequence
  Synthetic oligonucleotide; TTC chr11 5183492 5183513 5183497 5183492 -
aaagaacatctttatttctgcc

SEQ ID NO: 150894 - DNA, 22 bp, Artificial Sequence
  Synthetic oligonucleotide; CTT chr11 5183480 5183501 5183485 5183480 -
tatttctgccttcattttgtta

SEQ ID NO: 150895 - DNA, 22 bp, Artificial Sequence
  Synthetic oligonucleotide; TTT chr11 5183479 5183500 5183484 5183479 -
atttctgccttcattttgttat

SEQ ID NO: 150896 - DNA, 22 bp, Artificial Sequence
  Synthetic oligonucleotide; TTA chr11 5183478 5183499 5183483 5183478 -
tttctgccttcattttgttatg

SEQ ID NO: 150897 - DNA, 22 bp, Artificial Sequence
  Synthetic oligonucleotide; TTT chr11 5183475 5183496 5183480 5183475 -
ctgccttcattttgttatgtac

SEQ ID NO: 150898 - DNA, 22 bp, Artificial Sequence
  Synthetic oligonucleotide; TTC chr11 5183474 5183495 5183479 5183474 -
tgccttcattttgttatgtacc

SEQ ID NO: 150899 - DNA, 22 bp, Artificial Sequence
  Synthetic oligonucleotide; CTG chr11 5183472 5183493 5183477 5183472 -
ccttcattttgttatgtaccca

SEQ ID NO: 150900 - DNA, 22 bp, Artificial Sequence
  Synthetic oligonucleotide; CTT chr11 5183468 5183489 5183473 5183468 -
cattttgttatgtacccagtag

SEQ ID NO: 150901 - DNA, 22 bp, Artificial Sequence
  Synthetic oligonucleotide; TTC chr11 5183467 5183488 5183472 5183467 -
attttgttatgtacccagtagt

SEQ ID NO: 150902 - DNA, 22 bp, Artificial Sequence
  Synthetic oligonucleotide; TTT chr11 5183463 5183484 5183468 5183463 -
tgttatgtacccagtagtcatt

SEQ ID NO: 150903 - DNA, 22 bp, Artificial Sequence
  Synthetic oligonucleotide; TTT chr11 5183462 5183483 5183467 5183462 -
gttatgtacccagtagtcattc

SEQ ID NO: 150904 - DNA, 22 bp, Artificial Sequence
  Synthetic oligonucleotide; TTG chr11 5183461 5183482 5183466 5183461 -
ttatgtacccagtagtcattca

SEQ ID NO: 150905 - DNA, 22 bp, Artificial Sequence
  Synthetic oligonucleotide; TTA chr11 5183458 5183479 5183463 5183458 -
tgtacccagtagtcattcagga

SEQ ID NO: 150906 - DNA, 22 bp, Artificial Sequence
  Synthetic oligonucleotide; TTC chr11 5183440 5183461 5183445 5183440 -
aggagcaggctgttcagtttcc

SEQ ID NO: 150907 - DNA, 22 bp, Artificial Sequence
  Synthetic oligonucleotide; CTG chr11 5183428 5183449 5183433 5183428 -
ttcagtttccatgtagttgagt

SEQ ID NO: 150908 - DNA, 22 bp, Artificial Sequence
  Synthetic oligonucleotide; TTC chr11 5183425 5183446 5183430 5183425 -
agtttccatgtagttgagtggt

SEQ ID NO: 150909 - DNA, 22 bp, Artificial Sequence
  Synthetic oligonucleotide; TTT chr11 5183420 5183441 5183425 5183420 -
ccatgtagttgagtggttttga

SEQ ID NO: 150910 - DNA, 22 bp, Artificial Sequence
  Synthetic oligonucleotide; TTC chr11 5183419 5183440 5183424 5183419 -
catgtagttgagtggttttgag

SEQ ID NO: 150911 - DNA, 22 bp, Artificial Sequence
  Synthetic oligonucleotide; TTG chr11 5183409 5183430 5183414 5183409 -
agtggttttgagtgagtttctt

SEQ ID NO: 150912 - DNA, 22 bp, Artificial Sequence
  Synthetic oligonucleotide; TTT chr11 5183401 5183422 5183406 5183401 -
tgagtgagtttcttaatcctga

SEQ ID NO: 150913 - DNA, 22 bp, Artificial Sequence
  Synthetic oligonucleotide; TTT chr11 5183400 5183421 5183405 5183400 -
gagtgagtttcttaatcctgag

SEQ ID NO: 150914 - DNA, 22 bp, Artificial Sequence
  Synthetic oligonucleotide; TTG chr11 5183399 5183420 5183404 5183399 -
agtgagtttcttaatcctgagt

SEQ ID NO: 150915 - DNA, 22 bp, Artificial Sequence
  Synthetic oligonucleotide; TTT chr11 5183390 5183411 5183395 5183390 -
cttaatcctgagttctagtttg

SEQ ID NO: 150916 - DNA, 22 bp, Artificial Sequence
  Synthetic oligonucleotide; TTC chr11 5183389 5183410 5183394 5183389 -
ttaatcctgagttctagtttga

SEQ ID NO: 150917 - DNA, 22 bp, Artificial Sequence
  Synthetic oligonucleotide; CTT chr11 5183387 5183408 5183392 5183387 -
aatcctgagttctagtttgatt

SEQ ID NO: 150918 - DNA, 22 bp, Artificial Sequence
  Synthetic oligonucleotide; TTA chr11 5183386 5183407 5183391 5183386 -
atcctgagttctagtttgattg

SEQ ID NO: 150919 - DNA, 22 bp, Artificial Sequence
  Synthetic oligonucleotide; CTG chr11 5183380 5183401 5183385 5183380 -
agttctagtttgattgcactgt

SEQ ID NO: 150920 - DNA, 22 bp, Artificial Sequence
  Synthetic oligonucleotide; TTC chr11 5183375 5183396 5183380 5183375 -
tagtttgattgcactgtggtct

SEQ ID NO: 150921 - DNA, 22 bp, Artificial Sequence
  Synthetic oligonucleotide; CTA chr11 5183373 5183394 5183378 5183373 -
gtttgattgcactgtggtctga

SEQ ID NO: 150922 - DNA, 22 bp, Artificial Sequence
  Synthetic oligonucleotide; TTT chr11 5183369 5183390 5183374 5183369 -
gattgcactgtggtctgagaga

SEQ ID NO: 150923 - DNA, 22 bp, Artificial Sequence
  Synthetic oligonucleotide; TTG chr11 5183368 5183389 5183373 5183368 -
attgcactgtggtctgagagac

SEQ ID NO: 150924 - DNA, 22 bp, Artificial Sequence
  Synthetic oligonucleotide; TTG chr11 5183364 5183385 5183369 5183364 -
cactgtggtctgagagacagtt

SEQ ID NO: 150925 - DNA, 22 bp, Artificial Sequence
  Synthetic oligonucleotide; CTG chr11 5183359 5183380 5183364 5183359 -
tggtctgagagacagtttgtta

SEQ ID NO: 150926 - DNA, 22 bp, Artificial Sequence
  Synthetic oligonucleotide; CTG chr11 5183352 5183373 5183357 5183352 -
agagacagtttgttattgtttc

SEQ ID NO: 150927 - DNA, 22 bp, Artificial Sequence
  Synthetic oligonucleotide; TTT chr11 5183341 5183362 5183346 5183341 -
gttattgtttctgttcttttac

SEQ ID NO: 150928 - DNA, 22 bp, Artificial Sequence
  Synthetic oligonucleotide; TTG chr11 5183340 5183361 5183345 5183340 -
ttattgtttctgttcttttacg

SEQ ID NO: 150929 - DNA, 22 bp, Artificial Sequence
  Synthetic oligonucleotide; TTA chr11 5183337 5183358 5183342 5183337 -
ttgtttctgttcttttacgttt

SEQ ID NO: 150930 - DNA, 22 bp, Artificial Sequence
  Synthetic oligonucleotide; TTG chr11 5183334 5183355 5183339 5183334 -
tttctgttcttttacgtttgct

SEQ ID NO: 150931 - DNA, 22 bp, Artificial Sequence
  Synthetic oligonucleotide; TTT chr11 5183331 5183352 5183336 5183331 -
ctgttcttttacgtttgctgag

SEQ ID NO: 150932 - DNA, 22 bp, Artificial Sequence
  Synthetic oligonucleotide; TTC chr11 5183330 5183351 5183335 5183330 -
tgttcttttacgtttgctgagg

SEQ ID NO: 150933 - DNA, 22 bp, Artificial Sequence
  Synthetic oligonucleotide; CTG chr11 5183328 5183349 5183333 5183328 -
ttcttttacgtttgctgaggag

SEQ ID NO: 150934 - DNA, 22 bp, Artificial Sequence
  Synthetic oligonucleotide; TTC chr11 5183325 5183346 5183330 5183325 -
ttttacgtttgctgaggagtgc

SEQ ID NO: 150935 - DNA, 22 bp, Artificial Sequence
  Synthetic oligonucleotide; CTT chr11 5183323 5183344 5183328 5183323 -
ttacgtttgctgaggagtgctt

SEQ ID NO: 150936 - DNA, 22 bp, Artificial Sequence
  Synthetic oligonucleotide; TTT chr11 5183322 5183343 5183327 5183322 -
tacgtttgctgaggagtgcttc

SEQ ID NO: 150937 - DNA, 22 bp, Artificial Sequence
  Synthetic oligonucleotide; TTT chr11 5183321 5183342 5183326 5183321 -
acgtttgctgaggagtgcttca

SEQ ID NO: 150938 - DNA, 22 bp, Artificial Sequence
  Synthetic oligonucleotide; TTA chr11 5183320 5183341 5183325 5183320 -
cgtttgctgaggagtgcttcac

SEQ ID NO: 150939 - DNA, 22 bp, Artificial Sequence
  Synthetic oligonucleotide; TTT chr11 5183315 5183336 5183320 5183315 -
gctgaggagtgcttcacttcca

SEQ ID NO: 150940 - DNA, 22 bp, Artificial Sequence
  Synthetic oligonucleotide; TTG chr11 5183314 5183335 5183319 5183314 -
ctgaggagtgcttcacttccaa

SEQ ID NO: 150941 - DNA, 22 bp, Artificial Sequence
  Synthetic oligonucleotide; CTG chr11 5183311 5183332 5183316 5183311 -
aggagtgcttcacttccaacta

SEQ ID NO: 150942 - DNA, 22 bp, Artificial Sequence
  Synthetic oligonucleotide; CTT chr11 5183301 5183322 5183306 5183301 -
cacttccaactatgtggtcaac

SEQ ID NO: 150943 - DNA, 22 bp, Artificial Sequence
  Synthetic oligonucleotide; TTC chr11 5183300 5183321 5183305 5183300 -
acttccaactatgtggtcaact

SEQ ID NO: 150944 - DNA, 22 bp, Artificial Sequence
  Synthetic oligonucleotide; CTT chr11 5183296 5183317 5183301 5183296 -
ccaactatgtggtcaactggaa

SEQ ID NO: 150945 - DNA, 22 bp, Artificial Sequence
  Synthetic oligonucleotide; TTC chr11 5183295 5183316 5183300 5183295 -
caactatgtggtcaactggaat

SEQ ID NO: 150946 - DNA, 22 bp, Artificial Sequence
  Synthetic oligonucleotide; CTA chr11 5183289 5183310 5183294 5183289 -
tgtggtcaactggaataggtgt

SEQ ID NO: 150947 - DNA, 22 bp, Artificial Sequence
  Synthetic oligonucleotide; CTG chr11 5183277 5183298 5183282 5183277 -
gaataggtgtggtgtggtgctg

SEQ ID NO: 150948 - DNA, 22 bp, Artificial Sequence
  Synthetic oligonucleotide; CTG chr11 5183255 5183276 5183260 5183255 -
agaagaatgtatattctattga

SEQ ID NO: 150949 - DNA, 22 bp, Artificial Sequence
  Synthetic oligonucleotide; TTC chr11 5183239 5183260 5183244 5183239 -
tattgatttgggatggagagtt

SEQ ID NO: 150950 - DNA, 22 bp, Artificial Sequence
  Synthetic oligonucleotide; CTA chr11 5183237 5183258 5183242 5183237 -
ttgatttgggatggagagttct

SEQ ID NO: 150951 - DNA, 22 bp, Artificial Sequence
  Synthetic oligonucleotide; TTG chr11 5183234 5183255 5183239 5183234 -
atttgggatggagagttctgta

SEQ ID NO: 150952 - DNA, 22 bp, Artificial Sequence
  Synthetic oligonucleotide; TTT chr11 5183230 5183251 5183235 5183230 -
gggatggagagttctgtagatg

SEQ ID NO: 150953 - DNA, 22 bp, Artificial Sequence
  Synthetic oligonucleotide; TTG chr11 5183229 5183250 5183234 5183229 -
ggatggagagttctgtagatgt

SEQ ID NO: 150954 - DNA, 22 bp, Artificial Sequence
  Synthetic oligonucleotide; TTC chr11 5183216 5183237 5183221 5183216 -
tgtagatgtctattaggtctgc

SEQ ID NO: 150955 - DNA, 22 bp, Artificial Sequence
  Synthetic oligonucleotide; CTG chr11 5183214 5183235 5183219 5183214 -
tagatgtctattaggtctgctt

SEQ ID NO: 150956 - DNA, 22 bp, Artificial Sequence
  Synthetic oligonucleotide; CTA chr11 5183204 5183225 5183209 5183204 -
ttaggtctgcttggtgcagagc

SEQ ID NO: 150957 - DNA, 22 bp, Artificial Sequence
  Synthetic oligonucleotide; TTA chr11 5183201 5183222 5183206 5183201 -
ggtctgcttggtgcagagctga

SEQ ID NO: 150958 - DNA, 22 bp, Artificial Sequence
  Synthetic oligonucleotide; CTG chr11 5183195 5183216 5183200 5183195 -
cttggtgcagagctgaattcaa

SEQ ID NO: 150959 - DNA, 22 bp, Artificial Sequence
  Synthetic oligonucleotide; CTT chr11 5183192 5183213 5183197 5183192 -
ggtgcagagctgaattcaattc

SEQ ID NO: 150960 - DNA, 22 bp, Artificial Sequence
  Synthetic oligonucleotide; TTG chr11 5183191 5183212 5183196 5183191 -
gtgcagagctgaattcaattcc

SEQ ID NO: 150961 - DNA, 22 bp, Artificial Sequence
  Synthetic oligonucleotide; CTG chr11 5183180 5183201 5183185 5183180 -
aattcaattcctggatatcctt

SEQ ID NO: 150962 - DNA, 22 bp, Artificial Sequence
  Synthetic oligonucleotide; TTC chr11 5183175 5183196 5183180 5183175 -
aattcctggatatccttgttaa

SEQ ID NO: 150963 - DNA, 22 bp, Artificial Sequence
  Synthetic oligonucleotide; TTC chr11 5183170 5183191 5183175 5183170 -
ctggatatccttgttaactttc

SEQ ID NO: 150964 - DNA, 22 bp, Artificial Sequence
  Synthetic oligonucleotide; CTG chr11 5183167 5183188 5183172 5183167 -
gatatccttgttaactttctgt

SEQ ID NO: 150965 - DNA, 22 bp, Artificial Sequence
  Synthetic oligonucleotide; CTT chr11 5183158 5183179 5183163 5183158 -
gttaactttctgtctcgttgat

SEQ ID NO: 150966 - DNA, 22 bp, Artificial Sequence
  Synthetic oligonucleotide; TTG chr11 5183157 5183178 5183162 5183157 -
ttaactttctgtctcgttgatc

SEQ ID NO: 150967 - DNA, 22 bp, Artificial Sequence
  Synthetic oligonucleotide; TTA chr11 5183154 5183175 5183159 5183154 -
actttctgtctcgttgatctgt

SEQ ID NO: 150968 - DNA, 22 bp, Artificial Sequence
  Synthetic oligonucleotide; CTT chr11 5183150 5183171 5183155 5183150 -
tctgtctcgttgatctgtctaa

SEQ ID NO: 150969 - DNA, 22 bp, Artificial Sequence
  Synthetic oligonucleotide; TTT chr11 5183149 5183170 5183154 5183149 -
ctgtctcgttgatctgtctaat

SEQ ID NO: 150970 - DNA, 22 bp, Artificial Sequence
  Synthetic oligonucleotide; TTC chr11 5183148 5183169 5183153 5183148 -
tgtctcgttgatctgtctaatg

SEQ ID NO: 150971 - DNA, 22 bp, Artificial Sequence
  Synthetic oligonucleotide; CTG chr11 5183146 5183167 5183151 5183146 -
tctcgttgatctgtctaatgtt

SEQ ID NO: 150972 - DNA, 22 bp, Artificial Sequence
  Synthetic oligonucleotide; CTC chr11 5183142 5183163 5183147 5183142 -
gttgatctgtctaatgttgaca

SEQ ID NO: 150973 - DNA, 22 bp, Artificial Sequence
  Synthetic oligonucleotide; TTG chr11 5183138 5183159 5183143 5183138 -
atctgtctaatgttgacagtgg

SEQ ID NO: 150974 - DNA, 22 bp, Artificial Sequence
  Synthetic oligonucleotide; CTG chr11 5183133 5183154 5183138 5183133 -
tctaatgttgacagtggggtgt

SEQ ID NO: 150975 - DNA, 22 bp, Artificial Sequence
  Synthetic oligonucleotide; CTA chr11 5183129 5183150 5183134 5183129 -
atgttgacagtggggtgttaaa

SEQ ID NO: 150976 - DNA, 22 bp, Artificial Sequence
  Synthetic oligonucleotide; TTG chr11 5183123 5183144 5183128 5183123 -
acagtggggtgttaaagtctcc

SEQ ID NO: 150977 - DNA, 22 bp, Artificial Sequence
  Synthetic oligonucleotide; TTA chr11 5183109 5183130 5183114 5183109 -
aagtctcccattattattgtgt

SEQ ID NO: 150978 - DNA, 22 bp, Artificial Sequence
  Synthetic oligonucleotide; CTC chr11 5183102 5183123 5183107 5183102 -
ccattattattgtgtgggagtc

SEQ ID NO: 150979 - DNA, 22 bp, Artificial Sequence
  Synthetic oligonucleotide; TTA chr11 5183096 5183117 5183101 5183096 -
ttattgtgtgggagtctaagtc

SEQ ID NO: 150980 - DNA, 22 bp, Artificial Sequence
  Synthetic oligonucleotide; TTA chr11 5183093 5183114 5183098 5183093 -
ttgtgtgggagtctaagtctct

SEQ ID NO: 150981 - DNA, 22 bp, Artificial Sequence
  Synthetic oligonucleotide; TTG chr11 5183090 5183111 5183095 5183090 -
tgtgggagtctaagtctctttg

SEQ ID NO: 150982 - DNA, 22 bp, Artificial Sequence
  Synthetic oligonucleotide; CTA chr11 5183078 5183099 5183083 5183078 -
agtctctttgtaggtctctaag

SEQ ID NO: 150983 - DNA, 22 bp, Artificial Sequence
  Synthetic oligonucleotide; CTC chr11 5183072 5183093 5183077 5183072 -
tttgtaggtctctaaggacttg

SEQ ID NO: 150984 - DNA, 22 bp, Artificial Sequence
  Synthetic oligonucleotide; CTT chr11 5183070 5183091 5183075 5183070 -
tgtaggtctctaaggacttgct

SEQ ID NO: 150985 - DNA, 22 bp, Artificial Sequence
  Synthetic oligonucleotide; TTT chr11 5183069 5183090 5183074 5183069 -
gtaggtctctaaggacttgctt

SEQ ID NO: 150986 - DNA, 22 bp, Artificial Sequence
  Synthetic oligonucleotide; TTG chr11 5183068 5183089 5183073 5183068 -
taggtctctaaggacttgcttt

SEQ ID NO: 150987 - DNA, 22 bp, Artificial Sequence
  Synthetic oligonucleotide; CTC chr11 5183060 5183081 5183065 5183060 -
taaggacttgctttatgaatct

SEQ ID NO: 150988 - DNA, 22 bp, Artificial Sequence
  Synthetic oligonucleotide; CTA chr11 5183058 5183079 5183063 5183058 -
aggacttgctttatgaatctgg

SEQ ID NO: 150989 - DNA, 22 bp, Artificial Sequence
  Synthetic oligonucleotide; CTT chr11 5183051 5183072 5183056 5183051 -
gctttatgaatctgggtgctgc

SEQ ID NO: 150990 - DNA, 22 bp, Artificial Sequence
  Synthetic oligonucleotide; TTG chr11 5183050 5183071 5183055 5183050 -
ctttatgaatctgggtgctgct

SEQ ID NO: 150991 - DNA, 22 bp, Artificial Sequence
  Synthetic oligonucleotide; CTT chr11 5183047 5183068 5183052 5183047 -
tatgaatctgggtgctgctgta

SEQ ID NO: 150992 - DNA, 22 bp, Artificial Sequence
  Synthetic oligonucleotide; TTT chr11 5183046 5183067 5183051 5183046 -
atgaatctgggtgctgctgtat

SEQ ID NO: 150993 - DNA, 22 bp, Artificial Sequence
  Synthetic oligonucleotide; TTA chr11 5183045 5183066 5183050 5183045 -
tgaatctgggtgctgctgtatt

SEQ ID NO: 150994 - DNA, 22 bp, Artificial Sequence
  Synthetic oligonucleotide; CTG chr11 5183037 5183058 5183042 5183037 -
ggtgctgctgtattgggtgcat

SEQ ID NO: 150995 - DNA, 22 bp, Artificial Sequence
  Synthetic oligonucleotide; CTG chr11 5183030 5183051 5183035 5183030 -
ctgtattgggtgcatatatatt

SEQ ID NO: 150996 - DNA, 22 bp, Artificial Sequence
  Synthetic oligonucleotide; CTG chr11 5183027 5183048 5183032 5183027 -
tattgggtgcatatatatttag

SEQ ID NO: 150997 - DNA, 22 bp, Artificial Sequence
  Synthetic oligonucleotide; TTG chr11 5183022 5183043 5183027 5183022 -
ggtgcatatatatttaggatag

SEQ ID NO: 150998 - DNA, 22 bp, Artificial Sequence
  Synthetic oligonucleotide; TTT chr11 5183007 5183028 5183012 5183007 -
aggatagttagctcttcttgtt

SEQ ID NO: 150999 - DNA, 22 bp, Artificial Sequence
  Synthetic oligonucleotide; TTA chr11 5183006 5183027 5183011 5183006 -
ggatagttagctcttcttgttg

SEQ ID NO: 151000 - DNA, 22 bp, Artificial Sequence
  Synthetic oligonucleotide; TTA chr11 5182997 5183018 5183002 5182997 -
gctcttcttgttgaattgatcc

SEQ ID NO: 151001 - DNA, 22 bp, Artificial Sequence
  Synthetic oligonucleotide; CTC chr11 5182993 5183014 5182998 5182993 -
ttcttgttgaattgatcccttt

SEQ ID NO: 151002 - DNA, 22 bp, Artificial Sequence
  Synthetic oligonucleotide; CTT chr11 5182991 5183012 5182996 5182991 -
cttgttgaattgatccctttac

SEQ ID NO: 151003 - DNA, 22 bp, Artificial Sequence
  Synthetic oligonucleotide; TTC chr11 5182990 5183011 5182995 5182990 -
ttgttgaattgatccctttacc

SEQ ID NO: 151004 - DNA, 22 bp, Artificial Sequence
  Synthetic oligonucleotide; CTT chr11 5182988 5183009 5182993 5182988 -
gttgaattgatccctttaccag

SEQ ID NO: 151005 - DNA, 22 bp, Artificial Sequence
  Synthetic oligonucleotide; TTG chr11 5182987 5183008 5182992 5182987 -
ttgaattgatccctttaccagt

SEQ ID NO: 151006 - DNA, 22 bp, Artificial Sequence
  Synthetic oligonucleotide; TTG chr11 5182984 5183005 5182989 5182984 -
aattgatccctttaccagtatg

SEQ ID NO: 151007 - DNA, 22 bp, Artificial Sequence
  Synthetic oligonucleotide; TTG chr11 5182979 5183000 5182984 5182979 -
atccctttaccagtatgtaatg

SEQ ID NO: 151008 - DNA, 22 bp, Artificial Sequence
  Synthetic oligonucleotide; CTT chr11 5182972 5182993 5182977 5182972 -
taccagtatgtaatggccttct

SEQ ID NO: 151009 - DNA, 22 bp, Artificial Sequence
  Synthetic oligonucleotide; TTT chr11 5182971 5182992 5182976 5182971 -
accagtatgtaatggccttctt

SEQ ID NO: 151010 - DNA, 22 bp, Artificial Sequence
  Synthetic oligonucleotide; TTA chr11 5182970 5182991 5182975 5182970 -
ccagtatgtaatggccttcttt

SEQ ID NO: 151011 - DNA, 22 bp, Artificial Sequence
  Synthetic oligonucleotide; CTT chr11 5182952 5182973 5182957 5182952 -
ctttgtctcttttgatctttgt

SEQ ID NO: 151012 - DNA, 22 bp, Artificial Sequence
  Synthetic oligonucleotide; TTC chr11 5182951 5182972 5182956 5182951 -
tttgtctcttttgatctttgtt

SEQ ID NO: 151013 - DNA, 22 bp, Artificial Sequence
  Synthetic oligonucleotide; CTT chr11 5182949 5182970 5182954 5182949 -
tgtctcttttgatctttgttgg

SEQ ID NO: 151014 - DNA, 22 bp, Artificial Sequence
  Synthetic oligonucleotide; TTT chr11 5182948 5182969 5182953 5182948 -
gtctcttttgatctttgttggt

SEQ ID NO: 151015 - DNA, 22 bp, Artificial Sequence
  Synthetic oligonucleotide; TTG chr11 5182947 5182968 5182952 5182947 -
tctcttttgatctttgttggtt

SEQ ID NO: 151016 - DNA, 22 bp, Artificial Sequence
  Synthetic oligonucleotide; CTC chr11 5182943 5182964 5182948 5182943 -
ttttgatctttgttggtttaaa

SEQ ID NO: 151017 - DNA, 22 bp, Artificial Sequence
  Synthetic oligonucleotide; CTT chr11 5182941 5182962 5182946 5182941 -
ttgatctttgttggtttaaagt

SEQ ID NO: 151018 - DNA, 22 bp, Artificial Sequence
  Synthetic oligonucleotide; TTT chr11 5182940 5182961 5182945 5182940 -
tgatctttgttggtttaaagtc

SEQ ID NO: 151019 - DNA, 22 bp, Artificial Sequence
  Synthetic oligonucleotide; TTT chr11 5182939 5182960 5182944 5182939 -
gatctttgttggtttaaagtct

SEQ ID NO: 151020 - DNA, 22 bp, Artificial Sequence
  Synthetic oligonucleotide; TTG chr11 5182938 5182959 5182943 5182938 -
atctttgttggtttaaagtctg

SEQ ID NO: 151021 - DNA, 22 bp, Artificial Sequence
  Synthetic oligonucleotide; CTT chr11 5182933 5182954 5182938 5182933 -
tgttggtttaaagtctgtttta

SEQ ID NO: 151022 - DNA, 22 bp, Artificial Sequence
  Synthetic oligonucleotide; TTT chr11 5182932 5182953 5182937 5182932 -
gttggtttaaagtctgttttat

SEQ ID NO: 151023 - DNA, 22 bp, Artificial Sequence
  Synthetic oligonucleotide; TTG chr11 5182931 5182952 5182936 5182931 -
ttggtttaaagtctgttttatc

SEQ ID NO: 151024 - DNA, 22 bp, Artificial Sequence
  Synthetic oligonucleotide; TTG chr11 5182928 5182949 5182933 5182928 -
gtttaaagtctgttttatcaga

SEQ ID NO: 151025 - DNA, 22 bp, Artificial Sequence
  Synthetic oligonucleotide; TTT chr11 5182924 5182945 5182929 5182924 -
aaagtctgttttatcagagact

SEQ ID NO: 151026 - DNA, 22 bp, Artificial Sequence
  Synthetic oligonucleotide; TTA chr11 5182923 5182944 5182928 5182923 -
aagtctgttttatcagagacta

SEQ ID NO: 151027 - DNA, 22 bp, Artificial Sequence
  Synthetic oligonucleotide; CTG chr11 5182916 5182937 5182921 5182916 -
ttttatcagagactaagattgc

SEQ ID NO: 151028 - DNA, 22 bp, Artificial Sequence
  Synthetic oligonucleotide; TTT chr11 5182913 5182934 5182918 5182913 -
tatcagagactaagattgcaaa

SEQ ID NO: 151029 - DNA, 22 bp, Artificial Sequence
  Synthetic oligonucleotide; TTT chr11 5182912 5182933 5182917 5182912 -
atcagagactaagattgcaaac

SEQ ID NO: 151030 - DNA, 22 bp, Artificial Sequence
  Synthetic oligonucleotide; TTA chr11 5182911 5182932 5182916 5182911 -
tcagagactaagattgcaaacc

SEQ ID NO: 151031 - DNA, 22 bp, Artificial Sequence
  Synthetic oligonucleotide; CTA chr11 5182901 5182922 5182906 5182901 -
agattgcaaaccctgccttttt

SEQ ID NO: 151032 - DNA, 22 bp, Artificial Sequence
  Synthetic oligonucleotide; TTG chr11 5182895 5182916 5182900 5182895 -
caaaccctgccttttttttgtt

SEQ ID NO: 151033 - DNA, 22 bp, Artificial Sequence
  Synthetic oligonucleotide; CTG chr11 5182886 5182907 5182891 5182886 -
ccttttttttgttttccatttg

SEQ ID NO: 151034 - DNA, 22 bp, Artificial Sequence
  Synthetic oligonucleotide; CTT chr11 5182882 5182903 5182887 5182882 -
ttttttgttttccatttgcttg

SEQ ID NO: 151035 - DNA, 22 bp, Artificial Sequence
  Synthetic oligonucleotide; TTT chr11 5182881 5182902 5182886 5182881 -
tttttgttttccatttgcttgg

SEQ ID NO: 151036 - DNA, 22 bp, Artificial Sequence
  Synthetic oligonucleotide; TTT chr11 5182880 5182901 5182885 5182880 -
ttttgttttccatttgcttggt

SEQ ID NO: 151037 - DNA, 22 bp, Artificial Sequence
  Synthetic oligonucleotide; TTT chr11 5182879 5182900 5182884 5182879 -
tttgttttccatttgcttggta

SEQ ID NO: 151038 - DNA, 22 bp, Artificial Sequence
  Synthetic oligonucleotide; TTT chr11 5182878 5182899 5182883 5182878 -
ttgttttccatttgcttggtag

SEQ ID NO: 151039 - DNA, 22 bp, Artificial Sequence
  Synthetic oligonucleotide; TTT chr11 5182877 5182898 5182882 5182877 -
tgttttccatttgcttggtaga

SEQ ID NO: 151040 - DNA, 22 bp, Artificial Sequence
  Synthetic oligonucleotide; TTT chr11 5182876 5182897 5182881 5182876 -
gttttccatttgcttggtagat

SEQ ID NO: 151041 - DNA, 22 bp, Artificial Sequence
  Synthetic oligonucleotide; TTG chr11 5182875 5182896 5182880 5182875 -
ttttccatttgcttggtagatc

SEQ ID NO: 151042 - DNA, 22 bp, Artificial Sequence
  Synthetic oligonucleotide; TTT chr11 5182872 5182893 5182877 5182872 -
tccatttgcttggtagatcttc

SEQ ID NO: 151043 - DNA, 22 bp, Artificial Sequence
  Synthetic oligonucleotide; TTT chr11 5182871 5182892 5182876 5182871 -
ccatttgcttggtagatcttcc

SEQ ID NO: 151044 - DNA, 22 bp, Artificial Sequence
  Synthetic oligonucleotide; TTC chr11 5182870 5182891 5182875 5182870 -
catttgcttggtagatcttcct

SEQ ID NO: 151045 - DNA, 22 bp, Artificial Sequence
  Synthetic oligonucleotide; TTT chr11 5182865 5182886 5182870 5182865 -
gcttggtagatcttcctccatc

SEQ ID NO: 151046 - DNA, 22 bp, Artificial Sequence
  Synthetic oligonucleotide; TTG chr11 5182864 5182885 5182869 5182864 -
cttggtagatcttcctccatcc

SEQ ID NO: 151047 - DNA, 22 bp, Artificial Sequence
  Synthetic oligonucleotide; CTT chr11 5182861 5182882 5182866 5182861 -
ggtagatcttcctccatccctt

SEQ ID NO: 151048 - DNA, 22 bp, Artificial Sequence
  Synthetic oligonucleotide; TTG chr11 5182860 5182881 5182865 5182860 -
gtagatcttcctccatcccttt

SEQ ID NO: 151049 - DNA, 22 bp, Artificial Sequence
  Synthetic oligonucleotide; CTT chr11 5182851 5182872 5182856 5182851 -
cctccatccctttattttgagc

SEQ ID NO: 151050 - DNA, 22 bp, Artificial Sequence
  Synthetic oligonucleotide; TTC chr11 5182850 5182871 5182855 5182850 -
ctccatccctttattttgagcc

SEQ ID NO: 151051 - DNA, 22 bp, Artificial Sequence
  Synthetic oligonucleotide; CTC chr11 5182847 5182868 5182852 5182847 -
catccctttattttgagcctat

SEQ ID NO: 151052 - DNA, 22 bp, Artificial Sequence
  Synthetic oligonucleotide; CTT chr11 5182839 5182860 5182844 5182839 -
tattttgagcctatgtgtgtct

SEQ ID NO: 151053 - DNA, 22 bp, Artificial Sequence
  Synthetic oligonucleotide; TTT chr11 5182838 5182859 5182843 5182838 -
attttgagcctatgtgtgtctc

SEQ ID NO: 151054 - DNA, 22 bp, Artificial Sequence
  Synthetic oligonucleotide; TTA chr11 5182837 5182858 5182842 5182837 -
ttttgagcctatgtgtgtctct

SEQ ID NO: 151055 - DNA, 22 bp, Artificial Sequence
  Synthetic oligonucleotide; TTT chr11 5182834 5182855 5182839 5182834 -
tgagcctatgtgtgtctctcca

SEQ ID NO: 151056 - DNA, 22 bp, Artificial Sequence
  Synthetic oligonucleotide; TTT chr11 5182833 5182854 5182838 5182833 -
gagcctatgtgtgtctctccac

SEQ ID NO: 151057 - DNA, 22 bp, Artificial Sequence
  Synthetic oligonucleotide; TTG chr11 5182832 5182853 5182837 5182832 -
agcctatgtgtgtctctccaca

SEQ ID NO: 151058 - DNA, 22 bp, Artificial Sequence
  Synthetic oligonucleotide; CTA chr11 5182826 5182847 5182831 5182826 -
tgtgtgtctctccacatgagat

SEQ ID NO: 151059 - DNA, 22 bp, Artificial Sequence
  Synthetic oligonucleotide; CTC chr11 5182816 5182837 5182821 5182816 -
tccacatgagattggtttcctg

SEQ ID NO: 151060 - DNA, 22 bp, Artificial Sequence
  Synthetic oligonucleotide; CTC chr11 5182814 5182835 5182819 5182814 -
cacatgagattggtttcctgaa

SEQ ID NO: 151061 - DNA, 22 bp, Artificial Sequence
  Synthetic oligonucleotide; TTG chr11 5182802 5182823 5182807 5182802 -
gtttcctgaatacagcacactg

SEQ ID NO: 151062 - DNA, 22 bp, Artificial Sequence
  Synthetic oligonucleotide; TTT chr11 5182798 5182819 5182803 5182798 -
cctgaatacagcacactgatag

SEQ ID NO: 151063 - DNA, 22 bp, Artificial Sequence
  Synthetic oligonucleotide; TTC chr11 5182797 5182818 5182802 5182797 -
ctgaatacagcacactgatagg

SEQ ID NO: 151064 - DNA, 22 bp, Artificial Sequence
  Synthetic oligonucleotide; CTG chr11 5182794 5182815 5182799 5182794 -
aatacagcacactgataggtct

SEQ ID NO: 151065 - DNA, 22 bp, Artificial Sequence
  Synthetic oligonucleotide; CTG chr11 5182780 5182801 5182785 5182780 -
ataggtcttgactctttatcca

SEQ ID NO: 151066 - DNA, 22 bp, Artificial Sequence
  Synthetic oligonucleotide; CTT chr11 5182771 5182792 5182776 5182771 -
gactctttatccaatttgccag

SEQ ID NO: 151067 - DNA, 22 bp, Artificial Sequence
  Synthetic oligonucleotide; TTG chr11 5182770 5182791 5182775 5182770 -
actctttatccaatttgccagt

SEQ ID NO: 151068 - DNA, 22 bp, Artificial Sequence
  Synthetic oligonucleotide; CTC chr11 5182766 5182787 5182771 5182766 -
tttatccaatttgccagtctgt

SEQ ID NO: 151069 - DNA, 22 bp, Artificial Sequence
  Synthetic oligonucleotide; CTT chr11 5182764 5182785 5182769 5182764 -
tatccaatttgccagtctgtgt

SEQ ID NO: 151070 - DNA, 22 bp, Artificial Sequence
  Synthetic oligonucleotide; TTT chr11 5182763 5182784 5182768 5182763 -
atccaatttgccagtctgtgtc

SEQ ID NO: 151071 - DNA, 22 bp, Artificial Sequence
  Synthetic oligonucleotide; TTA chr11 5182762 5182783 5182767 5182762 -
tccaatttgccagtctgtgtct

SEQ ID NO: 151072 - DNA, 22 bp, Artificial Sequence
  Synthetic oligonucleotide; TTT chr11 5182754 5182775 5182759 5182754 -
gccagtctgtgtcttttaattg

SEQ ID NO: 151073 - DNA, 22 bp, Artificial Sequence
  Synthetic oligonucleotide; TTG chr11 5182753 5182774 5182758 5182753 -
ccagtctgtgtcttttaattgg

SEQ ID NO: 151074 - DNA, 22 bp, Artificial Sequence
  Synthetic oligonucleotide; CTG chr11 5182745 5182766 5182750 5182745 -
tgtcttttaattggagcattta

SEQ ID NO: 151075 - DNA, 22 bp, Artificial Sequence
  Synthetic oligonucleotide; CTT chr11 5182739 5182760 5182744 5182739 -
ttaattggagcatttagctcat

SEQ ID NO: 151076 - DNA, 22 bp, Artificial Sequence
  Synthetic oligonucleotide; TTT chr11 5182738 5182759 5182743 5182738 -
taattggagcatttagctcatt

SEQ ID NO: 151077 - DNA, 22 bp, Artificial Sequence
  Synthetic oligonucleotide; TTT chr11 5182737 5182758 5182742 5182737 -
aattggagcatttagctcattt

SEQ ID NO: 151078 - DNA, 22 bp, Artificial Sequence
  Synthetic oligonucleotide; TTA chr11 5182736 5182757 5182741 5182736 -
attggagcatttagctcattta

SEQ ID NO: 151079 - DNA, 22 bp, Artificial Sequence
  Synthetic oligonucleotide; TTG chr11 5182732 5182753 5182737 5182732 -
gagcatttagctcatttacatt

SEQ ID NO: 151080 - DNA, 22 bp, Artificial Sequence
  Synthetic oligonucleotide; TTT chr11 5182724 5182745 5182729 5182724 -
agctcatttacatttaaggtta

SEQ ID NO: 151081 - DNA, 22 bp, Artificial Sequence
  Synthetic oligonucleotide; TTA chr11 5182723 5182744 5182728 5182723 -
gctcatttacatttaaggttaa

SEQ ID NO: 151082 - DNA, 22 bp, Artificial Sequence
  Synthetic oligonucleotide; CTC chr11 5182719 5182740 5182724 5182719 -
atttacatttaaggttaatatt

SEQ ID NO: 151083 - DNA, 22 bp, Artificial Sequence
  Synthetic oligonucleotide; TTT chr11 5182715 5182736 5182720 5182715 -
acatttaaggttaatattgtta

SEQ ID NO: 151084 - DNA, 22 bp, Artificial Sequence
  Synthetic oligonucleotide; TTA chr11 5182714 5182735 5182719 5182714 -
catttaaggttaatattgttat

SEQ ID NO: 151085 - DNA, 22 bp, Artificial Sequence
  Synthetic oligonucleotide; TTT chr11 5182709 5182730 5182714 5182709 -
aaggttaatattgttatgtgag

SEQ ID NO: 151086 - DNA, 22 bp, Artificial Sequence
  Synthetic oligonucleotide; TTA chr11 5182708 5182729 5182713 5182708 -
aggttaatattgttatgtgaga

SEQ ID NO: 151087 - DNA, 22 bp, Artificial Sequence
  Synthetic oligonucleotide; TTA chr11 5182702 5182723 5182707 5182702 -
atattgttatgtgagaatttga

SEQ ID NO: 151088 - DNA, 22 bp, Artificial Sequence
  Synthetic oligonucleotide; TTG chr11 5182696 5182717 5182701 5182696 -
ttatgtgagaatttgatcctgt

SEQ ID NO: 151089 - DNA, 22 bp, Artificial Sequence
  Synthetic oligonucleotide; TTA chr11 5182693 5182714 5182698 5182693 -
tgtgagaatttgatcctgtcat

SEQ ID NO: 151090 - DNA, 22 bp, Artificial Sequence
  Synthetic oligonucleotide; TTT chr11 5182682 5182703 5182687 5182682 -
gatcctgtcattatgatgttag

SEQ ID NO: 151091 - DNA, 22 bp, Artificial Sequence
  Synthetic oligonucleotide; TTG chr11 5182681 5182702 5182686 5182681 -
atcctgtcattatgatgttagc

SEQ ID NO: 151092 - DNA, 22 bp, Artificial Sequence
  Synthetic oligonucleotide; CTG chr11 5182675 5182696 5182680 5182675 -
tcattatgatgttagctggtta

SEQ ID NO: 151093 - DNA, 22 bp, Artificial Sequence
  Synthetic oligonucleotide; TTA chr11 5182669 5182690 5182674 5182669 -
tgatgttagctggttattttgc

SEQ ID NO: 151094 - DNA, 22 bp, Artificial Sequence
  Synthetic oligonucleotide; TTA chr11 5182661 5182682 5182666 5182661 -
gctggttattttgcttgctagt

SEQ ID NO: 151095 - DNA, 22 bp, Artificial Sequence
  Synthetic oligonucleotide; CTG chr11 5182657 5182678 5182662 5182657 -
gttattttgcttgctagttgat

SEQ ID NO: 151096 - DNA, 22 bp, Artificial Sequence
  Synthetic oligonucleotide; TTA chr11 5182653 5182674 5182658 5182653 -
ttttgcttgctagttgatgcag

SEQ ID NO: 151097 - DNA, 22 bp, Artificial Sequence
  Synthetic oligonucleotide; TTT chr11 5182650 5182671 5182655 5182650 -
tgcttgctagttgatgcagttt

SEQ ID NO: 151098 - DNA, 22 bp, Artificial Sequence
  Synthetic oligonucleotide; TTT chr11 5182649 5182670 5182654 5182649 -
gcttgctagttgatgcagtttc

SEQ ID NO: 151099 - DNA, 22 bp, Artificial Sequence
  Synthetic oligonucleotide; TTG chr11 5182648 5182669 5182653 5182648 -
cttgctagttgatgcagtttct

SEQ ID NO: 151100 - DNA, 22 bp, Artificial Sequence
  Synthetic oligonucleotide; CTT chr11 5182645 5182666 5182650 5182645 -
gctagttgatgcagtttctccc

SEQ ID NO: 151101 - DNA, 22 bp, Artificial Sequence
  Synthetic oligonucleotide; TTG chr11 5182644 5182665 5182649 5182644 -
ctagttgatgcagtttctccct

SEQ ID NO: 151102 - DNA, 22 bp, Artificial Sequence
  Synthetic oligonucleotide; CTA chr11 5182641 5182662 5182646 5182641 -
gttgatgcagtttctccctagc

SEQ ID NO: 151103 - DNA, 22 bp, Artificial Sequence
  Synthetic oligonucleotide; TTG chr11 5182637 5182658 5182642 5182637 -
atgcagtttctccctagccttg

SEQ ID NO: 151104 - DNA, 22 bp, Artificial Sequence
  Synthetic oligonucleotide; TTT chr11 5182628 5182649 5182633 5182628 -
ctccctagccttgatggtcttt

SEQ ID NO: 151105 - DNA, 22 bp, Artificial Sequence
  Synthetic oligonucleotide; TTC chr11 5182627 5182648 5182632 5182627 -
tccctagccttgatggtcttta

SEQ ID NO: 151106 - DNA, 22 bp, Artificial Sequence
  Synthetic oligonucleotide; CTC chr11 5182625 5182646 5182630 5182625 -
cctagccttgatggtctttaca

SEQ ID NO: 151107 - DNA, 22 bp, Artificial Sequence
  Synthetic oligonucleotide; CTA chr11 5182621 5182642 5182626 5182621 -
gccttgatggtctttacaattt

SEQ ID NO: 151108 - DNA, 22 bp, Artificial Sequence
  Synthetic oligonucleotide; CTT chr11 5182616 5182637 5182621 5182616 -
gatggtctttacaatttggcat

SEQ ID NO: 151109 - DNA, 22 bp, Artificial Sequence
  Synthetic oligonucleotide; TTG chr11 5182615 5182636 5182620 5182615 -
atggtctttacaatttggcatg

SEQ ID NO: 151110 - DNA, 22 bp, Artificial Sequence
  Synthetic oligonucleotide; CTT chr11 5182607 5182628 5182612 5182607 -
tacaatttggcatgtttttgca

SEQ ID NO: 151111 - DNA, 22 bp, Artificial Sequence
  Synthetic oligonucleotide; TTT chr11 5182606 5182627 5182611 5182606 -
acaatttggcatgtttttgcag

SEQ ID NO: 151112 - DNA, 22 bp, Artificial Sequence
  Synthetic oligonucleotide; TTA chr11 5182605 5182626 5182610 5182605 -
caatttggcatgtttttgcagt

SEQ ID NO: 151113 - DNA, 22 bp, Artificial Sequence
  Synthetic oligonucleotide; TTT chr11 5182599 5182620 5182604 5182599 -
ggcatgtttttgcagtggctgg

SEQ ID NO: 151114 - DNA, 22 bp, Artificial Sequence
  Synthetic oligonucleotide; TTG chr11 5182598 5182619 5182603 5182598 -
gcatgtttttgcagtggctggt

SEQ ID NO: 151115 - DNA, 22 bp, Artificial Sequence
  Synthetic oligonucleotide; TTT chr11 5182590 5182611 5182595 5182590 -
ttgcagtggctggtactggttg

SEQ ID NO: 151116 - DNA, 22 bp, Artificial Sequence
  Synthetic oligonucleotide; TTT chr11 5182589 5182610 5182594 5182589 -
tgcagtggctggtactggttgt

SEQ ID NO: 151117 - DNA, 22 bp, Artificial Sequence
  Synthetic oligonucleotide; TTT chr11 5182588 5182609 5182593 5182588 -
gcagtggctggtactggttgtt

SEQ ID NO: 151118 - DNA, 22 bp, Artificial Sequence
  Synthetic oligonucleotide; TTG chr11 5182587 5182608 5182592 5182587 -
cagtggctggtactggttgttt

SEQ ID NO: 151119 - DNA, 22 bp, Artificial Sequence
  Synthetic oligonucleotide; CTG chr11 5182578 5182599 5182583 5182578 -
gtactggttgtttctttccatg

SEQ ID NO: 151120 - DNA, 22 bp, Artificial Sequence
  Synthetic oligonucleotide; CTG chr11 5182572 5182593 5182577 5182572 -
gttgtttctttccatgtttact

SEQ ID NO: 151121 - DNA, 22 bp, Artificial Sequence
  Synthetic oligonucleotide; TTG chr11 5182568 5182589 5182573 5182568 -
tttctttccatgtttactgctt

SEQ ID NO: 151122 - DNA, 22 bp, Artificial Sequence
  Synthetic oligonucleotide; TTT chr11 5182565 5182586 5182570 5182565 -
ctttccatgtttactgcttcct

SEQ ID NO: 151123 - DNA, 22 bp, Artificial Sequence
  Synthetic oligonucleotide; TTC chr11 5182564 5182585 5182569 5182564 -
tttccatgtttactgcttcctt

SEQ ID NO: 151124 - DNA, 22 bp, Artificial Sequence
  Synthetic oligonucleotide; CTT chr11 5182562 5182583 5182567 5182562 -
tccatgtttactgcttccttca

SEQ ID NO: 151125 - DNA, 22 bp, Artificial Sequence
  Synthetic oligonucleotide; TTT chr11 5182561 5182582 5182566 5182561 -
ccatgtttactgcttccttcag

SEQ ID NO: 151126 - DNA, 22 bp, Artificial Sequence
  Synthetic oligonucleotide; TTC chr11 5182560 5182581 5182565 5182560 -
catgtttactgcttccttcagg

SEQ ID NO: 151127 - DNA, 22 bp, Artificial Sequence
  Synthetic oligonucleotide; TTT chr11 5182553 5182574 5182558 5182553 -
actgcttccttcaggagctctt

SEQ ID NO: 151128 - DNA, 22 bp, Artificial Sequence
  Synthetic oligonucleotide; TTA chr11 5182552 5182573 5182557 5182552 -
ctgcttccttcaggagctcttt

SEQ ID NO: 151129 - DNA, 22 bp, Artificial Sequence
  Synthetic oligonucleotide; CTG chr11 5182549 5182570 5182554 5182549 -
cttccttcaggagctcttttag

SEQ ID NO: 151130 - DNA, 22 bp, Artificial Sequence
  Synthetic oligonucleotide; CTT chr11 5182546 5182567 5182551 5182546 -
ccttcaggagctcttttagggc

SEQ ID NO: 151131 - DNA, 22 bp, Artificial Sequence
  Synthetic oligonucleotide; TTC chr11 5182545 5182566 5182550 5182545 -
cttcaggagctcttttagggca

SEQ ID NO: 151132 - DNA, 22 bp, Artificial Sequence
  Synthetic oligonucleotide; CTT chr11 5182542 5182563 5182547 5182542 -
caggagctcttttagggcaggc

SEQ ID NO: 151133 - DNA, 22 bp, Artificial Sequence
  Synthetic oligonucleotide; TTC chr11 5182541 5182562 5182546 5182541 -
aggagctcttttagggcaggcc

SEQ ID NO: 151134 - DNA, 22 bp, Artificial Sequence
  Synthetic oligonucleotide; CTC chr11 5182533 5182554 5182538 5182533 -
ttttagggcaggcctggtggtg

SEQ ID NO: 151135 - DNA, 22 bp, Artificial Sequence
  Synthetic oligonucleotide; CTT chr11 5182531 5182552 5182536 5182531 -
ttagggcaggcctggtggtgac

SEQ ID NO: 151136 - DNA, 22 bp, Artificial Sequence
  Synthetic oligonucleotide; TTT chr11 5182530 5182551 5182535 5182530 -
tagggcaggcctggtggtgaca

SEQ ID NO: 151137 - DNA, 22 bp, Artificial Sequence
  Synthetic oligonucleotide; TTT chr11 5182529 5182550 5182534 5182529 -
agggcaggcctggtggtgacaa

SEQ ID NO: 151138 - DNA, 22 bp, Artificial Sequence
  Synthetic oligonucleotide; TTA chr11 5182528 5182549 5182533 5182528 -
gggcaggcctggtggtgacaaa

SEQ ID NO: 151139 - DNA, 22 bp, Artificial Sequence
  Synthetic oligonucleotide; CTG chr11 5182517 5182538 5182522 5182517 -
gtggtgacaaaatcagcaattg

SEQ ID NO: 151140 - DNA, 22 bp, Artificial Sequence
  Synthetic oligonucleotide; TTG chr11 5182495 5182516 5182500 5182495 -
cttgtctgtaaagtattttatt

SEQ ID NO: 151141 - DNA, 22 bp, Artificial Sequence
  Synthetic oligonucleotide; CTT chr11 5182492 5182513 5182497 5182492 -
gtctgtaaagtattttatttct

SEQ ID NO: 151142 - DNA, 22 bp, Artificial Sequence
  Synthetic oligonucleotide; TTG chr11 5182491 5182512 5182496 5182491 -
tctgtaaagtattttatttctc

SEQ ID NO: 151143 - DNA, 22 bp, Artificial Sequence
  Synthetic oligonucleotide; CTG chr11 5182487 5182508 5182492 5182487 -
taaagtattttatttctccttc

SEQ ID NO: 151144 - DNA, 22 bp, Artificial Sequence
  Synthetic oligonucleotide; TTT chr11 5182477 5182498 5182482 5182477 -
tatttctccttcacttatgaag

SEQ ID NO: 151145 - DNA, 22 bp, Artificial Sequence
  Synthetic oligonucleotide; TTT chr11 5182476 5182497 5182481 5182476 -
atttctccttcacttatgaagc

SEQ ID NO: 151146 - DNA, 22 bp, Artificial Sequence
  Synthetic oligonucleotide; TTA chr11 5182475 5182496 5182480 5182475 -
tttctccttcacttatgaagct

SEQ ID NO: 151147 - DNA, 22 bp, Artificial Sequence
  Synthetic oligonucleotide; TTT chr11 5182472 5182493 5182477 5182472 -
ctccttcacttatgaagcttac

SEQ ID NO: 151148 - DNA, 22 bp, Artificial Sequence
  Synthetic oligonucleotide; TTC chr11 5182471 5182492 5182476 5182471 -
tccttcacttatgaagcttacc

SEQ ID NO: 151149 - DNA, 22 bp, Artificial Sequence
  Synthetic oligonucleotide; CTC chr11 5182469 5182490 5182474 5182469 -
cttcacttatgaagcttaccaa

SEQ ID NO: 151150 - DNA, 22 bp, Artificial Sequence
  Synthetic oligonucleotide; CTT chr11 5182466 5182487 5182471 5182466 -
cacttatgaagcttaccaacca

SEQ ID NO: 151151 - DNA, 22 bp, Artificial Sequence
  Synthetic oligonucleotide; TTC chr11 5182465 5182486 5182470 5182465 -
acttatgaagcttaccaaccaa

SEQ ID NO: 151152 - DNA, 22 bp, Artificial Sequence
  Synthetic oligonucleotide; CTT chr11 5182461 5182482 5182466 5182461 -
atgaagcttaccaaccaaaaaa

SEQ ID NO: 151153 - DNA, 22 bp, Artificial Sequence
  Synthetic oligonucleotide; TTA chr11 5182460 5182481 5182465 5182460 -
tgaagcttaccaaccaaaaaaa

SEQ ID NO: 151154 - DNA, 22 bp, Artificial Sequence
  Synthetic oligonucleotide; CTT chr11 5182452 5182473 5182457 5182452 -
accaaccaaaaaaagtccagga

SEQ ID NO: 151155 - DNA, 22 bp, Artificial Sequence
  Synthetic oligonucleotide; TTA chr11 5182451 5182472 5182456 5182451 -
ccaaccaaaaaaagtccaggac

SEQ ID NO: 151156 - DNA, 22 bp, Artificial Sequence
  Synthetic oligonucleotide; TTC chr11 5182418 5182439 5182423 5182418 -
acagccgaattctaccagaggt

SEQ ID NO: 151157 - DNA, 22 bp, Artificial Sequence
  Synthetic oligonucleotide; TTC chr11 5182406 5182427 5182411 5182406 -
taccagaggtacaaggaggagc

SEQ ID NO: 151158 - DNA, 22 bp, Artificial Sequence
  Synthetic oligonucleotide; CTA chr11 5182404 5182425 5182409 5182404 -
ccagaggtacaaggaggagctg

SEQ ID NO: 151159 - DNA, 22 bp, Artificial Sequence
  Synthetic oligonucleotide; CTG chr11 5182382 5182403 5182387 5182382 -
gtaccattccttctgaaactat

SEQ ID NO: 151160 - DNA, 22 bp, Artificial Sequence
  Synthetic oligonucleotide; TTC chr11 5182373 5182394 5182378 5182373 -
cttctgaaactattccaatcaa

SEQ ID NO: 151161 - DNA, 22 bp, Artificial Sequence
  Synthetic oligonucleotide; CTT chr11 5182370 5182391 5182375 5182370 -
ctgaaactattccaatcaatag

SEQ ID NO: 151162 - DNA, 22 bp, Artificial Sequence
  Synthetic oligonucleotide; TTC chr11 5182369 5182390 5182374 5182369 -
tgaaactattccaatcaataga

SEQ ID NO: 151163 - DNA, 22 bp, Artificial Sequence
  Synthetic oligonucleotide; CTG chr11 5182367 5182388 5182372 5182367 -
aaactattccaatcaatagaaa

SEQ ID NO: 151164 - DNA, 22 bp, Artificial Sequence
  Synthetic oligonucleotide; CTA chr11 5182361 5182382 5182366 5182361 -
ttccaatcaatagaaaaagagg

SEQ ID NO: 151165 - DNA, 22 bp, Artificial Sequence
  Synthetic oligonucleotide; TTC chr11 5182358 5182379 5182363 5182358 -
caatcaatagaaaaagagggaa

SEQ ID NO: 151166 - DNA, 22 bp, Artificial Sequence
  Synthetic oligonucleotide; CTC chr11 5182331 5182352 5182336 5182331 -
cctaactcattttatgaggcca

SEQ ID NO: 151167 - DNA, 22 bp, Artificial Sequence
  Synthetic oligonucleotide; CTA chr11 5182327 5182348 5182332 5182327 -
actcattttatgaggccagcat

SEQ ID NO: 151168 - DNA, 22 bp, Artificial Sequence
  Synthetic oligonucleotide; CTC chr11 5182323 5182344 5182328 5182323 -
attttatgaggccagcatcatc

SEQ ID NO: 151169 - DNA, 22 bp, Artificial Sequence
  Synthetic oligonucleotide; TTT chr11 5182319 5182340 5182324 5182319 -
tatgaggccagcatcatcttga

SEQ ID NO: 151170 - DNA, 22 bp, Artificial Sequence
  Synthetic oligonucleotide; TTT chr11 5182318 5182339 5182323 5182318 -
atgaggccagcatcatcttgat

SEQ ID NO: 151171 - DNA, 22 bp, Artificial Sequence
  Synthetic oligonucleotide; TTA chr11 5182317 5182338 5182322 5182317 -
tgaggccagcatcatcttgata

SEQ ID NO: 151172 - DNA, 22 bp, Artificial Sequence
  Synthetic oligonucleotide; CTT chr11 5182299 5182320 5182304 5182299 -
gataccaaagcctagcagacac

SEQ ID NO: 151173 - DNA, 22 bp, Artificial Sequence
  Synthetic oligonucleotide; TTG chr11 5182298 5182319 5182303 5182298 -
ataccaaagcctagcagacaca

SEQ ID NO: 151174 - DNA, 22 bp, Artificial Sequence
  Synthetic oligonucleotide; CTA chr11 5182285 5182306 5182290 5182285 -
gcagacacacaacaaaaaaaga

SEQ ID NO: 151175 - DNA, 22 bp, Artificial Sequence
  Synthetic oligonucleotide; TTT chr11 5182257 5182278 5182262 5182257 -
tacaccaatatccctgatgaac

SEQ ID NO: 151176 - DNA, 22 bp, Artificial Sequence
  Synthetic oligonucleotide; TTT chr11 5182256 5182277 5182261 5182256 -
acaccaatatccctgatgaaca

SEQ ID NO: 151177 - DNA, 22 bp, Artificial Sequence
  Synthetic oligonucleotide; TTA chr11 5182255 5182276 5182260 5182255 -
caccaatatccctgatgaacat

SEQ ID NO: 151178 - DNA, 22 bp, Artificial Sequence
  Synthetic oligonucleotide; CTG chr11 5182241 5182262 5182246 5182241 -
atgaacatcgatgcaaaaatcc

SEQ ID NO: 151179 - DNA, 22 bp, Artificial Sequence
  Synthetic oligonucleotide; CTC chr11 5182217 5182238 5182222 5182217 -
agtaaaatactggcaaaccaaa

SEQ ID NO: 151180 - DNA, 22 bp, Artificial Sequence
  Synthetic oligonucleotide; CTG chr11 5182205 5182226 5182210 5182205 -
gcaaaccaaatccaggagcaca

SEQ ID NO: 151181 - DNA, 22 bp, Artificial Sequence
  Synthetic oligonucleotide; CTT chr11 5182172 5182193 5182177 5182172 -
atccaccatgatcaagtgggct

SEQ ID NO: 151182 - DNA, 22 bp, Artificial Sequence
  Synthetic oligonucleotide; TTA chr11 5182171 5182192 5182176 5182171 -
tccaccatgatcaagtgggctt

SEQ ID NO: 151183 - DNA, 22 bp, Artificial Sequence
  Synthetic oligonucleotide; CTT chr11 5182149 5182170 5182154 5182149 -
catccctgggatgcagggctgg

SEQ ID NO: 151184 - DNA, 22 bp, Artificial Sequence
  Synthetic oligonucleotide; TTC chr11 5182148 5182169 5182153 5182148 -
atccctgggatgcagggctggt

SEQ ID NO: 151185 - DNA, 22 bp, Artificial Sequence
  Synthetic oligonucleotide; CTG chr11 5182141 5182162 5182146 5182141 -
ggatgcagggctggttcaacat

SEQ ID NO: 151186 - DNA, 22 bp, Artificial Sequence
  Synthetic oligonucleotide; CTG chr11 5182128 5182149 5182133 5182128 -
gttcaacatatgcaaatcaata

SEQ ID NO: 151187 - DNA, 22 bp, Artificial Sequence
  Synthetic oligonucleotide; TTC chr11 5182124 5182145 5182129 5182124 -
aacatatgcaaatcaataaaca

SEQ ID NO: 151188 - DNA, 22 bp, Artificial Sequence
  Synthetic oligonucleotide; TTA chr11 5182057 5182078 5182062 5182057 -
tctcaatagatgcagaaaaggc

SEQ ID NO: 151189 - DNA, 22 bp, Artificial Sequence
  Synthetic oligonucleotide; CTC chr11 5182053 5182074 5182058 5182053 -
aatagatgcagaaaaggccttt

SEQ ID NO: 151190 - DNA, 22 bp, Artificial Sequence
  Synthetic oligonucleotide; CTT chr11 5182032 5182053 5182037 5182032 -
tgacaaaattcaacaatgcttc

SEQ ID NO: 151191 - DNA, 22 bp, Artificial Sequence
  Synthetic oligonucleotide; TTT chr11 5182031 5182052 5182036 5182031 -
gacaaaattcaacaatgcttca

SEQ ID NO: 151192 - DNA, 22 bp, Artificial Sequence
  Synthetic oligonucleotide; TTG chr11 5182030 5182051 5182035 5182030 -
acaaaattcaacaatgcttcat

SEQ ID NO: 151193 - DNA, 22 bp, Artificial Sequence
  Synthetic oligonucleotide; TTC chr11 5182021 5182042 5182026 5182021 -
aacaatgcttcatactaaaaac

SEQ ID NO: 151194 - DNA, 22 bp, Artificial Sequence
  Synthetic oligonucleotide; CTT chr11 5182011 5182032 5182016 5182011 -
catactaaaaactctcaataaa

SEQ ID NO: 151195 - DNA, 22 bp, Artificial Sequence
  Synthetic oligonucleotide; TTC chr11 5182010 5182031 5182015 5182010 -
atactaaaaactctcaataaat

SEQ ID NO: 151196 - DNA, 22 bp, Artificial Sequence
  Synthetic oligonucleotide; CTA chr11 5182004 5182025 5182009 5182004 -
aaaactctcaataaattaggta

SEQ ID NO: 151197 - DNA, 22 bp, Artificial Sequence
  Synthetic oligonucleotide; CTC chr11 5181997 5182018 5182002 5181997 -
tcaataaattaggtatcgatgg

SEQ ID NO: 151198 - DNA, 22 bp, Artificial Sequence
  Synthetic oligonucleotide; CTC chr11 5181995 5182016 5182000 5181995 -
aataaattaggtatcgatggga

SEQ ID NO: 151199 - DNA, 22 bp, Artificial Sequence
  Synthetic oligonucleotide; TTA chr11 5181986 5182007 5181991 5181986 -
ggtatcgatgggacatatctca

SEQ ID NO: 151200 - DNA, 22 bp, Artificial Sequence
  Synthetic oligonucleotide; CTC chr11 5181965 5181986 5181970 5181965 -
aaaataataagagctatctatg

SEQ ID NO: 151201 - DNA, 22 bp, Artificial Sequence
  Synthetic oligonucleotide; CTA chr11 5181949 5181970 5181954 5181949 -
tctatgacaaacccacagccaa

SEQ ID NO: 151202 - DNA, 22 bp, Artificial Sequence
  Synthetic oligonucleotide; CTA chr11 5181945 5181966 5181950 5181945 -
tgacaaacccacagccaatatc

SEQ ID NO: 151203 - DNA, 22 bp, Artificial Sequence
  Synthetic oligonucleotide; CTG chr11 5181917 5181938 5181922 5181917 -
aatggacaaaaactggaagcat

SEQ ID NO: 151204 - DNA, 22 bp, Artificial Sequence
  Synthetic oligonucleotide; CTG chr11 5181902 5181923 5181907 5181902 -
gaagcattccctttgaaaactg

SEQ ID NO: 151205 - DNA, 22 bp, Artificial Sequence
  Synthetic oligonucleotide; TTC chr11 5181893 5181914 5181898 5181893 -
cctttgaaaactggcacaagac

SEQ ID NO: 151206 - DNA, 22 bp, Artificial Sequence
  Synthetic oligonucleotide; CTT chr11 5181889 5181910 5181894 5181889 -
tgaaaactggcacaagacaggg

SEQ ID NO: 151207 - DNA, 22 bp, Artificial Sequence
  Synthetic oligonucleotide; TTT chr11 5181888 5181909 5181893 5181888 -
gaaaactggcacaagacaggga

SEQ ID NO: 151208 - DNA, 22 bp, Artificial Sequence
  Synthetic oligonucleotide; TTG chr11 5181887 5181908 5181892 5181887 -
aaaactggcacaagacagggat

SEQ ID NO: 151209 - DNA, 22 bp, Artificial Sequence
  Synthetic oligonucleotide; CTG chr11 5181880 5181901 5181885 5181880 -
gcacaagacagggatgccctct

SEQ ID NO: 151210 - DNA, 22 bp, Artificial Sequence
  Synthetic oligonucleotide; CTC chr11 5181859 5181880 5181864 5181859 -
tctcaccactcctattcaacat

SEQ ID NO: 151211 - DNA, 22 bp, Artificial Sequence
  Synthetic oligonucleotide; CTC chr11 5181857 5181878 5181862 5181857 -
tcaccactcctattcaacatag

SEQ ID NO: 151212 - DNA, 22 bp, Artificial Sequence
  Synthetic oligonucleotide; CTC chr11 5181855 5181876 5181860 5181855 -
accactcctattcaacatagtg

SEQ ID NO: 151213 - DNA, 22 bp, Artificial Sequence
  Synthetic oligonucleotide; CTC chr11 5181848 5181869 5181853 5181848 -
ctattcaacatagtgttggaag

SEQ ID NO: 151214 - DNA, 22 bp, Artificial Sequence
  Synthetic oligonucleotide; CTA chr11 5181845 5181866 5181850 5181845 -
ttcaacatagtgttggaagttc

SEQ ID NO: 151215 - DNA, 22 bp, Artificial Sequence
  Synthetic oligonucleotide; TTC chr11 5181842 5181863 5181847 5181842 -
aacatagtgttggaagttctgg

SEQ ID NO: 151216 - DNA, 22 bp, Artificial Sequence
  Synthetic oligonucleotide; TTG chr11 5181830 5181851 5181835 5181830 -
gaagttctggccagggcaatca

SEQ ID NO: 151217 - DNA, 22 bp, Artificial Sequence
  Synthetic oligonucleotide; TTC chr11 5181823 5181844 5181828 5181823 -
tggccagggcaatcaggcaaga

SEQ ID NO: 151218 - DNA, 22 bp, Artificial Sequence
  Synthetic oligonucleotide; CTG chr11 5181821 5181842 5181826 5181821 -
gccagggcaatcaggcaagaga

SEQ ID NO: 151219 - DNA, 22 bp, Artificial Sequence
  Synthetic oligonucleotide; TTC chr11 5181781 5181802 5181786 5181781 -
aattaggaaaagaggaagtgaa

SEQ ID NO: 151220 - DNA, 22 bp, Artificial Sequence
  Synthetic oligonucleotide; TTA chr11 5181776 5181797 5181781 5181776 -
ggaaaagaggaagtgaaattgt

SEQ ID NO: 151221 - DNA, 22 bp, Artificial Sequence
  Synthetic oligonucleotide; TTG chr11 5181755 5181776 5181760 5181755 -
tccctgtttgcagatgacgtga

SEQ ID NO: 151222 - DNA, 22 bp, Artificial Sequence
  Synthetic oligonucleotide; CTG chr11 5181749 5181770 5181754 5181749 -
tttgcagatgacgtgattgtat

SEQ ID NO: 151223 - DNA, 22 bp, Artificial Sequence
  Synthetic oligonucleotide; TTT chr11 5181746 5181767 5181751 5181746 -
gcagatgacgtgattgtatatc

SEQ ID NO: 151224 - DNA, 22 bp, Artificial Sequence
  Synthetic oligonucleotide; TTG chr11 5181745 5181766 5181750 5181745 -
cagatgacgtgattgtatatct

SEQ ID NO: 151225 - DNA, 22 bp, Artificial Sequence
  Synthetic oligonucleotide; TTG chr11 5181730 5181751 5181735 5181730 -
tatatctagaaaaccccatcgt

SEQ ID NO: 151226 - DNA, 22 bp, Artificial Sequence
  Synthetic oligonucleotide; CTA chr11 5181722 5181743 5181727 5181722 -
gaaaaccccatcgtctcagccc

SEQ ID NO: 151227 - DNA, 22 bp, Artificial Sequence
  Synthetic oligonucleotide; CTC chr11 5181705 5181726 5181710 5181705 -
agcccaaaatctccttaagctg

SEQ ID NO: 151228 - DNA, 22 bp, Artificial Sequence
  Synthetic oligonucleotide; CTC chr11 5181692 5181713 5181697 5181692 -
cttaagctgataagcaacttca

SEQ ID NO: 151229 - DNA, 22 bp, Artificial Sequence
  Synthetic oligonucleotide; CTT chr11 5181689 5181710 5181694 5181689 -
aagctgataagcaacttcagaa

SEQ ID NO: 151230 - DNA, 22 bp, Artificial Sequence
  Synthetic oligonucleotide; TTA chr11 5181688 5181709 5181693 5181688 -
agctgataagcaacttcagaaa

SEQ ID NO: 151231 - DNA, 22 bp, Artificial Sequence
  Synthetic oligonucleotide; CTG chr11 5181683 5181704 5181688 5181683 -
ataagcaacttcagaaaagtct

SEQ ID NO: 151232 - DNA, 22 bp, Artificial Sequence
  Synthetic oligonucleotide; CTT chr11 5181672 5181693 5181677 5181672 -
cagaaaagtctcagcatacaaa

SEQ ID NO: 151233 - DNA, 22 bp, Artificial Sequence
  Synthetic oligonucleotide; TTC chr11 5181671 5181692 5181676 5181671 -
agaaaagtctcagcatacaaaa

SEQ ID NO: 151234 - DNA, 22 bp, Artificial Sequence
  Synthetic oligonucleotide; CTC chr11 5181660 5181681 5181665 5181660 -
agcatacaaaatcaatgtgcaa

SEQ ID NO: 151235 - DNA, 22 bp, Artificial Sequence
  Synthetic oligonucleotide; TTC chr11 5181623 5181644 5181628 5181623 -
ctatacaccaataacagacaaa

SEQ ID NO: 151236 - DNA, 22 bp, Artificial Sequence
  Synthetic oligonucleotide; CTA chr11 5181620 5181641 5181625 5181620 -
tacaccaataacagacaaacag

SEQ ID NO: 151237 - DNA, 22 bp, Artificial Sequence
  Synthetic oligonucleotide; CTC chr11 5181575 5181596 5181580 5181575 -
ccattcacaattgcctcaaaga

SEQ ID NO: 151238 - DNA, 22 bp, Artificial Sequence
  Synthetic oligonucleotide; TTC chr11 5181569 5181590 5181574 5181569 -
acaattgcctcaaagagaataa

SEQ ID NO: 151239 - DNA, 22 bp, Artificial Sequence
  Synthetic oligonucleotide; TTG chr11 5181562 5181583 5181567 5181562 -
cctcaaagagaataaaatacct

SEQ ID NO: 151240 - DNA, 22 bp, Artificial Sequence
  Synthetic oligonucleotide; CTC chr11 5181558 5181579 5181563 5181558 -
aaagagaataaaatacctagga

SEQ ID NO: 151241 - DNA, 22 bp, Artificial Sequence
  Synthetic oligonucleotide; CTA chr11 5181539 5181560 5181544 5181539 -
ggaatccaacttacaagggatg

SEQ ID NO: 151242 - DNA, 22 bp, Artificial Sequence
  Synthetic oligonucleotide; CTT chr11 5181527 5181548 5181532 5181527 -
acaagggatgtgaaggacctct

SEQ ID NO: 151243 - DNA, 22 bp, Artificial Sequence
  Synthetic oligonucleotide; TTA chr11 5181526 5181547 5181531 5181526 -
caagggatgtgaaggacctctt

SEQ ID NO: 151244 - DNA, 22 bp, Artificial Sequence
  Synthetic oligonucleotide; CTC chr11 5181506 5181527 5181511 5181506 -
ttcaaggagaacaacaaaacac

SEQ ID NO: 151245 - DNA, 22 bp, Artificial Sequence
  Synthetic oligonucleotide; CTT chr11 5181504 5181525 5181509 5181504 -
caaggagaacaacaaaacactg

SEQ ID NO: 151246 - DNA, 22 bp, Artificial Sequence
  Synthetic oligonucleotide; TTC chr11 5181503 5181524 5181508 5181503 -
aaggagaacaacaaaacactgc

SEQ ID NO: 151247 - DNA, 22 bp, Artificial Sequence
  Synthetic oligonucleotide; CTG chr11 5181482 5181503 5181487 5181482 -
ctcaacgaaataaaagaggata

SEQ ID NO: 151248 - DNA, 22 bp, Artificial Sequence
  Synthetic oligonucleotide; CTC chr11 5181479 5181500 5181484 5181479 -
aacgaaataaaagaggatacaa

SEQ ID NO: 151249 - DNA, 22 bp, Artificial Sequence
  Synthetic oligonucleotide; TTC chr11 5181439 5181460 5181444 5181439 -
catgctcatggataggaagaat

SEQ ID NO: 151250 - DNA, 22 bp, Artificial Sequence
  Synthetic oligonucleotide; CTC chr11 5181432 5181453 5181437 5181432 -
atggataggaagaatcaatatc

SEQ ID NO: 151251 - DNA, 22 bp, Artificial Sequence
  Synthetic oligonucleotide; CTT chr11 5181396 5181417 5181401 5181396 -
actgcccaaggtaatttataga

SEQ ID NO: 151252 - DNA, 22 bp, Artificial Sequence
  Synthetic oligonucleotide; TTA chr11 5181395 5181416 5181400 5181395 -
ctgcccaaggtaatttatagat

SEQ ID NO: 151253 - DNA, 22 bp, Artificial Sequence
  Synthetic oligonucleotide; CTG chr11 5181392 5181413 5181397 5181392 -
cccaaggtaatttatagattca

SEQ ID NO: 151254 - DNA, 22 bp, Artificial Sequence
  Synthetic oligonucleotide; TTT chr11 5181379 5181400 5181384 5181379 -
atagattcaatgccatccccat

SEQ ID NO: 151255 - DNA, 22 bp, Artificial Sequence
  Synthetic oligonucleotide; TTA chr11 5181378 5181399 5181383 5181378 -
tagattcaatgccatccccatc

SEQ ID NO: 151256 - DNA, 22 bp, Artificial Sequence
  Synthetic oligonucleotide; TTC chr11 5181371 5181392 5181376 5181371 -
aatgccatccccatcaagctac

SEQ ID NO: 151257 - DNA, 22 bp, Artificial Sequence
  Synthetic oligonucleotide; CTA chr11 5181350 5181371 5181355 5181350 -
ccaatgactttcttcacagaat

SEQ ID NO: 151258 - DNA, 22 bp, Artificial Sequence
  Synthetic oligonucleotide; CTT chr11 5181340 5181361 5181345 5181340 -
tcttcacagaattggaaaaaac

SEQ ID NO: 151259 - DNA, 22 bp, Artificial Sequence
  Synthetic oligonucleotide; TTT chr11 5181339 5181360 5181344 5181339 -
cttcacagaattggaaaaaact

SEQ ID NO: 151260 - DNA, 22 bp, Artificial Sequence
  Synthetic oligonucleotide; TTC chr11 5181338 5181359 5181343 5181338 -
ttcacagaattggaaaaaacta

SEQ ID NO: 151261 - DNA, 22 bp, Artificial Sequence
  Synthetic oligonucleotide; CTT chr11 5181336 5181357 5181341 5181336 -
cacagaattggaaaaaactact

SEQ ID NO: 151262 - DNA, 22 bp, Artificial Sequence
  Synthetic oligonucleotide; TTC chr11 5181335 5181356 5181340 5181335 -
acagaattggaaaaaactactt

SEQ ID NO: 151263 - DNA, 22 bp, Artificial Sequence
  Synthetic oligonucleotide; TTG chr11 5181326 5181347 5181331 5181326 -
gaaaaaactactttaaagttca

SEQ ID NO: 151264 - DNA, 22 bp, Artificial Sequence
  Synthetic oligonucleotide; CTA chr11 5181316 5181337 5181321 5181316 -
ctttaaagttcatatggaacca

SEQ ID NO: 151265 - DNA, 22 bp, Artificial Sequence
  Synthetic oligonucleotide; CTT chr11 5181313 5181334 5181318 5181313 -
taaagttcatatggaaccaaaa

SEQ ID NO: 151266 - DNA, 22 bp, Artificial Sequence
  Synthetic oligonucleotide; TTT chr11 5181312 5181333 5181317 5181312 -
aaagttcatatggaaccaaaaa

SEQ ID NO: 151267 - DNA, 22 bp, Artificial Sequence
  Synthetic oligonucleotide; TTA chr11 5181311 5181332 5181316 5181311 -
aagttcatatggaaccaaaaaa

SEQ ID NO: 151268 - DNA, 22 bp, Artificial Sequence
  Synthetic oligonucleotide; TTC chr11 5181305 5181326 5181310 5181305 -
atatggaaccaaaaaagagccc

SEQ ID NO: 151269 - DNA, 22 bp, Artificial Sequence
  Synthetic oligonucleotide; TTG chr11 5181277 5181298 5181282 5181277 -
acaagtcaatcctaagccaaaa

SEQ ID NO: 151270 - DNA, 22 bp, Artificial Sequence
  Synthetic oligonucleotide; CTA chr11 5181263 5181284 5181268 5181263 -
agccaaaagaacaaagctagag

SEQ ID NO: 151271 - DNA, 22 bp, Artificial Sequence
  Synthetic oligonucleotide; CTA chr11 5181244 5181265 5181249 5181244 -
gaggcatcatgctacctgactt

SEQ ID NO: 151272 - DNA, 22 bp, Artificial Sequence
  Synthetic oligonucleotide; CTA chr11 5181230 5181251 5181235 5181230 -
cctgacttcaaactatactaca

SEQ ID NO: 151273 - DNA, 22 bp, Artificial Sequence
  Synthetic oligonucleotide; CTG chr11 5181226 5181247 5181231 5181226 -
acttcaaactatactacaaggt

SEQ ID NO: 151274 - DNA, 22 bp, Artificial Sequence
  Synthetic oligonucleotide; CTT chr11 5181222 5181243 5181227 5181222 -
caaactatactacaaggtacag

SEQ ID NO: 151275 - DNA, 22 bp, Artificial Sequence
  Synthetic oligonucleotide; TTC chr11 5181221 5181242 5181226 5181221 -
aaactatactacaaggtacagt

SEQ ID NO: 151276 - DNA, 22 bp, Artificial Sequence
  Synthetic oligonucleotide; CTA chr11 5181215 5181236 5181220 5181215 -
tactacaaggtacagtaaccaa

SEQ ID NO: 151277 - DNA, 22 bp, Artificial Sequence
  Synthetic oligonucleotide; CTA chr11 5181210 5181231 5181215 5181210 -
caaggtacagtaaccaaaacaa

SEQ ID NO: 151278 - DNA, 22 bp, Artificial Sequence
  Synthetic oligonucleotide; CTG chr11 5181178 5181199 5181183 5181178 -
gtaccaaaacagagatgtagac

SEQ ID NO: 151279 - DNA, 22 bp, Artificial Sequence
  Synthetic oligonucleotide; CTC chr11 5181135 5181156 5181140 5181135 -
tcagaaataataccacacatcc

SEQ ID NO: 151280 - DNA, 22 bp, Artificial Sequence
  Synthetic oligonucleotide; CTC chr11 5181133 5181154 5181138 5181133 -
agaaataataccacacatccac

SEQ ID NO: 151281 - DNA, 22 bp, Artificial Sequence
  Synthetic oligonucleotide; CTA chr11 5181106 5181127 5181111 5181106 -
tctgatctttgacaaacctgac

SEQ ID NO: 151282 - DNA, 22 bp, Artificial Sequence
  Synthetic oligonucleotide; CTG chr11 5181102 5181123 5181107 5181102 -
atctttgacaaacctgacaaaa

SEQ ID NO: 151283 - DNA, 22 bp, Artificial Sequence
  Synthetic oligonucleotide; CTT chr11 5181097 5181118 5181102 5181097 -
tgacaaacctgacaaaaacaag

SEQ ID NO: 151284 - DNA, 22 bp, Artificial Sequence
  Synthetic oligonucleotide; TTT chr11 5181096 5181117 5181101 5181096 -
gacaaacctgacaaaaacaagc

SEQ ID NO: 151285 - DNA, 22 bp, Artificial Sequence
  Synthetic oligonucleotide; TTG chr11 5181095 5181116 5181100 5181095 -
acaaacctgacaaaaacaagca

SEQ ID NO: 151286 - DNA, 22 bp, Artificial Sequence
  Synthetic oligonucleotide; CTG chr11 5181086 5181107 5181091 5181086 -
acaaaaacaagcaatggggaaa

SEQ ID NO: 151287 - DNA, 22 bp, Artificial Sequence
  Synthetic oligonucleotide; TTC chr11 5181058 5181079 5181063 5181058 -
cctatttaataaatgatgctgg

SEQ ID NO: 151288 - DNA, 22 bp, Artificial Sequence
  Synthetic oligonucleotide; CTA chr11 5181054 5181075 5181059 5181054 -
tttaataaatgatgctgggaaa

SEQ ID NO: 151289 - DNA, 22 bp, Artificial Sequence
  Synthetic oligonucleotide; TTT chr11 5181051 5181072 5181056 5181051 -
aataaatgatgctgggaaaact

SEQ ID NO: 151290 - DNA, 22 bp, Artificial Sequence
  Synthetic oligonucleotide; TTA chr11 5181050 5181071 5181055 5181050 -
ataaatgatgctgggaaaactg

SEQ ID NO: 151291 - DNA, 22 bp, Artificial Sequence
  Synthetic oligonucleotide; CTG chr11 5181037 5181058 5181042 5181037 -
ggaaaactggctagccatatgt

SEQ ID NO: 151292 - DNA, 22 bp, Artificial Sequence
  Synthetic oligonucleotide; CTG chr11 5181028 5181049 5181033 5181028 -
gctagccatatgtagaaagctg

SEQ ID NO: 151293 - DNA, 22 bp, Artificial Sequence
  Synthetic oligonucleotide; CTA chr11 5181024 5181045 5181029 5181024 -
gccatatgtagaaagctgaaac

SEQ ID NO: 151294 - DNA, 22 bp, Artificial Sequence
  Synthetic oligonucleotide; CTG chr11 5181006 5181027 5181011 5181006 -
aaactggatcccttccttacac

SEQ ID NO: 151295 - DNA, 22 bp, Artificial Sequence
  Synthetic oligonucleotide; CTG chr11 5181000 5181021 5181005 5181000 -
gatcccttccttacaccttata

SEQ ID NO: 151296 - DNA, 22 bp, Artificial Sequence
  Synthetic oligonucleotide; CTT chr11 5180992 5181013 5180997 5180992 -
ccttacaccttatacaaaaatt

SEQ ID NO: 151297 - DNA, 22 bp, Artificial Sequence
  Synthetic oligonucleotide; TTC chr11 5180991 5181012 5180996 5180991 -
cttacaccttatacaaaaatta

SEQ ID NO: 151298 - DNA, 22 bp, Artificial Sequence
  Synthetic oligonucleotide; CTT chr11 5180988 5181009 5180993 5180988 -
acaccttatacaaaaattattt

SEQ ID NO: 151299 - DNA, 22 bp, Artificial Sequence
  Synthetic oligonucleotide; TTA chr11 5180987 5181008 5180992 5180987 -
caccttatacaaaaattatttc

SEQ ID NO: 151300 - DNA, 22 bp, Artificial Sequence
  Synthetic oligonucleotide; CTT chr11 5180981 5181002 5180986 5180981 -
atacaaaaattatttcaagatg

SEQ ID NO: 151301 - DNA, 22 bp, Artificial Sequence
  Synthetic oligonucleotide; TTA chr11 5180980 5181001 5180985 5180980 -
tacaaaaattatttcaagatgg

SEQ ID NO: 151302 - DNA, 22 bp, Artificial Sequence
  Synthetic oligonucleotide; TTA chr11 5180969 5180990 5180974 5180969 -
tttcaagatggattaaagactt

SEQ ID NO: 151303 - DNA, 22 bp, Artificial Sequence
  Synthetic oligonucleotide; TTT chr11 5180966 5180987 5180971 5180966 -
caagatggattaaagacttaca

SEQ ID NO: 151304 - DNA, 22 bp, Artificial Sequence
  Synthetic oligonucleotide; TTC chr11 5180965 5180986 5180970 5180965 -
aagatggattaaagacttacat

SEQ ID NO: 151305 - DNA, 22 bp, Artificial Sequence
  Synthetic oligonucleotide; TTA chr11 5180954 5180975 5180959 5180954 -
aagacttacatgttagacctaa

SEQ ID NO: 151306 - DNA, 22 bp, Artificial Sequence
  Synthetic oligonucleotide; CTT chr11 5180947 5180968 5180952 5180947 -
acatgttagacctaaaaccata

SEQ ID NO: 151307 - DNA, 22 bp, Artificial Sequence
  Synthetic oligonucleotide; TTA chr11 5180946 5180967 5180951 5180946 -
catgttagacctaaaaccataa

SEQ ID NO: 151308 - DNA, 22 bp, Artificial Sequence
  Synthetic oligonucleotide; TTA chr11 5180939 5180960 5180944 5180939 -
gacctaaaaccataaaaacctt

SEQ ID NO: 151309 - DNA, 22 bp, Artificial Sequence
  Synthetic oligonucleotide; CTA chr11 5180933 5180954 5180938 5180933 -
aaaccataaaaaccttagaaga

SEQ ID NO: 151310 - DNA, 22 bp, Artificial Sequence
  Synthetic oligonucleotide; CTT chr11 5180917 5180938 5180922 5180917 -
agaagaaaacctaagcaatacc

SEQ ID NO: 151311 - DNA, 22 bp, Artificial Sequence
  Synthetic oligonucleotide; TTA chr11 5180916 5180937 5180921 5180916 -
gaagaaaacctaagcaatacca

SEQ ID NO: 151312 - DNA, 22 bp, Artificial Sequence
  Synthetic oligonucleotide; CTA chr11 5180904 5180925 5180909 5180904 -
agcaataccattcaggacatag

SEQ ID NO: 151313 - DNA, 22 bp, Artificial Sequence
  Synthetic oligonucleotide; TTC chr11 5180891 5180912 5180896 5180891 -
aggacataggcatgggcaagga

SEQ ID NO: 151314 - DNA, 22 bp, Artificial Sequence
  Synthetic oligonucleotide; CTT chr11 5180866 5180887 5180871 5180866 -
catgtctaaaacaccaaaagca

SEQ ID NO: 151315 - DNA, 22 bp, Artificial Sequence
  Synthetic oligonucleotide; TTC chr11 5180865 5180886 5180870 5180865 -
atgtctaaaacaccaaaagcaa

SEQ ID NO: 151316 - DNA, 22 bp, Artificial Sequence
  Synthetic oligonucleotide; CTA chr11 5180858 5180879 5180863 5180858 -
aaacaccaaaagcaatggcaac

SEQ ID NO: 151317 - DNA, 22 bp, Artificial Sequence
  Synthetic oligonucleotide; CTA chr11 5180808 5180829 5180813 5180808 -
attaaactaaagagcttctgca

SEQ ID NO: 151318 - DNA, 22 bp, Artificial Sequence
  Synthetic oligonucleotide; TTA chr11 5180804 5180825 5180809 5180804 -
aactaaagagcttctgcacagc

SEQ ID NO: 151319 - DNA, 22 bp, Artificial Sequence
  Synthetic oligonucleotide; CTA chr11 5180799 5180820 5180804 5180799 -
aagagcttctgcacagcaaaag

SEQ ID NO: 151320 - DNA, 22 bp, Artificial Sequence
  Synthetic oligonucleotide; CTT chr11 5180791 5180812 5180796 5180791 -
ctgcacagcaaaagaaactacc

SEQ ID NO: 151321 - DNA, 22 bp, Artificial Sequence
  Synthetic oligonucleotide; TTC chr11 5180790 5180811 5180795 5180790 -
tgcacagcaaaagaaactacca

SEQ ID NO: 151322 - DNA, 22 bp, Artificial Sequence
  Synthetic oligonucleotide; CTG chr11 5180788 5180809 5180793 5180788 -
cacagcaaaagaaactaccatc

SEQ ID NO: 151323 - DNA, 22 bp, Artificial Sequence
  Synthetic oligonucleotide; CTA chr11 5180771 5180792 5180776 5180771 -
ccatcagagtgaacaggcaacc

SEQ ID NO: 151324 - DNA, 22 bp, Artificial Sequence
  Synthetic oligonucleotide; CTA chr11 5180747 5180768 5180752 5180747 -
cacaatgggagaaaatttttgc

SEQ ID NO: 151325 - DNA, 22 bp, Artificial Sequence
  Synthetic oligonucleotide; TTT chr11 5180729 5180750 5180734 5180729 -
ttgcaatctactcatctgacaa

SEQ ID NO: 151326 - DNA, 22 bp, Artificial Sequence
  Synthetic oligonucleotide; TTT chr11 5180728 5180749 5180733 5180728 -
tgcaatctactcatctgacaaa

SEQ ID NO: 151327 - DNA, 22 bp, Artificial Sequence
  Synthetic oligonucleotide; TTT chr11 5180727 5180748 5180732 5180727 -
gcaatctactcatctgacaaag

SEQ ID NO: 151328 - DNA, 22 bp, Artificial Sequence
  Synthetic oligonucleotide; TTG chr11 5180726 5180747 5180731 5180726 -
caatctactcatctgacaaagg

SEQ ID NO: 151329 - DNA, 22 bp, Artificial Sequence
  Synthetic oligonucleotide; CTA chr11 5180719 5180740 5180724 5180719 -
ctcatctgacaaagggctaata

SEQ ID NO: 151330 - DNA, 22 bp, Artificial Sequence
  Synthetic oligonucleotide; CTC chr11 5180716 5180737 5180721 5180716 -
atctgacaaagggctaatatcc

SEQ ID NO: 151331 - DNA, 22 bp, Artificial Sequence
  Synthetic oligonucleotide; CTG chr11 5180711 5180732 5180716 5180711 -
acaaagggctaatatccagaat

SEQ ID NO: 151332 - DNA, 22 bp, Artificial Sequence
  Synthetic oligonucleotide; CTA chr11 5180700 5180721 5180705 5180700 -
atatccagaatctacaatgaac

SEQ ID NO: 151333 - DNA, 22 bp, Artificial Sequence
  Synthetic oligonucleotide; CTA chr11 5180686 5180707 5180691 5180686 -
caatgaactcaaacaaatttac

SEQ ID NO: 151334 - DNA, 22 bp, Artificial Sequence
  Synthetic oligonucleotide; CTC chr11 5180676 5180697 5180681 5180676 -
aaacaaatttacaagaaaaaaa

SEQ ID NO: 151335 - DNA, 22 bp, Artificial Sequence
  Synthetic oligonucleotide; TTT chr11 5180666 5180687 5180671 5180666 -
acaagaaaaaaacaaacaactg

SEQ ID NO: 151336 - DNA, 22 bp, Artificial Sequence
  Synthetic oligonucleotide; TTA chr11 5180665 5180686 5180670 5180665 -
caagaaaaaaacaaacaactgc

SEQ ID NO: 151337 - DNA, 22 bp, Artificial Sequence
  Synthetic oligonucleotide; CTG chr11 5180644 5180665 5180649 5180644 -
catcaacaagggggtgaaggat

SEQ ID NO: 151338 - DNA, 22 bp, Artificial Sequence
  Synthetic oligonucleotide; CTT chr11 5180608 5180629 5180613 5180608 -
ctcaaaagaagacatttatgca

SEQ ID NO: 151339 - DNA, 22 bp, Artificial Sequence
  Synthetic oligonucleotide; TTC chr11 5180607 5180628 5180612 5180607 -
tcaaaagaagacatttatgcag

SEQ ID NO: 151340 - DNA, 22 bp, Artificial Sequence
  Synthetic oligonucleotide; CTC chr11 5180605 5180626 5180610 5180605 -
aaaagaagacatttatgcagcc

SEQ ID NO: 151341 - DNA, 22 bp, Artificial Sequence
  Synthetic oligonucleotide; TTT chr11 5180591 5180612 5180596 5180591 -
atgcagccaaaaaacacatgaa

SEQ ID NO: 151342 - DNA, 22 bp, Artificial Sequence
  Synthetic oligonucleotide; TTA chr11 5180590 5180611 5180595 5180590 -
tgcagccaaaaaacacatgaaa

SEQ ID NO: 151343 - DNA, 22 bp, Artificial Sequence
  Synthetic oligonucleotide; CTC chr11 5180560 5180581 5180565 5180560 -
atcatcactggccatcagagaa

SEQ ID NO: 151344 - DNA, 22 bp, Artificial Sequence
  Synthetic oligonucleotide; CTG chr11 5180550 5180571 5180555 5180550 -
gccatcagagaaatgcaaatca

SEQ ID NO: 151345 - DNA, 22 bp, Artificial Sequence
  Synthetic oligonucleotide; CTC chr11 5180505 5180526 5180510 5180505 -
acaccagttagaatggtgatca

SEQ ID NO: 151346 - DNA, 22 bp, Artificial Sequence
  Synthetic oligonucleotide; TTA chr11 5180495 5180516 5180500 5180495 -
gaatggtgatcattaaaaagtc

SEQ ID NO: 151347 - DNA, 22 bp, Artificial Sequence
  Synthetic oligonucleotide; TTA chr11 5180480 5180501 5180485 5180480 -
aaaagtcaggaaaccacaggtg

SEQ ID NO: 151348 - DNA, 22 bp, Artificial Sequence
  Synthetic oligonucleotide; CTG chr11 5180455 5180476 5180460 5180455 -
gagaggatgtggagaaatagga

SEQ ID NO: 151349 - DNA, 22 bp, Artificial Sequence
  Synthetic oligonucleotide; CTT chr11 5180427 5180448 5180432 5180427 -
ttacactgttggtgggactata

SEQ ID NO: 151350 - DNA, 22 bp, Artificial Sequence
  Synthetic oligonucleotide; TTT chr11 5180426 5180447 5180431 5180426 -
tacactgttggtgggactataa

SEQ ID NO: 151351 - DNA, 22 bp, Artificial Sequence
  Synthetic oligonucleotide; TTT chr11 5180425 5180446 5180430 5180425 -
acactgttggtgggactataaa

SEQ ID NO: 151352 - DNA, 22 bp, Artificial Sequence
  Synthetic oligonucleotide; TTA chr11 5180424 5180445 5180429 5180424 -
cactgttggtgggactataaac

SEQ ID NO: 151353 - DNA, 22 bp, Artificial Sequence
  Synthetic oligonucleotide; CTG chr11 5180419 5180440 5180424 5180419 -
ttggtgggactataaactagtt

SEQ ID NO: 151354 - DNA, 22 bp, Artificial Sequence
  Synthetic oligonucleotide; TTG chr11 5180416 5180437 5180421 5180416 -
gtgggactataaactagttcaa

SEQ ID NO: 151355 - DNA, 22 bp, Artificial Sequence
  Synthetic oligonucleotide; CTA chr11 5180407 5180428 5180412 5180407 -
taaactagttcaaccattgtgg

SEQ ID NO: 151356 - DNA, 22 bp, Artificial Sequence
  Synthetic oligonucleotide; CTA chr11 5180400 5180421 5180405 5180400 -
gttcaaccattgtggaagtcag

SEQ ID NO: 151357 - DNA, 22 bp, Artificial Sequence
  Synthetic oligonucleotide; TTC chr11 5180396 5180417 5180401 5180396 -
aaccattgtggaagtcagtgtg

SEQ ID NO: 151358 - DNA, 22 bp, Artificial Sequence
  Synthetic oligonucleotide; TTG chr11 5180388 5180409 5180393 5180388 -
tggaagtcagtgtggcaattcc

SEQ ID NO: 151359 - DNA, 22 bp, Artificial Sequence
  Synthetic oligonucleotide; TTC chr11 5180367 5180388 5180372 5180367 -
ctcagggatctagaactagaaa

SEQ ID NO: 151360 - DNA, 22 bp, Artificial Sequence
  Synthetic oligonucleotide; CTC chr11 5180364 5180385 5180369 5180364 -
agggatctagaactagaaatac

SEQ ID NO: 151361 - DNA, 22 bp, Artificial Sequence
  Synthetic oligonucleotide; CTA chr11 5180355 5180376 5180360 5180355 -
gaactagaaataccatttgacc

SEQ ID NO: 151362 - DNA, 22 bp, Artificial Sequence
  Synthetic oligonucleotide; CTA chr11 5180349 5180370 5180354 5180349 -
gaaataccatttgacccagcca

SEQ ID NO: 151363 - DNA, 22 bp, Artificial Sequence
  Synthetic oligonucleotide; TTT chr11 5180337 5180358 5180342 5180337 -
gacccagccatcctattactgg

SEQ ID NO: 151364 - DNA, 22 bp, Artificial Sequence
  Synthetic oligonucleotide; TTG chr11 5180336 5180357 5180341 5180336 -
acccagccatcctattactggg

SEQ ID NO: 151365 - DNA, 22 bp, Artificial Sequence
  Synthetic oligonucleotide; CTA chr11 5180322 5180343 5180327 5180322 -
ttactgggtatatacccaaagg

SEQ ID NO: 151366 - DNA, 22 bp, Artificial Sequence
  Synthetic oligonucleotide; TTA chr11 5180319 5180340 5180324 5180319 -
ctgggtatatacccaaaggaat

SEQ ID NO: 151367 - DNA, 22 bp, Artificial Sequence
  Synthetic oligonucleotide; CTG chr11 5180316 5180337 5180321 5180316 -
ggtatatacccaaaggaatgta

SEQ ID NO: 151368 - DNA, 22 bp, Artificial Sequence
  Synthetic oligonucleotide; CTG chr11 5180284 5180305 5180289 5180284 -
ctataaagacacatgcacacgt

SEQ ID NO: 151369 - DNA, 22 bp, Artificial Sequence
  Synthetic oligonucleotide; CTA chr11 5180281 5180302 5180286 5180281 -
taaagacacatgcacacgtatg

SEQ ID NO: 151370 - DNA, 22 bp, Artificial Sequence
  Synthetic oligonucleotide; TTT chr11 5180256 5180277 5180261 5180256 -
attgtggcactattcacaatag

SEQ ID NO: 151371 - DNA, 22 bp, Artificial Sequence
  Synthetic oligonucleotide; TTA chr11 5180255 5180276 5180260 5180255 -
ttgtggcactattcacaatagc

SEQ ID NO: 151372 - DNA, 22 bp, Artificial Sequence
  Synthetic oligonucleotide; TTG chr11 5180252 5180273 5180257 5180252 -
tggcactattcacaatagcaaa

SEQ ID NO: 151373 - DNA, 22 bp, Artificial Sequence
  Synthetic oligonucleotide; CTA chr11 5180244 5180265 5180249 5180244 -
ttcacaatagcaaagacttgga

SEQ ID NO: 151374 - DNA, 22 bp, Artificial Sequence
  Synthetic oligonucleotide; TTC chr11 5180241 5180262 5180246 5180241 -
acaatagcaaagacttggaacc

SEQ ID NO: 151375 - DNA, 22 bp, Artificial Sequence
  Synthetic oligonucleotide; CTT chr11 5180225 5180246 5180230 5180225 -
ggaaccaacccaaatgtccaac

SEQ ID NO: 151376 - DNA, 22 bp, Artificial Sequence
  Synthetic oligonucleotide; TTG chr11 5180224 5180245 5180229 5180224 -
gaaccaacccaaatgtccaaca

SEQ ID NO: 151377 - DNA, 22 bp, Artificial Sequence
  Synthetic oligonucleotide; CTG chr11 5180191 5180212 5180196 5180191 -
gattaagaaaatgtggcacata

SEQ ID NO: 151378 - DNA, 22 bp, Artificial Sequence
  Synthetic oligonucleotide; TTA chr11 5180186 5180207 5180191 5180186 -
agaaaatgtggcacatatacat

SEQ ID NO: 151379 - DNA, 22 bp, Artificial Sequence
  Synthetic oligonucleotide; CTA chr11 5180152 5180173 5180157 5180152 -
tgcagccataaaaaatgatgag

SEQ ID NO: 151380 - DNA, 22 bp, Artificial Sequence
  Synthetic oligonucleotide; TTC chr11 5180127 5180148 5180132 5180127 -
atgtcctttgtagggacatgga

SEQ ID NO: 151381 - DNA, 22 bp, Artificial Sequence
  Synthetic oligonucleotide; CTT chr11 5180119 5180140 5180124 5180119 -
tgtagggacatggatgaaactg

SEQ ID NO: 151382 - DNA, 22 bp, Artificial Sequence
  Synthetic oligonucleotide; TTT chr11 5180118 5180139 5180123 5180118 -
gtagggacatggatgaaactgg

SEQ ID NO: 151383 - DNA, 22 bp, Artificial Sequence
  Synthetic oligonucleotide; TTG chr11 5180117 5180138 5180122 5180117 -
tagggacatggatgaaactgga

SEQ ID NO: 151384 - DNA, 22 bp, Artificial Sequence
  Synthetic oligonucleotide; CTG chr11 5180097 5180118 5180102 5180097 -
gaaaccatcattctgagcaaag

SEQ ID NO: 151385 - DNA, 22 bp, Artificial Sequence
  Synthetic oligonucleotide; TTC chr11 5180084 5180105 5180089 5180084 -
tgagcaaagtatcgcaaggacg

SEQ ID NO: 151386 - DNA, 22 bp, Artificial Sequence
  Synthetic oligonucleotide; CTG chr11 5180082 5180103 5180087 5180082 -
agcaaagtatcgcaaggacgaa

SEQ ID NO: 151387 - DNA, 22 bp, Artificial Sequence
  Synthetic oligonucleotide; TTC chr11 5180040 5180061 5180045 5180040 -
tcactcataggtgggagttgaa

SEQ ID NO: 151388 - DNA, 22 bp, Artificial Sequence
  Synthetic oligonucleotide; CTC chr11 5180038 5180059 5180043 5180038 -
actcataggtgggagttgaaca

SEQ ID NO: 151389 - DNA, 22 bp, Artificial Sequence
  Synthetic oligonucleotide; CTC chr11 5180034 5180055 5180039 5180034 -
ataggtgggagttgaacaatga

SEQ ID NO: 151390 - DNA, 22 bp, Artificial Sequence
  Synthetic oligonucleotide; TTG chr11 5180020 5180041 5180025 5180020 -
aacaatgagaacatttggacac

SEQ ID NO: 151391 - DNA, 22 bp, Artificial Sequence
  Synthetic oligonucleotide; TTT chr11 5180004 5180025 5180009 5180004 -
ggacacagtgaggggaacatca

SEQ ID NO: 151392 - DNA, 22 bp, Artificial Sequence
  Synthetic oligonucleotide; TTG chr11 5180003 5180024 5180008 5180003 -
gacacagtgaggggaacatcac

SEQ ID NO: 151393 - DNA, 22 bp, Artificial Sequence
  Synthetic oligonucleotide; CTG chr11 5179968 5179989 5179973 5179968 -
ttgtggggtgggggccgggggg

SEQ ID NO: 151394 - DNA, 22 bp, Artificial Sequence
  Synthetic oligonucleotide; TTG chr11 5179965 5179986 5179970 5179965 -
tggggtgggggccggggggagg

SEQ ID NO: 151395 - DNA, 22 bp, Artificial Sequence
  Synthetic oligonucleotide; TTA chr11 5179933 5179954 5179938 5179933 -
ggagatatacctaatgtaaatg

SEQ ID NO: 151396 - DNA, 22 bp, Artificial Sequence
  Synthetic oligonucleotide; CTA chr11 5179920 5179941 5179925 5179920 -
atgtaaatgacgagttaatggg

SEQ ID NO: 151397 - DNA, 22 bp, Artificial Sequence
  Synthetic oligonucleotide; TTA chr11 5179903 5179924 5179908 5179903 -
atgggtgcagcacaccaacatg

SEQ ID NO: 151398 - DNA, 22 bp, Artificial Sequence
  Synthetic oligonucleotide; CTG chr11 5179853 5179874 5179858 5179853 -
catgttgtgcacatgtacccta

SEQ ID NO: 151399 - DNA, 22 bp, Artificial Sequence
  Synthetic oligonucleotide; TTG chr11 5179846 5179867 5179851 5179846 -
tgcacatgtaccctagaactta

SEQ ID NO: 151400 - DNA, 22 bp, Artificial Sequence
  Synthetic oligonucleotide; CTA chr11 5179831 5179852 5179836 5179831 -
gaacttaaagtataataaacat

SEQ ID NO: 151401 - DNA, 22 bp, Artificial Sequence
  Synthetic oligonucleotide; CTT chr11 5179825 5179846 5179830 5179825 -
aaagtataataaacatatatat

SEQ ID NO: 151402 - DNA, 22 bp, Artificial Sequence
  Synthetic oligonucleotide; TTA chr11 5179824 5179845 5179829 5179824 -
aagtataataaacatatatata

SEQ ID NO: 151403 - DNA, 22 bp, Artificial Sequence
  Synthetic oligonucleotide; TTG chr11 5179784 5179805 5179789 5179784 -
tctcattttcaatcagtgactg

SEQ ID NO: 151404 - DNA, 22 bp, Artificial Sequence
  Synthetic oligonucleotide; CTC chr11 5179780 5179801 5179785 5179780 -
attttcaatcagtgactgaagt

SEQ ID NO: 151405 - DNA, 22 bp, Artificial Sequence
  Synthetic oligonucleotide; TTT chr11 5179776 5179797 5179781 5179776 -
tcaatcagtgactgaagtggaa

SEQ ID NO: 151406 - DNA, 22 bp, Artificial Sequence
  Synthetic oligonucleotide; TTT chr11 5179775 5179796 5179780 5179775 -
caatcagtgactgaagtggaaa

SEQ ID NO: 151407 - DNA, 22 bp, Artificial Sequence
  Synthetic oligonucleotide; TTC chr11 5179774 5179795 5179779 5179774 -
aatcagtgactgaagtggaaag

SEQ ID NO: 151408 - DNA, 22 bp, Artificial Sequence
  Synthetic oligonucleotide; CTG chr11 5179762 5179783 5179767 5179762 -
aagtggaaagaaacaaaatatt

SEQ ID NO: 151409 - DNA, 22 bp, Artificial Sequence
  Synthetic oligonucleotide; TTT chr11 5179739 5179760 5179744 5179739 -
tattctttaccacctatgaggc

SEQ ID NO: 151410 - DNA, 22 bp, Artificial Sequence
  Synthetic oligonucleotide; TTT chr11 5179738 5179759 5179743 5179738 -
attctttaccacctatgaggca

SEQ ID NO: 151411 - DNA, 22 bp, Artificial Sequence
  Synthetic oligonucleotide; TTA chr11 5179737 5179758 5179742 5179737 -
ttctttaccacctatgaggcat

SEQ ID NO: 151412 - DNA, 22 bp, Artificial Sequence
  Synthetic oligonucleotide; TTC chr11 5179734 5179755 5179739 5179734 -
tttaccacctatgaggcatata

SEQ ID NO: 151413 - DNA, 22 bp, Artificial Sequence
  Synthetic oligonucleotide; CTT chr11 5179732 5179753 5179737 5179732 -
taccacctatgaggcatatact

SEQ ID NO: 151414 - DNA, 22 bp, Artificial Sequence
  Synthetic oligonucleotide; TTT chr11 5179731 5179752 5179736 5179731 -
accacctatgaggcatatactt

SEQ ID NO: 151415 - DNA, 22 bp, Artificial Sequence
  Synthetic oligonucleotide; TTA chr11 5179730 5179751 5179735 5179730 -
ccacctatgaggcatatacttt

SEQ ID NO: 151416 - DNA, 22 bp, Artificial Sequence
  Synthetic oligonucleotide; CTA chr11 5179723 5179744 5179728 5179723 -
tgaggcatatactttttttttt

SEQ ID NO: 151417 - DNA, 22 bp, Artificial Sequence
  Synthetic oligonucleotide; CTT chr11 5179709 5179730 5179714 5179709 -
ttttttttgagagggagtctcg

SEQ ID NO: 151418 - DNA, 22 bp, Artificial Sequence
  Synthetic oligonucleotide; TTT chr11 5179708 5179729 5179713 5179708 -
tttttttgagagggagtctcgc

SEQ ID NO: 151419 - DNA, 22 bp, Artificial Sequence
  Synthetic oligonucleotide; TTT chr11 5179707 5179728 5179712 5179707 -
ttttttgagagggagtctcgct

SEQ ID NO: 151420 - DNA, 22 bp, Artificial Sequence
  Synthetic oligonucleotide; TTT chr11 5179706 5179727 5179711 5179706 -
tttttgagagggagtctcgctc

SEQ ID NO: 151421 - DNA, 22 bp, Artificial Sequence
  Synthetic oligonucleotide; TTT chr11 5179705 5179726 5179710 5179705 -
ttttgagagggagtctcgctct

SEQ ID NO: 151422 - DNA, 22 bp, Artificial Sequence
  Synthetic oligonucleotide; TTT chr11 5179704 5179725 5179709 5179704 -
tttgagagggagtctcgctctg

SEQ ID NO: 151423 - DNA, 22 bp, Artificial Sequence
  Synthetic oligonucleotide; TTT chr11 5179703 5179724 5179708 5179703 -
ttgagagggagtctcgctctgt

SEQ ID NO: 151424 - DNA, 22 bp, Artificial Sequence
  Synthetic oligonucleotide; TTT chr11 5179702 5179723 5179707 5179702 -
tgagagggagtctcgctctgtc

SEQ ID NO: 151425 - DNA, 22 bp, Artificial Sequence
  Synthetic oligonucleotide; TTT chr11 5179701 5179722 5179706 5179701 -
gagagggagtctcgctctgtca

SEQ ID NO: 151426 - DNA, 22 bp, Artificial Sequence
  Synthetic oligonucleotide; TTG chr11 5179700 5179721 5179705 5179700 -
agagggagtctcgctctgtcac

SEQ ID NO: 151427 - DNA, 22 bp, Artificial Sequence
  Synthetic oligonucleotide; CTC chr11 5179688 5179709 5179693 5179688 -
gctctgtcacctaggctggagt

SEQ ID NO: 151428 - DNA, 22 bp, Artificial Sequence
  Synthetic oligonucleotide; CTC chr11 5179684 5179705 5179689 5179684 -
tgtcacctaggctggagtgcag

SEQ ID NO: 151429 - DNA, 22 bp, Artificial Sequence
  Synthetic oligonucleotide; CTG chr11 5179682 5179703 5179687 5179682 -
tcacctaggctggagtgcagtt

SEQ ID NO: 151430 - DNA, 22 bp, Artificial Sequence
  Synthetic oligonucleotide; CTA chr11 5179675 5179696 5179680 5179675 -
ggctggagtgcagttgcgcgat

SEQ ID NO: 151431 - DNA, 22 bp, Artificial Sequence
  Synthetic oligonucleotide; CTG chr11 5179670 5179691 5179675 5179670 -
gagtgcagttgcgcgatctctg

SEQ ID NO: 151432 - DNA, 22 bp, Artificial Sequence
  Synthetic oligonucleotide; TTG chr11 5179659 5179680 5179664 5179659 -
cgcgatctctgctcactgaaac

SEQ ID NO: 151433 - DNA, 22 bp, Artificial Sequence
  Synthetic oligonucleotide; CTC chr11 5179650 5179671 5179655 5179650 -
tgctcactgaaacttctgcctc

SEQ ID NO: 151434 - DNA, 22 bp, Artificial Sequence
  Synthetic oligonucleotide; CTG chr11 5179648 5179669 5179653 5179648 -
ctcactgaaacttctgcctccc

SEQ ID NO: 151435 - DNA, 22 bp, Artificial Sequence
  Synthetic oligonucleotide; CTC chr11 5179645 5179666 5179650 5179645 -
actgaaacttctgcctcccagg

SEQ ID NO: 151436 - DNA, 22 bp, Artificial Sequence
  Synthetic oligonucleotide; CTG chr11 5179641 5179662 5179646 5179641 -
aaacttctgcctcccaggttca

SEQ ID NO: 151437 - DNA, 22 bp, Artificial Sequence
  Synthetic oligonucleotide; CTT chr11 5179635 5179656 5179640 5179635 -
ctgcctcccaggttcaagcgat

SEQ ID NO: 151438 - DNA, 22 bp, Artificial Sequence
  Synthetic oligonucleotide; TTC chr11 5179634 5179655 5179639 5179634 -
tgcctcccaggttcaagcgatt

SEQ ID NO: 151439 - DNA, 22 bp, Artificial Sequence
  Synthetic oligonucleotide; CTG chr11 5179632 5179653 5179637 5179632 -
cctcccaggttcaagcgattct

SEQ ID NO: 151440 - DNA, 22 bp, Artificial Sequence
  Synthetic oligonucleotide; CTC chr11 5179628 5179649 5179633 5179628 -
ccaggttcaagcgattctcctg

SEQ ID NO: 151441 - DNA, 22 bp, Artificial Sequence
  Synthetic oligonucleotide; TTC chr11 5179620 5179641 5179625 5179620 -
aagcgattctcctgcctcagcc

SEQ ID NO: 151442 - DNA, 22 bp, Artificial Sequence
  Synthetic oligonucleotide; TTC chr11 5179611 5179632 5179616 5179611 -
tcctgcctcagcctcttgagta

SEQ ID NO: 151443 - DNA, 22 bp, Artificial Sequence
  Synthetic oligonucleotide; CTC chr11 5179609 5179630 5179614 5179609 -
ctgcctcagcctcttgagtagc

SEQ ID NO: 151444 - DNA, 22 bp, Artificial Sequence
  Synthetic oligonucleotide; CTG chr11 5179606 5179627 5179611 5179606 -
cctcagcctcttgagtagctgg

SEQ ID NO: 151445 - DNA, 22 bp, Artificial Sequence
  Synthetic oligonucleotide; CTC chr11 5179602 5179623 5179607 5179602 -
agcctcttgagtagctgggatt

SEQ ID NO: 151446 - DNA, 22 bp, Artificial Sequence
  Synthetic oligonucleotide; CTC chr11 5179596 5179617 5179601 5179596 -
ttgagtagctgggattaaaggt

SEQ ID NO: 151447 - DNA, 22 bp, Artificial Sequence
  Synthetic oligonucleotide; CTT chr11 5179594 5179615 5179599 5179594 -
gagtagctgggattaaaggtgc

SEQ ID NO: 151448 - DNA, 22 bp, Artificial Sequence
  Synthetic oligonucleotide; TTG chr11 5179593 5179614 5179598 5179593 -
agtagctgggattaaaggtgca

SEQ ID NO: 151449 - DNA, 22 bp, Artificial Sequence
  Synthetic oligonucleotide; CTG chr11 5179585 5179606 5179590 5179585 -
ggattaaaggtgcacaccacta

SEQ ID NO: 151450 - DNA, 22 bp, Artificial Sequence
  Synthetic oligonucleotide; TTA chr11 5179579 5179600 5179584 5179579 -
aaggtgcacaccactatgccca

SEQ ID NO: 151451 - DNA, 22 bp, Artificial Sequence
  Synthetic oligonucleotide; CTA chr11 5179563 5179584 5179568 5179563 -
tgcccagctaatttttgtattt

SEQ ID NO: 151452 - DNA, 22 bp, Artificial Sequence
  Synthetic oligonucleotide; CTA chr11 5179553 5179574 5179558 5179553 -
atttttgtatttttagtagaga

SEQ ID NO: 151453 - DNA, 22 bp, Artificial Sequence
  Synthetic oligonucleotide; TTT chr11 5179549 5179570 5179554 5179549 -
ttgtatttttagtagagacggg

SEQ ID NO: 151454 - DNA, 22 bp, Artificial Sequence
  Synthetic oligonucleotide; TTT chr11 5179548 5179569 5179553 5179548 -
tgtatttttagtagagacgggg

SEQ ID NO: 151455 - DNA, 22 bp, Artificial Sequence
  Synthetic oligonucleotide; TTT chr11 5179547 5179568 5179552 5179547 -
gtatttttagtagagacggggt

SEQ ID NO: 151456 - DNA, 22 bp, Artificial Sequence
  Synthetic oligonucleotide; TTG chr11 5179546 5179567 5179551 5179546 -
tatttttagtagagacggggtt

SEQ ID NO: 151457 - DNA, 22 bp, Artificial Sequence
  Synthetic oligonucleotide; TTT chr11 5179541 5179562 5179546 5179541 -
ttagtagagacggggtttcatt

SEQ ID NO: 151458 - DNA, 22 bp, Artificial Sequence
  Synthetic oligonucleotide; TTT chr11 5179540 5179561 5179545 5179540 -
tagtagagacggggtttcattg

SEQ ID NO: 151459 - DNA, 22 bp, Artificial Sequence
  Synthetic oligonucleotide; TTT chr11 5179539 5179560 5179544 5179539 -
agtagagacggggtttcattgt

SEQ ID NO: 151460 - DNA, 22 bp, Artificial Sequence
  Synthetic oligonucleotide; TTA chr11 5179538 5179559 5179543 5179538 -
gtagagacggggtttcattgtt

SEQ ID NO: 151461 - DNA, 22 bp, Artificial Sequence
  Synthetic oligonucleotide; TTT chr11 5179523 5179544 5179528 5179523 -
cattgttttggtcaagctggtc

SEQ ID NO: 151462 - DNA, 22 bp, Artificial Sequence
  Synthetic oligonucleotide; TTC chr11 5179522 5179543 5179527 5179522 -
attgttttggtcaagctggtct

SEQ ID NO: 151463 - DNA, 22 bp, Artificial Sequence
  Synthetic oligonucleotide; TTG chr11 5179518 5179539 5179523 5179518 -
ttttggtcaagctggtctggaa

SEQ ID NO: 151464 - DNA, 22 bp, Artificial Sequence
  Synthetic oligonucleotide; TTT chr11 5179515 5179536 5179520 5179515 -
tggtcaagctggtctggaactc

SEQ ID NO: 151465 - DNA, 22 bp, Artificial Sequence
  Synthetic oligonucleotide; TTT chr11 5179514 5179535 5179519 5179514 -
ggtcaagctggtctggaactcc

SEQ ID NO: 151466 - DNA, 22 bp, Artificial Sequence
  Synthetic oligonucleotide; TTG chr11 5179513 5179534 5179518 5179513 -
gtcaagctggtctggaactcct

SEQ ID NO: 151467 - DNA, 22 bp, Artificial Sequence
  Synthetic oligonucleotide; CTG chr11 5179504 5179525 5179509 5179504 -
gtctggaactcctgaccttgtg

SEQ ID NO: 151468 - DNA, 22 bp, Artificial Sequence
  Synthetic oligonucleotide; CTG chr11 5179499 5179520 5179504 5179499 -
gaactcctgaccttgtgatcta

SEQ ID NO: 151469 - DNA, 22 bp, Artificial Sequence
  Synthetic oligonucleotide; CTC chr11 5179493 5179514 5179498 5179493 -
ctgaccttgtgatctacccgcc

SEQ ID NO: 151470 - DNA, 22 bp, Artificial Sequence
  Synthetic oligonucleotide; CTG chr11 5179490 5179511 5179495 5179490 -
accttgtgatctacccgcctca

SEQ ID NO: 151471 - DNA, 22 bp, Artificial Sequence
  Synthetic oligonucleotide; CTT chr11 5179485 5179506 5179490 5179485 -
gtgatctacccgcctcagcctc

SEQ ID NO: 151472 - DNA, 22 bp, Artificial Sequence
  Synthetic oligonucleotide; TTG chr11 5179484 5179505 5179489 5179484 -
tgatctacccgcctcagcctct

SEQ ID NO: 151473 - DNA, 22 bp, Artificial Sequence
  Synthetic oligonucleotide; CTA chr11 5179477 5179498 5179482 5179477 -
cccgcctcagcctctcaaagtg

SEQ ID NO: 151474 - DNA, 22 bp, Artificial Sequence
  Synthetic oligonucleotide; CTC chr11 5179469 5179490 5179474 5179469 -
agcctctcaaagtgctgggatt

SEQ ID NO: 151475 - DNA, 22 bp, Artificial Sequence
  Synthetic oligonucleotide; CTC chr11 5179463 5179484 5179468 5179463 -
tcaaagtgctgggattacaggt

SEQ ID NO: 151476 - DNA, 22 bp, Artificial Sequence
  Synthetic oligonucleotide; CTC chr11 5179461 5179482 5179466 5179461 -
aaagtgctgggattacaggtgt

SEQ ID NO: 151477 - DNA, 22 bp, Artificial Sequence
  Synthetic oligonucleotide; CTG chr11 5179452 5179473 5179457 5179452 -
ggattacaggtgtgagccaccg

SEQ ID NO: 151478 - DNA, 22 bp, Artificial Sequence
  Synthetic oligonucleotide; TTA chr11 5179446 5179467 5179451 5179446 -
caggtgtgagccaccgtgccag

SEQ ID NO: 151479 - DNA, 22 bp, Artificial Sequence
  Synthetic oligonucleotide; CTG chr11 5179420 5179441 5179425 5179420 -
gcatatagatttaaaaacccag

SEQ ID NO: 151480 - DNA, 22 bp, Artificial Sequence
  Synthetic oligonucleotide; TTT chr11 5179408 5179429 5179413 5179408 -
aaaaacccagctccgtctgcca

SEQ ID NO: 151481 - DNA, 22 bp, Artificial Sequence
  Synthetic oligonucleotide; TTA chr11 5179407 5179428 5179412 5179407 -
aaaacccagctccgtctgccat

SEQ ID NO: 151482 - DNA, 22 bp, Artificial Sequence
  Synthetic oligonucleotide; CTC chr11 5179395 5179416 5179400 5179395 -
cgtctgccattgcaaatatcta

SEQ ID NO: 151483 - DNA, 22 bp, Artificial Sequence
  Synthetic oligonucleotide; CTG chr11 5179389 5179410 5179394 5179389 -
ccattgcaaatatctaaagttt

SEQ ID NO: 151484 - DNA, 22 bp, Artificial Sequence
  Synthetic oligonucleotide; TTG chr11 5179383 5179404 5179388 5179383 -
caaatatctaaagtttataatg

SEQ ID NO: 151485 - DNA, 22 bp, Artificial Sequence
  Synthetic oligonucleotide; CTA chr11 5179373 5179394 5179378 5179373 -
aagtttataatgttttatccta

SEQ ID NO: 151486 - DNA, 22 bp, Artificial Sequence
  Synthetic oligonucleotide; TTT chr11 5179367 5179388 5179372 5179367 -
ataatgttttatcctatatttt

SEQ ID NO: 151487 - DNA, 22 bp, Artificial Sequence
  Synthetic oligonucleotide; TTA chr11 5179366 5179387 5179371 5179366 -
taatgttttatcctatattttt

SEQ ID NO: 151488 - DNA, 22 bp, Artificial Sequence
  Synthetic oligonucleotide; TTT chr11 5179358 5179379 5179363 5179358 -
tatcctatatttttgagaaata

SEQ ID NO: 151489 - DNA, 22 bp, Artificial Sequence
  Synthetic oligonucleotide; TTT chr11 5179357 5179378 5179362 5179357 -
atcctatatttttgagaaatag

SEQ ID NO: 151490 - DNA, 22 bp, Artificial Sequence
  Synthetic oligonucleotide; TTA chr11 5179356 5179377 5179361 5179356 -
tcctatatttttgagaaataga

SEQ ID NO: 151491 - DNA, 22 bp, Artificial Sequence
  Synthetic oligonucleotide; CTA chr11 5179351 5179372 5179356 5179351 -
tatttttgagaaatagattaat

SEQ ID NO: 151492 - DNA, 22 bp, Artificial Sequence
  Synthetic oligonucleotide; TTT chr11 5179346 5179367 5179351 5179346 -
ttgagaaatagattaattggca

SEQ ID NO: 151493 - DNA, 22 bp, Artificial Sequence
  Synthetic oligonucleotide; TTT chr11 5179345 5179366 5179350 5179345 -
tgagaaatagattaattggcag

SEQ ID NO: 151494 - DNA, 22 bp, Artificial Sequence
  Synthetic oligonucleotide; TTT chr11 5179344 5179365 5179349 5179344 -
gagaaatagattaattggcaga

SEQ ID NO: 151495 - DNA, 22 bp, Artificial Sequence
  Synthetic oligonucleotide; TTG chr11 5179343 5179364 5179348 5179343 -
agaaatagattaattggcagaa

SEQ ID NO: 151496 - DNA, 22 bp, Artificial Sequence
  Synthetic oligonucleotide; TTA chr11 5179331 5179352 5179336 5179331 -
attggcagaacaatttaatttg

SEQ ID NO: 151497 - DNA, 22 bp, Artificial Sequence
  Synthetic oligonucleotide; TTG chr11 5179327 5179348 5179332 5179327 -
gcagaacaatttaatttgctgt

SEQ ID NO: 151498 - DNA, 22 bp, Artificial Sequence
  Synthetic oligonucleotide; TTT chr11 5179315 5179336 5179320 5179315 -
aatttgctgtatgtcttcaatg

SEQ ID NO: 151499 - DNA, 22 bp, Artificial Sequence
  Synthetic oligonucleotide; TTA chr11 5179314 5179335 5179319 5179314 -
atttgctgtatgtcttcaatgg

SEQ ID NO: 151500 - DNA, 22 bp, Artificial Sequence
  Synthetic oligonucleotide; TTT chr11 5179310 5179331 5179315 5179310 -
gctgtatgtcttcaatggctag

SEQ ID NO: 151501 - DNA, 22 bp, Artificial Sequence
  Synthetic oligonucleotide; TTG chr11 5179309 5179330 5179314 5179309 -
ctgtatgtcttcaatggctagc

SEQ ID NO: 151502 - DNA, 22 bp, Artificial Sequence
  Synthetic oligonucleotide; CTG chr11 5179306 5179327 5179311 5179306 -
tatgtcttcaatggctagcata

SEQ ID NO: 151503 - DNA, 22 bp, Artificial Sequence
  Synthetic oligonucleotide; CTT chr11 5179298 5179319 5179303 5179298 -
caatggctagcatatggcttaa

SEQ ID NO: 151504 - DNA, 22 bp, Artificial Sequence
  Synthetic oligonucleotide; TTC chr11 5179297 5179318 5179302 5179297 -
aatggctagcatatggcttaac

SEQ ID NO: 151505 - DNA, 22 bp, Artificial Sequence
  Synthetic oligonucleotide; CTA chr11 5179289 5179310 5179294 5179289 -
gcatatggcttaacaataagtt

SEQ ID NO: 151506 - DNA, 22 bp, Artificial Sequence
  Synthetic oligonucleotide; CTT chr11 5179278 5179299 5179283 5179278 -
aacaataagttaaggccaatca

SEQ ID NO: 151507 - DNA, 22 bp, Artificial Sequence
  Synthetic oligonucleotide; TTA chr11 5179277 5179298 5179282 5179277 -
acaataagttaaggccaatcaa

SEQ ID NO: 151508 - DNA, 22 bp, Artificial Sequence
  Synthetic oligonucleotide; TTA chr11 5179266 5179287 5179271 5179266 -
aggccaatcaatgtggaagaag

SEQ ID NO: 151509 - DNA, 22 bp, Artificial Sequence
  Synthetic oligonucleotide; CTA chr11 5179232 5179253 5179237 5179232 -
tattgcttgaaatctattttgt

SEQ ID NO: 151510 - DNA, 22 bp, Artificial Sequence
  Synthetic oligonucleotide; TTG chr11 5179227 5179248 5179232 5179227 -
cttgaaatctattttgtcagac

SEQ ID NO: 151511 - DNA, 22 bp, Artificial Sequence
  Synthetic oligonucleotide; CTT chr11 5179224 5179245 5179229 5179224 -
gaaatctattttgtcagactta

SEQ ID NO: 151512 - DNA, 22 bp, Artificial Sequence
  Synthetic oligonucleotide; TTG chr11 5179223 5179244 5179228 5179223 -
aaatctattttgtcagacttaa

SEQ ID NO: 151513 - DNA, 22 bp, Artificial Sequence
  Synthetic oligonucleotide; CTA chr11 5179216 5179237 5179221 5179216 -
ttttgtcagacttaattccctc

SEQ ID NO: 151514 - DNA, 22 bp, Artificial Sequence
  Synthetic oligonucleotide; TTT chr11 5179213 5179234 5179218 5179213 -
tgtcagacttaattccctccca

SEQ ID NO: 151515 - DNA, 22 bp, Artificial Sequence
  Synthetic oligonucleotide; TTT chr11 5179212 5179233 5179217 5179212 -
gtcagacttaattccctcccat

SEQ ID NO: 151516 - DNA, 22 bp, Artificial Sequence
  Synthetic oligonucleotide; TTG chr11 5179211 5179232 5179216 5179211 -
tcagacttaattccctcccatt

SEQ ID NO: 151517 - DNA, 22 bp, Artificial Sequence
  Synthetic oligonucleotide; CTT chr11 5179203 5179224 5179208 5179203 -
aattccctcccatttctgtaag

SEQ ID NO: 151518 - DNA, 22 bp, Artificial Sequence
  Synthetic oligonucleotide; TTA chr11 5179202 5179223 5179207 5179202 -
attccctcccatttctgtaagc

SEQ ID NO: 151519 - DNA, 22 bp, Artificial Sequence
  Synthetic oligonucleotide; TTC chr11 5179198 5179219 5179203 5179198 -
cctcccatttctgtaagcagca

SEQ ID NO: 151520 - DNA, 22 bp, Artificial Sequence
  Synthetic oligonucleotide; CTC chr11 5179194 5179215 5179199 5179194 -
ccatttctgtaagcagcacaac

SEQ ID NO: 151521 - DNA, 22 bp, Artificial Sequence
  Synthetic oligonucleotide; TTT chr11 5179188 5179209 5179193 5179188 -
ctgtaagcagcacaactaaatt

SEQ ID NO: 151522 - DNA, 22 bp, Artificial Sequence
  Synthetic oligonucleotide; TTC chr11 5179187 5179208 5179192 5179187 -
tgtaagcagcacaactaaattt

SEQ ID NO: 151523 - DNA, 22 bp, Artificial Sequence
  Synthetic oligonucleotide; CTG chr11 5179185 5179206 5179190 5179185 -
taagcagcacaactaaatttca

SEQ ID NO: 151524 - DNA, 22 bp, Artificial Sequence
  Synthetic oligonucleotide; CTA chr11 5179170 5179191 5179175 5179170 -
aatttcataactctctattttc

SEQ ID NO: 151525 - DNA, 22 bp, Artificial Sequence
  Synthetic oligonucleotide; TTT chr11 5179165 5179186 5179170 5179165 -
cataactctctattttccttag

SEQ ID NO: 151526 - DNA, 22 bp, Artificial Sequence
  Synthetic oligonucleotide; TTC chr11 5179164 5179185 5179169 5179164 -
ataactctctattttccttagg

SEQ ID NO: 151527 - DNA, 22 bp, Artificial Sequence
  Synthetic oligonucleotide; CTC chr11 5179157 5179178 5179162 5179157 -
tctattttccttagggatatga

SEQ ID NO: 151528 - DNA, 22 bp, Artificial Sequence
  Synthetic oligonucleotide; CTC chr11 5179155 5179176 5179160 5179155 -
tattttccttagggatatgatc

SEQ ID NO: 151529 - DNA, 22 bp, Artificial Sequence
  Synthetic oligonucleotide; CTA chr11 5179153 5179174 5179158 5179153 -
ttttccttagggatatgatcag

SEQ ID NO: 151530 - DNA, 22 bp, Artificial Sequence
  Synthetic oligonucleotide; TTT chr11 5179150 5179171 5179155 5179150 -
tccttagggatatgatcagtaa

SEQ ID NO: 151531 - DNA, 22 bp, Artificial Sequence
  Synthetic oligonucleotide; TTT chr11 5179149 5179170 5179154 5179149 -
ccttagggatatgatcagtaaa

SEQ ID NO: 151532 - DNA, 22 bp, Artificial Sequence
  Synthetic oligonucleotide; TTC chr11 5179148 5179169 5179153 5179148 -
cttagggatatgatcagtaaaa

SEQ ID NO: 151533 - DNA, 22 bp, Artificial Sequence
  Synthetic oligonucleotide; CTT chr11 5179145 5179166 5179150 5179145 -
agggatatgatcagtaaaaaat

SEQ ID NO: 151534 - DNA, 22 bp, Artificial Sequence
  Synthetic oligonucleotide; TTA chr11 5179144 5179165 5179149 5179144 -
gggatatgatcagtaaaaaatt

SEQ ID NO: 151535 - DNA, 22 bp, Artificial Sequence
  Synthetic oligonucleotide; TTT chr11 5179121 5179142 5179126 5179121 -
gatgctgcgttttatatctagt

SEQ ID NO: 151536 - DNA, 22 bp, Artificial Sequence
  Synthetic oligonucleotide; TTG chr11 5179120 5179141 5179125 5179120 -
atgctgcgttttatatctagtt

SEQ ID NO: 151537 - DNA, 22 bp, Artificial Sequence
  Synthetic oligonucleotide; CTG chr11 5179114 5179135 5179119 5179114 -
cgttttatatctagttttacct

SEQ ID NO: 151538 - DNA, 22 bp, Artificial Sequence
  Synthetic oligonucleotide; TTT chr11 5179109 5179130 5179114 5179109 -
tatatctagttttaccttgata

SEQ ID NO: 151539 - DNA, 22 bp, Artificial Sequence
  Synthetic oligonucleotide; TTT chr11 5179108 5179129 5179113 5179108 -
atatctagttttaccttgatag

SEQ ID NO: 151540 - DNA, 22 bp, Artificial Sequence
  Synthetic oligonucleotide; TTA chr11 5179107 5179128 5179112 5179107 -
tatctagttttaccttgatagg

SEQ ID NO: 151541 - DNA, 22 bp, Artificial Sequence
  Synthetic oligonucleotide; CTA chr11 5179101 5179122 5179106 5179101 -
gttttaccttgataggcagcat

SEQ ID NO: 151542 - DNA, 22 bp, Artificial Sequence
  Synthetic oligonucleotide; TTT chr11 5179097 5179118 5179102 5179097 -
taccttgataggcagcattgga

SEQ ID NO: 151543 - DNA, 22 bp, Artificial Sequence
  Synthetic oligonucleotide; TTT chr11 5179096 5179117 5179101 5179096 -
accttgataggcagcattggat

SEQ ID NO: 151544 - DNA, 22 bp, Artificial Sequence
  Synthetic oligonucleotide; TTA chr11 5179095 5179116 5179100 5179095 -
ccttgataggcagcattggatg

SEQ ID NO: 151545 - DNA, 22 bp, Artificial Sequence
  Synthetic oligonucleotide; CTT chr11 5179091 5179112 5179096 5179091 -
gataggcagcattggatggtag

SEQ ID NO: 151546 - DNA, 22 bp, Artificial Sequence
  Synthetic oligonucleotide; TTG chr11 5179090 5179111 5179095 5179090 -
ataggcagcattggatggtagt

SEQ ID NO: 151547 - DNA, 22 bp, Artificial Sequence
  Synthetic oligonucleotide; TTG chr11 5179077 5179098 5179082 5179077 -
gatggtagtaaagatcaaagct

SEQ ID NO: 151548 - DNA, 22 bp, Artificial Sequence
  Synthetic oligonucleotide; CTT chr11 5179054 5179075 5179059 5179054 -
tcagatttatcctgccttactt

SEQ ID NO: 151549 - DNA, 22 bp, Artificial Sequence
  Synthetic oligonucleotide; TTT chr11 5179053 5179074 5179058 5179053 -
cagatttatcctgccttacttt

SEQ ID NO: 151550 - DNA, 22 bp, Artificial Sequence
  Synthetic oligonucleotide; TTC chr11 5179052 5179073 5179057 5179052 -
agatttatcctgccttacttta

SEQ ID NO: 151551 - DNA, 22 bp, Artificial Sequence
  Synthetic oligonucleotide; TTT chr11 5179046 5179067 5179051 5179046 -
atcctgccttactttaaatcca

SEQ ID NO: 151552 - DNA, 22 bp, Artificial Sequence
  Synthetic oligonucleotide; TTA chr11 5179045 5179066 5179050 5179045 -
tcctgccttactttaaatccag

SEQ ID NO: 151553 - DNA, 22 bp, Artificial Sequence
  Synthetic oligonucleotide; CTG chr11 5179040 5179061 5179045 5179040 -
ccttactttaaatccagtaggg

SEQ ID NO: 151554 - DNA, 22 bp, Artificial Sequence
  Synthetic oligonucleotide; CTT chr11 5179036 5179057 5179041 5179036 -
actttaaatccagtagggccta

SEQ ID NO: 151555 - DNA, 22 bp, Artificial Sequence
  Synthetic oligonucleotide; TTA chr11 5179035 5179056 5179040 5179035 -
ctttaaatccagtagggcctag

SEQ ID NO: 151556 - DNA, 22 bp, Artificial Sequence
  Synthetic oligonucleotide; CTT chr11 5179032 5179053 5179037 5179032 -
taaatccagtagggcctagggt

SEQ ID NO: 151557 - DNA, 22 bp, Artificial Sequence
  Synthetic oligonucleotide; TTT chr11 5179031 5179052 5179036 5179031 -
aaatccagtagggcctagggta

SEQ ID NO: 151558 - DNA, 22 bp, Artificial Sequence
  Synthetic oligonucleotide; TTA chr11 5179030 5179051 5179035 5179030 -
aatccagtagggcctagggtaa

SEQ ID NO: 151559 - DNA, 22 bp, Artificial Sequence
  Synthetic oligonucleotide; CTA chr11 5179014 5179035 5179019 5179014 -
gggtaagaggctgaaagtctgt

SEQ ID NO: 151560 - DNA, 22 bp, Artificial Sequence
  Synthetic oligonucleotide; CTG chr11 5179001 5179022 5179006 5179001 -
aaagtctgtgggttttttttac

SEQ ID NO: 151561 - DNA, 22 bp, Artificial Sequence
  Synthetic oligonucleotide; CTG chr11 5178993 5179014 5178998 5178993 -
tgggttttttttacatctgtag

SEQ ID NO: 151562 - DNA, 22 bp, Artificial Sequence
  Synthetic oligonucleotide; TTT chr11 5178986 5179007 5178991 5178986 -
tttttacatctgtagaaataat

SEQ ID NO: 151563 - DNA, 22 bp, Artificial Sequence
  Synthetic oligonucleotide; TTT chr11 5178985 5179006 5178990 5178985 -
ttttacatctgtagaaataata

SEQ ID NO: 151564 - DNA, 22 bp, Artificial Sequence
  Synthetic oligonucleotide; TTT chr11 5178984 5179005 5178989 5178984 -
tttacatctgtagaaataatag

SEQ ID NO: 151565 - DNA, 22 bp, Artificial Sequence
  Synthetic oligonucleotide; TTT chr11 5178983 5179004 5178988 5178983 -
ttacatctgtagaaataatagt

SEQ ID NO: 151566 - DNA, 22 bp, Artificial Sequence
  Synthetic oligonucleotide; TTT chr11 5178982 5179003 5178987 5178982 -
tacatctgtagaaataatagta

SEQ ID NO: 151567 - DNA, 22 bp, Artificial Sequence
  Synthetic oligonucleotide; TTT chr11 5178981 5179002 5178986 5178981 -
acatctgtagaaataatagtat

SEQ ID NO: 151568 - DNA, 22 bp, Artificial Sequence
  Synthetic oligonucleotide; TTA chr11 5178980 5179001 5178985 5178980 -
catctgtagaaataatagtatt

SEQ ID NO: 151569 - DNA, 22 bp, Artificial Sequence
  Synthetic oligonucleotide; CTG chr11 5178974 5178995 5178979 5178974 -
tagaaataatagtatttatata

SEQ ID NO: 151570 - DNA, 22 bp, Artificial Sequence
  Synthetic oligonucleotide; TTT chr11 5178957 5178978 5178962 5178957 -
atataatggttatttaaagggc

SEQ ID NO: 151571 - DNA, 22 bp, Artificial Sequence
  Synthetic oligonucleotide; TTA chr11 5178956 5178977 5178961 5178956 -
tataatggttatttaaagggct

SEQ ID NO: 151572 - DNA, 22 bp, Artificial Sequence
  Synthetic oligonucleotide; TTA chr11 5178945 5178966 5178950 5178945 -
tttaaagggcttttcaataggt

SEQ ID NO: 151573 - DNA, 22 bp, Artificial Sequence
  Synthetic oligonucleotide; TTT chr11 5178942 5178963 5178947 5178942 -
aaagggcttttcaataggttat

SEQ ID NO: 151574 - DNA, 22 bp, Artificial Sequence
  Synthetic oligonucleotide; TTA chr11 5178941 5178962 5178946 5178941 -
aagggcttttcaataggttatt

SEQ ID NO: 151575 - DNA, 22 bp, Artificial Sequence
  Synthetic oligonucleotide; CTT chr11 5178933 5178954 5178938 5178933 -
ttcaataggttattgtgaagat

SEQ ID NO: 151576 - DNA, 22 bp, Artificial Sequence
  Synthetic oligonucleotide; TTT chr11 5178932 5178953 5178937 5178932 -
tcaataggttattgtgaagatt

SEQ ID NO: 151577 - DNA, 22 bp, Artificial Sequence
  Synthetic oligonucleotide; TTT chr11 5178931 5178952 5178936 5178931 -
caataggttattgtgaagattt

SEQ ID NO: 151578 - DNA, 22 bp, Artificial Sequence
  Synthetic oligonucleotide; TTC chr11 5178930 5178951 5178935 5178930 -
aataggttattgtgaagattta

SEQ ID NO: 151579 - DNA, 22 bp, Artificial Sequence
  Synthetic oligonucleotide; TTA chr11 5178921 5178942 5178926 5178921 -
ttgtgaagatttaataagttaa

SEQ ID NO: 151580 - DNA, 22 bp, Artificial Sequence
  Synthetic oligonucleotide; TTG chr11 5178918 5178939 5178923 5178918 -
tgaagatttaataagttaatat

SEQ ID NO: 151581 - DNA, 22 bp, Artificial Sequence
  Synthetic oligonucleotide; TTT chr11 5178909 5178930 5178914 5178909 -
aataagttaatatttgtaaagt

SEQ ID NO: 151582 - DNA, 22 bp, Artificial Sequence
  Synthetic oligonucleotide; TTA chr11 5178908 5178929 5178913 5178908 -
ataagttaatatttgtaaagta

SEQ ID NO: 151583 - DNA, 22 bp, Artificial Sequence
  Synthetic oligonucleotide; TTA chr11 5178900 5178921 5178905 5178900 -
atatttgtaaagtagtatgaca

SEQ ID NO: 151584 - DNA, 22 bp, Artificial Sequence
  Synthetic oligonucleotide; TTT chr11 5178894 5178915 5178899 5178894 -
gtaaagtagtatgacacatatt

SEQ ID NO: 151585 - DNA, 22 bp, Artificial Sequence
  Synthetic oligonucleotide; TTG chr11 5178893 5178914 5178898 5178893 -
taaagtagtatgacacatatta

SEQ ID NO: 151586 - DNA, 22 bp, Artificial Sequence
  Synthetic oligonucleotide; TTA chr11 5178871 5178892 5178876 5178871 -
agcagttattaaataatatcta

SEQ ID NO: 151587 - DNA, 22 bp, Artificial Sequence
  Synthetic oligonucleotide; TTA chr11 5178863 5178884 5178868 5178863 -
ttaaataatatctactaatttt

SEQ ID NO: 151588 - DNA, 22 bp, Artificial Sequence
  Synthetic oligonucleotide; TTA chr11 5178860 5178881 5178865 5178860 -
aataatatctactaatttttta

SEQ ID NO: 151589 - DNA, 22 bp, Artificial Sequence
  Synthetic oligonucleotide; CTA chr11 5178849 5178870 5178854 5178849 -
ctaattttttaaggtacaaaaa

SEQ ID NO: 151590 - DNA, 22 bp, Artificial Sequence
  Synthetic oligonucleotide; CTA chr11 5178846 5178867 5178851 5178846 -
attttttaaggtacaaaaaatt

SEQ ID NO: 151591 - DNA, 22 bp, Artificial Sequence
  Synthetic oligonucleotide; TTT chr11 5178842 5178863 5178847 5178842 -
tttaaggtacaaaaaattaatt

SEQ ID NO: 151592 - DNA, 22 bp, Artificial Sequence
  Synthetic oligonucleotide; TTT chr11 5178841 5178862 5178846 5178841 -
ttaaggtacaaaaaattaatta

SEQ ID NO: 151593 - DNA, 22 bp, Artificial Sequence
  Synthetic oligonucleotide; TTT chr11 5178840 5178861 5178845 5178840 -
taaggtacaaaaaattaattat

SEQ ID NO: 151594 - DNA, 22 bp, Artificial Sequence
  Synthetic oligonucleotide; TTT chr11 5178839 5178860 5178844 5178839 -
aaggtacaaaaaattaattatt

SEQ ID NO: 151595 - DNA, 22 bp, Artificial Sequence
  Synthetic oligonucleotide; TTA chr11 5178838 5178859 5178843 5178838 -
aggtacaaaaaattaattattt

SEQ ID NO: 151596 - DNA, 22 bp, Artificial Sequence
  Synthetic oligonucleotide; TTA chr11 5178823 5178844 5178828 5178823 -
attatttggtaggacttatata

SEQ ID NO: 151597 - DNA, 22 bp, Artificial Sequence
  Synthetic oligonucleotide; TTA chr11 5178819 5178840 5178824 5178819 -
tttggtaggacttatatattcg

SEQ ID NO: 151598 - DNA, 22 bp, Artificial Sequence
  Synthetic oligonucleotide; TTT chr11 5178816 5178837 5178821 5178816 -
ggtaggacttatatattcggtc

SEQ ID NO: 151599 - DNA, 22 bp, Artificial Sequence
  Synthetic oligonucleotide; TTG chr11 5178815 5178836 5178820 5178815 -
gtaggacttatatattcggtct

SEQ ID NO: 151600 - DNA, 22 bp, Artificial Sequence
  Synthetic oligonucleotide; CTT chr11 5178806 5178827 5178811 5178806 -
atatattcggtctattaaccca

SEQ ID NO: 151601 - DNA, 22 bp, Artificial Sequence
  Synthetic oligonucleotide; TTA chr11 5178805 5178826 5178810 5178805 -
tatattcggtctattaacccat

SEQ ID NO: 151602 - DNA, 22 bp, Artificial Sequence
  Synthetic oligonucleotide; TTC chr11 5178798 5178819 5178803 5178798 -
ggtctattaacccattttactc

SEQ ID NO: 151603 - DNA, 22 bp, Artificial Sequence
  Synthetic oligonucleotide; CTA chr11 5178792 5178813 5178797 5178792 -
ttaacccattttactctccttt

SEQ ID NO: 151604 - DNA, 22 bp, Artificial Sequence
  Synthetic oligonucleotide; TTA chr11 5178789 5178810 5178794 5178789 -
acccattttactctcctttccc

SEQ ID NO: 151605 - DNA, 22 bp, Artificial Sequence
  Synthetic oligonucleotide; TTT chr11 5178781 5178802 5178786 5178781 -
tactctcctttcccagagaaga

SEQ ID NO: 151606 - DNA, 22 bp, Artificial Sequence
  Synthetic oligonucleotide; TTT chr11 5178780 5178801 5178785 5178780 -
actctcctttcccagagaagaa

SEQ ID NO: 151607 - DNA, 22 bp, Artificial Sequence
  Synthetic oligonucleotide; TTA chr11 5178779 5178800 5178784 5178779 -
ctctcctttcccagagaagaaa

SEQ ID NO: 151608 - DNA, 22 bp, Artificial Sequence
  Synthetic oligonucleotide; CTC chr11 5178776 5178797 5178781 5178776 -
tcctttcccagagaagaaaaca

SEQ ID NO: 151609 - DNA, 22 bp, Artificial Sequence
  Synthetic oligonucleotide; CTC chr11 5178774 5178795 5178779 5178774 -
ctttcccagagaagaaaacatt

SEQ ID NO: 151610 - DNA, 22 bp, Artificial Sequence
  Synthetic oligonucleotide; CTT chr11 5178771 5178792 5178776 5178771 -
tcccagagaagaaaacattgga

SEQ ID NO: 151611 - DNA, 22 bp, Artificial Sequence
  Synthetic oligonucleotide; TTT chr11 5178770 5178791 5178775 5178770 -
cccagagaagaaaacattggaa

SEQ ID NO: 151612 - DNA, 22 bp, Artificial Sequence
  Synthetic oligonucleotide; TTC chr11 5178769 5178790 5178774 5178769 -
ccagagaagaaaacattggaaa

SEQ ID NO: 151613 - DNA, 22 bp, Artificial Sequence
  Synthetic oligonucleotide; TTG chr11 5178751 5178772 5178756 5178751 -
gaaagaaaacaaatctgatgag

SEQ ID NO: 151614 - DNA, 22 bp, Artificial Sequence
  Synthetic oligonucleotide; CTG chr11 5178734 5178755 5178739 5178734 -
atgagacctcattcagcctaag

SEQ ID NO: 151615 - DNA, 22 bp, Artificial Sequence
  Synthetic oligonucleotide; CTC chr11 5178724 5178745 5178729 5178724 -
attcagcctaaggtagtgtttc

SEQ ID NO: 151616 - DNA, 22 bp, Artificial Sequence
  Synthetic oligonucleotide; TTC chr11 5178720 5178741 5178725 5178720 -
agcctaaggtagtgtttctaaa

SEQ ID NO: 151617 - DNA, 22 bp, Artificial Sequence
  Synthetic oligonucleotide; CTA chr11 5178714 5178735 5178719 5178714 -
aggtagtgtttctaaatcctca

SEQ ID NO: 151618 - DNA, 22 bp, Artificial Sequence
  Synthetic oligonucleotide; TTT chr11 5178703 5178724 5178708 5178703 -
ctaaatcctcaactttgtagtc

SEQ ID NO: 151619 - DNA, 22 bp, Artificial Sequence
  Synthetic oligonucleotide; TTC chr11 5178702 5178723 5178707 5178702 -
taaatcctcaactttgtagtct

SEQ ID NO: 151620 - DNA, 22 bp, Artificial Sequence
  Synthetic oligonucleotide; CTA chr11 5178700 5178721 5178705 5178700 -
aatcctcaactttgtagtcttt

SEQ ID NO: 151621 - DNA, 22 bp, Artificial Sequence
  Synthetic oligonucleotide; CTC chr11 5178693 5178714 5178698 5178693 -
aactttgtagtctttcactaat

SEQ ID NO: 151622 - DNA, 22 bp, Artificial Sequence
  Synthetic oligonucleotide; CTT chr11 5178688 5178709 5178693 5178688 -
tgtagtctttcactaatggcac

SEQ ID NO: 151623 - DNA, 22 bp, Artificial Sequence
  Synthetic oligonucleotide; TTT chr11 5178687 5178708 5178692 5178687 -
gtagtctttcactaatggcact

SEQ ID NO: 151624 - DNA, 22 bp, Artificial Sequence
  Synthetic oligonucleotide; TTG chr11 5178686 5178707 5178691 5178686 -
tagtctttcactaatggcacta

SEQ ID NO: 151625 - DNA, 22 bp, Artificial Sequence
  Synthetic oligonucleotide; CTT chr11 5178679 5178700 5178684 5178679 -
tcactaatggcactaggcctgg

SEQ ID NO: 151626 - DNA, 22 bp, Artificial Sequence
  Synthetic oligonucleotide; TTT chr11 5178678 5178699 5178683 5178678 -
cactaatggcactaggcctgga

SEQ ID NO: 151627 - DNA, 22 bp, Artificial Sequence
  Synthetic oligonucleotide; TTC chr11 5178677 5178698 5178682 5178677 -
actaatggcactaggcctggaa

SEQ ID NO: 151628 - DNA, 22 bp, Artificial Sequence
  Synthetic oligonucleotide; CTA chr11 5178673 5178694 5178678 5178673 -
atggcactaggcctggaataaa

SEQ ID NO: 151629 - DNA, 22 bp, Artificial Sequence
  Synthetic oligonucleotide; CTA chr11 5178664 5178685 5178669 5178664 -
ggcctggaataaactgtacata

SEQ ID NO: 151630 - DNA, 22 bp, Artificial Sequence
  Synthetic oligonucleotide; CTG chr11 5178658 5178679 5178663 5178658 -
gaataaactgtacatacggctc

SEQ ID NO: 151631 - DNA, 22 bp, Artificial Sequence
  Synthetic oligonucleotide; CTG chr11 5178648 5178669 5178653 5178648 -
tacatacggctcctttctttcg

SEQ ID NO: 151632 - DNA, 22 bp, Artificial Sequence
  Synthetic oligonucleotide; CTC chr11 5178636 5178657 5178641 5178636 -
ctttctttcgcaatcacactaa

SEQ ID NO: 151633 - DNA, 22 bp, Artificial Sequence
  Synthetic oligonucleotide; CTT chr11 5178633 5178654 5178638 5178633 -
tctttcgcaatcacactaattc

SEQ ID NO: 151634 - DNA, 22 bp, Artificial Sequence
  Synthetic oligonucleotide; TTT chr11 5178632 5178653 5178637 5178632 -
ctttcgcaatcacactaattcc

SEQ ID NO: 151635 - DNA, 22 bp, Artificial Sequence
  Synthetic oligonucleotide; TTC chr11 5178631 5178652 5178636 5178631 -
tttcgcaatcacactaattccc

SEQ ID NO: 151636 - DNA, 22 bp, Artificial Sequence
  Synthetic oligonucleotide; CTT chr11 5178629 5178650 5178634 5178629 -
tcgcaatcacactaattcccag

SEQ ID NO: 151637 - DNA, 22 bp, Artificial Sequence
  Synthetic oligonucleotide; TTT chr11 5178628 5178649 5178633 5178628 -
cgcaatcacactaattcccagg

SEQ ID NO: 151638 - DNA, 22 bp, Artificial Sequence
  Synthetic oligonucleotide; TTC chr11 5178627 5178648 5178632 5178627 -
gcaatcacactaattcccagga

SEQ ID NO: 151639 - DNA, 22 bp, Artificial Sequence
  Synthetic oligonucleotide; CTA chr11 5178615 5178636 5178620 5178615 -
attcccaggatgtgtggtatgt

SEQ ID NO: 151640 - DNA, 22 bp, Artificial Sequence
  Synthetic oligonucleotide; TTC chr11 5178611 5178632 5178616 5178611 -
ccaggatgtgtggtatgtcctg

SEQ ID NO: 151641 - DNA, 22 bp, Artificial Sequence
  Synthetic oligonucleotide; CTG chr11 5178589 5178610 5178594 5178589 -
atgggaatcccagggctggaag

SEQ ID NO: 151642 - DNA, 22 bp, Artificial Sequence
  Synthetic oligonucleotide; CTG chr11 5178571 5178592 5178576 5178571 -
gaaggcttgcatacctggatct

SEQ ID NO: 151643 - DNA, 22 bp, Artificial Sequence
  Synthetic oligonucleotide; CTT chr11 5178563 5178584 5178568 5178563 -
gcatacctggatctccatccct

SEQ ID NO: 151644 - DNA, 22 bp, Artificial Sequence
  Synthetic oligonucleotide; TTG chr11 5178562 5178583 5178567 5178562 -
catacctggatctccatccctt

SEQ ID NO: 151645 - DNA, 22 bp, Artificial Sequence
  Synthetic oligonucleotide; CTG chr11 5178554 5178575 5178559 5178554 -
gatctccatccctttttctttt

SEQ ID NO: 151646 - DNA, 22 bp, Artificial Sequence
  Synthetic oligonucleotide; CTC chr11 5178548 5178569 5178553 5178548 -
catccctttttcttttatgtac

SEQ ID NO: 151647 - DNA, 22 bp, Artificial Sequence
  Synthetic oligonucleotide; CTT chr11 5178540 5178561 5178545 5178540 -
tttcttttatgtacattgtggc

SEQ ID NO: 151648 - DNA, 22 bp, Artificial Sequence
  Synthetic oligonucleotide; TTT chr11 5178539 5178560 5178544 5178539 -
ttcttttatgtacattgtggct

SEQ ID NO: 151649 - DNA, 22 bp, Artificial Sequence
  Synthetic oligonucleotide; TTT chr11 5178538 5178559 5178543 5178538 -
tcttttatgtacattgtggctg

SEQ ID NO: 151650 - DNA, 22 bp, Artificial Sequence
  Synthetic oligonucleotide; TTT chr11 5178537 5178558 5178542 5178537 -
cttttatgtacattgtggctgt

SEQ ID NO: 151651 - DNA, 22 bp, Artificial Sequence
  Synthetic oligonucleotide; TTC chr11 5178536 5178557 5178541 5178536 -
ttttatgtacattgtggctgtt

SEQ ID NO: 151652 - DNA, 22 bp, Artificial Sequence
  Synthetic oligonucleotide; CTT chr11 5178534 5178555 5178539 5178534 -
ttatgtacattgtggctgttgc

SEQ ID NO: 151653 - DNA, 22 bp, Artificial Sequence
  Synthetic oligonucleotide; TTT chr11 5178533 5178554 5178538 5178533 -
tatgtacattgtggctgttgca

SEQ ID NO: 151654 - DNA, 22 bp, Artificial Sequence
  Synthetic oligonucleotide; TTT chr11 5178532 5178553 5178537 5178532 -
atgtacattgtggctgttgcag

SEQ ID NO: 151655 - DNA, 22 bp, Artificial Sequence
  Synthetic oligonucleotide; TTA chr11 5178531 5178552 5178536 5178531 -
tgtacattgtggctgttgcagg

SEQ ID NO: 151656 - DNA, 22 bp, Artificial Sequence
  Synthetic oligonucleotide; TTG chr11 5178522 5178543 5178527 5178522 -
tggctgttgcaggcaatatctt

SEQ ID NO: 151657 - DNA, 22 bp, Artificial Sequence
  Synthetic oligonucleotide; CTG chr11 5178516 5178537 5178521 5178516 -
ttgcaggcaatatcttcttgat

SEQ ID NO: 151658 - DNA, 22 bp, Artificial Sequence
  Synthetic oligonucleotide; TTG chr11 5178513 5178534 5178518 5178513 -
caggcaatatcttcttgatctt

SEQ ID NO: 151659 - DNA, 22 bp, Artificial Sequence
  Synthetic oligonucleotide; CTT chr11 5178500 5178521 5178505 5178500 -
cttgatcttcctgatcatgact

SEQ ID NO: 151660 - DNA, 22 bp, Artificial Sequence
  Synthetic oligonucleotide; TTC chr11 5178499 5178520 5178504 5178499 -
ttgatcttcctgatcatgactg

SEQ ID NO: 151661 - DNA, 22 bp, Artificial Sequence
  Synthetic oligonucleotide; CTT chr11 5178497 5178518 5178502 5178497 -
gatcttcctgatcatgactgag

SEQ ID NO: 151662 - DNA, 22 bp, Artificial Sequence
  Synthetic oligonucleotide; TTG chr11 5178496 5178517 5178501 5178496 -
atcttcctgatcatgactgagc

SEQ ID NO: 151663 - DNA, 22 bp, Artificial Sequence
  Synthetic oligonucleotide; CTT chr11 5178491 5178512 5178496 5178491 -
cctgatcatgactgagcgcagt

SEQ ID NO: 151664 - DNA, 22 bp, Artificial Sequence
  Synthetic oligonucleotide; TTC chr11 5178490 5178511 5178495 5178490 -
ctgatcatgactgagcgcagtc

SEQ ID NO: 151665 - DNA, 22 bp, Artificial Sequence
  Synthetic oligonucleotide; CTG chr11 5178487 5178508 5178492 5178487 -
atcatgactgagcgcagtctcc

SEQ ID NO: 151666 - DNA, 22 bp, Artificial Sequence
  Synthetic oligonucleotide; CTG chr11 5178477 5178498 5178482 5178477 -
agcgcagtctccatgagcccat

SEQ ID NO: 151667 - DNA, 22 bp, Artificial Sequence
  Synthetic oligonucleotide; CTC chr11 5178466 5178487 5178471 5178466 -
catgagcccatgtatctcttcc

SEQ ID NO: 151668 - DNA, 22 bp, Artificial Sequence
  Synthetic oligonucleotide; CTC chr11 5178448 5178469 5178453 5178448 -
ttcctatccatgctggcctcag

SEQ ID NO: 151669 - DNA, 22 bp, Artificial Sequence
  Synthetic oligonucleotide; CTT chr11 5178446 5178467 5178451 5178446 -
cctatccatgctggcctcagcc

SEQ ID NO: 151670 - DNA, 22 bp, Artificial Sequence
  Synthetic oligonucleotide; TTC chr11 5178445 5178466 5178450 5178445 -
ctatccatgctggcctcagccg

SEQ ID NO: 151671 - DNA, 22 bp, Artificial Sequence
  Synthetic oligonucleotide; CTA chr11 5178442 5178463 5178447 5178442 -
tccatgctggcctcagccgact

SEQ ID NO: 151672 - DNA, 22 bp, Artificial Sequence
  Synthetic oligonucleotide; CTG chr11 5178433 5178454 5178438 5178433 -
gcctcagccgacttcctgctcg

SEQ ID NO: 151673 - DNA, 22 bp, Artificial Sequence
  Synthetic oligonucleotide; CTC chr11 5178428 5178449 5178433 5178428 -
agccgacttcctgctcgccact

SEQ ID NO: 151674 - DNA, 22 bp, Artificial Sequence
  Synthetic oligonucleotide; CTT chr11 5178419 5178440 5178424 5178419 -
cctgctcgccactgctgcagcc

SEQ ID NO: 151675 - DNA, 22 bp, Artificial Sequence
  Synthetic oligonucleotide; TTC chr11 5178418 5178439 5178423 5178418 -
ctgctcgccactgctgcagccc

SEQ ID NO: 151676 - DNA, 22 bp, Artificial Sequence
  Synthetic oligonucleotide; CTG chr11 5178415 5178436 5178420 5178415 -
ctcgccactgctgcagccccta

SEQ ID NO: 151677 - DNA, 22 bp, Artificial Sequence
  Synthetic oligonucleotide; CTC chr11 5178412 5178433 5178417 5178412 -
gccactgctgcagcccctaagg

SEQ ID NO: 151678 - DNA, 22 bp, Artificial Sequence
  Synthetic oligonucleotide; CTG chr11 5178405 5178426 5178410 5178405 -
ctgcagcccctaaggtgctggc

SEQ ID NO: 151679 - DNA, 22 bp, Artificial Sequence
  Synthetic oligonucleotide; CTG chr11 5178402 5178423 5178407 5178402 -
cagcccctaaggtgctggctat

SEQ ID NO: 151680 - DNA, 22 bp, Artificial Sequence
  Synthetic oligonucleotide; CTA chr11 5178393 5178414 5178398 5178393 -
aggtgctggctatcctctggtt

SEQ ID NO: 151681 - DNA, 22 bp, Artificial Sequence
  Synthetic oligonucleotide; CTG chr11 5178385 5178406 5178390 5178385 -
gctatcctctggttccactcca

SEQ ID NO: 151682 - DNA, 22 bp, Artificial Sequence
  Synthetic oligonucleotide; CTA chr11 5178381 5178402 5178386 5178381 -
tcctctggttccactccatgga

SEQ ID NO: 151683 - DNA, 22 bp, Artificial Sequence
  Synthetic oligonucleotide; CTC chr11 5178376 5178397 5178381 5178376 -
tggttccactccatggacatat

SEQ ID NO: 151684 - DNA, 22 bp, Artificial Sequence
  Synthetic oligonucleotide; CTG chr11 5178374 5178395 5178379 5178374 -
gttccactccatggacatatcc

SEQ ID NO: 151685 - DNA, 22 bp, Artificial Sequence
  Synthetic oligonucleotide; TTC chr11 5178370 5178391 5178375 5178370 -
cactccatggacatatcctttg

SEQ ID NO: 151686 - DNA, 22 bp, Artificial Sequence
  Synthetic oligonucleotide; CTC chr11 5178365 5178386 5178370 5178365 -
catggacatatcctttggtagt

SEQ ID NO: 151687 - DNA, 22 bp, Artificial Sequence
  Synthetic oligonucleotide; CTT chr11 5178350 5178371 5178355 5178350 -
tggtagttgtgtgtctcagatg

SEQ ID NO: 151688 - DNA, 22 bp, Artificial Sequence
  Synthetic oligonucleotide; TTT chr11 5178349 5178370 5178354 5178349 -
ggtagttgtgtgtctcagatgt

SEQ ID NO: 151689 - DNA, 22 bp, Artificial Sequence
  Synthetic oligonucleotide; TTG chr11 5178348 5178369 5178353 5178348 -
gtagttgtgtgtctcagatgtt

SEQ ID NO: 151690 - DNA, 22 bp, Artificial Sequence
  Synthetic oligonucleotide; TTG chr11 5178341 5178362 5178346 5178341 -
tgtgtctcagatgttcttcata

SEQ ID NO: 151691 - DNA, 22 bp, Artificial Sequence
  Synthetic oligonucleotide; CTC chr11 5178333 5178354 5178338 5178333 -
agatgttcttcatacatttcat

SEQ ID NO: 151692 - DNA, 22 bp, Artificial Sequence
  Synthetic oligonucleotide; TTC chr11 5178325 5178346 5178330 5178325 -
ttcatacatttcatctttgtgg

SEQ ID NO: 151693 - DNA, 22 bp, Artificial Sequence
  Synthetic oligonucleotide; CTT chr11 5178323 5178344 5178328 5178323 -
catacatttcatctttgtggca

SEQ ID NO: 151694 - DNA, 22 bp, Artificial Sequence
  Synthetic oligonucleotide; TTC chr11 5178322 5178343 5178327 5178322 -
atacatttcatctttgtggcag

SEQ ID NO: 151695 - DNA, 22 bp, Artificial Sequence
  Synthetic oligonucleotide; TTT chr11 5178314 5178335 5178319 5178314 -
catctttgtggcagaatctgct

SEQ ID NO: 151696 - DNA, 22 bp, Artificial Sequence
  Synthetic oligonucleotide; TTC chr11 5178313 5178334 5178318 5178313 -
atctttgtggcagaatctgcta

SEQ ID NO: 151697 - DNA, 22 bp, Artificial Sequence
  Synthetic oligonucleotide; CTT chr11 5178308 5178329 5178313 5178308 -
tgtggcagaatctgctattctc

SEQ ID NO: 151698 - DNA, 22 bp, Artificial Sequence
  Synthetic oligonucleotide; TTT chr11 5178307 5178328 5178312 5178307 -
gtggcagaatctgctattctcc

SEQ ID NO: 151699 - DNA, 22 bp, Artificial Sequence
  Synthetic oligonucleotide; TTG chr11 5178306 5178327 5178311 5178306 -
tggcagaatctgctattctcct

SEQ ID NO: 151700 - DNA, 22 bp, Artificial Sequence
  Synthetic oligonucleotide; CTG chr11 5178294 5178315 5178299 5178294 -
ctattctcctggcaatggcatt

SEQ ID NO: 151701 - DNA, 22 bp, Artificial Sequence
  Synthetic oligonucleotide; CTA chr11 5178291 5178312 5178296 5178291 -
ttctcctggcaatggcatttga

SEQ ID NO: 151702 - DNA, 22 bp, Artificial Sequence
  Synthetic oligonucleotide; TTC chr11 5178288 5178309 5178293 5178288 -
tcctggcaatggcatttgaccg

SEQ ID NO: 151703 - DNA, 22 bp, Artificial Sequence
  Synthetic oligonucleotide; CTC chr11 5178286 5178307 5178291 5178286 -
ctggcaatggcatttgaccgct

SEQ ID NO: 151704 - DNA, 22 bp, Artificial Sequence
  Synthetic oligonucleotide; CTG chr11 5178283 5178304 5178288 5178283 -
gcaatggcatttgaccgctatg

SEQ ID NO: 151705 - DNA, 22 bp, Artificial Sequence
  Synthetic oligonucleotide; TTT chr11 5178271 5178292 5178276 5178271 -
gaccgctatgtggccatctgtt

SEQ ID NO: 151706 - DNA, 22 bp, Artificial Sequence
  Synthetic oligonucleotide; TTG chr11 5178270 5178291 5178275 5178270 -
accgctatgtggccatctgtta

SEQ ID NO: 151707 - DNA, 22 bp, Artificial Sequence
  Synthetic oligonucleotide; CTA chr11 5178263 5178284 5178268 5178263 -
tgtggccatctgttacccactg

SEQ ID NO: 151708 - DNA, 22 bp, Artificial Sequence
  Synthetic oligonucleotide; CTG chr11 5178251 5178272 5178256 5178251 -
ttacccactgagatacaccatt

SEQ ID NO: 151709 - DNA, 22 bp, Artificial Sequence
  Synthetic oligonucleotide; TTA chr11 5178248 5178269 5178253 5178248 -
cccactgagatacaccatttta

SEQ ID NO: 151710 - DNA, 22 bp, Artificial Sequence
  Synthetic oligonucleotide; CTG chr11 5178241 5178262 5178246 5178241 -
agatacaccattttaacctcat

SEQ ID NO: 151711 - DNA, 22 bp, Artificial Sequence
  Synthetic oligonucleotide; TTT chr11 5178228 5178249 5178233 5178228 -
taacctcatcagccgtcaggaa

SEQ ID NO: 151712 - DNA, 22 bp, Artificial Sequence
  Synthetic oligonucleotide; TTT chr11 5178227 5178248 5178232 5178227 -
aacctcatcagccgtcaggaag

SEQ ID NO: 151713 - DNA, 22 bp, Artificial Sequence
  Synthetic oligonucleotide; TTA chr11 5178226 5178247 5178231 5178226 -
acctcatcagccgtcaggaaga

SEQ ID NO: 151714 - DNA, 22 bp, Artificial Sequence
  Synthetic oligonucleotide; CTC chr11 5178221 5178242 5178226 5178221 -
atcagccgtcaggaagattggc

SEQ ID NO: 151715 - DNA, 22 bp, Artificial Sequence
  Synthetic oligonucleotide; TTG chr11 5178201 5178222 5178206 5178201 -
gcatagcagctgtggtcaggag

SEQ ID NO: 151716 - DNA, 22 bp, Artificial Sequence
  Synthetic oligonucleotide; CTG chr11 5178189 5178210 5178194 5178189 -
tggtcaggagctttttcatctg

SEQ ID NO: 151717 - DNA, 22 bp, Artificial Sequence
  Synthetic oligonucleotide; CTT chr11 5178176 5178197 5178181 5178176 -
tttcatctgctgtccgttcatc

SEQ ID NO: 151718 - DNA, 22 bp, Artificial Sequence
  Synthetic oligonucleotide; TTT chr11 5178175 5178196 5178180 5178175 -
ttcatctgctgtccgttcatct

SEQ ID NO: 151719 - DNA, 22 bp, Artificial Sequence
  Synthetic oligonucleotide; TTT chr11 5178174 5178195 5178179 5178174 -
tcatctgctgtccgttcatctt

SEQ ID NO: 151720 - DNA, 22 bp, Artificial Sequence
  Synthetic oligonucleotide; TTT chr11 5178173 5178194 5178178 5178173 -
catctgctgtccgttcatcttc

SEQ ID NO: 151721 - DNA, 22 bp, Artificial Sequence
  Synthetic oligonucleotide; TTC chr11 5178172 5178193 5178177 5178172 -
atctgctgtccgttcatcttcc

SEQ ID NO: 151722 - DNA, 22 bp, Artificial Sequence
  Synthetic oligonucleotide; CTG chr11 5178167 5178188 5178172 5178167 -
ctgtccgttcatcttcctggta

SEQ ID NO: 151723 - DNA, 22 bp, Artificial Sequence
  Synthetic oligonucleotide; CTG chr11 5178164 5178185 5178169 5178164 -
tccgttcatcttcctggtatac

SEQ ID NO: 151724 - DNA, 22 bp, Artificial Sequence
  Synthetic oligonucleotide; TTC chr11 5178157 5178178 5178162 5178157 -
atcttcctggtataccgactta

SEQ ID NO: 151725 - DNA, 22 bp, Artificial Sequence
  Synthetic oligonucleotide; CTT chr11 5178152 5178173 5178157 5178152 -
cctggtataccgacttacatat

SEQ ID NO: 151726 - DNA, 22 bp, Artificial Sequence
  Synthetic oligonucleotide; TTC chr11 5178151 5178172 5178156 5178151 -
ctggtataccgacttacatatt

SEQ ID NO: 151727 - DNA, 22 bp, Artificial Sequence
  Synthetic oligonucleotide; CTG chr11 5178148 5178169 5178153 5178148 -
gtataccgacttacatattgtg

SEQ ID NO: 151728 - DNA, 22 bp, Artificial Sequence
  Synthetic oligonucleotide; CTT chr11 5178136 5178157 5178141 5178136 -
acatattgtgggagaaacatca

SEQ ID NO: 151729 - DNA, 22 bp, Artificial Sequence
  Synthetic oligonucleotide; TTA chr11 5178135 5178156 5178140 5178135 -
catattgtgggagaaacatcat

SEQ ID NO: 151730 - DNA, 22 bp, Artificial Sequence
  Synthetic oligonucleotide; TTG chr11 5178128 5178149 5178133 5178128 -
tgggagaaacatcattcctcat

SEQ ID NO: 151731 - DNA, 22 bp, Artificial Sequence
  Synthetic oligonucleotide; TTC chr11 5178111 5178132 5178116 5178111 -
ctcattcctactgtgagcacat

SEQ ID NO: 151732 - DNA, 22 bp, Artificial Sequence
  Synthetic oligonucleotide; CTC chr11 5178108 5178129 5178113 5178108 -
attcctactgtgagcacattgc

SEQ ID NO: 151733 - DNA, 22 bp, Artificial Sequence
  Synthetic oligonucleotide; TTC chr11 5178104 5178125 5178109 5178104 -
ctactgtgagcacattgccaga

SEQ ID NO: 151734 - DNA, 22 bp, Artificial Sequence
  Synthetic oligonucleotide; CTA chr11 5178101 5178122 5178106 5178101 -
ctgtgagcacattgccagattg

SEQ ID NO: 151735 - DNA, 22 bp, Artificial Sequence
  Synthetic oligonucleotide; CTG chr11 5178098 5178119 5178103 5178098 -
tgagcacattgccagattggct

SEQ ID NO: 151736 - DNA, 22 bp, Artificial Sequence
  Synthetic oligonucleotide; TTG chr11 5178087 5178108 5178092 5178087 -
ccagattggcttgtggcaatat

SEQ ID NO: 151737 - DNA, 22 bp, Artificial Sequence
  Synthetic oligonucleotide; TTG chr11 5178079 5178100 5178084 5178079 -
gcttgtggcaatatcaatgtca

SEQ ID NO: 151738 - DNA, 22 bp, Artificial Sequence
  Synthetic oligonucleotide; CTT chr11 5178075 5178096 5178080 5178075 -
gtggcaatatcaatgtcaatat

SEQ ID NO: 151739 - DNA, 22 bp, Artificial Sequence
  Synthetic oligonucleotide; TTG chr11 5178074 5178095 5178079 5178074 -
tggcaatatcaatgtcaatatc

SEQ ID NO: 151740 - DNA, 22 bp, Artificial Sequence
  Synthetic oligonucleotide; TTT chr11 5178048 5178069 5178053 5178048 -
atggcctcactgtggccctact

SEQ ID NO: 151741 - DNA, 22 bp, Artificial Sequence
  Synthetic oligonucleotide; TTA chr11 5178047 5178068 5178052 5178047 -
tggcctcactgtggccctactc

SEQ ID NO: 151742 - DNA, 22 bp, Artificial Sequence
  Synthetic oligonucleotide; CTC chr11 5178040 5178061 5178045 5178040 -
actgtggccctactctctacag

SEQ ID NO: 151743 - DNA, 22 bp, Artificial Sequence
  Synthetic oligonucleotide; CTG chr11 5178036 5178057 5178041 5178036 -
tggccctactctctacaggact

SEQ ID NO: 151744 - DNA, 22 bp, Artificial Sequence
  Synthetic oligonucleotide; CTA chr11 5178028 5178049 5178033 5178028 -
ctctctacaggactggatatag

SEQ ID NO: 151745 - DNA, 22 bp, Artificial Sequence
  Synthetic oligonucleotide; CTC chr11 5178025 5178046 5178030 5178025 -
tctacaggactggatatagtgc

SEQ ID NO: 151746 - DNA, 22 bp, Artificial Sequence
  Synthetic oligonucleotide; CTC chr11 5178023 5178044 5178028 5178023 -
tacaggactggatatagtgctt

SEQ ID NO: 151747 - DNA, 22 bp, Artificial Sequence
  Synthetic oligonucleotide; CTA chr11 5178021 5178042 5178026 5178021 -
caggactggatatagtgcttat

SEQ ID NO: 151748 - DNA, 22 bp, Artificial Sequence
  Synthetic oligonucleotide; CTG chr11 5178013 5178034 5178018 5178013 -
gatatagtgcttatcattatat

SEQ ID NO: 151749 - DNA, 22 bp, Artificial Sequence
  Synthetic oligonucleotide; CTT chr11 5178001 5178022 5178006 5178001 -
atcattatatcctacacaatga

SEQ ID NO: 151750 - DNA, 22 bp, Artificial Sequence
  Synthetic oligonucleotide; TTA chr11 5178000 5178021 5178005 5178000 -
tcattatatcctacacaatgat

SEQ ID NO: 151751 - DNA, 22 bp, Artificial Sequence
  Synthetic oligonucleotide; TTA chr11 5177994 5178015 5177999 5177994 -
tatcctacacaatgatccttca

SEQ ID NO: 151752 - DNA, 22 bp, Artificial Sequence
  Synthetic oligonucleotide; CTA chr11 5177987 5178008 5177992 5177987 -
cacaatgatccttcactcagtg

SEQ ID NO: 151753 - DNA, 22 bp, Artificial Sequence
  Synthetic oligonucleotide; CTT chr11 5177974 5177995 5177979 5177974 -
cactcagtgtttcagatatctt

SEQ ID NO: 151754 - DNA, 22 bp, Artificial Sequence
  Synthetic oligonucleotide; TTC chr11 5177973 5177994 5177978 5177973 -
actcagtgtttcagatatcttc

SEQ ID NO: 151755 - DNA, 22 bp, Artificial Sequence
  Synthetic oligonucleotide; CTC chr11 5177969 5177990 5177974 5177969 -
agtgtttcagatatcttcctgg

SEQ ID NO: 151756 - DNA, 22 bp, Artificial Sequence
  Synthetic oligonucleotide; TTT chr11 5177962 5177983 5177967 5177962 -
cagatatcttcctgggctgcca

SEQ ID NO: 151757 - DNA, 22 bp, Artificial Sequence
  Synthetic oligonucleotide; TTC chr11 5177961 5177982 5177966 5177961 -
agatatcttcctgggctgccag

SEQ ID NO: 151758 - DNA, 22 bp, Artificial Sequence
  Synthetic oligonucleotide; CTT chr11 5177952 5177973 5177957 5177952 -
cctgggctgccaggttcaaggc

SEQ ID NO: 151759 - DNA, 22 bp, Artificial Sequence
  Synthetic oligonucleotide; TTC chr11 5177951 5177972 5177956 5177951 -
ctgggctgccaggttcaaggcc

SEQ ID NO: 151760 - DNA, 22 bp, Artificial Sequence
  Synthetic oligonucleotide; CTG chr11 5177948 5177969 5177953 5177948 -
ggctgccaggttcaaggccctt

SEQ ID NO: 151761 - DNA, 22 bp, Artificial Sequence
  Synthetic oligonucleotide; CTG chr11 5177943 5177964 5177948 5177943 -
ccaggttcaaggcccttagtac

SEQ ID NO: 151762 - DNA, 22 bp, Artificial Sequence
  Synthetic oligonucleotide; TTC chr11 5177935 5177956 5177940 5177935 -
aaggcccttagtacgtgcggct

SEQ ID NO: 151763 - DNA, 22 bp, Artificial Sequence
  Synthetic oligonucleotide; CTT chr11 5177926 5177947 5177931 5177926 -
agtacgtgcggctctcatatct

SEQ ID NO: 151764 - DNA, 22 bp, Artificial Sequence
  Synthetic oligonucleotide; TTA chr11 5177925 5177946 5177930 5177925 -
gtacgtgcggctctcatatctg

SEQ ID NO: 151765 - DNA, 22 bp, Artificial Sequence
  Synthetic oligonucleotide; CTC chr11 5177912 5177933 5177917 5177912 -
tcatatctgtgtcatatttatg

SEQ ID NO: 151766 - DNA, 22 bp, Artificial Sequence
  Synthetic oligonucleotide; CTC chr11 5177910 5177931 5177915 5177910 -
atatctgtgtcatatttatgtt

SEQ ID NO: 151767 - DNA, 22 bp, Artificial Sequence
  Synthetic oligonucleotide; CTG chr11 5177903 5177924 5177908 5177903 -
tgtcatatttatgttctatacc

SEQ ID NO: 151768 - DNA, 22 bp, Artificial Sequence
  Synthetic oligonucleotide; TTT chr11 5177893 5177914 5177898 5177893 -
atgttctataccccagcattct

SEQ ID NO: 151769 - DNA, 22 bp, Artificial Sequence
  Synthetic oligonucleotide; TTA chr11 5177892 5177913 5177897 5177892 -
tgttctataccccagcattctt

SEQ ID NO: 151770 - DNA, 22 bp, Artificial Sequence
  Synthetic oligonucleotide; TTC chr11 5177887 5177908 5177892 5177887 -
tataccccagcattcttttcat

SEQ ID NO: 151771 - DNA, 22 bp, Artificial Sequence
  Synthetic oligonucleotide; CTA chr11 5177885 5177906 5177890 5177885 -
taccccagcattcttttcattt

SEQ ID NO: 151772 - DNA, 22 bp, Artificial Sequence
  Synthetic oligonucleotide; TTC chr11 5177872 5177893 5177877 5177872 -
ttttcatttcttgcccatcgct

SEQ ID NO: 151773 - DNA, 22 bp, Artificial Sequence
  Synthetic oligonucleotide; CTT chr11 5177870 5177891 5177875 5177870 -
ttcatttcttgcccatcgcttt

SEQ ID NO: 151774 - DNA, 22 bp, Artificial Sequence
  Synthetic oligonucleotide; TTT chr11 5177869 5177890 5177874 5177869 -
tcatttcttgcccatcgctttg

SEQ ID NO: 151775 - DNA, 22 bp, Artificial Sequence
  Synthetic oligonucleotide; TTT chr11 5177868 5177889 5177873 5177868 -
catttcttgcccatcgctttgg

SEQ ID NO: 151776 - DNA, 22 bp, Artificial Sequence
  Synthetic oligonucleotide; TTC chr11 5177867 5177888 5177872 5177867 -
atttcttgcccatcgctttgga

SEQ ID NO: 151777 - DNA, 22 bp, Artificial Sequence
  Synthetic oligonucleotide; TTT chr11 5177863 5177884 5177868 5177863 -
cttgcccatcgctttggaggta

SEQ ID NO: 151778 - DNA, 22 bp, Artificial Sequence
  Synthetic oligonucleotide; TTC chr11 5177862 5177883 5177867 5177862 -
ttgcccatcgctttggaggtaa

SEQ ID NO: 151779 - DNA, 22 bp, Artificial Sequence
  Synthetic oligonucleotide; CTT chr11 5177860 5177881 5177865 5177860 -
gcccatcgctttggaggtaaaa

SEQ ID NO: 151780 - DNA, 22 bp, Artificial Sequence
  Synthetic oligonucleotide; TTG chr11 5177859 5177880 5177864 5177859 -
cccatcgctttggaggtaaaac

SEQ ID NO: 151781 - DNA, 22 bp, Artificial Sequence
  Synthetic oligonucleotide; CTT chr11 5177849 5177870 5177854 5177849 -
tggaggtaaaaccatccctcac

SEQ ID NO: 151782 - DNA, 22 bp, Artificial Sequence
  Synthetic oligonucleotide; TTT chr11 5177848 5177869 5177853 5177848 -
ggaggtaaaaccatccctcacc

SEQ ID NO: 151783 - DNA, 22 bp, Artificial Sequence
  Synthetic oligonucleotide; TTG chr11 5177847 5177868 5177852 5177847 -
gaggtaaaaccatccctcacca

SEQ ID NO: 151784 - DNA, 22 bp, Artificial Sequence
  Synthetic oligonucleotide; CTC chr11 5177829 5177850 5177834 5177829 -
accacattcacatcctagtggg

SEQ ID NO: 151785 - DNA, 22 bp, Artificial Sequence
  Synthetic oligonucleotide; TTC chr11 5177820 5177841 5177825 5177820 -
acatcctagtgggcagtctcta

SEQ ID NO: 151786 - DNA, 22 bp, Artificial Sequence
  Synthetic oligonucleotide; CTA chr11 5177812 5177833 5177817 5177812 -
gtgggcagtctctatgtgttag

SEQ ID NO: 151787 - DNA, 22 bp, Artificial Sequence
  Synthetic oligonucleotide; CTC chr11 5177800 5177821 5177805 5177800 -
tatgtgttagtgccccctatgc

SEQ ID NO: 151788 - DNA, 22 bp, Artificial Sequence
  Synthetic oligonucleotide; CTA chr11 5177798 5177819 5177803 5177798 -
tgtgttagtgccccctatgcta

SEQ ID NO: 151789 - DNA, 22 bp, Artificial Sequence
  Synthetic oligonucleotide; TTA chr11 5177791 5177812 5177796 5177791 -
gtgccccctatgctaaacccca

SEQ ID NO: 151790 - DNA, 22 bp, Artificial Sequence
  Synthetic oligonucleotide; CTA chr11 5177781 5177802 5177786 5177781 -
tgctaaaccccatcatttatgg

SEQ ID NO: 151791 - DNA, 22 bp, Artificial Sequence
  Synthetic oligonucleotide; CTA chr11 5177776 5177797 5177781 5177776 -
aaccccatcatttatggggtga

SEQ ID NO: 151792 - DNA, 22 bp, Artificial Sequence
  Synthetic oligonucleotide; TTT chr11 5177763 5177784 5177768 5177763 -
atggggtgaagaccaaacaaat

SEQ ID NO: 151793 - DNA, 22 bp, Artificial Sequence
  Synthetic oligonucleotide; TTA chr11 5177762 5177783 5177767 5177762 -
tggggtgaagaccaaacaaatt

SEQ ID NO: 151794 - DNA, 22 bp, Artificial Sequence
  Synthetic oligonucleotide; TTA chr11 5177739 5177760 5177744 5177739 -
aagatcgagtgattttgctttt

SEQ ID NO: 151795 - DNA, 22 bp, Artificial Sequence
  Synthetic oligonucleotide; TTT chr11 5177724 5177745 5177729 5177724 -
tgcttttctctcctatcagtgt

SEQ ID NO: 151796 - DNA, 22 bp, Artificial Sequence
  Synthetic oligonucleotide; TTT chr11 5177723 5177744 5177728 5177723 -
gcttttctctcctatcagtgta

SEQ ID NO: 151797 - DNA, 22 bp, Artificial Sequence
  Synthetic oligonucleotide; TTG chr11 5177722 5177743 5177727 5177722 -
cttttctctcctatcagtgtat

SEQ ID NO: 151798 - DNA, 22 bp, Artificial Sequence
  Synthetic oligonucleotide; CTT chr11 5177719 5177740 5177724 5177719 -
ttctctcctatcagtgtatgct

SEQ ID NO: 151799 - DNA, 22 bp, Artificial Sequence
  Synthetic oligonucleotide; TTT chr11 5177718 5177739 5177723 5177718 -
tctctcctatcagtgtatgctg

SEQ ID NO: 151800 - DNA, 22 bp, Artificial Sequence
  Synthetic oligonucleotide; TTT chr11 5177717 5177738 5177722 5177717 -
ctctcctatcagtgtatgctgt

SEQ ID NO: 151801 - DNA, 22 bp, Artificial Sequence
  Synthetic oligonucleotide; TTC chr11 5177716 5177737 5177721 5177716 -
tctcctatcagtgtatgctgtt

SEQ ID NO: 151802 - DNA, 22 bp, Artificial Sequence
  Synthetic oligonucleotide; CTC chr11 5177714 5177735 5177719 5177714 -
tcctatcagtgtatgctgttaa

SEQ ID NO: 151803 - DNA, 22 bp, Artificial Sequence
  Synthetic oligonucleotide; CTC chr11 5177712 5177733 5177717 5177712 -
ctatcagtgtatgctgttaaga

SEQ ID NO: 151804 - DNA, 22 bp, Artificial Sequence
  Synthetic oligonucleotide; CTA chr11 5177709 5177730 5177714 5177709 -
tcagtgtatgctgttaagatta

SEQ ID NO: 151805 - DNA, 22 bp, Artificial Sequence
  Synthetic oligonucleotide; CTG chr11 5177696 5177717 5177701 5177696 -
ttaagattaaaaagtctgtttt

SEQ ID NO: 151806 - DNA, 22 bp, Artificial Sequence
  Synthetic oligonucleotide; TTA chr11 5177693 5177714 5177698 5177693 -
agattaaaaagtctgttttagg

SEQ ID NO: 151807 - DNA, 22 bp, Artificial Sequence
  Synthetic oligonucleotide; TTA chr11 5177687 5177708 5177692 5177687 -
aaaagtctgttttagggaatag

SEQ ID NO: 151808 - DNA, 22 bp, Artificial Sequence
  Synthetic oligonucleotide; CTG chr11 5177678 5177699 5177683 5177678 -
ttttagggaatagaataaatac

SEQ ID NO: 151809 - DNA, 22 bp, Artificial Sequence
  Synthetic oligonucleotide; TTT chr11 5177675 5177696 5177680 5177675 -
tagggaatagaataaatacaat

SEQ ID NO: 151810 - DNA, 22 bp, Artificial Sequence
  Synthetic oligonucleotide; TTT chr11 5177674 5177695 5177679 5177674 -
agggaatagaataaatacaatc

SEQ ID NO: 151811 - DNA, 22 bp, Artificial Sequence
  Synthetic oligonucleotide; TTA chr11 5177673 5177694 5177678 5177673 -
gggaatagaataaatacaatcc

SEQ ID NO: 151812 - DNA, 22 bp, Artificial Sequence
  Synthetic oligonucleotide; CTC chr11 5177639 5177660 5177644 5177639 -
aaacacacttaaaatgatggtg

SEQ ID NO: 151813 - DNA, 22 bp, Artificial Sequence
  Synthetic oligonucleotide; CTT chr11 5177629 5177650 5177634 5177629 -
aaaatgatggtgtctatcaaag

SEQ ID NO: 151814 - DNA, 22 bp, Artificial Sequence
  Synthetic oligonucleotide; TTA chr11 5177628 5177649 5177633 5177628 -
aaatgatggtgtctatcaaagt

SEQ ID NO: 151815 - DNA, 22 bp, Artificial Sequence
  Synthetic oligonucleotide; CTA chr11 5177613 5177634 5177618 5177613 -
tcaaagtgtccacggaattttg

SEQ ID NO: 151816 - DNA, 22 bp, Artificial Sequence
  Synthetic oligonucleotide; TTT chr11 5177593 5177614 5177598 5177593 -
tgctaaggcactcaaagatcaa

SEQ ID NO: 151817 - DNA, 22 bp, Artificial Sequence
  Synthetic oligonucleotide; TTT chr11 5177592 5177613 5177597 5177592 -
gctaaggcactcaaagatcaaa

SEQ ID NO: 151818 - DNA, 22 bp, Artificial Sequence
  Synthetic oligonucleotide; TTG chr11 5177591 5177612 5177596 5177591 -
ctaaggcactcaaagatcaaag

SEQ ID NO: 151819 - DNA, 22 bp, Artificial Sequence
  Synthetic oligonucleotide; CTA chr11 5177588 5177609 5177593 5177588 -
aggcactcaaagatcaaaggtt

SEQ ID NO: 151820 - DNA, 22 bp, Artificial Sequence
  Synthetic oligonucleotide; CTC chr11 5177580 5177601 5177585 5177580 -
aaagatcaaaggttttgaaaaa

SEQ ID NO: 151821 - DNA, 22 bp, Artificial Sequence
  Synthetic oligonucleotide; TTT chr11 5177565 5177586 5177570 5177565 -
tgaaaaaaaaaatactttaatg

SEQ ID NO: 151822 - DNA, 22 bp, Artificial Sequence
  Synthetic oligonucleotide; TTT chr11 5177564 5177585 5177569 5177564 -
gaaaaaaaaaatactttaatga

SEQ ID NO: 151823 - DNA, 22 bp, Artificial Sequence
  Synthetic oligonucleotide; TTG chr11 5177563 5177584 5177568 5177563 -
aaaaaaaaaatactttaatgaa

SEQ ID NO: 151824 - DNA, 22 bp, Artificial Sequence
  Synthetic oligonucleotide; CTT chr11 5177548 5177569 5177553 5177548 -
taatgaaattctccattttttc

SEQ ID NO: 151825 - DNA, 22 bp, Artificial Sequence
  Synthetic oligonucleotide; TTT chr11 5177547 5177568 5177552 5177547 -
aatgaaattctccattttttca

SEQ ID NO: 151826 - DNA, 22 bp, Artificial Sequence
  Synthetic oligonucleotide; TTA chr11 5177546 5177567 5177551 5177546 -
atgaaattctccattttttcag

SEQ ID NO: 151827 - DNA, 22 bp, Artificial Sequence
  Synthetic oligonucleotide; TTC chr11 5177537 5177558 5177542 5177537 -
tccattttttcagaaatactat

SEQ ID NO: 151828 - DNA, 22 bp, Artificial Sequence
  Synthetic oligonucleotide; CTC chr11 5177535 5177556 5177540 5177535 -
cattttttcagaaatactattt

SEQ ID NO: 151829 - DNA, 22 bp, Artificial Sequence
  Synthetic oligonucleotide; TTT chr11 5177530 5177551 5177535 5177530 -
tttcagaaatactattttcatg

SEQ ID NO: 151830 - DNA, 22 bp, Artificial Sequence
  Synthetic oligonucleotide; TTT chr11 5177529 5177550 5177534 5177529 -
ttcagaaatactattttcatga

SEQ ID NO: 151831 - DNA, 22 bp, Artificial Sequence
  Synthetic oligonucleotide; TTT chr11 5177528 5177549 5177533 5177528 -
tcagaaatactattttcatgaa

SEQ ID NO: 151832 - DNA, 22 bp, Artificial Sequence
  Synthetic oligonucleotide; TTT chr11 5177527 5177548 5177532 5177527 -
cagaaatactattttcatgaat

SEQ ID NO: 151833 - DNA, 22 bp, Artificial Sequence
  Synthetic oligonucleotide; TTC chr11 5177526 5177547 5177531 5177526 -
agaaatactattttcatgaatt

SEQ ID NO: 151834 - DNA, 22 bp, Artificial Sequence
  Synthetic oligonucleotide; CTA chr11 5177516 5177537 5177521 5177516 -
ttttcatgaattttaacttaaa

SEQ ID NO: 151835 - DNA, 22 bp, Artificial Sequence
  Synthetic oligonucleotide; TTT chr11 5177513 5177534 5177518 5177513 -
tcatgaattttaacttaaaaat

SEQ ID NO: 151836 - DNA, 22 bp, Artificial Sequence
  Synthetic oligonucleotide; TTT chr11 5177512 5177533 5177517 5177512 -
catgaattttaacttaaaaata

SEQ ID NO: 151837 - DNA, 22 bp, Artificial Sequence
  Synthetic oligonucleotide; TTC chr11 5177511 5177532 5177516 5177511 -
atgaattttaacttaaaaatat

SEQ ID NO: 151838 - DNA, 22 bp, Artificial Sequence
  Synthetic oligonucleotide; TTT chr11 5177503 5177524 5177508 5177503 -
taacttaaaaatatataaagat

SEQ ID NO: 151839 - DNA, 22 bp, Artificial Sequence
  Synthetic oligonucleotide; TTT chr11 5177502 5177523 5177507 5177502 -
aacttaaaaatatataaagata

SEQ ID NO: 151840 - DNA, 22 bp, Artificial Sequence
  Synthetic oligonucleotide; TTA chr11 5177501 5177522 5177506 5177501 -
acttaaaaatatataaagataa

SEQ ID NO: 151841 - DNA, 22 bp, Artificial Sequence
  Synthetic oligonucleotide; CTT chr11 5177497 5177518 5177502 5177497 -
aaaaatatataaagataatcga

SEQ ID NO: 151842 - DNA, 22 bp, Artificial Sequence
  Synthetic oligonucleotide; TTA chr11 5177496 5177517 5177501 5177496 -
aaaatatataaagataatcgag

SEQ ID NO: 151843 - DNA, 22 bp, Artificial Sequence
  Synthetic oligonucleotide; TTT chr11 5177457 5177478 5177462 5177457 -
tagggtttaatccagattgact

SEQ ID NO: 151844 - DNA, 22 bp, Artificial Sequence
  Synthetic oligonucleotide; TTT chr11 5177456 5177477 5177461 5177456 -
agggtttaatccagattgactt

SEQ ID NO: 151845 - DNA, 22 bp, Artificial Sequence
  Synthetic oligonucleotide; TTA chr11 5177455 5177476 5177460 5177455 -
gggtttaatccagattgacttt

SEQ ID NO: 151846 - DNA, 22 bp, Artificial Sequence
  Synthetic oligonucleotide; TTT chr11 5177449 5177470 5177454 5177449 -
aatccagattgacttttcctac

SEQ ID NO: 151847 - DNA, 22 bp, Artificial Sequence
  Synthetic oligonucleotide; TTA chr11 5177448 5177469 5177453 5177448 -
atccagattgacttttcctacg

SEQ ID NO: 151848 - DNA, 22 bp, Artificial Sequence
  Synthetic oligonucleotide; TTG chr11 5177438 5177459 5177443 5177438 -
acttttcctacgtagagctagg

SEQ ID NO: 151849 - DNA, 22 bp, Artificial Sequence
  Synthetic oligonucleotide; CTT chr11 5177434 5177455 5177439 5177434 -
ttcctacgtagagctaggaagt

SEQ ID NO: 151850 - DNA, 22 bp, Artificial Sequence
  Synthetic oligonucleotide; TTT chr11 5177433 5177454 5177438 5177433 -
tcctacgtagagctaggaagtg

SEQ ID NO: 151851 - DNA, 22 bp, Artificial Sequence
  Synthetic oligonucleotide; TTT chr11 5177432 5177453 5177437 5177432 -
cctacgtagagctaggaagtgg

SEQ ID NO: 151852 - DNA, 22 bp, Artificial Sequence
  Synthetic oligonucleotide; TTC chr11 5177431 5177452 5177436 5177431 -
ctacgtagagctaggaagtggg

SEQ ID NO: 151853 - DNA, 22 bp, Artificial Sequence
  Synthetic oligonucleotide; CTA chr11 5177428 5177449 5177433 5177428 -
cgtagagctaggaagtggggtt

SEQ ID NO: 151854 - DNA, 22 bp, Artificial Sequence
  Synthetic oligonucleotide; CTA chr11 5177418 5177439 5177423 5177418 -
ggaagtggggttttgagtcagt

SEQ ID NO: 151855 - DNA, 22 bp, Artificial Sequence
  Synthetic oligonucleotide; TTT chr11 5177405 5177426 5177410 5177405 -
tgagtcagtcactgggcttttt

SEQ ID NO: 151856 - DNA, 22 bp, Artificial Sequence
  Synthetic oligonucleotide; TTT chr11 5177404 5177425 5177409 5177404 -
gagtcagtcactgggcttttta

SEQ ID NO: 151857 - DNA, 22 bp, Artificial Sequence
  Synthetic oligonucleotide; TTG chr11 5177403 5177424 5177408 5177403 -
agtcagtcactgggctttttat

SEQ ID NO: 151858 - DNA, 22 bp, Artificial Sequence
  Synthetic oligonucleotide; CTG chr11 5177391 5177412 5177396 5177391 -
ggctttttatagtcagtctgaa

SEQ ID NO: 151859 - DNA, 22 bp, Artificial Sequence
  Synthetic oligonucleotide; CTT chr11 5177386 5177407 5177391 5177386 -
tttatagtcagtctgaaattct

SEQ ID NO: 151860 - DNA, 22 bp, Artificial Sequence
  Synthetic oligonucleotide; TTT chr11 5177385 5177406 5177390 5177385 -
ttatagtcagtctgaaattctg

SEQ ID NO: 151861 - DNA, 22 bp, Artificial Sequence
  Synthetic oligonucleotide; TTT chr11 5177384 5177405 5177389 5177384 -
tatagtcagtctgaaattctgc

SEQ ID NO: 151862 - DNA, 22 bp, Artificial Sequence
  Synthetic oligonucleotide; TTT chr11 5177383 5177404 5177388 5177383 -
atagtcagtctgaaattctgct

SEQ ID NO: 151863 - DNA, 22 bp, Artificial Sequence
  Synthetic oligonucleotide; TTA chr11 5177382 5177403 5177387 5177382 -
tagtcagtctgaaattctgctg

SEQ ID NO: 151864 - DNA, 22 bp, Artificial Sequence
  Synthetic oligonucleotide; CTG chr11 5177371 5177392 5177376 5177371 -
aaattctgctgaaatgtacaac

SEQ ID NO: 151865 - DNA, 22 bp, Artificial Sequence
  Synthetic oligonucleotide; TTC chr11 5177365 5177386 5177370 5177365 -
tgctgaaatgtacaacactccc

SEQ ID NO: 151866 - DNA, 22 bp, Artificial Sequence
  Synthetic oligonucleotide; CTG chr11 5177363 5177384 5177368 5177363 -
ctgaaatgtacaacactcccgc

SEQ ID NO: 151867 - DNA, 22 bp, Artificial Sequence
  Synthetic oligonucleotide; CTG chr11 5177360 5177381 5177365 5177360 -
aaatgtacaacactcccgctgt

SEQ ID NO: 151868 - DNA, 22 bp, Artificial Sequence
  Synthetic oligonucleotide; CTC chr11 5177345 5177366 5177350 5177345 -
ccgctgtactctgcagagactt

SEQ ID NO: 151869 - DNA, 22 bp, Artificial Sequence
  Synthetic oligonucleotide; CTG chr11 5177339 5177360 5177344 5177339 -
tactctgcagagacttgaacca

SEQ ID NO: 151870 - DNA, 22 bp, Artificial Sequence
  Synthetic oligonucleotide; CTC chr11 5177334 5177355 5177339 5177334 -
tgcagagacttgaaccaataac

SEQ ID NO: 151871 - DNA, 22 bp, Artificial Sequence
  Synthetic oligonucleotide; CTG chr11 5177332 5177353 5177337 5177332 -
cagagacttgaaccaataacat

SEQ ID NO: 151872 - DNA, 22 bp, Artificial Sequence
  Synthetic oligonucleotide; CTT chr11 5177323 5177344 5177328 5177323 -
gaaccaataacatgaagccata

SEQ ID NO: 151873 - DNA, 22 bp, Artificial Sequence
  Synthetic oligonucleotide; TTG chr11 5177322 5177343 5177327 5177322 -
aaccaataacatgaagccataa

SEQ ID NO: 151874 - DNA, 22 bp, Artificial Sequence
  Synthetic oligonucleotide; TTA chr11 5177295 5177316 5177300 5177295 -
tttttgtcaacacctgttactt

SEQ ID NO: 151875 - DNA, 22 bp, Artificial Sequence
  Synthetic oligonucleotide; TTT chr11 5177292 5177313 5177297 5177292 -
ttgtcaacacctgttacttaag

SEQ ID NO: 151876 - DNA, 22 bp, Artificial Sequence
  Synthetic oligonucleotide; TTT chr11 5177291 5177312 5177296 5177291 -
tgtcaacacctgttacttaagt

SEQ ID NO: 151877 - DNA, 22 bp, Artificial Sequence
  Synthetic oligonucleotide; TTT chr11 5177290 5177311 5177295 5177290 -
gtcaacacctgttacttaagtt

SEQ ID NO: 151878 - DNA, 22 bp, Artificial Sequence
  Synthetic oligonucleotide; TTG chr11 5177289 5177310 5177294 5177289 -
tcaacacctgttacttaagtta

SEQ ID NO: 151879 - DNA, 22 bp, Artificial Sequence
  Synthetic oligonucleotide; CTG chr11 5177279 5177300 5177284 5177279 -
ttacttaagttaaaatgttatc

SEQ ID NO: 151880 - DNA, 22 bp, Artificial Sequence
  Synthetic oligonucleotide; TTA chr11 5177276 5177297 5177281 5177276 -
cttaagttaaaatgttatccct

SEQ ID NO: 151881 - DNA, 22 bp, Artificial Sequence
  Synthetic oligonucleotide; CTT chr11 5177273 5177294 5177278 5177273 -
aagttaaaatgttatccctaga

SEQ ID NO: 151882 - DNA, 22 bp, Artificial Sequence
  Synthetic oligonucleotide; TTA chr11 5177272 5177293 5177277 5177272 -
agttaaaatgttatccctagaa

SEQ ID NO: 151883 - DNA, 22 bp, Artificial Sequence
  Synthetic oligonucleotide; TTA chr11 5177267 5177288 5177272 5177267 -
aaatgttatccctagaatattt

SEQ ID NO: 151884 - DNA, 22 bp, Artificial Sequence
  Synthetic oligonucleotide; TTA chr11 5177259 5177280 5177264 5177259 -
tccctagaatattttctaactc

SEQ ID NO: 151885 - DNA, 22 bp, Artificial Sequence
  Synthetic oligonucleotide; CTA chr11 5177253 5177274 5177258 5177253 -
gaatattttctaactcactgac

SEQ ID NO: 151886 - DNA, 22 bp, Artificial Sequence
  Synthetic oligonucleotide; TTT chr11 5177245 5177266 5177250 5177245 -
tctaactcactgacatctcaca

SEQ ID NO: 151887 - DNA, 22 bp, Artificial Sequence
  Synthetic oligonucleotide; TTT chr11 5177244 5177265 5177249 5177244 -
ctaactcactgacatctcacaa

SEQ ID NO: 151888 - DNA, 22 bp, Artificial Sequence
  Synthetic oligonucleotide; TTC chr11 5177243 5177264 5177248 5177243 -
taactcactgacatctcacaaa

SEQ ID NO: 151889 - DNA, 22 bp, Artificial Sequence
  Synthetic oligonucleotide; CTA chr11 5177241 5177262 5177246 5177241 -
actcactgacatctcacaaagt

SEQ ID NO: 151890 - DNA, 22 bp, Artificial Sequence
  Synthetic oligonucleotide; CTC chr11 5177237 5177258 5177242 5177237 -
actgacatctcacaaagtctct

SEQ ID NO: 151891 - DNA, 22 bp, Artificial Sequence
  Synthetic oligonucleotide; CTG chr11 5177233 5177254 5177238 5177233 -
acatctcacaaagtctcttgta

SEQ ID NO: 151892 - DNA, 22 bp, Artificial Sequence
  Synthetic oligonucleotide; CTC chr11 5177226 5177247 5177231 5177226 -
acaaagtctcttgtatggaata

SEQ ID NO: 151893 - DNA, 22 bp, Artificial Sequence
  Synthetic oligonucleotide; CTC chr11 5177216 5177237 5177221 5177216 -
ttgtatggaatagacacataat

SEQ ID NO: 151894 - DNA, 22 bp, Artificial Sequence
  Synthetic oligonucleotide; CTT chr11 5177214 5177235 5177219 5177214 -
gtatggaatagacacataatac

SEQ ID NO: 151895 - DNA, 22 bp, Artificial Sequence
  Synthetic oligonucleotide; TTG chr11 5177213 5177234 5177218 5177213 -
tatggaatagacacataataca

SEQ ID NO: 151896 - DNA, 22 bp, Artificial Sequence
  Synthetic oligonucleotide; TTC chr11 5177182 5177203 5177187 5177182 -
aacaagtgaataatagtgaatt

SEQ ID NO: 151897 - DNA, 22 bp, Artificial Sequence
  Synthetic oligonucleotide; TTA chr11 5177159 5177180 5177164 5177159 -
aagcaaataataaccaatatta

SEQ ID NO: 151898 - DNA, 22 bp, Artificial Sequence
  Synthetic oligonucleotide; TTA chr11 5177137 5177158 5177142 5177137 -
aattaacaaatatgagattgcc

SEQ ID NO: 151899 - DNA, 22 bp, Artificial Sequence
  Synthetic oligonucleotide; TTA chr11 5177132 5177153 5177137 5177132 -
acaaatatgagattgcctggat

SEQ ID NO: 151900 - DNA, 22 bp, Artificial Sequence
  Synthetic oligonucleotide; TTG chr11 5177117 5177138 5177122 5177117 -
cctggatgatgtaaaatctgat

SEQ ID NO: 151901 - DNA, 22 bp, Artificial Sequence
  Synthetic oligonucleotide; CTG chr11 5177113 5177134 5177118 5177113 -
gatgatgtaaaatctgatacac

SEQ ID NO: 151902 - DNA, 22 bp, Artificial Sequence
  Synthetic oligonucleotide; CTG chr11 5177097 5177118 5177102 5177097 -
atacacatttccccctatagtg

SEQ ID NO: 151903 - DNA, 22 bp, Artificial Sequence
  Synthetic oligonucleotide; TTT chr11 5177087 5177108 5177092 5177087 -
ccccctatagtggagattttag

SEQ ID NO: 151904 - DNA, 22 bp, Artificial Sequence
  Synthetic oligonucleotide; TTC chr11 5177086 5177107 5177091 5177086 -
cccctatagtggagattttaga

SEQ ID NO: 151905 - DNA, 22 bp, Artificial Sequence
  Synthetic oligonucleotide; CTA chr11 5177080 5177101 5177085 5177080 -
tagtggagattttagacccaag

SEQ ID NO: 151906 - DNA, 22 bp, Artificial Sequence
  Synthetic oligonucleotide; TTT chr11 5177068 5177089 5177073 5177068 -
tagacccaagtcatcaatggag

SEQ ID NO: 151907 - DNA, 22 bp, Artificial Sequence
  Synthetic oligonucleotide; TTT chr11 5177067 5177088 5177072 5177067 -
agacccaagtcatcaatggagc

SEQ ID NO: 151908 - DNA, 22 bp, Artificial Sequence
  Synthetic oligonucleotide; TTA chr11 5177066 5177087 5177071 5177066 -
gacccaagtcatcaatggagca

SEQ ID NO: 151909 - DNA, 22 bp, Artificial Sequence
  Synthetic oligonucleotide; CTG chr11 5177018 5177039 5177023 5177018 -
aagaagtaaaatgattgaaaat

SEQ ID NO: 151910 - DNA, 22 bp, Artificial Sequence
  Synthetic oligonucleotide; TTG chr11 5177001 5177022 5177006 5177001 -
aaaatttctatacctgggtgat

SEQ ID NO: 151911 - DNA, 22 bp, Artificial Sequence
  Synthetic oligonucleotide; TTT chr11 5176994 5177015 5176999 5176994 -
ctatacctgggtgataaataaa

SEQ ID NO: 151912 - DNA, 22 bp, Artificial Sequence
  Synthetic oligonucleotide; TTC chr11 5176993 5177014 5176998 5176993 -
tatacctgggtgataaataaat

SEQ ID NO: 151913 - DNA, 22 bp, Artificial Sequence
  Synthetic oligonucleotide; CTA chr11 5176991 5177012 5176996 5176991 -
tacctgggtgataaataaattt

SEQ ID NO: 151914 - DNA, 22 bp, Artificial Sequence
  Synthetic oligonucleotide; CTG chr11 5176985 5177006 5176990 5176985 -
ggtgataaataaatttttaaaa

SEQ ID NO: 151915 - DNA, 22 bp, Artificial Sequence
  Synthetic oligonucleotide; TTT chr11 5176969 5176990 5176974 5176969 -
ttaaaataaacattttttaaaa

SEQ ID NO: 151916 - DNA, 22 bp, Artificial Sequence
  Synthetic oligonucleotide; TTT chr11 5176968 5176989 5176973 5176968 -
taaaataaacattttttaaaaa

SEQ ID NO: 151917 - DNA, 22 bp, Artificial Sequence
  Synthetic oligonucleotide; TTT chr11 5176967 5176988 5176972 5176967 -
aaaataaacattttttaaaaag

SEQ ID NO: 151918 - DNA, 22 bp, Artificial Sequence
  Synthetic oligonucleotide; TTA chr11 5176966 5176987 5176971 5176966 -
aaataaacattttttaaaaagc

SEQ ID NO: 151919 - DNA, 22 bp, Artificial Sequence
  Synthetic oligonucleotide; TTT chr11 5176954 5176975 5176959 5176954 -
tttaaaaagctagagaagatta

SEQ ID NO: 151920 - DNA, 22 bp, Artificial Sequence
  Synthetic oligonucleotide; TTT chr11 5176953 5176974 5176958 5176953 -
ttaaaaagctagagaagattaa

SEQ ID NO: 151921 - DNA, 22 bp, Artificial Sequence
  Synthetic oligonucleotide; TTT chr11 5176952 5176973 5176957 5176952 -
taaaaagctagagaagattaag

SEQ ID NO: 151922 - DNA, 22 bp, Artificial Sequence
  Synthetic oligonucleotide; TTT chr11 5176951 5176972 5176956 5176951 -
aaaaagctagagaagattaagg

SEQ ID NO: 151923 - DNA, 22 bp, Artificial Sequence
  Synthetic oligonucleotide; TTA chr11 5176950 5176971 5176955 5176950 -
aaaagctagagaagattaagga

SEQ ID NO: 151924 - DNA, 22 bp, Artificial Sequence
  Synthetic oligonucleotide; CTA chr11 5176942 5176963 5176947 5176942 -
gagaagattaaggagaatattt

SEQ ID NO: 151925 - DNA, 22 bp, Artificial Sequence
  Synthetic oligonucleotide; TTA chr11 5176932 5176953 5176937 5176932 -
aggagaatattttccaagaaac

SEQ ID NO: 151926 - DNA, 22 bp, Artificial Sequence
  Synthetic oligonucleotide; TTT chr11 5176920 5176941 5176925 5176920 -
tccaagaaacttaaataaaaaa

SEQ ID NO: 151927 - DNA, 22 bp, Artificial Sequence
  Synthetic oligonucleotide; TTT chr11 5176919 5176940 5176924 5176919 -
ccaagaaacttaaataaaaaag

SEQ ID NO: 151928 - DNA, 22 bp, Artificial Sequence
  Synthetic oligonucleotide; TTC chr11 5176918 5176939 5176923 5176918 -
caagaaacttaaataaaaaaga

SEQ ID NO: 151929 - DNA, 22 bp, Artificial Sequence
  Synthetic oligonucleotide; CTT chr11 5176908 5176929 5176913 5176908 -
aaataaaaaagaatgtaatccc

SEQ ID NO: 151930 - DNA, 22 bp, Artificial Sequence
  Synthetic oligonucleotide; TTA chr11 5176907 5176928 5176912 5176907 -
aataaaaaagaatgtaatccca

SEQ ID NO: 151931 - DNA, 22 bp, Artificial Sequence
  Synthetic oligonucleotide; TTA chr11 5176872 5176893 5176877 5176872 -
tctatgatattatctacagact

SEQ ID NO: 151932 - DNA, 22 bp, Artificial Sequence
  Synthetic oligonucleotide; CTA chr11 5176868 5176889 5176873 5176868 -
tgatattatctacagactatac

SEQ ID NO: 151933 - DNA, 22 bp, Artificial Sequence
  Synthetic oligonucleotide; TTA chr11 5176860 5176881 5176865 5176860 -
tctacagactataccttaatcc

SEQ ID NO: 151934 - DNA, 22 bp, Artificial Sequence
  Synthetic oligonucleotide; CTA chr11 5176856 5176877 5176861 5176856 -
cagactataccttaatcccttc

SEQ ID NO: 151935 - DNA, 22 bp, Artificial Sequence
  Synthetic oligonucleotide; CTA chr11 5176849 5176870 5176854 5176849 -
taccttaatcccttcacatcaa

SEQ ID NO: 151936 - DNA, 22 bp, Artificial Sequence
  Synthetic oligonucleotide; CTT chr11 5176843 5176864 5176848 5176843 -
aatcccttcacatcaatacaaa

SEQ ID NO: 151937 - DNA, 22 bp, Artificial Sequence
  Synthetic oligonucleotide; TTA chr11 5176842 5176863 5176847 5176842 -
atcccttcacatcaatacaaat

SEQ ID NO: 151938 - DNA, 22 bp, Artificial Sequence
  Synthetic oligonucleotide; CTT chr11 5176835 5176856 5176840 5176835 -
cacatcaatacaaatttttaca

SEQ ID NO: 151939 - DNA, 22 bp, Artificial Sequence
  Synthetic oligonucleotide; TTC chr11 5176834 5176855 5176839 5176834 -
acatcaatacaaatttttacaa

SEQ ID NO: 151940 - DNA, 22 bp, Artificial Sequence
  Synthetic oligonucleotide; TTT chr11 5176818 5176839 5176823 5176818 -
ttacaatctctccttcttaaaa

SEQ ID NO: 151941 - DNA, 22 bp, Artificial Sequence
  Synthetic oligonucleotide; TTT chr11 5176817 5176838 5176822 5176817 -
tacaatctctccttcttaaaag

SEQ ID NO: 151942 - DNA, 22 bp, Artificial Sequence
  Synthetic oligonucleotide; TTT chr11 5176816 5176837 5176821 5176816 -
acaatctctccttcttaaaagc

SEQ ID NO: 151943 - DNA, 22 bp, Artificial Sequence
  Synthetic oligonucleotide; TTA chr11 5176815 5176836 5176820 5176815 -
caatctctccttcttaaaagcc

SEQ ID NO: 151944 - DNA, 22 bp, Artificial Sequence
  Synthetic oligonucleotide; CTC chr11 5176808 5176829 5176813 5176808 -
tccttcttaaaagcctagaaca

SEQ ID NO: 151945 - DNA, 22 bp, Artificial Sequence
  Synthetic oligonucleotide; CTC chr11 5176806 5176827 5176811 5176806 -
cttcttaaaagcctagaacaat

SEQ ID NO: 151946 - DNA, 22 bp, Artificial Sequence
  Synthetic oligonucleotide; CTT chr11 5176803 5176824 5176808 5176803 -
cttaaaagcctagaacaatgcc

SEQ ID NO: 151947 - DNA, 22 bp, Artificial Sequence
  Synthetic oligonucleotide; TTC chr11 5176802 5176823 5176807 5176802 -
ttaaaagcctagaacaatgcca

SEQ ID NO: 151948 - DNA, 22 bp, Artificial Sequence
  Synthetic oligonucleotide; CTT chr11 5176800 5176821 5176805 5176800 -
aaaagcctagaacaatgccatg

SEQ ID NO: 151949 - DNA, 22 bp, Artificial Sequence
  Synthetic oligonucleotide; TTA chr11 5176799 5176820 5176804 5176799 -
aaagcctagaacaatgccatga

SEQ ID NO: 151950 - DNA, 22 bp, Artificial Sequence
  Synthetic oligonucleotide; CTA chr11 5176791 5176812 5176796 5176791 -
gaacaatgccatgagaatgttt

SEQ ID NO: 151951 - DNA, 22 bp, Artificial Sequence
  Synthetic oligonucleotide; TTT chr11 5176769 5176790 5176774 5176769 -
aaaaaatgaccttatttacacc

SEQ ID NO: 151952 - DNA, 22 bp, Artificial Sequence
  Synthetic oligonucleotide; TTA chr11 5176768 5176789 5176773 5176768 -
aaaaatgaccttatttacacct

SEQ ID NO: 151953 - DNA, 22 bp, Artificial Sequence
  Synthetic oligonucleotide; CTT chr11 5176756 5176777 5176761 5176756 -
atttacacctaaagaaagacaa

SEQ ID NO: 151954 - DNA, 22 bp, Artificial Sequence
  Synthetic oligonucleotide; TTA chr11 5176755 5176776 5176760 5176755 -
tttacacctaaagaaagacaaa

SEQ ID NO: 151955 - DNA, 22 bp, Artificial Sequence
  Synthetic oligonucleotide; TTT chr11 5176752 5176773 5176757 5176752 -
acacctaaagaaagacaaaaaa

SEQ ID NO: 151956 - DNA, 22 bp, Artificial Sequence
  Synthetic oligonucleotide; TTA chr11 5176751 5176772 5176756 5176751 -
cacctaaagaaagacaaaaaaa

SEQ ID NO: 151957 - DNA, 22 bp, Artificial Sequence
  Synthetic oligonucleotide; CTA chr11 5176745 5176766 5176750 5176745 -
aagaaagacaaaaaaaaaactt

SEQ ID NO: 151958 - DNA, 22 bp, Artificial Sequence
  Synthetic oligonucleotide; CTT chr11 5176723 5176744 5176728 5176723 -
tgagaaatctgaggtactatct

SEQ ID NO: 151959 - DNA, 22 bp, Artificial Sequence
  Synthetic oligonucleotide; TTT chr11 5176722 5176743 5176727 5176722 -
gagaaatctgaggtactatctt

SEQ ID NO: 151960 - DNA, 22 bp, Artificial Sequence
  Synthetic oligonucleotide; TTG chr11 5176721 5176742 5176726 5176721 -
agaaatctgaggtactatctta

SEQ ID NO: 151961 - DNA, 22 bp, Artificial Sequence
  Synthetic oligonucleotide; CTG chr11 5176712 5176733 5176717 5176712 -
aggtactatcttaaacacttga

SEQ ID NO: 151962 - DNA, 22 bp, Artificial Sequence
  Synthetic oligonucleotide; CTA chr11 5176704 5176725 5176709 5176704 -
tcttaaacacttgaaatctact

SEQ ID NO: 151963 - DNA, 22 bp, Artificial Sequence
  Synthetic oligonucleotide; CTT chr11 5176700 5176721 5176705 5176700 -
aaacacttgaaatctactcatg

SEQ ID NO: 151964 - DNA, 22 bp, Artificial Sequence
  Synthetic oligonucleotide; TTA chr11 5176699 5176720 5176704 5176699 -
aacacttgaaatctactcatgc

SEQ ID NO: 151965 - DNA, 22 bp, Artificial Sequence
  Synthetic oligonucleotide; CTT chr11 5176692 5176713 5176697 5176692 -
gaaatctactcatgcttggctt

SEQ ID NO: 151966 - DNA, 22 bp, Artificial Sequence
  Synthetic oligonucleotide; TTG chr11 5176691 5176712 5176696 5176691 -
aaatctactcatgcttggctta

SEQ ID NO: 151967 - DNA, 22 bp, Artificial Sequence
  Synthetic oligonucleotide; CTA chr11 5176684 5176705 5176689 5176684 -
ctcatgcttggcttatgcttag

SEQ ID NO: 151968 - DNA, 22 bp, Artificial Sequence
  Synthetic oligonucleotide; CTC chr11 5176681 5176702 5176686 5176681 -
atgcttggcttatgcttagctt

SEQ ID NO: 151969 - DNA, 22 bp, Artificial Sequence
  Synthetic oligonucleotide; CTT chr11 5176675 5176696 5176680 5176675 -
ggcttatgcttagctttttctg

SEQ ID NO: 151970 - DNA, 22 bp, Artificial Sequence
  Synthetic oligonucleotide; TTG chr11 5176674 5176695 5176679 5176674 -
gcttatgcttagctttttctgt

SEQ ID NO: 151971 - DNA, 22 bp, Artificial Sequence
  Synthetic oligonucleotide; CTT chr11 5176670 5176691 5176675 5176670 -
atgcttagctttttctgtgatt

SEQ ID NO: 151972 - DNA, 22 bp, Artificial Sequence
  Synthetic oligonucleotide; TTA chr11 5176669 5176690 5176674 5176669 -
tgcttagctttttctgtgattt

SEQ ID NO: 151973 - DNA, 22 bp, Artificial Sequence
  Synthetic oligonucleotide; CTT chr11 5176664 5176685 5176669 5176664 -
agctttttctgtgatttttata

SEQ ID NO: 151974 - DNA, 22 bp, Artificial Sequence
  Synthetic oligonucleotide; TTA chr11 5176663 5176684 5176668 5176663 -
gctttttctgtgatttttatag

SEQ ID NO: 151975 - DNA, 22 bp, Artificial Sequence
  Synthetic oligonucleotide; CTT chr11 5176659 5176680 5176664 5176659 -
tttctgtgatttttatagaaat

SEQ ID NO: 151976 - DNA, 22 bp, Artificial Sequence
  Synthetic oligonucleotide; TTT chr11 5176658 5176679 5176663 5176658 -
ttctgtgatttttatagaaatt

SEQ ID NO: 151977 - DNA, 22 bp, Artificial Sequence
  Synthetic oligonucleotide; TTT chr11 5176657 5176678 5176662 5176657 -
tctgtgatttttatagaaattt

SEQ ID NO: 151978 - DNA, 22 bp, Artificial Sequence
  Synthetic oligonucleotide; TTT chr11 5176656 5176677 5176661 5176656 -
ctgtgatttttatagaaattta

SEQ ID NO: 151979 - DNA, 22 bp, Artificial Sequence
  Synthetic oligonucleotide; TTC chr11 5176655 5176676 5176660 5176655 -
tgtgatttttatagaaatttat

SEQ ID NO: 151980 - DNA, 22 bp, Artificial Sequence
  Synthetic oligonucleotide; CTG chr11 5176653 5176674 5176658 5176653 -
tgatttttatagaaatttatac

SEQ ID NO: 151981 - DNA, 22 bp, Artificial Sequence
  Synthetic oligonucleotide; TTT chr11 5176647 5176668 5176652 5176647 -
ttatagaaatttatacatgtat

SEQ ID NO: 151982 - DNA, 22 bp, Artificial Sequence
  Synthetic oligonucleotide; TTT chr11 5176646 5176667 5176651 5176646 -
tatagaaatttatacatgtatt

SEQ ID NO: 151983 - DNA, 22 bp, Artificial Sequence
  Synthetic oligonucleotide; TTT chr11 5176645 5176666 5176650 5176645 -
atagaaatttatacatgtatta

SEQ ID NO: 151984 - DNA, 22 bp, Artificial Sequence
  Synthetic oligonucleotide; TTA chr11 5176644 5176665 5176649 5176644 -
tagaaatttatacatgtattaa

SEQ ID NO: 151985 - DNA, 22 bp, Artificial Sequence
  Synthetic oligonucleotide; TTT chr11 5176635 5176656 5176640 5176635 -
atacatgtattaacacttagat

SEQ ID NO: 151986 - DNA, 22 bp, Artificial Sequence
  Synthetic oligonucleotide; TTA chr11 5176634 5176655 5176639 5176634 -
tacatgtattaacacttagatt

SEQ ID NO: 151987 - DNA, 22 bp, Artificial Sequence
  Synthetic oligonucleotide; TTA chr11 5176623 5176644 5176628 5176623 -
acacttagatttacatatacac

SEQ ID NO: 151988 - DNA, 22 bp, Artificial Sequence
  Synthetic oligonucleotide; CTT chr11 5176617 5176638 5176622 5176617 -
agatttacatatacacacactt

SEQ ID NO: 151989 - DNA, 22 bp, Artificial Sequence
  Synthetic oligonucleotide; TTA chr11 5176616 5176637 5176621 5176616 -
gatttacatatacacacactta

SEQ ID NO: 151990 - DNA, 22 bp, Artificial Sequence
  Synthetic oligonucleotide; TTT chr11 5176611 5176632 5176616 5176611 -
acatatacacacacttaattta

SEQ ID NO: 151991 - DNA, 22 bp, Artificial Sequence
  Synthetic oligonucleotide; TTA chr11 5176610 5176631 5176615 5176610 -
catatacacacacttaatttat

SEQ ID NO: 151992 - DNA, 22 bp, Artificial Sequence
  Synthetic oligonucleotide; CTT chr11 5176595 5176616 5176600 5176595 -
aatttatctacatttatatgtg

SEQ ID NO: 151993 - DNA, 22 bp, Artificial Sequence
  Synthetic oligonucleotide; TTA chr11 5176594 5176615 5176599 5176594 -
atttatctacatttatatgtgg

SEQ ID NO: 151994 - DNA, 22 bp, Artificial Sequence
  Synthetic oligonucleotide; TTT chr11 5176590 5176611 5176595 5176590 -
atctacatttatatgtggatgt

SEQ ID NO: 151995 - DNA, 22 bp, Artificial Sequence
  Synthetic oligonucleotide; TTA chr11 5176589 5176610 5176594 5176589 -
tctacatttatatgtggatgta

SEQ ID NO: 151996 - DNA, 22 bp, Artificial Sequence
  Synthetic oligonucleotide; CTA chr11 5176585 5176606 5176590 5176585 -
catttatatgtggatgtacctt

SEQ ID NO: 151997 - DNA, 22 bp, Artificial Sequence
  Synthetic oligonucleotide; TTT chr11 5176580 5176601 5176585 5176580 -
atatgtggatgtaccttcatat

SEQ ID NO: 151998 - DNA, 22 bp, Artificial Sequence
  Synthetic oligonucleotide; TTA chr11 5176579 5176600 5176584 5176579 -
tatgtggatgtaccttcatata

SEQ ID NO: 151999 - DNA, 22 bp, Artificial Sequence
  Synthetic oligonucleotide; CTT chr11 5176563 5176584 5176568 5176563 -
catatatatgtacacacacaca

SEQ ID NO: 152000 - DNA, 22 bp, Artificial Sequence
  Synthetic oligonucleotide; TTC chr11 5176562 5176583 5176567 5176562 -
atatatatgtacacacacacac

SEQ ID NO: 152001 - DNA, 22 bp, Artificial Sequence
  Synthetic oligonucleotide; TTT chr11 5176494 5176515 5176499 5176494 -
gtgcaccaaagaataagaaagt

SEQ ID NO: 152002 - DNA, 22 bp, Artificial Sequence
  Synthetic oligonucleotide; TTG chr11 5176493 5176514 5176498 5176493 -
tgcaccaaagaataagaaagtt

SEQ ID NO: 152003 - DNA, 22 bp, Artificial Sequence
  Synthetic oligonucleotide; TTA chr11 5176470 5176491 5176475 5176470 -
gaaatagacttcctacagtatt

SEQ ID NO: 152004 - DNA, 22 bp, Artificial Sequence
  Synthetic oligonucleotide; CTT chr11 5176459 5176480 5176464 5176459 -
cctacagtatttccattattgg

SEQ ID NO: 152005 - DNA, 22 bp, Artificial Sequence
  Synthetic oligonucleotide; TTC chr11 5176458 5176479 5176463 5176458 -
ctacagtatttccattattggg

SEQ ID NO: 152006 - DNA, 22 bp, Artificial Sequence
  Synthetic oligonucleotide; CTA chr11 5176455 5176476 5176460 5176455 -
cagtatttccattattgggaag

SEQ ID NO: 152007 - DNA, 22 bp, Artificial Sequence
  Synthetic oligonucleotide; TTT chr11 5176447 5176468 5176452 5176447 -
ccattattgggaagggagaata

SEQ ID NO: 152008 - DNA, 22 bp, Artificial Sequence
  Synthetic oligonucleotide; TTC chr11 5176446 5176467 5176451 5176446 -
cattattgggaagggagaatac

SEQ ID NO: 152009 - DNA, 22 bp, Artificial Sequence
  Synthetic oligonucleotide; TTA chr11 5176441 5176462 5176446 5176441 -
ttgggaagggagaatacataaa

SEQ ID NO: 152010 - DNA, 22 bp, Artificial Sequence
  Synthetic oligonucleotide; TTG chr11 5176438 5176459 5176443 5176438 -
ggaagggagaatacataaaaca

SEQ ID NO: 152011 - DNA, 22 bp, Artificial Sequence
  Synthetic oligonucleotide; TTC chr11 5176413 5176434 5176418 5176413 -
taaaaaatctaattaatttgtt

SEQ ID NO: 152012 - DNA, 22 bp, Artificial Sequence
  Synthetic oligonucleotide; CTA chr11 5176411 5176432 5176416 5176411 -
aaaaatctaattaatttgtttc

SEQ ID NO: 152013 - DNA, 22 bp, Artificial Sequence
  Synthetic oligonucleotide; CTA chr11 5176402 5176423 5176407 5176402 -
attaatttgtttctgctagtac

SEQ ID NO: 152014 - DNA, 22 bp, Artificial Sequence
  Synthetic oligonucleotide; TTA chr11 5176398 5176419 5176403 5176398 -
atttgtttctgctagtactaca

SEQ ID NO: 152015 - DNA, 22 bp, Artificial Sequence
  Synthetic oligonucleotide; TTT chr11 5176394 5176415 5176399 5176394 -
gtttctgctagtactacactaa

SEQ ID NO: 152016 - DNA, 22 bp, Artificial Sequence
  Synthetic oligonucleotide; TTG chr11 5176393 5176414 5176398 5176393 -
tttctgctagtactacactaaa

SEQ ID NO: 152017 - DNA, 22 bp, Artificial Sequence
  Synthetic oligonucleotide; TTT chr11 5176390 5176411 5176395 5176390 -
ctgctagtactacactaaatat

SEQ ID NO: 152018 - DNA, 22 bp, Artificial Sequence
  Synthetic oligonucleotide; TTC chr11 5176389 5176410 5176394 5176389 -
tgctagtactacactaaatatt

SEQ ID NO: 152019 - DNA, 22 bp, Artificial Sequence
  Synthetic oligonucleotide; CTG chr11 5176387 5176408 5176392 5176387 -
ctagtactacactaaatattta

SEQ ID NO: 152020 - DNA, 22 bp, Artificial Sequence
  Synthetic oligonucleotide; CTA chr11 5176384 5176405 5176389 5176384 -
gtactacactaaatatttaagt

SEQ ID NO: 152021 - DNA, 22 bp, Artificial Sequence
  Synthetic oligonucleotide; CTA chr11 5176378 5176399 5176383 5176378 -
cactaaatatttaagtgctatt

SEQ ID NO: 152022 - DNA, 22 bp, Artificial Sequence
  Synthetic oligonucleotide; CTA chr11 5176373 5176394 5176378 5176373 -
aatatttaagtgctattttgaa

SEQ ID NO: 152023 - DNA, 22 bp, Artificial Sequence
  Synthetic oligonucleotide; TTT chr11 5176366 5176387 5176371 5176366 -
aagtgctattttgaattgtctt

SEQ ID NO: 152024 - DNA, 22 bp, Artificial Sequence
  Synthetic oligonucleotide; TTA chr11 5176365 5176386 5176370 5176365 -
agtgctattttgaattgtcttc

SEQ ID NO: 152025 - DNA, 22 bp, Artificial Sequence
  Synthetic oligonucleotide; CTA chr11 5176358 5176379 5176363 5176358 -
ttttgaattgtcttcaaaatat

SEQ ID NO: 152026 - DNA, 22 bp, Artificial Sequence
  Synthetic oligonucleotide; TTT chr11 5176355 5176376 5176360 5176355 -
tgaattgtcttcaaaatatttg

SEQ ID NO: 152027 - DNA, 22 bp, Artificial Sequence
  Synthetic oligonucleotide; TTT chr11 5176354 5176375 5176359 5176354 -
gaattgtcttcaaaatatttgc

SEQ ID NO: 152028 - DNA, 22 bp, Artificial Sequence
  Synthetic oligonucleotide; TTG chr11 5176353 5176374 5176358 5176353 -
aattgtcttcaaaatatttgca

SEQ ID NO: 152029 - DNA, 22 bp, Artificial Sequence
  Synthetic oligonucleotide; TTG chr11 5176348 5176369 5176353 5176348 -
tcttcaaaatatttgcatttct

SEQ ID NO: 152030 - DNA, 22 bp, Artificial Sequence
  Synthetic oligonucleotide; CTT chr11 5176344 5176365 5176349 5176344 -
caaaatatttgcatttctcagt

SEQ ID NO: 152031 - DNA, 22 bp, Artificial Sequence
  Synthetic oligonucleotide; TTC chr11 5176343 5176364 5176348 5176343 -
aaaatatttgcatttctcagta

SEQ ID NO: 152032 - DNA, 22 bp, Artificial Sequence
  Synthetic oligonucleotide; TTT chr11 5176334 5176355 5176339 5176334 -
gcatttctcagtacatctgtta

SEQ ID NO: 152033 - DNA, 22 bp, Artificial Sequence
  Synthetic oligonucleotide; TTG chr11 5176333 5176354 5176338 5176333 -
catttctcagtacatctgttaa

SEQ ID NO: 152034 - DNA, 22 bp, Artificial Sequence
  Synthetic oligonucleotide; TTT chr11 5176328 5176349 5176333 5176328 -
ctcagtacatctgttaaacttc

SEQ ID NO: 152035 - DNA, 22 bp, Artificial Sequence
  Synthetic oligonucleotide; TTC chr11 5176327 5176348 5176332 5176327 -
tcagtacatctgttaaacttca

SEQ ID NO: 152036 - DNA, 22 bp, Artificial Sequence
  Synthetic oligonucleotide; CTC chr11 5176325 5176346 5176330 5176325 -
agtacatctgttaaacttcata

SEQ ID NO: 152037 - DNA, 22 bp, Artificial Sequence
  Synthetic oligonucleotide; CTG chr11 5176315 5176336 5176320 5176315 -
ttaaacttcatatagttttttt

SEQ ID NO: 152038 - DNA, 22 bp, Artificial Sequence
  Synthetic oligonucleotide; TTA chr11 5176312 5176333 5176317 5176312 -
aacttcatatagtttttttttc

SEQ ID NO: 152039 - DNA, 22 bp, Artificial Sequence
  Synthetic oligonucleotide; CTT chr11 5176307 5176328 5176312 5176307 -
catatagtttttttttctactc

SEQ ID NO: 152040 - DNA, 22 bp, Artificial Sequence
  Synthetic oligonucleotide; TTC chr11 5176306 5176327 5176311 5176306 -
atatagtttttttttctactct

SEQ ID NO: 152041 - DNA, 22 bp, Artificial Sequence
  Synthetic oligonucleotide; TTT chr11 5176297 5176318 5176302 5176297 -
ttttttctactctacacaatgt

SEQ ID NO: 152042 - DNA, 22 bp, Artificial Sequence
  Synthetic oligonucleotide; TTT chr11 5176296 5176317 5176301 5176296 -
tttttctactctacacaatgtt

SEQ ID NO: 152043 - DNA, 22 bp, Artificial Sequence
  Synthetic oligonucleotide; TTT chr11 5176295 5176316 5176300 5176295 -
ttttctactctacacaatgttt

SEQ ID NO: 152044 - DNA, 22 bp, Artificial Sequence
  Synthetic oligonucleotide; TTT chr11 5176294 5176315 5176299 5176294 -
tttctactctacacaatgtttt

SEQ ID NO: 152045 - DNA, 22 bp, Artificial Sequence
  Synthetic oligonucleotide; TTT chr11 5176293 5176314 5176298 5176293 -
ttctactctacacaatgttttg

SEQ ID NO: 152046 - DNA, 22 bp, Artificial Sequence
  Synthetic oligonucleotide; TTT chr11 5176292 5176313 5176297 5176292 -
tctactctacacaatgttttgg

SEQ ID NO: 152047 - DNA, 22 bp, Artificial Sequence
  Synthetic oligonucleotide; TTT chr11 5176291 5176312 5176296 5176291 -
ctactctacacaatgttttgga

SEQ ID NO: 152048 - DNA, 22 bp, Artificial Sequence
  Synthetic oligonucleotide; TTC chr11 5176290 5176311 5176295 5176290 -
tactctacacaatgttttggac

SEQ ID NO: 152049 - DNA, 22 bp, Artificial Sequence
  Synthetic oligonucleotide; CTA chr11 5176288 5176309 5176293 5176288 -
ctctacacaatgttttggacat

SEQ ID NO: 152050 - DNA, 22 bp, Artificial Sequence
  Synthetic oligonucleotide; CTC chr11 5176285 5176306 5176290 5176285 -
tacacaatgttttggacattct

SEQ ID NO: 152051 - DNA, 22 bp, Artificial Sequence
  Synthetic oligonucleotide; CTA chr11 5176283 5176304 5176288 5176283 -
cacaatgttttggacattctaa

SEQ ID NO: 152052 - DNA, 22 bp, Artificial Sequence
  Synthetic oligonucleotide; TTT chr11 5176273 5176294 5176278 5176273 -
tggacattctaatgtgaaattt

SEQ ID NO: 152053 - DNA, 22 bp, Artificial Sequence
  Synthetic oligonucleotide; TTT chr11 5176272 5176293 5176277 5176272 -
ggacattctaatgtgaaattta

SEQ ID NO: 152054 - DNA, 22 bp, Artificial Sequence
  Synthetic oligonucleotide; TTG chr11 5176271 5176292 5176276 5176271 -
gacattctaatgtgaaatttac

SEQ ID NO: 152055 - DNA, 22 bp, Artificial Sequence
  Synthetic oligonucleotide; TTC chr11 5176264 5176285 5176269 5176264 -
taatgtgaaatttacactcagc

SEQ ID NO: 152056 - DNA, 22 bp, Artificial Sequence
  Synthetic oligonucleotide; CTA chr11 5176262 5176283 5176267 5176262 -
atgtgaaatttacactcagcgt

SEQ ID NO: 152057 - DNA, 22 bp, Artificial Sequence
  Synthetic oligonucleotide; TTT chr11 5176251 5176272 5176256 5176251 -
acactcagcgttgcatttctcc

SEQ ID NO: 152058 - DNA, 22 bp, Artificial Sequence
  Synthetic oligonucleotide; TTA chr11 5176250 5176271 5176255 5176250 -
cactcagcgttgcatttctcca

SEQ ID NO: 152059 - DNA, 22 bp, Artificial Sequence
  Synthetic oligonucleotide; CTC chr11 5176245 5176266 5176250 5176245 -
agcgttgcatttctccataaaa

SEQ ID NO: 152060 - DNA, 22 bp, Artificial Sequence
  Synthetic oligonucleotide; TTG chr11 5176238 5176259 5176243 5176238 -
catttctccataaaagtaataa

SEQ ID NO: 152061 - DNA, 22 bp, Artificial Sequence
  Synthetic oligonucleotide; TTT chr11 5176233 5176254 5176238 5176233 -
ctccataaaagtaataatatga

SEQ ID NO: 152062 - DNA, 22 bp, Artificial Sequence
  Synthetic oligonucleotide; TTC chr11 5176232 5176253 5176237 5176232 -
tccataaaagtaataatatgat

SEQ ID NO: 152063 - DNA, 22 bp, Artificial Sequence
  Synthetic oligonucleotide; CTC chr11 5176230 5176251 5176235 5176230 -
cataaaagtaataatatgatgg

SEQ ID NO: 152064 - DNA, 22 bp, Artificial Sequence
  Synthetic oligonucleotide; TTG chr11 5176185 5176206 5176190 5176185 -
cagtatgatgacagaggatttg

SEQ ID NO: 152065 - DNA, 22 bp, Artificial Sequence
  Synthetic oligonucleotide; TTT chr11 5176164 5176185 5176169 5176164 -
gactgaaaggtaggaagatttt

SEQ ID NO: 152066 - DNA, 22 bp, Artificial Sequence
  Synthetic oligonucleotide; TTG chr11 5176163 5176184 5176168 5176163 -
actgaaaggtaggaagattttg

SEQ ID NO: 152067 - DNA, 22 bp, Artificial Sequence
  Synthetic oligonucleotide; CTG chr11 5176159 5176180 5176164 5176159 -
aaaggtaggaagattttgtata

SEQ ID NO: 152068 - DNA, 22 bp, Artificial Sequence
  Synthetic oligonucleotide; TTT chr11 5176143 5176164 5176148 5176143 -
tgtatacttgattttagcagtg

SEQ ID NO: 152069 - DNA, 22 bp, Artificial Sequence
  Synthetic oligonucleotide; TTT chr11 5176142 5176163 5176147 5176142 -
gtatacttgattttagcagtgg

SEQ ID NO: 152070 - DNA, 22 bp, Artificial Sequence
  Synthetic oligonucleotide; TTG chr11 5176141 5176162 5176146 5176141 -
tatacttgattttagcagtggg

SEQ ID NO: 152071 - DNA, 22 bp, Artificial Sequence
  Synthetic oligonucleotide; CTT chr11 5176134 5176155 5176139 5176134 -
gattttagcagtggggagctaa

SEQ ID NO: 152072 - DNA, 22 bp, Artificial Sequence
  Synthetic oligonucleotide; TTG chr11 5176133 5176154 5176138 5176133 -
attttagcagtggggagctaag

SEQ ID NO: 152073 - DNA, 22 bp, Artificial Sequence
  Synthetic oligonucleotide; TTT chr11 5176129 5176150 5176134 5176129 -
tagcagtggggagctaagaaaa

SEQ ID NO: 152074 - DNA, 22 bp, Artificial Sequence
  Synthetic oligonucleotide; TTT chr11 5176128 5176149 5176133 5176128 -
agcagtggggagctaagaaaat

SEQ ID NO: 152075 - DNA, 22 bp, Artificial Sequence
  Synthetic oligonucleotide; TTA chr11 5176127 5176148 5176132 5176127 -
gcagtggggagctaagaaaatg

SEQ ID NO: 152076 - DNA, 22 bp, Artificial Sequence
  Synthetic oligonucleotide; CTA chr11 5176113 5176134 5176118 5176113 -
agaaaatgccaatttcacatcc

SEQ ID NO: 152077 - DNA, 22 bp, Artificial Sequence
  Synthetic oligonucleotide; TTT chr11 5176098 5176119 5176103 5176098 -
cacatccaaaatgcatgcaaca

SEQ ID NO: 152078 - DNA, 22 bp, Artificial Sequence
  Synthetic oligonucleotide; TTC chr11 5176097 5176118 5176102 5176097 -
acatccaaaatgcatgcaacat

SEQ ID NO: 152079 - DNA, 22 bp, Artificial Sequence
  Synthetic oligonucleotide; CTT chr11 5176067 5176088 5176072 5176067 -
aaataggtatatgaatatatat

SEQ ID NO: 152080 - DNA, 22 bp, Artificial Sequence
  Synthetic oligonucleotide; TTA chr11 5176066 5176087 5176071 5176066 -
aataggtatatgaatatatata

SEQ ID NO: 152081 - DNA, 22 bp, Artificial Sequence
  Synthetic oligonucleotide; CTA chr11 5176022 5176043 5176027 5176022 -
cacagtaacatatacatgtcat

SEQ ID NO: 152082 - DNA, 22 bp, Artificial Sequence
  Synthetic oligonucleotide; TTT chr11 5175998 5176019 5176003 5175998 -
tgacagttaaaatggtagaagt

SEQ ID NO: 152083 - DNA, 22 bp, Artificial Sequence
  Synthetic oligonucleotide; TTT chr11 5175997 5176018 5176002 5175997 -
gacagttaaaatggtagaagta

SEQ ID NO: 152084 - DNA, 22 bp, Artificial Sequence
  Synthetic oligonucleotide; TTG chr11 5175996 5176017 5176001 5175996 -
acagttaaaatggtagaagtaa

SEQ ID NO: 152085 - DNA, 22 bp, Artificial Sequence
  Synthetic oligonucleotide; TTA chr11 5175989 5176010 5175994 5175989 -
aaatggtagaagtaaaaatgat

SEQ ID NO: 152086 - DNA, 22 bp, Artificial Sequence
  Synthetic oligonucleotide; TTG chr11 5175965 5175986 5175970 5175965 -
aatttacaatctctaaataaac

SEQ ID NO: 152087 - DNA, 22 bp, Artificial Sequence
  Synthetic oligonucleotide; TTT chr11 5175960 5175981 5175965 5175960 -
acaatctctaaataaactttca

SEQ ID NO: 152088 - DNA, 22 bp, Artificial Sequence
  Synthetic oligonucleotide; TTA chr11 5175959 5175980 5175964 5175959 -
caatctctaaataaactttcag

SEQ ID NO: 152089 - DNA, 22 bp, Artificial Sequence
  Synthetic oligonucleotide; CTC chr11 5175952 5175973 5175957 5175952 -
taaataaactttcagttgagca

SEQ ID NO: 152090 - DNA, 22 bp, Artificial Sequence
  Synthetic oligonucleotide; CTA chr11 5175950 5175971 5175955 5175950 -
aataaactttcagttgagcact

SEQ ID NO: 152091 - DNA, 22 bp, Artificial Sequence
  Synthetic oligonucleotide; CTT chr11 5175941 5175962 5175946 5175941 -
tcagttgagcactcagattctg

SEQ ID NO: 152092 - DNA, 22 bp, Artificial Sequence
  Synthetic oligonucleotide; TTT chr11 5175940 5175961 5175945 5175940 -
cagttgagcactcagattctga

SEQ ID NO: 152093 - DNA, 22 bp, Artificial Sequence
  Synthetic oligonucleotide; TTC chr11 5175939 5175960 5175944 5175939 -
agttgagcactcagattctgaa

SEQ ID NO: 152094 - DNA, 22 bp, Artificial Sequence
  Synthetic oligonucleotide; TTG chr11 5175934 5175955 5175939 5175934 -
agcactcagattctgaaaggat

SEQ ID NO: 152095 - DNA, 22 bp, Artificial Sequence
  Synthetic oligonucleotide; CTC chr11 5175927 5175948 5175932 5175927 -
agattctgaaaggatttaggaa

SEQ ID NO: 152096 - DNA, 22 bp, Artificial Sequence
  Synthetic oligonucleotide; TTC chr11 5175921 5175942 5175926 5175921 -
tgaaaggatttaggaaatggct

SEQ ID NO: 152097 - DNA, 22 bp, Artificial Sequence
  Synthetic oligonucleotide; CTG chr11 5175919 5175940 5175924 5175919 -
aaaggatttaggaaatggctgt

SEQ ID NO: 152098 - DNA, 22 bp, Artificial Sequence
  Synthetic oligonucleotide; TTT chr11 5175910 5175931 5175915 5175910 -
aggaaatggctgttgctatgca

SEQ ID NO: 152099 - DNA, 22 bp, Artificial Sequence
  Synthetic oligonucleotide; TTA chr11 5175909 5175930 5175914 5175909 -
ggaaatggctgttgctatgcag

SEQ ID NO: 152100 - DNA, 22 bp, Artificial Sequence
  Synthetic oligonucleotide; CTG chr11 5175898 5175919 5175903 5175898 -
ttgctatgcagctgctgaattt

SEQ ID NO: 152101 - DNA, 22 bp, Artificial Sequence
  Synthetic oligonucleotide; TTG chr11 5175895 5175916 5175900 5175895 -
ctatgcagctgctgaatttaac

SEQ ID NO: 152102 - DNA, 22 bp, Artificial Sequence
  Synthetic oligonucleotide; CTA chr11 5175892 5175913 5175897 5175892 -
tgcagctgctgaatttaacatt

SEQ ID NO: 152103 - DNA, 22 bp, Artificial Sequence
  Synthetic oligonucleotide; CTG chr11 5175884 5175905 5175889 5175884 -
ctgaatttaacattactgagcc

SEQ ID NO: 152104 - DNA, 22 bp, Artificial Sequence
  Synthetic oligonucleotide; CTG chr11 5175881 5175902 5175886 5175881 -
aatttaacattactgagccatt

SEQ ID NO: 152105 - DNA, 22 bp, Artificial Sequence
  Synthetic oligonucleotide; TTT chr11 5175876 5175897 5175881 5175876 -
aacattactgagccattgccct

SEQ ID NO: 152106 - DNA, 22 bp, Artificial Sequence
  Synthetic oligonucleotide; TTA chr11 5175875 5175896 5175880 5175875 -
acattactgagccattgccctg

SEQ ID NO: 152107 - DNA, 22 bp, Artificial Sequence
  Synthetic oligonucleotide; TTA chr11 5175869 5175890 5175874 5175869 -
ctgagccattgccctggacatg

SEQ ID NO: 152108 - DNA, 22 bp, Artificial Sequence
  Synthetic oligonucleotide; CTG chr11 5175866 5175887 5175871 5175866 -
agccattgccctggacatgaga

SEQ ID NO: 152109 - DNA, 22 bp, Artificial Sequence
  Synthetic oligonucleotide; TTG chr11 5175858 5175879 5175863 5175858 -
ccctggacatgagaagaagttt

SEQ ID NO: 152110 - DNA, 22 bp, Artificial Sequence
  Synthetic oligonucleotide; CTG chr11 5175853 5175874 5175858 5175853 -
gacatgagaagaagttttcatg

SEQ ID NO: 152111 - DNA, 22 bp, Artificial Sequence
  Synthetic oligonucleotide; TTT chr11 5175836 5175857 5175841 5175836 -
tcatgttctactgtctccttaa

SEQ ID NO: 152112 - DNA, 22 bp, Artificial Sequence
  Synthetic oligonucleotide; TTT chr11 5175835 5175856 5175840 5175835 -
catgttctactgtctccttaac

SEQ ID NO: 152113 - DNA, 22 bp, Artificial Sequence
  Synthetic oligonucleotide; TTC chr11 5175834 5175855 5175839 5175834 -
atgttctactgtctccttaacc

SEQ ID NO: 152114 - DNA, 22 bp, Artificial Sequence
  Synthetic oligonucleotide; TTC chr11 5175828 5175849 5175833 5175828 -
tactgtctccttaaccagtaat

SEQ ID NO: 152115 - DNA, 22 bp, Artificial Sequence
  Synthetic oligonucleotide; CTA chr11 5175826 5175847 5175831 5175826 -
ctgtctccttaaccagtaatcc

SEQ ID NO: 152116 - DNA, 22 bp, Artificial Sequence
  Synthetic oligonucleotide; CTG chr11 5175823 5175844 5175828 5175823 -
tctccttaaccagtaatccttc

SEQ ID NO: 152117 - DNA, 22 bp, Artificial Sequence
  Synthetic oligonucleotide; CTC chr11 5175819 5175840 5175824 5175819 -
cttaaccagtaatccttcagca

SEQ ID NO: 152118 - DNA, 22 bp, Artificial Sequence
  Synthetic oligonucleotide; CTT chr11 5175816 5175837 5175821 5175816 -
aaccagtaatccttcagcagga

SEQ ID NO: 152119 - DNA, 22 bp, Artificial Sequence
  Synthetic oligonucleotide; TTA chr11 5175815 5175836 5175820 5175815 -
accagtaatccttcagcaggaa

SEQ ID NO: 152120 - DNA, 22 bp, Artificial Sequence
  Synthetic oligonucleotide; CTT chr11 5175802 5175823 5175807 5175802 -
cagcaggaagggaaagggaaag

SEQ ID NO: 152121 - DNA, 22 bp, Artificial Sequence
  Synthetic oligonucleotide; TTC chr11 5175801 5175822 5175806 5175801 -
agcaggaagggaaagggaaagg

SEQ ID NO: 152122 - DNA, 22 bp, Artificial Sequence
  Synthetic oligonucleotide; TTT chr11 5175639 5175660 5175644 5175639 -
taaagcagggagttttggaagc

SEQ ID NO: 152123 - DNA, 22 bp, Artificial Sequence
  Synthetic oligonucleotide; TTT chr11 5175638 5175659 5175643 5175638 -
aaagcagggagttttggaagca

SEQ ID NO: 152124 - DNA, 22 bp, Artificial Sequence
  Synthetic oligonucleotide; TTA chr11 5175637 5175658 5175642 5175637 -
aagcagggagttttggaagcac

SEQ ID NO: 152125 - DNA, 22 bp, Artificial Sequence
  Synthetic oligonucleotide; TTT chr11 5175624 5175645 5175629 5175624 -
tggaagcacttagctaaaactg

SEQ ID NO: 152126 - DNA, 22 bp, Artificial Sequence
  Synthetic oligonucleotide; TTT chr11 5175623 5175644 5175628 5175623 -
ggaagcacttagctaaaactga

SEQ ID NO: 152127 - DNA, 22 bp, Artificial Sequence
  Synthetic oligonucleotide; TTG chr11 5175622 5175643 5175627 5175622 -
gaagcacttagctaaaactgat

SEQ ID NO: 152128 - DNA, 22 bp, Artificial Sequence
  Synthetic oligonucleotide; CTT chr11 5175613 5175634 5175618 5175613 -
agctaaaactgatatggtgttc

SEQ ID NO: 152129 - DNA, 22 bp, Artificial Sequence
  Synthetic oligonucleotide; TTA chr11 5175612 5175633 5175617 5175612 -
gctaaaactgatatggtgttct

SEQ ID NO: 152130 - DNA, 22 bp, Artificial Sequence
  Synthetic oligonucleotide; CTA chr11 5175608 5175629 5175613 5175608 -
aaactgatatggtgttctagac

SEQ ID NO: 152131 - DNA, 22 bp, Artificial Sequence
  Synthetic oligonucleotide; CTG chr11 5175602 5175623 5175607 5175602 -
atatggtgttctagacagaatt

SEQ ID NO: 152132 - DNA, 22 bp, Artificial Sequence
  Synthetic oligonucleotide; TTC chr11 5175591 5175612 5175596 5175591 -
tagacagaattagcaaaaacaa

SEQ ID NO: 152133 - DNA, 22 bp, Artificial Sequence
  Synthetic oligonucleotide; CTA chr11 5175589 5175610 5175594 5175589 -
gacagaattagcaaaaacaaaa

SEQ ID NO: 152134 - DNA, 22 bp, Artificial Sequence
  Synthetic oligonucleotide; TTA chr11 5175579 5175600 5175584 5175579 -
gcaaaaacaaaaaacaaaaggt

SEQ ID NO: 152135 - DNA, 22 bp, Artificial Sequence
  Synthetic oligonucleotide; CTA chr11 5175546 5175567 5175551 5175546 -
agtgattgataaggtgagaata

SEQ ID NO: 152136 - DNA, 22 bp, Artificial Sequence
  Synthetic oligonucleotide; TTG chr11 5175538 5175559 5175543 5175538 -
ataaggtgagaatagtatttca

SEQ ID NO: 152137 - DNA, 22 bp, Artificial Sequence
  Synthetic oligonucleotide; TTT chr11 5175518 5175539 5175523 5175518 -
caaatgagcaagagatccaaga

SEQ ID NO: 152138 - DNA, 22 bp, Artificial Sequence
  Synthetic oligonucleotide; TTC chr11 5175517 5175538 5175522 5175517 -
aaatgagcaagagatccaagac

SEQ ID NO: 152139 - DNA, 22 bp, Artificial Sequence
  Synthetic oligonucleotide; CTA chr11 5175484 5175505 5175489 5175484 -
cagactattgttttataactga

SEQ ID NO: 152140 - DNA, 22 bp, Artificial Sequence
  Synthetic oligonucleotide; CTA chr11 5175477 5175498 5175482 5175477 -
ttgttttataactgaggtctta

SEQ ID NO: 152141 - DNA, 22 bp, Artificial Sequence
  Synthetic oligonucleotide; TTG chr11 5175474 5175495 5175479 5175474 -
ttttataactgaggtcttagtt

SEQ ID NO: 152142 - DNA, 22 bp, Artificial Sequence
  Synthetic oligonucleotide; TTT chr11 5175471 5175492 5175476 5175471 -
tataactgaggtcttagttaat

SEQ ID NO: 152143 - DNA, 22 bp, Artificial Sequence
  Synthetic oligonucleotide; TTT chr11 5175470 5175491 5175475 5175470 -
ataactgaggtcttagttaata

SEQ ID NO: 152144 - DNA, 22 bp, Artificial Sequence
  Synthetic oligonucleotide; TTA chr11 5175469 5175490 5175474 5175469 -
taactgaggtcttagttaatat

SEQ ID NO: 152145 - DNA, 22 bp, Artificial Sequence
  Synthetic oligonucleotide; CTG chr11 5175463 5175484 5175468 5175463 -
aggtcttagttaatatcaatca

SEQ ID NO: 152146 - DNA, 22 bp, Artificial Sequence
  Synthetic oligonucleotide; CTT chr11 5175456 5175477 5175461 5175456 -
agttaatatcaatcaagcaaaa

SEQ ID NO: 152147 - DNA, 22 bp, Artificial Sequence
  Synthetic oligonucleotide; TTA chr11 5175455 5175476 5175460 5175455 -
gttaatatcaatcaagcaaaat

SEQ ID NO: 152148 - DNA, 22 bp, Artificial Sequence
  Synthetic oligonucleotide; TTA chr11 5175451 5175472 5175456 5175451 -
atatcaatcaagcaaaattttg

SEQ ID NO: 152149 - DNA, 22 bp, Artificial Sequence
  Synthetic oligonucleotide; TTT chr11 5175431 5175452 5175436 5175431 -
tgatttcggggggagaaaaaag

SEQ ID NO: 152150 - DNA, 22 bp, Artificial Sequence
  Synthetic oligonucleotide; TTT chr11 5175430 5175451 5175435 5175430 -
gatttcggggggagaaaaaaga

SEQ ID NO: 152151 - DNA, 22 bp, Artificial Sequence
  Synthetic oligonucleotide; TTG chr11 5175429 5175450 5175434 5175429 -
atttcggggggagaaaaaagac

SEQ ID NO: 152152 - DNA, 22 bp, Artificial Sequence
  Synthetic oligonucleotide; TTT chr11 5175425 5175446 5175430 5175425 -
cggggggagaaaaaagaccaaa

SEQ ID NO: 152153 - DNA, 22 bp, Artificial Sequence
  Synthetic oligonucleotide; TTC chr11 5175424 5175445 5175429 5175424 -
ggggggagaaaaaagaccaaat

SEQ ID NO: 152154 - DNA, 22 bp, Artificial Sequence
  Synthetic oligonucleotide; TTG chr11 5175400 5175421 5175405 5175400 -
taatctggggtgtatttcttta

SEQ ID NO: 152155 - DNA, 22 bp, Artificial Sequence
  Synthetic oligonucleotide; CTG chr11 5175393 5175414 5175398 5175393 -
gggtgtatttctttatttacat

SEQ ID NO: 152156 - DNA, 22 bp, Artificial Sequence
  Synthetic oligonucleotide; TTT chr11 5175383 5175404 5175388 5175383 -
ctttatttacatctttgccttt

SEQ ID NO: 152157 - DNA, 22 bp, Artificial Sequence
  Synthetic oligonucleotide; TTC chr11 5175382 5175403 5175387 5175382 -
tttatttacatctttgccttta

SEQ ID NO: 152158 - DNA, 22 bp, Artificial Sequence
  Synthetic oligonucleotide; CTT chr11 5175380 5175401 5175385 5175380 -
tatttacatctttgcctttatt

SEQ ID NO: 152159 - DNA, 22 bp, Artificial Sequence
  Synthetic oligonucleotide; TTT chr11 5175379 5175400 5175384 5175379 -
atttacatctttgcctttattt

SEQ ID NO: 152160 - DNA, 22 bp, Artificial Sequence
  Synthetic oligonucleotide; TTA chr11 5175378 5175399 5175383 5175378 -
tttacatctttgcctttatttt

SEQ ID NO: 152161 - DNA, 22 bp, Artificial Sequence
  Synthetic oligonucleotide; TTT chr11 5175375 5175396 5175380 5175375 -
acatctttgcctttatttttta

SEQ ID NO: 152162 - DNA, 22 bp, Artificial Sequence
  Synthetic oligonucleotide; TTA chr11 5175374 5175395 5175379 5175374 -
catctttgcctttattttttaa

SEQ ID NO: 152163 - DNA, 22 bp, Artificial Sequence
  Synthetic oligonucleotide; CTT chr11 5175368 5175389 5175373 5175368 -
tgcctttattttttaactttct

SEQ ID NO: 152164 - DNA, 22 bp, Artificial Sequence
  Synthetic oligonucleotide; TTT chr11 5175367 5175388 5175372 5175367 -
gcctttattttttaactttctt

SEQ ID NO: 152165 - DNA, 22 bp, Artificial Sequence
  Synthetic oligonucleotide; TTG chr11 5175366 5175387 5175371 5175366 -
cctttattttttaactttcttt

SEQ ID NO: 152166 - DNA, 22 bp, Artificial Sequence
  Synthetic oligonucleotide; CTT chr11 5175362 5175383 5175367 5175362 -
tattttttaactttcttttgta

SEQ ID NO: 152167 - DNA, 22 bp, Artificial Sequence
  Synthetic oligonucleotide; TTT chr11 5175361 5175382 5175366 5175361 -
attttttaactttcttttgtat

SEQ ID NO: 152168 - DNA, 22 bp, Artificial Sequence
  Synthetic oligonucleotide; TTA chr11 5175360 5175381 5175365 5175360 -
ttttttaactttcttttgtata

SEQ ID NO: 152169 - DNA, 22 bp, Artificial Sequence
  Synthetic oligonucleotide; TTT chr11 5175357 5175378 5175362 5175357 -
tttaactttcttttgtatatga

SEQ ID NO: 152170 - DNA, 22 bp, Artificial Sequence
  Synthetic oligonucleotide; TTT chr11 5175356 5175377 5175361 5175356 -
ttaactttcttttgtatatgat

SEQ ID NO: 152171 - DNA, 22 bp, Artificial Sequence
  Synthetic oligonucleotide; TTT chr11 5175355 5175376 5175360 5175355 -
taactttcttttgtatatgata

SEQ ID NO: 152172 - DNA, 22 bp, Artificial Sequence
  Synthetic oligonucleotide; TTT chr11 5175354 5175375 5175359 5175354 -
aactttcttttgtatatgatat

SEQ ID NO: 152173 - DNA, 22 bp, Artificial Sequence
  Synthetic oligonucleotide; TTA chr11 5175353 5175374 5175358 5175353 -
actttcttttgtatatgatatg

SEQ ID NO: 152174 - DNA, 22 bp, Artificial Sequence
  Synthetic oligonucleotide; CTT chr11 5175349 5175370 5175354 5175349 -
tcttttgtatatgatatgatca

SEQ ID NO: 152175 - DNA, 22 bp, Artificial Sequence
  Synthetic oligonucleotide; TTT chr11 5175348 5175369 5175353 5175348 -
cttttgtatatgatatgatcat

SEQ ID NO: 152176 - DNA, 22 bp, Artificial Sequence
  Synthetic oligonucleotide; TTC chr11 5175347 5175368 5175352 5175347 -
ttttgtatatgatatgatcatt

SEQ ID NO: 152177 - DNA, 22 bp, Artificial Sequence
  Synthetic oligonucleotide; CTT chr11 5175345 5175366 5175350 5175345 -
ttgtatatgatatgatcattta

SEQ ID NO: 152178 - DNA, 22 bp, Artificial Sequence
  Synthetic oligonucleotide; TTT chr11 5175344 5175365 5175349 5175344 -
tgtatatgatatgatcatttaa

SEQ ID NO: 152179 - DNA, 22 bp, Artificial Sequence
  Synthetic oligonucleotide; TTT chr11 5175343 5175364 5175348 5175343 -
gtatatgatatgatcatttaag

SEQ ID NO: 152180 - DNA, 22 bp, Artificial Sequence
  Synthetic oligonucleotide; TTG chr11 5175342 5175363 5175347 5175342 -
tatatgatatgatcatttaagt

SEQ ID NO: 152181 - DNA, 22 bp, Artificial Sequence
  Synthetic oligonucleotide; TTT chr11 5175324 5175345 5175329 5175324 -
aagtataagtcacctgaaagta

SEQ ID NO: 152182 - DNA, 22 bp, Artificial Sequence
  Synthetic oligonucleotide; TTA chr11 5175323 5175344 5175328 5175323 -
agtataagtcacctgaaagtaa

SEQ ID NO: 152183 - DNA, 22 bp, Artificial Sequence
  Synthetic oligonucleotide; CTG chr11 5175308 5175329 5175313 5175308 -
aaagtaaaaagagttatataag

SEQ ID NO: 152184 - DNA, 22 bp, Artificial Sequence
  Synthetic oligonucleotide; TTA chr11 5175292 5175313 5175297 5175292 -
tataaggacaacataaaaatca

SEQ ID NO: 152185 - DNA, 22 bp, Artificial Sequence
  Synthetic oligonucleotide; TTT chr11 5175261 5175282 5175266 5175261 -
tatgcaactgcaagaaccaata

SEQ ID NO: 152186 - DNA, 22 bp, Artificial Sequence
  Synthetic oligonucleotide; TTT chr11 5175260 5175281 5175265 5175260 -
atgcaactgcaagaaccaatag

SEQ ID NO: 152187 - DNA, 22 bp, Artificial Sequence
  Synthetic oligonucleotide; TTA chr11 5175259 5175280 5175264 5175259 -
tgcaactgcaagaaccaatagg

SEQ ID NO: 152188 - DNA, 22 bp, Artificial Sequence
  Synthetic oligonucleotide; CTG chr11 5175251 5175272 5175256 5175251 -
caagaaccaataggaaaataga

SEQ ID NO: 152189 - DNA, 22 bp, Artificial Sequence
  Synthetic oligonucleotide; TTC chr11 5175209 5175230 5175214 5175209 -
aaaatgatgatagaggccagac

SEQ ID NO: 152190 - DNA, 22 bp, Artificial Sequence
  Synthetic oligonucleotide; CTG chr11 5175170 5175191 5175175 5175170 -
taatcccagctacatgggaggc

SEQ ID NO: 152191 - DNA, 22 bp, Artificial Sequence
  Synthetic oligonucleotide; CTA chr11 5175158 5175179 5175163 5175158 -
catgggaggctgaggcaggaga

SEQ ID NO: 152192 - DNA, 22 bp, Artificial Sequence
  Synthetic oligonucleotide; CTG chr11 5175146 5175167 5175151 5175146 -
aggcaggagaatgatttgaatt

SEQ ID NO: 152193 - DNA, 22 bp, Artificial Sequence
  Synthetic oligonucleotide; TTT chr11 5175129 5175150 5175134 5175129 -
gaattctggaggcggaggttgc

SEQ ID NO: 152194 - DNA, 22 bp, Artificial Sequence
  Synthetic oligonucleotide; TTG chr11 5175128 5175149 5175133 5175128 -
aattctggaggcggaggttgca

SEQ ID NO: 152195 - DNA, 22 bp, Artificial Sequence
  Synthetic oligonucleotide; TTC chr11 5175123 5175144 5175128 5175123 -
tggaggcggaggttgcagtgag

SEQ ID NO: 152196 - DNA, 22 bp, Artificial Sequence
  Synthetic oligonucleotide; CTG chr11 5175121 5175142 5175126 5175121 -
gaggcggaggttgcagtgagcc

SEQ ID NO: 152197 - DNA, 22 bp, Artificial Sequence
  Synthetic oligonucleotide; TTG chr11 5175108 5175129 5175113 5175108 -
cagtgagccgagatcgcgtcac

SEQ ID NO: 152198 - DNA, 22 bp, Artificial Sequence
  Synthetic oligonucleotide; CTC chr11 5175083 5175104 5175088 5175083 -
actctagcctggaccacagaga

SEQ ID NO: 152199 - DNA, 22 bp, Artificial Sequence
  Synthetic oligonucleotide; CTC chr11 5175079 5175100 5175084 5175079 -
tagcctggaccacagagagaga

SEQ ID NO: 152200 - DNA, 22 bp, Artificial Sequence
  Synthetic oligonucleotide; CTA chr11 5175077 5175098 5175082 5175077 -
gcctggaccacagagagagact

SEQ ID NO: 152201 - DNA, 22 bp, Artificial Sequence
  Synthetic oligonucleotide; CTG chr11 5175072 5175093 5175077 5175072 -
gaccacagagagagactccatc

SEQ ID NO: 152202 - DNA, 22 bp, Artificial Sequence
  Synthetic oligonucleotide; CTC chr11 5175054 5175075 5175059 5175054 -
catctcaaaaaaaccaaaaata

SEQ ID NO: 152203 - DNA, 22 bp, Artificial Sequence
  Synthetic oligonucleotide; CTC chr11 5175048 5175069 5175053 5175048 -
aaaaaaaccaaaaatacgtaaa

SEQ ID NO: 152204 - DNA, 22 bp, Artificial Sequence
  Synthetic oligonucleotide; CTG chr11 5174974 5174995 5174979 5174974 -
tatatgtgcctaaaataaatga

SEQ ID NO: 152205 - DNA, 22 bp, Artificial Sequence
  Synthetic oligonucleotide; CTA chr11 5174962 5174983 5174967 5174962 -
aaataaatgaaataattgttta

SEQ ID NO: 152206 - DNA, 22 bp, Artificial Sequence
  Synthetic oligonucleotide; TTG chr11 5174944 5174965 5174949 5174944 -
tttattatacattgtttattgt

SEQ ID NO: 152207 - DNA, 22 bp, Artificial Sequence
  Synthetic oligonucleotide; TTT chr11 5174941 5174962 5174946 5174941 -
attatacattgtttattgtaac

SEQ ID NO: 152208 - DNA, 22 bp, Artificial Sequence
  Synthetic oligonucleotide; TTA chr11 5174940 5174961 5174945 5174940 -
ttatacattgtttattgtaaca

SEQ ID NO: 152209 - DNA, 22 bp, Artificial Sequence
  Synthetic oligonucleotide; TTA chr11 5174937 5174958 5174942 5174937 -
tacattgtttattgtaacaatt

SEQ ID NO: 152210 - DNA, 22 bp, Artificial Sequence
  Synthetic oligonucleotide; TTG chr11 5174930 5174951 5174935 5174930 -
tttattgtaacaattctctcag

SEQ ID NO: 152211 - DNA, 22 bp, Artificial Sequence
  Synthetic oligonucleotide; TTT chr11 5174927 5174948 5174932 5174927 -
attgtaacaattctctcagaaa

SEQ ID NO: 152212 - DNA, 22 bp, Artificial Sequence
  Synthetic oligonucleotide; TTA chr11 5174926 5174947 5174931 5174926 -
ttgtaacaattctctcagaaac

SEQ ID NO: 152213 - DNA, 22 bp, Artificial Sequence
  Synthetic oligonucleotide; TTG chr11 5174923 5174944 5174928 5174923 -
taacaattctctcagaaacaac

SEQ ID NO: 152214 - DNA, 22 bp, Artificial Sequence
  Synthetic oligonucleotide; TTC chr11 5174914 5174935 5174919 5174914 -
tctcagaaacaactcataataa

SEQ ID NO: 152215 - DNA, 22 bp, Artificial Sequence
  Synthetic oligonucleotide; CTC chr11 5174912 5174933 5174917 5174912 -
tcagaaacaactcataataaat

SEQ ID NO: 152216 - DNA, 22 bp, Artificial Sequence
  Synthetic oligonucleotide; CTC chr11 5174910 5174931 5174915 5174910 -
agaaacaactcataataaattc

SEQ ID NO: 152217 - DNA, 22 bp, Artificial Sequence
  Synthetic oligonucleotide; CTC chr11 5174899 5174920 5174904 5174899 -
ataataaattcaattcaaccct

SEQ ID NO: 152218 - DNA, 22 bp, Artificial Sequence
  Synthetic oligonucleotide; TTC chr11 5174888 5174909 5174893 5174888 -
aattcaaccctaatcaaaataa

SEQ ID NO: 152219 - DNA, 22 bp, Artificial Sequence
  Synthetic oligonucleotide; TTC chr11 5174883 5174904 5174888 5174883 -
aaccctaatcaaaataaaaatt

SEQ ID NO: 152220 - DNA, 22 bp, Artificial Sequence
  Synthetic oligonucleotide; CTA chr11 5174876 5174897 5174881 5174876 -
atcaaaataaaaatttgtcttg

SEQ ID NO: 152221 - DNA, 22 bp, Artificial Sequence
  Synthetic oligonucleotide; TTT chr11 5174860 5174881 5174865 5174860 -
gtcttgttttaaatttctttcc

SEQ ID NO: 152222 - DNA, 22 bp, Artificial Sequence
  Synthetic oligonucleotide; TTG chr11 5174859 5174880 5174864 5174859 -
tcttgttttaaatttctttcca

SEQ ID NO: 152223 - DNA, 22 bp, Artificial Sequence
  Synthetic oligonucleotide; CTT chr11 5174855 5174876 5174860 5174855 -
gttttaaatttctttccatttt

SEQ ID NO: 152224 - DNA, 22 bp, Artificial Sequence
  Synthetic oligonucleotide; TTG chr11 5174854 5174875 5174859 5174854 -
ttttaaatttctttccattttt

SEQ ID NO: 152225 - DNA, 22 bp, Artificial Sequence
  Synthetic oligonucleotide; TTT chr11 5174851 5174872 5174856 5174851 -
taaatttctttccatttttatt

SEQ ID NO: 152226 - DNA, 22 bp, Artificial Sequence
  Synthetic oligonucleotide; TTT chr11 5174850 5174871 5174855 5174850 -
aaatttctttccatttttattg

SEQ ID NO: 152227 - DNA, 22 bp, Artificial Sequence
  Synthetic oligonucleotide; TTA chr11 5174849 5174870 5174854 5174849 -
aatttctttccatttttattgt

SEQ ID NO: 152228 - DNA, 22 bp, Artificial Sequence
  Synthetic oligonucleotide; TTT chr11 5174844 5174865 5174849 5174844 -
ctttccatttttattgtgataa

SEQ ID NO: 152229 - DNA, 22 bp, Artificial Sequence
  Synthetic oligonucleotide; TTC chr11 5174843 5174864 5174848 5174843 -
tttccatttttattgtgataaa

SEQ ID NO: 152230 - DNA, 22 bp, Artificial Sequence
  Synthetic oligonucleotide; CTT chr11 5174841 5174862 5174846 5174841 -
tccatttttattgtgataaagt

SEQ ID NO: 152231 - DNA, 22 bp, Artificial Sequence
  Synthetic oligonucleotide; TTT chr11 5174840 5174861 5174845 5174840 -
ccatttttattgtgataaagtt

SEQ ID NO: 152232 - DNA, 22 bp, Artificial Sequence
  Synthetic oligonucleotide; TTC chr11 5174839 5174860 5174844 5174839 -
catttttattgtgataaagttt

SEQ ID NO: 152233 - DNA, 22 bp, Artificial Sequence
  Synthetic oligonucleotide; TTT chr11 5174834 5174855 5174839 5174834 -
ttattgtgataaagtttataaa

SEQ ID NO: 152234 - DNA, 22 bp, Artificial Sequence
  Synthetic oligonucleotide; TTT chr11 5174833 5174854 5174838 5174833 -
tattgtgataaagtttataaat

SEQ ID NO: 152235 - DNA, 22 bp, Artificial Sequence
  Synthetic oligonucleotide; TTT chr11 5174832 5174853 5174837 5174832 -
attgtgataaagtttataaata

SEQ ID NO: 152236 - DNA, 22 bp, Artificial Sequence
  Synthetic oligonucleotide; TTA chr11 5174831 5174852 5174836 5174831 -
ttgtgataaagtttataaatat

SEQ ID NO: 152237 - DNA, 22 bp, Artificial Sequence
  Synthetic oligonucleotide; TTG chr11 5174828 5174849 5174833 5174828 -
tgataaagtttataaatatgct

SEQ ID NO: 152238 - DNA, 22 bp, Artificial Sequence
  Synthetic oligonucleotide; TTT chr11 5174817 5174838 5174822 5174817 -
ataaatatgctacatataatac

SEQ ID NO: 152239 - DNA, 22 bp, Artificial Sequence
  Synthetic oligonucleotide; TTA chr11 5174816 5174837 5174821 5174816 -
taaatatgctacatataatacc

SEQ ID NO: 152240 - DNA, 22 bp, Artificial Sequence
  Synthetic oligonucleotide; CTA chr11 5174805 5174826 5174810 5174805 -
catataataccgtatatcatat

SEQ ID NO: 152241 - DNA, 22 bp, Artificial Sequence
  Synthetic oligonucleotide; CTC chr11 5174771 5174792 5174776 5174771 -
accatattaaccatttttaagt

SEQ ID NO: 152242 - DNA, 22 bp, Artificial Sequence
  Synthetic oligonucleotide; TTA chr11 5174762 5174783 5174767 5174762 -
accatttttaagtataattatg

SEQ ID NO: 152243 - DNA, 22 bp, Artificial Sequence
  Synthetic oligonucleotide; TTT chr11 5174755 5174776 5174760 5174755 -
ttaagtataattatgtggcatt

SEQ ID NO: 152244 - DNA, 22 bp, Artificial Sequence
  Synthetic oligonucleotide; TTT chr11 5174754 5174775 5174759 5174754 -
taagtataattatgtggcatta

SEQ ID NO: 152245 - DNA, 22 bp, Artificial Sequence
  Synthetic oligonucleotide; TTT chr11 5174753 5174774 5174758 5174753 -
aagtataattatgtggcattaa

SEQ ID NO: 152246 - DNA, 22 bp, Artificial Sequence
  Synthetic oligonucleotide; TTA chr11 5174752 5174773 5174757 5174752 -
agtataattatgtggcattaat

SEQ ID NO: 152247 - DNA, 22 bp, Artificial Sequence
  Synthetic oligonucleotide; TTA chr11 5174742 5174763 5174747 5174742 -
tgtggcattaattatattaaca

SEQ ID NO: 152248 - DNA, 22 bp, Artificial Sequence
  Synthetic oligonucleotide; TTA chr11 5174732 5174753 5174737 5174732 -
attatattaacaatattgtgcc

SEQ ID NO: 152249 - DNA, 22 bp, Artificial Sequence
  Synthetic oligonucleotide; TTA chr11 5174728 5174749 5174733 5174728 -
tattaacaatattgtgccgcta

SEQ ID NO: 152250 - DNA, 22 bp, Artificial Sequence
  Synthetic oligonucleotide; TTA chr11 5174723 5174744 5174728 5174723 -
acaatattgtgccgctatcacc

SEQ ID NO: 152251 - DNA, 22 bp, Artificial Sequence
  Synthetic oligonucleotide; TTG chr11 5174714 5174735 5174719 5174714 -
tgccgctatcaccatgatctca

SEQ ID NO: 152252 - DNA, 22 bp, Artificial Sequence
  Synthetic oligonucleotide; CTA chr11 5174706 5174727 5174711 5174706 -
tcaccatgatctcatgccaaaa

SEQ ID NO: 152253 - DNA, 22 bp, Artificial Sequence
  Synthetic oligonucleotide; CTC chr11 5174693 5174714 5174698 5174693 -
atgccaaaactttttcatcatc

SEQ ID NO: 152254 - DNA, 22 bp, Artificial Sequence
  Synthetic oligonucleotide; CTT chr11 5174681 5174702 5174686 5174681 -
tttcatcatccaagcagaaatg

SEQ ID NO: 152255 - DNA, 22 bp, Artificial Sequence
  Synthetic oligonucleotide; TTT chr11 5174680 5174701 5174685 5174680 -
ttcatcatccaagcagaaatgc

SEQ ID NO: 152256 - DNA, 22 bp, Artificial Sequence
  Synthetic oligonucleotide; TTT chr11 5174679 5174700 5174684 5174679 -
tcatcatccaagcagaaatgct

SEQ ID NO: 152257 - DNA, 22 bp, Artificial Sequence
  Synthetic oligonucleotide; TTT chr11 5174678 5174699 5174683 5174678 -
catcatccaagcagaaatgcta

SEQ ID NO: 152258 - DNA, 22 bp, Artificial Sequence
  Synthetic oligonucleotide; TTC chr11 5174677 5174698 5174682 5174677 -
atcatccaagcagaaatgctat

SEQ ID NO: 152259 - DNA, 22 bp, Artificial Sequence
  Synthetic oligonucleotide; CTA chr11 5174656 5174677 5174661 5174656 -
tacttgttaggcagtaactccc

SEQ ID NO: 152260 - DNA, 22 bp, Artificial Sequence
  Synthetic oligonucleotide; CTT chr11 5174651 5174672 5174656 5174651 -
gttaggcagtaactccccagtc

SEQ ID NO: 152261 - DNA, 22 bp, Artificial Sequence
  Synthetic oligonucleotide; TTG chr11 5174650 5174671 5174655 5174650 -
ttaggcagtaactccccagtcc

SEQ ID NO: 152262 - DNA, 22 bp, Artificial Sequence
  Synthetic oligonucleotide; TTA chr11 5174647 5174668 5174652 5174647 -
ggcagtaactccccagtcccat

SEQ ID NO: 152263 - DNA, 22 bp, Artificial Sequence
  Synthetic oligonucleotide; CTC chr11 5174636 5174657 5174641 5174636 -
cccagtcccatagtaacctcta

SEQ ID NO: 152264 - DNA, 22 bp, Artificial Sequence
  Synthetic oligonucleotide; CTC chr11 5174616 5174637 5174621 5174616 -
taatctactatatgtttctcta

SEQ ID NO: 152265 - DNA, 22 bp, Artificial Sequence
  Synthetic oligonucleotide; CTA chr11 5174614 5174635 5174619 5174614 -
atctactatatgtttctctaaa

SEQ ID NO: 152266 - DNA, 22 bp, Artificial Sequence
  Synthetic oligonucleotide; CTA chr11 5174609 5174630 5174614 5174609 -
ctatatgtttctctaaatcagt

SEQ ID NO: 152267 - DNA, 22 bp, Artificial Sequence
  Synthetic oligonucleotide; CTA chr11 5174606 5174627 5174611 5174606 -
tatgtttctctaaatcagtcta

SEQ ID NO: 152268 - DNA, 22 bp, Artificial Sequence
  Synthetic oligonucleotide; TTT chr11 5174599 5174620 5174604 5174599 -
ctctaaatcagtctattttaga

SEQ ID NO: 152269 - DNA, 22 bp, Artificial Sequence
  Synthetic oligonucleotide; TTC chr11 5174598 5174619 5174603 5174598 -
tctaaatcagtctattttagat

SEQ ID NO: 152270 - DNA, 22 bp, Artificial Sequence
  Synthetic oligonucleotide; CTC chr11 5174596 5174617 5174601 5174596 -
taaatcagtctattttagataa

SEQ ID NO: 152271 - DNA, 22 bp, Artificial Sequence
  Synthetic oligonucleotide; CTA chr11 5174594 5174615 5174599 5174594 -
aatcagtctattttagataatt

SEQ ID NO: 152272 - DNA, 22 bp, Artificial Sequence
  Synthetic oligonucleotide; CTA chr11 5174584 5174605 5174589 5174584 -
ttttagataattcatataaata

SEQ ID NO: 152273 - DNA, 22 bp, Artificial Sequence
  Synthetic oligonucleotide; TTT chr11 5174581 5174602 5174586 5174581 -
tagataattcatataaatagat

SEQ ID NO: 152274 - DNA, 22 bp, Artificial Sequence
  Synthetic oligonucleotide; TTT chr11 5174580 5174601 5174585 5174580 -
agataattcatataaatagatt

SEQ ID NO: 152275 - DNA, 22 bp, Artificial Sequence
  Synthetic oligonucleotide; TTA chr11 5174579 5174600 5174584 5174579 -
gataattcatataaatagattc

SEQ ID NO: 152276 - DNA, 22 bp, Artificial Sequence
  Synthetic oligonucleotide; TTC chr11 5174571 5174592 5174576 5174571 -
atataaatagattcatacaata

SEQ ID NO: 152277 - DNA, 22 bp, Artificial Sequence
  Synthetic oligonucleotide; TTC chr11 5174557 5174578 5174562 5174557 -
atacaatatttgttgttttgtg

SEQ ID NO: 152278 - DNA, 22 bp, Artificial Sequence
  Synthetic oligonucleotide; TTT chr11 5174546 5174567 5174551 5174546 -
gttgttttgtgtctggcttatt

SEQ ID NO: 152279 - DNA, 22 bp, Artificial Sequence
  Synthetic oligonucleotide; TTG chr11 5174545 5174566 5174550 5174545 -
ttgttttgtgtctggcttattt

SEQ ID NO: 152280 - DNA, 22 bp, Artificial Sequence
  Synthetic oligonucleotide; TTG chr11 5174542 5174563 5174547 5174542 -
ttttgtgtctggcttattttac

SEQ ID NO: 152281 - DNA, 22 bp, Artificial Sequence
  Synthetic oligonucleotide; TTT chr11 5174539 5174560 5174544 5174539 -
tgtgtctggcttattttaccca

SEQ ID NO: 152282 - DNA, 22 bp, Artificial Sequence
  Synthetic oligonucleotide; TTT chr11 5174538 5174559 5174543 5174538 -
gtgtctggcttattttacccaa

SEQ ID NO: 152283 - DNA, 22 bp, Artificial Sequence
  Synthetic oligonucleotide; TTG chr11 5174537 5174558 5174542 5174537 -
tgtctggcttattttacccaac

SEQ ID NO: 152284 - DNA, 22 bp, Artificial Sequence
  Synthetic oligonucleotide; CTG chr11 5174531 5174552 5174536 5174531 -
gcttattttacccaacataagg

SEQ ID NO: 152285 - DNA, 22 bp, Artificial Sequence
  Synthetic oligonucleotide; CTT chr11 5174527 5174548 5174532 5174527 -
attttacccaacataaggtttc

SEQ ID NO: 152286 - DNA, 22 bp, Artificial Sequence
  Synthetic oligonucleotide; TTA chr11 5174526 5174547 5174531 5174526 -
ttttacccaacataaggtttca

SEQ ID NO: 152287 - DNA, 22 bp, Artificial Sequence
  Synthetic oligonucleotide; TTT chr11 5174523 5174544 5174528 5174523 -
tacccaacataaggtttcaaag

SEQ ID NO: 152288 - DNA, 22 bp, Artificial Sequence
  Synthetic oligonucleotide; TTT chr11 5174522 5174543 5174527 5174522 -
acccaacataaggtttcaaagt

SEQ ID NO: 152289 - DNA, 22 bp, Artificial Sequence
  Synthetic oligonucleotide; TTA chr11 5174521 5174542 5174526 5174521 -
cccaacataaggtttcaaagtc

SEQ ID NO: 152290 - DNA, 22 bp, Artificial Sequence
  Synthetic oligonucleotide; TTT chr11 5174506 5174527 5174511 5174506 -
caaagtccatccatgccataac

SEQ ID NO: 152291 - DNA, 22 bp, Artificial Sequence
  Synthetic oligonucleotide; TTC chr11 5174505 5174526 5174510 5174505 -
aaagtccatccatgccataaca

SEQ ID NO: 152292 - DNA, 22 bp, Artificial Sequence
  Synthetic oligonucleotide; CTT chr11 5174465 5174486 5174470 5174465 -
tgcttaatgttgtccattcata

SEQ ID NO: 152293 - DNA, 22 bp, Artificial Sequence
  Synthetic oligonucleotide; TTT chr11 5174464 5174485 5174469 5174464 -
gcttaatgttgtccattcatag

SEQ ID NO: 152294 - DNA, 22 bp, Artificial Sequence
  Synthetic oligonucleotide; TTG chr11 5174463 5174484 5174468 5174463 -
cttaatgttgtccattcataga

SEQ ID NO: 152295 - DNA, 22 bp, Artificial Sequence
  Synthetic oligonucleotide; CTT chr11 5174460 5174481 5174465 5174460 -
aatgttgtccattcatagattc

SEQ ID NO: 152296 - DNA, 22 bp, Artificial Sequence
  Synthetic oligonucleotide; TTA chr11 5174459 5174480 5174464 5174459 -
atgttgtccattcatagattct

SEQ ID NO: 152297 - DNA, 22 bp, Artificial Sequence
  Synthetic oligonucleotide; TTG chr11 5174453 5174474 5174458 5174453 -
tccattcatagattcttggaaa

SEQ ID NO: 152298 - DNA, 22 bp, Artificial Sequence
  Synthetic oligonucleotide; TTC chr11 5174446 5174467 5174451 5174446 -
atagattcttggaaactgaaac

SEQ ID NO: 152299 - DNA, 22 bp, Artificial Sequence
  Synthetic oligonucleotide; TTC chr11 5174438 5174459 5174443 5174438 -
ttggaaactgaaactttaagcc

SEQ ID NO: 152300 - DNA, 22 bp, Artificial Sequence
  Synthetic oligonucleotide; CTT chr11 5174436 5174457 5174441 5174436 -
ggaaactgaaactttaagccaa

SEQ ID NO: 152301 - DNA, 22 bp, Artificial Sequence
  Synthetic oligonucleotide; TTG chr11 5174435 5174456 5174440 5174435 -
gaaactgaaactttaagccaag

SEQ ID NO: 152302 - DNA, 22 bp, Artificial Sequence
  Synthetic oligonucleotide; CTG chr11 5174428 5174449 5174433 5174428 -
aaactttaagccaagtgacata

SEQ ID NO: 152303 - DNA, 22 bp, Artificial Sequence
  Synthetic oligonucleotide; CTT chr11 5174422 5174443 5174427 5174422 -
taagccaagtgacatataatga

SEQ ID NO: 152304 - DNA, 22 bp, Artificial Sequence
  Synthetic oligonucleotide; TTT chr11 5174421 5174442 5174426 5174421 -
aagccaagtgacatataatgat

SEQ ID NO: 152305 - DNA, 22 bp, Artificial Sequence
  Synthetic oligonucleotide; TTA chr11 5174420 5174441 5174425 5174420 -
agccaagtgacatataatgata

SEQ ID NO: 152306 - DNA, 22 bp, Artificial Sequence
  Synthetic oligonucleotide; TTT chr11 5174391 5174412 5174396 5174391 -
tttttctcatctaacagtgttg

SEQ ID NO: 152307 - DNA, 22 bp, Artificial Sequence
  Synthetic oligonucleotide; TTT chr11 5174390 5174411 5174395 5174390 -
ttttctcatctaacagtgttgg

SEQ ID NO: 152308 - DNA, 22 bp, Artificial Sequence
  Synthetic oligonucleotide; TTT chr11 5174389 5174410 5174394 5174389 -
tttctcatctaacagtgttggc

SEQ ID NO: 152309 - DNA, 22 bp, Artificial Sequence
  Synthetic oligonucleotide; TTT chr11 5174388 5174409 5174393 5174388 -
ttctcatctaacagtgttggct

SEQ ID NO: 152310 - DNA, 22 bp, Artificial Sequence
  Synthetic oligonucleotide; TTT chr11 5174387 5174408 5174392 5174387 -
tctcatctaacagtgttggcta

SEQ ID NO: 152311 - DNA, 22 bp, Artificial Sequence
  Synthetic oligonucleotide; TTT chr11 5174386 5174407 5174391 5174386 -
ctcatctaacagtgttggctaa

SEQ ID NO: 152312 - DNA, 22 bp, Artificial Sequence
  Synthetic oligonucleotide; TTC chr11 5174385 5174406 5174390 5174385 -
tcatctaacagtgttggctaaa

SEQ ID NO: 152313 - DNA, 22 bp, Artificial Sequence
  Synthetic oligonucleotide; CTC chr11 5174383 5174404 5174388 5174383 -
atctaacagtgttggctaaaac

SEQ ID NO: 152314 - DNA, 22 bp, Artificial Sequence
  Synthetic oligonucleotide; CTA chr11 5174378 5174399 5174383 5174378 -
acagtgttggctaaaacagtgt

SEQ ID NO: 152315 - DNA, 22 bp, Artificial Sequence
  Synthetic oligonucleotide; TTG chr11 5174369 5174390 5174374 5174369 -
gctaaaacagtgttatttgagg

SEQ ID NO: 152316 - DNA, 22 bp, Artificial Sequence
  Synthetic oligonucleotide; CTA chr11 5174365 5174386 5174370 5174365 -
aaacagtgttatttgaggatct

SEQ ID NO: 152317 - DNA, 22 bp, Artificial Sequence
  Synthetic oligonucleotide; TTA chr11 5174354 5174375 5174359 5174354 -
tttgaggatctgttttacatca

SEQ ID NO: 152318 - DNA, 22 bp, Artificial Sequence
  Synthetic oligonucleotide; TTT chr11 5174351 5174372 5174356 5174351 -
gaggatctgttttacatcattt

SEQ ID NO: 152319 - DNA, 22 bp, Artificial Sequence
  Synthetic oligonucleotide; TTG chr11 5174350 5174371 5174355 5174350 -
aggatctgttttacatcatttc

SEQ ID NO: 152320 - DNA, 22 bp, Artificial Sequence
  Synthetic oligonucleotide; CTG chr11 5174342 5174363 5174347 5174342 -
ttttacatcatttcacttaaag

SEQ ID NO: 152321 - DNA, 22 bp, Artificial Sequence
  Synthetic oligonucleotide; TTT chr11 5174339 5174360 5174344 5174339 -
tacatcatttcacttaaagttg

SEQ ID NO: 152322 - DNA, 22 bp, Artificial Sequence
  Synthetic oligonucleotide; TTT chr11 5174338 5174359 5174343 5174338 -
acatcatttcacttaaagttgc

SEQ ID NO: 152323 - DNA, 22 bp, Artificial Sequence
  Synthetic oligonucleotide; TTA chr11 5174337 5174358 5174342 5174337 -
catcatttcacttaaagttgcc

SEQ ID NO: 152324 - DNA, 22 bp, Artificial Sequence
  Synthetic oligonucleotide; TTT chr11 5174329 5174350 5174334 5174329 -
cacttaaagttgccatttccaa

SEQ ID NO: 152325 - DNA, 22 bp, Artificial Sequence
  Synthetic oligonucleotide; TTC chr11 5174328 5174349 5174333 5174328 -
acttaaagttgccatttccaaa

SEQ ID NO: 152326 - DNA, 22 bp, Artificial Sequence
  Synthetic oligonucleotide; CTT chr11 5174324 5174345 5174329 5174324 -
aaagttgccatttccaaaaacc

SEQ ID NO: 152327 - DNA, 22 bp, Artificial Sequence
  Synthetic oligonucleotide; TTA chr11 5174323 5174344 5174328 5174323 -
aagttgccatttccaaaaacct

SEQ ID NO: 152328 - DNA, 22 bp, Artificial Sequence
  Synthetic oligonucleotide; TTG chr11 5174317 5174338 5174322 5174317 -
ccatttccaaaaacctattcat

SEQ ID NO: 152329 - DNA, 22 bp, Artificial Sequence
  Synthetic oligonucleotide; TTT chr11 5174311 5174332 5174316 5174311 -
ccaaaaacctattcatgacatt

SEQ ID NO: 152330 - DNA, 22 bp, Artificial Sequence
  Synthetic oligonucleotide; TTC chr11 5174310 5174331 5174315 5174310 -
caaaaacctattcatgacatta

SEQ ID NO: 152331 - DNA, 22 bp, Artificial Sequence
  Synthetic oligonucleotide; CTA chr11 5174300 5174321 5174305 5174300 -
ttcatgacattaaataaggact

SEQ ID NO: 152332 - DNA, 22 bp, Artificial Sequence
  Synthetic oligonucleotide; TTC chr11 5174297 5174318 5174302 5174297 -
atgacattaaataaggacttac

SEQ ID NO: 152333 - DNA, 22 bp, Artificial Sequence
  Synthetic oligonucleotide; TTA chr11 5174288 5174309 5174293 5174288 -
aataaggacttactgcatctgt

SEQ ID NO: 152334 - DNA, 22 bp, Artificial Sequence
  Synthetic oligonucleotide; CTT chr11 5174277 5174298 5174282 5174277 -
actgcatctgtacttcattctt

SEQ ID NO: 152335 - DNA, 22 bp, Artificial Sequence
  Synthetic oligonucleotide; TTA chr11 5174276 5174297 5174281 5174276 -
ctgcatctgtacttcattcttt

SEQ ID NO: 152336 - DNA, 22 bp, Artificial Sequence
  Synthetic oligonucleotide; CTG chr11 5174273 5174294 5174278 5174273 -
catctgtacttcattctttttt

SEQ ID NO: 152337 - DNA, 22 bp, Artificial Sequence
  Synthetic oligonucleotide; CTG chr11 5174267 5174288 5174272 5174267 -
tacttcattcttttttattgct

SEQ ID NO: 152338 - DNA, 22 bp, Artificial Sequence
  Synthetic oligonucleotide; CTT chr11 5174262 5174283 5174267 5174262 -
cattcttttttattgctacata

SEQ ID NO: 152339 - DNA, 22 bp, Artificial Sequence
  Synthetic oligonucleotide; TTC chr11 5174261 5174282 5174266 5174261 -
attcttttttattgctacataa

SEQ ID NO: 152340 - DNA, 22 bp, Artificial Sequence
  Synthetic oligonucleotide; TTC chr11 5174257 5174278 5174262 5174257 -
ttttttattgctacataatatt

SEQ ID NO: 152341 - DNA, 22 bp, Artificial Sequence
  Synthetic oligonucleotide; CTT chr11 5174255 5174276 5174260 5174255 -
ttttattgctacataatattcc

SEQ ID NO: 152342 - DNA, 22 bp, Artificial Sequence
  Synthetic oligonucleotide; TTT chr11 5174254 5174275 5174259 5174254 -
tttattgctacataatattcca

SEQ ID NO: 152343 - DNA, 22 bp, Artificial Sequence
  Synthetic oligonucleotide; TTT chr11 5174253 5174274 5174258 5174253 -
ttattgctacataatattccat

SEQ ID NO: 152344 - DNA, 22 bp, Artificial Sequence
  Synthetic oligonucleotide; TTT chr11 5174252 5174273 5174257 5174252 -
tattgctacataatattccatt

SEQ ID NO: 152345 - DNA, 22 bp, Artificial Sequence
  Synthetic oligonucleotide; TTT chr11 5174251 5174272 5174256 5174251 -
attgctacataatattccattg

SEQ ID NO: 152346 - DNA, 22 bp, Artificial Sequence
  Synthetic oligonucleotide; TTA chr11 5174250 5174271 5174255 5174250 -
ttgctacataatattccattgt

SEQ ID NO: 152347 - DNA, 22 bp, Artificial Sequence
  Synthetic oligonucleotide; TTG chr11 5174247 5174268 5174252 5174247 -
ctacataatattccattgtgtg

SEQ ID NO: 152348 - DNA, 22 bp, Artificial Sequence
  Synthetic oligonucleotide; CTA chr11 5174244 5174265 5174249 5174244 -
cataatattccattgtgtgtat

SEQ ID NO: 152349 - DNA, 22 bp, Artificial Sequence
  Synthetic oligonucleotide; TTC chr11 5174234 5174255 5174239 5174234 -
cattgtgtgtatatatcacatt

SEQ ID NO: 152350 - DNA, 22 bp, Artificial Sequence
  Synthetic oligonucleotide; TTG chr11 5174229 5174250 5174234 5174229 -
tgtgtatatatcacatttgttt

SEQ ID NO: 152351 - DNA, 22 bp, Artificial Sequence
  Synthetic oligonucleotide; TTT chr11 5174211 5174232 5174216 5174211 -
gtttattcattcatctgtttat

SEQ ID NO: 152352 - DNA, 22 bp, Artificial Sequence
  Synthetic oligonucleotide; TTG chr11 5174210 5174231 5174215 5174210 -
tttattcattcatctgtttatg

SEQ ID NO: 152353 - DNA, 22 bp, Artificial Sequence
  Synthetic oligonucleotide; TTT chr11 5174207 5174228 5174212 5174207 -
attcattcatctgtttatgtac

SEQ ID NO: 152354 - DNA, 22 bp, Artificial Sequence
  Synthetic oligonucleotide; TTA chr11 5174206 5174227 5174211 5174206 -
ttcattcatctgtttatgtaca

SEQ ID NO: 152355 - DNA, 22 bp, Artificial Sequence
  Synthetic oligonucleotide; TTC chr11 5174203 5174224 5174208 5174203 -
attcatctgtttatgtacattc

SEQ ID NO: 152356 - DNA, 22 bp, Artificial Sequence
  Synthetic oligonucleotide; TTC chr11 5174199 5174220 5174204 5174199 -
atctgtttatgtacattctggt

SEQ ID NO: 152357 - DNA, 22 bp, Artificial Sequence
  Synthetic oligonucleotide; CTG chr11 5174194 5174215 5174199 5174194 -
tttatgtacattctggttgttt

SEQ ID NO: 152358 - DNA, 22 bp, Artificial Sequence
  Synthetic oligonucleotide; TTT chr11 5174191 5174212 5174196 5174191 -
atgtacattctggttgtttcca

SEQ ID NO: 152359 - DNA, 22 bp, Artificial Sequence
  Synthetic oligonucleotide; TTA chr11 5174190 5174211 5174195 5174190 -
tgtacattctggttgtttccac

SEQ ID NO: 152360 - DNA, 22 bp, Artificial Sequence
  Synthetic oligonucleotide; TTC chr11 5174181 5174202 5174186 5174181 -
tggttgtttccaccttttggct

SEQ ID NO: 152361 - DNA, 22 bp, Artificial Sequence
  Synthetic oligonucleotide; CTG chr11 5174179 5174200 5174184 5174179 -
gttgtttccaccttttggctat

SEQ ID NO: 152362 - DNA, 22 bp, Artificial Sequence
  Synthetic oligonucleotide; TTG chr11 5174175 5174196 5174180 5174175 -
tttccaccttttggctattgtg

SEQ ID NO: 152363 - DNA, 22 bp, Artificial Sequence
  Synthetic oligonucleotide; TTT chr11 5174172 5174193 5174177 5174172 -
ccaccttttggctattgtgaat

SEQ ID NO: 152364 - DNA, 22 bp, Artificial Sequence
  Synthetic oligonucleotide; TTC chr11 5174171 5174192 5174176 5174171 -
caccttttggctattgtgaata

SEQ ID NO: 152365 - DNA, 22 bp, Artificial Sequence
  Synthetic oligonucleotide; CTT chr11 5174165 5174186 5174170 5174165 -
ttggctattgtgaataatgcta

SEQ ID NO: 152366 - DNA, 22 bp, Artificial Sequence
  Synthetic oligonucleotide; TTT chr11 5174164 5174185 5174169 5174164 -
tggctattgtgaataatgctac

SEQ ID NO: 152367 - DNA, 22 bp, Artificial Sequence
  Synthetic oligonucleotide; TTT chr11 5174163 5174184 5174168 5174163 -
ggctattgtgaataatgctaca

SEQ ID NO: 152368 - DNA, 22 bp, Artificial Sequence
  Synthetic oligonucleotide; TTG chr11 5174162 5174183 5174167 5174162 -
gctattgtgaataatgctacaa

SEQ ID NO: 152369 - DNA, 22 bp, Artificial Sequence
  Synthetic oligonucleotide; CTA chr11 5174158 5174179 5174163 5174158 -
ttgtgaataatgctacaatgaa

SEQ ID NO: 152370 - DNA, 22 bp, Artificial Sequence
  Synthetic oligonucleotide; TTG chr11 5174155 5174176 5174160 5174155 -
tgaataatgctacaatgaacat

SEQ ID NO: 152371 - DNA, 22 bp, Artificial Sequence
  Synthetic oligonucleotide; CTA chr11 5174143 5174164 5174148 5174143 -
caatgaacatttcagtacaagt

SEQ ID NO: 152372 - DNA, 22 bp, Artificial Sequence
  Synthetic oligonucleotide; TTT chr11 5174131 5174152 5174136 5174131 -
cagtacaagtacctgtttaaat

SEQ ID NO: 152373 - DNA, 22 bp, Artificial Sequence
  Synthetic oligonucleotide; TTC chr11 5174130 5174151 5174135 5174130 -
agtacaagtacctgtttaaatc

SEQ ID NO: 152374 - DNA, 22 bp, Artificial Sequence
  Synthetic oligonucleotide; CTG chr11 5174116 5174137 5174121 5174116 -
tttaaatctttatatatatttt

SEQ ID NO: 152375 - DNA, 22 bp, Artificial Sequence
  Synthetic oligonucleotide; TTT chr11 5174113 5174134 5174118 5174113 -
aaatctttatatatatttttaa

SEQ ID NO: 152376 - DNA, 22 bp, Artificial Sequence
  Synthetic oligonucleotide; TTA chr11 5174112 5174133 5174117 5174112 -
aatctttatatatatttttaat

SEQ ID NO: 152377 - DNA, 22 bp, Artificial Sequence
  Synthetic oligonucleotide; CTT chr11 5174106 5174127 5174111 5174106 -
tatatatatttttaatatatac

SEQ ID NO: 152378 - DNA, 22 bp, Artificial Sequence
  Synthetic oligonucleotide; TTT chr11 5174105 5174126 5174110 5174105 -
atatatatttttaatatatacc

SEQ ID NO: 152379 - DNA, 22 bp, Artificial Sequence
  Synthetic oligonucleotide; TTA chr11 5174104 5174125 5174109 5174104 -
tatatatttttaatatatacct

SEQ ID NO: 152380 - DNA, 22 bp, Artificial Sequence
  Synthetic oligonucleotide; TTT chr11 5174095 5174116 5174100 5174095 -
ttaatatatacctaggagagga

SEQ ID NO: 152381 - DNA, 22 bp, Artificial Sequence
  Synthetic oligonucleotide; TTT chr11 5174094 5174115 5174099 5174094 -
taatatatacctaggagaggaa

SEQ ID NO: 152382 - DNA, 22 bp, Artificial Sequence
  Synthetic oligonucleotide; TTT chr11 5174093 5174114 5174098 5174093 -
aatatatacctaggagaggaat

SEQ ID NO: 152383 - DNA, 22 bp, Artificial Sequence
  Synthetic oligonucleotide; TTA chr11 5174092 5174113 5174097 5174092 -
atatatacctaggagaggaatt

SEQ ID NO: 152384 - DNA, 22 bp, Artificial Sequence
  Synthetic oligonucleotide; CTA chr11 5174081 5174102 5174086 5174081 -
ggagaggaattttggggtcata

SEQ ID NO: 152385 - DNA, 22 bp, Artificial Sequence
  Synthetic oligonucleotide; TTT chr11 5174069 5174090 5174074 5174069 -
tggggtcatatgttattcagtg

SEQ ID NO: 152386 - DNA, 22 bp, Artificial Sequence
  Synthetic oligonucleotide; TTT chr11 5174068 5174089 5174073 5174068 -
ggggtcatatgttattcagtgc

SEQ ID NO: 152387 - DNA, 22 bp, Artificial Sequence
  Synthetic oligonucleotide; TTG chr11 5174067 5174088 5174072 5174067 -
gggtcatatgttattcagtgcc

SEQ ID NO: 152388 - DNA, 22 bp, Artificial Sequence
  Synthetic oligonucleotide; TTA chr11 5174054 5174075 5174059 5174054 -
ttcagtgcctaagtttttgaag

SEQ ID NO: 152389 - DNA, 22 bp, Artificial Sequence
  Synthetic oligonucleotide; TTC chr11 5174051 5174072 5174056 5174051 -
agtgcctaagtttttgaagaac

SEQ ID NO: 152390 - DNA, 22 bp, Artificial Sequence
  Synthetic oligonucleotide; CTA chr11 5174043 5174064 5174048 5174043 -
agtttttgaagaactgtcaaaa

SEQ ID NO: 152391 - DNA, 22 bp, Artificial Sequence
  Synthetic oligonucleotide; TTT chr11 5174038 5174059 5174043 5174038 -
ttgaagaactgtcaaaatattt

SEQ ID NO: 152392 - DNA, 22 bp, Artificial Sequence
  Synthetic oligonucleotide; TTT chr11 5174037 5174058 5174042 5174037 -
tgaagaactgtcaaaatatttt

SEQ ID NO: 152393 - DNA, 22 bp, Artificial Sequence
  Synthetic oligonucleotide; TTT chr11 5174036 5174057 5174041 5174036 -
gaagaactgtcaaaatattttc

SEQ ID NO: 152394 - DNA, 22 bp, Artificial Sequence
  Synthetic oligonucleotide; TTG chr11 5174035 5174056 5174040 5174035 -
aagaactgtcaaaatattttct

SEQ ID NO: 152395 - DNA, 22 bp, Artificial Sequence
  Synthetic oligonucleotide; CTG chr11 5174027 5174048 5174032 5174027 -
tcaaaatattttctacagaagt

SEQ ID NO: 152396 - DNA, 22 bp, Artificial Sequence
  Synthetic oligonucleotide; TTT chr11 5174016 5174037 5174021 5174016 -
tctacagaagttgcaccactta

SEQ ID NO: 152397 - DNA, 22 bp, Artificial Sequence
  Synthetic oligonucleotide; TTT chr11 5174015 5174036 5174020 5174015 -
ctacagaagttgcaccacttaa

SEQ ID NO: 152398 - DNA, 22 bp, Artificial Sequence
  Synthetic oligonucleotide; TTC chr11 5174014 5174035 5174019 5174014 -
tacagaagttgcaccacttaac

SEQ ID NO: 152399 - DNA, 22 bp, Artificial Sequence
  Synthetic oligonucleotide; CTA chr11 5174012 5174033 5174017 5174012 -
cagaagttgcaccacttaacat

SEQ ID NO: 152400 - DNA, 22 bp, Artificial Sequence
  Synthetic oligonucleotide; TTG chr11 5174003 5174024 5174008 5174003 -
caccacttaacatttttagcag

SEQ ID NO: 152401 - DNA, 22 bp, Artificial Sequence
  Synthetic oligonucleotide; CTT chr11 5173995 5174016 5174000 5173995 -
aacatttttagcagcaatatat

SEQ ID NO: 152402 - DNA, 22 bp, Artificial Sequence
  Synthetic oligonucleotide; TTA chr11 5173994 5174015 5173999 5173994 -
acatttttagcagcaatatatg

SEQ ID NO: 152403 - DNA, 22 bp, Artificial Sequence
  Synthetic oligonucleotide; TTT chr11 5173988 5174009 5173993 5173988 -
ttagcagcaatatatgaggatt

SEQ ID NO: 152404 - DNA, 22 bp, Artificial Sequence
  Synthetic oligonucleotide; TTT chr11 5173987 5174008 5173992 5173987 -
tagcagcaatatatgaggattc

SEQ ID NO: 152405 - DNA, 22 bp, Artificial Sequence
  Synthetic oligonucleotide; TTT chr11 5173986 5174007 5173991 5173986 -
agcagcaatatatgaggattcc

SEQ ID NO: 152406 - DNA, 22 bp, Artificial Sequence
  Synthetic oligonucleotide; TTA chr11 5173985 5174006 5173990 5173985 -
gcagcaatatatgaggattcca

SEQ ID NO: 152407 - DNA, 22 bp, Artificial Sequence
  Synthetic oligonucleotide; TTC chr11 5173965 5173986 5173970 5173965 -
caattttcttatatctttgtca

SEQ ID NO: 152408 - DNA, 22 bp, Artificial Sequence
  Synthetic oligonucleotide; TTT chr11 5173959 5173980 5173964 5173959 -
tcttatatctttgtcaacactt

SEQ ID NO: 152409 - DNA, 22 bp, Artificial Sequence
  Synthetic oligonucleotide; TTT chr11 5173958 5173979 5173963 5173958 -
cttatatctttgtcaacacttg

SEQ ID NO: 152410 - DNA, 22 bp, Artificial Sequence
  Synthetic oligonucleotide; TTC chr11 5173957 5173978 5173962 5173957 -
ttatatctttgtcaacacttgt

SEQ ID NO: 152411 - DNA, 22 bp, Artificial Sequence
  Synthetic oligonucleotide; CTT chr11 5173955 5173976 5173960 5173955 -
atatctttgtcaacacttgtta

SEQ ID NO: 152412 - DNA, 22 bp, Artificial Sequence
  Synthetic oligonucleotide; TTA chr11 5173954 5173975 5173959 5173954 -
tatctttgtcaacacttgttac

SEQ ID NO: 152413 - DNA, 22 bp, Artificial Sequence
  Synthetic oligonucleotide; CTT chr11 5173948 5173969 5173953 5173948 -
tgtcaacacttgttacttttca

SEQ ID NO: 152414 - DNA, 22 bp, Artificial Sequence
  Synthetic oligonucleotide; TTT chr11 5173947 5173968 5173952 5173947 -
gtcaacacttgttacttttcat

SEQ ID NO: 152415 - DNA, 22 bp, Artificial Sequence
  Synthetic oligonucleotide; TTG chr11 5173946 5173967 5173951 5173946 -
tcaacacttgttacttttcatt

SEQ ID NO: 152416 - DNA, 22 bp, Artificial Sequence
  Synthetic oligonucleotide; CTT chr11 5173937 5173958 5173942 5173937 -
gttacttttcatttgttttgtt

SEQ ID NO: 152417 - DNA, 22 bp, Artificial Sequence
  Synthetic oligonucleotide; TTG chr11 5173936 5173957 5173941 5173936 -
ttacttttcatttgttttgttt

SEQ ID NO: 152418 - DNA, 22 bp, Artificial Sequence
  Synthetic oligonucleotide; TTA chr11 5173933 5173954 5173938 5173933 -
cttttcatttgttttgtttctc

SEQ ID NO: 152419 - DNA, 22 bp, Artificial Sequence
  Synthetic oligonucleotide; CTT chr11 5173930 5173951 5173935 5173930 -
ttcatttgttttgtttctctta

SEQ ID NO: 152420 - DNA, 22 bp, Artificial Sequence
  Synthetic oligonucleotide; TTT chr11 5173929 5173950 5173934 5173929 -
tcatttgttttgtttctcttaa

SEQ ID NO: 152421 - DNA, 22 bp, Artificial Sequence
  Synthetic oligonucleotide; TTT chr11 5173928 5173949 5173933 5173928 -
catttgttttgtttctcttaaa

SEQ ID NO: 152422 - DNA, 22 bp, Artificial Sequence
  Synthetic oligonucleotide; TTC chr11 5173927 5173948 5173932 5173927 -
atttgttttgtttctcttaaag

SEQ ID NO: 152423 - DNA, 22 bp, Artificial Sequence
  Synthetic oligonucleotide; TTT chr11 5173923 5173944 5173928 5173923 -
gttttgtttctcttaaagtata

SEQ ID NO: 152424 - DNA, 22 bp, Artificial Sequence
  Synthetic oligonucleotide; TTG chr11 5173922 5173943 5173927 5173922 -
ttttgtttctcttaaagtatag

SEQ ID NO: 152425 - DNA, 22 bp, Artificial Sequence
  Synthetic oligonucleotide; TTT chr11 5173919 5173940 5173924 5173919 -
tgtttctcttaaagtatagaca

SEQ ID NO: 152426 - DNA, 22 bp, Artificial Sequence
  Synthetic oligonucleotide; TTT chr11 5173918 5173939 5173923 5173918 -
gtttctcttaaagtatagacat

SEQ ID NO: 152427 - DNA, 22 bp, Artificial Sequence
  Synthetic oligonucleotide; TTG chr11 5173917 5173938 5173922 5173917 -
tttctcttaaagtatagacatt

SEQ ID NO: 152428 - DNA, 22 bp, Artificial Sequence
  Synthetic oligonucleotide; TTT chr11 5173914 5173935 5173919 5173914 -
ctcttaaagtatagacattcta

SEQ ID NO: 152429 - DNA, 22 bp, Artificial Sequence
  Synthetic oligonucleotide; TTC chr11 5173913 5173934 5173918 5173913 -
tcttaaagtatagacattctag

SEQ ID NO: 152430 - DNA, 22 bp, Artificial Sequence
  Synthetic oligonucleotide; CTC chr11 5173911 5173932 5173916 5173911 -
ttaaagtatagacattctagta

SEQ ID NO: 152431 - DNA, 22 bp, Artificial Sequence
  Synthetic oligonucleotide; CTT chr11 5173909 5173930 5173914 5173909 -
aaagtatagacattctagtaag

SEQ ID NO: 152432 - DNA, 22 bp, Artificial Sequence
  Synthetic oligonucleotide; TTA chr11 5173908 5173929 5173913 5173908 -
aagtatagacattctagtaagt

SEQ ID NO: 152433 - DNA, 22 bp, Artificial Sequence
  Synthetic oligonucleotide; TTC chr11 5173894 5173915 5173899 5173894 -
tagtaagtttgaagtagtgtct

SEQ ID NO: 152434 - DNA, 22 bp, Artificial Sequence
  Synthetic oligonucleotide; CTA chr11 5173892 5173913 5173897 5173892 -
gtaagtttgaagtagtgtctta

SEQ ID NO: 152435 - DNA, 22 bp, Artificial Sequence
  Synthetic oligonucleotide; TTT chr11 5173884 5173905 5173889 5173884 -
gaagtagtgtcttattgtggtt

SEQ ID NO: 152436 - DNA, 22 bp, Artificial Sequence
  Synthetic oligonucleotide; TTG chr11 5173883 5173904 5173888 5173883 -
aagtagtgtcttattgtggttt

SEQ ID NO: 152437 - DNA, 22 bp, Artificial Sequence
  Synthetic oligonucleotide; CTT chr11 5173871 5173892 5173876 5173871 -
attgtggttttggtttgcattt

SEQ ID NO: 152438 - DNA, 22 bp, Artificial Sequence
  Synthetic oligonucleotide; TTA chr11 5173870 5173891 5173875 5173870 -
ttgtggttttggtttgcatttt

SEQ ID NO: 152439 - DNA, 22 bp, Artificial Sequence
  Synthetic oligonucleotide; TTG chr11 5173867 5173888 5173872 5173867 -
tggttttggtttgcattttatg

SEQ ID NO: 152440 - DNA, 22 bp, Artificial Sequence
  Synthetic oligonucleotide; TTT chr11 5173861 5173882 5173866 5173861 -
tggtttgcattttatgtgccaa

SEQ ID NO: 152441 - DNA, 22 bp, Artificial Sequence
  Synthetic oligonucleotide; TTT chr11 5173860 5173881 5173865 5173860 -
ggtttgcattttatgtgccaat

SEQ ID NO: 152442 - DNA, 22 bp, Artificial Sequence
  Synthetic oligonucleotide; TTG chr11 5173859 5173880 5173864 5173859 -
gtttgcattttatgtgccaatg

SEQ ID NO: 152443 - DNA, 22 bp, Artificial Sequence
  Synthetic oligonucleotide; TTT chr11 5173855 5173876 5173860 5173855 -
gcattttatgtgccaatgttca

SEQ ID NO: 152444 - DNA, 22 bp, Artificial Sequence
  Synthetic oligonucleotide; TTG chr11 5173854 5173875 5173859 5173854 -
cattttatgtgccaatgttcat

SEQ ID NO: 152445 - DNA, 22 bp, Artificial Sequence
  Synthetic oligonucleotide; TTT chr11 5173849 5173870 5173854 5173849 -
tatgtgccaatgttcatttgta

SEQ ID NO: 152446 - DNA, 22 bp, Artificial Sequence
  Synthetic oligonucleotide; TTT chr11 5173848 5173869 5173853 5173848 -
atgtgccaatgttcatttgtat

SEQ ID NO: 152447 - DNA, 22 bp, Artificial Sequence
  Synthetic oligonucleotide; TTA chr11 5173847 5173868 5173852 5173847 -
tgtgccaatgttcatttgtata

SEQ ID NO: 152448 - DNA, 22 bp, Artificial Sequence
  Synthetic oligonucleotide; TTC chr11 5173834 5173855 5173839 5173834 -
atttgtatatcttctttctaga

SEQ ID NO: 152449 - DNA, 22 bp, Artificial Sequence
  Synthetic oligonucleotide; TTT chr11 5173830 5173851 5173835 5173830 -
gtatatcttctttctagaaatt

SEQ ID NO: 152450 - DNA, 22 bp, Artificial Sequence
  Synthetic oligonucleotide; TTG chr11 5173829 5173850 5173834 5173829 -
tatatcttctttctagaaatta

SEQ ID NO: 152451 - DNA, 22 bp, Artificial Sequence
  Synthetic oligonucleotide; CTT chr11 5173821 5173842 5173826 5173821 -
ctttctagaaattactcattcc

SEQ ID NO: 152452 - DNA, 22 bp, Artificial Sequence
  Synthetic oligonucleotide; TTC chr11 5173820 5173841 5173825 5173820 -
tttctagaaattactcattccc

SEQ ID NO: 152453 - DNA, 22 bp, Artificial Sequence
  Synthetic oligonucleotide; CTT chr11 5173818 5173839 5173823 5173818 -
tctagaaattactcattcccat

SEQ ID NO: 152454 - DNA, 22 bp, Artificial Sequence
  Synthetic oligonucleotide; TTT chr11 5173817 5173838 5173822 5173817 -
ctagaaattactcattcccatc

SEQ ID NO: 152455 - DNA, 22 bp, Artificial Sequence
  Synthetic oligonucleotide; TTC chr11 5173816 5173837 5173821 5173816 -
tagaaattactcattcccatca

SEQ ID NO: 152456 - DNA, 22 bp, Artificial Sequence
  Synthetic oligonucleotide; CTA chr11 5173814 5173835 5173819 5173814 -
gaaattactcattcccatcatt

SEQ ID NO: 152457 - DNA, 22 bp, Artificial Sequence
  Synthetic oligonucleotide; TTA chr11 5173807 5173828 5173812 5173807 -
ctcattcccatcatttgcatat

SEQ ID NO: 152458 - DNA, 22 bp, Artificial Sequence
  Synthetic oligonucleotide; CTC chr11 5173804 5173825 5173809 5173804 -
attcccatcatttgcatatttt

SEQ ID NO: 152459 - DNA, 22 bp, Artificial Sequence
  Synthetic oligonucleotide; TTC chr11 5173800 5173821 5173805 5173800 -
ccatcatttgcatatttttaaa

SEQ ID NO: 152460 - DNA, 22 bp, Artificial Sequence
  Synthetic oligonucleotide; TTT chr11 5173791 5173812 5173796 5173791 -
gcatatttttaaattgagttgt

SEQ ID NO: 152461 - DNA, 22 bp, Artificial Sequence
  Synthetic oligonucleotide; TTG chr11 5173790 5173811 5173795 5173790 -
catatttttaaattgagttgtt

SEQ ID NO: 152462 - DNA, 22 bp, Artificial Sequence
  Synthetic oligonucleotide; TTT chr11 5173783 5173804 5173788 5173783 -
ttaaattgagttgtttgtcttt

SEQ ID NO: 152463 - DNA, 22 bp, Artificial Sequence
  Synthetic oligonucleotide; TTT chr11 5173782 5173803 5173787 5173782 -
taaattgagttgtttgtctttt

SEQ ID NO: 152464 - DNA, 22 bp, Artificial Sequence
  Synthetic oligonucleotide; TTT chr11 5173781 5173802 5173786 5173781 -
aaattgagttgtttgtcttttt

SEQ ID NO: 152465 - DNA, 22 bp, Artificial Sequence
  Synthetic oligonucleotide; TTA chr11 5173780 5173801 5173785 5173780 -
aattgagttgtttgtctttttg

SEQ ID NO: 152466 - DNA, 22 bp, Artificial Sequence
  Synthetic oligonucleotide; TTG chr11 5173775 5173796 5173780 5173775 -
agttgtttgtctttttgttttt

SEQ ID NO: 152467 - DNA, 22 bp, Artificial Sequence
  Synthetic oligonucleotide; TTG chr11 5173770 5173791 5173775 5173770 -
tttgtctttttgtttttgagtt

SEQ ID NO: 152468 - DNA, 22 bp, Artificial Sequence
  Synthetic oligonucleotide; TTT chr11 5173767 5173788 5173772 5173767 -
gtctttttgtttttgagttgta

SEQ ID NO: 152469 - DNA, 22 bp, Artificial Sequence
  Synthetic oligonucleotide; TTG chr11 5173766 5173787 5173771 5173766 -
tctttttgtttttgagttgtag

SEQ ID NO: 152470 - DNA, 22 bp, Artificial Sequence
  Synthetic oligonucleotide; CTT chr11 5173762 5173783 5173767 5173762 -
tttgtttttgagttgtaggact

SEQ ID NO: 152471 - DNA, 22 bp, Artificial Sequence
  Synthetic oligonucleotide; TTT chr11 5173761 5173782 5173766 5173761 -
ttgtttttgagttgtaggactt

SEQ ID NO: 152472 - DNA, 22 bp, Artificial Sequence
  Synthetic oligonucleotide; TTT chr11 5173760 5173781 5173765 5173760 -
tgtttttgagttgtaggacttt

SEQ ID NO: 152473 - DNA, 22 bp, Artificial Sequence
  Synthetic oligonucleotide; TTT chr11 5173759 5173780 5173764 5173759 -
gtttttgagttgtaggactttt

SEQ ID NO: 152474 - DNA, 22 bp, Artificial Sequence
  Synthetic oligonucleotide; TTG chr11 5173758 5173779 5173763 5173758 -
tttttgagttgtaggacttttt

SEQ ID NO: 152475 - DNA, 22 bp, Artificial Sequence
  Synthetic oligonucleotide; TTT chr11 5173755 5173776 5173760 5173755 -
ttgagttgtaggactttttcat

SEQ ID NO: 152476 - DNA, 22 bp, Artificial Sequence
  Synthetic oligonucleotide; TTT chr11 5173754 5173775 5173759 5173754 -
tgagttgtaggactttttcata

SEQ ID NO: 152477 - DNA, 22 bp, Artificial Sequence
  Synthetic oligonucleotide; TTT chr11 5173753 5173774 5173758 5173753 -
gagttgtaggactttttcatac

SEQ ID NO: 152478 - DNA, 22 bp, Artificial Sequence
  Synthetic oligonucleotide; TTG chr11 5173752 5173773 5173757 5173752 -
agttgtaggactttttcataca

SEQ ID NO: 152479 - DNA, 22 bp, Artificial Sequence
  Synthetic oligonucleotide; TTG chr11 5173747 5173768 5173752 5173747 -
taggactttttcatacattctg

SEQ ID NO: 152480 - DNA, 22 bp, Artificial Sequence
  Synthetic oligonucleotide; CTT chr11 5173739 5173760 5173744 5173739 -
tttcatacattctggatattaa

SEQ ID NO: 152481 - DNA, 22 bp, Artificial Sequence
  Synthetic oligonucleotide; TTT chr11 5173738 5173759 5173743 5173738 -
ttcatacattctggatattaaa

SEQ ID NO: 152482 - DNA, 22 bp, Artificial Sequence
  Synthetic oligonucleotide; TTT chr11 5173737 5173758 5173742 5173737 -
tcatacattctggatattaaac

SEQ ID NO: 152483 - DNA, 22 bp, Artificial Sequence
  Synthetic oligonucleotide; TTT chr11 5173736 5173757 5173741 5173736 -
catacattctggatattaaact

SEQ ID NO: 152484 - DNA, 22 bp, Artificial Sequence
  Synthetic oligonucleotide; TTC chr11 5173735 5173756 5173740 5173735 -
atacattctggatattaaactt

SEQ ID NO: 152485 - DNA, 22 bp, Artificial Sequence
  Synthetic oligonucleotide; TTC chr11 5173727 5173748 5173732 5173727 -
tggatattaaacttatgaaata

SEQ ID NO: 152486 - DNA, 22 bp, Artificial Sequence
  Synthetic oligonucleotide; CTG chr11 5173725 5173746 5173730 5173725 -
gatattaaacttatgaaataca

SEQ ID NO: 152487 - DNA, 22 bp, Artificial Sequence
  Synthetic oligonucleotide; TTA chr11 5173718 5173739 5173723 5173718 -
aacttatgaaatacataatttg

SEQ ID NO: 152488 - DNA, 22 bp, Artificial Sequence
  Synthetic oligonucleotide; CTT chr11 5173713 5173734 5173718 5173713 -
atgaaatacataatttgcaaag

SEQ ID NO: 152489 - DNA, 22 bp, Artificial Sequence
  Synthetic oligonucleotide; TTA chr11 5173712 5173733 5173717 5173712 -
tgaaatacataatttgcaaaga

SEQ ID NO: 152490 - DNA, 22 bp, Artificial Sequence
  Synthetic oligonucleotide; TTT chr11 5173697 5173718 5173702 5173697 -
gcaaagatgttctctcatctta

SEQ ID NO: 152491 - DNA, 22 bp, Artificial Sequence
  Synthetic oligonucleotide; TTG chr11 5173696 5173717 5173701 5173696 -
caaagatgttctctcatcttat

SEQ ID NO: 152492 - DNA, 22 bp, Artificial Sequence
  Synthetic oligonucleotide; TTC chr11 5173685 5173706 5173690 5173685 -
tctcatcttataggttgtcttt

SEQ ID NO: 152493 - DNA, 22 bp, Artificial Sequence
  Synthetic oligonucleotide; CTC chr11 5173683 5173704 5173688 5173683 -
tcatcttataggttgtcttttt

SEQ ID NO: 152494 - DNA, 22 bp, Artificial Sequence
  Synthetic oligonucleotide; CTC chr11 5173681 5173702 5173686 5173681 -
atcttataggttgtctttttac

SEQ ID NO: 152495 - DNA, 22 bp, Artificial Sequence
  Synthetic oligonucleotide; CTT chr11 5173676 5173697 5173681 5173676 -
ataggttgtctttttactttct

SEQ ID NO: 152496 - DNA, 22 bp, Artificial Sequence
  Synthetic oligonucleotide; TTA chr11 5173675 5173696 5173680 5173675 -
taggttgtctttttactttctt

SEQ ID NO: 152497 - DNA, 22 bp, Artificial Sequence
  Synthetic oligonucleotide; TTG chr11 5173668 5173689 5173673 5173668 -
tctttttactttcttaaagtcg

SEQ ID NO: 152498 - DNA, 22 bp, Artificial Sequence
  Synthetic oligonucleotide; CTT chr11 5173664 5173685 5173669 5173664 -
tttactttcttaaagtcgtttg

SEQ ID NO: 152499 - DNA, 22 bp, Artificial Sequence
  Synthetic oligonucleotide; TTT chr11 5173663 5173684 5173668 5173663 -
ttactttcttaaagtcgtttgt

SEQ ID NO: 152500 - DNA, 22 bp, Artificial Sequence
  Synthetic oligonucleotide; TTT chr11 5173662 5173683 5173667 5173662 -
tactttcttaaagtcgtttgtt

SEQ ID NO: 152501 - DNA, 22 bp, Artificial Sequence
  Synthetic oligonucleotide; TTT chr11 5173661 5173682 5173666 5173661 -
actttcttaaagtcgtttgttg

SEQ ID NO: 152502 - DNA, 22 bp, Artificial Sequence
  Synthetic oligonucleotide; TTA chr11 5173660 5173681 5173665 5173660 -
ctttcttaaagtcgtttgttgc

SEQ ID NO: 152503 - DNA, 22 bp, Artificial Sequence
  Synthetic oligonucleotide; CTT chr11 5173657 5173678 5173662 5173657 -
tcttaaagtcgtttgttgcatg

SEQ ID NO: 152504 - DNA, 22 bp, Artificial Sequence
  Synthetic oligonucleotide; TTT chr11 5173656 5173677 5173661 5173656 -
cttaaagtcgtttgttgcatga

SEQ ID NO: 152505 - DNA, 22 bp, Artificial Sequence
  Synthetic oligonucleotide; TTC chr11 5173655 5173676 5173660 5173655 -
ttaaagtcgtttgttgcatgaa

SEQ ID NO: 152506 - DNA, 22 bp, Artificial Sequence
  Synthetic oligonucleotide; CTT chr11 5173653 5173674 5173658 5173653 -
aaagtcgtttgttgcatgaact

SEQ ID NO: 152507 - DNA, 22 bp, Artificial Sequence
  Synthetic oligonucleotide; TTA chr11 5173652 5173673 5173657 5173652 -
aagtcgtttgttgcatgaactt

SEQ ID NO: 152508 - DNA, 22 bp, Artificial Sequence
  Synthetic oligonucleotide; TTT chr11 5173643 5173664 5173648 5173643 -
gttgcatgaactttttaaatga

SEQ ID NO: 152509 - DNA, 22 bp, Artificial Sequence
  Synthetic oligonucleotide; TTG chr11 5173642 5173663 5173647 5173642 -
ttgcatgaactttttaaatgaa

SEQ ID NO: 152510 - DNA, 22 bp, Artificial Sequence
  Synthetic oligonucleotide; TTG chr11 5173639 5173660 5173644 5173639 -
catgaactttttaaatgaaatc

SEQ ID NO: 152511 - DNA, 22 bp, Artificial Sequence
  Synthetic oligonucleotide; CTT chr11 5173630 5173651 5173635 5173630 -
tttaaatgaaatccaatttatg

SEQ ID NO: 152512 - DNA, 22 bp, Artificial Sequence
  Synthetic oligonucleotide; TTT chr11 5173629 5173650 5173634 5173629 -
ttaaatgaaatccaatttatgt

SEQ ID NO: 152513 - DNA, 22 bp, Artificial Sequence
  Synthetic oligonucleotide; TTT chr11 5173628 5173649 5173633 5173628 -
taaatgaaatccaatttatgta

SEQ ID NO: 152514 - DNA, 22 bp, Artificial Sequence
  Synthetic oligonucleotide; TTT chr11 5173627 5173648 5173632 5173627 -
aaatgaaatccaatttatgtat

SEQ ID NO: 152515 - DNA, 22 bp, Artificial Sequence
  Synthetic oligonucleotide; TTA chr11 5173626 5173647 5173631 5173626 -
aatgaaatccaatttatgtatt

SEQ ID NO: 152516 - DNA, 22 bp, Artificial Sequence
  Synthetic oligonucleotide; TTT chr11 5173611 5173632 5173616 5173611 -
atgtatttattttttgttactc

SEQ ID NO: 152517 - DNA, 22 bp, Artificial Sequence
  Synthetic oligonucleotide; TTA chr11 5173610 5173631 5173615 5173610 -
tgtatttattttttgttactca

SEQ ID NO: 152518 - DNA, 22 bp, Artificial Sequence
  Synthetic oligonucleotide; TTT chr11 5173603 5173624 5173608 5173603 -
attttttgttactcatactttt

SEQ ID NO: 152519 - DNA, 22 bp, Artificial Sequence
  Synthetic oligonucleotide; TTA chr11 5173602 5173623 5173607 5173602 -
ttttttgttactcatacttttt

SEQ ID NO: 152520 - DNA, 22 bp, Artificial Sequence
  Synthetic oligonucleotide; TTT chr11 5173599 5173620 5173604 5173599 -
tttgttactcatactttttgtg

SEQ ID NO: 152521 - DNA, 22 bp, Artificial Sequence
  Synthetic oligonucleotide; TTT chr11 5173598 5173619 5173603 5173598 -
ttgttactcatactttttgtgt

SEQ ID NO: 152522 - DNA, 22 bp, Artificial Sequence
  Synthetic oligonucleotide; TTT chr11 5173597 5173618 5173602 5173597 -
tgttactcatactttttgtgtc

SEQ ID NO: 152523 - DNA, 22 bp, Artificial Sequence
  Synthetic oligonucleotide; TTT chr11 5173596 5173617 5173601 5173596 -
gttactcatactttttgtgtca

SEQ ID NO: 152524 - DNA, 22 bp, Artificial Sequence
  Synthetic oligonucleotide; TTG chr11 5173595 5173616 5173600 5173595 -
ttactcatactttttgtgtcat

SEQ ID NO: 152525 - DNA, 22 bp, Artificial Sequence
  Synthetic oligonucleotide; TTA chr11 5173592 5173613 5173597 5173592 -
ctcatactttttgtgtcatatc

SEQ ID NO: 152526 - DNA, 22 bp, Artificial Sequence
  Synthetic oligonucleotide; CTC chr11 5173589 5173610 5173594 5173589 -
atactttttgtgtcatatctaa

SEQ ID NO: 152527 - DNA, 22 bp, Artificial Sequence
  Synthetic oligonucleotide; CTT chr11 5173583 5173604 5173588 5173583 -
tttgtgtcatatctaagaatct

SEQ ID NO: 152528 - DNA, 22 bp, Artificial Sequence
  Synthetic oligonucleotide; TTT chr11 5173582 5173603 5173587 5173582 -
ttgtgtcatatctaagaatcta

SEQ ID NO: 152529 - DNA, 22 bp, Artificial Sequence
  Synthetic oligonucleotide; TTT chr11 5173581 5173602 5173586 5173581 -
tgtgtcatatctaagaatctat

SEQ ID NO: 152530 - DNA, 22 bp, Artificial Sequence
  Synthetic oligonucleotide; TTT chr11 5173580 5173601 5173585 5173580 -
gtgtcatatctaagaatctatt

SEQ ID NO: 152531 - DNA, 22 bp, Artificial Sequence
  Synthetic oligonucleotide; TTG chr11 5173579 5173600 5173584 5173579 -
tgtcatatctaagaatctattg

SEQ ID NO: 152532 - DNA, 22 bp, Artificial Sequence
  Synthetic oligonucleotide; CTA chr11 5173568 5173589 5173573 5173568 -
agaatctattgtaaaatcaaag

SEQ ID NO: 152533 - DNA, 22 bp, Artificial Sequence
  Synthetic oligonucleotide; CTA chr11 5173560 5173581 5173565 5173560 -
ttgtaaaatcaaagttcatgaa

SEQ ID NO: 152534 - DNA, 22 bp, Artificial Sequence
  Synthetic oligonucleotide; TTG chr11 5173557 5173578 5173562 5173557 -
taaaatcaaagttcatgaagat

SEQ ID NO: 152535 - DNA, 22 bp, Artificial Sequence
  Synthetic oligonucleotide; TTC chr11 5173543 5173564 5173548 5173543 -
atgaagatttacccatgcttcc

SEQ ID NO: 152536 - DNA, 22 bp, Artificial Sequence
  Synthetic oligonucleotide; TTT chr11 5173533 5173554 5173538 5173533 -
acccatgcttccttccgagggt

SEQ ID NO: 152537 - DNA, 22 bp, Artificial Sequence
  Synthetic oligonucleotide; TTA chr11 5173532 5173553 5173537 5173532 -
cccatgcttccttccgagggtg

SEQ ID NO: 152538 - DNA, 22 bp, Artificial Sequence
  Synthetic oligonucleotide; CTT chr11 5173523 5173544 5173528 5173523 -
ccttccgagggtgttatggctt

SEQ ID NO: 152539 - DNA, 22 bp, Artificial Sequence
  Synthetic oligonucleotide; TTC chr11 5173522 5173543 5173527 5173522 -
cttccgagggtgttatggcttt

SEQ ID NO: 152540 - DNA, 22 bp, Artificial Sequence
  Synthetic oligonucleotide; CTT chr11 5173519 5173540 5173524 5173519 -
ccgagggtgttatggctttagt

SEQ ID NO: 152541 - DNA, 22 bp, Artificial Sequence
  Synthetic oligonucleotide; TTC chr11 5173518 5173539 5173523 5173518 -
cgagggtgttatggctttagtt

SEQ ID NO: 152542 - DNA, 22 bp, Artificial Sequence
  Synthetic oligonucleotide; TTA chr11 5173507 5173528 5173512 5173507 -
tggctttagttcaatttaggtc

SEQ ID NO: 152543 - DNA, 22 bp, Artificial Sequence
  Synthetic oligonucleotide; CTT chr11 5173501 5173522 5173506 5173501 -
tagttcaatttaggtcattaca

SEQ ID NO: 152544 - DNA, 22 bp, Artificial Sequence
  Synthetic oligonucleotide; TTT chr11 5173500 5173521 5173505 5173500 -
agttcaatttaggtcattacac

SEQ ID NO: 152545 - DNA, 22 bp, Artificial Sequence
  Synthetic oligonucleotide; TTA chr11 5173499 5173520 5173504 5173499 -
gttcaatttaggtcattacaca

SEQ ID NO: 152546 - DNA, 22 bp, Artificial Sequence
  Synthetic oligonucleotide; TTC chr11 5173495 5173516 5173500 5173495 -
aatttaggtcattacacaattt

SEQ ID NO: 152547 - DNA, 22 bp, Artificial Sequence
  Synthetic oligonucleotide; TTT chr11 5173490 5173511 5173495 5173490 -
aggtcattacacaatttttatg

SEQ ID NO: 152548 - DNA, 22 bp, Artificial Sequence
  Synthetic oligonucleotide; TTA chr11 5173489 5173510 5173494 5173489 -
ggtcattacacaatttttatgc

SEQ ID NO: 152549 - DNA, 22 bp, Artificial Sequence
  Synthetic oligonucleotide; TTA chr11 5173481 5173502 5173486 5173481 -
cacaatttttatgcatgctggc

SEQ ID NO: 152550 - DNA, 22 bp, Artificial Sequence
  Synthetic oligonucleotide; TTT chr11 5173473 5173494 5173478 5173473 -
ttatgcatgctggcttttaatc

SEQ ID NO: 152551 - DNA, 22 bp, Artificial Sequence
  Synthetic oligonucleotide; TTT chr11 5173472 5173493 5173477 5173472 -
tatgcatgctggcttttaatcc

SEQ ID NO: 152552 - DNA, 22 bp, Artificial Sequence
  Synthetic oligonucleotide; TTT chr11 5173471 5173492 5173476 5173471 -
atgcatgctggcttttaatcct

SEQ ID NO: 152553 - DNA, 22 bp, Artificial Sequence
  Synthetic oligonucleotide; TTA chr11 5173470 5173491 5173475 5173470 -
tgcatgctggcttttaatcctt

SEQ ID NO: 152554 - DNA, 22 bp, Artificial Sequence
  Synthetic oligonucleotide; CTG chr11 5173461 5173482 5173466 5173461 -
gcttttaatccttatttgaaag

SEQ ID NO: 152555 - DNA, 22 bp, Artificial Sequence
  Synthetic oligonucleotide; CTT chr11 5173457 5173478 5173462 5173457 -
ttaatccttatttgaaagaata

SEQ ID NO: 152556 - DNA, 22 bp, Artificial Sequence
  Synthetic oligonucleotide; TTT chr11 5173456 5173477 5173461 5173456 -
taatccttatttgaaagaatac

SEQ ID NO: 152557 - DNA, 22 bp, Artificial Sequence
  Synthetic oligonucleotide; TTT chr11 5173455 5173476 5173460 5173455 -
aatccttatttgaaagaataca

SEQ ID NO: 152558 - DNA, 22 bp, Artificial Sequence
  Synthetic oligonucleotide; TTA chr11 5173454 5173475 5173459 5173454 -
atccttatttgaaagaatacaa

SEQ ID NO: 152559 - DNA, 22 bp, Artificial Sequence
  Synthetic oligonucleotide; CTT chr11 5173448 5173469 5173453 5173448 -
atttgaaagaatacaaagttag

SEQ ID NO: 152560 - DNA, 22 bp, Artificial Sequence
  Synthetic oligonucleotide; TTA chr11 5173447 5173468 5173452 5173447 -
tttgaaagaatacaaagttagc

SEQ ID NO: 152561 - DNA, 22 bp, Artificial Sequence
  Synthetic oligonucleotide; TTT chr11 5173444 5173465 5173449 5173444 -
gaaagaatacaaagttagcatg

SEQ ID NO: 152562 - DNA, 22 bp, Artificial Sequence
  Synthetic oligonucleotide; TTG chr11 5173443 5173464 5173448 5173443 -
aaagaatacaaagttagcatga

SEQ ID NO: 152563 - DNA, 22 bp, Artificial Sequence
  Synthetic oligonucleotide; TTA chr11 5173427 5173448 5173432 5173427 -
gcatgacaacaaaaatatagct

SEQ ID NO: 152564 - DNA, 22 bp, Artificial Sequence
  Synthetic oligonucleotide; CTT chr11 5173404 5173425 5173409 5173404 -
gaccaattgaatatgaagttgt

SEQ ID NO: 152565 - DNA, 22 bp, Artificial Sequence
  Synthetic oligonucleotide; TTG chr11 5173403 5173424 5173408 5173403 -
accaattgaatatgaagttgta

SEQ ID NO: 152566 - DNA, 22 bp, Artificial Sequence
  Synthetic oligonucleotide; TTG chr11 5173395 5173416 5173400 5173395 -
aatatgaagttgtatataaaaa

SEQ ID NO: 152567 - DNA, 22 bp, Artificial Sequence
  Synthetic oligonucleotide; TTG chr11 5173383 5173404 5173388 5173383 -
tatataaaaacagaataagaac

SEQ ID NO: 152568 - DNA, 22 bp, Artificial Sequence
  Synthetic oligonucleotide; CTA chr11 5173306 5173327 5173311 5173306 -
gaattagatccatatttatata

SEQ ID NO: 152569 - DNA, 22 bp, Artificial Sequence
  Synthetic oligonucleotide; TTA chr11 5173300 5173321 5173305 5173300 -
gatccatatttatataaaaata

SEQ ID NO: 152570 - DNA, 22 bp, Artificial Sequence
  Synthetic oligonucleotide; TTT chr11 5173289 5173310 5173294 5173289 -
atataaaaatataaaataaaat

SEQ ID NO: 152571 - DNA, 22 bp, Artificial Sequence
  Synthetic oligonucleotide; TTA chr11 5173288 5173309 5173293 5173288 -
tataaaaatataaaataaaatg

SEQ ID NO: 152572 - DNA, 22 bp, Artificial Sequence
  Synthetic oligonucleotide; CTC chr11 5173253 5173274 5173258 5173253 -
atcatgcttggagaccaaccct

SEQ ID NO: 152573 - DNA, 22 bp, Artificial Sequence
  Synthetic oligonucleotide; CTT chr11 5173244 5173265 5173249 5173244 -
ggagaccaacccttgatcttat

SEQ ID NO: 152574 - DNA, 22 bp, Artificial Sequence
  Synthetic oligonucleotide; TTG chr11 5173243 5173264 5173248 5173243 -
gagaccaacccttgatcttata

SEQ ID NO: 152575 - DNA, 22 bp, Artificial Sequence
  Synthetic oligonucleotide; CTT chr11 5173230 5173251 5173235 5173230 -
gatcttatacttggtattagaa

SEQ ID NO: 152576 - DNA, 22 bp, Artificial Sequence
  Synthetic oligonucleotide; TTG chr11 5173229 5173250 5173234 5173229 -
atcttatacttggtattagaaa

SEQ ID NO: 152577 - DNA, 22 bp, Artificial Sequence
  Synthetic oligonucleotide; CTT chr11 5173224 5173245 5173229 5173224 -
atacttggtattagaaaaattg

SEQ ID NO: 152578 - DNA, 22 bp, Artificial Sequence
  Synthetic oligonucleotide; TTA chr11 5173223 5173244 5173228 5173223 -
tacttggtattagaaaaattgt

SEQ ID NO: 152579 - DNA, 22 bp, Artificial Sequence
  Synthetic oligonucleotide; CTT chr11 5173218 5173239 5173223 5173218 -
ggtattagaaaaattgtttata

SEQ ID NO: 152580 - DNA, 22 bp, Artificial Sequence
  Synthetic oligonucleotide; TTG chr11 5173217 5173238 5173222 5173217 -
gtattagaaaaattgtttatat

SEQ ID NO: 152581 - DNA, 22 bp, Artificial Sequence
  Synthetic oligonucleotide; TTA chr11 5173211 5173232 5173216 5173211 -
gaaaaattgtttatatgtttga

SEQ ID NO: 152582 - DNA, 22 bp, Artificial Sequence
  Synthetic oligonucleotide; TTG chr11 5173202 5173223 5173207 5173202 -
tttatatgtttgagaatactta

SEQ ID NO: 152583 - DNA, 22 bp, Artificial Sequence
  Synthetic oligonucleotide; TTT chr11 5173199 5173220 5173204 5173199 -
atatgtttgagaatacttaagt

SEQ ID NO: 152584 - DNA, 22 bp, Artificial Sequence
  Synthetic oligonucleotide; TTA chr11 5173198 5173219 5173203 5173198 -
tatgtttgagaatacttaagta

SEQ ID NO: 152585 - DNA, 22 bp, Artificial Sequence
  Synthetic oligonucleotide; TTT chr11 5173191 5173212 5173196 5173191 -
gagaatacttaagtaaaattct

SEQ ID NO: 152586 - DNA, 22 bp, Artificial Sequence
  Synthetic oligonucleotide; TTG chr11 5173190 5173211 5173195 5173190 -
agaatacttaagtaaaattcta

SEQ ID NO: 152587 - DNA, 22 bp, Artificial Sequence
  Synthetic oligonucleotide; CTT chr11 5173181 5173202 5173186 5173181 -
aagtaaaattctaattacccaa

SEQ ID NO: 152588 - DNA, 22 bp, Artificial Sequence
  Synthetic oligonucleotide; TTA chr11 5173180 5173201 5173185 5173180 -
agtaaaattctaattacccaag

SEQ ID NO: 152589 - DNA, 22 bp, Artificial Sequence
  Synthetic oligonucleotide; TTC chr11 5173170 5173191 5173175 5173170 -
taattacccaagtcccccaaac

SEQ ID NO: 152590 - DNA, 22 bp, Artificial Sequence
  Synthetic oligonucleotide; CTA chr11 5173168 5173189 5173173 5173168 -
attacccaagtcccccaaacaa

SEQ ID NO: 152591 - DNA, 22 bp, Artificial Sequence
  Synthetic oligonucleotide; TTA chr11 5173164 5173185 5173169 5173164 -
cccaagtcccccaaacaaattt

SEQ ID NO: 152592 - DNA, 22 bp, Artificial Sequence
  Synthetic oligonucleotide; TTT chr11 5173142 5173163 5173147 5173142 -
caggtggaatcaagaatctcta

SEQ ID NO: 152593 - DNA, 22 bp, Artificial Sequence
  Synthetic oligonucleotide; TTC chr11 5173141 5173162 5173146 5173141 -
aggtggaatcaagaatctctaa

SEQ ID NO: 152594 - DNA, 22 bp, Artificial Sequence
  Synthetic oligonucleotide; CTC chr11 5173122 5173143 5173127 5173122 -
taacactattattacctgtctt

SEQ ID NO: 152595 - DNA, 22 bp, Artificial Sequence
  Synthetic oligonucleotide; CTA chr11 5173120 5173141 5173125 5173120 -
acactattattacctgtcttta

SEQ ID NO: 152596 - DNA, 22 bp, Artificial Sequence
  Synthetic oligonucleotide; CTA chr11 5173114 5173135 5173119 5173114 -
ttattacctgtctttatcatga

SEQ ID NO: 152597 - DNA, 22 bp, Artificial Sequence
  Synthetic oligonucleotide; TTA chr11 5173111 5173132 5173116 5173111 -
ttacctgtctttatcatgatta

SEQ ID NO: 152598 - DNA, 22 bp, Artificial Sequence
  Synthetic oligonucleotide; TTA chr11 5173108 5173129 5173113 5173108 -
cctgtctttatcatgattactg

SEQ ID NO: 152599 - DNA, 22 bp, Artificial Sequence
  Synthetic oligonucleotide; CTG chr11 5173104 5173125 5173109 5173104 -
tctttatcatgattactgtctc

SEQ ID NO: 152600 - DNA, 22 bp, Artificial Sequence
  Synthetic oligonucleotide; CTT chr11 5173100 5173121 5173105 5173100 -
tatcatgattactgtctctatc

SEQ ID NO: 152601 - DNA, 22 bp, Artificial Sequence
  Synthetic oligonucleotide; TTT chr11 5173099 5173120 5173104 5173099 -
atcatgattactgtctctatcc

SEQ ID NO: 152602 - DNA, 22 bp, Artificial Sequence
  Synthetic oligonucleotide; TTA chr11 5173098 5173119 5173103 5173098 -
tcatgattactgtctctatccc

SEQ ID NO: 152603 - DNA, 22 bp, Artificial Sequence
  Synthetic oligonucleotide; TTA chr11 5173089 5173110 5173094 5173089 -
ctgtctctatccccctttatta

SEQ ID NO: 152604 - DNA, 22 bp, Artificial Sequence
  Synthetic oligonucleotide; CTG chr11 5173086 5173107 5173091 5173086 -
tctctatccccctttattacta

SEQ ID NO: 152605 - DNA, 22 bp, Artificial Sequence
  Synthetic oligonucleotide; CTC chr11 5173082 5173103 5173087 5173082 -
tatccccctttattactatcta

SEQ ID NO: 152606 - DNA, 22 bp, Artificial Sequence
  Synthetic oligonucleotide; CTA chr11 5173080 5173101 5173085 5173080 -
tccccctttattactatctaca

SEQ ID NO: 152607 - DNA, 22 bp, Artificial Sequence
  Synthetic oligonucleotide; CTT chr11 5173072 5173093 5173077 5173072 -
tattactatctacaccactatc

SEQ ID NO: 152608 - DNA, 22 bp, Artificial Sequence
  Synthetic oligonucleotide; TTT chr11 5173071 5173092 5173076 5173071 -
attactatctacaccactatcc

SEQ ID NO: 152609 - DNA, 22 bp, Artificial Sequence
  Synthetic oligonucleotide; TTA chr11 5173070 5173091 5173075 5173070 -
ttactatctacaccactatccc

SEQ ID NO: 152610 - DNA, 22 bp, Artificial Sequence
  Synthetic oligonucleotide; TTA chr11 5173067 5173088 5173072 5173067 -
ctatctacaccactatccctat

SEQ ID NO: 152611 - DNA, 22 bp, Artificial Sequence
  Synthetic oligonucleotide; CTA chr11 5173064 5173085 5173069 5173064 -
tctacaccactatccctatctg

SEQ ID NO: 152612 - DNA, 22 bp, Artificial Sequence
  Synthetic oligonucleotide; CTA chr11 5173060 5173081 5173065 5173060 -
caccactatccctatctgcagt

SEQ ID NO: 152613 - DNA, 22 bp, Artificial Sequence
  Synthetic oligonucleotide; CTA chr11 5173052 5173073 5173057 5173052 -
tccctatctgcagttccgtctc

SEQ ID NO: 152614 - DNA, 22 bp, Artificial Sequence
  Synthetic oligonucleotide; CTA chr11 5173046 5173067 5173051 5173046 -
tctgcagttccgtctctagctc

SEQ ID NO: 152615 - DNA, 22 bp, Artificial Sequence
  Synthetic oligonucleotide; CTG chr11 5173042 5173063 5173047 5173042 -
cagttccgtctctagctctaga

SEQ ID NO: 152616 - DNA, 22 bp, Artificial Sequence
  Synthetic oligonucleotide; TTC chr11 5173036 5173057 5173041 5173036 -
cgtctctagctctagatccaac

SEQ ID NO: 152617 - DNA, 22 bp, Artificial Sequence
  Synthetic oligonucleotide; CTC chr11 5173030 5173051 5173035 5173030 -
tagctctagatccaactctgca

SEQ ID NO: 152618 - DNA, 22 bp, Artificial Sequence
  Synthetic oligonucleotide; CTA chr11 5173028 5173049 5173033 5173028 -
gctctagatccaactctgcatc

SEQ ID NO: 152619 - DNA, 22 bp, Artificial Sequence
  Synthetic oligonucleotide; CTC chr11 5173024 5173045 5173029 5173024 -
tagatccaactctgcatctctc

SEQ ID NO: 152620 - DNA, 22 bp, Artificial Sequence
  Synthetic oligonucleotide; CTA chr11 5173022 5173043 5173027 5173022 -
gatccaactctgcatctctcca

SEQ ID NO: 152621 - DNA, 22 bp, Artificial Sequence
  Synthetic oligonucleotide; CTC chr11 5173012 5173033 5173017 5173012 -
tgcatctctccactttttactt

SEQ ID NO: 152622 - DNA, 22 bp, Artificial Sequence
  Synthetic oligonucleotide; CTG chr11 5173010 5173031 5173015 5173010 -
catctctccactttttactttg

SEQ ID NO: 152623 - DNA, 22 bp, Artificial Sequence
  Synthetic oligonucleotide; CTC chr11 5173004 5173025 5173009 5173004 -
tccactttttactttgtatatg

SEQ ID NO: 152624 - DNA, 22 bp, Artificial Sequence
  Synthetic oligonucleotide; CTC chr11 5173002 5173023 5173007 5173002 -
cactttttactttgtatatgga

SEQ ID NO: 152625 - DNA, 22 bp, Artificial Sequence
  Synthetic oligonucleotide; CTT chr11 5172997 5173018 5173002 5172997 -
tttactttgtatatggaatagc

SEQ ID NO: 152626 - DNA, 22 bp, Artificial Sequence
  Synthetic oligonucleotide; TTT chr11 5172996 5173017 5173001 5172996 -
ttactttgtatatggaatagct

SEQ ID NO: 152627 - DNA, 22 bp, Artificial Sequence
  Synthetic oligonucleotide; TTT chr11 5172995 5173016 5173000 5172995 -
tactttgtatatggaatagctt

SEQ ID NO: 152628 - DNA, 22 bp, Artificial Sequence
  Synthetic oligonucleotide; TTT chr11 5172994 5173015 5172999 5172994 -
actttgtatatggaatagcttc

SEQ ID NO: 152629 - DNA, 22 bp, Artificial Sequence
  Synthetic oligonucleotide; TTA chr11 5172993 5173014 5172998 5172993 -
ctttgtatatggaatagcttct

SEQ ID NO: 152630 - DNA, 22 bp, Artificial Sequence
  Synthetic oligonucleotide; CTT chr11 5172990 5173011 5172995 5172990 -
tgtatatggaatagcttcttaa

SEQ ID NO: 152631 - DNA, 22 bp, Artificial Sequence
  Synthetic oligonucleotide; TTT chr11 5172989 5173010 5172994 5172989 -
gtatatggaatagcttcttaag

SEQ ID NO: 152632 - DNA, 22 bp, Artificial Sequence
  Synthetic oligonucleotide; TTG chr11 5172988 5173009 5172993 5172988 -
tatatggaatagcttcttaaga

SEQ ID NO: 152633 - DNA, 22 bp, Artificial Sequence
  Synthetic oligonucleotide; CTT chr11 5172973 5172994 5172978 5172973 -
cttaagaatgaaaagtatataa

SEQ ID NO: 152634 - DNA, 22 bp, Artificial Sequence
  Synthetic oligonucleotide; TTC chr11 5172972 5172993 5172977 5172972 -
ttaagaatgaaaagtatataat

SEQ ID NO: 152635 - DNA, 22 bp, Artificial Sequence
  Synthetic oligonucleotide; CTT chr11 5172970 5172991 5172975 5172970 -
aagaatgaaaagtatataatat

SEQ ID NO: 152636 - DNA, 22 bp, Artificial Sequence
  Synthetic oligonucleotide; TTA chr11 5172969 5172990 5172974 5172969 -
agaatgaaaagtatataatatt

SEQ ID NO: 152637 - DNA, 22 bp, Artificial Sequence
  Synthetic oligonucleotide; TTA chr11 5172946 5172967 5172951 5172946 -
ataaaatgtatgttaacctgac

SEQ ID NO: 152638 - DNA, 22 bp, Artificial Sequence
  Synthetic oligonucleotide; TTA chr11 5172931 5172952 5172936 5172931 -
acctgactacataaaagttttg

SEQ ID NO: 152639 - DNA, 22 bp, Artificial Sequence
  Synthetic oligonucleotide; CTG chr11 5172926 5172947 5172931 5172926 -
actacataaaagttttgtaaat

SEQ ID NO: 152640 - DNA, 22 bp, Artificial Sequence
  Synthetic oligonucleotide; CTA chr11 5172922 5172943 5172927 5172922 -
cataaaagttttgtaaatgatt

SEQ ID NO: 152641 - DNA, 22 bp, Artificial Sequence
  Synthetic oligonucleotide; TTT chr11 5172911 5172932 5172916 5172911 -
tgtaaatgattgtgtatgaaaa

SEQ ID NO: 152642 - DNA, 22 bp, Artificial Sequence
  Synthetic oligonucleotide; TTT chr11 5172910 5172931 5172915 5172910 -
gtaaatgattgtgtatgaaaaa

SEQ ID NO: 152643 - DNA, 22 bp, Artificial Sequence
  Synthetic oligonucleotide; TTG chr11 5172909 5172930 5172914 5172909 -
taaatgattgtgtatgaaaaaa

SEQ ID NO: 152644 - DNA, 22 bp, Artificial Sequence
  Synthetic oligonucleotide; TTG chr11 5172899 5172920 5172904 5172899 -
tgtatgaaaaaattaatgaaga

SEQ ID NO: 152645 - DNA, 22 bp, Artificial Sequence
  Synthetic oligonucleotide; TTA chr11 5172884 5172905 5172889 5172884 -
atgaagataagatgcgggggaa

SEQ ID NO: 152646 - DNA, 22 bp, Artificial Sequence
  Synthetic oligonucleotide; CTT chr11 5172834 5172855 5172839 5172834 -
atatttaaattataattaatga

SEQ ID NO: 152647 - DNA, 22 bp, Artificial Sequence
  Synthetic oligonucleotide; TTA chr11 5172833 5172854 5172838 5172833 -
tatttaaattataattaatgat

SEQ ID NO: 152648 - DNA, 22 bp, Artificial Sequence
  Synthetic oligonucleotide; TTT chr11 5172828 5172849 5172833 5172828 -
aaattataattaatgatattgt

SEQ ID NO: 152649 - DNA, 22 bp, Artificial Sequence
  Synthetic oligonucleotide; TTA chr11 5172827 5172848 5172832 5172827 -
aattataattaatgatattgtg

SEQ ID NO: 152650 - DNA, 22 bp, Artificial Sequence
  Synthetic oligonucleotide; TTA chr11 5172822 5172843 5172827 5172822 -
taattaatgatattgtgtaact

SEQ ID NO: 152651 - DNA, 22 bp, Artificial Sequence
  Synthetic oligonucleotide; TTA chr11 5172816 5172837 5172821 5172816 -
atgatattgtgtaactatttta

SEQ ID NO: 152652 - DNA, 22 bp, Artificial Sequence
  Synthetic oligonucleotide; TTG chr11 5172807 5172828 5172812 5172807 -
tgtaactattttatgtttattt

SEQ ID NO: 152653 - DNA, 22 bp, Artificial Sequence
  Synthetic oligonucleotide; CTA chr11 5172799 5172820 5172804 5172799 -
ttttatgtttatttgggttttg

SEQ ID NO: 152654 - DNA, 22 bp, Artificial Sequence
  Synthetic oligonucleotide; TTT chr11 5172796 5172817 5172801 5172796 -
tatgtttatttgggttttgcat

SEQ ID NO: 152655 - DNA, 22 bp, Artificial Sequence
  Synthetic oligonucleotide; TTT chr11 5172795 5172816 5172800 5172795 -
atgtttatttgggttttgcatt

SEQ ID NO: 152656 - DNA, 22 bp, Artificial Sequence
  Synthetic oligonucleotide; TTA chr11 5172794 5172815 5172799 5172794 -
tgtttatttgggttttgcattg

SEQ ID NO: 152657 - DNA, 22 bp, Artificial Sequence
  Synthetic oligonucleotide; TTT chr11 5172789 5172810 5172794 5172789 -
atttgggttttgcattgacatt

SEQ ID NO: 152658 - DNA, 22 bp, Artificial Sequence
  Synthetic oligonucleotide; TTA chr11 5172788 5172809 5172793 5172788 -
tttgggttttgcattgacattg

SEQ ID NO: 152659 - DNA, 22 bp, Artificial Sequence
  Synthetic oligonucleotide; TTT chr11 5172785 5172806 5172790 5172785 -
gggttttgcattgacattggca

SEQ ID NO: 152660 - DNA, 22 bp, Artificial Sequence
  Synthetic oligonucleotide; TTG chr11 5172784 5172805 5172789 5172784 -
ggttttgcattgacattggcat

SEQ ID NO: 152661 - DNA, 22 bp, Artificial Sequence
  Synthetic oligonucleotide; TTT chr11 5172779 5172800 5172784 5172779 -
tgcattgacattggcatgttct

SEQ ID NO: 152662 - DNA, 22 bp, Artificial Sequence
  Synthetic oligonucleotide; TTT chr11 5172778 5172799 5172783 5172778 -
gcattgacattggcatgttctt

SEQ ID NO: 152663 - DNA, 22 bp, Artificial Sequence
  Synthetic oligonucleotide; TTG chr11 5172777 5172798 5172782 5172777 -
cattgacattggcatgttctta

SEQ ID NO: 152664 - DNA, 22 bp, Artificial Sequence
  Synthetic oligonucleotide; TTG chr11 5172772 5172793 5172777 5172772 -
acattggcatgttcttatgtat

SEQ ID NO: 152665 - DNA, 22 bp, Artificial Sequence
  Synthetic oligonucleotide; TTG chr11 5172766 5172787 5172771 5172766 -
gcatgttcttatgtatactctc

SEQ ID NO: 152666 - DNA, 22 bp, Artificial Sequence
  Synthetic oligonucleotide; TTC chr11 5172758 5172779 5172763 5172758 -
ttatgtatactctctccagcat

SEQ ID NO: 152667 - DNA, 22 bp, Artificial Sequence
  Synthetic oligonucleotide; CTT chr11 5172756 5172777 5172761 5172756 -
atgtatactctctccagcatgc

SEQ ID NO: 152668 - DNA, 22 bp, Artificial Sequence
  Synthetic oligonucleotide; TTA chr11 5172755 5172776 5172760 5172755 -
tgtatactctctccagcatgct

SEQ ID NO: 152669 - DNA, 22 bp, Artificial Sequence
  Synthetic oligonucleotide; CTC chr11 5172746 5172767 5172751 5172746 -
tctccagcatgcttctcaggaa

SEQ ID NO: 152670 - DNA, 22 bp, Artificial Sequence
  Synthetic oligonucleotide; CTC chr11 5172744 5172765 5172749 5172744 -
tccagcatgcttctcaggaact

SEQ ID NO: 152671 - DNA, 22 bp, Artificial Sequence
  Synthetic oligonucleotide; CTC chr11 5172742 5172763 5172747 5172742 -
cagcatgcttctcaggaactat

SEQ ID NO: 152672 - DNA, 22 bp, Artificial Sequence
  Synthetic oligonucleotide; CTT chr11 5172732 5172753 5172737 5172732 -
ctcaggaactattccccccttt

SEQ ID NO: 152673 - DNA, 22 bp, Artificial Sequence
  Synthetic oligonucleotide; TTC chr11 5172731 5172752 5172736 5172731 -
tcaggaactattcccccctttc

SEQ ID NO: 152674 - DNA, 22 bp, Artificial Sequence
  Synthetic oligonucleotide; CTC chr11 5172729 5172750 5172734 5172729 -
aggaactattcccccctttctc

SEQ ID NO: 152675 - DNA, 22 bp, Artificial Sequence
  Synthetic oligonucleotide; CTA chr11 5172721 5172742 5172726 5172721 -
ttcccccctttctctctaatac

SEQ ID NO: 152676 - DNA, 22 bp, Artificial Sequence
  Synthetic oligonucleotide; TTC chr11 5172718 5172739 5172723 5172718 -
ccccctttctctctaatacacc

SEQ ID NO: 152677 - DNA, 22 bp, Artificial Sequence
  Synthetic oligonucleotide; CTT chr11 5172711 5172732 5172716 5172711 -
tctctctaatacacccgaagtt

SEQ ID NO: 152678 - DNA, 22 bp, Artificial Sequence
  Synthetic oligonucleotide; TTT chr11 5172710 5172731 5172715 5172710 -
ctctctaatacacccgaagttt

SEQ ID NO: 152679 - DNA, 22 bp, Artificial Sequence
  Synthetic oligonucleotide; TTC chr11 5172709 5172730 5172714 5172709 -
tctctaatacacccgaagtttc

SEQ ID NO: 152680 - DNA, 22 bp, Artificial Sequence
  Synthetic oligonucleotide; CTC chr11 5172707 5172728 5172712 5172707 -
tctaatacacccgaagtttctg

SEQ ID NO: 152681 - DNA, 22 bp, Artificial Sequence
  Synthetic oligonucleotide; CTC chr11 5172705 5172726 5172710 5172705 -
taatacacccgaagtttctggg

SEQ ID NO: 152682 - DNA, 22 bp, Artificial Sequence
  Synthetic oligonucleotide; CTA chr11 5172703 5172724 5172708 5172703 -
atacacccgaagtttctgggaa

SEQ ID NO: 152683 - DNA, 22 bp, Artificial Sequence
  Synthetic oligonucleotide; TTT chr11 5172688 5172709 5172693 5172688 -
ctgggaataattattcttggtt

SEQ ID NO: 152684 - DNA, 22 bp, Artificial Sequence
  Synthetic oligonucleotide; TTC chr11 5172687 5172708 5172692 5172687 -
tgggaataattattcttggtta

SEQ ID NO: 152685 - DNA, 22 bp, Artificial Sequence
  Synthetic oligonucleotide; CTG chr11 5172685 5172706 5172690 5172685 -
ggaataattattcttggttaat

SEQ ID NO: 152686 - DNA, 22 bp, Artificial Sequence
  Synthetic oligonucleotide; TTA chr11 5172675 5172696 5172680 5172675 -
ttcttggttaattgcttcttga

SEQ ID NO: 152687 - DNA, 22 bp, Artificial Sequence
  Synthetic oligonucleotide; TTC chr11 5172672 5172693 5172677 5172672 -
ttggttaattgcttcttgaggg

SEQ ID NO: 152688 - DNA, 22 bp, Artificial Sequence
  Synthetic oligonucleotide; CTT chr11 5172670 5172691 5172675 5172670 -
ggttaattgcttcttgagggat

SEQ ID NO: 152689 - DNA, 22 bp, Artificial Sequence
  Synthetic oligonucleotide; TTG chr11 5172669 5172690 5172674 5172669 -
gttaattgcttcttgagggata

SEQ ID NO: 152690 - DNA, 22 bp, Artificial Sequence
  Synthetic oligonucleotide; TTA chr11 5172665 5172686 5172670 5172665 -
attgcttcttgagggatactga

SEQ ID NO: 152691 - DNA, 22 bp, Artificial Sequence
  Synthetic oligonucleotide; TTG chr11 5172661 5172682 5172666 5172661 -
cttcttgagggatactgaatca

SEQ ID NO: 152692 - DNA, 22 bp, Artificial Sequence
  Synthetic oligonucleotide; CTT chr11 5172658 5172679 5172663 5172658 -
cttgagggatactgaatcattc

SEQ ID NO: 152693 - DNA, 22 bp, Artificial Sequence
  Synthetic oligonucleotide; TTC chr11 5172657 5172678 5172662 5172657 -
ttgagggatactgaatcattct

SEQ ID NO: 152694 - DNA, 22 bp, Artificial Sequence
  Synthetic oligonucleotide; CTT chr11 5172655 5172676 5172660 5172655 -
gagggatactgaatcattctgt

SEQ ID NO: 152695 - DNA, 22 bp, Artificial Sequence
  Synthetic oligonucleotide; TTG chr11 5172654 5172675 5172659 5172654 -
agggatactgaatcattctgtc

SEQ ID NO: 152696 - DNA, 22 bp, Artificial Sequence
  Synthetic oligonucleotide; CTG chr11 5172644 5172665 5172649 5172644 -
aatcattctgtctctatgtcct

SEQ ID NO: 152697 - DNA, 22 bp, Artificial Sequence
  Synthetic oligonucleotide; TTC chr11 5172636 5172657 5172641 5172636 -
tgtctctatgtcctccagtcaa

SEQ ID NO: 152698 - DNA, 22 bp, Artificial Sequence
  Synthetic oligonucleotide; CTG chr11 5172634 5172655 5172639 5172634 -
tctctatgtcctccagtcaact

SEQ ID NO: 152699 - DNA, 22 bp, Artificial Sequence
  Synthetic oligonucleotide; CTC chr11 5172630 5172651 5172635 5172630 -
tatgtcctccagtcaactaagc

SEQ ID NO: 152700 - DNA, 22 bp, Artificial Sequence
  Synthetic oligonucleotide; CTA chr11 5172628 5172649 5172633 5172628 -
tgtcctccagtcaactaagcac

SEQ ID NO: 152701 - DNA, 22 bp, Artificial Sequence
  Synthetic oligonucleotide; CTC chr11 5172621 5172642 5172626 5172621 -
cagtcaactaagcacatataca

SEQ ID NO: 152702 - DNA, 22 bp, Artificial Sequence
  Synthetic oligonucleotide; CTA chr11 5172611 5172632 5172616 5172611 -
agcacatatacagggaggtagt

SEQ ID NO: 152703 - DNA, 22 bp, Artificial Sequence
  Synthetic oligonucleotide; CTA chr11 5172584 5172605 5172589 5172584 -
tgtccacagcccagttgaaagt

SEQ ID NO: 152704 - DNA, 22 bp, Artificial Sequence
  Synthetic oligonucleotide; TTG chr11 5172567 5172588 5172572 5172567 -
aaagtaaacagtaacaaatagt

SEQ ID NO: 152705 - DNA, 22 bp, Artificial Sequence
  Synthetic oligonucleotide; TTG chr11 5172533 5172554 5172538 5172533 -
atgtggtagctctcagttccac

SEQ ID NO: 152706 - DNA, 22 bp, Artificial Sequence
  Synthetic oligonucleotide; CTC chr11 5172521 5172542 5172526 5172521 -
tcagttccacctaggtaagtat

SEQ ID NO: 152707 - DNA, 22 bp, Artificial Sequence
  Synthetic oligonucleotide; CTC chr11 5172519 5172540 5172524 5172519 -
agttccacctaggtaagtatct

SEQ ID NO: 152708 - DNA, 22 bp, Artificial Sequence
  Synthetic oligonucleotide; TTC chr11 5172514 5172535 5172519 5172514 -
cacctaggtaagtatctgaggt

SEQ ID NO: 152709 - DNA, 22 bp, Artificial Sequence
  Synthetic oligonucleotide; CTA chr11 5172508 5172529 5172513 5172508 -
ggtaagtatctgaggtctagga

SEQ ID NO: 152710 - DNA, 22 bp, Artificial Sequence
  Synthetic oligonucleotide; CTG chr11 5172496 5172517 5172501 5172496 -
aggtctaggatcaactatagtt

SEQ ID NO: 152711 - DNA, 22 bp, Artificial Sequence
  Synthetic oligonucleotide; CTA chr11 5172489 5172510 5172494 5172489 -
ggatcaactatagttatgccta

SEQ ID NO: 152712 - DNA, 22 bp, Artificial Sequence
  Synthetic oligonucleotide; CTA chr11 5172479 5172500 5172484 5172479 -
tagttatgcctaatggtataat

SEQ ID NO: 152713 - DNA, 22 bp, Artificial Sequence
  Synthetic oligonucleotide; TTA chr11 5172473 5172494 5172478 5172473 -
tgcctaatggtataatgtgctg

SEQ ID NO: 152714 - DNA, 22 bp, Artificial Sequence
  Synthetic oligonucleotide; CTA chr11 5172467 5172488 5172472 5172467 -
atggtataatgtgctggcttgc

SEQ ID NO: 152715 - DNA, 22 bp, Artificial Sequence
  Synthetic oligonucleotide; CTG chr11 5172451 5172472 5172456 5172451 -
gcttgcaccagcttaggaaagc

SEQ ID NO: 152716 - DNA, 22 bp, Artificial Sequence
  Synthetic oligonucleotide; CTT chr11 5172447 5172468 5172452 5172447 -
gcaccagcttaggaaagctgat

SEQ ID NO: 152717 - DNA, 22 bp, Artificial Sequence
  Synthetic oligonucleotide; TTG chr11 5172446 5172467 5172451 5172446 -
caccagcttaggaaagctgatt

SEQ ID NO: 152718 - DNA, 22 bp, Artificial Sequence
  Synthetic oligonucleotide; CTT chr11 5172437 5172458 5172442 5172437 -
aggaaagctgattatgctcatc

SEQ ID NO: 152719 - DNA, 22 bp, Artificial Sequence
  Synthetic oligonucleotide; TTA chr11 5172436 5172457 5172441 5172436 -
ggaaagctgattatgctcatct

SEQ ID NO: 152720 - DNA, 22 bp, Artificial Sequence
  Synthetic oligonucleotide; CTG chr11 5172427 5172448 5172432 5172427 -
attatgctcatctcagctctgc

SEQ ID NO: 152721 - DNA, 22 bp, Artificial Sequence
  Synthetic oligonucleotide; TTA chr11 5172423 5172444 5172428 5172423 -
tgctcatctcagctctgcattt

SEQ ID NO: 152722 - DNA, 22 bp, Artificial Sequence
  Synthetic oligonucleotide; CTC chr11 5172418 5172439 5172423 5172418 -
atctcagctctgcatttaatag

SEQ ID NO: 152723 - DNA, 22 bp, Artificial Sequence
  Synthetic oligonucleotide; CTC chr11 5172413 5172434 5172418 5172413 -
agctctgcatttaatagcatct

SEQ ID NO: 152724 - DNA, 22 bp, Artificial Sequence
  Synthetic oligonucleotide; CTC chr11 5172408 5172429 5172413 5172408 -
tgcatttaatagcatctctttg

SEQ ID NO: 152725 - DNA, 22 bp, Artificial Sequence
  Synthetic oligonucleotide; CTG chr11 5172406 5172427 5172411 5172406 -
catttaatagcatctctttggt

SEQ ID NO: 152726 - DNA, 22 bp, Artificial Sequence
  Synthetic oligonucleotide; TTT chr11 5172401 5172422 5172406 5172401 -
aatagcatctctttggtagtct

SEQ ID NO: 152727 - DNA, 22 bp, Artificial Sequence
  Synthetic oligonucleotide; TTA chr11 5172400 5172421 5172405 5172400 -
atagcatctctttggtagtctg

SEQ ID NO: 152728 - DNA, 22 bp, Artificial Sequence
  Synthetic oligonucleotide; CTC chr11 5172390 5172411 5172395 5172390 -
tttggtagtctgaaattgatca

SEQ ID NO: 152729 - DNA, 22 bp, Artificial Sequence
  Synthetic oligonucleotide; CTT chr11 5172388 5172409 5172393 5172388 -
tggtagtctgaaattgatcatg

SEQ ID NO: 152730 - DNA, 22 bp, Artificial Sequence
  Synthetic oligonucleotide; TTT chr11 5172387 5172408 5172392 5172387 -
ggtagtctgaaattgatcatgg

SEQ ID NO: 152731 - DNA, 22 bp, Artificial Sequence
  Synthetic oligonucleotide; TTG chr11 5172386 5172407 5172391 5172386 -
gtagtctgaaattgatcatggt

SEQ ID NO: 152732 - DNA, 22 bp, Artificial Sequence
  Synthetic oligonucleotide; CTG chr11 5172378 5172399 5172383 5172378 -
aaattgatcatggtaggagtca

SEQ ID NO: 152733 - DNA, 22 bp, Artificial Sequence
  Synthetic oligonucleotide; TTG chr11 5172372 5172393 5172377 5172372 -
atcatggtaggagtcattaaaa

SEQ ID NO: 152734 - DNA, 22 bp, Artificial Sequence
  Synthetic oligonucleotide; TTA chr11 5172353 5172374 5172358 5172353 -
aaacacaaaaaatcggtaactg

SEQ ID NO: 152735 - DNA, 22 bp, Artificial Sequence
  Synthetic oligonucleotide; CTG chr11 5172331 5172352 5172336 5172331 -
gtaaaaatcagggcatttttat

SEQ ID NO: 152736 - DNA, 22 bp, Artificial Sequence
  Synthetic oligonucleotide; TTT chr11 5172313 5172334 5172318 5172313 -
ttatttggaaatatttattact

SEQ ID NO: 152737 - DNA, 22 bp, Artificial Sequence
  Synthetic oligonucleotide; TTT chr11 5172312 5172333 5172317 5172312 -
tatttggaaatatttattacta

SEQ ID NO: 152738 - DNA, 22 bp, Artificial Sequence
  Synthetic oligonucleotide; TTT chr11 5172311 5172332 5172316 5172311 -
atttggaaatatttattactat

SEQ ID NO: 152739 - DNA, 22 bp, Artificial Sequence
  Synthetic oligonucleotide; TTA chr11 5172310 5172331 5172315 5172310 -
tttggaaatatttattactatc

SEQ ID NO: 152740 - DNA, 22 bp, Artificial Sequence
  Synthetic oligonucleotide; TTT chr11 5172307 5172328 5172312 5172307 -
ggaaatatttattactatccca

SEQ ID NO: 152741 - DNA, 22 bp, Artificial Sequence
  Synthetic oligonucleotide; TTG chr11 5172306 5172327 5172311 5172306 -
gaaatatttattactatcccac

SEQ ID NO: 152742 - DNA, 22 bp, Artificial Sequence
  Synthetic oligonucleotide; TTT chr11 5172297 5172318 5172302 5172297 -
attactatcccactgattatgc

SEQ ID NO: 152743 - DNA, 22 bp, Artificial Sequence
  Synthetic oligonucleotide; TTA chr11 5172296 5172317 5172301 5172296 -
ttactatcccactgattatgcc

SEQ ID NO: 152744 - DNA, 22 bp, Artificial Sequence
  Synthetic oligonucleotide; TTA chr11 5172293 5172314 5172298 5172293 -
ctatcccactgattatgcctaa

SEQ ID NO: 152745 - DNA, 22 bp, Artificial Sequence
  Synthetic oligonucleotide; CTA chr11 5172290 5172311 5172295 5172290 -
tcccactgattatgcctaacga

SEQ ID NO: 152746 - DNA, 22 bp, Artificial Sequence
  Synthetic oligonucleotide; CTG chr11 5172282 5172303 5172287 5172282 -
attatgcctaacgaagagccct

SEQ ID NO: 152747 - DNA, 22 bp, Artificial Sequence
  Synthetic oligonucleotide; TTA chr11 5172278 5172299 5172283 5172278 -
tgcctaacgaagagccctggcc

SEQ ID NO: 152748 - DNA, 22 bp, Artificial Sequence
  Synthetic oligonucleotide; CTA chr11 5172272 5172293 5172277 5172272 -
acgaagagccctggcccaacac

SEQ ID NO: 152749 - DNA, 22 bp, Artificial Sequence
  Synthetic oligonucleotide; CTG chr11 5172259 5172280 5172264 5172259 -
gcccaacacgggaagaagagtt

SEQ ID NO: 152750 - DNA, 22 bp, Artificial Sequence
  Synthetic oligonucleotide; TTC chr11 5172236 5172257 5172241 5172236 -
agccttggtcacattcttattt

SEQ ID NO: 152751 - DNA, 22 bp, Artificial Sequence
  Synthetic oligonucleotide; CTT chr11 5172230 5172251 5172235 5172230 -
ggtcacattcttatttctgagc

SEQ ID NO: 152752 - DNA, 22 bp, Artificial Sequence
  Synthetic oligonucleotide; TTG chr11 5172229 5172250 5172234 5172229 -
gtcacattcttatttctgagcc

SEQ ID NO: 152753 - DNA, 22 bp, Artificial Sequence
  Synthetic oligonucleotide; TTC chr11 5172220 5172241 5172225 5172220 -
ttatttctgagccccatcctga

SEQ ID NO: 152754 - DNA, 22 bp, Artificial Sequence
  Synthetic oligonucleotide; CTT chr11 5172218 5172239 5172223 5172218 -
atttctgagccccatcctgaat

SEQ ID NO: 152755 - DNA, 22 bp, Artificial Sequence
  Synthetic oligonucleotide; TTA chr11 5172217 5172238 5172222 5172217 -
tttctgagccccatcctgaatt

SEQ ID NO: 152756 - DNA, 22 bp, Artificial Sequence
  Synthetic oligonucleotide; TTT chr11 5172214 5172235 5172219 5172214 -
ctgagccccatcctgaattcca

SEQ ID NO: 152757 - DNA, 22 bp, Artificial Sequence
  Synthetic oligonucleotide; TTC chr11 5172213 5172234 5172218 5172213 -
tgagccccatcctgaattccat

SEQ ID NO: 152758 - DNA, 22 bp, Artificial Sequence
  Synthetic oligonucleotide; CTG chr11 5172211 5172232 5172216 5172211 -
agccccatcctgaattccattt

SEQ ID NO: 152759 - DNA, 22 bp, Artificial Sequence
  Synthetic oligonucleotide; CTG chr11 5172199 5172220 5172204 5172199 -
aattccatttctggcctccaac

SEQ ID NO: 152760 - DNA, 22 bp, Artificial Sequence
  Synthetic oligonucleotide; TTC chr11 5172194 5172215 5172199 5172194 -
catttctggcctccaacgttaa

SEQ ID NO: 152761 - DNA, 22 bp, Artificial Sequence
  Synthetic oligonucleotide; TTT chr11 5172189 5172210 5172194 5172189 -
ctggcctccaacgttaatacct

SEQ ID NO: 152762 - DNA, 22 bp, Artificial Sequence
  Synthetic oligonucleotide; TTC chr11 5172188 5172209 5172193 5172188 -
tggcctccaacgttaataccta

SEQ ID NO: 152763 - DNA, 22 bp, Artificial Sequence
  Synthetic oligonucleotide; CTG chr11 5172186 5172207 5172191 5172186 -
gcctccaacgttaatacctaag

SEQ ID NO: 152764 - DNA, 22 bp, Artificial Sequence
  Synthetic oligonucleotide; CTC chr11 5172181 5172202 5172186 5172181 -
caacgttaatacctaaggctct

SEQ ID NO: 152765 - DNA, 22 bp, Artificial Sequence
  Synthetic oligonucleotide; TTA chr11 5172173 5172194 5172178 5172173 -
atacctaaggctctgctgcaga

SEQ ID NO: 152766 - DNA, 22 bp, Artificial Sequence
  Synthetic oligonucleotide; CTA chr11 5172166 5172187 5172171 5172166 -
aggctctgctgcagataagtgg

SEQ ID NO: 152767 - DNA, 22 bp, Artificial Sequence
  Synthetic oligonucleotide; CTC chr11 5172160 5172181 5172165 5172160 -
tgctgcagataagtggaacttt

SEQ ID NO: 152768 - DNA, 22 bp, Artificial Sequence
  Synthetic oligonucleotide; CTG chr11 5172158 5172179 5172163 5172158 -
ctgcagataagtggaactttag

SEQ ID NO: 152769 - DNA, 22 bp, Artificial Sequence
  Synthetic oligonucleotide; CTG chr11 5172155 5172176 5172160 5172155 -
cagataagtggaactttagtgt

SEQ ID NO: 152770 - DNA, 22 bp, Artificial Sequence
  Synthetic oligonucleotide; CTT chr11 5172139 5172160 5172144 5172139 -
tagtgttaataaacttgttccc

SEQ ID NO: 152771 - DNA, 22 bp, Artificial Sequence
  Synthetic oligonucleotide; TTT chr11 5172138 5172159 5172143 5172138 -
agtgttaataaacttgttccca

SEQ ID NO: 152772 - DNA, 22 bp, Artificial Sequence
  Synthetic oligonucleotide; TTA chr11 5172137 5172158 5172142 5172137 -
gtgttaataaacttgttcccag

SEQ ID NO: 152773 - DNA, 22 bp, Artificial Sequence
  Synthetic oligonucleotide; TTA chr11 5172131 5172152 5172136 5172131 -
ataaacttgttcccagataaat

SEQ ID NO: 152774 - DNA, 22 bp, Artificial Sequence
  Synthetic oligonucleotide; CTT chr11 5172123 5172144 5172128 5172123 -
gttcccagataaatatctctaa

SEQ ID NO: 152775 - DNA, 22 bp, Artificial Sequence
  Synthetic oligonucleotide; TTG chr11 5172122 5172143 5172127 5172122 -
ttcccagataaatatctctaag

SEQ ID NO: 152776 - DNA, 22 bp, Artificial Sequence
  Synthetic oligonucleotide; TTC chr11 5172119 5172140 5172124 5172119 -
ccagataaatatctctaagcct

SEQ ID NO: 152777 - DNA, 22 bp, Artificial Sequence
  Synthetic oligonucleotide; CTC chr11 5172104 5172125 5172109 5172104 -
taagcctgtaccctagccccac

SEQ ID NO: 152778 - DNA, 22 bp, Artificial Sequence
  Synthetic oligonucleotide; CTA chr11 5172102 5172123 5172107 5172102 -
agcctgtaccctagccccacca

SEQ ID NO: 152779 - DNA, 22 bp, Artificial Sequence
  Synthetic oligonucleotide; CTG chr11 5172096 5172117 5172101 5172096 -
taccctagccccaccatcacat

SEQ ID NO: 152780 - DNA, 22 bp, Artificial Sequence
  Synthetic oligonucleotide; CTA chr11 5172089 5172110 5172094 5172089 -
gccccaccatcacatgtgactt

SEQ ID NO: 152781 - DNA, 22 bp, Artificial Sequence
  Synthetic oligonucleotide; CTT chr11 5172067 5172088 5172072 5172067 -
gtgagatactgatgcttctgat

SEQ ID NO: 152782 - DNA, 22 bp, Artificial Sequence
  Synthetic oligonucleotide; TTG chr11 5172066 5172087 5172071 5172066 -
tgagatactgatgcttctgatc

SEQ ID NO: 152783 - DNA, 22 bp, Artificial Sequence
  Synthetic oligonucleotide; CTG chr11 5172056 5172077 5172061 5172056 -
atgcttctgatcttgctccctg

SEQ ID NO: 152784 - DNA, 22 bp, Artificial Sequence
  Synthetic oligonucleotide; CTT chr11 5172050 5172071 5172055 5172050 -
ctgatcttgctccctgacccgg

SEQ ID NO: 152785 - DNA, 22 bp, Artificial Sequence
  Synthetic oligonucleotide; TTC chr11 5172049 5172070 5172054 5172049 -
tgatcttgctccctgacccggt

SEQ ID NO: 152786 - DNA, 22 bp, Artificial Sequence
  Synthetic oligonucleotide; CTG chr11 5172047 5172068 5172052 5172047 -
atcttgctccctgacccggttc

SEQ ID NO: 152787 - DNA, 22 bp, Artificial Sequence
  Synthetic oligonucleotide; CTT chr11 5172042 5172063 5172047 5172042 -
gctccctgacccggttccagca

SEQ ID NO: 152788 - DNA, 22 bp, Artificial Sequence
  Synthetic oligonucleotide; TTG chr11 5172041 5172062 5172046 5172041 -
ctccctgacccggttccagcag

SEQ ID NO: 152789 - DNA, 22 bp, Artificial Sequence
  Synthetic oligonucleotide; CTC chr11 5172038 5172059 5172043 5172038 -
cctgacccggttccagcagaag

SEQ ID NO: 152790 - DNA, 22 bp, Artificial Sequence
  Synthetic oligonucleotide; CTG chr11 5172034 5172055 5172039 5172034 -
acccggttccagcagaagactg

SEQ ID NO: 152791 - DNA, 22 bp, Artificial Sequence
  Synthetic oligonucleotide; TTC chr11 5172025 5172046 5172030 5172025 -
cagcagaagactgacccttctg

SEQ ID NO: 152792 - DNA, 22 bp, Artificial Sequence
  Synthetic oligonucleotide; CTG chr11 5172012 5172033 5172017 5172012 -
acccttctgcaaaatacagagg

SEQ ID NO: 152793 - DNA, 22 bp, Artificial Sequence
  Synthetic oligonucleotide; CTT chr11 5172006 5172027 5172011 5172006 -
ctgcaaaatacagaggagcttt

SEQ ID NO: 152794 - DNA, 22 bp, Artificial Sequence
  Synthetic oligonucleotide; TTC chr11 5172005 5172026 5172010 5172005 -
tgcaaaatacagaggagctttt

SEQ ID NO: 152795 - DNA, 22 bp, Artificial Sequence
  Synthetic oligonucleotide; CTG chr11 5172003 5172024 5172008 5172003 -
caaaatacagaggagcttttct

SEQ ID NO: 152796 - DNA, 22 bp, Artificial Sequence
  Synthetic oligonucleotide; CTT chr11 5171985 5172006 5171990 5171985 -
ttctaatctatggatagcaggt

SEQ ID NO: 152797 - DNA, 22 bp, Artificial Sequence
  Synthetic oligonucleotide; TTT chr11 5171984 5172005 5171989 5171984 -
tctaatctatggatagcaggtg

SEQ ID NO: 152798 - DNA, 22 bp, Artificial Sequence
  Synthetic oligonucleotide; TTT chr11 5171983 5172004 5171988 5171983 -
ctaatctatggatagcaggtgg

SEQ ID NO: 152799 - DNA, 22 bp, Artificial Sequence
  Synthetic oligonucleotide; TTC chr11 5171982 5172003 5171987 5171982 -
taatctatggatagcaggtgga

SEQ ID NO: 152800 - DNA, 22 bp, Artificial Sequence
  Synthetic oligonucleotide; CTA chr11 5171980 5172001 5171985 5171980 -
atctatggatagcaggtggaga

SEQ ID NO: 152801 - DNA, 22 bp, Artificial Sequence
  Synthetic oligonucleotide; CTA chr11 5171975 5171996 5171980 5171975 -
tggatagcaggtggagaaagag

SEQ ID NO: 152802 - DNA, 22 bp, Artificial Sequence
  Synthetic oligonucleotide; CTG chr11 5171946 5171967 5171951 5171946 -
gtaagttaaagaaaaaaatgga

SEQ ID NO: 152803 - DNA, 22 bp, Artificial Sequence
  Synthetic oligonucleotide; TTA chr11 5171938 5171959 5171943 5171938 -
aagaaaaaaatggaaaatactt

SEQ ID NO: 152804 - DNA, 22 bp, Artificial Sequence
  Synthetic oligonucleotide; CTT chr11 5171916 5171937 5171921 5171916 -
tattctaggagaaactatcctt

SEQ ID NO: 152805 - DNA, 22 bp, Artificial Sequence
  Synthetic oligonucleotide; TTT chr11 5171915 5171936 5171920 5171915 -
attctaggagaaactatccttg

SEQ ID NO: 152806 - DNA, 22 bp, Artificial Sequence
  Synthetic oligonucleotide; TTA chr11 5171914 5171935 5171919 5171914 -
ttctaggagaaactatccttgt

SEQ ID NO: 152807 - DNA, 22 bp, Artificial Sequence
  Synthetic oligonucleotide; TTC chr11 5171911 5171932 5171916 5171911 -
taggagaaactatccttgtgtt

SEQ ID NO: 152808 - DNA, 22 bp, Artificial Sequence
  Synthetic oligonucleotide; CTA chr11 5171909 5171930 5171914 5171909 -
ggagaaactatccttgtgttct

SEQ ID NO: 152809 - DNA, 22 bp, Artificial Sequence
  Synthetic oligonucleotide; CTA chr11 5171899 5171920 5171904 5171899 -
tccttgtgttctaatatattaa

SEQ ID NO: 152810 - DNA, 22 bp, Artificial Sequence
  Synthetic oligonucleotide; CTT chr11 5171894 5171915 5171899 5171894 -
gtgttctaatatattaaattgt

SEQ ID NO: 152811 - DNA, 22 bp, Artificial Sequence
  Synthetic oligonucleotide; TTG chr11 5171893 5171914 5171898 5171893 -
tgttctaatatattaaattgtt

SEQ ID NO: 152812 - DNA, 22 bp, Artificial Sequence
  Synthetic oligonucleotide; TTC chr11 5171888 5171909 5171893 5171888 -
taatatattaaattgttctttt

SEQ ID NO: 152813 - DNA, 22 bp, Artificial Sequence
  Synthetic oligonucleotide; CTA chr11 5171886 5171907 5171891 5171886 -
atatattaaattgttcttttta

SEQ ID NO: 152814 - DNA, 22 bp, Artificial Sequence
  Synthetic oligonucleotide; TTA chr11 5171878 5171899 5171883 5171878 -
aattgttctttttattctatac

SEQ ID NO: 152815 - DNA, 22 bp, Artificial Sequence
  Synthetic oligonucleotide; TTG chr11 5171873 5171894 5171878 5171873 -
ttctttttattctatacattta

SEQ ID NO: 152816 - DNA, 22 bp, Artificial Sequence
  Synthetic oligonucleotide; TTC chr11 5171870 5171891 5171875 5171870 -
tttttattctatacatttaata

SEQ ID NO: 152817 - DNA, 22 bp, Artificial Sequence
  Synthetic oligonucleotide; CTT chr11 5171868 5171889 5171873 5171868 -
tttattctatacatttaatatt

SEQ ID NO: 152818 - DNA, 22 bp, Artificial Sequence
  Synthetic oligonucleotide; TTT chr11 5171867 5171888 5171872 5171867 -
ttattctatacatttaatattt

SEQ ID NO: 152819 - DNA, 22 bp, Artificial Sequence
  Synthetic oligonucleotide; TTT chr11 5171866 5171887 5171871 5171866 -
tattctatacatttaatattta

SEQ ID NO: 152820 - DNA, 22 bp, Artificial Sequence
  Synthetic oligonucleotide; TTT chr11 5171865 5171886 5171870 5171865 -
attctatacatttaatatttac

SEQ ID NO: 152821 - DNA, 22 bp, Artificial Sequence
  Synthetic oligonucleotide; TTA chr11 5171864 5171885 5171869 5171864 -
ttctatacatttaatatttact

SEQ ID NO: 152822 - DNA, 22 bp, Artificial Sequence
  Synthetic oligonucleotide; TTC chr11 5171861 5171882 5171866 5171861 -
tatacatttaatatttactata

SEQ ID NO: 152823 - DNA, 22 bp, Artificial Sequence
  Synthetic oligonucleotide; CTA chr11 5171859 5171880 5171864 5171859 -
tacatttaatatttactatatt

SEQ ID NO: 152824 - DNA, 22 bp, Artificial Sequence
  Synthetic oligonucleotide; TTT chr11 5171852 5171873 5171857 5171852 -
aatatttactatattccacata

SEQ ID NO: 152825 - DNA, 22 bp, Artificial Sequence
  Synthetic oligonucleotide; TTA chr11 5171851 5171872 5171856 5171851 -
atatttactatattccacatat

SEQ ID NO: 152826 - DNA, 22 bp, Artificial Sequence
  Synthetic oligonucleotide; TTT chr11 5171845 5171866 5171850 5171845 -
actatattccacatataatgat

SEQ ID NO: 152827 - DNA, 22 bp, Artificial Sequence
  Synthetic oligonucleotide; TTA chr11 5171844 5171865 5171849 5171844 -
ctatattccacatataatgata

SEQ ID NO: 152828 - DNA, 22 bp, Artificial Sequence
  Synthetic oligonucleotide; CTA chr11 5171841 5171862 5171846 5171841 -
tattccacatataatgataaac

SEQ ID NO: 152829 - DNA, 22 bp, Artificial Sequence
  Synthetic oligonucleotide; TTC chr11 5171836 5171857 5171841 5171836 -
cacatataatgataaacaatat

SEQ ID NO: 152830 - DNA, 22 bp, Artificial Sequence
  Synthetic oligonucleotide; TTA chr11 5171804 5171825 5171809 5171804 -
ctttaaaatactattattgtct

SEQ ID NO: 152831 - DNA, 22 bp, Artificial Sequence
  Synthetic oligonucleotide; CTT chr11 5171801 5171822 5171806 5171801 -
taaaatactattattgtcttta

SEQ ID NO: 152832 - DNA, 22 bp, Artificial Sequence
  Synthetic oligonucleotide; TTT chr11 5171800 5171821 5171805 5171800 -
aaaatactattattgtctttat

SEQ ID NO: 152833 - DNA, 22 bp, Artificial Sequence
  Synthetic oligonucleotide; TTA chr11 5171799 5171820 5171804 5171799 -
aaatactattattgtctttata

SEQ ID NO: 152834 - DNA, 22 bp, Artificial Sequence
  Synthetic oligonucleotide; CTA chr11 5171791 5171812 5171796 5171791 -
ttattgtctttatagcaaatat

SEQ ID NO: 152835 - DNA, 22 bp, Artificial Sequence
  Synthetic oligonucleotide; TTA chr11 5171788 5171809 5171793 5171788 -
ttgtctttatagcaaatatctg

SEQ ID NO: 152836 - DNA, 22 bp, Artificial Sequence
  Synthetic oligonucleotide; TTG chr11 5171785 5171806 5171790 5171785 -
tctttatagcaaatatctgggt

SEQ ID NO: 152837 - DNA, 22 bp, Artificial Sequence
  Synthetic oligonucleotide; CTT chr11 5171781 5171802 5171786 5171781 -
tatagcaaatatctgggtctca

SEQ ID NO: 152838 - DNA, 22 bp, Artificial Sequence
  Synthetic oligonucleotide; TTT chr11 5171780 5171801 5171785 5171780 -
atagcaaatatctgggtctcag

SEQ ID NO: 152839 - DNA, 22 bp, Artificial Sequence
  Synthetic oligonucleotide; TTA chr11 5171779 5171800 5171784 5171779 -
tagcaaatatctgggtctcaga

SEQ ID NO: 152840 - DNA, 22 bp, Artificial Sequence
  Synthetic oligonucleotide; CTG chr11 5171766 5171787 5171771 5171766 -
ggtctcagataacttgcaatat

SEQ ID NO: 152841 - DNA, 22 bp, Artificial Sequence
  Synthetic oligonucleotide; CTC chr11 5171760 5171781 5171765 5171760 -
agataacttgcaatataaatca

SEQ ID NO: 152842 - DNA, 22 bp, Artificial Sequence
  Synthetic oligonucleotide; CTT chr11 5171751 5171772 5171756 5171751 -
gcaatataaatcaactttaata

SEQ ID NO: 152843 - DNA, 22 bp, Artificial Sequence
  Synthetic oligonucleotide; TTG chr11 5171750 5171771 5171755 5171750 -
caatataaatcaactttaatat

SEQ ID NO: 152844 - DNA, 22 bp, Artificial Sequence
  Synthetic oligonucleotide; CTT chr11 5171734 5171755 5171739 5171734 -
taatataatcccaagattacac

SEQ ID NO: 152845 - DNA, 22 bp, Artificial Sequence
  Synthetic oligonucleotide; TTT chr11 5171733 5171754 5171738 5171733 -
aatataatcccaagattacacg

SEQ ID NO: 152846 - DNA, 22 bp, Artificial Sequence
  Synthetic oligonucleotide; TTA chr11 5171732 5171753 5171737 5171732 -
atataatcccaagattacacgt

SEQ ID NO: 152847 - DNA, 22 bp, Artificial Sequence
  Synthetic oligonucleotide; TTA chr11 5171715 5171736 5171720 5171715 -
cacgtcaattaaatgttagaac

SEQ ID NO: 152848 - DNA, 22 bp, Artificial Sequence
  Synthetic oligonucleotide; TTA chr11 5171704 5171725 5171709 5171704 -
aatgttagaaccatcaatactc

SEQ ID NO: 152849 - DNA, 22 bp, Artificial Sequence
  Synthetic oligonucleotide; TTA chr11 5171697 5171718 5171702 5171697 -
gaaccatcaatactctttatta

SEQ ID NO: 152850 - DNA, 22 bp, Artificial Sequence
  Synthetic oligonucleotide; CTC chr11 5171682 5171703 5171687 5171682 -
tttattagtgttatattacttt

SEQ ID NO: 152851 - DNA, 22 bp, Artificial Sequence
  Synthetic oligonucleotide; CTT chr11 5171680 5171701 5171685 5171680 -
tattagtgttatattactttag

SEQ ID NO: 152852 - DNA, 22 bp, Artificial Sequence
  Synthetic oligonucleotide; TTT chr11 5171679 5171700 5171684 5171679 -
attagtgttatattactttagc

SEQ ID NO: 152853 - DNA, 22 bp, Artificial Sequence
  Synthetic oligonucleotide; TTA chr11 5171678 5171699 5171683 5171678 -
ttagtgttatattactttagct

SEQ ID NO: 152854 - DNA, 22 bp, Artificial Sequence
  Synthetic oligonucleotide; TTA chr11 5171675 5171696 5171680 5171675 -
gtgttatattactttagctatt

SEQ ID NO: 152855 - DNA, 22 bp, Artificial Sequence
  Synthetic oligonucleotide; TTA chr11 5171669 5171690 5171674 5171669 -
tattactttagctattcatcta

SEQ ID NO: 152856 - DNA, 22 bp, Artificial Sequence
  Synthetic oligonucleotide; TTA chr11 5171664 5171685 5171669 5171664 -
ctttagctattcatctactctc

SEQ ID NO: 152857 - DNA, 22 bp, Artificial Sequence
  Synthetic oligonucleotide; CTT chr11 5171661 5171682 5171666 5171661 -
tagctattcatctactctcttt

SEQ ID NO: 152858 - DNA, 22 bp, Artificial Sequence
  Synthetic oligonucleotide; TTT chr11 5171660 5171681 5171665 5171660 -
agctattcatctactctcttta

SEQ ID NO: 152859 - DNA, 22 bp, Artificial Sequence
  Synthetic oligonucleotide; TTA chr11 5171659 5171680 5171664 5171659 -
gctattcatctactctctttat

SEQ ID NO: 152860 - DNA, 22 bp, Artificial Sequence
  Synthetic oligonucleotide; CTA chr11 5171655 5171676 5171660 5171655 -
ttcatctactctctttataaac

SEQ ID NO: 152861 - DNA, 22 bp, Artificial Sequence
  Synthetic oligonucleotide; TTC chr11 5171652 5171673 5171657 5171652 -
atctactctctttataaacact

SEQ ID NO: 152862 - DNA, 22 bp, Artificial Sequence
  Synthetic oligonucleotide; CTA chr11 5171647 5171668 5171652 5171647 -
ctctctttataaacactacaag

SEQ ID NO: 152863 - DNA, 22 bp, Artificial Sequence
  Synthetic oligonucleotide; CTC chr11 5171644 5171665 5171649 5171644 -
tctttataaacactacaagtta

SEQ ID NO: 152864 - DNA, 22 bp, Artificial Sequence
  Synthetic oligonucleotide; CTC chr11 5171642 5171663 5171647 5171642 -
tttataaacactacaagttagc

SEQ ID NO: 152865 - DNA, 22 bp, Artificial Sequence
  Synthetic oligonucleotide; CTT chr11 5171640 5171661 5171645 5171640 -
tataaacactacaagttagcag

SEQ ID NO: 152866 - DNA, 22 bp, Artificial Sequence
  Synthetic oligonucleotide; TTT chr11 5171639 5171660 5171644 5171639 -
ataaacactacaagttagcagt

SEQ ID NO: 152867 - DNA, 22 bp, Artificial Sequence
  Synthetic oligonucleotide; TTA chr11 5171638 5171659 5171643 5171638 -
taaacactacaagttagcagtt

SEQ ID NO: 152868 - DNA, 22 bp, Artificial Sequence
  Synthetic oligonucleotide; CTA chr11 5171629 5171650 5171634 5171629 -
caagttagcagtttcttcagtc

SEQ ID NO: 152869 - DNA, 22 bp, Artificial Sequence
  Synthetic oligonucleotide; TTA chr11 5171622 5171643 5171627 5171622 -
gcagtttcttcagtcataattt

SEQ ID NO: 152870 - DNA, 22 bp, Artificial Sequence
  Synthetic oligonucleotide; TTT chr11 5171615 5171636 5171620 5171615 -
cttcagtcataatttccatgtg

SEQ ID NO: 152871 - DNA, 22 bp, Artificial Sequence
  Synthetic oligonucleotide; TTC chr11 5171614 5171635 5171619 5171614 -
ttcagtcataatttccatgtga

SEQ ID NO: 152872 - DNA, 22 bp, Artificial Sequence
  Synthetic oligonucleotide; CTT chr11 5171612 5171633 5171617 5171612 -
cagtcataatttccatgtgaat

SEQ ID NO: 152873 - DNA, 22 bp, Artificial Sequence
  Synthetic oligonucleotide; TTC chr11 5171611 5171632 5171616 5171611 -
agtcataatttccatgtgaatc

SEQ ID NO: 152874 - DNA, 22 bp, Artificial Sequence
  Synthetic oligonucleotide; TTT chr11 5171600 5171621 5171605 5171600 -
ccatgtgaatctgtcatctcta

SEQ ID NO: 152875 - DNA, 22 bp, Artificial Sequence
  Synthetic oligonucleotide; TTC chr11 5171599 5171620 5171604 5171599 -
catgtgaatctgtcatctctat

SEQ ID NO: 152876 - DNA, 22 bp, Artificial Sequence
  Synthetic oligonucleotide; CTG chr11 5171587 5171608 5171592 5171587 -
tcatctctatgcttattttaac

SEQ ID NO: 152877 - DNA, 22 bp, Artificial Sequence
  Synthetic oligonucleotide; CTC chr11 5171580 5171601 5171585 5171580 -
tatgcttattttaactgttttt

SEQ ID NO: 152878 - DNA, 22 bp, Artificial Sequence
  Synthetic oligonucleotide; CTA chr11 5171578 5171599 5171583 5171578 -
tgcttattttaactgtttttca

SEQ ID NO: 152879 - DNA, 22 bp, Artificial Sequence
  Synthetic oligonucleotide; CTT chr11 5171573 5171594 5171578 5171573 -
attttaactgtttttcactgcc

SEQ ID NO: 152880 - DNA, 22 bp, Artificial Sequence
  Synthetic oligonucleotide; TTA chr11 5171572 5171593 5171577 5171572 -
ttttaactgtttttcactgcca

SEQ ID NO: 152881 - DNA, 22 bp, Artificial Sequence
  Synthetic oligonucleotide; TTT chr11 5171569 5171590 5171574 5171569 -
taactgtttttcactgccatag

SEQ ID NO: 152882 - DNA, 22 bp, Artificial Sequence
  Synthetic oligonucleotide; TTT chr11 5171568 5171589 5171573 5171568 -
aactgtttttcactgccataga

SEQ ID NO: 152883 - DNA, 22 bp, Artificial Sequence
  Synthetic oligonucleotide; TTA chr11 5171567 5171588 5171572 5171567 -
actgtttttcactgccatagat

SEQ ID NO: 152884 - DNA, 22 bp, Artificial Sequence
  Synthetic oligonucleotide; CTG chr11 5171563 5171584 5171568 5171563 -
tttttcactgccatagatgacc

SEQ ID NO: 152885 - DNA, 22 bp, Artificial Sequence
  Synthetic oligonucleotide; TTT chr11 5171560 5171581 5171565 5171560 -
ttcactgccatagatgacccaa

SEQ ID NO: 152886 - DNA, 22 bp, Artificial Sequence
  Synthetic oligonucleotide; TTT chr11 5171559 5171580 5171564 5171559 -
tcactgccatagatgacccaac

SEQ ID NO: 152887 - DNA, 22 bp, Artificial Sequence
  Synthetic oligonucleotide; TTT chr11 5171558 5171579 5171563 5171558 -
cactgccatagatgacccaact

SEQ ID NO: 152888 - DNA, 22 bp, Artificial Sequence
  Synthetic oligonucleotide; TTC chr11 5171557 5171578 5171562 5171557 -
actgccatagatgacccaactt

SEQ ID NO: 152889 - DNA, 22 bp, Artificial Sequence
  Synthetic oligonucleotide; CTG chr11 5171553 5171574 5171558 5171553 -
ccatagatgacccaacttgaga

SEQ ID NO: 152890 - DNA, 22 bp, Artificial Sequence
  Synthetic oligonucleotide; CTT chr11 5171535 5171556 5171540 5171535 -
gagatttctattaatgccttat

SEQ ID NO: 152891 - DNA, 22 bp, Artificial Sequence
  Synthetic oligonucleotide; TTG chr11 5171534 5171555 5171539 5171534 -
agatttctattaatgccttatc

SEQ ID NO: 152892 - DNA, 22 bp, Artificial Sequence
  Synthetic oligonucleotide; TTT chr11 5171528 5171549 5171533 5171528 -
ctattaatgccttatctggcat

SEQ ID NO: 152893 - DNA, 22 bp, Artificial Sequence
  Synthetic oligonucleotide; TTC chr11 5171527 5171548 5171532 5171527 -
tattaatgccttatctggcata

SEQ ID NO: 152894 - DNA, 22 bp, Artificial Sequence
  Synthetic oligonucleotide; CTA chr11 5171525 5171546 5171530 5171525 -
ttaatgccttatctggcatata

SEQ ID NO: 152895 - DNA, 22 bp, Artificial Sequence
  Synthetic oligonucleotide; TTA chr11 5171522 5171543 5171527 5171522 -
atgccttatctggcatataggc

SEQ ID NO: 152896 - DNA, 22 bp, Artificial Sequence
  Synthetic oligonucleotide; CTT chr11 5171515 5171536 5171520 5171515 -
atctggcatataggctatgttg

SEQ ID NO: 152897 - DNA, 22 bp, Artificial Sequence
  Synthetic oligonucleotide; TTA chr11 5171514 5171535 5171519 5171514 -
tctggcatataggctatgttgg

SEQ ID NO: 152898 - DNA, 22 bp, Artificial Sequence
  Synthetic oligonucleotide; CTG chr11 5171510 5171531 5171515 5171510 -
gcatataggctatgttggaata

SEQ ID NO: 152899 - DNA, 22 bp, Artificial Sequence
  Synthetic oligonucleotide; CTA chr11 5171498 5171519 5171503 5171498 -
tgttggaatacttttctgcatg

SEQ ID NO: 152900 - DNA, 22 bp, Artificial Sequence
  Synthetic oligonucleotide; TTG chr11 5171493 5171514 5171498 5171493 -
gaatacttttctgcatgaccca

SEQ ID NO: 152901 - DNA, 22 bp, Artificial Sequence
  Synthetic oligonucleotide; CTT chr11 5171485 5171506 5171490 5171485 -
ttctgcatgacccattaggttt

SEQ ID NO: 152902 - DNA, 22 bp, Artificial Sequence
  Synthetic oligonucleotide; TTT chr11 5171484 5171505 5171489 5171484 -
tctgcatgacccattaggtttc

SEQ ID NO: 152903 - DNA, 22 bp, Artificial Sequence
  Synthetic oligonucleotide; TTT chr11 5171483 5171504 5171488 5171483 -
ctgcatgacccattaggtttct

SEQ ID NO: 152904 - DNA, 22 bp, Artificial Sequence
  Synthetic oligonucleotide; TTC chr11 5171482 5171503 5171487 5171482 -
tgcatgacccattaggtttctc

SEQ ID NO: 152905 - DNA, 22 bp, Artificial Sequence
  Synthetic oligonucleotide; CTG chr11 5171480 5171501 5171485 5171480 -
catgacccattaggtttctctt

SEQ ID NO: 152906 - DNA, 22 bp, Artificial Sequence
  Synthetic oligonucleotide; TTA chr11 5171468 5171489 5171473 5171468 -
ggtttctcttccactcactgtg

SEQ ID NO: 152907 - DNA, 22 bp, Artificial Sequence
  Synthetic oligonucleotide; TTT chr11 5171463 5171484 5171468 5171463 -
ctcttccactcactgtggctta

SEQ ID NO: 152908 - DNA, 22 bp, Artificial Sequence
  Synthetic oligonucleotide; TTC chr11 5171462 5171483 5171467 5171462 -
tcttccactcactgtggcttac

SEQ ID NO: 152909 - DNA, 22 bp, Artificial Sequence
  Synthetic oligonucleotide; CTC chr11 5171460 5171481 5171465 5171460 -
ttccactcactgtggcttacct

SEQ ID NO: 152910 - DNA, 22 bp, Artificial Sequence
  Synthetic oligonucleotide; CTT chr11 5171458 5171479 5171463 5171458 -
ccactcactgtggcttacctgt

SEQ ID NO: 152911 - DNA, 22 bp, Artificial Sequence
  Synthetic oligonucleotide; TTC chr11 5171457 5171478 5171462 5171457 -
cactcactgtggcttacctgtg

SEQ ID NO: 152912 - DNA, 22 bp, Artificial Sequence
  Synthetic oligonucleotide; CTC chr11 5171452 5171473 5171457 5171452 -
actgtggcttacctgtgccctt

SEQ ID NO: 152913 - DNA, 22 bp, Artificial Sequence
  Synthetic oligonucleotide; CTG chr11 5171448 5171469 5171453 5171448 -
tggcttacctgtgcccttgttt

SEQ ID NO: 152914 - DNA, 22 bp, Artificial Sequence
  Synthetic oligonucleotide; CTT chr11 5171442 5171463 5171447 5171442 -
acctgtgcccttgtttcagaaa

SEQ ID NO: 152915 - DNA, 22 bp, Artificial Sequence
  Synthetic oligonucleotide; TTA chr11 5171441 5171462 5171446 5171441 -
cctgtgcccttgtttcagaaat

SEQ ID NO: 152916 - DNA, 22 bp, Artificial Sequence
  Synthetic oligonucleotide; CTG chr11 5171437 5171458 5171442 5171437 -
tgcccttgtttcagaaataaat

SEQ ID NO: 152917 - DNA, 22 bp, Artificial Sequence
  Synthetic oligonucleotide; CTT chr11 5171430 5171451 5171435 5171430 -
gtttcagaaataaattttttat

SEQ ID NO: 152918 - DNA, 22 bp, Artificial Sequence
  Synthetic oligonucleotide; TTG chr11 5171429 5171450 5171434 5171429 -
tttcagaaataaattttttatc

SEQ ID NO: 152919 - DNA, 22 bp, Artificial Sequence
  Synthetic oligonucleotide; TTT chr11 5171426 5171447 5171431 5171426 -
cagaaataaattttttatccct

SEQ ID NO: 152920 - DNA, 22 bp, Artificial Sequence
  Synthetic oligonucleotide; TTC chr11 5171425 5171446 5171430 5171425 -
agaaataaattttttatccctt

SEQ ID NO: 152921 - DNA, 22 bp, Artificial Sequence
  Synthetic oligonucleotide; TTT chr11 5171413 5171434 5171418 5171413 -
tttatccctttttctgaggaaa

SEQ ID NO: 152922 - DNA, 22 bp, Artificial Sequence
  Synthetic oligonucleotide; TTT chr11 5171412 5171433 5171417 5171412 -
ttatccctttttctgaggaaat

SEQ ID NO: 152923 - DNA, 22 bp, Artificial Sequence
  Synthetic oligonucleotide; TTT chr11 5171411 5171432 5171416 5171411 -
tatccctttttctgaggaaatg

SEQ ID NO: 152924 - DNA, 22 bp, Artificial Sequence
  Synthetic oligonucleotide; TTT chr11 5171410 5171431 5171415 5171410 -
atccctttttctgaggaaatgt

SEQ ID NO: 152925 - DNA, 22 bp, Artificial Sequence
  Synthetic oligonucleotide; TTA chr11 5171409 5171430 5171414 5171409 -
tccctttttctgaggaaatgtc

SEQ ID NO: 152926 - DNA, 22 bp, Artificial Sequence
  Synthetic oligonucleotide; CTT chr11 5171403 5171424 5171408 5171403 -
tttctgaggaaatgtcttagat

SEQ ID NO: 152927 - DNA, 22 bp, Artificial Sequence
  Synthetic oligonucleotide; TTT chr11 5171402 5171423 5171407 5171402 -
ttctgaggaaatgtcttagata

SEQ ID NO: 152928 - DNA, 22 bp, Artificial Sequence
  Synthetic oligonucleotide; TTT chr11 5171401 5171422 5171406 5171401 -
tctgaggaaatgtcttagatat

SEQ ID NO: 152929 - DNA, 22 bp, Artificial Sequence
  Synthetic oligonucleotide; TTT chr11 5171400 5171421 5171405 5171400 -
ctgaggaaatgtcttagatatg

SEQ ID NO: 152930 - DNA, 22 bp, Artificial Sequence
  Synthetic oligonucleotide; TTC chr11 5171399 5171420 5171404 5171399 -
tgaggaaatgtcttagatatga

SEQ ID NO: 152931 - DNA, 22 bp, Artificial Sequence
  Synthetic oligonucleotide; CTG chr11 5171397 5171418 5171402 5171397 -
aggaaatgtcttagatatgact

SEQ ID NO: 152932 - DNA, 22 bp, Artificial Sequence
  Synthetic oligonucleotide; CTT chr11 5171385 5171406 5171390 5171385 -
agatatgactgttagctcagaa

SEQ ID NO: 152933 - DNA, 22 bp, Artificial Sequence
  Synthetic oligonucleotide; TTA chr11 5171384 5171405 5171389 5171384 -
gatatgactgttagctcagaac

SEQ ID NO: 152934 - DNA, 22 bp, Artificial Sequence
  Synthetic oligonucleotide; CTG chr11 5171374 5171395 5171379 5171374 -
ttagctcagaacttgatgtgca

SEQ ID NO: 152935 - DNA, 22 bp, Artificial Sequence
  Synthetic oligonucleotide; TTA chr11 5171371 5171392 5171376 5171371 -
gctcagaacttgatgtgcaata

SEQ ID NO: 152936 - DNA, 22 bp, Artificial Sequence
  Synthetic oligonucleotide; CTC chr11 5171367 5171388 5171372 5171367 -
agaacttgatgtgcaataactg

SEQ ID NO: 152937 - DNA, 22 bp, Artificial Sequence
  Synthetic oligonucleotide; CTT chr11 5171360 5171381 5171365 5171360 -
gatgtgcaataactgagtagaa

SEQ ID NO: 152938 - DNA, 22 bp, Artificial Sequence
  Synthetic oligonucleotide; TTG chr11 5171359 5171380 5171364 5171359 -
atgtgcaataactgagtagaaa

SEQ ID NO: 152939 - DNA, 22 bp, Artificial Sequence
  Synthetic oligonucleotide; CTG chr11 5171345 5171366 5171350 5171345 -
agtagaaacttatatattccag

SEQ ID NO: 152940 - DNA, 22 bp, Artificial Sequence
  Synthetic oligonucleotide; CTT chr11 5171334 5171355 5171339 5171334 -
atatattccagtctccatgtgc

SEQ ID NO: 152941 - DNA, 22 bp, Artificial Sequence
  Synthetic oligonucleotide; TTA chr11 5171333 5171354 5171338 5171333 -
tatattccagtctccatgtgct

SEQ ID NO: 152942 - DNA, 22 bp, Artificial Sequence
  Synthetic oligonucleotide; TTC chr11 5171326 5171347 5171331 5171326 -
cagtctccatgtgcttctcaat

SEQ ID NO: 152943 - DNA, 22 bp, Artificial Sequence
  Synthetic oligonucleotide; CTC chr11 5171319 5171340 5171324 5171319 -
catgtgcttctcaatatcttca

SEQ ID NO: 152944 - DNA, 22 bp, Artificial Sequence
  Synthetic oligonucleotide; CTT chr11 5171310 5171331 5171315 5171310 -
ctcaatatcttcagaggaagta

SEQ ID NO: 152945 - DNA, 22 bp, Artificial Sequence
  Synthetic oligonucleotide; TTC chr11 5171309 5171330 5171314 5171309 -
tcaatatcttcagaggaagtat

SEQ ID NO: 152946 - DNA, 22 bp, Artificial Sequence
  Synthetic oligonucleotide; CTC chr11 5171307 5171328 5171312 5171307 -
aatatcttcagaggaagtatca

SEQ ID NO: 152947 - DNA, 22 bp, Artificial Sequence
  Synthetic oligonucleotide; CTT chr11 5171299 5171320 5171304 5171299 -
cagaggaagtatcaccatgacg

SEQ ID NO: 152948 - DNA, 22 bp, Artificial Sequence
  Synthetic oligonucleotide; TTC chr11 5171298 5171319 5171303 5171298 -
agaggaagtatcaccatgacgt

SEQ ID NO: 152949 - DNA, 22 bp, Artificial Sequence
  Synthetic oligonucleotide; TTT chr11 5171274 5171295 5171279 5171274 -
tcaaacgttccataacattcac

SEQ ID NO: 152950 - DNA, 22 bp, Artificial Sequence
  Synthetic oligonucleotide; TTT chr11 5171273 5171294 5171278 5171273 -
caaacgttccataacattcaca

SEQ ID NO: 152951 - DNA, 22 bp, Artificial Sequence
  Synthetic oligonucleotide; TTC chr11 5171272 5171293 5171277 5171272 -
aaacgttccataacattcacac

SEQ ID NO: 152952 - DNA, 22 bp, Artificial Sequence
  Synthetic oligonucleotide; TTC chr11 5171264 5171285 5171269 5171264 -
cataacattcacacctacaaca

SEQ ID NO: 152953 - DNA, 22 bp, Artificial Sequence
  Synthetic oligonucleotide; TTC chr11 5171254 5171275 5171259 5171254 -
acacctacaacattcactctcg

SEQ ID NO: 152954 - DNA, 22 bp, Artificial Sequence
  Synthetic oligonucleotide; CTA chr11 5171247 5171268 5171252 5171247 -
caacattcactctcgttggcat

SEQ ID NO: 152955 - DNA, 22 bp, Artificial Sequence
  Synthetic oligonucleotide; TTC chr11 5171239 5171260 5171244 5171239 -
actctcgttggcatcccgggac

SEQ ID NO: 152956 - DNA, 22 bp, Artificial Sequence
  Synthetic oligonucleotide; CTC chr11 5171235 5171256 5171240 5171235 -
tcgttggcatcccgggactgga

SEQ ID NO: 152957 - DNA, 22 bp, Artificial Sequence
  Synthetic oligonucleotide; CTC chr11 5171233 5171254 5171238 5171233 -
gttggcatcccgggactggagg

SEQ ID NO: 152958 - DNA, 22 bp, Artificial Sequence
  Synthetic oligonucleotide; TTG chr11 5171229 5171250 5171234 5171229 -
gcatcccgggactggaggcaga

SEQ ID NO: 152959 - DNA, 22 bp, Artificial Sequence
  Synthetic oligonucleotide; CTG chr11 5171215 5171236 5171220 5171215 -
gaggcagaacattatgtggata

SEQ ID NO: 152960 - DNA, 22 bp, Artificial Sequence
  Synthetic oligonucleotide; TTA chr11 5171201 5171222 5171206 5171201 -
tgtggatatccatccccttctg

SEQ ID NO: 152961 - DNA, 22 bp, Artificial Sequence
  Synthetic oligonucleotide; CTT chr11 5171182 5171203 5171187 5171182 -
ctgcctgatatacaccatcatc

SEQ ID NO: 152962 - DNA, 22 bp, Artificial Sequence
  Synthetic oligonucleotide; TTC chr11 5171181 5171202 5171186 5171181 -
tgcctgatatacaccatcatct

SEQ ID NO: 152963 - DNA, 22 bp, Artificial Sequence
  Synthetic oligonucleotide; CTG chr11 5171179 5171200 5171184 5171179 -
cctgatatacaccatcatcttt

SEQ ID NO: 152964 - DNA, 22 bp, Artificial Sequence
  Synthetic oligonucleotide; CTG chr11 5171175 5171196 5171180 5171175 -
atatacaccatcatctttccgg

SEQ ID NO: 152965 - DNA, 22 bp, Artificial Sequence
  Synthetic oligonucleotide; CTT chr11 5171158 5171179 5171163 5171158 -
tccgggaaatggcatcattctt

SEQ ID NO: 152966 - DNA, 22 bp, Artificial Sequence
  Synthetic oligonucleotide; TTT chr11 5171157 5171178 5171162 5171157 -
ccgggaaatggcatcattcttc

SEQ ID NO: 152967 - DNA, 22 bp, Artificial Sequence
  Synthetic oligonucleotide; TTC chr11 5171156 5171177 5171161 5171156 -
cgggaaatggcatcattcttca

SEQ ID NO: 152968 - DNA, 22 bp, Artificial Sequence
  Synthetic oligonucleotide; TTC chr11 5171138 5171159 5171143 5171138 -
ttcacatcatccgaattgactc

SEQ ID NO: 152969 - DNA, 22 bp, Artificial Sequence
  Synthetic oligonucleotide; CTT chr11 5171136 5171157 5171141 5171136 -
cacatcatccgaattgactctt

SEQ ID NO: 152970 - DNA, 22 bp, Artificial Sequence
  Synthetic oligonucleotide; TTC chr11 5171135 5171156 5171140 5171135 -
acatcatccgaattgactcttc

SEQ ID NO: 152971 - DNA, 22 bp, Artificial Sequence
  Synthetic oligonucleotide; TTG chr11 5171120 5171141 5171125 5171120 -
actcttccttgcaccaacccat

SEQ ID NO: 152972 - DNA, 22 bp, Artificial Sequence
  Synthetic oligonucleotide; CTC chr11 5171116 5171137 5171121 5171116 -
ttccttgcaccaacccatgtac

SEQ ID NO: 152973 - DNA, 22 bp, Artificial Sequence
  Synthetic oligonucleotide; CTT chr11 5171114 5171135 5171119 5171114 -
ccttgcaccaacccatgtacta

SEQ ID NO: 152974 - DNA, 22 bp, Artificial Sequence
  Synthetic oligonucleotide; TTC chr11 5171113 5171134 5171118 5171113 -
cttgcaccaacccatgtactat

SEQ ID NO: 152975 - DNA, 22 bp, Artificial Sequence
  Synthetic oligonucleotide; CTT chr11 5171110 5171131 5171115 5171110 -
gcaccaacccatgtactatttt

SEQ ID NO: 152976 - DNA, 22 bp, Artificial Sequence
  Synthetic oligonucleotide; TTG chr11 5171109 5171130 5171114 5171109 -
caccaacccatgtactattttc

SEQ ID NO: 152977 - DNA, 22 bp, Artificial Sequence
  Synthetic oligonucleotide; CTA chr11 5171092 5171113 5171097 5171092 -
ttttctggccatgccggccttt

SEQ ID NO: 152978 - DNA, 22 bp, Artificial Sequence
  Synthetic oligonucleotide; TTT chr11 5171089 5171110 5171094 5171089 -
tctggccatgccggcctttgtt

SEQ ID NO: 152979 - DNA, 22 bp, Artificial Sequence
  Synthetic oligonucleotide; TTT chr11 5171088 5171109 5171093 5171088 -
ctggccatgccggcctttgttg

SEQ ID NO: 152980 - DNA, 22 bp, Artificial Sequence
  Synthetic oligonucleotide; TTC chr11 5171087 5171108 5171092 5171087 -
tggccatgccggcctttgttga

SEQ ID NO: 152981 - DNA, 22 bp, Artificial Sequence
  Synthetic oligonucleotide; CTG chr11 5171085 5171106 5171090 5171085 -
gccatgccggcctttgttgaac

SEQ ID NO: 152982 - DNA, 22 bp, Artificial Sequence
  Synthetic oligonucleotide; CTT chr11 5171071 5171092 5171076 5171071 -
tgttgaacttggtgtctctgct

SEQ ID NO: 152983 - DNA, 22 bp, Artificial Sequence
  Synthetic oligonucleotide; TTT chr11 5171070 5171091 5171075 5171070 -
gttgaacttggtgtctctgctt

SEQ ID NO: 152984 - DNA, 22 bp, Artificial Sequence
  Synthetic oligonucleotide; TTG chr11 5171069 5171090 5171074 5171069 -
ttgaacttggtgtctctgcttc

SEQ ID NO: 152985 - DNA, 22 bp, Artificial Sequence
  Synthetic oligonucleotide; TTG chr11 5171066 5171087 5171071 5171066 -
aacttggtgtctctgcttccac

SEQ ID NO: 152986 - DNA, 22 bp, Artificial Sequence
  Synthetic oligonucleotide; CTT chr11 5171061 5171082 5171066 5171061 -
ggtgtctctgcttccaccatgc

SEQ ID NO: 152987 - DNA, 22 bp, Artificial Sequence
  Synthetic oligonucleotide; TTG chr11 5171060 5171081 5171065 5171060 -
gtgtctctgcttccaccatgcc

SEQ ID NO: 152988 - DNA, 22 bp, Artificial Sequence
  Synthetic oligonucleotide; CTC chr11 5171053 5171074 5171058 5171053 -
tgcttccaccatgcccactgtg

SEQ ID NO: 152989 - DNA, 22 bp, Artificial Sequence
  Synthetic oligonucleotide; CTG chr11 5171051 5171072 5171056 5171051 -
cttccaccatgcccactgtgtt

SEQ ID NO: 152990 - DNA, 22 bp, Artificial Sequence
  Synthetic oligonucleotide; CTT chr11 5171048 5171069 5171053 5171048 -
ccaccatgcccactgtgttaag

SEQ ID NO: 152991 - DNA, 22 bp, Artificial Sequence
  Synthetic oligonucleotide; TTC chr11 5171047 5171068 5171052 5171047 -
caccatgcccactgtgttaagc

SEQ ID NO: 152992 - DNA, 22 bp, Artificial Sequence
  Synthetic oligonucleotide; CTG chr11 5171033 5171054 5171038 5171033 -
tgttaagcatattcctctttgg

SEQ ID NO: 152993 - DNA, 22 bp, Artificial Sequence
  Synthetic oligonucleotide; TTA chr11 5171028 5171049 5171033 5171028 -
agcatattcctctttggcatta

SEQ ID NO: 152994 - DNA, 22 bp, Artificial Sequence
  Synthetic oligonucleotide; TTC chr11 5171019 5171040 5171024 5171019 -
ctctttggcattaacgatgtca

SEQ ID NO: 152995 - DNA, 22 bp, Artificial Sequence
  Synthetic oligonucleotide; CTC chr11 5171016 5171037 5171021 5171016 -
tttggcattaacgatgtcagtt

SEQ ID NO: 152996 - DNA, 22 bp, Artificial Sequence
  Synthetic oligonucleotide; CTT chr11 5171014 5171035 5171019 5171014 -
tggcattaacgatgtcagtttt

SEQ ID NO: 152997 - DNA, 22 bp, Artificial Sequence
  Synthetic oligonucleotide; TTT chr11 5171013 5171034 5171018 5171013 -
ggcattaacgatgtcagttttg

SEQ ID NO: 152998 - DNA, 22 bp, Artificial Sequence
  Synthetic oligonucleotide; TTG chr11 5171012 5171033 5171017 5171012 -
gcattaacgatgtcagttttgg

SEQ ID NO: 152999 - DNA, 22 bp, Artificial Sequence
  Synthetic oligonucleotide; TTA chr11 5171006 5171027 5171011 5171006 -
acgatgtcagttttggtggttg

SEQ ID NO: 153000 - DNA, 22 bp, Artificial Sequence
  Synthetic oligonucleotide; TTT chr11 5170993 5171014 5170998 5170993 -
tggtggttgcctgctccagatg

SEQ ID NO: 153001 - DNA, 22 bp, Artificial Sequence
  Synthetic oligonucleotide; TTT chr11 5170992 5171013 5170997 5170992 -
ggtggttgcctgctccagatgt

SEQ ID NO: 153002 - DNA, 22 bp, Artificial Sequence
  Synthetic oligonucleotide; TTG chr11 5170991 5171012 5170996 5170991 -
gtggttgcctgctccagatgtt

SEQ ID NO: 153003 - DNA, 22 bp, Artificial Sequence
  Synthetic oligonucleotide; TTG chr11 5170984 5171005 5170989 5170984 -
cctgctccagatgttttctatg

SEQ ID NO: 153004 - DNA, 22 bp, Artificial Sequence
  Synthetic oligonucleotide; CTG chr11 5170980 5171001 5170985 5170980 -
ctccagatgttttctatgcact

SEQ ID NO: 153005 - DNA, 22 bp, Artificial Sequence
  Synthetic oligonucleotide; CTC chr11 5170977 5170998 5170982 5170977 -
cagatgttttctatgcactctt

SEQ ID NO: 153006 - DNA, 22 bp, Artificial Sequence
  Synthetic oligonucleotide; TTT chr11 5170968 5170989 5170973 5170968 -
tctatgcactctttcactctta

SEQ ID NO: 153007 - DNA, 22 bp, Artificial Sequence
  Synthetic oligonucleotide; TTT chr11 5170967 5170988 5170972 5170967 -
ctatgcactctttcactcttat

SEQ ID NO: 153008 - DNA, 22 bp, Artificial Sequence
  Synthetic oligonucleotide; TTC chr11 5170966 5170987 5170971 5170966 -
tatgcactctttcactcttatg

SEQ ID NO: 153009 - DNA, 22 bp, Artificial Sequence
  Synthetic oligonucleotide; CTA chr11 5170964 5170985 5170969 5170964 -
tgcactctttcactcttatgga

SEQ ID NO: 153010 - DNA, 22 bp, Artificial Sequence
  Synthetic oligonucleotide; CTC chr11 5170957 5170978 5170962 5170957 -
tttcactcttatggagtcaggt

SEQ ID NO: 153011 - DNA, 22 bp, Artificial Sequence
  Synthetic oligonucleotide; CTT chr11 5170955 5170976 5170960 5170955 -
tcactcttatggagtcaggtgt

SEQ ID NO: 153012 - DNA, 22 bp, Artificial Sequence
  Synthetic oligonucleotide; TTT chr11 5170954 5170975 5170959 5170954 -
cactcttatggagtcaggtgtc

SEQ ID NO: 153013 - DNA, 22 bp, Artificial Sequence
  Synthetic oligonucleotide; TTC chr11 5170953 5170974 5170958 5170953 -
actcttatggagtcaggtgtcc

SEQ ID NO: 153014 - DNA, 22 bp, Artificial Sequence
  Synthetic oligonucleotide; CTC chr11 5170949 5170970 5170954 5170949 -
ttatggagtcaggtgtccttct

SEQ ID NO: 153015 - DNA, 22 bp, Artificial Sequence
  Synthetic oligonucleotide; CTT chr11 5170947 5170968 5170952 5170947 -
atggagtcaggtgtccttctgg

SEQ ID NO: 153016 - DNA, 22 bp, Artificial Sequence
  Synthetic oligonucleotide; TTA chr11 5170946 5170967 5170951 5170946 -
tggagtcaggtgtccttctggc

SEQ ID NO: 153017 - DNA, 22 bp, Artificial Sequence
  Synthetic oligonucleotide; CTT chr11 5170929 5170950 5170934 5170929 -
ctggcaatgtcagtggaccgct

SEQ ID NO: 153018 - DNA, 22 bp, Artificial Sequence
  Synthetic oligonucleotide; TTC chr11 5170928 5170949 5170933 5170928 -
tggcaatgtcagtggaccgctt

SEQ ID NO: 153019 - DNA, 22 bp, Artificial Sequence
  Synthetic oligonucleotide; CTG chr11 5170926 5170947 5170931 5170926 -
gcaatgtcagtggaccgctttg

SEQ ID NO: 153020 - DNA, 22 bp, Artificial Sequence
  Synthetic oligonucleotide; CTT chr11 5170906 5170927 5170911 5170906 -
tgtggccatctacagcccactg

SEQ ID NO: 153021 - DNA, 22 bp, Artificial Sequence
  Synthetic oligonucleotide; TTT chr11 5170905 5170926 5170910 5170905 -
gtggccatctacagcccactgc

SEQ ID NO: 153022 - DNA, 22 bp, Artificial Sequence
  Synthetic oligonucleotide; TTG chr11 5170904 5170925 5170909 5170904 -
tggccatctacagcccactgcg

SEQ ID NO: 153023 - DNA, 22 bp, Artificial Sequence
  Synthetic oligonucleotide; CTA chr11 5170894 5170915 5170899 5170894 -
cagcccactgcgctacacaacc

SEQ ID NO: 153024 - DNA, 22 bp, Artificial Sequence
  Synthetic oligonucleotide; CTG chr11 5170884 5170905 5170889 5170884 -
cgctacacaaccattctgacaa

SEQ ID NO: 153025 - DNA, 22 bp, Artificial Sequence
  Synthetic oligonucleotide; CTA chr11 5170879 5170900 5170884 5170879 -
cacaaccattctgacaattgcc

SEQ ID NO: 153026 - DNA, 22 bp, Artificial Sequence
  Synthetic oligonucleotide; TTC chr11 5170868 5170889 5170873 5170868 -
tgacaattgcctgcatttctgg

SEQ ID NO: 153027 - DNA, 22 bp, Artificial Sequence
  Synthetic oligonucleotide; CTG chr11 5170866 5170887 5170871 5170866 -
acaattgcctgcatttctggga

SEQ ID NO: 153028 - DNA, 22 bp, Artificial Sequence
  Synthetic oligonucleotide; TTG chr11 5170859 5170880 5170864 5170859 -
cctgcatttctgggacgggtgc

SEQ ID NO: 153029 - DNA, 22 bp, Artificial Sequence
  Synthetic oligonucleotide; CTG chr11 5170855 5170876 5170860 5170855 -
catttctgggacgggtgccgcc

SEQ ID NO: 153030 - DNA, 22 bp, Artificial Sequence
  Synthetic oligonucleotide; TTT chr11 5170850 5170871 5170855 5170850 -
ctgggacgggtgccgccattgc

SEQ ID NO: 153031 - DNA, 22 bp, Artificial Sequence
  Synthetic oligonucleotide; TTC chr11 5170849 5170870 5170854 5170849 -
tgggacgggtgccgccattgcc

SEQ ID NO: 153032 - DNA, 22 bp, Artificial Sequence
  Synthetic oligonucleotide; CTG chr11 5170847 5170868 5170852 5170847 -
ggacgggtgccgccattgcctt

SEQ ID NO: 153033 - DNA, 22 bp, Artificial Sequence
  Synthetic oligonucleotide; TTG chr11 5170829 5170850 5170834 5170829 -
ccttgcgcagtgtaatgcttat

SEQ ID NO: 153034 - DNA, 22 bp, Artificial Sequence
  Synthetic oligonucleotide; CTT chr11 5170825 5170846 5170830 5170825 -
gcgcagtgtaatgcttatgctc

SEQ ID NO: 153035 - DNA, 22 bp, Artificial Sequence
  Synthetic oligonucleotide; TTG chr11 5170824 5170845 5170829 5170824 -
cgcagtgtaatgcttatgctcc

SEQ ID NO: 153036 - DNA, 22 bp, Artificial Sequence
  Synthetic oligonucleotide; CTT chr11 5170809 5170830 5170814 5170809 -
atgctcccactgctctttctcc

SEQ ID NO: 153037 - DNA, 22 bp, Artificial Sequence
  Synthetic oligonucleotide; TTA chr11 5170808 5170829 5170813 5170808 -
tgctcccactgctctttctcct

SEQ ID NO: 153038 - DNA, 22 bp, Artificial Sequence
  Synthetic oligonucleotide; CTC chr11 5170803 5170824 5170808 5170803 -
ccactgctctttctcctgaggc

SEQ ID NO: 153039 - DNA, 22 bp, Artificial Sequence
  Synthetic oligonucleotide; CTG chr11 5170797 5170818 5170802 5170797 -
ctctttctcctgaggcgtctgc

SEQ ID NO: 153040 - DNA, 22 bp, Artificial Sequence
  Synthetic oligonucleotide; CTC chr11 5170794 5170815 5170799 5170794 -
tttctcctgaggcgtctgcctt

SEQ ID NO: 153041 - DNA, 22 bp, Artificial Sequence
  Synthetic oligonucleotide; CTT chr11 5170792 5170813 5170797 5170792 -
tctcctgaggcgtctgcctttc

SEQ ID NO: 153042 - DNA, 22 bp, Artificial Sequence
  Synthetic oligonucleotide; TTT chr11 5170791 5170812 5170796 5170791 -
ctcctgaggcgtctgcctttct

SEQ ID NO: 153043 - DNA, 22 bp, Artificial Sequence
  Synthetic oligonucleotide; TTC chr11 5170790 5170811 5170795 5170790 -
tcctgaggcgtctgcctttctg

SEQ ID NO: 153044 - DNA, 22 bp, Artificial Sequence
  Synthetic oligonucleotide; CTC chr11 5170788 5170809 5170793 5170788 -
ctgaggcgtctgcctttctgtg

SEQ ID NO: 153045 - DNA, 22 bp, Artificial Sequence
  Synthetic oligonucleotide; CTG chr11 5170785 5170806 5170790 5170785 -
aggcgtctgcctttctgtggcc

SEQ ID NO: 153046 - DNA, 22 bp, Artificial Sequence
  Synthetic oligonucleotide; CTG chr11 5170776 5170797 5170781 5170776 -
cctttctgtggccacaataccc

SEQ ID NO: 153047 - DNA, 22 bp, Artificial Sequence
  Synthetic oligonucleotide; CTT chr11 5170772 5170793 5170777 5170772 -
tctgtggccacaataccctcac

SEQ ID NO: 153048 - DNA, 22 bp, Artificial Sequence
  Synthetic oligonucleotide; TTT chr11 5170771 5170792 5170776 5170771 -
ctgtggccacaataccctcaca

SEQ ID NO: 153049 - DNA, 22 bp, Artificial Sequence
  Synthetic oligonucleotide; TTC chr11 5170770 5170791 5170775 5170770 -
tgtggccacaataccctcacac

SEQ ID NO: 153050 - DNA, 22 bp, Artificial Sequence
  Synthetic oligonucleotide; CTG chr11 5170768 5170789 5170773 5170768 -
tggccacaataccctcacacac

SEQ ID NO: 153051 - DNA, 22 bp, Artificial Sequence
  Synthetic oligonucleotide; CTC chr11 5170752 5170773 5170757 5170752 -
acacactcttattgcctccact

SEQ ID NO: 153052 - DNA, 22 bp, Artificial Sequence
  Synthetic oligonucleotide; CTC chr11 5170744 5170765 5170749 5170744 -
ttattgcctccactcagatctg

SEQ ID NO: 153053 - DNA, 22 bp, Artificial Sequence
  Synthetic oligonucleotide; CTT chr11 5170742 5170763 5170747 5170742 -
attgcctccactcagatctgat

SEQ ID NO: 153054 - DNA, 22 bp, Artificial Sequence
  Synthetic oligonucleotide; TTA chr11 5170741 5170762 5170746 5170741 -
ttgcctccactcagatctgatc

SEQ ID NO: 153055 - DNA, 22 bp, Artificial Sequence
  Synthetic oligonucleotide; TTG chr11 5170738 5170759 5170743 5170738 -
cctccactcagatctgatcaaa

SEQ ID NO: 153056 - DNA, 22 bp, Artificial Sequence
  Synthetic oligonucleotide; CTC chr11 5170734 5170755 5170739 5170734 -
cactcagatctgatcaaattgc

SEQ ID NO: 153057 - DNA, 22 bp, Artificial Sequence
  Synthetic oligonucleotide; CTC chr11 5170729 5170750 5170734 5170729 -
agatctgatcaaattgccctgt

SEQ ID NO: 153058 - DNA, 22 bp, Artificial Sequence
  Synthetic oligonucleotide; CTG chr11 5170722 5170743 5170727 5170722 -
atcaaattgccctgtggagaca

SEQ ID NO: 153059 - DNA, 22 bp, Artificial Sequence
  Synthetic oligonucleotide; TTG chr11 5170713 5170734 5170718 5170713 -
ccctgtggagacacacgtccca

SEQ ID NO: 153060 - DNA, 22 bp, Artificial Sequence
  Synthetic oligonucleotide; CTG chr11 5170708 5170729 5170713 5170708 -
tggagacacacgtcccaatagc

SEQ ID NO: 153061 - DNA, 22 bp, Artificial Sequence
  Synthetic oligonucleotide; CTG chr11 5170680 5170701 5170685 5170680 -
gctctatttgtcattaccttca

SEQ ID NO: 153062 - DNA, 22 bp, Artificial Sequence
  Synthetic oligonucleotide; CTC chr11 5170676 5170697 5170681 5170676 -
tatttgtcattaccttcacatt

SEQ ID NO: 153063 - DNA, 22 bp, Artificial Sequence
  Synthetic oligonucleotide; CTA chr11 5170674 5170695 5170679 5170674 -
tttgtcattaccttcacatttg

SEQ ID NO: 153064 - DNA, 22 bp, Artificial Sequence
  Synthetic oligonucleotide; TTT chr11 5170671 5170692 5170676 5170671 -
gtcattaccttcacatttggac

SEQ ID NO: 153065 - DNA, 22 bp, Artificial Sequence
  Synthetic oligonucleotide; TTG chr11 5170670 5170691 5170675 5170670 -
tcattaccttcacatttggact

SEQ ID NO: 153066 - DNA, 22 bp, Artificial Sequence
  Synthetic oligonucleotide; TTA chr11 5170664 5170685 5170669 5170664 -
ccttcacatttggactggactt

SEQ ID NO: 153067 - DNA, 22 bp, Artificial Sequence
  Synthetic oligonucleotide; CTT chr11 5170660 5170681 5170665 5170660 -
cacatttggactggacttattg

SEQ ID NO: 153068 - DNA, 22 bp, Artificial Sequence
  Synthetic oligonucleotide; TTC chr11 5170659 5170680 5170664 5170659 -
acatttggactggacttattgt

SEQ ID NO: 153069 - DNA, 22 bp, Artificial Sequence
  Synthetic oligonucleotide; TTT chr11 5170653 5170674 5170658 5170653 -
ggactggacttattgttcattg

SEQ ID NO: 153070 - DNA, 22 bp, Artificial Sequence
  Synthetic oligonucleotide; TTG chr11 5170652 5170673 5170657 5170652 -
gactggacttattgttcattgt

SEQ ID NO: 153071 - DNA, 22 bp, Artificial Sequence
  Synthetic oligonucleotide; CTG chr11 5170647 5170668 5170652 5170647 -
gacttattgttcattgtggttt

SEQ ID NO: 153072 - DNA, 22 bp, Artificial Sequence
  Synthetic oligonucleotide; CTT chr11 5170642 5170663 5170647 5170642 -
attgttcattgtggtttcttat

SEQ ID NO: 153073 - DNA, 22 bp, Artificial Sequence
  Synthetic oligonucleotide; TTA chr11 5170641 5170662 5170646 5170641 -
ttgttcattgtggtttcttatg

SEQ ID NO: 153074 - DNA, 22 bp, Artificial Sequence
  Synthetic oligonucleotide; TTG chr11 5170638 5170659 5170643 5170638 -
ttcattgtggtttcttatgtgc

SEQ ID NO: 153075 - DNA, 22 bp, Artificial Sequence
  Synthetic oligonucleotide; TTC chr11 5170635 5170656 5170640 5170635 -
attgtggtttcttatgtgctga

SEQ ID NO: 153076 - DNA, 22 bp, Artificial Sequence
  Synthetic oligonucleotide; TTG chr11 5170631 5170652 5170636 5170631 -
tggtttcttatgtgctgattct

SEQ ID NO: 153077 - DNA, 22 bp, Artificial Sequence
  Synthetic oligonucleotide; TTT chr11 5170625 5170646 5170630 5170625 -
cttatgtgctgattcttcatac

SEQ ID NO: 153078 - DNA, 22 bp, Artificial Sequence
  Synthetic oligonucleotide; TTC chr11 5170624 5170645 5170629 5170624 -
ttatgtgctgattcttcataca

SEQ ID NO: 153079 - DNA, 22 bp, Artificial Sequence
  Synthetic oligonucleotide; CTT chr11 5170622 5170643 5170627 5170622 -
atgtgctgattcttcatacagt

SEQ ID NO: 153080 - DNA, 22 bp, Artificial Sequence
  Synthetic oligonucleotide; TTA chr11 5170621 5170642 5170626 5170621 -
tgtgctgattcttcatacagta

SEQ ID NO: 153081 - DNA, 22 bp, Artificial Sequence
  Synthetic oligonucleotide; CTG chr11 5170614 5170635 5170619 5170614 -
attcttcatacagtactggaaa

SEQ ID NO: 153082 - DNA, 22 bp, Artificial Sequence
  Synthetic oligonucleotide; TTC chr11 5170610 5170631 5170615 5170610 -
ttcatacagtactggaaatagc

SEQ ID NO: 153083 - DNA, 22 bp, Artificial Sequence
  Synthetic oligonucleotide; CTT chr11 5170608 5170629 5170613 5170608 -
catacagtactggaaatagctt

SEQ ID NO: 153084 - DNA, 22 bp, Artificial Sequence
  Synthetic oligonucleotide; TTC chr11 5170607 5170628 5170612 5170607 -
atacagtactggaaatagcttc

SEQ ID NO: 153085 - DNA, 22 bp, Artificial Sequence
  Synthetic oligonucleotide; CTG chr11 5170596 5170617 5170601 5170596 -
gaaatagcttctggagcagggc

SEQ ID NO: 153086 - DNA, 22 bp, Artificial Sequence
  Synthetic oligonucleotide; CTT chr11 5170586 5170607 5170591 5170586 -
ctggagcagggcggtggcaggc

SEQ ID NO: 153087 - DNA, 22 bp, Artificial Sequence
  Synthetic oligonucleotide; TTC chr11 5170585 5170606 5170590 5170585 -
tggagcagggcggtggcaggca

SEQ ID NO: 153088 - DNA, 22 bp, Artificial Sequence
  Synthetic oligonucleotide; CTG chr11 5170583 5170604 5170588 5170583 -
gagcagggcggtggcaggcact

SEQ ID NO: 153089 - DNA, 22 bp, Artificial Sequence
  Synthetic oligonucleotide; CTC chr11 5170560 5170581 5170565 5170560 -
aacacatgtgtgtcgcacatat

SEQ ID NO: 153090 - DNA, 22 bp, Artificial Sequence
  Synthetic oligonucleotide; CTG chr11 5170532 5170553 5170537 5170532 -
tgcttgtgtactatgtgcccat

SEQ ID NO: 153091 - DNA, 22 bp, Artificial Sequence
  Synthetic oligonucleotide; CTT chr11 5170527 5170548 5170532 5170527 -
gtgtactatgtgcccatgatca

SEQ ID NO: 153092 - DNA, 22 bp, Artificial Sequence
  Synthetic oligonucleotide; TTG chr11 5170526 5170547 5170531 5170526 -
tgtactatgtgcccatgatcag

SEQ ID NO: 153093 - DNA, 22 bp, Artificial Sequence
  Synthetic oligonucleotide; CTA chr11 5170519 5170540 5170524 5170519 -
tgtgcccatgatcagcctctcc

SEQ ID NO: 153094 - DNA, 22 bp, Artificial Sequence
  Synthetic oligonucleotide; CTC chr11 5170500 5170521 5170505 5170500 -
tccctgatgcaccgctttggac

SEQ ID NO: 153095 - DNA, 22 bp, Artificial Sequence
  Synthetic oligonucleotide; CTC chr11 5170498 5170519 5170503 5170498 -
cctgatgcaccgctttggacgg

SEQ ID NO: 153096 - DNA, 22 bp, Artificial Sequence
  Synthetic oligonucleotide; CTG chr11 5170494 5170515 5170499 5170494 -
atgcaccgctttggacggcatt

SEQ ID NO: 153097 - DNA, 22 bp, Artificial Sequence
  Synthetic oligonucleotide; CTT chr11 5170483 5170504 5170488 5170483 -
tggacggcatttacctccactt

SEQ ID NO: 153098 - DNA, 22 bp, Artificial Sequence
  Synthetic oligonucleotide; TTT chr11 5170482 5170503 5170487 5170482 -
ggacggcatttacctccacttt

SEQ ID NO: 153099 - DNA, 22 bp, Artificial Sequence
  Synthetic oligonucleotide; TTG chr11 5170481 5170502 5170486 5170481 -
gacggcatttacctccactttt

SEQ ID NO: 153100 - DNA, 22 bp, Artificial Sequence
  Synthetic oligonucleotide; TTT chr11 5170471 5170492 5170476 5170471 -
acctccacttttccagactgtc

SEQ ID NO: 153101 - DNA, 22 bp, Artificial Sequence
  Synthetic oligonucleotide; TTA chr11 5170470 5170491 5170475 5170470 -
cctccacttttccagactgtca

SEQ ID NO: 153102 - DNA, 22 bp, Artificial Sequence
  Synthetic oligonucleotide; CTC chr11 5170466 5170487 5170471 5170466 -
cacttttccagactgtcacggc

SEQ ID NO: 153103 - DNA, 22 bp, Artificial Sequence
  Synthetic oligonucleotide; CTT chr11 5170461 5170482 5170466 5170461 -
ttccagactgtcacggccaatg

SEQ ID NO: 153104 - DNA, 22 bp, Artificial Sequence
  Synthetic oligonucleotide; TTT chr11 5170460 5170481 5170465 5170460 -
tccagactgtcacggccaatgc

SEQ ID NO: 153105 - DNA, 22 bp, Artificial Sequence
  Synthetic oligonucleotide; TTT chr11 5170459 5170480 5170464 5170459 -
ccagactgtcacggccaatgct

SEQ ID NO: 153106 - DNA, 22 bp, Artificial Sequence
  Synthetic oligonucleotide; TTC chr11 5170458 5170479 5170463 5170458 -
cagactgtcacggccaatgctt

SEQ ID NO: 153107 - DNA, 22 bp, Artificial Sequence
  Synthetic oligonucleotide; CTG chr11 5170451 5170472 5170456 5170451 -
tcacggccaatgcttacctctt

SEQ ID NO: 153108 - DNA, 22 bp, Artificial Sequence
  Synthetic oligonucleotide; CTT chr11 5170436 5170457 5170441 5170436 -
acctcttttttcctcctgtggt

SEQ ID NO: 153109 - DNA, 22 bp, Artificial Sequence
  Synthetic oligonucleotide; TTA chr11 5170435 5170456 5170440 5170435 -
cctcttttttcctcctgtggtc

SEQ ID NO: 153110 - DNA, 22 bp, Artificial Sequence
  Synthetic oligonucleotide; CTC chr11 5170431 5170452 5170436 5170431 -
ttttttcctcctgtggtcaacc

SEQ ID NO: 153111 - DNA, 22 bp, Artificial Sequence
  Synthetic oligonucleotide; CTT chr11 5170429 5170450 5170434 5170429 -
ttttcctcctgtggtcaacccc

SEQ ID NO: 153112 - DNA, 22 bp, Artificial Sequence
  Synthetic oligonucleotide; TTT chr11 5170428 5170449 5170433 5170428 -
tttcctcctgtggtcaacccca

SEQ ID NO: 153113 - DNA, 22 bp, Artificial Sequence
  Synthetic oligonucleotide; TTT chr11 5170427 5170448 5170432 5170427 -
ttcctcctgtggtcaaccccat

SEQ ID NO: 153114 - DNA, 22 bp, Artificial Sequence
  Synthetic oligonucleotide; TTT chr11 5170426 5170447 5170431 5170426 -
tcctcctgtggtcaaccccatt

SEQ ID NO: 153115 - DNA, 22 bp, Artificial Sequence
  Synthetic oligonucleotide; TTT chr11 5170425 5170446 5170430 5170425 -
cctcctgtggtcaaccccattg

SEQ ID NO: 153116 - DNA, 22 bp, Artificial Sequence
  Synthetic oligonucleotide; TTC chr11 5170424 5170445 5170429 5170424 -
ctcctgtggtcaaccccattgt

SEQ ID NO: 153117 - DNA, 22 bp, Artificial Sequence
  Synthetic oligonucleotide; CTC chr11 5170421 5170442 5170426 5170421 -
ctgtggtcaaccccattgtcta

SEQ ID NO: 153118 - DNA, 22 bp, Artificial Sequence
  Synthetic oligonucleotide; CTG chr11 5170418 5170439 5170423 5170418 -
tggtcaaccccattgtctatag

SEQ ID NO: 153119 - DNA, 22 bp, Artificial Sequence
  Synthetic oligonucleotide; TTG chr11 5170403 5170424 5170408 5170403 -
tctatagtatcaaaatcaaaga

SEQ ID NO: 153120 - DNA, 22 bp, Artificial Sequence
  Synthetic oligonucleotide; CTA chr11 5170399 5170420 5170404 5170399 -
tagtatcaaaatcaaagaaatt

SEQ ID NO: 153121 - DNA, 22 bp, Artificial Sequence
  Synthetic oligonucleotide; TTC chr11 5170376 5170397 5170381 5170376 -
gcaacagcgttgttcttacact

SEQ ID NO: 153122 - DNA, 22 bp, Artificial Sequence
  Synthetic oligonucleotide; TTG chr11 5170364 5170385 5170369 5170364 -
ttcttacactatccaggaagag

SEQ ID NO: 153123 - DNA, 22 bp, Artificial Sequence
  Synthetic oligonucleotide; TTC chr11 5170361 5170382 5170366 5170361 -
ttacactatccaggaagagggg

SEQ ID NO: 153124 - DNA, 22 bp, Artificial Sequence
  Synthetic oligonucleotide; CTT chr11 5170359 5170380 5170364 5170359 -
acactatccaggaagaggggtg

SEQ ID NO: 153125 - DNA, 22 bp, Artificial Sequence
  Synthetic oligonucleotide; TTA chr11 5170358 5170379 5170363 5170358 -
cactatccaggaagaggggtga

SEQ ID NO: 153126 - DNA, 22 bp, Artificial Sequence
  Synthetic oligonucleotide; CTA chr11 5170353 5170374 5170358 5170353 -
tccaggaagaggggtgagttct

SEQ ID NO: 153127 - DNA, 22 bp, Artificial Sequence
  Synthetic oligonucleotide; TTC chr11 5170332 5170353 5170337 5170332 -
taatggagactgaagataccct

SEQ ID NO: 153128 - DNA, 22 bp, Artificial Sequence
  Synthetic oligonucleotide; CTA chr11 5170330 5170351 5170335 5170330 -
atggagactgaagataccctga

SEQ ID NO: 153129 - DNA, 22 bp, Artificial Sequence
  Synthetic oligonucleotide; CTG chr11 5170320 5170341 5170325 5170320 -
aagataccctgacagcacaggc

SEQ ID NO: 153130 - DNA, 22 bp, Artificial Sequence
  Synthetic oligonucleotide; CTG chr11 5170309 5170330 5170314 5170309 -
acagcacaggcacttagatcag

SEQ ID NO: 153131 - DNA, 22 bp, Artificial Sequence
  Synthetic oligonucleotide; CTT chr11 5170294 5170315 5170299 5170294 -
agatcaggctttattacctgaa

SEQ ID NO: 153132 - DNA, 22 bp, Artificial Sequence
  Synthetic oligonucleotide; TTA chr11 5170293 5170314 5170298 5170293 -
gatcaggctttattacctgaat

SEQ ID NO: 153133 - DNA, 22 bp, Artificial Sequence
  Synthetic oligonucleotide; CTT chr11 5170283 5170304 5170288 5170283 -
tattacctgaatattagctttg

SEQ ID NO: 153134 - DNA, 22 bp, Artificial Sequence
  Synthetic oligonucleotide; TTT chr11 5170282 5170303 5170287 5170282 -
attacctgaatattagctttgc

SEQ ID NO: 153135 - DNA, 22 bp, Artificial Sequence
  Synthetic oligonucleotide; TTA chr11 5170281 5170302 5170286 5170281 -
ttacctgaatattagctttgca

SEQ ID NO: 153136 - DNA, 22 bp, Artificial Sequence
  Synthetic oligonucleotide; TTA chr11 5170278 5170299 5170283 5170278 -
cctgaatattagctttgcaaat

SEQ ID NO: 153137 - DNA, 22 bp, Artificial Sequence
  Synthetic oligonucleotide; CTG chr11 5170274 5170295 5170279 5170274 -
aatattagctttgcaaatatga

SEQ ID NO: 153138 - DNA, 22 bp, Artificial Sequence
  Synthetic oligonucleotide; TTA chr11 5170267 5170288 5170272 5170267 -
gctttgcaaatatgaaaaattc

SEQ ID NO: 153139 - DNA, 22 bp, Artificial Sequence
  Synthetic oligonucleotide; CTT chr11 5170263 5170284 5170268 5170263 -
tgcaaatatgaaaaattccatg

SEQ ID NO: 153140 - DNA, 22 bp, Artificial Sequence
  Synthetic oligonucleotide; TTT chr11 5170262 5170283 5170267 5170262 -
gcaaatatgaaaaattccatgg

SEQ ID NO: 153141 - DNA, 22 bp, Artificial Sequence
  Synthetic oligonucleotide; TTG chr11 5170261 5170282 5170266 5170261 -
caaatatgaaaaattccatggc

SEQ ID NO: 153142 - DNA, 22 bp, Artificial Sequence
  Synthetic oligonucleotide; TTC chr11 5170245 5170266 5170250 5170245 -
catggcttattattgcttgtta

SEQ ID NO: 153143 - DNA, 22 bp, Artificial Sequence
  Synthetic oligonucleotide; CTT chr11 5170237 5170258 5170242 5170237 -
attattgcttgttaatgagctt

SEQ ID NO: 153144 - DNA, 22 bp, Artificial Sequence
  Synthetic oligonucleotide; TTA chr11 5170236 5170257 5170241 5170236 -
ttattgcttgttaatgagcttt

SEQ ID NO: 153145 - DNA, 22 bp, Artificial Sequence
  Synthetic oligonucleotide; TTA chr11 5170233 5170254 5170238 5170233 -
ttgcttgttaatgagctttaac

SEQ ID NO: 153146 - DNA, 22 bp, Artificial Sequence
  Synthetic oligonucleotide; TTG chr11 5170230 5170251 5170235 5170230 -
cttgttaatgagctttaacatt

SEQ ID NO: 153147 - DNA, 22 bp, Artificial Sequence
  Synthetic oligonucleotide; CTT chr11 5170227 5170248 5170232 5170227 -
gttaatgagctttaacattttg

SEQ ID NO: 153148 - DNA, 22 bp, Artificial Sequence
  Synthetic oligonucleotide; TTG chr11 5170226 5170247 5170231 5170226 -
ttaatgagctttaacattttgt

SEQ ID NO: 153149 - DNA, 22 bp, Artificial Sequence
  Synthetic oligonucleotide; TTA chr11 5170223 5170244 5170228 5170223 -
atgagctttaacattttgtaga

SEQ ID NO: 153150 - DNA, 22 bp, Artificial Sequence
  Synthetic oligonucleotide; CTT chr11 5170215 5170236 5170220 5170215 -
taacattttgtagatgaagaaa

SEQ ID NO: 153151 - DNA, 22 bp, Artificial Sequence
  Synthetic oligonucleotide; TTT chr11 5170214 5170235 5170219 5170214 -
aacattttgtagatgaagaaaa

SEQ ID NO: 153152 - DNA, 22 bp, Artificial Sequence
  Synthetic oligonucleotide; TTA chr11 5170213 5170234 5170218 5170213 -
acattttgtagatgaagaaaaa

SEQ ID NO: 153153 - DNA, 22 bp, Artificial Sequence
  Synthetic oligonucleotide; TTT chr11 5170207 5170228 5170212 5170207 -
tgtagatgaagaaaaaaaacag

SEQ ID NO: 153154 - DNA, 22 bp, Artificial Sequence
  Synthetic oligonucleotide; TTT chr11 5170206 5170227 5170211 5170206 -
gtagatgaagaaaaaaaacagt

SEQ ID NO: 153155 - DNA, 22 bp, Artificial Sequence
  Synthetic oligonucleotide; TTG chr11 5170205 5170226 5170210 5170205 -
tagatgaagaaaaaaaacagtt

SEQ ID NO: 153156 - DNA, 22 bp, Artificial Sequence
  Synthetic oligonucleotide; TTT chr11 5170182 5170203 5170187 5170182 -
tatatatttccctgagaatagg

SEQ ID NO: 153157 - DNA, 22 bp, Artificial Sequence
  Synthetic oligonucleotide; TTT chr11 5170181 5170202 5170186 5170181 -
atatatttccctgagaatagga

SEQ ID NO: 153158 - DNA, 22 bp, Artificial Sequence
  Synthetic oligonucleotide; TTA chr11 5170180 5170201 5170185 5170180 -
tatatttccctgagaataggaa

SEQ ID NO: 153159 - DNA, 22 bp, Artificial Sequence
  Synthetic oligonucleotide; TTT chr11 5170173 5170194 5170178 5170173 -
ccctgagaataggaaatggcat

SEQ ID NO: 153160 - DNA, 22 bp, Artificial Sequence
  Synthetic oligonucleotide; TTC chr11 5170172 5170193 5170177 5170172 -
cctgagaataggaaatggcatt

SEQ ID NO: 153161 - DNA, 22 bp, Artificial Sequence
  Synthetic oligonucleotide; CTG chr11 5170168 5170189 5170173 5170168 -
agaataggaaatggcattactc

SEQ ID NO: 153162 - DNA, 22 bp, Artificial Sequence
  Synthetic oligonucleotide; TTA chr11 5170149 5170170 5170154 5170149 -
ctctgaaataaaattgtgggag

SEQ ID NO: 153163 - DNA, 22 bp, Artificial Sequence
  Synthetic oligonucleotide; CTC chr11 5170146 5170167 5170151 5170146 -
tgaaataaaattgtgggaggag

SEQ ID NO: 153164 - DNA, 22 bp, Artificial Sequence
  Synthetic oligonucleotide; CTG chr11 5170144 5170165 5170149 5170144 -
aaataaaattgtgggaggaggc

SEQ ID NO: 153165 - DNA, 22 bp, Artificial Sequence
  Synthetic oligonucleotide; TTG chr11 5170133 5170154 5170138 5170133 -
tgggaggaggcatagaacacag

SEQ ID NO: 153166 - DNA, 22 bp, Artificial Sequence
  Synthetic oligonucleotide; CTT chr11 5170107 5170128 5170112 5170107 -
tgtcctggtgatgacacacttt

SEQ ID NO: 153167 - DNA, 22 bp, Artificial Sequence
  Synthetic oligonucleotide; TTT chr11 5170106 5170127 5170111 5170106 -
gtcctggtgatgacacactttg

SEQ ID NO: 153168 - DNA, 22 bp, Artificial Sequence
  Synthetic oligonucleotide; TTG chr11 5170105 5170126 5170110 5170105 -
tcctggtgatgacacactttgt

SEQ ID NO: 153169 - DNA, 22 bp, Artificial Sequence
  Synthetic oligonucleotide; CTG chr11 5170100 5170121 5170105 5170100 -
gtgatgacacactttgtgtgct

SEQ ID NO: 153170 - DNA, 22 bp, Artificial Sequence
  Synthetic oligonucleotide; CTT chr11 5170086 5170107 5170091 5170086 -
tgtgtgctgaatccttgaatac

SEQ ID NO: 153171 - DNA, 22 bp, Artificial Sequence
  Synthetic oligonucleotide; TTT chr11 5170085 5170106 5170090 5170085 -
gtgtgctgaatccttgaatact

SEQ ID NO: 153172 - DNA, 22 bp, Artificial Sequence
  Synthetic oligonucleotide; TTG chr11 5170084 5170105 5170089 5170084 -
tgtgctgaatccttgaatactc

SEQ ID NO: 153173 - DNA, 22 bp, Artificial Sequence
  Synthetic oligonucleotide; CTG chr11 5170077 5170098 5170082 5170077 -
aatccttgaatactcaattcag

SEQ ID NO: 153174 - DNA, 22 bp, Artificial Sequence
  Synthetic oligonucleotide; CTT chr11 5170070 5170091 5170075 5170070 -
gaatactcaattcagtgacatt

SEQ ID NO: 153175 - DNA, 22 bp, Artificial Sequence
  Synthetic oligonucleotide; TTG chr11 5170069 5170090 5170074 5170069 -
aatactcaattcagtgacattt

SEQ ID NO: 153176 - DNA, 22 bp, Artificial Sequence
  Synthetic oligonucleotide; CTC chr11 5170062 5170083 5170067 5170062 -
aattcagtgacatttggttctg

SEQ ID NO: 153177 - DNA, 22 bp, Artificial Sequence
  Synthetic oligonucleotide; TTC chr11 5170057 5170078 5170062 5170057 -
agtgacatttggttctgggaat

SEQ ID NO: 153178 - DNA, 22 bp, Artificial Sequence
  Synthetic oligonucleotide; TTT chr11 5170047 5170068 5170052 5170047 -
ggttctgggaatatgtagaaag

SEQ ID NO: 153179 - DNA, 22 bp, Artificial Sequence
  Synthetic oligonucleotide; TTG chr11 5170046 5170067 5170051 5170046 -
gttctgggaatatgtagaaaga

SEQ ID NO: 153180 - DNA, 22 bp, Artificial Sequence
  Synthetic oligonucleotide; TTC chr11 5170042 5170063 5170047 5170042 -
tgggaatatgtagaaagagtct

SEQ ID NO: 153181 - DNA, 22 bp, Artificial Sequence
  Synthetic oligonucleotide; CTG chr11 5170040 5170061 5170045 5170040 -
ggaatatgtagaaagagtcttg

SEQ ID NO: 153182 - DNA, 22 bp, Artificial Sequence
  Synthetic oligonucleotide; CTT chr11 5170019 5170040 5170024 5170019 -
ggggaggtttaagtttctggtt

SEQ ID NO: 153183 - DNA, 22 bp, Artificial Sequence
  Synthetic oligonucleotide; TTG chr11 5170018 5170039 5170023 5170018 -
gggaggtttaagtttctggtta

SEQ ID NO: 153184 - DNA, 22 bp, Artificial Sequence
  Synthetic oligonucleotide; TTT chr11 5170009 5170030 5170014 5170009 -
aagtttctggttatattaaaat

SEQ ID NO: 153185 - DNA, 22 bp, Artificial Sequence
  Synthetic oligonucleotide; TTA chr11 5170008 5170029 5170013 5170008 -
agtttctggttatattaaaatt

SEQ ID NO: 153186 - DNA, 22 bp, Artificial Sequence
  Synthetic oligonucleotide; TTT chr11 5170003 5170024 5170008 5170003 -
ctggttatattaaaattagtga

SEQ ID NO: 153187 - DNA, 22 bp, Artificial Sequence
  Synthetic oligonucleotide; TTC chr11 5170002 5170023 5170007 5170002 -
tggttatattaaaattagtgat

SEQ ID NO: 153188 - DNA, 22 bp, Artificial Sequence
  Synthetic oligonucleotide; CTG chr11 5170000 5170021 5170005 5170000 -
gttatattaaaattagtgatac

SEQ ID NO: 153189 - DNA, 22 bp, Artificial Sequence
  Synthetic oligonucleotide; TTA chr11 5169996 5170017 5170001 5169996 -
tattaaaattagtgatacatac

SEQ ID NO: 153190 - DNA, 22 bp, Artificial Sequence
  Synthetic oligonucleotide; TTA chr11 5169991 5170012 5169996 5169991 -
aaattagtgatacatacttgtg

SEQ ID NO: 153191 - DNA, 22 bp, Artificial Sequence
  Synthetic oligonucleotide; TTA chr11 5169985 5170006 5169990 5169985 -
gtgatacatacttgtgaaggaa

SEQ ID NO: 153192 - DNA, 22 bp, Artificial Sequence
  Synthetic oligonucleotide; CTT chr11 5169972 5169993 5169977 5169972 -
gtgaaggaaaataatcaggaca

SEQ ID NO: 153193 - DNA, 22 bp, Artificial Sequence
  Synthetic oligonucleotide; TTG chr11 5169971 5169992 5169976 5169971 -
tgaaggaaaataatcaggacac

SEQ ID NO: 153194 - DNA, 22 bp, Artificial Sequence
  Synthetic oligonucleotide; TTG chr11 5169933 5169954 5169938 5169933 -
tattattttgtttgtatagttt

SEQ ID NO: 153195 - DNA, 22 bp, Artificial Sequence
  Synthetic oligonucleotide; TTA chr11 5169928 5169949 5169933 5169928 -
ttttgtttgtatagtttcagaa

SEQ ID NO: 153196 - DNA, 22 bp, Artificial Sequence
  Synthetic oligonucleotide; TTT chr11 5169925 5169946 5169930 5169925 -
tgtttgtatagtttcagaacat

SEQ ID NO: 153197 - DNA, 22 bp, Artificial Sequence
  Synthetic oligonucleotide; TTT chr11 5169924 5169945 5169929 5169924 -
gtttgtatagtttcagaacatg

SEQ ID NO: 153198 - DNA, 22 bp, Artificial Sequence
  Synthetic oligonucleotide; TTG chr11 5169923 5169944 5169928 5169923 -
tttgtatagtttcagaacatgt

SEQ ID NO: 153199 - DNA, 22 bp, Artificial Sequence
  Synthetic oligonucleotide; TTT chr11 5169920 5169941 5169925 5169920 -
gtatagtttcagaacatgtaca

SEQ ID NO: 153200 - DNA, 22 bp, Artificial Sequence
  Synthetic oligonucleotide; TTG chr11 5169919 5169940 5169924 5169919 -
tatagtttcagaacatgtacat

SEQ ID NO: 153201 - DNA, 22 bp, Artificial Sequence
  Synthetic oligonucleotide; TTT chr11 5169911 5169932 5169916 5169911 -
cagaacatgtacatctaattta

SEQ ID NO: 153202 - DNA, 22 bp, Artificial Sequence
  Synthetic oligonucleotide; TTC chr11 5169910 5169931 5169915 5169910 -
agaacatgtacatctaatttaa

SEQ ID NO: 153203 - DNA, 22 bp, Artificial Sequence
  Synthetic oligonucleotide; CTA chr11 5169894 5169915 5169899 5169894 -
atttaatgtcaaaaaatcagaa

SEQ ID NO: 153204 - DNA, 22 bp, Artificial Sequence
  Synthetic oligonucleotide; TTT chr11 5169890 5169911 5169895 5169890 -
aatgtcaaaaaatcagaaccct

SEQ ID NO: 153205 - DNA, 22 bp, Artificial Sequence
  Synthetic oligonucleotide; TTA chr11 5169889 5169910 5169894 5169889 -
atgtcaaaaaatcagaaccctg

SEQ ID NO: 153206 - DNA, 22 bp, Artificial Sequence
  Synthetic oligonucleotide; CTG chr11 5169867 5169888 5169872 5169867 -
cttacctctgatggatataaag

SEQ ID NO: 153207 - DNA, 22 bp, Artificial Sequence
  Synthetic oligonucleotide; CTT chr11 5169864 5169885 5169869 5169864 -
acctctgatggatataaagatg

SEQ ID NO: 153208 - DNA, 22 bp, Artificial Sequence
  Synthetic oligonucleotide; TTA chr11 5169863 5169884 5169868 5169863 -
cctctgatggatataaagatgg

SEQ ID NO: 153209 - DNA, 22 bp, Artificial Sequence
  Synthetic oligonucleotide; CTC chr11 5169859 5169880 5169864 5169859 -
tgatggatataaagatggaaga

SEQ ID NO: 153210 - DNA, 22 bp, Artificial Sequence
  Synthetic oligonucleotide; CTG chr11 5169857 5169878 5169862 5169857 -
atggatataaagatggaagaat

SEQ ID NO: 153211 - DNA, 22 bp, Artificial Sequence
  Synthetic oligonucleotide; TTT chr11 5169813 5169834 5169818 5169813 -
ctggggagatggaaatattttg

SEQ ID NO: 153212 - DNA, 22 bp, Artificial Sequence
  Synthetic oligonucleotide; TTC chr11 5169812 5169833 5169817 5169812 -
tggggagatggaaatattttgt

SEQ ID NO: 153213 - DNA, 22 bp, Artificial Sequence
  Synthetic oligonucleotide; CTG chr11 5169810 5169831 5169815 5169810 -
gggagatggaaatattttgttg

SEQ ID NO: 153214 - DNA, 22 bp, Artificial Sequence
  Synthetic oligonucleotide; TTT chr11 5169793 5169814 5169798 5169793 -
tgttgtgttagggatgtggtga

SEQ ID NO: 153215 - DNA, 22 bp, Artificial Sequence
  Synthetic oligonucleotide; TTT chr11 5169792 5169813 5169797 5169792 -
gttgtgttagggatgtggtgac

SEQ ID NO: 153216 - DNA, 22 bp, Artificial Sequence
  Synthetic oligonucleotide; TTG chr11 5169791 5169812 5169796 5169791 -
ttgtgttagggatgtggtgaca

SEQ ID NO: 153217 - DNA, 22 bp, Artificial Sequence
  Synthetic oligonucleotide; TTG chr11 5169788 5169809 5169793 5169788 -
tgttagggatgtggtgacattg

SEQ ID NO: 153218 - DNA, 22 bp, Artificial Sequence
  Synthetic oligonucleotide; TTA chr11 5169783 5169804 5169788 5169783 -
gggatgtggtgacattgttttg

SEQ ID NO: 153219 - DNA, 22 bp, Artificial Sequence
  Synthetic oligonucleotide; TTG chr11 5169766 5169787 5169771 5169766 -
ttttgtcaatttgtcaaaacgg

SEQ ID NO: 153220 - DNA, 22 bp, Artificial Sequence
  Synthetic oligonucleotide; TTT chr11 5169763 5169784 5169768 5169763 -
tgtcaatttgtcaaaacggtac

SEQ ID NO: 153221 - DNA, 22 bp, Artificial Sequence
  Synthetic oligonucleotide; TTT chr11 5169762 5169783 5169767 5169762 -
gtcaatttgtcaaaacggtaca

SEQ ID NO: 153222 - DNA, 22 bp, Artificial Sequence
  Synthetic oligonucleotide; TTG chr11 5169761 5169782 5169766 5169761 -
tcaatttgtcaaaacggtacag

SEQ ID NO: 153223 - DNA, 22 bp, Artificial Sequence
  Synthetic oligonucleotide; TTT chr11 5169754 5169775 5169759 5169754 -
gtcaaaacggtacagctaagat

SEQ ID NO: 153224 - DNA, 22 bp, Artificial Sequence
  Synthetic oligonucleotide; TTG chr11 5169753 5169774 5169758 5169753 -
tcaaaacggtacagctaagatt

SEQ ID NO: 153225 - DNA, 22 bp, Artificial Sequence
  Synthetic oligonucleotide; CTA chr11 5169736 5169757 5169741 5169736 -
agatttgcacatttctaggtac

SEQ ID NO: 153226 - DNA, 22 bp, Artificial Sequence
  Synthetic oligonucleotide; TTT chr11 5169730 5169751 5169735 5169730 -
gcacatttctaggtacatcaat

SEQ ID NO: 153227 - DNA, 22 bp, Artificial Sequence
  Synthetic oligonucleotide; TTG chr11 5169729 5169750 5169734 5169729 -
cacatttctaggtacatcaatt

SEQ ID NO: 153228 - DNA, 22 bp, Artificial Sequence
  Synthetic oligonucleotide; TTT chr11 5169722 5169743 5169727 5169722 -
ctaggtacatcaattttacatc

SEQ ID NO: 153229 - DNA, 22 bp, Artificial Sequence
  Synthetic oligonucleotide; TTC chr11 5169721 5169742 5169726 5169721 -
taggtacatcaattttacatca

SEQ ID NO: 153230 - DNA, 22 bp, Artificial Sequence
  Synthetic oligonucleotide; CTA chr11 5169719 5169740 5169724 5169719 -
ggtacatcaattttacatcaaa

SEQ ID NO: 153231 - DNA, 22 bp, Artificial Sequence
  Synthetic oligonucleotide; TTT chr11 5169706 5169727 5169711 5169706 -
tacatcaaaacttctgaatgat

SEQ ID NO: 153232 - DNA, 22 bp, Artificial Sequence
  Synthetic oligonucleotide; TTT chr11 5169705 5169726 5169710 5169705 -
acatcaaaacttctgaatgata

SEQ ID NO: 153233 - DNA, 22 bp, Artificial Sequence
  Synthetic oligonucleotide; TTA chr11 5169704 5169725 5169709 5169704 -
catcaaaacttctgaatgataa

SEQ ID NO: 153234 - DNA, 22 bp, Artificial Sequence
  Synthetic oligonucleotide; CTT chr11 5169693 5169714 5169698 5169693 -
ctgaatgataataataacaaaa

SEQ ID NO: 153235 - DNA, 22 bp, Artificial Sequence
  Synthetic oligonucleotide; TTC chr11 5169692 5169713 5169697 5169692 -
tgaatgataataataacaaaaa

SEQ ID NO: 153236 - DNA, 22 bp, Artificial Sequence
  Synthetic oligonucleotide; CTG chr11 5169690 5169711 5169695 5169690 -
aatgataataataacaaaaagg

SEQ ID NO: 153237 - DNA, 22 bp, Artificial Sequence
  Synthetic oligonucleotide; TTA chr11 5169640 5169661 5169645 5169640 -
gatttcatagtgaatacaagtg

SEQ ID NO: 153238 - DNA, 22 bp, Artificial Sequence
  Synthetic oligonucleotide; TTT chr11 5169635 5169656 5169640 5169635 -
catagtgaatacaagtgtggaa

SEQ ID NO: 153239 - DNA, 22 bp, Artificial Sequence
  Synthetic oligonucleotide; TTC chr11 5169634 5169655 5169639 5169634 -
atagtgaatacaagtgtggaaa

SEQ ID NO: 153240 - DNA, 22 bp, Artificial Sequence
  Synthetic oligonucleotide; TTG chr11 5169590 5169611 5169595 5169590 -
ataattgttgaagttgtgtcat

SEQ ID NO: 153241 - DNA, 22 bp, Artificial Sequence
  Synthetic oligonucleotide; TTG chr11 5169583 5169604 5169588 5169583 -
ttgaagttgtgtcatgggtgcc

SEQ ID NO: 153242 - DNA, 22 bp, Artificial Sequence
  Synthetic oligonucleotide; TTG chr11 5169580 5169601 5169585 5169580 -
aagttgtgtcatgggtgcctgg

SEQ ID NO: 153243 - DNA, 22 bp, Artificial Sequence
  Synthetic oligonucleotide; TTG chr11 5169574 5169595 5169579 5169574 -
tgtcatgggtgcctggaaatta

SEQ ID NO: 153244 - DNA, 22 bp, Artificial Sequence
  Synthetic oligonucleotide; CTG chr11 5169559 5169580 5169564 5169559 -
gaaattaattataatattctgt

SEQ ID NO: 153245 - DNA, 22 bp, Artificial Sequence
  Synthetic oligonucleotide; TTA chr11 5169552 5169573 5169557 5169552 -
attataatattctgtttacttt

SEQ ID NO: 153246 - DNA, 22 bp, Artificial Sequence
  Synthetic oligonucleotide; TTA chr11 5169548 5169569 5169553 5169548 -
taatattctgtttactttgtgt

SEQ ID NO: 153247 - DNA, 22 bp, Artificial Sequence
  Synthetic oligonucleotide; TTC chr11 5169540 5169561 5169545 5169540 -
tgtttactttgtgtagtttaca

SEQ ID NO: 153248 - DNA, 22 bp, Artificial Sequence
  Synthetic oligonucleotide; CTG chr11 5169538 5169559 5169543 5169538 -
tttactttgtgtagtttacaat

SEQ ID NO: 153249 - DNA, 22 bp, Artificial Sequence
  Synthetic oligonucleotide; TTT chr11 5169535 5169556 5169540 5169535 -
actttgtgtagtttacaatttc

SEQ ID NO: 153250 - DNA, 22 bp, Artificial Sequence
  Synthetic oligonucleotide; TTA chr11 5169534 5169555 5169539 5169534 -
ctttgtgtagtttacaatttct

SEQ ID NO: 153251 - DNA, 22 bp, Artificial Sequence
  Synthetic oligonucleotide; CTT chr11 5169531 5169552 5169536 5169531 -
tgtgtagtttacaatttctgta

SEQ ID NO: 153252 - DNA, 22 bp, Artificial Sequence
  Synthetic oligonucleotide; TTT chr11 5169530 5169551 5169535 5169530 -
gtgtagtttacaatttctgtaa

SEQ ID NO: 153253 - DNA, 22 bp, Artificial Sequence
  Synthetic oligonucleotide; TTG chr11 5169529 5169550 5169534 5169529 -
tgtagtttacaatttctgtaat

SEQ ID NO: 153254 - DNA, 22 bp, Artificial Sequence
  Synthetic oligonucleotide; TTT chr11 5169521 5169542 5169526 5169521 -
acaatttctgtaataaaaagat

SEQ ID NO: 153255 - DNA, 22 bp, Artificial Sequence
  Synthetic oligonucleotide; TTA chr11 5169520 5169541 5169525 5169520 -
caatttctgtaataaaaagatt

SEQ ID NO: 153256 - DNA, 22 bp, Artificial Sequence
  Synthetic oligonucleotide; TTT chr11 5169514 5169535 5169519 5169514 -
ctgtaataaaaagattcttaaa

SEQ ID NO: 153257 - DNA, 22 bp, Artificial Sequence
  Synthetic oligonucleotide; TTC chr11 5169513 5169534 5169518 5169513 -
tgtaataaaaagattcttaaaa

SEQ ID NO: 153258 - DNA, 22 bp, Artificial Sequence
  Synthetic oligonucleotide; CTG chr11 5169511 5169532 5169516 5169511 -
taataaaaagattcttaaaaaa

SEQ ID NO: 153259 - DNA, 22 bp, Artificial Sequence
  Synthetic oligonucleotide; TTC chr11 5169497 5169518 5169502 5169497 -
ttaaaaaaattatactcagtgt

SEQ ID NO: 153260 - DNA, 22 bp, Artificial Sequence
  Synthetic oligonucleotide; CTT chr11 5169495 5169516 5169500 5169495 -
aaaaaaattatactcagtgtgc

SEQ ID NO: 153261 - DNA, 22 bp, Artificial Sequence
  Synthetic oligonucleotide; TTA chr11 5169494 5169515 5169499 5169494 -
aaaaaattatactcagtgtgct

SEQ ID NO: 153262 - DNA, 22 bp, Artificial Sequence
  Synthetic oligonucleotide; TTA chr11 5169485 5169506 5169490 5169485 -
tactcagtgtgctaatgttaaa

SEQ ID NO: 153263 - DNA, 22 bp, Artificial Sequence
  Synthetic oligonucleotide; CTC chr11 5169480 5169501 5169485 5169480 -
agtgtgctaatgttaaatctta

SEQ ID NO: 153264 - DNA, 22 bp, Artificial Sequence
  Synthetic oligonucleotide; CTA chr11 5169471 5169492 5169476 5169471 -
atgttaaatcttaattgaatat

SEQ ID NO: 153265 - DNA, 22 bp, Artificial Sequence
  Synthetic oligonucleotide; TTA chr11 5169465 5169486 5169470 5169465 -
aatcttaattgaatatgcacca

SEQ ID NO: 153266 - DNA, 22 bp, Artificial Sequence
  Synthetic oligonucleotide; CTT chr11 5169459 5169480 5169464 5169459 -
aattgaatatgcaccatgaagc

SEQ ID NO: 153267 - DNA, 22 bp, Artificial Sequence
  Synthetic oligonucleotide; TTA chr11 5169458 5169479 5169463 5169458 -
attgaatatgcaccatgaagca

SEQ ID NO: 153268 - DNA, 22 bp, Artificial Sequence
  Synthetic oligonucleotide; TTG chr11 5169454 5169475 5169459 5169454 -
aatatgcaccatgaagcagaga

SEQ ID NO: 153269 - DNA, 22 bp, Artificial Sequence
  Synthetic oligonucleotide; CTT chr11 5169426 5169447 5169431 5169426 -
ttaactggtcaggaggaaactg

SEQ ID NO: 153270 - DNA, 22 bp, Artificial Sequence
  Synthetic oligonucleotide; TTT chr11 5169425 5169446 5169430 5169425 -
taactggtcaggaggaaactgt

SEQ ID NO: 153271 - DNA, 22 bp, Artificial Sequence
  Synthetic oligonucleotide; TTT chr11 5169424 5169445 5169429 5169424 -
aactggtcaggaggaaactgtt

SEQ ID NO: 153272 - DNA, 22 bp, Artificial Sequence
  Synthetic oligonucleotide; TTA chr11 5169423 5169444 5169428 5169423 -
actggtcaggaggaaactgttt

SEQ ID NO: 153273 - DNA, 22 bp, Artificial Sequence
  Synthetic oligonucleotide; CTG chr11 5169419 5169440 5169424 5169419 -
gtcaggaggaaactgtttggct

SEQ ID NO: 153274 - DNA, 22 bp, Artificial Sequence
  Synthetic oligonucleotide; CTG chr11 5169404 5169425 5169409 5169404 -
tttggctttagaaagctatttt

SEQ ID NO: 153275 - DNA, 22 bp, Artificial Sequence
  Synthetic oligonucleotide; TTT chr11 5169401 5169422 5169406 5169401 -
ggctttagaaagctattttatt

SEQ ID NO: 153276 - DNA, 22 bp, Artificial Sequence
  Synthetic oligonucleotide; TTG chr11 5169400 5169421 5169405 5169400 -
gctttagaaagctattttattt

SEQ ID NO: 153277 - DNA, 22 bp, Artificial Sequence
  Synthetic oligonucleotide; CTT chr11 5169396 5169417 5169401 5169396 -
tagaaagctattttatttttaa

SEQ ID NO: 153278 - DNA, 22 bp, Artificial Sequence
  Synthetic oligonucleotide; TTT chr11 5169395 5169416 5169400 5169395 -
agaaagctattttatttttaat

SEQ ID NO: 153279 - DNA, 22 bp, Artificial Sequence
  Synthetic oligonucleotide; TTA chr11 5169394 5169415 5169399 5169394 -
gaaagctattttatttttaatg

SEQ ID NO: 153280 - DNA, 22 bp, Artificial Sequence
  Synthetic oligonucleotide; CTA chr11 5169386 5169407 5169391 5169386 -
ttttatttttaatgagttcaat

SEQ ID NO: 153281 - DNA, 22 bp, Artificial Sequence
  Synthetic oligonucleotide; TTT chr11 5169383 5169404 5169388 5169383 -
tatttttaatgagttcaatact

SEQ ID NO: 153282 - DNA, 22 bp, Artificial Sequence
  Synthetic oligonucleotide; TTT chr11 5169382 5169403 5169387 5169382 -
atttttaatgagttcaatacta

SEQ ID NO: 153283 - DNA, 22 bp, Artificial Sequence
  Synthetic oligonucleotide; TTA chr11 5169381 5169402 5169386 5169381 -
tttttaatgagttcaatactag

SEQ ID NO: 153284 - DNA, 22 bp, Artificial Sequence
  Synthetic oligonucleotide; TTT chr11 5169378 5169399 5169383 5169378 -
ttaatgagttcaatactagaaa

SEQ ID NO: 153285 - DNA, 22 bp, Artificial Sequence
  Synthetic oligonucleotide; TTT chr11 5169377 5169398 5169382 5169377 -
taatgagttcaatactagaaag

SEQ ID NO: 153286 - DNA, 22 bp, Artificial Sequence
  Synthetic oligonucleotide; TTT chr11 5169376 5169397 5169381 5169376 -
aatgagttcaatactagaaaga

SEQ ID NO: 153287 - DNA, 22 bp, Artificial Sequence
  Synthetic oligonucleotide; TTA chr11 5169375 5169396 5169380 5169375 -
atgagttcaatactagaaagaa

SEQ ID NO: 153288 - DNA, 22 bp, Artificial Sequence
  Synthetic oligonucleotide; TTC chr11 5169367 5169388 5169372 5169367 -
aatactagaaagaaaaaaaacc

SEQ ID NO: 153289 - DNA, 22 bp, Artificial Sequence
  Synthetic oligonucleotide; CTA chr11 5169360 5169381 5169365 5169360 -
gaaagaaaaaaaaccacaacta

SEQ ID NO: 153290 - DNA, 22 bp, Artificial Sequence
  Synthetic oligonucleotide; CTA chr11 5169338 5169359 5169343 5169338 -
cttgaaaatactgttttagaag

SEQ ID NO: 153291 - DNA, 22 bp, Artificial Sequence
  Synthetic oligonucleotide; CTT chr11 5169335 5169356 5169340 5169335 -
gaaaatactgttttagaagaaa

SEQ ID NO: 153292 - DNA, 22 bp, Artificial Sequence
  Synthetic oligonucleotide; TTG chr11 5169334 5169355 5169339 5169334 -
aaaatactgttttagaagaaaa

SEQ ID NO: 153293 - DNA, 22 bp, Artificial Sequence
  Synthetic oligonucleotide; CTG chr11 5169325 5169346 5169330 5169325 -
ttttagaagaaaataactaaaa

SEQ ID NO: 153294 - DNA, 22 bp, Artificial Sequence
  Synthetic oligonucleotide; TTT chr11 5169322 5169343 5169327 5169322 -
tagaagaaaataactaaaaaac

SEQ ID NO: 153295 - DNA, 22 bp, Artificial Sequence
  Synthetic oligonucleotide; TTT chr11 5169321 5169342 5169326 5169321 -
agaagaaaataactaaaaaaca

SEQ ID NO: 153296 - DNA, 22 bp, Artificial Sequence
  Synthetic oligonucleotide; TTA chr11 5169320 5169341 5169325 5169320 -
gaagaaaataactaaaaaacag

SEQ ID NO: 153297 - DNA, 22 bp, Artificial Sequence
  Synthetic oligonucleotide; CTA chr11 5169306 5169327 5169311 5169306 -
aaaaacagaaaaagcaaggcct

SEQ ID NO: 153298 - DNA, 22 bp, Artificial Sequence
  Synthetic oligonucleotide; CTA chr11 5169283 5169304 5169288 5169283 -
ctcctgcaatagtctttggtga

SEQ ID NO: 153299 - DNA, 22 bp, Artificial Sequence
  Synthetic oligonucleotide; CTC chr11 5169280 5169301 5169285 5169280 -
ctgcaatagtctttggtgacat

SEQ ID NO: 153300 - DNA, 22 bp, Artificial Sequence
  Synthetic oligonucleotide; CTG chr11 5169277 5169298 5169282 5169277 -
caatagtctttggtgacatcaa

SEQ ID NO: 153301 - DNA, 22 bp, Artificial Sequence
  Synthetic oligonucleotide; CTT chr11 5169267 5169288 5169272 5169267 -
tggtgacatcaatcactcggta

SEQ ID NO: 153302 - DNA, 22 bp, Artificial Sequence
  Synthetic oligonucleotide; TTT chr11 5169266 5169287 5169271 5169266 -
ggtgacatcaatcactcggtag

SEQ ID NO: 153303 - DNA, 22 bp, Artificial Sequence
  Synthetic oligonucleotide; TTG chr11 5169265 5169286 5169270 5169265 -
gtgacatcaatcactcggtagt

SEQ ID NO: 153304 - DNA, 22 bp, Artificial Sequence
  Synthetic oligonucleotide; CTC chr11 5169249 5169270 5169254 5169249 -
ggtagtagacaagcttctgaca

SEQ ID NO: 153305 - DNA, 22 bp, Artificial Sequence
  Synthetic oligonucleotide; CTT chr11 5169233 5169254 5169238 5169233 -
ctgacaaacaaaaaggtaggga

SEQ ID NO: 153306 - DNA, 22 bp, Artificial Sequence
  Synthetic oligonucleotide; TTC chr11 5169232 5169253 5169237 5169232 -
tgacaaacaaaaaggtagggag

SEQ ID NO: 153307 - DNA, 22 bp, Artificial Sequence
  Synthetic oligonucleotide; CTG chr11 5169230 5169251 5169235 5169230 -
acaaacaaaaaggtagggagga

SEQ ID NO: 153308 - DNA, 22 bp, Artificial Sequence
  Synthetic oligonucleotide; TTC chr11 5169196 5169217 5169201 5169196 -
tagaaaatccctcagacaggga

SEQ ID NO: 153309 - DNA, 22 bp, Artificial Sequence
  Synthetic oligonucleotide; CTA chr11 5169194 5169215 5169199 5169194 -
gaaaatccctcagacagggatt

SEQ ID NO: 153310 - DNA, 22 bp, Artificial Sequence
  Synthetic oligonucleotide; CTC chr11 5169183 5169204 5169188 5169183 -
agacagggattgcagagcccaa

SEQ ID NO: 153311 - DNA, 22 bp, Artificial Sequence
  Synthetic oligonucleotide; TTG chr11 5169171 5169192 5169176 5169171 -
cagagcccaactttttgttttc

SEQ ID NO: 153312 - DNA, 22 bp, Artificial Sequence
  Synthetic oligonucleotide; CTT chr11 5169158 5169179 5169163 5169158 -
tttgttttcttcagataatttt

SEQ ID NO: 153313 - DNA, 22 bp, Artificial Sequence
  Synthetic oligonucleotide; TTT chr11 5169157 5169178 5169162 5169157 -
ttgttttcttcagataattttg

SEQ ID NO: 153314 - DNA, 22 bp, Artificial Sequence
  Synthetic oligonucleotide; TTT chr11 5169156 5169177 5169161 5169156 -
tgttttcttcagataattttga

SEQ ID NO: 153315 - DNA, 22 bp, Artificial Sequence
  Synthetic oligonucleotide; TTT chr11 5169155 5169176 5169160 5169155 -
gttttcttcagataattttgaa

SEQ ID NO: 153316 - DNA, 22 bp, Artificial Sequence
  Synthetic oligonucleotide; TTG chr11 5169154 5169175 5169159 5169154 -
ttttcttcagataattttgaat

SEQ ID NO: 153317 - DNA, 22 bp, Artificial Sequence
  Synthetic oligonucleotide; TTT chr11 5169151 5169172 5169156 5169151 -
tcttcagataattttgaatttc

SEQ ID NO: 153318 - DNA, 22 bp, Artificial Sequence
  Synthetic oligonucleotide; TTT chr11 5169150 5169171 5169155 5169150 -
cttcagataattttgaatttcc

SEQ ID NO: 153319 - DNA, 22 bp, Artificial Sequence
  Synthetic oligonucleotide; TTC chr11 5169149 5169170 5169154 5169149 -
ttcagataattttgaatttcca

SEQ ID NO: 153320 - DNA, 22 bp, Artificial Sequence
  Synthetic oligonucleotide; CTT chr11 5169147 5169168 5169152 5169147 -
cagataattttgaatttccatg

SEQ ID NO: 153321 - DNA, 22 bp, Artificial Sequence
  Synthetic oligonucleotide; TTC chr11 5169146 5169167 5169151 5169146 -
agataattttgaatttccatga

SEQ ID NO: 153322 - DNA, 22 bp, Artificial Sequence
  Synthetic oligonucleotide; TTT chr11 5169137 5169158 5169142 5169137 -
tgaatttccatgaaccacagtg

SEQ ID NO: 153323 - DNA, 22 bp, Artificial Sequence
  Synthetic oligonucleotide; TTT chr11 5169136 5169157 5169141 5169136 -
gaatttccatgaaccacagtga

SEQ ID NO: 153324 - DNA, 22 bp, Artificial Sequence
  Synthetic oligonucleotide; TTG chr11 5169135 5169156 5169140 5169135 -
aatttccatgaaccacagtgaa

SEQ ID NO: 153325 - DNA, 22 bp, Artificial Sequence
  Synthetic oligonucleotide; TTT chr11 5169130 5169151 5169135 5169130 -
ccatgaaccacagtgaatatcc

SEQ ID NO: 153326 - DNA, 22 bp, Artificial Sequence
  Synthetic oligonucleotide; TTC chr11 5169129 5169150 5169134 5169129 -
catgaaccacagtgaatatcct

SEQ ID NO: 153327 - DNA, 22 bp, Artificial Sequence
  Synthetic oligonucleotide; CTA chr11 5169106 5169127 5169111 5169106 -
ttaaaccacacagtcttgagtg

SEQ ID NO: 153328 - DNA, 22 bp, Artificial Sequence
  Synthetic oligonucleotide; TTA chr11 5169103 5169124 5169108 5169103 -
aaccacacagtcttgagtgatt

SEQ ID NO: 153329 - DNA, 22 bp, Artificial Sequence
  Synthetic oligonucleotide; CTT chr11 5169089 5169110 5169094 5169089 -
gagtgattatcagccaaccaag

SEQ ID NO: 153330 - DNA, 22 bp, Artificial Sequence
  Synthetic oligonucleotide; TTG chr11 5169088 5169109 5169093 5169088 -
agtgattatcagccaaccaagt

SEQ ID NO: 153331 - DNA, 22 bp, Artificial Sequence
  Synthetic oligonucleotide; TTA chr11 5169080 5169101 5169085 5169080 -
tcagccaaccaagtaactaata

SEQ ID NO: 153332 - DNA, 22 bp, Artificial Sequence
  Synthetic oligonucleotide; CTA chr11 5169061 5169082 5169066 5169061 -
atagaaggtttggtcaaataaa

SEQ ID NO: 153333 - DNA, 22 bp, Artificial Sequence
  Synthetic oligonucleotide; TTT chr11 5169050 5169071 5169055 5169050 -
ggtcaaataaaaatatgtatca

SEQ ID NO: 153334 - DNA, 22 bp, Artificial Sequence
  Synthetic oligonucleotide; TTG chr11 5169049 5169070 5169054 5169049 -
gtcaaataaaaatatgtatcaa

SEQ ID NO: 153335 - DNA, 22 bp, Artificial Sequence
  Synthetic oligonucleotide; TTT chr11 5169008 5169029 5169013 5169008 -
atatttttttctgttttcctcg

SEQ ID NO: 153336 - DNA, 22 bp, Artificial Sequence
  Synthetic oligonucleotide; TTA chr11 5169007 5169028 5169012 5169007 -
tatttttttctgttttcctcga

SEQ ID NO: 153337 - DNA, 22 bp, Artificial Sequence
  Synthetic oligonucleotide; TTT chr11 5169002 5169023 5169007 5169002 -
ttttctgttttcctcgaaatta

SEQ ID NO: 153338 - DNA, 22 bp, Artificial Sequence
  Synthetic oligonucleotide; TTT chr11 5169001 5169022 5169006 5169001 -
tttctgttttcctcgaaattaa

SEQ ID NO: 153339 - DNA, 22 bp, Artificial Sequence
  Synthetic oligonucleotide; TTT chr11 5169000 5169021 5169005 5169000 -
ttctgttttcctcgaaattaat

SEQ ID NO: 153340 - DNA, 22 bp, Artificial Sequence
  Synthetic oligonucleotide; TTT chr11 5168999 5169020 5169004 5168999 -
tctgttttcctcgaaattaatt

SEQ ID NO: 153341 - DNA, 22 bp, Artificial Sequence
  Synthetic oligonucleotide; TTT chr11 5168998 5169019 5169003 5168998 -
ctgttttcctcgaaattaattt

SEQ ID NO: 153342 - DNA, 22 bp, Artificial Sequence
  Synthetic oligonucleotide; TTC chr11 5168997 5169018 5169002 5168997 -
tgttttcctcgaaattaattta

SEQ ID NO: 153343 - DNA, 22 bp, Artificial Sequence
  Synthetic oligonucleotide; CTG chr11 5168995 5169016 5169000 5168995 -
ttttcctcgaaattaatttatg

SEQ ID NO: 153344 - DNA, 22 bp, Artificial Sequence
  Synthetic oligonucleotide; TTT chr11 5168992 5169013 5168997 5168992 -
tcctcgaaattaatttatggac

SEQ ID NO: 153345 - DNA, 22 bp, Artificial Sequence
  Synthetic oligonucleotide; TTT chr11 5168991 5169012 5168996 5168991 -
cctcgaaattaatttatggact

SEQ ID NO: 153346 - DNA, 22 bp, Artificial Sequence
  Synthetic oligonucleotide; TTC chr11 5168990 5169011 5168995 5168990 -
ctcgaaattaatttatggactt

SEQ ID NO: 153347 - DNA, 22 bp, Artificial Sequence
  Synthetic oligonucleotide; CTC chr11 5168987 5169008 5168992 5168987 -
gaaattaatttatggacttaaa

SEQ ID NO: 153348 - DNA, 22 bp, Artificial Sequence
  Synthetic oligonucleotide; TTA chr11 5168980 5169001 5168985 5168980 -
atttatggacttaaaaaatttt

SEQ ID NO: 153349 - DNA, 22 bp, Artificial Sequence
  Synthetic oligonucleotide; TTT chr11 5168976 5168997 5168981 5168976 -
atggacttaaaaaatttttaat

SEQ ID NO: 153350 - DNA, 22 bp, Artificial Sequence
  Synthetic oligonucleotide; TTA chr11 5168975 5168996 5168980 5168975 -
tggacttaaaaaatttttaatg

SEQ ID NO: 153351 - DNA, 22 bp, Artificial Sequence
  Synthetic oligonucleotide; CTT chr11 5168968 5168989 5168973 5168968 -
aaaaaatttttaatgtatgaaa

SEQ ID NO: 153352 - DNA, 22 bp, Artificial Sequence
  Synthetic oligonucleotide; TTA chr11 5168967 5168988 5168972 5168967 -
aaaaatttttaatgtatgaaac

SEQ ID NO: 153353 - DNA, 22 bp, Artificial Sequence
  Synthetic oligonucleotide; TTT chr11 5168959 5168980 5168964 5168959 -
ttaatgtatgaaacacctttga

SEQ ID NO: 153354 - DNA, 22 bp, Artificial Sequence
  Synthetic oligonucleotide; TTT chr11 5168958 5168979 5168963 5168958 -
taatgtatgaaacacctttgaa

SEQ ID NO: 153355 - DNA, 22 bp, Artificial Sequence
  Synthetic oligonucleotide; TTT chr11 5168957 5168978 5168962 5168957 -
aatgtatgaaacacctttgaaa

SEQ ID NO: 153356 - DNA, 22 bp, Artificial Sequence
  Synthetic oligonucleotide; TTA chr11 5168956 5168977 5168961 5168956 -
atgtatgaaacacctttgaaag

SEQ ID NO: 153357 - DNA, 22 bp, Artificial Sequence
  Synthetic oligonucleotide; CTT chr11 5168940 5168961 5168945 5168940 -
tgaaagtgttcaatgtagtgaa

SEQ ID NO: 153358 - DNA, 22 bp, Artificial Sequence
  Synthetic oligonucleotide; TTT chr11 5168939 5168960 5168944 5168939 -
gaaagtgttcaatgtagtgaag

SEQ ID NO: 153359 - DNA, 22 bp, Artificial Sequence
  Synthetic oligonucleotide; TTG chr11 5168938 5168959 5168943 5168938 -
aaagtgttcaatgtagtgaagt

SEQ ID NO: 153360 - DNA, 22 bp, Artificial Sequence
  Synthetic oligonucleotide; TTC chr11 5168929 5168950 5168934 5168929 -
aatgtagtgaagtcataaaaac

SEQ ID NO: 153361 - DNA, 22 bp, Artificial Sequence
  Synthetic oligonucleotide; TTT chr11 5168895 5168916 5168900 5168895 -
aaaaaaaaattctcaaaatttc

SEQ ID NO: 153362 - DNA, 22 bp, Artificial Sequence
  Synthetic oligonucleotide; TTA chr11 5168894 5168915 5168899 5168894 -
aaaaaaaattctcaaaatttca

SEQ ID NO: 153363 - DNA, 22 bp, Artificial Sequence
  Synthetic oligonucleotide; TTC chr11 5168883 5168904 5168888 5168883 -
tcaaaatttcagagtaatttag

SEQ ID NO: 153364 - DNA, 22 bp, Artificial Sequence
  Synthetic oligonucleotide; CTC chr11 5168881 5168902 5168886 5168881 -
aaaatttcagagtaatttagaa

SEQ ID NO: 153365 - DNA, 22 bp, Artificial Sequence
  Synthetic oligonucleotide; TTT chr11 5168874 5168895 5168879 5168874 -
cagagtaatttagaagcccttc

SEQ ID NO: 153366 - DNA, 22 bp, Artificial Sequence
  Synthetic oligonucleotide; TTC chr11 5168873 5168894 5168878 5168873 -
agagtaatttagaagcccttcc

SEQ ID NO: 153367 - DNA, 22 bp, Artificial Sequence
  Synthetic oligonucleotide; TTT chr11 5168863 5168884 5168868 5168863 -
agaagcccttccttaacaataa

SEQ ID NO: 153368 - DNA, 22 bp, Artificial Sequence
  Synthetic oligonucleotide; TTA chr11 5168862 5168883 5168867 5168862 -
gaagcccttccttaacaataat

SEQ ID NO: 153369 - DNA, 22 bp, Artificial Sequence
  Synthetic oligonucleotide; CTT chr11 5168853 5168874 5168858 5168853 -
ccttaacaataattattggtaa

SEQ ID NO: 153370 - DNA, 22 bp, Artificial Sequence
  Synthetic oligonucleotide; TTC chr11 5168852 5168873 5168857 5168852 -
cttaacaataattattggtaac

SEQ ID NO: 153371 - DNA, 22 bp, Artificial Sequence
  Synthetic oligonucleotide; CTT chr11 5168849 5168870 5168854 5168849 -
aacaataattattggtaacctc

SEQ ID NO: 153372 - DNA, 22 bp, Artificial Sequence
  Synthetic oligonucleotide; TTA chr11 5168848 5168869 5168853 5168848 -
acaataattattggtaacctcc

SEQ ID NO: 153373 - DNA, 22 bp, Artificial Sequence
  Synthetic oligonucleotide; TTA chr11 5168838 5168859 5168843 5168838 -
ttggtaacctccattacagtcc

SEQ ID NO: 153374 - DNA, 22 bp, Artificial Sequence
  Synthetic oligonucleotide; TTG chr11 5168835 5168856 5168840 5168835 -
gtaacctccattacagtcctgt

SEQ ID NO: 153375 - DNA, 22 bp, Artificial Sequence
  Synthetic oligonucleotide; CTC chr11 5168827 5168848 5168832 5168827 -
cattacagtcctgtattactat

SEQ ID NO: 153376 - DNA, 22 bp, Artificial Sequence
  Synthetic oligonucleotide; TTA chr11 5168822 5168843 5168827 5168822 -
cagtcctgtattactattctta

SEQ ID NO: 153377 - DNA, 22 bp, Artificial Sequence
  Synthetic oligonucleotide; CTG chr11 5168814 5168835 5168819 5168814 -
tattactattcttatggtatac

SEQ ID NO: 153378 - DNA, 22 bp, Artificial Sequence
  Synthetic oligonucleotide; TTA chr11 5168809 5168830 5168814 5168809 -
ctattcttatggtatacatgaa

SEQ ID NO: 153379 - DNA, 22 bp, Artificial Sequence
  Synthetic oligonucleotide; CTA chr11 5168806 5168827 5168811 5168806 -
ttcttatggtatacatgaaaaa

SEQ ID NO: 153380 - DNA, 22 bp, Artificial Sequence
  Synthetic oligonucleotide; TTC chr11 5168803 5168824 5168808 5168803 -
ttatggtatacatgaaaaaact

SEQ ID NO: 153381 - DNA, 22 bp, Artificial Sequence
  Synthetic oligonucleotide; CTT chr11 5168801 5168822 5168806 5168801 -
atggtatacatgaaaaaactaa

SEQ ID NO: 153382 - DNA, 22 bp, Artificial Sequence
  Synthetic oligonucleotide; TTA chr11 5168800 5168821 5168805 5168800 -
tggtatacatgaaaaaactaag

SEQ ID NO: 153383 - DNA, 22 bp, Artificial Sequence
  Synthetic oligonucleotide; CTA chr11 5168780 5168801 5168785 5168780 -
agagataatttttgtaacttta

SEQ ID NO: 153384 - DNA, 22 bp, Artificial Sequence
  Synthetic oligonucleotide; TTT chr11 5168769 5168790 5168774 5168769 -
ttgtaactttatcaagttcaca

SEQ ID NO: 153385 - DNA, 22 bp, Artificial Sequence
  Synthetic oligonucleotide; TTT chr11 5168768 5168789 5168773 5168768 -
tgtaactttatcaagttcacac

SEQ ID NO: 153386 - DNA, 22 bp, Artificial Sequence
  Synthetic oligonucleotide; TTT chr11 5168767 5168788 5168772 5168767 -
gtaactttatcaagttcacaca

SEQ ID NO: 153387 - DNA, 22 bp, Artificial Sequence
  Synthetic oligonucleotide; TTG chr11 5168766 5168787 5168771 5168766 -
taactttatcaagttcacacaa

SEQ ID NO: 153388 - DNA, 22 bp, Artificial Sequence
  Synthetic oligonucleotide; CTT chr11 5168760 5168781 5168765 5168760 -
tatcaagttcacacaatggaaa

SEQ ID NO: 153389 - DNA, 22 bp, Artificial Sequence
  Synthetic oligonucleotide; TTT chr11 5168759 5168780 5168764 5168759 -
atcaagttcacacaatggaaaa

SEQ ID NO: 153390 - DNA, 22 bp, Artificial Sequence
  Synthetic oligonucleotide; TTA chr11 5168758 5168779 5168763 5168758 -
tcaagttcacacaatggaaaac

SEQ ID NO: 153391 - DNA, 22 bp, Artificial Sequence
  Synthetic oligonucleotide; TTC chr11 5168750 5168771 5168755 5168750 -
acacaatggaaaacttgtacac

SEQ ID NO: 153392 - DNA, 22 bp, Artificial Sequence
  Synthetic oligonucleotide; CTT chr11 5168734 5168755 5168739 5168734 -
gtacacccaagagccaagtcct

SEQ ID NO: 153393 - DNA, 22 bp, Artificial Sequence
  Synthetic oligonucleotide; TTG chr11 5168733 5168754 5168738 5168733 -
tacacccaagagccaagtcctc

SEQ ID NO: 153394 - DNA, 22 bp, Artificial Sequence
  Synthetic oligonucleotide; CTC chr11 5168711 5168732 5168716 5168711 -
agtgtgatgttatacacttgaa

SEQ ID NO: 153395 - DNA, 22 bp, Artificial Sequence
  Synthetic oligonucleotide; TTA chr11 5168699 5168720 5168704 5168699 -
tacacttgaaccagatgtacct

SEQ ID NO: 153396 - DNA, 22 bp, Artificial Sequence
  Synthetic oligonucleotide; CTT chr11 5168692 5168713 5168697 5168692 -
gaaccagatgtacctaggttga

SEQ ID NO: 153397 - DNA, 22 bp, Artificial Sequence
  Synthetic oligonucleotide; TTG chr11 5168691 5168712 5168696 5168691 -
aaccagatgtacctaggttgaa

SEQ ID NO: 153398 - DNA, 22 bp, Artificial Sequence
  Synthetic oligonucleotide; CTA chr11 5168676 5168697 5168681 5168676 -
ggttgaaatcttagctatcttg

SEQ ID NO: 153399 - DNA, 22 bp, Artificial Sequence
  Synthetic oligonucleotide; TTG chr11 5168671 5168692 5168676 5168671 -
aaatcttagctatcttgctatt

SEQ ID NO: 153400 - DNA, 22 bp, Artificial Sequence
  Synthetic oligonucleotide; CTT chr11 5168664 5168685 5168669 5168664 -
agctatcttgctattagtaatt

SEQ ID NO: 153401 - DNA, 22 bp, Artificial Sequence
  Synthetic oligonucleotide; TTA chr11 5168663 5168684 5168668 5168663 -
gctatcttgctattagtaattg

SEQ ID NO: 153402 - DNA, 22 bp, Artificial Sequence
  Synthetic oligonucleotide; CTA chr11 5168659 5168680 5168664 5168659 -
tcttgctattagtaattgtggg

SEQ ID NO: 153403 - DNA, 22 bp, Artificial Sequence
  Synthetic oligonucleotide; CTT chr11 5168655 5168676 5168660 5168655 -
gctattagtaattgtgggatct

SEQ ID NO: 153404 - DNA, 22 bp, Artificial Sequence
  Synthetic oligonucleotide; TTG chr11 5168654 5168675 5168659 5168654 -
ctattagtaattgtgggatctt

SEQ ID NO: 153405 - DNA, 22 bp, Artificial Sequence
  Synthetic oligonucleotide; CTA chr11 5168651 5168672 5168656 5168651 -
ttagtaattgtgggatcttgct

SEQ ID NO: 153406 - DNA, 22 bp, Artificial Sequence
  Synthetic oligonucleotide; TTA chr11 5168648 5168669 5168653 5168648 -
gtaattgtgggatcttgctagt

SEQ ID NO: 153407 - DNA, 22 bp, Artificial Sequence
  Synthetic oligonucleotide; TTG chr11 5168641 5168662 5168646 5168641 -
tgggatcttgctagtagtatga

SEQ ID NO: 153408 - DNA, 22 bp, Artificial Sequence
  Synthetic oligonucleotide; CTT chr11 5168632 5168653 5168637 5168632 -
gctagtagtatgacctgtttga

SEQ ID NO: 153409 - DNA, 22 bp, Artificial Sequence
  Synthetic oligonucleotide; TTG chr11 5168631 5168652 5168636 5168631 -
ctagtagtatgacctgtttgaa

SEQ ID NO: 153410 - DNA, 22 bp, Artificial Sequence
  Synthetic oligonucleotide; CTA chr11 5168628 5168649 5168633 5168628 -
gtagtatgacctgtttgaatat

SEQ ID NO: 153411 - DNA, 22 bp, Artificial Sequence
  Synthetic oligonucleotide; CTG chr11 5168615 5168636 5168620 5168615 -
tttgaatataatttattcattt

SEQ ID NO: 153412 - DNA, 22 bp, Artificial Sequence
  Synthetic oligonucleotide; TTT chr11 5168612 5168633 5168617 5168612 -
gaatataatttattcatttata

SEQ ID NO: 153413 - DNA, 22 bp, Artificial Sequence
  Synthetic oligonucleotide; TTG chr11 5168611 5168632 5168616 5168611 -
aatataatttattcatttataa

SEQ ID NO: 153414 - DNA, 22 bp, Artificial Sequence
  Synthetic oligonucleotide; TTT chr11 5168601 5168622 5168606 5168601 -
attcatttataaatgaataaga

SEQ ID NO: 153415 - DNA, 22 bp, Artificial Sequence
  Synthetic oligonucleotide; TTA chr11 5168600 5168621 5168605 5168600 -
ttcatttataaatgaataagaa

SEQ ID NO: 153416 - DNA, 22 bp, Artificial Sequence
  Synthetic oligonucleotide; TTC chr11 5168597 5168618 5168602 5168597 -
atttataaatgaataagaaaat

SEQ ID NO: 153417 - DNA, 22 bp, Artificial Sequence
  Synthetic oligonucleotide; TTT chr11 5168593 5168614 5168598 5168593 -
ataaatgaataagaaaataaaa

SEQ ID NO: 153418 - DNA, 22 bp, Artificial Sequence
  Synthetic oligonucleotide; TTA chr11 5168592 5168613 5168597 5168592 -
taaatgaataagaaaataaaat

SEQ ID NO: 153419 - DNA, 22 bp, Artificial Sequence
  Synthetic oligonucleotide; CTT chr11 5168563 5168584 5168568 5168563 -
ttatgatcttgaagattaaatg

SEQ ID NO: 153420 - DNA, 22 bp, Artificial Sequence
  Synthetic oligonucleotide; TTT chr11 5168562 5168583 5168567 5168562 -
tatgatcttgaagattaaatga

SEQ ID NO: 153421 - DNA, 22 bp, Artificial Sequence
  Synthetic oligonucleotide; TTT chr11 5168561 5168582 5168566 5168561 -
atgatcttgaagattaaatgaa

SEQ ID NO: 153422 - DNA, 22 bp, Artificial Sequence
  Synthetic oligonucleotide; TTA chr11 5168560 5168581 5168565 5168560 -
tgatcttgaagattaaatgaaa

SEQ ID NO: 153423 - DNA, 22 bp, Artificial Sequence
  Synthetic oligonucleotide; CTT chr11 5168553 5168574 5168558 5168553 -
gaagattaaatgaaatggtgca

SEQ ID NO: 153424 - DNA, 22 bp, Artificial Sequence
  Synthetic oligonucleotide; TTG chr11 5168552 5168573 5168557 5168552 -
aagattaaatgaaatggtgcac

SEQ ID NO: 153425 - DNA, 22 bp, Artificial Sequence
  Synthetic oligonucleotide; TTA chr11 5168545 5168566 5168550 5168545 -
aatgaaatggtgcacattaagc

SEQ ID NO: 153426 - DNA, 22 bp, Artificial Sequence
  Synthetic oligonucleotide; TTA chr11 5168526 5168547 5168531 5168526 -
agcaattagcaaagttcctagt

SEQ ID NO: 153427 - DNA, 22 bp, Artificial Sequence
  Synthetic oligonucleotide; TTA chr11 5168518 5168539 5168523 5168518 -
gcaaagttcctagtaaaatttg

SEQ ID NO: 153428 - DNA, 22 bp, Artificial Sequence
  Synthetic oligonucleotide; TTC chr11 5168509 5168530 5168514 5168509 -
ctagtaaaatttgctcaataag

SEQ ID NO: 153429 - DNA, 22 bp, Artificial Sequence
  Synthetic oligonucleotide; CTA chr11 5168506 5168527 5168511 5168506 -
gtaaaatttgctcaataagtaa

SEQ ID NO: 153430 - DNA, 22 bp, Artificial Sequence
  Synthetic oligonucleotide; TTT chr11 5168497 5168518 5168502 5168497 -
gctcaataagtaattatatttt

SEQ ID NO: 153431 - DNA, 22 bp, Artificial Sequence
  Synthetic oligonucleotide; TTG chr11 5168496 5168517 5168501 5168496 -
ctcaataagtaattatatttta

SEQ ID NO: 153432 - DNA, 22 bp, Artificial Sequence
  Synthetic oligonucleotide; CTC chr11 5168493 5168514 5168498 5168493 -
aataagtaattatattttatta

SEQ ID NO: 153433 - DNA, 22 bp, Artificial Sequence
  Synthetic oligonucleotide; TTA chr11 5168481 5168502 5168486 5168481 -
tattttattaagtaattacttt

SEQ ID NO: 153434 - DNA, 22 bp, Artificial Sequence
  Synthetic oligonucleotide; TTT chr11 5168476 5168497 5168481 5168476 -
tattaagtaattactttttcac

SEQ ID NO: 153435 - DNA, 22 bp, Artificial Sequence
  Synthetic oligonucleotide; TTT chr11 5168475 5168496 5168480 5168475 -
attaagtaattactttttcacc

SEQ ID NO: 153436 - DNA, 22 bp, Artificial Sequence
  Synthetic oligonucleotide; TTA chr11 5168474 5168495 5168479 5168474 -
ttaagtaattactttttcacca

SEQ ID NO: 153437 - DNA, 22 bp, Artificial Sequence
  Synthetic oligonucleotide; TTA chr11 5168471 5168492 5168476 5168471 -
agtaattactttttcaccaaat

SEQ ID NO: 153438 - DNA, 22 bp, Artificial Sequence
  Synthetic oligonucleotide; TTA chr11 5168463 5168484 5168468 5168463 -
ctttttcaccaaatctgactac

SEQ ID NO: 153439 - DNA, 22 bp, Artificial Sequence
  Synthetic oligonucleotide; CTT chr11 5168460 5168481 5168465 5168460 -
tttcaccaaatctgactacaat

SEQ ID NO: 153440 - DNA, 22 bp, Artificial Sequence
  Synthetic oligonucleotide; TTT chr11 5168459 5168480 5168464 5168459 -
ttcaccaaatctgactacaata

SEQ ID NO: 153441 - DNA, 22 bp, Artificial Sequence
  Synthetic oligonucleotide; TTT chr11 5168458 5168479 5168463 5168458 -
tcaccaaatctgactacaatac

SEQ ID NO: 153442 - DNA, 22 bp, Artificial Sequence
  Synthetic oligonucleotide; TTT chr11 5168457 5168478 5168462 5168457 -
caccaaatctgactacaatacg

SEQ ID NO: 153443 - DNA, 22 bp, Artificial Sequence
  Synthetic oligonucleotide; TTC chr11 5168456 5168477 5168461 5168456 -
accaaatctgactacaatacgt

SEQ ID NO: 153444 - DNA, 22 bp, Artificial Sequence
  Synthetic oligonucleotide; CTG chr11 5168446 5168467 5168451 5168446 -
actacaatacgtgaatacacag

SEQ ID NO: 153445 - DNA, 22 bp, Artificial Sequence
  Synthetic oligonucleotide; CTA chr11 5168442 5168463 5168447 5168442 -
caatacgtgaatacacagtcaa

SEQ ID NO: 153446 - DNA, 22 bp, Artificial Sequence
  Synthetic oligonucleotide; TTT chr11 5168416 5168437 5168421 5168416 -
cacaattcctgacagtctctct

SEQ ID NO: 153447 - DNA, 22 bp, Artificial Sequence
  Synthetic oligonucleotide; TTC chr11 5168415 5168436 5168420 5168415 -
acaattcctgacagtctctcta

SEQ ID NO: 153448 - DNA, 22 bp, Artificial Sequence
  Synthetic oligonucleotide; TTC chr11 5168408 5168429 5168413 5168408 -
ctgacagtctctctaaatgcta

SEQ ID NO: 153449 - DNA, 22 bp, Artificial Sequence
  Synthetic oligonucleotide; CTG chr11 5168405 5168426 5168410 5168405 -
acagtctctctaaatgctaatt

SEQ ID NO: 153450 - DNA, 22 bp, Artificial Sequence
  Synthetic oligonucleotide; CTC chr11 5168397 5168418 5168402 5168397 -
tctaaatgctaattttaaactc

SEQ ID NO: 153451 - DNA, 22 bp, Artificial Sequence
  Synthetic oligonucleotide; CTC chr11 5168395 5168416 5168400 5168395 -
taaatgctaattttaaactcaa

SEQ ID NO: 153452 - DNA, 22 bp, Artificial Sequence
  Synthetic oligonucleotide; CTA chr11 5168393 5168414 5168398 5168393 -
aatgctaattttaaactcaagt

SEQ ID NO: 153453 - DNA, 22 bp, Artificial Sequence
  Synthetic oligonucleotide; CTA chr11 5168386 5168407 5168391 5168386 -
attttaaactcaagtacataaa

SEQ ID NO: 153454 - DNA, 22 bp, Artificial Sequence
  Synthetic oligonucleotide; TTT chr11 5168382 5168403 5168387 5168382 -
taaactcaagtacataaaaatt

SEQ ID NO: 153455 - DNA, 22 bp, Artificial Sequence
  Synthetic oligonucleotide; TTT chr11 5168381 5168402 5168386 5168381 -
aaactcaagtacataaaaatta

SEQ ID NO: 153456 - DNA, 22 bp, Artificial Sequence
  Synthetic oligonucleotide; TTA chr11 5168380 5168401 5168385 5168380 -
aactcaagtacataaaaattaa

SEQ ID NO: 153457 - DNA, 22 bp, Artificial Sequence
  Synthetic oligonucleotide; CTC chr11 5168375 5168396 5168380 5168375 -
aagtacataaaaattaaagtca

SEQ ID NO: 153458 - DNA, 22 bp, Artificial Sequence
  Synthetic oligonucleotide; TTA chr11 5168359 5168380 5168364 5168359 -
aagtcacaaatttctctgtcac

SEQ ID NO: 153459 - DNA, 22 bp, Artificial Sequence
  Synthetic oligonucleotide; TTT chr11 5168346 5168367 5168351 5168346 -
ctctgtcacgagctatagtgta

SEQ ID NO: 153460 - DNA, 22 bp, Artificial Sequence
  Synthetic oligonucleotide; TTC chr11 5168345 5168366 5168350 5168345 -
tctgtcacgagctatagtgtac

SEQ ID NO: 153461 - DNA, 22 bp, Artificial Sequence
  Synthetic oligonucleotide; CTC chr11 5168343 5168364 5168348 5168343 -
tgtcacgagctatagtgtacca

SEQ ID NO: 153462 - DNA, 22 bp, Artificial Sequence
  Synthetic oligonucleotide; CTG chr11 5168341 5168362 5168346 5168341 -
tcacgagctatagtgtaccata

SEQ ID NO: 153463 - DNA, 22 bp, Artificial Sequence
  Synthetic oligonucleotide; CTA chr11 5168331 5168352 5168336 5168331 -
tagtgtaccatactaagtgatt

SEQ ID NO: 153464 - DNA, 22 bp, Artificial Sequence
  Synthetic oligonucleotide; CTA chr11 5168316 5168337 5168321 5168316 -
agtgatttatatagattagttc

SEQ ID NO: 153465 - DNA, 22 bp, Artificial Sequence
  Synthetic oligonucleotide; TTT chr11 5168308 5168329 5168313 5168308 -
atatagattagttcatttaatc

SEQ ID NO: 153466 - DNA, 22 bp, Artificial Sequence
  Synthetic oligonucleotide; TTA chr11 5168307 5168328 5168312 5168307 -
tatagattagttcatttaatcc

SEQ ID NO: 153467 - DNA, 22 bp, Artificial Sequence
  Synthetic oligonucleotide; TTA chr11 5168298 5168319 5168303 5168298 -
gttcatttaatccacggaacaa

SEQ ID NO: 153468 - DNA, 22 bp, Artificial Sequence
  Synthetic oligonucleotide; TTC chr11 5168294 5168315 5168299 5168294 -
atttaatccacggaacaaatat

SEQ ID NO: 153469 - DNA, 22 bp, Artificial Sequence
  Synthetic oligonucleotide; TTT chr11 5168290 5168311 5168295 5168290 -
aatccacggaacaaatatatga

SEQ ID NO: 153470 - DNA, 22 bp, Artificial Sequence
  Synthetic oligonucleotide; TTA chr11 5168289 5168310 5168294 5168289 -
atccacggaacaaatatatgaa

SEQ ID NO: 153471 - DNA, 22 bp, Artificial Sequence
  Synthetic oligonucleotide; TTA chr11 5168260 5168281 5168265 5168260 -
tcagtttgtctacatgttacaa

SEQ ID NO: 153472 - DNA, 22 bp, Artificial Sequence
  Synthetic oligonucleotide; TTT chr11 5168253 5168274 5168258 5168253 -
gtctacatgttacaaatgtaga

SEQ ID NO: 153473 - DNA, 22 bp, Artificial Sequence
  Synthetic oligonucleotide; TTG chr11 5168252 5168273 5168257 5168252 -
tctacatgttacaaatgtagaa

SEQ ID NO: 153474 - DNA, 22 bp, Artificial Sequence
  Synthetic oligonucleotide; CTA chr11 5168248 5168269 5168253 5168248 -
catgttacaaatgtagaaacag

SEQ ID NO: 153475 - DNA, 22 bp, Artificial Sequence
  Synthetic oligonucleotide; TTA chr11 5168241 5168262 5168246 5168241 -
caaatgtagaaacagaaacata

SEQ ID NO: 153476 - DNA, 22 bp, Artificial Sequence
  Synthetic oligonucleotide; TTA chr11 5168182 5168203 5168187 5168182 -
ataagtggcagaatcacaactc

SEQ ID NO: 153477 - DNA, 22 bp, Artificial Sequence
  Synthetic oligonucleotide; CTC chr11 5168160 5168181 5168165 5168160 -
aaaaccagacaatccaactaaa

SEQ ID NO: 153478 - DNA, 22 bp, Artificial Sequence
  Synthetic oligonucleotide; CTA chr11 5168140 5168161 5168145 5168140 -
aaaacctgattctttagcccac

SEQ ID NO: 153479 - DNA, 22 bp, Artificial Sequence
  Synthetic oligonucleotide; CTG chr11 5168132 5168153 5168137 5168132 -
attctttagcccaccatattat

SEQ ID NO: 153480 - DNA, 22 bp, Artificial Sequence
  Synthetic oligonucleotide; TTC chr11 5168128 5168149 5168133 5168128 -
tttagcccaccatattatcagt

SEQ ID NO: 153481 - DNA, 22 bp, Artificial Sequence
  Synthetic oligonucleotide; CTT chr11 5168126 5168147 5168131 5168126 -
tagcccaccatattatcagtgg

SEQ ID NO: 153482 - DNA, 22 bp, Artificial Sequence
  Synthetic oligonucleotide; TTT chr11 5168125 5168146 5168130 5168125 -
agcccaccatattatcagtggt

SEQ ID NO: 153483 - DNA, 22 bp, Artificial Sequence
  Synthetic oligonucleotide; TTA chr11 5168124 5168145 5168129 5168124 -
gcccaccatattatcagtggtc

SEQ ID NO: 153484 - DNA, 22 bp, Artificial Sequence
  Synthetic oligonucleotide; TTA chr11 5168111 5168132 5168116 5168111 -
tcagtggtcccataacttaaaa

SEQ ID NO: 153485 - DNA, 22 bp, Artificial Sequence
  Synthetic oligonucleotide; CTT chr11 5168093 5168114 5168098 5168093 -
aaaattcagatttgactttaaa

SEQ ID NO: 153486 - DNA, 22 bp, Artificial Sequence
  Synthetic oligonucleotide; TTA chr11 5168092 5168113 5168097 5168092 -
aaattcagatttgactttaaaa

SEQ ID NO: 153487 - DNA, 22 bp, Artificial Sequence
  Synthetic oligonucleotide; TTC chr11 5168086 5168107 5168091 5168086 -
agatttgactttaaaattggaa

SEQ ID NO: 153488 - DNA, 22 bp, Artificial Sequence
  Synthetic oligonucleotide; TTT chr11 5168080 5168101 5168085 5168080 -
gactttaaaattggaatctgaa

SEQ ID NO: 153489 - DNA, 22 bp, Artificial Sequence
  Synthetic oligonucleotide; TTG chr11 5168079 5168100 5168084 5168079 -
actttaaaattggaatctgaag

SEQ ID NO: 153490 - DNA, 22 bp, Artificial Sequence
  Synthetic oligonucleotide; CTT chr11 5168075 5168096 5168080 5168075 -
taaaattggaatctgaagaaca

SEQ ID NO: 153491 - DNA, 22 bp, Artificial Sequence
  Synthetic oligonucleotide; TTT chr11 5168074 5168095 5168079 5168074 -
aaaattggaatctgaagaacac

SEQ ID NO: 153492 - DNA, 22 bp, Artificial Sequence
  Synthetic oligonucleotide; TTA chr11 5168073 5168094 5168078 5168073 -
aaattggaatctgaagaacacc

SEQ ID NO: 153493 - DNA, 22 bp, Artificial Sequence
  Synthetic oligonucleotide; TTG chr11 5168067 5168088 5168072 5168067 -
gaatctgaagaacaccaagcaa

SEQ ID NO: 153494 - DNA, 22 bp, Artificial Sequence
  Synthetic oligonucleotide; CTG chr11 5168060 5168081 5168065 5168060 -
aagaacaccaagcaattctgta

SEQ ID NO: 153495 - DNA, 22 bp, Artificial Sequence
  Synthetic oligonucleotide; TTC chr11 5168042 5168063 5168047 5168042 -
tgtaaaccattttctcctttga

SEQ ID NO: 153496 - DNA, 22 bp, Artificial Sequence
  Synthetic oligonucleotide; CTG chr11 5168040 5168061 5168045 5168040 -
taaaccattttctcctttgaga

SEQ ID NO: 153497 - DNA, 22 bp, Artificial Sequence
  Synthetic oligonucleotide; TTT chr11 5168030 5168051 5168035 5168030 -
tctcctttgagattcatgagga

SEQ ID NO: 153498 - DNA, 22 bp, Artificial Sequence
  Synthetic oligonucleotide; TTT chr11 5168029 5168050 5168034 5168029 -
ctcctttgagattcatgaggac

SEQ ID NO: 153499 - DNA, 22 bp, Artificial Sequence
  Synthetic oligonucleotide; TTC chr11 5168028 5168049 5168033 5168028 -
tcctttgagattcatgaggaca

SEQ ID NO: 153500 - DNA, 22 bp, Artificial Sequence
  Synthetic oligonucleotide; CTC chr11 5168026 5168047 5168031 5168026 -
ctttgagattcatgaggacaaa

SEQ ID NO: 153501 - DNA, 22 bp, Artificial Sequence
  Synthetic oligonucleotide; CTT chr11 5168023 5168044 5168028 5168023 -
tgagattcatgaggacaaaatt

SEQ ID NO: 153502 - DNA, 22 bp, Artificial Sequence
  Synthetic oligonucleotide; TTT chr11 5168022 5168043 5168027 5168022 -
gagattcatgaggacaaaattc

SEQ ID NO: 153503 - DNA, 22 bp, Artificial Sequence
  Synthetic oligonucleotide; TTG chr11 5168021 5168042 5168026 5168021 -
agattcatgaggacaaaattca

SEQ ID NO: 153504 - DNA, 22 bp, Artificial Sequence
  Synthetic oligonucleotide; TTC chr11 5168015 5168036 5168020 5168015 -
atgaggacaaaattcactcacc

SEQ ID NO: 153505 - DNA, 22 bp, Artificial Sequence
  Synthetic oligonucleotide; TTC chr11 5168000 5168021 5168005 5168000 -
actcacctctgtttcctctaat

SEQ ID NO: 153506 - DNA, 22 bp, Artificial Sequence
  Synthetic oligonucleotide; CTC chr11 5167996 5168017 5168001 5167996 -
acctctgtttcctctaattata

SEQ ID NO: 153507 - DNA, 22 bp, Artificial Sequence
  Synthetic oligonucleotide; CTC chr11 5167991 5168012 5167996 5167991 -
tgtttcctctaattatagtcat

SEQ ID NO: 153508 - DNA, 22 bp, Artificial Sequence
  Synthetic oligonucleotide; CTG chr11 5167989 5168010 5167994 5167989 -
tttcctctaattatagtcatat

SEQ ID NO: 153509 - DNA, 22 bp, Artificial Sequence
  Synthetic oligonucleotide; TTT chr11 5167986 5168007 5167991 5167986 -
cctctaattatagtcatatatt

SEQ ID NO: 153510 - DNA, 22 bp, Artificial Sequence
  Synthetic oligonucleotide; TTC chr11 5167985 5168006 5167990 5167985 -
ctctaattatagtcatatatta

SEQ ID NO: 153511 - DNA, 22 bp, Artificial Sequence
  Synthetic oligonucleotide; CTC chr11 5167982 5168003 5167987 5167982 -
taattatagtcatatattaata

SEQ ID NO: 153512 - DNA, 22 bp, Artificial Sequence
  Synthetic oligonucleotide; CTA chr11 5167980 5168001 5167985 5167980 -
attatagtcatatattaataat

SEQ ID NO: 153513 - DNA, 22 bp, Artificial Sequence
  Synthetic oligonucleotide; TTA chr11 5167976 5167997 5167981 5167976 -
tagtcatatattaataatgtat

SEQ ID NO: 153514 - DNA, 22 bp, Artificial Sequence
  Synthetic oligonucleotide; TTA chr11 5167963 5167984 5167968 5167963 -
ataatgtataaaggttttctca

SEQ ID NO: 153515 - DNA, 22 bp, Artificial Sequence
  Synthetic oligonucleotide; TTT chr11 5167946 5167967 5167951 5167946 -
tctcaagaggatctttataaaa

SEQ ID NO: 153516 - DNA, 22 bp, Artificial Sequence
  Synthetic oligonucleotide; TTT chr11 5167945 5167966 5167950 5167945 -
ctcaagaggatctttataaaag

SEQ ID NO: 153517 - DNA, 22 bp, Artificial Sequence
  Synthetic oligonucleotide; TTC chr11 5167944 5167965 5167949 5167944 -
tcaagaggatctttataaaagg

SEQ ID NO: 153518 - DNA, 22 bp, Artificial Sequence
  Synthetic oligonucleotide; CTC chr11 5167942 5167963 5167947 5167942 -
aagaggatctttataaaagggg

SEQ ID NO: 153519 - DNA, 22 bp, Artificial Sequence
  Synthetic oligonucleotide; CTT chr11 5167931 5167952 5167936 5167931 -
tataaaaggggccttcccacat

SEQ ID NO: 153520 - DNA, 22 bp, Artificial Sequence
  Synthetic oligonucleotide; TTT chr11 5167930 5167951 5167935 5167930 -
ataaaaggggccttcccacatt

SEQ ID NO: 153521 - DNA, 22 bp, Artificial Sequence
  Synthetic oligonucleotide; TTA chr11 5167929 5167950 5167934 5167929 -
taaaaggggccttcccacatta

SEQ ID NO: 153522 - DNA, 22 bp, Artificial Sequence
  Synthetic oligonucleotide; CTT chr11 5167916 5167937 5167921 5167916 -
cccacattagtttaactgctta

SEQ ID NO: 153523 - DNA, 22 bp, Artificial Sequence
  Synthetic oligonucleotide; TTC chr11 5167915 5167936 5167920 5167915 -
ccacattagtttaactgcttag

SEQ ID NO: 153524 - DNA, 22 bp, Artificial Sequence
  Synthetic oligonucleotide; TTA chr11 5167907 5167928 5167912 5167907 -
gtttaactgcttaggtactgat

SEQ ID NO: 153525 - DNA, 22 bp, Artificial Sequence
  Synthetic oligonucleotide; TTT chr11 5167903 5167924 5167908 5167903 -
aactgcttaggtactgattctc

SEQ ID NO: 153526 - DNA, 22 bp, Artificial Sequence
  Synthetic oligonucleotide; TTA chr11 5167902 5167923 5167907 5167902 -
actgcttaggtactgattctct

SEQ ID NO: 153527 - DNA, 22 bp, Artificial Sequence
  Synthetic oligonucleotide; CTG chr11 5167898 5167919 5167903 5167898 -
cttaggtactgattctcttcta

SEQ ID NO: 153528 - DNA, 22 bp, Artificial Sequence
  Synthetic oligonucleotide; CTT chr11 5167895 5167916 5167900 5167895 -
aggtactgattctcttctactt

SEQ ID NO: 153529 - DNA, 22 bp, Artificial Sequence
  Synthetic oligonucleotide; TTA chr11 5167894 5167915 5167899 5167894 -
ggtactgattctcttctacttc

SEQ ID NO: 153530 - DNA, 22 bp, Artificial Sequence
  Synthetic oligonucleotide; CTG chr11 5167887 5167908 5167892 5167887 -
attctcttctacttcctcaacc

SEQ ID NO: 153531 - DNA, 22 bp, Artificial Sequence
  Synthetic oligonucleotide; TTC chr11 5167883 5167904 5167888 5167883 -
tcttctacttcctcaaccaaca

SEQ ID NO: 153532 - DNA, 22 bp, Artificial Sequence
  Synthetic oligonucleotide; CTC chr11 5167881 5167902 5167886 5167881 -
ttctacttcctcaaccaacact

SEQ ID NO: 153533 - DNA, 22 bp, Artificial Sequence
  Synthetic oligonucleotide; CTT chr11 5167879 5167900 5167884 5167879 -
ctacttcctcaaccaacacttt

SEQ ID NO: 153534 - DNA, 22 bp, Artificial Sequence
  Synthetic oligonucleotide; TTC chr11 5167878 5167899 5167883 5167878 -
tacttcctcaaccaacactttt

SEQ ID NO: 153535 - DNA, 22 bp, Artificial Sequence
  Synthetic oligonucleotide; CTA chr11 5167876 5167897 5167881 5167876 -
cttcctcaaccaacacttttag

SEQ ID NO: 153536 - DNA, 22 bp, Artificial Sequence
  Synthetic oligonucleotide; CTT chr11 5167873 5167894 5167878 5167873 -
cctcaaccaacacttttagaac

SEQ ID NO: 153537 - DNA, 22 bp, Artificial Sequence
  Synthetic oligonucleotide; TTC chr11 5167872 5167893 5167877 5167872 -
ctcaaccaacacttttagaact

SEQ ID NO: 153538 - DNA, 22 bp, Artificial Sequence
  Synthetic oligonucleotide; CTC chr11 5167869 5167890 5167874 5167869 -
aaccaacacttttagaactatc

SEQ ID NO: 153539 - DNA, 22 bp, Artificial Sequence
  Synthetic oligonucleotide; CTT chr11 5167858 5167879 5167863 5167858 -
ttagaactatcatctaagatta

SEQ ID NO: 153540 - DNA, 22 bp, Artificial Sequence
  Synthetic oligonucleotide; TTT chr11 5167857 5167878 5167862 5167857 -
tagaactatcatctaagattac

SEQ ID NO: 153541 - DNA, 22 bp, Artificial Sequence
  Synthetic oligonucleotide; TTT chr11 5167856 5167877 5167861 5167856 -
agaactatcatctaagattaca

SEQ ID NO: 153542 - DNA, 22 bp, Artificial Sequence
  Synthetic oligonucleotide; TTA chr11 5167855 5167876 5167860 5167855 -
gaactatcatctaagattacat

SEQ ID NO: 153543 - DNA, 22 bp, Artificial Sequence
  Synthetic oligonucleotide; CTA chr11 5167849 5167870 5167854 5167849 -
tcatctaagattacatcggtca

SEQ ID NO: 153544 - DNA, 22 bp, Artificial Sequence
  Synthetic oligonucleotide; CTA chr11 5167842 5167863 5167847 5167842 -
agattacatcggtcaaattttc

SEQ ID NO: 153545 - DNA, 22 bp, Artificial Sequence
  Synthetic oligonucleotide; TTA chr11 5167836 5167857 5167841 5167836 -
catcggtcaaattttcttatgc

SEQ ID NO: 153546 - DNA, 22 bp, Artificial Sequence
  Synthetic oligonucleotide; TTT chr11 5167822 5167843 5167827 5167822 -
tcttatgcttacaataaataaa

SEQ ID NO: 153547 - DNA, 22 bp, Artificial Sequence
  Synthetic oligonucleotide; TTT chr11 5167821 5167842 5167826 5167821 -
cttatgcttacaataaataaat

SEQ ID NO: 153548 - DNA, 22 bp, Artificial Sequence
  Synthetic oligonucleotide; TTC chr11 5167820 5167841 5167825 5167820 -
ttatgcttacaataaataaata

SEQ ID NO: 153549 - DNA, 22 bp, Artificial Sequence
  Synthetic oligonucleotide; CTT chr11 5167818 5167839 5167823 5167818 -
atgcttacaataaataaatact

SEQ ID NO: 153550 - DNA, 22 bp, Artificial Sequence
  Synthetic oligonucleotide; TTA chr11 5167817 5167838 5167822 5167817 -
tgcttacaataaataaatactt

SEQ ID NO: 153551 - DNA, 22 bp, Artificial Sequence
  Synthetic oligonucleotide; CTT chr11 5167812 5167833 5167817 5167812 -
acaataaataaatactttttaa

SEQ ID NO: 153552 - DNA, 22 bp, Artificial Sequence
  Synthetic oligonucleotide; TTA chr11 5167811 5167832 5167816 5167811 -
caataaataaatactttttaag

SEQ ID NO: 153553 - DNA, 22 bp, Artificial Sequence
  Synthetic oligonucleotide; CTT chr11 5167795 5167816 5167800 5167795 -
tttaagccagcaacttcacttc

SEQ ID NO: 153554 - DNA, 22 bp, Artificial Sequence
  Synthetic oligonucleotide; TTT chr11 5167794 5167815 5167799 5167794 -
ttaagccagcaacttcacttca

SEQ ID NO: 153555 - DNA, 22 bp, Artificial Sequence
  Synthetic oligonucleotide; TTT chr11 5167793 5167814 5167798 5167793 -
taagccagcaacttcacttcac

SEQ ID NO: 153556 - DNA, 22 bp, Artificial Sequence
  Synthetic oligonucleotide; TTT chr11 5167792 5167813 5167797 5167792 -
aagccagcaacttcacttcact

SEQ ID NO: 153557 - DNA, 22 bp, Artificial Sequence
  Synthetic oligonucleotide; TTA chr11 5167791 5167812 5167796 5167791 -
agccagcaacttcacttcactt

SEQ ID NO: 153558 - DNA, 22 bp, Artificial Sequence
  Synthetic oligonucleotide; CTT chr11 5167779 5167800 5167784 5167779 -
cacttcacttactatgttttat

SEQ ID NO: 153559 - DNA, 22 bp, Artificial Sequence
  Synthetic oligonucleotide; TTC chr11 5167778 5167799 5167783 5167778 -
acttcacttactatgttttatt

SEQ ID NO: 153560 - DNA, 22 bp, Artificial Sequence
  Synthetic oligonucleotide; CTT chr11 5167774 5167795 5167779 5167774 -
cacttactatgttttattacat

SEQ ID NO: 153561 - DNA, 22 bp, Artificial Sequence
  Synthetic oligonucleotide; TTC chr11 5167773 5167794 5167778 5167773 -
acttactatgttttattacata

SEQ ID NO: 153562 - DNA, 22 bp, Artificial Sequence
  Synthetic oligonucleotide; CTT chr11 5167769 5167790 5167774 5167769 -
actatgttttattacatattat

SEQ ID NO: 153563 - DNA, 22 bp, Artificial Sequence
  Synthetic oligonucleotide; TTA chr11 5167768 5167789 5167773 5167768 -
ctatgttttattacatattatt

SEQ ID NO: 153564 - DNA, 22 bp, Artificial Sequence
  Synthetic oligonucleotide; CTA chr11 5167765 5167786 5167770 5167765 -
tgttttattacatattattcat

SEQ ID NO: 153565 - DNA, 22 bp, Artificial Sequence
  Synthetic oligonucleotide; TTT chr11 5167760 5167781 5167765 5167760 -
tattacatattattcattctaa

SEQ ID NO: 153566 - DNA, 22 bp, Artificial Sequence
  Synthetic oligonucleotide; TTT chr11 5167759 5167780 5167764 5167759 -
attacatattattcattctaag

SEQ ID NO: 153567 - DNA, 22 bp, Artificial Sequence
  Synthetic oligonucleotide; TTA chr11 5167758 5167779 5167763 5167758 -
ttacatattattcattctaagt

SEQ ID NO: 153568 - DNA, 22 bp, Artificial Sequence
  Synthetic oligonucleotide; TTA chr11 5167755 5167776 5167760 5167755 -
catattattcattctaagtgta

SEQ ID NO: 153569 - DNA, 22 bp, Artificial Sequence
  Synthetic oligonucleotide; TTA chr11 5167748 5167769 5167753 5167748 -
ttcattctaagtgtagtcctag

SEQ ID NO: 153570 - DNA, 22 bp, Artificial Sequence
  Synthetic oligonucleotide; TTC chr11 5167745 5167766 5167750 5167745 -
attctaagtgtagtcctagata

SEQ ID NO: 153571 - DNA, 22 bp, Artificial Sequence
  Synthetic oligonucleotide; TTC chr11 5167741 5167762 5167746 5167741 -
taagtgtagtcctagatatagt

SEQ ID NO: 153572 - DNA, 22 bp, Artificial Sequence
  Synthetic oligonucleotide; CTA chr11 5167739 5167760 5167744 5167739 -
agtgtagtcctagatatagtag

SEQ ID NO: 153573 - DNA, 22 bp, Artificial Sequence
  Synthetic oligonucleotide; CTA chr11 5167727 5167748 5167732 5167727 -
gatatagtagagtactacgcca

SEQ ID NO: 153574 - DNA, 22 bp, Artificial Sequence
  Synthetic oligonucleotide; CTA chr11 5167710 5167731 5167715 5167710 -
cgccaagacatcaggtcaagga

SEQ ID NO: 153575 - DNA, 22 bp, Artificial Sequence
  Synthetic oligonucleotide; CTA chr11 5167672 5167693 5167677 5167672 -
aaagcagaagagatgagaaaca

SEQ ID NO: 153576 - DNA, 22 bp, Artificial Sequence
  Synthetic oligonucleotide; CTC chr11 5167630 5167651 5167635 5167630 -
caaatcctgtgacaacaaacat

SEQ ID NO: 153577 - DNA, 22 bp, Artificial Sequence
  Synthetic oligonucleotide; CTG chr11 5167621 5167642 5167626 5167621 -
tgacaacaaacatctcaataga

SEQ ID NO: 153578 - DNA, 22 bp, Artificial Sequence
  Synthetic oligonucleotide; CTC chr11 5167605 5167626 5167610 5167605 -
aatagaaatcacacagtccaag

SEQ ID NO: 153579 - DNA, 22 bp, Artificial Sequence
  Synthetic oligonucleotide; TTT chr11 5167564 5167585 5167569 5167564 -
tcaaagcgctcagggataaaag

SEQ ID NO: 153580 - DNA, 22 bp, Artificial Sequence
  Synthetic oligonucleotide; TTT chr11 5167563 5167584 5167568 5167563 -
caaagcgctcagggataaaaga

SEQ ID NO: 153581 - DNA, 22 bp, Artificial Sequence
  Synthetic oligonucleotide; TTC chr11 5167562 5167583 5167567 5167562 -
aaagcgctcagggataaaagaa

SEQ ID NO: 153582 - DNA, 22 bp, Artificial Sequence
  Synthetic oligonucleotide; CTC chr11 5167553 5167574 5167558 5167553 -
agggataaaagaaaactgatat

SEQ ID NO: 153583 - DNA, 22 bp, Artificial Sequence
  Synthetic oligonucleotide; CTG chr11 5167535 5167556 5167540 5167535 -
atattcaagaatattttatagg

SEQ ID NO: 153584 - DNA, 22 bp, Artificial Sequence
  Synthetic oligonucleotide; TTC chr11 5167529 5167550 5167534 5167529 -
aagaatattttatagggtaaaa

SEQ ID NO: 153585 - DNA, 22 bp, Artificial Sequence
  Synthetic oligonucleotide; TTT chr11 5167519 5167540 5167524 5167519 -
tatagggtaaaactgttattca

SEQ ID NO: 153586 - DNA, 22 bp, Artificial Sequence
  Synthetic oligonucleotide; TTT chr11 5167518 5167539 5167523 5167518 -
atagggtaaaactgttattcaa

SEQ ID NO: 153587 - DNA, 22 bp, Artificial Sequence
  Synthetic oligonucleotide; TTA chr11 5167517 5167538 5167522 5167517 -
tagggtaaaactgttattcaaa

SEQ ID NO: 153588 - DNA, 22 bp, Artificial Sequence
  Synthetic oligonucleotide; CTG chr11 5167504 5167525 5167509 5167504 -
ttattcaaatataagcaatata

SEQ ID NO: 153589 - DNA, 22 bp, Artificial Sequence
  Synthetic oligonucleotide; TTA chr11 5167501 5167522 5167506 5167501 -
ttcaaatataagcaatatataa

SEQ ID NO: 153590 - DNA, 22 bp, Artificial Sequence
  Synthetic oligonucleotide; TTC chr11 5167498 5167519 5167503 5167498 -
aaatataagcaatatataaagt

SEQ ID NO: 153591 - DNA, 22 bp, Artificial Sequence
  Synthetic oligonucleotide; CTT chr11 5167473 5167494 5167478 5167473 -
tcccagacaaacaaaagttgag

SEQ ID NO: 153592 - DNA, 22 bp, Artificial Sequence
  Synthetic oligonucleotide; TTT chr11 5167472 5167493 5167477 5167472 -
cccagacaaacaaaagttgaga

SEQ ID NO: 153593 - DNA, 22 bp, Artificial Sequence
  Synthetic oligonucleotide; TTC chr11 5167471 5167492 5167476 5167471 -
ccagacaaacaaaagttgagag

SEQ ID NO: 153594 - DNA, 22 bp, Artificial Sequence
  Synthetic oligonucleotide; TTG chr11 5167453 5167474 5167458 5167453 -
agagaattcaccaacaccagac

SEQ ID NO: 153595 - DNA, 22 bp, Artificial Sequence
  Synthetic oligonucleotide; TTC chr11 5167444 5167465 5167449 5167444 -
accaacaccagaccatcttgca

SEQ ID NO: 153596 - DNA, 22 bp, Artificial Sequence
  Synthetic oligonucleotide; CTT chr11 5167425 5167446 5167430 5167425 -
gcaaaaaatgctaaagggagtt

SEQ ID NO: 153597 - DNA, 22 bp, Artificial Sequence
  Synthetic oligonucleotide; TTG chr11 5167424 5167445 5167429 5167424 -
caaaaaatgctaaagggagtta

SEQ ID NO: 153598 - DNA, 22 bp, Artificial Sequence
  Synthetic oligonucleotide; CTA chr11 5167412 5167433 5167417 5167412 -
aagggagttatgcaatctgaaa

SEQ ID NO: 153599 - DNA, 22 bp, Artificial Sequence
  Synthetic oligonucleotide; TTA chr11 5167402 5167423 5167407 5167402 -
tgcaatctgaaagaaaaaagac

SEQ ID NO: 153600 - DNA, 22 bp, Artificial Sequence
  Synthetic oligonucleotide; CTG chr11 5167393 5167414 5167398 5167393 -
aaagaaaaaagacattaacatg

SEQ ID NO: 153601 - DNA, 22 bp, Artificial Sequence
  Synthetic oligonucleotide; TTA chr11 5167376 5167397 5167381 5167376 -
acatgcaaaagaaaacttttca

SEQ ID NO: 153602 - DNA, 22 bp, Artificial Sequence
  Synthetic oligonucleotide; CTT chr11 5167358 5167379 5167363 5167358 -
ttcaaagtatgaaacccactgg

SEQ ID NO: 153603 - DNA, 22 bp, Artificial Sequence
  Synthetic oligonucleotide; TTT chr11 5167357 5167378 5167362 5167357 -
tcaaagtatgaaacccactggt

SEQ ID NO: 153604 - DNA, 22 bp, Artificial Sequence
  Synthetic oligonucleotide; TTT chr11 5167356 5167377 5167361 5167356 -
caaagtatgaaacccactggta

SEQ ID NO: 153605 - DNA, 22 bp, Artificial Sequence
  Synthetic oligonucleotide; TTC chr11 5167355 5167376 5167360 5167355 -
aaagtatgaaacccactggtaa

SEQ ID NO: 153606 - DNA, 22 bp, Artificial Sequence
  Synthetic oligonucleotide; CTG chr11 5167337 5167358 5167342 5167337 -
gtaaaattaagtacatagacaa

SEQ ID NO: 153607 - DNA, 22 bp, Artificial Sequence
  Synthetic oligonucleotide; TTA chr11 5167328 5167349 5167333 5167328 -
agtacatagacaaacctagaat

SEQ ID NO: 153608 - DNA, 22 bp, Artificial Sequence
  Synthetic oligonucleotide; CTA chr11 5167310 5167331 5167315 5167310 -
gaataccccattactgtatttt

SEQ ID NO: 153609 - DNA, 22 bp, Artificial Sequence
  Synthetic oligonucleotide; TTA chr11 5167297 5167318 5167302 5167297 -
ctgtattttttggtgtgcaatc

SEQ ID NO: 153610 - DNA, 22 bp, Artificial Sequence
  Synthetic oligonucleotide; CTG chr11 5167294 5167315 5167299 5167294 -
tattttttggtgtgcaatccac

SEQ ID NO: 153611 - DNA, 22 bp, Artificial Sequence
  Synthetic oligonucleotide; TTT chr11 5167289 5167310 5167294 5167289 -
tttggtgtgcaatccacacaga

SEQ ID NO: 153612 - DNA, 22 bp, Artificial Sequence
  Synthetic oligonucleotide; TTT chr11 5167288 5167309 5167293 5167288 -
ttggtgtgcaatccacacagaa

SEQ ID NO: 153613 - DNA, 22 bp, Artificial Sequence
  Synthetic oligonucleotide; TTT chr11 5167287 5167308 5167292 5167287 -
tggtgtgcaatccacacagaac

SEQ ID NO: 153614 - DNA, 22 bp, Artificial Sequence
  Synthetic oligonucleotide; TTT chr11 5167286 5167307 5167291 5167286 -
ggtgtgcaatccacacagaact

SEQ ID NO: 153615 - DNA, 22 bp, Artificial Sequence
  Synthetic oligonucleotide; TTG chr11 5167285 5167306 5167290 5167285 -
gtgtgcaatccacacagaactc

SEQ ID NO: 153616 - DNA, 22 bp, Artificial Sequence
  Synthetic oligonucleotide; CTC chr11 5167263 5167284 5167268 5167263 -
cagtatgaaacccaaaaaacaa

SEQ ID NO: 153617 - DNA, 22 bp, Artificial Sequence
  Synthetic oligonucleotide; CTT chr11 5167236 5167257 5167241 5167236 -
tcaaaaacagtaatagctatag

SEQ ID NO: 153618 - DNA, 22 bp, Artificial Sequence
  Synthetic oligonucleotide; TTT chr11 5167235 5167256 5167240 5167235 -
caaaaacagtaatagctatagc

SEQ ID NO: 153619 - DNA, 22 bp, Artificial Sequence
  Synthetic oligonucleotide; TTC chr11 5167234 5167255 5167239 5167234 -
aaaaacagtaatagctatagca

SEQ ID NO: 153620 - DNA, 22 bp, Artificial Sequence
  Synthetic oligonucleotide; CTA chr11 5167217 5167238 5167222 5167217 -
tagcaaccttttaagatgtagg

SEQ ID NO: 153621 - DNA, 22 bp, Artificial Sequence
  Synthetic oligonucleotide; CTT chr11 5167207 5167228 5167212 5167207 -
ttaagatgtaggtaatataaaa

SEQ ID NO: 153622 - DNA, 22 bp, Artificial Sequence
  Synthetic oligonucleotide; TTT chr11 5167206 5167227 5167211 5167206 -
taagatgtaggtaatataaaat

SEQ ID NO: 153623 - DNA, 22 bp, Artificial Sequence
  Synthetic oligonucleotide; TTT chr11 5167205 5167226 5167210 5167205 -
aagatgtaggtaatataaaata

SEQ ID NO: 153624 - DNA, 22 bp, Artificial Sequence
  Synthetic oligonucleotide; TTA chr11 5167204 5167225 5167209 5167204 -
agatgtaggtaatataaaatat

SEQ ID NO: 153625 - DNA, 22 bp, Artificial Sequence
  Synthetic oligonucleotide; TTA chr11 5167138 5167159 5167143 5167138 -
aagtgtagaatttttttgcctg

SEQ ID NO: 153626 - DNA, 22 bp, Artificial Sequence
  Synthetic oligonucleotide; TTT chr11 5167125 5167146 5167130 5167125 -
ttttgcctgtttttgcccttgt

SEQ ID NO: 153627 - DNA, 22 bp, Artificial Sequence
  Synthetic oligonucleotide; TTT chr11 5167124 5167145 5167129 5167124 -
tttgcctgtttttgcccttgtt

SEQ ID NO: 153628 - DNA, 22 bp, Artificial Sequence
  Synthetic oligonucleotide; TTT chr11 5167123 5167144 5167128 5167123 -
ttgcctgtttttgcccttgttt

SEQ ID NO: 153629 - DNA, 22 bp, Artificial Sequence
  Synthetic oligonucleotide; TTT chr11 5167122 5167143 5167127 5167122 -
tgcctgtttttgcccttgttta

SEQ ID NO: 153630 - DNA, 22 bp, Artificial Sequence
  Synthetic oligonucleotide; TTT chr11 5167121 5167142 5167126 5167121 -
gcctgtttttgcccttgtttat

SEQ ID NO: 153631 - DNA, 22 bp, Artificial Sequence
  Synthetic oligonucleotide; TTG chr11 5167120 5167141 5167125 5167120 -
cctgtttttgcccttgtttata

SEQ ID NO: 153632 - DNA, 22 bp, Artificial Sequence
  Synthetic oligonucleotide; CTG chr11 5167116 5167137 5167121 5167116 -
tttttgcccttgtttatattcc

SEQ ID NO: 153633 - DNA, 22 bp, Artificial Sequence
  Synthetic oligonucleotide; TTT chr11 5167113 5167134 5167118 5167113 -
ttgcccttgtttatattccttt

SEQ ID NO: 153634 - DNA, 22 bp, Artificial Sequence
  Synthetic oligonucleotide; TTT chr11 5167112 5167133 5167117 5167112 -
tgcccttgtttatattccttta

SEQ ID NO: 153635 - DNA, 22 bp, Artificial Sequence
  Synthetic oligonucleotide; TTT chr11 5167111 5167132 5167116 5167111 -
gcccttgtttatattcctttat

SEQ ID NO: 153636 - DNA, 22 bp, Artificial Sequence
  Synthetic oligonucleotide; TTG chr11 5167110 5167131 5167115 5167110 -
cccttgtttatattcctttatt

SEQ ID NO: 153637 - DNA, 22 bp, Artificial Sequence
  Synthetic oligonucleotide; CTT chr11 5167105 5167126 5167110 5167105 -
gtttatattcctttatttgcga

SEQ ID NO: 153638 - DNA, 22 bp, Artificial Sequence
  Synthetic oligonucleotide; TTG chr11 5167104 5167125 5167109 5167104 -
tttatattcctttatttgcgat

SEQ ID NO: 153639 - DNA, 22 bp, Artificial Sequence
  Synthetic oligonucleotide; TTT chr11 5167101 5167122 5167106 5167101 -
atattcctttatttgcgatcta

SEQ ID NO: 153640 - DNA, 22 bp, Artificial Sequence
  Synthetic oligonucleotide; TTA chr11 5167100 5167121 5167105 5167100 -
tattcctttatttgcgatctaa

SEQ ID NO: 153641 - DNA, 22 bp, Artificial Sequence
  Synthetic oligonucleotide; TTC chr11 5167095 5167116 5167100 5167095 -
ctttatttgcgatctaagataa

SEQ ID NO: 153642 - DNA, 22 bp, Artificial Sequence
  Synthetic oligonucleotide; CTT chr11 5167092 5167113 5167097 5167092 -
tatttgcgatctaagataattc

SEQ ID NO: 153643 - DNA, 22 bp, Artificial Sequence
  Synthetic oligonucleotide; TTT chr11 5167091 5167112 5167096 5167091 -
atttgcgatctaagataattcg

SEQ ID NO: 153644 - DNA, 22 bp, Artificial Sequence
  Synthetic oligonucleotide; TTA chr11 5167090 5167111 5167095 5167090 -
tttgcgatctaagataattcgt

SEQ ID NO: 153645 - DNA, 22 bp, Artificial Sequence
  Synthetic oligonucleotide; TTT chr11 5167087 5167108 5167092 5167087 -
gcgatctaagataattcgtcat

SEQ ID NO: 153646 - DNA, 22 bp, Artificial Sequence
  Synthetic oligonucleotide; TTG chr11 5167086 5167107 5167091 5167086 -
cgatctaagataattcgtcatc

SEQ ID NO: 153647 - DNA, 22 bp, Artificial Sequence
  Synthetic oligonucleotide; CTA chr11 5167079 5167100 5167084 5167079 -
agataattcgtcatcctttaaa

SEQ ID NO: 153648 - DNA, 22 bp, Artificial Sequence
  Synthetic oligonucleotide; TTC chr11 5167070 5167091 5167075 5167070 -
gtcatcctttaaaataacttgc

SEQ ID NO: 153649 - DNA, 22 bp, Artificial Sequence
  Synthetic oligonucleotide; CTT chr11 5167061 5167082 5167066 5167061 -
taaaataacttgctatatttat

SEQ ID NO: 153650 - DNA, 22 bp, Artificial Sequence
  Synthetic oligonucleotide; TTT chr11 5167060 5167081 5167065 5167060 -
aaaataacttgctatatttata

SEQ ID NO: 153651 - DNA, 22 bp, Artificial Sequence
  Synthetic oligonucleotide; TTA chr11 5167059 5167080 5167064 5167059 -
aaataacttgctatatttataa

SEQ ID NO: 153652 - DNA, 22 bp, Artificial Sequence
  Synthetic oligonucleotide; CTT chr11 5167050 5167071 5167055 5167050 -
gctatatttataagatgtttct

SEQ ID NO: 153653 - DNA, 22 bp, Artificial Sequence
  Synthetic oligonucleotide; TTG chr11 5167049 5167070 5167054 5167049 -
ctatatttataagatgtttctt

SEQ ID NO: 153654 - DNA, 22 bp, Artificial Sequence
  Synthetic oligonucleotide; CTA chr11 5167046 5167067 5167051 5167046 -
tatttataagatgtttcttgta

SEQ ID NO: 153655 - DNA, 22 bp, Artificial Sequence
  Synthetic oligonucleotide; TTT chr11 5167041 5167062 5167046 5167041 -
ataagatgtttcttgtaagccc

SEQ ID NO: 153656 - DNA, 22 bp, Artificial Sequence
  Synthetic oligonucleotide; TTA chr11 5167040 5167061 5167045 5167040 -
taagatgtttcttgtaagcccc

SEQ ID NO: 153657 - DNA, 22 bp, Artificial Sequence
  Synthetic oligonucleotide; TTT chr11 5167030 5167051 5167035 5167030 -
cttgtaagccccatggtaacca

SEQ ID NO: 153658 - DNA, 22 bp, Artificial Sequence
  Synthetic oligonucleotide; TTC chr11 5167029 5167050 5167034 5167029 -
ttgtaagccccatggtaaccac

SEQ ID NO: 153659 - DNA, 22 bp, Artificial Sequence
  Synthetic oligonucleotide; CTT chr11 5167027 5167048 5167032 5167027 -
gtaagccccatggtaaccacag

SEQ ID NO: 153660 - DNA, 22 bp, Artificial Sequence
  Synthetic oligonucleotide; TTG chr11 5167026 5167047 5167031 5167026 -
taagccccatggtaaccacagc

SEQ ID NO: 153661 - DNA, 22 bp, Artificial Sequence
  Synthetic oligonucleotide; CTA chr11 5166993 5167014 5166998 5166993 -
taatagatttactaaaaataaa

SEQ ID NO: 153662 - DNA, 22 bp, Artificial Sequence
  Synthetic oligonucleotide; TTT chr11 5166983 5167004 5166988 5166983 -
actaaaaataaaaagtaacaaa

SEQ ID NO: 153663 - DNA, 22 bp, Artificial Sequence
  Synthetic oligonucleotide; TTA chr11 5166982 5167003 5166987 5166982 -
ctaaaaataaaaagtaacaaat

SEQ ID NO: 153664 - DNA, 22 bp, Artificial Sequence
  Synthetic oligonucleotide; CTA chr11 5166979 5167000 5166984 5166979 -
aaaataaaaagtaacaaattaa

SEQ ID NO: 153665 - DNA, 22 bp, Artificial Sequence
  Synthetic oligonucleotide; TTA chr11 5166958 5166979 5166963 5166958 -
aaatatgctaccagagataatc

SEQ ID NO: 153666 - DNA, 22 bp, Artificial Sequence
  Synthetic oligonucleotide; CTA chr11 5166948 5166969 5166953 5166948 -
ccagagataatcacataaccat

SEQ ID NO: 153667 - DNA, 22 bp, Artificial Sequence
  Synthetic oligonucleotide; CTC chr11 5166897 5166918 5166902 5166897 -
catacagccaaaaataagcaaa

SEQ ID NO: 153668 - DNA, 22 bp, Artificial Sequence
  Synthetic oligonucleotide; CTT chr11 5166843 5166864 5166848 5166843 -
acttagtaactacactgagtgt

SEQ ID NO: 153669 - DNA, 22 bp, Artificial Sequence
  Synthetic oligonucleotide; TTA chr11 5166842 5166863 5166847 5166842 -
cttagtaactacactgagtgta

SEQ ID NO: 153670 - DNA, 22 bp, Artificial Sequence
  Synthetic oligonucleotide; CTT chr11 5166839 5166860 5166844 5166839 -
agtaactacactgagtgtaaat

SEQ ID NO: 153671 - DNA, 22 bp, Artificial Sequence
  Synthetic oligonucleotide; TTA chr11 5166838 5166859 5166843 5166838 -
gtaactacactgagtgtaaata

SEQ ID NO: 153672 - DNA, 22 bp, Artificial Sequence
  Synthetic oligonucleotide; CTA chr11 5166831 5166852 5166836 5166831 -
cactgagtgtaaatagtctcag

SEQ ID NO: 153673 - DNA, 22 bp, Artificial Sequence
  Synthetic oligonucleotide; CTG chr11 5166826 5166847 5166831 5166826 -
agtgtaaatagtctcagttccc

SEQ ID NO: 153674 - DNA, 22 bp, Artificial Sequence
  Synthetic oligonucleotide; CTC chr11 5166811 5166832 5166816 5166811 -
agttccccaattaaaagtaata

SEQ ID NO: 153675 - DNA, 22 bp, Artificial Sequence
  Synthetic oligonucleotide; TTC chr11 5166806 5166827 5166811 5166806 -
cccaattaaaagtaatagaatg

SEQ ID NO: 153676 - DNA, 22 bp, Artificial Sequence
  Synthetic oligonucleotide; TTA chr11 5166798 5166819 5166803 5166798 -
aaagtaatagaatggtaaatgg

SEQ ID NO: 153677 - DNA, 22 bp, Artificial Sequence
  Synthetic oligonucleotide; CTT chr11 5166754 5166775 5166759 5166754 -
tatgcgatcttcaagaaaccca

SEQ ID NO: 153678 - DNA, 22 bp, Artificial Sequence
  Synthetic oligonucleotide; TTT chr11 5166753 5166774 5166758 5166753 -
atgcgatcttcaagaaacccac

SEQ ID NO: 153679 - DNA, 22 bp, Artificial Sequence
  Synthetic oligonucleotide; TTA chr11 5166752 5166773 5166757 5166752 -
tgcgatcttcaagaaacccact

SEQ ID NO: 153680 - DNA, 22 bp, Artificial Sequence
  Synthetic oligonucleotide; CTT chr11 5166743 5166764 5166748 5166743 -
caagaaacccacttcacctata

SEQ ID NO: 153681 - DNA, 22 bp, Artificial Sequence
  Synthetic oligonucleotide; TTC chr11 5166742 5166763 5166747 5166742 -
aagaaacccacttcacctataa

SEQ ID NO: 153682 - DNA, 22 bp, Artificial Sequence
  Synthetic oligonucleotide; CTT chr11 5166729 5166750 5166734 5166729 -
cacctataaaggcacacataaa

SEQ ID NO: 153683 - DNA, 22 bp, Artificial Sequence
  Synthetic oligonucleotide; TTC chr11 5166728 5166749 5166733 5166728 -
acctataaaggcacacataaat

SEQ ID NO: 153684 - DNA, 22 bp, Artificial Sequence
  Synthetic oligonucleotide; CTA chr11 5166723 5166744 5166728 5166723 -
taaaggcacacataaatgaaag

SEQ ID NO: 153685 - DNA, 22 bp, Artificial Sequence
  Synthetic oligonucleotide; TTG chr11 5166691 5166712 5166696 5166691 -
gaaaaaaattccatgaactgga

SEQ ID NO: 153686 - DNA, 22 bp, Artificial Sequence
  Synthetic oligonucleotide; TTC chr11 5166680 5166701 5166685 5166680 -
catgaactggaaaccagaaaga

SEQ ID NO: 153687 - DNA, 22 bp, Artificial Sequence
  Synthetic oligonucleotide; CTG chr11 5166671 5166692 5166676 5166671 -
gaaaccagaaagagcagtagta

SEQ ID NO: 153688 - DNA, 22 bp, Artificial Sequence
  Synthetic oligonucleotide; TTG chr11 5166645 5166666 5166650 5166645 -
tacttaaatcagataaaataga

SEQ ID NO: 153689 - DNA, 22 bp, Artificial Sequence
  Synthetic oligonucleotide; CTT chr11 5166640 5166661 5166645 5166640 -
aaatcagataaaatagactaca

SEQ ID NO: 153690 - DNA, 22 bp, Artificial Sequence
  Synthetic oligonucleotide; TTA chr11 5166639 5166660 5166644 5166639 -
aatcagataaaatagactacaa

SEQ ID NO: 153691 - DNA, 22 bp, Artificial Sequence
  Synthetic oligonucleotide; CTA chr11 5166620 5166641 5166625 5166620 -
caaatttaaaaactgtaagaaa

SEQ ID NO: 153692 - DNA, 22 bp, Artificial Sequence
  Synthetic oligonucleotide; TTT chr11 5166613 5166634 5166618 5166613 -
aaaaactgtaagaaaagataag

SEQ ID NO: 153693 - DNA, 22 bp, Artificial Sequence
  Synthetic oligonucleotide; TTA chr11 5166612 5166633 5166617 5166612 -
aaaactgtaagaaaagataagg

SEQ ID NO: 153694 - DNA, 22 bp, Artificial Sequence
  Synthetic oligonucleotide; CTG chr11 5166605 5166626 5166610 5166605 -
taagaaaagataaggagggtca

SEQ ID NO: 153695 - DNA, 22 bp, Artificial Sequence
  Synthetic oligonucleotide; CTG chr11 5166580 5166601 5166585 5166580 -
tataataataaaggggtcaatt

SEQ ID NO: 153696 - DNA, 22 bp, Artificial Sequence
  Synthetic oligonucleotide; TTC chr11 5166557 5166578 5166562 5166557 -
agcaagaggatacaattataaa

SEQ ID NO: 153697 - DNA, 22 bp, Artificial Sequence
  Synthetic oligonucleotide; TTA chr11 5166539 5166560 5166544 5166539 -
taaatattgatgtatccaacat

SEQ ID NO: 153698 - DNA, 22 bp, Artificial Sequence
  Synthetic oligonucleotide; TTG chr11 5166530 5166551 5166535 5166530 -
atgtatccaacatcaaagttcc

SEQ ID NO: 153699 - DNA, 22 bp, Artificial Sequence
  Synthetic oligonucleotide; TTC chr11 5166509 5166530 5166514 5166509 -
ccaagtatataaggaaaacatt

SEQ ID NO: 153700 - DNA, 22 bp, Artificial Sequence
  Synthetic oligonucleotide; TTA chr11 5166486 5166507 5166491 5166486 -
atagtcctaaagggcgagacag

SEQ ID NO: 153701 - DNA, 22 bp, Artificial Sequence
  Synthetic oligonucleotide; CTA chr11 5166477 5166498 5166482 5166477 -
aagggcgagacagactgcaata

SEQ ID NO: 153702 - DNA, 22 bp, Artificial Sequence
  Synthetic oligonucleotide; CTG chr11 5166460 5166481 5166465 5166460 -
caatacaataatagtagggaac

SEQ ID NO: 153703 - DNA, 22 bp, Artificial Sequence
  Synthetic oligonucleotide; CTT chr11 5166436 5166457 5166441 5166436 -
taaacacttcagtctcagtaat

SEQ ID NO: 153704 - DNA, 22 bp, Artificial Sequence
  Synthetic oligonucleotide; TTT chr11 5166435 5166456 5166440 5166435 -
aaacacttcagtctcagtaatg

SEQ ID NO: 153705 - DNA, 22 bp, Artificial Sequence
  Synthetic oligonucleotide; TTA chr11 5166434 5166455 5166439 5166434 -
aacacttcagtctcagtaatga

SEQ ID NO: 153706 - DNA, 22 bp, Artificial Sequence
  Synthetic oligonucleotide; CTT chr11 5166427 5166448 5166432 5166427 -
cagtctcagtaatgaacagatc

SEQ ID NO: 153707 - DNA, 22 bp, Artificial Sequence
  Synthetic oligonucleotide; TTC chr11 5166426 5166447 5166431 5166426 -
agtctcagtaatgaacagatcg

SEQ ID NO: 153708 - DNA, 22 bp, Artificial Sequence
  Synthetic oligonucleotide; CTC chr11 5166420 5166441 5166425 5166420 -
agtaatgaacagatcggccaga

SEQ ID NO: 153709 - DNA, 22 bp, Artificial Sequence
  Synthetic oligonucleotide; CTA chr11 5166395 5166416 5166400 5166395 -
aaaatcaacaaatgaacaacac

SEQ ID NO: 153710 - DNA, 22 bp, Artificial Sequence
  Synthetic oligonucleotide; TTA chr11 5166368 5166389 5166373 5166368 -
atgtacccactatatctaatag

SEQ ID NO: 153711 - DNA, 22 bp, Artificial Sequence
  Synthetic oligonucleotide; CTA chr11 5166356 5166377 5166361 5166356 -
tatctaatagacccaactgaca

SEQ ID NO: 153712 - DNA, 22 bp, Artificial Sequence
  Synthetic oligonucleotide; CTA chr11 5166350 5166371 5166355 5166350 -
atagacccaactgacattaaca

SEQ ID NO: 153713 - DNA, 22 bp, Artificial Sequence
  Synthetic oligonucleotide; CTG chr11 5166337 5166358 5166342 5166337 -
acattaacagaacttgtccccc

SEQ ID NO: 153714 - DNA, 22 bp, Artificial Sequence
  Synthetic oligonucleotide; TTA chr11 5166331 5166352 5166336 5166331 -
acagaacttgtcccccaactgc

SEQ ID NO: 153715 - DNA, 22 bp, Artificial Sequence
  Synthetic oligonucleotide; CTT chr11 5166322 5166343 5166327 5166322 -
gtcccccaactgctgaagaaga

SEQ ID NO: 153716 - DNA, 22 bp, Artificial Sequence
  Synthetic oligonucleotide; TTG chr11 5166321 5166342 5166326 5166321 -
tcccccaactgctgaagaagat

SEQ ID NO: 153717 - DNA, 22 bp, Artificial Sequence
  Synthetic oligonucleotide; CTG chr11 5166310 5166331 5166315 5166310 -
ctgaagaagatacatttcttta

SEQ ID NO: 153718 - DNA, 22 bp, Artificial Sequence
  Synthetic oligonucleotide; CTG chr11 5166307 5166328 5166312 5166307 -
aagaagatacatttctttaaag

SEQ ID NO: 153719 - DNA, 22 bp, Artificial Sequence
  Synthetic oligonucleotide; TTT chr11 5166293 5166314 5166298 5166293 -
ctttaaagcagcatgtacaaca

SEQ ID NO: 153720 - DNA, 22 bp, Artificial Sequence
  Synthetic oligonucleotide; TTC chr11 5166292 5166313 5166297 5166292 -
tttaaagcagcatgtacaacat

SEQ ID NO: 153721 - DNA, 22 bp, Artificial Sequence
  Synthetic oligonucleotide; CTT chr11 5166290 5166311 5166295 5166290 -
taaagcagcatgtacaacattt

SEQ ID NO: 153722 - DNA, 22 bp, Artificial Sequence
  Synthetic oligonucleotide; TTT chr11 5166289 5166310 5166294 5166289 -
aaagcagcatgtacaacatttt

SEQ ID NO: 153723 - DNA, 22 bp, Artificial Sequence
  Synthetic oligonucleotide; TTA chr11 5166288 5166309 5166293 5166288 -
aagcagcatgtacaacattttc

SEQ ID NO: 153724 - DNA, 22 bp, Artificial Sequence
  Synthetic oligonucleotide; TTT chr11 5166268 5166289 5166273 5166268 -
tcctaaataaggccatatgtta

SEQ ID NO: 153725 - DNA, 22 bp, Artificial Sequence
  Synthetic oligonucleotide; TTT chr11 5166267 5166288 5166272 5166267 -
cctaaataaggccatatgttag

SEQ ID NO: 153726 - DNA, 22 bp, Artificial Sequence
  Synthetic oligonucleotide; TTC chr11 5166266 5166287 5166271 5166266 -
ctaaataaggccatatgttagg

SEQ ID NO: 153727 - DNA, 22 bp, Artificial Sequence
  Synthetic oligonucleotide; CTA chr11 5166263 5166284 5166268 5166263 -
aataaggccatatgttaggcca

SEQ ID NO: 153728 - DNA, 22 bp, Artificial Sequence
  Synthetic oligonucleotide; TTA chr11 5166246 5166267 5166251 5166246 -
ggccacaaggtaagtttgtaca

SEQ ID NO: 153729 - DNA, 22 bp, Artificial Sequence
  Synthetic oligonucleotide; TTT chr11 5166229 5166250 5166234 5166229 -
gtacaaatttttcagaagtaga

SEQ ID NO: 153730 - DNA, 22 bp, Artificial Sequence
  Synthetic oligonucleotide; TTG chr11 5166228 5166249 5166233 5166228 -
tacaaatttttcagaagtagaa

SEQ ID NO: 153731 - DNA, 22 bp, Artificial Sequence
  Synthetic oligonucleotide; TTT chr11 5166219 5166240 5166224 5166219 -
ttcagaagtagaaattttatca

SEQ ID NO: 153732 - DNA, 22 bp, Artificial Sequence
  Synthetic oligonucleotide; TTT chr11 5166218 5166239 5166223 5166218 -
tcagaagtagaaattttatcaa

SEQ ID NO: 153733 - DNA, 22 bp, Artificial Sequence
  Synthetic oligonucleotide; TTT chr11 5166217 5166238 5166222 5166217 -
cagaagtagaaattttatcaag

SEQ ID NO: 153734 - DNA, 22 bp, Artificial Sequence
  Synthetic oligonucleotide; TTC chr11 5166216 5166237 5166221 5166216 -
agaagtagaaattttatcaagt

SEQ ID NO: 153735 - DNA, 22 bp, Artificial Sequence
  Synthetic oligonucleotide; TTT chr11 5166202 5166223 5166207 5166202 -
tatcaagtatattttctgacca

SEQ ID NO: 153736 - DNA, 22 bp, Artificial Sequence
  Synthetic oligonucleotide; TTT chr11 5166201 5166222 5166206 5166201 -
atcaagtatattttctgaccac

SEQ ID NO: 153737 - DNA, 22 bp, Artificial Sequence
  Synthetic oligonucleotide; TTA chr11 5166200 5166221 5166205 5166200 -
tcaagtatattttctgaccaca

SEQ ID NO: 153738 - DNA, 22 bp, Artificial Sequence
  Synthetic oligonucleotide; TTT chr11 5166188 5166209 5166193 5166188 -
tctgaccacagtggaataaaac

SEQ ID NO: 153739 - DNA, 22 bp, Artificial Sequence
  Synthetic oligonucleotide; TTT chr11 5166187 5166208 5166192 5166187 -
ctgaccacagtggaataaaact

SEQ ID NO: 153740 - DNA, 22 bp, Artificial Sequence
  Synthetic oligonucleotide; TTC chr11 5166186 5166207 5166191 5166186 -
tgaccacagtggaataaaacta

SEQ ID NO: 153741 - DNA, 22 bp, Artificial Sequence
  Synthetic oligonucleotide; CTG chr11 5166184 5166205 5166189 5166184 -
accacagtggaataaaactaga

SEQ ID NO: 153742 - DNA, 22 bp, Artificial Sequence
  Synthetic oligonucleotide; CTA chr11 5166164 5166185 5166169 5166164 -
gaaatgaataacaagaagatca

SEQ ID NO: 153743 - DNA, 22 bp, Artificial Sequence
  Synthetic oligonucleotide; CTC chr11 5166101 5166122 5166106 5166101 -
ctgaatgtcaggcctctgagcc

SEQ ID NO: 153744 - DNA, 22 bp, Artificial Sequence
  Synthetic oligonucleotide; CTG chr11 5166098 5166119 5166103 5166098 -
aatgtcaggcctctgagcccaa

SEQ ID NO: 153745 - DNA, 22 bp, Artificial Sequence
  Synthetic oligonucleotide; CTC chr11 5166085 5166106 5166090 5166085 -
tgagcccaagctaagccatcat

SEQ ID NO: 153746 - DNA, 22 bp, Artificial Sequence
  Synthetic oligonucleotide; CTG chr11 5166083 5166104 5166088 5166083 -
agcccaagctaagccatcatgt

SEQ ID NO: 153747 - DNA, 22 bp, Artificial Sequence
  Synthetic oligonucleotide; CTA chr11 5166072 5166093 5166077 5166072 -
agccatcatgtcccctgtgacc

SEQ ID NO: 153748 - DNA, 22 bp, Artificial Sequence
  Synthetic oligonucleotide; CTG chr11 5166055 5166076 5166060 5166055 -
tgacctgcatatacacatacag

SEQ ID NO: 153749 - DNA, 22 bp, Artificial Sequence
  Synthetic oligonucleotide; CTG chr11 5166048 5166069 5166053 5166048 -
catatacacatacagatggcca

SEQ ID NO: 153750 - DNA, 22 bp, Artificial Sequence
  Synthetic oligonucleotide; TTT chr11 5166022 5166043 5166027 5166022 -
ctgccttaactgatgacattcc

SEQ ID NO: 153751 - DNA, 22 bp, Artificial Sequence
  Synthetic oligonucleotide; TTC chr11 5166021 5166042 5166026 5166021 -
tgccttaactgatgacattcca

SEQ ID NO: 153752 - DNA, 22 bp, Artificial Sequence
  Synthetic oligonucleotide; CTG chr11 5166019 5166040 5166024 5166019 -
ccttaactgatgacattccacc

SEQ ID NO: 153753 - DNA, 22 bp, Artificial Sequence
  Synthetic oligonucleotide; CTT chr11 5166015 5166036 5166020 5166015 -
aactgatgacattccaccacaa

SEQ ID NO: 153754 - DNA, 22 bp, Artificial Sequence
  Synthetic oligonucleotide; TTA chr11 5166014 5166035 5166019 5166014 -
actgatgacattccaccacaaa

SEQ ID NO: 153755 - DNA, 22 bp, Artificial Sequence
  Synthetic oligonucleotide; CTG chr11 5166010 5166031 5166015 5166010 -
atgacattccaccacaaaagaa

SEQ ID NO: 153756 - DNA, 22 bp, Artificial Sequence
  Synthetic oligonucleotide; TTC chr11 5166001 5166022 5166006 5166001 -
caccacaaaagaagtgaaaatg

SEQ ID NO: 153757 - DNA, 22 bp, Artificial Sequence
  Synthetic oligonucleotide; CTG chr11 5165974 5165995 5165979 5165974 -
ttcctgccttaactgatgacat

SEQ ID NO: 153758 - DNA, 22 bp, Artificial Sequence
  Synthetic oligonucleotide; TTC chr11 5165971 5165992 5165976 5165971 -
ctgccttaactgatgacattgt

SEQ ID NO: 153759 - DNA, 22 bp, Artificial Sequence
  Synthetic oligonucleotide; CTG chr11 5165968 5165989 5165973 5165968 -
ccttaactgatgacattgtctt

SEQ ID NO: 153760 - DNA, 22 bp, Artificial Sequence
  Synthetic oligonucleotide; CTT chr11 5165964 5165985 5165969 5165964 -
aactgatgacattgtcttgtga

SEQ ID NO: 153761 - DNA, 22 bp, Artificial Sequence
  Synthetic oligonucleotide; TTA chr11 5165963 5165984 5165968 5165963 -
actgatgacattgtcttgtgaa

SEQ ID NO: 153762 - DNA, 22 bp, Artificial Sequence
  Synthetic oligonucleotide; CTG chr11 5165959 5165980 5165964 5165959 -
atgacattgtcttgtgaaattc

SEQ ID NO: 153763 - DNA, 22 bp, Artificial Sequence
  Synthetic oligonucleotide; TTG chr11 5165950 5165971 5165955 5165950 -
tcttgtgaaattccttctcctg

SEQ ID NO: 153764 - DNA, 22 bp, Artificial Sequence
  Synthetic oligonucleotide; CTT chr11 5165946 5165967 5165951 5165946 -
gtgaaattccttctcctggctc

SEQ ID NO: 153765 - DNA, 22 bp, Artificial Sequence
  Synthetic oligonucleotide; TTG chr11 5165945 5165966 5165950 5165945 -
tgaaattccttctcctggctca

SEQ ID NO: 153766 - DNA, 22 bp, Artificial Sequence
  Synthetic oligonucleotide; TTC chr11 5165937 5165958 5165942 5165937 -
cttctcctggctcatcctggct

SEQ ID NO: 153767 - DNA, 22 bp, Artificial Sequence
  Synthetic oligonucleotide; CTT chr11 5165934 5165955 5165939 5165934 -
ctcctggctcatcctggctcaa

SEQ ID NO: 153768 - DNA, 22 bp, Artificial Sequence
  Synthetic oligonucleotide; TTC chr11 5165933 5165954 5165938 5165933 -
tcctggctcatcctggctcaaa

SEQ ID NO: 153769 - DNA, 22 bp, Artificial Sequence
  Synthetic oligonucleotide; CTC chr11 5165931 5165952 5165936 5165931 -
ctggctcatcctggctcaaaag

SEQ ID NO: 153770 - DNA, 22 bp, Artificial Sequence
  Synthetic oligonucleotide; CTG chr11 5165928 5165949 5165933 5165928 -
gctcatcctggctcaaaagctc

SEQ ID NO: 153771 - DNA, 22 bp, Artificial Sequence
  Synthetic oligonucleotide; CTC chr11 5165924 5165945 5165929 5165924 -
atcctggctcaaaagctcccct

SEQ ID NO: 153772 - DNA, 22 bp, Artificial Sequence
  Synthetic oligonucleotide; CTG chr11 5165918 5165939 5165923 5165918 -
gctcaaaagctcccctactgag

SEQ ID NO: 153773 - DNA, 22 bp, Artificial Sequence
  Synthetic oligonucleotide; CTC chr11 5165914 5165935 5165919 5165914 -
aaaagctcccctactgagcacc

SEQ ID NO: 153774 - DNA, 22 bp, Artificial Sequence
  Synthetic oligonucleotide; CTC chr11 5165906 5165927 5165911 5165906 -
ccctactgagcaccttgtgacc

SEQ ID NO: 153775 - DNA, 22 bp, Artificial Sequence
  Synthetic oligonucleotide; CTA chr11 5165901 5165922 5165906 5165901 -
ctgagcaccttgtgacccccac

SEQ ID NO: 153776 - DNA, 22 bp, Artificial Sequence
  Synthetic oligonucleotide; CTG chr11 5165898 5165919 5165903 5165898 -
agcaccttgtgacccccactcc

SEQ ID NO: 153777 - DNA, 22 bp, Artificial Sequence
  Synthetic oligonucleotide; CTT chr11 5165890 5165911 5165895 5165890 -
gtgacccccactcctgcccgcc

SEQ ID NO: 153778 - DNA, 22 bp, Artificial Sequence
  Synthetic oligonucleotide; TTG chr11 5165889 5165910 5165894 5165889 -
tgacccccactcctgcccgcca

SEQ ID NO: 153779 - DNA, 22 bp, Artificial Sequence
  Synthetic oligonucleotide; CTC chr11 5165877 5165898 5165882 5165877 -
ctgcccgccagagaacaacccc

SEQ ID NO: 153780 - DNA, 22 bp, Artificial Sequence
  Synthetic oligonucleotide; CTG chr11 5165874 5165895 5165879 5165874 -
cccgccagagaacaacccccct

SEQ ID NO: 153781 - DNA, 22 bp, Artificial Sequence
  Synthetic oligonucleotide; CTT chr11 5165851 5165872 5165856 5165851 -
tgactgtaattttcctttacct

SEQ ID NO: 153782 - DNA, 22 bp, Artificial Sequence
  Synthetic oligonucleotide; TTT chr11 5165850 5165871 5165855 5165850 -
gactgtaattttcctttaccta

SEQ ID NO: 153783 - DNA, 22 bp, Artificial Sequence
  Synthetic oligonucleotide; TTG chr11 5165849 5165870 5165854 5165849 -
actgtaattttcctttacctac

SEQ ID NO: 153784 - DNA, 22 bp, Artificial Sequence
  Synthetic oligonucleotide; CTG chr11 5165845 5165866 5165850 5165845 -
taattttcctttacctacccaa

SEQ ID NO: 153785 - DNA, 22 bp, Artificial Sequence
  Synthetic oligonucleotide; TTT chr11 5165839 5165860 5165844 5165839 -
tcctttacctacccaaatctta

SEQ ID NO: 153786 - DNA, 22 bp, Artificial Sequence
  Synthetic oligonucleotide; TTT chr11 5165838 5165859 5165843 5165838 -
cctttacctacccaaatcttat

SEQ ID NO: 153787 - DNA, 22 bp, Artificial Sequence
  Synthetic oligonucleotide; TTC chr11 5165837 5165858 5165842 5165837 -
ctttacctacccaaatcttata

SEQ ID NO: 153788 - DNA, 22 bp, Artificial Sequence
  Synthetic oligonucleotide; CTT chr11 5165834 5165855 5165839 5165834 -
tacctacccaaatcttataaaa

SEQ ID NO: 153789 - DNA, 22 bp, Artificial Sequence
  Synthetic oligonucleotide; TTT chr11 5165833 5165854 5165838 5165833 -
acctacccaaatcttataaaac

SEQ ID NO: 153790 - DNA, 22 bp, Artificial Sequence
  Synthetic oligonucleotide; TTA chr11 5165832 5165853 5165837 5165832 -
cctacccaaatcttataaaaca

SEQ ID NO: 153791 - DNA, 22 bp, Artificial Sequence
  Synthetic oligonucleotide; CTA chr11 5165828 5165849 5165833 5165828 -
cccaaatcttataaaacagccc

SEQ ID NO: 153792 - DNA, 22 bp, Artificial Sequence
  Synthetic oligonucleotide; CTT chr11 5165818 5165839 5165823 5165818 -
ataaaacagccccactcctatc

SEQ ID NO: 153793 - DNA, 22 bp, Artificial Sequence
  Synthetic oligonucleotide; TTA chr11 5165817 5165838 5165822 5165817 -
taaaacagccccactcctatct

SEQ ID NO: 153794 - DNA, 22 bp, Artificial Sequence
  Synthetic oligonucleotide; CTC chr11 5165801 5165822 5165806 5165801 -
ctatctccctttgctgactctc

SEQ ID NO: 153795 - DNA, 22 bp, Artificial Sequence
  Synthetic oligonucleotide; CTA chr11 5165798 5165819 5165803 5165798 -
tctccctttgctgactctcttt

SEQ ID NO: 153796 - DNA, 22 bp, Artificial Sequence
  Synthetic oligonucleotide; CTC chr11 5165794 5165815 5165799 5165794 -
cctttgctgactctctttttgg

SEQ ID NO: 153797 - DNA, 22 bp, Artificial Sequence
  Synthetic oligonucleotide; CTT chr11 5165790 5165811 5165795 5165790 -
tgctgactctctttttggactc

SEQ ID NO: 153798 - DNA, 22 bp, Artificial Sequence
  Synthetic oligonucleotide; TTT chr11 5165789 5165810 5165794 5165789 -
gctgactctctttttggactca

SEQ ID NO: 153799 - DNA, 22 bp, Artificial Sequence
  Synthetic oligonucleotide; TTG chr11 5165788 5165809 5165793 5165788 -
ctgactctctttttggactcag

SEQ ID NO: 153800 - DNA, 22 bp, Artificial Sequence
  Synthetic oligonucleotide; CTG chr11 5165785 5165806 5165790 5165785 -
actctctttttggactcagcct

SEQ ID NO: 153801 - DNA, 22 bp, Artificial Sequence
  Synthetic oligonucleotide; CTC chr11 5165781 5165802 5165786 5165781 -
tctttttggactcagcctgcct

SEQ ID NO: 153802 - DNA, 22 bp, Artificial Sequence
  Synthetic oligonucleotide; CTC chr11 5165779 5165800 5165784 5165779 -
tttttggactcagcctgcctgc

SEQ ID NO: 153803 - DNA, 22 bp, Artificial Sequence
  Synthetic oligonucleotide; CTT chr11 5165777 5165798 5165782 5165777 -
tttggactcagcctgcctgcac

SEQ ID NO: 153804 - DNA, 22 bp, Artificial Sequence
  Synthetic oligonucleotide; TTT chr11 5165776 5165797 5165781 5165776 -
ttggactcagcctgcctgcacc

SEQ ID NO: 153805 - DNA, 22 bp, Artificial Sequence
  Synthetic oligonucleotide; TTT chr11 5165775 5165796 5165780 5165775 -
tggactcagcctgcctgcaccc

SEQ ID NO: 153806 - DNA, 22 bp, Artificial Sequence
  Synthetic oligonucleotide; TTT chr11 5165774 5165795 5165779 5165774 -
ggactcagcctgcctgcaccca

SEQ ID NO: 153807 - DNA, 22 bp, Artificial Sequence
  Synthetic oligonucleotide; TTG chr11 5165773 5165794 5165778 5165773 -
gactcagcctgcctgcacccag

SEQ ID NO: 153808 - DNA, 22 bp, Artificial Sequence
  Synthetic oligonucleotide; CTC chr11 5165768 5165789 5165773 5165768 -
agcctgcctgcacccaggtgaa

SEQ ID NO: 153809 - DNA, 22 bp, Artificial Sequence
  Synthetic oligonucleotide; CTG chr11 5165762 5165783 5165767 5165762 -
cctgcacccaggtgaaataaac

SEQ ID NO: 153810 - DNA, 22 bp, Artificial Sequence
  Synthetic oligonucleotide; CTG chr11 5165758 5165779 5165763 5165758 -
cacccaggtgaaataaacagcc

SEQ ID NO: 153811 - DNA, 22 bp, Artificial Sequence
  Synthetic oligonucleotide; CTT chr11 5165734 5165755 5165739 5165734 -
gttgcttacacaaagcctgttt

SEQ ID NO: 153812 - DNA, 22 bp, Artificial Sequence
  Synthetic oligonucleotide; TTG chr11 5165733 5165754 5165738 5165733 -
ttgcttacacaaagcctgtttg

SEQ ID NO: 153813 - DNA, 22 bp, Artificial Sequence
  Synthetic oligonucleotide; TTG chr11 5165730 5165751 5165735 5165730 -
cttacacaaagcctgtttggta

SEQ ID NO: 153814 - DNA, 22 bp, Artificial Sequence
  Synthetic oligonucleotide; CTT chr11 5165727 5165748 5165732 5165727 -
acacaaagcctgtttggtagtc

SEQ ID NO: 153815 - DNA, 22 bp, Artificial Sequence
  Synthetic oligonucleotide; TTA chr11 5165726 5165747 5165731 5165726 -
cacaaagcctgtttggtagtct

SEQ ID NO: 153816 - DNA, 22 bp, Artificial Sequence
  Synthetic oligonucleotide; CTG chr11 5165715 5165736 5165720 5165715 -
tttggtagtctcttcatatgga

SEQ ID NO: 153817 - DNA, 22 bp, Artificial Sequence
  Synthetic oligonucleotide; TTT chr11 5165712 5165733 5165717 5165712 -
ggtagtctcttcatatggacgc

SEQ ID NO: 153818 - DNA, 22 bp, Artificial Sequence
  Synthetic oligonucleotide; TTG chr11 5165711 5165732 5165716 5165711 -
gtagtctcttcatatggacgcg

SEQ ID NO: 153819 - DNA, 22 bp, Artificial Sequence
  Synthetic oligonucleotide; CTC chr11 5165703 5165724 5165708 5165703 -
ttcatatggacgcgcatgaaat

SEQ ID NO: 153820 - DNA, 22 bp, Artificial Sequence
  Synthetic oligonucleotide; CTT chr11 5165701 5165722 5165706 5165701 -
catatggacgcgcatgaaattt

SEQ ID NO: 153821 - DNA, 22 bp, Artificial Sequence
  Synthetic oligonucleotide; TTC chr11 5165700 5165721 5165705 5165700 -
atatggacgcgcatgaaatttg

SEQ ID NO: 153822 - DNA, 22 bp, Artificial Sequence
  Synthetic oligonucleotide; TTT chr11 5165679 5165700 5165684 5165679 -
ggtgccgtgactcagattgggg

SEQ ID NO: 153823 - DNA, 22 bp, Artificial Sequence
  Synthetic oligonucleotide; TTG chr11 5165678 5165699 5165683 5165678 -
gtgccgtgactcagattggggg

SEQ ID NO: 153824 - DNA, 22 bp, Artificial Sequence
  Synthetic oligonucleotide; CTC chr11 5165666 5165687 5165671 5165666 -
agattgggggacctcccttggg

SEQ ID NO: 153825 - DNA, 22 bp, Artificial Sequence
  Synthetic oligonucleotide; TTG chr11 5165660 5165681 5165665 5165660 -
ggggacctcccttgggagatca

SEQ ID NO: 153826 - DNA, 22 bp, Artificial Sequence
  Synthetic oligonucleotide; CTC chr11 5165651 5165672 5165656 5165651 -
ccttgggagatcaatcccctgt

SEQ ID NO: 153827 - DNA, 22 bp, Artificial Sequence
  Synthetic oligonucleotide; CTT chr11 5165647 5165668 5165652 5165647 -
gggagatcaatcccctgtcctc

SEQ ID NO: 153828 - DNA, 22 bp, Artificial Sequence
  Synthetic oligonucleotide; TTG chr11 5165646 5165667 5165651 5165646 -
ggagatcaatcccctgtcctcc

SEQ ID NO: 153829 - DNA, 22 bp, Artificial Sequence
  Synthetic oligonucleotide; CTG chr11 5165630 5165651 5165635 5165630 -
tcctcctgctctttgctccgtg

SEQ ID NO: 153830 - DNA, 22 bp, Artificial Sequence
  Synthetic oligonucleotide; CTC chr11 5165625 5165646 5165630 5165625 -
ctgctctttgctccgtgagaaa

SEQ ID NO: 153831 - DNA, 22 bp, Artificial Sequence
  Synthetic oligonucleotide; CTG chr11 5165622 5165643 5165627 5165622 -
ctctttgctccgtgagaaagat

SEQ ID NO: 153832 - DNA, 22 bp, Artificial Sequence
  Synthetic oligonucleotide; CTC chr11 5165619 5165640 5165624 5165619 -
tttgctccgtgagaaagatcca

SEQ ID NO: 153833 - DNA, 22 bp, Artificial Sequence
  Synthetic oligonucleotide; CTT chr11 5165617 5165638 5165622 5165617 -
tgctccgtgagaaagatccacc

SEQ ID NO: 153834 - DNA, 22 bp, Artificial Sequence
  Synthetic oligonucleotide; TTT chr11 5165616 5165637 5165621 5165616 -
gctccgtgagaaagatccacct

SEQ ID NO: 153835 - DNA, 22 bp, Artificial Sequence
  Synthetic oligonucleotide; TTG chr11 5165615 5165636 5165620 5165615 -
ctccgtgagaaagatccaccta

SEQ ID NO: 153836 - DNA, 22 bp, Artificial Sequence
  Synthetic oligonucleotide; CTC chr11 5165612 5165633 5165617 5165612 -
cgtgagaaagatccacctacga

SEQ ID NO: 153837 - DNA, 22 bp, Artificial Sequence
  Synthetic oligonucleotide; CTA chr11 5165593 5165614 5165598 5165593 -
cgacctcaggtcctcaaactga

SEQ ID NO: 153838 - DNA, 22 bp, Artificial Sequence
  Synthetic oligonucleotide; CTC chr11 5165586 5165607 5165591 5165586 -
aggtcctcaaactgaccagccc

SEQ ID NO: 153839 - DNA, 22 bp, Artificial Sequence
  Synthetic oligonucleotide; CTC chr11 5165578 5165599 5165583 5165578 -
aaactgaccagcccaagaaaca

SEQ ID NO: 153840 - DNA, 22 bp, Artificial Sequence
  Synthetic oligonucleotide; CTG chr11 5165572 5165593 5165577 5165572 -
accagcccaagaaacatttcac

SEQ ID NO: 153841 - DNA, 22 bp, Artificial Sequence
  Synthetic oligonucleotide; TTT chr11 5165553 5165574 5165558 5165553 -
caccaatttcaaatccggtaag

SEQ ID NO: 153842 - DNA, 22 bp, Artificial Sequence
  Synthetic oligonucleotide; TTC chr11 5165552 5165573 5165557 5165552 -
accaatttcaaatccggtaagt

SEQ ID NO: 153843 - DNA, 22 bp, Artificial Sequence
  Synthetic oligonucleotide; TTT chr11 5165544 5165565 5165549 5165544 -
caaatccggtaagtggcctctt

SEQ ID NO: 153844 - DNA, 22 bp, Artificial Sequence
  Synthetic oligonucleotide; TTC chr11 5165543 5165564 5165548 5165543 -
aaatccggtaagtggcctcttt

SEQ ID NO: 153845 - DNA, 22 bp, Artificial Sequence
  Synthetic oligonucleotide; CTC chr11 5165524 5165545 5165529 5165524 -
tttttactgtcttctccaacct

SEQ ID NO: 153846 - DNA, 22 bp, Artificial Sequence
  Synthetic oligonucleotide; CTT chr11 5165522 5165543 5165527 5165522 -
tttactgtcttctccaacctcc

SEQ ID NO: 153847 - DNA, 22 bp, Artificial Sequence
  Synthetic oligonucleotide; TTT chr11 5165521 5165542 5165526 5165521 -
ttactgtcttctccaacctccc

SEQ ID NO: 153848 - DNA, 22 bp, Artificial Sequence
  Synthetic oligonucleotide; TTT chr11 5165520 5165541 5165525 5165520 -
tactgtcttctccaacctccct

SEQ ID NO: 153849 - DNA, 22 bp, Artificial Sequence
  Synthetic oligonucleotide; TTT chr11 5165519 5165540 5165524 5165519 -
actgtcttctccaacctccctc

SEQ ID NO: 153850 - DNA, 22 bp, Artificial Sequence
  Synthetic oligonucleotide; TTA chr11 5165518 5165539 5165523 5165518 -
ctgtcttctccaacctccctca

SEQ ID NO: 153851 - DNA, 22 bp, Artificial Sequence
  Synthetic oligonucleotide; CTG chr11 5165515 5165536 5165520 5165515 -
tcttctccaacctccctcacta

SEQ ID NO: 153852 - DNA, 22 bp, Artificial Sequence
  Synthetic oligonucleotide; CTT chr11 5165511 5165532 5165516 5165511 -
ctccaacctccctcactatccc

SEQ ID NO: 153853 - DNA, 22 bp, Artificial Sequence
  Synthetic oligonucleotide; TTC chr11 5165510 5165531 5165515 5165510 -
tccaacctccctcactatccct

SEQ ID NO: 153854 - DNA, 22 bp, Artificial Sequence
  Synthetic oligonucleotide; CTC chr11 5165508 5165529 5165513 5165508 -
caacctccctcactatccctca

SEQ ID NO: 153855 - DNA, 22 bp, Artificial Sequence
  Synthetic oligonucleotide; CTC chr11 5165501 5165522 5165506 5165501 -
cctcactatccctcaacttctt

SEQ ID NO: 153856 - DNA, 22 bp, Artificial Sequence
  Synthetic oligonucleotide; CTC chr11 5165497 5165518 5165502 5165497 -
actatccctcaacttctttctc

SEQ ID NO: 153857 - DNA, 22 bp, Artificial Sequence
  Synthetic oligonucleotide; CTA chr11 5165493 5165514 5165498 5165493 -
tccctcaacttctttctccttt

SEQ ID NO: 153858 - DNA, 22 bp, Artificial Sequence
  Synthetic oligonucleotide; CTC chr11 5165487 5165508 5165492 5165487 -
aacttctttctcctttcaatct

SEQ ID NO: 153859 - DNA, 22 bp, Artificial Sequence
  Synthetic oligonucleotide; CTT chr11 5165482 5165503 5165487 5165482 -
ctttctcctttcaatcttggca

SEQ ID NO: 153860 - DNA, 22 bp, Artificial Sequence
  Synthetic oligonucleotide; TTC chr11 5165481 5165502 5165486 5165481 -
tttctcctttcaatcttggcac

SEQ ID NO: 153861 - DNA, 22 bp, Artificial Sequence
  Synthetic oligonucleotide; CTT chr11 5165479 5165500 5165484 5165479 -
tctcctttcaatcttggcacca

SEQ ID NO: 153862 - DNA, 22 bp, Artificial Sequence
  Synthetic oligonucleotide; TTT chr11 5165478 5165499 5165483 5165478 -
ctcctttcaatcttggcaccac

SEQ ID NO: 153863 - DNA, 22 bp, Artificial Sequence
  Synthetic oligonucleotide; TTC chr11 5165477 5165498 5165482 5165477 -
tcctttcaatcttggcaccaca

SEQ ID NO: 153864 - DNA, 22 bp, Artificial Sequence
  Synthetic oligonucleotide; CTC chr11 5165475 5165496 5165480 5165475 -
ctttcaatcttggcaccacact

SEQ ID NO: 153865 - DNA, 22 bp, Artificial Sequence
  Synthetic oligonucleotide; CTT chr11 5165472 5165493 5165477 5165472 -
tcaatcttggcaccacacttca

SEQ ID NO: 153866 - DNA, 22 bp, Artificial Sequence
  Synthetic oligonucleotide; TTT chr11 5165471 5165492 5165476 5165471 -
caatcttggcaccacacttcaa

SEQ ID NO: 153867 - DNA, 22 bp, Artificial Sequence
  Synthetic oligonucleotide; TTC chr11 5165470 5165491 5165475 5165470 -
aatcttggcaccacacttcaat

SEQ ID NO: 153868 - DNA, 22 bp, Artificial Sequence
  Synthetic oligonucleotide; CTT chr11 5165464 5165485 5165469 5165464 -
ggcaccacacttcaatttctcc

SEQ ID NO: 153869 - DNA, 22 bp, Artificial Sequence
  Synthetic oligonucleotide; TTG chr11 5165463 5165484 5165468 5165463 -
gcaccacacttcaatttctccc

SEQ ID NO: 153870 - DNA, 22 bp, Artificial Sequence
  Synthetic oligonucleotide; CTT chr11 5165452 5165473 5165457 5165452 -
caatttctcccttctcttaatt

SEQ ID NO: 153871 - DNA, 22 bp, Artificial Sequence
  Synthetic oligonucleotide; TTC chr11 5165451 5165472 5165456 5165451 -
aatttctcccttctcttaattt

SEQ ID NO: 153872 - DNA, 22 bp, Artificial Sequence
  Synthetic oligonucleotide; TTT chr11 5165446 5165467 5165451 5165446 -
ctcccttctcttaatttcaatt

SEQ ID NO: 153873 - DNA, 22 bp, Artificial Sequence
  Synthetic oligonucleotide; TTC chr11 5165445 5165466 5165450 5165445 -
tcccttctcttaatttcaattc

SEQ ID NO: 153874 - DNA, 22 bp, Artificial Sequence
  Synthetic oligonucleotide; CTC chr11 5165443 5165464 5165448 5165443 -
ccttctcttaatttcaattcct

SEQ ID NO: 153875 - DNA, 22 bp, Artificial Sequence
  Synthetic oligonucleotide; CTT chr11 5165439 5165460 5165444 5165439 -
ctcttaatttcaattcctttca

SEQ ID NO: 153876 - DNA, 22 bp, Artificial Sequence
  Synthetic oligonucleotide; TTC chr11 5165438 5165459 5165443 5165438 -
tcttaatttcaattcctttcat

SEQ ID NO: 153877 - DNA, 22 bp, Artificial Sequence
  Synthetic oligonucleotide; CTC chr11 5165436 5165457 5165441 5165436 -
ttaatttcaattcctttcattt

SEQ ID NO: 153878 - DNA, 22 bp, Artificial Sequence
  Synthetic oligonucleotide; CTT chr11 5165434 5165455 5165439 5165434 -
aatttcaattcctttcattttc

SEQ ID NO: 153879 - DNA, 22 bp, Artificial Sequence
  Synthetic oligonucleotide; TTA chr11 5165433 5165454 5165438 5165433 -
atttcaattcctttcattttcc

SEQ ID NO: 153880 - DNA, 22 bp, Artificial Sequence
  Synthetic oligonucleotide; TTT chr11 5165429 5165450 5165434 5165429 -
caattcctttcattttccagta

SEQ ID NO: 153881 - DNA, 22 bp, Artificial Sequence
  Synthetic oligonucleotide; TTC chr11 5165428 5165449 5165433 5165428 -
aattcctttcattttccagtag

SEQ ID NO: 153882 - DNA, 22 bp, Artificial Sequence
  Synthetic oligonucleotide; TTC chr11 5165423 5165444 5165428 5165423 -
ctttcattttccagtagagaca

SEQ ID NO: 153883 - DNA, 22 bp, Artificial Sequence
  Synthetic oligonucleotide; CTT chr11 5165420 5165441 5165425 5165420 -
tcattttccagtagagacaaag

SEQ ID NO: 153884 - DNA, 22 bp, Artificial Sequence
  Synthetic oligonucleotide; TTT chr11 5165419 5165440 5165424 5165419 -
cattttccagtagagacaaagg

SEQ ID NO: 153885 - DNA, 22 bp, Artificial Sequence
  Synthetic oligonucleotide; TTC chr11 5165418 5165439 5165423 5165418 -
attttccagtagagacaaagga

SEQ ID NO: 153886 - DNA, 22 bp, Artificial Sequence
  Synthetic oligonucleotide; TTT chr11 5165414 5165435 5165419 5165414 -
tccagtagagacaaaggagaca

SEQ ID NO: 153887 - DNA, 22 bp, Artificial Sequence
  Synthetic oligonucleotide; TTT chr11 5165413 5165434 5165418 5165413 -
ccagtagagacaaaggagacat

SEQ ID NO: 153888 - DNA, 22 bp, Artificial Sequence
  Synthetic oligonucleotide; TTC chr11 5165412 5165433 5165417 5165412 -
cagtagagacaaaggagacatg

SEQ ID NO: 153889 - DNA, 22 bp, Artificial Sequence
  Synthetic oligonucleotide; TTT chr11 5165387 5165408 5165392 5165387 -
tatccgtggacccaaaactccg

SEQ ID NO: 153890 - DNA, 22 bp, Artificial Sequence
  Synthetic oligonucleotide; TTT chr11 5165386 5165407 5165391 5165386 -
atccgtggacccaaaactccgg

SEQ ID NO: 153891 - DNA, 22 bp, Artificial Sequence
  Synthetic oligonucleotide; TTA chr11 5165385 5165406 5165390 5165385 -
tccgtggacccaaaactccggt

SEQ ID NO: 153892 - DNA, 22 bp, Artificial Sequence
  Synthetic oligonucleotide; CTC chr11 5165367 5165388 5165372 5165367 -
cggtgccagtcacggactggga

SEQ ID NO: 153893 - DNA, 22 bp, Artificial Sequence
  Synthetic oligonucleotide; CTG chr11 5165348 5165369 5165353 5165348 -
ggaaggcagccttcccttggtg

SEQ ID NO: 153894 - DNA, 22 bp, Artificial Sequence
  Synthetic oligonucleotide; CTT chr11 5165335 5165356 5165340 5165335 -
cccttggtgtttaatcattgca

SEQ ID NO: 153895 - DNA, 22 bp, Artificial Sequence
  Synthetic oligonucleotide; TTC chr11 5165334 5165355 5165339 5165334 -
ccttggtgtttaatcattgcag

SEQ ID NO: 153896 - DNA, 22 bp, Artificial Sequence
  Synthetic oligonucleotide; CTT chr11 5165330 5165351 5165335 5165330 -
ggtgtttaatcattgcagggac

SEQ ID NO: 153897 - DNA, 22 bp, Artificial Sequence
  Synthetic oligonucleotide; TTG chr11 5165329 5165350 5165334 5165329 -
gtgtttaatcattgcagggaca

SEQ ID NO: 153898 - DNA, 22 bp, Artificial Sequence
  Synthetic oligonucleotide; TTT chr11 5165323 5165344 5165328 5165323 -
aatcattgcagggacacctctc

SEQ ID NO: 153899 - DNA, 22 bp, Artificial Sequence
  Synthetic oligonucleotide; TTA chr11 5165322 5165343 5165327 5165322 -
atcattgcagggacacctctct

SEQ ID NO: 153900 - DNA, 22 bp, Artificial Sequence
  Synthetic oligonucleotide; TTG chr11 5165315 5165336 5165320 5165315 -
cagggacacctctctgattatt

SEQ ID NO: 153901 - DNA, 22 bp, Artificial Sequence
  Synthetic oligonucleotide; CTC chr11 5165303 5165324 5165308 5165303 -
tctgattattaaaccatgtttc

SEQ ID NO: 153902 - DNA, 22 bp, Artificial Sequence
  Synthetic oligonucleotide; CTC chr11 5165301 5165322 5165306 5165301 -
tgattattaaaccatgtttcag

SEQ ID NO: 153903 - DNA, 22 bp, Artificial Sequence
  Synthetic oligonucleotide; CTG chr11 5165299 5165320 5165304 5165299 -
attattaaaccatgtttcagag

SEQ ID NO: 153904 - DNA, 22 bp, Artificial Sequence
  Synthetic oligonucleotide; TTA chr11 5165295 5165316 5165300 5165295 -
ttaaaccatgtttcagaggtgt

SEQ ID NO: 153905 - DNA, 22 bp, Artificial Sequence
  Synthetic oligonucleotide; TTA chr11 5165292 5165313 5165297 5165292 -
aaccatgtttcagaggtgtcag

SEQ ID NO: 153906 - DNA, 22 bp, Artificial Sequence
  Synthetic oligonucleotide; TTT chr11 5165282 5165303 5165287 5165282 -
cagaggtgtcagaccacgcagg

SEQ ID NO: 153907 - DNA, 22 bp, Artificial Sequence
  Synthetic oligonucleotide; TTC chr11 5165281 5165302 5165286 5165281 -
agaggtgtcagaccacgcaggg

SEQ ID NO: 153908 - DNA, 22 bp, Artificial Sequence
  Synthetic oligonucleotide; CTG chr11 5165252 5165273 5165257 5165252 -
ccttggtccttcacccttagcg

SEQ ID NO: 153909 - DNA, 22 bp, Artificial Sequence
  Synthetic oligonucleotide; CTT chr11 5165248 5165269 5165253 5165248 -
ggtccttcacccttagcggcaa

SEQ ID NO: 153910 - DNA, 22 bp, Artificial Sequence
  Synthetic oligonucleotide; TTG chr11 5165247 5165268 5165252 5165247 -
gtccttcacccttagcggcaaa

SEQ ID NO: 153911 - DNA, 22 bp, Artificial Sequence
  Synthetic oligonucleotide; CTT chr11 5165241 5165262 5165246 5165241 -
cacccttagcggcaaatcccac

SEQ ID NO: 153912 - DNA, 22 bp, Artificial Sequence
  Synthetic oligonucleotide; TTC chr11 5165240 5165261 5165245 5165240 -
acccttagcggcaaatcccact

SEQ ID NO: 153913 - DNA, 22 bp, Artificial Sequence
  Synthetic oligonucleotide; CTT chr11 5165234 5165255 5165239 5165234 -
agcggcaaatcccacttttctg

SEQ ID NO: 153914 - DNA, 22 bp, Artificial Sequence
  Synthetic oligonucleotide; TTA chr11 5165233 5165254 5165238 5165233 -
gcggcaaatcccacttttctgg

SEQ ID NO: 153915 - DNA, 22 bp, Artificial Sequence
  Synthetic oligonucleotide; CTT chr11 5165217 5165238 5165222 5165217 -
ttctggaggggggtaagtaccc

SEQ ID NO: 153916 - DNA, 22 bp, Artificial Sequence
  Synthetic oligonucleotide; TTT chr11 5165216 5165237 5165221 5165216 -
tctggaggggggtaagtacccc

SEQ ID NO: 153917 - DNA, 22 bp, Artificial Sequence
  Synthetic oligonucleotide; TTT chr11 5165215 5165236 5165220 5165215 -
ctggaggggggtaagtacccca

SEQ ID NO: 153918 - DNA, 22 bp, Artificial Sequence
  Synthetic oligonucleotide; TTC chr11 5165214 5165235 5165219 5165214 -
tggaggggggtaagtaccccaa

SEQ ID NO: 153919 - DNA, 22 bp, Artificial Sequence
  Synthetic oligonucleotide; CTG chr11 5165212 5165233 5165217 5165212 -
gaggggggtaagtaccccaacc

SEQ ID NO: 153920 - DNA, 22 bp, Artificial Sequence
  Synthetic oligonucleotide; CTT chr11 5165186 5165207 5165191 5165186 -
ctctccatgtctctgccccttc

SEQ ID NO: 153921 - DNA, 22 bp, Artificial Sequence
  Synthetic oligonucleotide; TTC chr11 5165185 5165206 5165190 5165185 -
tctccatgtctctgccccttca

SEQ ID NO: 153922 - DNA, 22 bp, Artificial Sequence
  Synthetic oligonucleotide; CTC chr11 5165183 5165204 5165188 5165183 -
tccatgtctctgccccttcact

SEQ ID NO: 153923 - DNA, 22 bp, Artificial Sequence
  Synthetic oligonucleotide; CTC chr11 5165181 5165202 5165186 5165181 -
catgtctctgccccttcactgc

SEQ ID NO: 153924 - DNA, 22 bp, Artificial Sequence
  Synthetic oligonucleotide; CTC chr11 5165173 5165194 5165178 5165173 -
tgccccttcactgcttttctgg

SEQ ID NO: 153925 - DNA, 22 bp, Artificial Sequence
  Synthetic oligonucleotide; CTG chr11 5165171 5165192 5165176 5165171 -
ccccttcactgcttttctgggg

SEQ ID NO: 153926 - DNA, 22 bp, Artificial Sequence
  Synthetic oligonucleotide; CTT chr11 5165165 5165186 5165170 5165165 -
cactgcttttctgggggcaaga

SEQ ID NO: 153927 - DNA, 22 bp, Artificial Sequence
  Synthetic oligonucleotide; TTC chr11 5165164 5165185 5165169 5165164 -
actgcttttctgggggcaagaa

SEQ ID NO: 153928 - DNA, 22 bp, Artificial Sequence
  Synthetic oligonucleotide; CTG chr11 5165160 5165181 5165165 5165160 -
cttttctgggggcaagaacccc

SEQ ID NO: 153929 - DNA, 22 bp, Artificial Sequence
  Synthetic oligonucleotide; CTT chr11 5165157 5165178 5165162 5165157 -
ttctgggggcaagaaccccaat

SEQ ID NO: 153930 - DNA, 22 bp, Artificial Sequence
  Synthetic oligonucleotide; TTT chr11 5165156 5165177 5165161 5165156 -
tctgggggcaagaaccccaatc

SEQ ID NO: 153931 - DNA, 22 bp, Artificial Sequence
  Synthetic oligonucleotide; TTT chr11 5165155 5165176 5165160 5165155 -
ctgggggcaagaaccccaatcc

SEQ ID NO: 153932 - DNA, 22 bp, Artificial Sequence
  Synthetic oligonucleotide; TTC chr11 5165154 5165175 5165159 5165154 -
tgggggcaagaaccccaatccc

SEQ ID NO: 153933 - DNA, 22 bp, Artificial Sequence
  Synthetic oligonucleotide; CTG chr11 5165152 5165173 5165157 5165152 -
ggggcaagaaccccaatccctt

SEQ ID NO: 153934 - DNA, 22 bp, Artificial Sequence
  Synthetic oligonucleotide; CTT chr11 5165130 5165151 5165135 5165130 -
atttctgtgccccaacctctta

SEQ ID NO: 153935 - DNA, 22 bp, Artificial Sequence
  Synthetic oligonucleotide; TTA chr11 5165129 5165150 5165134 5165129 -
tttctgtgccccaacctcttat

SEQ ID NO: 153936 - DNA, 22 bp, Artificial Sequence
  Synthetic oligonucleotide; TTT chr11 5165126 5165147 5165131 5165126 -
ctgtgccccaacctcttatctc

SEQ ID NO: 153937 - DNA, 22 bp, Artificial Sequence
  Synthetic oligonucleotide; TTC chr11 5165125 5165146 5165130 5165125 -
tgtgccccaacctcttatctca

SEQ ID NO: 153938 - DNA, 22 bp, Artificial Sequence
  Synthetic oligonucleotide; CTG chr11 5165123 5165144 5165128 5165123 -
tgccccaacctcttatctcagc

SEQ ID NO: 153939 - DNA, 22 bp, Artificial Sequence
  Synthetic oligonucleotide; CTC chr11 5165111 5165132 5165116 5165111 -
ttatctcagcaccccatccctt

SEQ ID NO: 153940 - DNA, 22 bp, Artificial Sequence
  Synthetic oligonucleotide; CTT chr11 5165109 5165130 5165114 5165109 -
atctcagcaccccatcccttat

SEQ ID NO: 153941 - DNA, 22 bp, Artificial Sequence
  Synthetic oligonucleotide; TTA chr11 5165108 5165129 5165113 5165108 -
tctcagcaccccatcccttatt

SEQ ID NO: 153942 - DNA, 22 bp, Artificial Sequence
  Synthetic oligonucleotide; CTC chr11 5165104 5165125 5165109 5165104 -
agcaccccatcccttatttcca

SEQ ID NO: 153943 - DNA, 22 bp, Artificial Sequence
  Synthetic oligonucleotide; CTT chr11 5165089 5165110 5165094 5165089 -
atttccacgccccatcctctta

SEQ ID NO: 153944 - DNA, 22 bp, Artificial Sequence
  Synthetic oligonucleotide; TTA chr11 5165088 5165109 5165093 5165088 -
tttccacgccccatcctcttat

SEQ ID NO: 153945 - DNA, 22 bp, Artificial Sequence
  Synthetic oligonucleotide; TTT chr11 5165085 5165106 5165090 5165085 -
ccacgccccatcctcttatctc

SEQ ID NO: 153946 - DNA, 22 bp, Artificial Sequence
  Synthetic oligonucleotide; TTC chr11 5165084 5165105 5165089 5165084 -
cacgccccatcctcttatctct

SEQ ID NO: 153947 - DNA, 22 bp, Artificial Sequence
  Synthetic oligonucleotide; CTC chr11 5165070 5165091 5165075 5165070 -
ttatctctgcaccccaatccct

SEQ ID NO: 153948 - DNA, 22 bp, Artificial Sequence
  Synthetic oligonucleotide; CTT chr11 5165068 5165089 5165073 5165068 -
atctctgcaccccaatccctta

SEQ ID NO: 153949 - DNA, 22 bp, Artificial Sequence
  Synthetic oligonucleotide; TTA chr11 5165067 5165088 5165072 5165067 -
tctctgcaccccaatcccttat

SEQ ID NO: 153950 - DNA, 22 bp, Artificial Sequence
  Synthetic oligonucleotide; CTC chr11 5165063 5165084 5165068 5165063 -
tgcaccccaatcccttatttct

SEQ ID NO: 153951 - DNA, 22 bp, Artificial Sequence
  Synthetic oligonucleotide; CTG chr11 5165061 5165082 5165066 5165061 -
caccccaatcccttatttctgc

SEQ ID NO: 153952 - DNA, 22 bp, Artificial Sequence
  Synthetic oligonucleotide; CTT chr11 5165047 5165068 5165052 5165047 -
atttctgcaccccgacctctta

SEQ ID NO: 153953 - DNA, 22 bp, Artificial Sequence
  Synthetic oligonucleotide; TTA chr11 5165046 5165067 5165051 5165046 -
tttctgcaccccgacctcttat

SEQ ID NO: 153954 - DNA, 22 bp, Artificial Sequence
  Synthetic oligonucleotide; TTT chr11 5165043 5165064 5165048 5165043 -
ctgcaccccgacctcttatctc

SEQ ID NO: 153955 - DNA, 22 bp, Artificial Sequence
  Synthetic oligonucleotide; TTC chr11 5165042 5165063 5165047 5165042 -
tgcaccccgacctcttatctct

SEQ ID NO: 153956 - DNA, 22 bp, Artificial Sequence
  Synthetic oligonucleotide; CTG chr11 5165040 5165061 5165045 5165040 -
caccccgacctcttatctctgc

SEQ ID NO: 153957 - DNA, 22 bp, Artificial Sequence
  Synthetic oligonucleotide; CTC chr11 5165028 5165049 5165033 5165028 -
ttatctctgcaccctgatccct

SEQ ID NO: 153958 - DNA, 22 bp, Artificial Sequence
  Synthetic oligonucleotide; CTT chr11 5165026 5165047 5165031 5165026 -
atctctgcaccctgatccctta

SEQ ID NO: 153959 - DNA, 22 bp, Artificial Sequence
  Synthetic oligonucleotide; TTA chr11 5165025 5165046 5165030 5165025 -
tctctgcaccctgatcccttat

SEQ ID NO: 153960 - DNA, 22 bp, Artificial Sequence
  Synthetic oligonucleotide; CTC chr11 5165021 5165042 5165026 5165021 -
tgcaccctgatcccttatttct

SEQ ID NO: 153961 - DNA, 22 bp, Artificial Sequence
  Synthetic oligonucleotide; CTG chr11 5165019 5165040 5165024 5165019 -
caccctgatcccttatttctgc

SEQ ID NO: 153962 - DNA, 22 bp, Artificial Sequence
  Synthetic oligonucleotide; CTG chr11 5165012 5165033 5165017 5165012 -
atcccttatttctgcaccccaa

SEQ ID NO: 153963 - DNA, 22 bp, Artificial Sequence
  Synthetic oligonucleotide; CTT chr11 5165005 5165026 5165010 5165005 -
atttctgcaccccaacctctta

SEQ ID NO: 153964 - DNA, 22 bp, Artificial Sequence
  Synthetic oligonucleotide; TTA chr11 5165004 5165025 5165009 5165004 -
tttctgcaccccaacctcttat

SEQ ID NO: 153965 - DNA, 22 bp, Artificial Sequence
  Synthetic oligonucleotide; TTT chr11 5165001 5165022 5165006 5165001 -
ctgcaccccaacctcttatctc

SEQ ID NO: 153966 - DNA, 22 bp, Artificial Sequence
  Synthetic oligonucleotide; TTC chr11 5165000 5165021 5165005 5165000 -
tgcaccccaacctcttatctct

SEQ ID NO: 153967 - DNA, 22 bp, Artificial Sequence
  Synthetic oligonucleotide; CTG chr11 5164998 5165019 5165003 5164998 -
caccccaacctcttatctctgc

SEQ ID NO: 153968 - DNA, 22 bp, Artificial Sequence
  Synthetic oligonucleotide; CTC chr11 5164986 5165007 5164991 5164986 -
ttatctctgcaccccgatccct

SEQ ID NO: 153969 - DNA, 22 bp, Artificial Sequence
  Synthetic oligonucleotide; CTT chr11 5164984 5165005 5164989 5164984 -
atctctgcaccccgatccctta

SEQ ID NO: 153970 - DNA, 22 bp, Artificial Sequence
  Synthetic oligonucleotide; TTA chr11 5164983 5165004 5164988 5164983 -
tctctgcaccccgatcccttat

SEQ ID NO: 153971 - DNA, 22 bp, Artificial Sequence
  Synthetic oligonucleotide; CTC chr11 5164979 5165000 5164984 5164979 -
tgcaccccgatcccttatttct

SEQ ID NO: 153972 - DNA, 22 bp, Artificial Sequence
  Synthetic oligonucleotide; CTG chr11 5164977 5164998 5164982 5164977 -
caccccgatcccttatttctgt

SEQ ID NO: 153973 - DNA, 22 bp, Artificial Sequence
  Synthetic oligonucleotide; CTT chr11 5164963 5164984 5164968 5164963 -
atttctgtgccccaacctctta

SEQ ID NO: 153974 - DNA, 22 bp, Artificial Sequence
  Synthetic oligonucleotide; TTA chr11 5164962 5164983 5164967 5164962 -
tttctgtgccccaacctcttat

SEQ ID NO: 153975 - DNA, 22 bp, Artificial Sequence
  Synthetic oligonucleotide; TTT chr11 5164959 5164980 5164964 5164959 -
ctgtgccccaacctcttatctc

SEQ ID NO: 153976 - DNA, 22 bp, Artificial Sequence
  Synthetic oligonucleotide; TTC chr11 5164958 5164979 5164963 5164958 -
tgtgccccaacctcttatctct

SEQ ID NO: 153977 - DNA, 22 bp, Artificial Sequence
  Synthetic oligonucleotide; CTG chr11 5164956 5164977 5164961 5164956 -
tgccccaacctcttatctctgc

SEQ ID NO: 153978 - DNA, 22 bp, Artificial Sequence
  Synthetic oligonucleotide; CTC chr11 5164944 5164965 5164949 5164944 -
ttatctctgcaccccaacccct

SEQ ID NO: 153979 - DNA, 22 bp, Artificial Sequence
  Synthetic oligonucleotide; CTT chr11 5164942 5164963 5164947 5164942 -
atctctgcaccccaacccctta

SEQ ID NO: 153980 - DNA, 22 bp, Artificial Sequence
  Synthetic oligonucleotide; TTA chr11 5164941 5164962 5164946 5164941 -
tctctgcaccccaaccccttat

SEQ ID NO: 153981 - DNA, 22 bp, Artificial Sequence
  Synthetic oligonucleotide; CTC chr11 5164937 5164958 5164942 5164937 -
tgcaccccaaccccttatttct

SEQ ID NO: 153982 - DNA, 22 bp, Artificial Sequence
  Synthetic oligonucleotide; CTG chr11 5164935 5164956 5164940 5164935 -
caccccaaccccttatttctgt

SEQ ID NO: 153983 - DNA, 22 bp, Artificial Sequence
  Synthetic oligonucleotide; CTT chr11 5164921 5164942 5164926 5164921 -
atttctgtgccctgacctctta

SEQ ID NO: 153984 - DNA, 22 bp, Artificial Sequence
  Synthetic oligonucleotide; TTA chr11 5164920 5164941 5164925 5164920 -
tttctgtgccctgacctcttat

SEQ ID NO: 153985 - DNA, 22 bp, Artificial Sequence
  Synthetic oligonucleotide; TTT chr11 5164917 5164938 5164922 5164917 -
ctgtgccctgacctcttatctc

SEQ ID NO: 153986 - DNA, 22 bp, Artificial Sequence
  Synthetic oligonucleotide; TTC chr11 5164916 5164937 5164921 5164916 -
tgtgccctgacctcttatctct

SEQ ID NO: 153987 - DNA, 22 bp, Artificial Sequence
  Synthetic oligonucleotide; CTG chr11 5164914 5164935 5164919 5164914 -
tgccctgacctcttatctctgc

SEQ ID NO: 153988 - DNA, 22 bp, Artificial Sequence
  Synthetic oligonucleotide; CTG chr11 5164907 5164928 5164912 5164907 -
acctcttatctctgcaccccaa

SEQ ID NO: 153989 - DNA, 22 bp, Artificial Sequence
  Synthetic oligonucleotide; CTC chr11 5164902 5164923 5164907 5164902 -
ttatctctgcaccccaacccct

SEQ ID NO: 153990 - DNA, 22 bp, Artificial Sequence
  Synthetic oligonucleotide; CTT chr11 5164900 5164921 5164905 5164900 -
atctctgcaccccaacccctta

SEQ ID NO: 153991 - DNA, 22 bp, Artificial Sequence
  Synthetic oligonucleotide; TTA chr11 5164899 5164920 5164904 5164899 -
tctctgcaccccaaccccttat

SEQ ID NO: 153992 - DNA, 22 bp, Artificial Sequence
  Synthetic oligonucleotide; CTC chr11 5164895 5164916 5164900 5164895 -
tgcaccccaaccccttatttcc

SEQ ID NO: 153993 - DNA, 22 bp, Artificial Sequence
  Synthetic oligonucleotide; CTG chr11 5164893 5164914 5164898 5164893 -
caccccaaccccttatttccgt

SEQ ID NO: 153994 - DNA, 22 bp, Artificial Sequence
  Synthetic oligonucleotide; CTT chr11 5164879 5164900 5164884 5164879 -
atttccgtgccccaaccccttg

SEQ ID NO: 153995 - DNA, 22 bp, Artificial Sequence
  Synthetic oligonucleotide; TTA chr11 5164878 5164899 5164883 5164878 -
tttccgtgccccaaccccttgc

SEQ ID NO: 153996 - DNA, 22 bp, Artificial Sequence
  Synthetic oligonucleotide; TTT chr11 5164875 5164896 5164880 5164875 -
ccgtgccccaaccccttgccca

SEQ ID NO: 153997 - DNA, 22 bp, Artificial Sequence
  Synthetic oligonucleotide; TTC chr11 5164874 5164895 5164879 5164874 -
cgtgccccaaccccttgcccat

SEQ ID NO: 153998 - DNA, 22 bp, Artificial Sequence
  Synthetic oligonucleotide; CTT chr11 5164858 5164879 5164863 5164858 -
gcccatttttctggtgagtaag

SEQ ID NO: 153999 - DNA, 22 bp, Artificial Sequence
  Synthetic oligonucleotide; TTG chr11 5164857 5164878 5164862 5164857 -
cccatttttctggtgagtaaga

SEQ ID NO: 154000 - DNA, 22 bp, Artificial Sequence
  Synthetic oligonucleotide; TTT chr11 5164850 5164871 5164855 5164850 -
ttctggtgagtaagaacccccg

SEQ ID NO: 154001 - DNA, 22 bp, Artificial Sequence
  Synthetic oligonucleotide; TTT chr11 5164849 5164870 5164854 5164849 -
tctggtgagtaagaacccccga

SEQ ID NO: 154002 - DNA, 22 bp, Artificial Sequence
  Synthetic oligonucleotide; TTT chr11 5164848 5164869 5164853 5164848 -
ctggtgagtaagaacccccgaa

SEQ ID NO: 154003 - DNA, 22 bp, Artificial Sequence
  Synthetic oligonucleotide; TTC chr11 5164847 5164868 5164852 5164847 -
tggtgagtaagaacccccgaac

SEQ ID NO: 154004 - DNA, 22 bp, Artificial Sequence
  Synthetic oligonucleotide; CTG chr11 5164845 5164866 5164850 5164845 -
gtgagtaagaacccccgaaccc

SEQ ID NO: 154005 - DNA, 22 bp, Artificial Sequence
  Synthetic oligonucleotide; CTT chr11 5164820 5164841 5164825 5164820 -
ccctccgtgtctgtactctttc

SEQ ID NO: 154006 - DNA, 22 bp, Artificial Sequence
  Synthetic oligonucleotide; TTC chr11 5164819 5164840 5164824 5164819 -
cctccgtgtctgtactctttct

SEQ ID NO: 154007 - DNA, 22 bp, Artificial Sequence
  Synthetic oligonucleotide; CTC chr11 5164815 5164836 5164820 5164815 -
cgtgtctgtactctttcttttc

SEQ ID NO: 154008 - DNA, 22 bp, Artificial Sequence
  Synthetic oligonucleotide; CTG chr11 5164807 5164828 5164812 5164807 -
tactctttcttttctctgggct

SEQ ID NO: 154009 - DNA, 22 bp, Artificial Sequence
  Synthetic oligonucleotide; CTC chr11 5164802 5164823 5164807 5164802 -
tttcttttctctgggcttgcct

SEQ ID NO: 154010 - DNA, 22 bp, Artificial Sequence
  Synthetic oligonucleotide; CTT chr11 5164800 5164821 5164805 5164800 -
tcttttctctgggcttgcctcc

SEQ ID NO: 154011 - DNA, 22 bp, Artificial Sequence
  Synthetic oligonucleotide; TTT chr11 5164799 5164820 5164804 5164799 -
cttttctctgggcttgcctcct

SEQ ID NO: 154012 - DNA, 22 bp, Artificial Sequence
  Synthetic oligonucleotide; TTC chr11 5164798 5164819 5164803 5164798 -
ttttctctgggcttgcctcctt

SEQ ID NO: 154013 - DNA, 22 bp, Artificial Sequence
  Synthetic oligonucleotide; CTT chr11 5164796 5164817 5164801 5164796 -
ttctctgggcttgcctccttca

SEQ ID NO: 154014 - DNA, 22 bp, Artificial Sequence
  Synthetic oligonucleotide; TTT chr11 5164795 5164816 5164800 5164795 -
tctctgggcttgcctccttcac

SEQ ID NO: 154015 - DNA, 22 bp, Artificial Sequence
  Synthetic oligonucleotide; TTT chr11 5164794 5164815 5164799 5164794 -
ctctgggcttgcctccttcact

SEQ ID NO: 154016 - DNA, 22 bp, Artificial Sequence
  Synthetic oligonucleotide; TTC chr11 5164793 5164814 5164798 5164793 -
tctgggcttgcctccttcacta

SEQ ID NO: 154017 - DNA, 22 bp, Artificial Sequence
  Synthetic oligonucleotide; CTC chr11 5164791 5164812 5164796 5164791 -
tgggcttgcctccttcactagg

SEQ ID NO: 154018 - DNA, 22 bp, Artificial Sequence
  Synthetic oligonucleotide; CTG chr11 5164789 5164810 5164794 5164789 -
ggcttgcctccttcactagggg

SEQ ID NO: 154019 - DNA, 22 bp, Artificial Sequence
  Synthetic oligonucleotide; CTT chr11 5164784 5164805 5164789 5164784 -
gcctccttcactaggggcaacc

SEQ ID NO: 154020 - DNA, 22 bp, Artificial Sequence
  Synthetic oligonucleotide; TTG chr11 5164783 5164804 5164788 5164783 -
cctccttcactaggggcaacct

SEQ ID NO: 154021 - DNA, 22 bp, Artificial Sequence
  Synthetic oligonucleotide; CTC chr11 5164779 5164800 5164784 5164779 -
cttcactaggggcaaccttcca

SEQ ID NO: 154022 - DNA, 22 bp, Artificial Sequence
  Synthetic oligonucleotide; CTT chr11 5164776 5164797 5164781 5164776 -
cactaggggcaaccttccaccc

SEQ ID NO: 154023 - DNA, 22 bp, Artificial Sequence
  Synthetic oligonucleotide; TTC chr11 5164775 5164796 5164780 5164775 -
actaggggcaaccttccaccct

SEQ ID NO: 154024 - DNA, 22 bp, Artificial Sequence
  Synthetic oligonucleotide; CTA chr11 5164771 5164792 5164776 5164771 -
ggggcaaccttccaccctccat

SEQ ID NO: 154025 - DNA, 22 bp, Artificial Sequence
  Synthetic oligonucleotide; CTT chr11 5164760 5164781 5164765 5164760 -
ccaccctccattcctccctctc

SEQ ID NO: 154026 - DNA, 22 bp, Artificial Sequence
  Synthetic oligonucleotide; TTC chr11 5164759 5164780 5164764 5164759 -
caccctccattcctccctctcc

SEQ ID NO: 154027 - DNA, 22 bp, Artificial Sequence
  Synthetic oligonucleotide; CTC chr11 5164752 5164773 5164757 5164752 -
cattcctccctctcccttagcc

SEQ ID NO: 154028 - DNA, 22 bp, Artificial Sequence
  Synthetic oligonucleotide; TTC chr11 5164747 5164768 5164752 5164747 -
ctccctctcccttagcctgtgc

SEQ ID NO: 154029 - DNA, 22 bp, Artificial Sequence
  Synthetic oligonucleotide; CTC chr11 5164744 5164765 5164749 5164744 -
cctctcccttagcctgtgctct

SEQ ID NO: 154030 - DNA, 22 bp, Artificial Sequence
  Synthetic oligonucleotide; CTC chr11 5164740 5164761 5164745 5164740 -
tcccttagcctgtgctctcaag

SEQ ID NO: 154031 - DNA, 22 bp, Artificial Sequence
  Synthetic oligonucleotide; CTC chr11 5164738 5164759 5164743 5164738 -
ccttagcctgtgctctcaagaa

SEQ ID NO: 154032 - DNA, 22 bp, Artificial Sequence
  Synthetic oligonucleotide; CTT chr11 5164734 5164755 5164739 5164734 -
agcctgtgctctcaagaactta

SEQ ID NO: 154033 - DNA, 22 bp, Artificial Sequence
  Synthetic oligonucleotide; TTA chr11 5164733 5164754 5164738 5164733 -
gcctgtgctctcaagaacttaa

SEQ ID NO: 154034 - DNA, 22 bp, Artificial Sequence
  Synthetic oligonucleotide; CTG chr11 5164728 5164749 5164733 5164728 -
tgctctcaagaacttaaaacct

SEQ ID NO: 154035 - DNA, 22 bp, Artificial Sequence
  Synthetic oligonucleotide; CTC chr11 5164723 5164744 5164728 5164723 -
tcaagaacttaaaacctcttca

SEQ ID NO: 154036 - DNA, 22 bp, Artificial Sequence
  Synthetic oligonucleotide; CTC chr11 5164721 5164742 5164726 5164721 -
aagaacttaaaacctcttcaac

SEQ ID NO: 154037 - DNA, 22 bp, Artificial Sequence
  Synthetic oligonucleotide; CTT chr11 5164713 5164734 5164718 5164713 -
aaaacctcttcaactcacacct

SEQ ID NO: 154038 - DNA, 22 bp, Artificial Sequence
  Synthetic oligonucleotide; TTA chr11 5164712 5164733 5164717 5164712 -
aaacctcttcaactcacacctg

SEQ ID NO: 154039 - DNA, 22 bp, Artificial Sequence
  Synthetic oligonucleotide; CTC chr11 5164705 5164726 5164710 5164705 -
ttcaactcacacctgacctaaa

SEQ ID NO: 154040 - DNA, 22 bp, Artificial Sequence
  Synthetic oligonucleotide; CTT chr11 5164703 5164724 5164708 5164703 -
caactcacacctgacctaaaac

SEQ ID NO: 154041 - DNA, 22 bp, Artificial Sequence
  Synthetic oligonucleotide; TTC chr11 5164702 5164723 5164707 5164702 -
aactcacacctgacctaaaacc

SEQ ID NO: 154042 - DNA, 22 bp, Artificial Sequence
  Synthetic oligonucleotide; CTC chr11 5164697 5164718 5164702 5164697 -
acacctgacctaaaacctaaat

SEQ ID NO: 154043 - DNA, 22 bp, Artificial Sequence
  Synthetic oligonucleotide; CTG chr11 5164690 5164711 5164695 5164690 -
acctaaaacctaaatgccttat

SEQ ID NO: 154044 - DNA, 22 bp, Artificial Sequence
  Synthetic oligonucleotide; CTA chr11 5164685 5164706 5164690 5164685 -
aaacctaaatgccttattttct

SEQ ID NO: 154045 - DNA, 22 bp, Artificial Sequence
  Synthetic oligonucleotide; CTA chr11 5164678 5164699 5164683 5164678 -
aatgccttattttcttctgcaa

SEQ ID NO: 154046 - DNA, 22 bp, Artificial Sequence
  Synthetic oligonucleotide; CTT chr11 5164670 5164691 5164675 5164670 -
attttcttctgcaaggccgctt

SEQ ID NO: 154047 - DNA, 22 bp, Artificial Sequence
  Synthetic oligonucleotide; TTA chr11 5164669 5164690 5164674 5164669 -
ttttcttctgcaaggccgcttg

SEQ ID NO: 154048 - DNA, 22 bp, Artificial Sequence
  Synthetic oligonucleotide; TTT chr11 5164666 5164687 5164671 5164666 -
tcttctgcaaggccgcttgact

SEQ ID NO: 154049 - DNA, 22 bp, Artificial Sequence
  Synthetic oligonucleotide; TTT chr11 5164665 5164686 5164670 5164665 -
cttctgcaaggccgcttgactc

SEQ ID NO: 154050 - DNA, 22 bp, Artificial Sequence
  Synthetic oligonucleotide; TTC chr11 5164664 5164685 5164669 5164664 -
ttctgcaaggccgcttgactcc

SEQ ID NO: 154051 - DNA, 22 bp, Artificial Sequence
  Synthetic oligonucleotide; CTT chr11 5164662 5164683 5164667 5164662 -
ctgcaaggccgcttgactccaa

SEQ ID NO: 154052 - DNA, 22 bp, Artificial Sequence
  Synthetic oligonucleotide; TTC chr11 5164661 5164682 5164666 5164661 -
tgcaaggccgcttgactccaat

SEQ ID NO: 154053 - DNA, 22 bp, Artificial Sequence
  Synthetic oligonucleotide; CTG chr11 5164659 5164680 5164664 5164659 -
caaggccgcttgactccaatac

SEQ ID NO: 154054 - DNA, 22 bp, Artificial Sequence
  Synthetic oligonucleotide; CTT chr11 5164648 5164669 5164653 5164648 -
gactccaatacaaactcgacag

SEQ ID NO: 154055 - DNA, 22 bp, Artificial Sequence
  Synthetic oligonucleotide; TTG chr11 5164647 5164668 5164652 5164647 -
actccaatacaaactcgacagt

SEQ ID NO: 154056 - DNA, 22 bp, Artificial Sequence
  Synthetic oligonucleotide; CTC chr11 5164643 5164664 5164648 5164643 -
caatacaaactcgacagtggtt

SEQ ID NO: 154057 - DNA, 22 bp, Artificial Sequence
  Synthetic oligonucleotide; CTC chr11 5164631 5164652 5164636 5164631 -
gacagtggttccaaatagccag

SEQ ID NO: 154058 - DNA, 22 bp, Artificial Sequence
  Synthetic oligonucleotide; TTC chr11 5164620 5164641 5164625 5164620 -
caaatagccagaaaatggcact

SEQ ID NO: 154059 - DNA, 22 bp, Artificial Sequence
  Synthetic oligonucleotide; CTT chr11 5164597 5164618 5164602 5164597 -
tcaatttttccattcttcaaga

SEQ ID NO: 154060 - DNA, 22 bp, Artificial Sequence
  Synthetic oligonucleotide; TTT chr11 5164596 5164617 5164601 5164596 -
caatttttccattcttcaagat

SEQ ID NO: 154061 - DNA, 22 bp, Artificial Sequence
  Synthetic oligonucleotide; TTC chr11 5164595 5164616 5164600 5164595 -
aatttttccattcttcaagatc

SEQ ID NO: 154062 - DNA, 22 bp, Artificial Sequence
  Synthetic oligonucleotide; TTT chr11 5164590 5164611 5164595 5164590 -
ttccattcttcaagatctaaat

SEQ ID NO: 154063 - DNA, 22 bp, Artificial Sequence
  Synthetic oligonucleotide; TTT chr11 5164589 5164610 5164594 5164589 -
tccattcttcaagatctaaata

SEQ ID NO: 154064 - DNA, 22 bp, Artificial Sequence
  Synthetic oligonucleotide; TTT chr11 5164588 5164609 5164593 5164588 -
ccattcttcaagatctaaataa

SEQ ID NO: 154065 - DNA, 22 bp, Artificial Sequence
  Synthetic oligonucleotide; TTC chr11 5164587 5164608 5164592 5164587 -
cattcttcaagatctaaataat

SEQ ID NO: 154066 - DNA, 22 bp, Artificial Sequence
  Synthetic oligonucleotide; TTC chr11 5164582 5164603 5164587 5164582 -
ttcaagatctaaataatttttg

SEQ ID NO: 154067 - DNA, 22 bp, Artificial Sequence
  Synthetic oligonucleotide; CTT chr11 5164580 5164601 5164585 5164580 -
caagatctaaataatttttgtc

SEQ ID NO: 154068 - DNA, 22 bp, Artificial Sequence
  Synthetic oligonucleotide; TTC chr11 5164579 5164600 5164584 5164579 -
aagatctaaataatttttgtcg

SEQ ID NO: 154069 - DNA, 22 bp, Artificial Sequence
  Synthetic oligonucleotide; CTA chr11 5164571 5164592 5164576 5164571 -
aataatttttgtcgtaaaacag

SEQ ID NO: 154070 - DNA, 22 bp, Artificial Sequence
  Synthetic oligonucleotide; TTT chr11 5164563 5164584 5164568 5164563 -
ttgtcgtaaaacaggcaaacag

SEQ ID NO: 154071 - DNA, 22 bp, Artificial Sequence
  Synthetic oligonucleotide; TTT chr11 5164562 5164583 5164567 5164562 -
tgtcgtaaaacaggcaaacagt

SEQ ID NO: 154072 - DNA, 22 bp, Artificial Sequence
  Synthetic oligonucleotide; TTT chr11 5164561 5164582 5164566 5164561 -
gtcgtaaaacaggcaaacagtc

SEQ ID NO: 154073 - DNA, 22 bp, Artificial Sequence
  Synthetic oligonucleotide; TTG chr11 5164560 5164581 5164565 5164560 -
tcgtaaaacaggcaaacagtct

SEQ ID NO: 154074 - DNA, 22 bp, Artificial Sequence
  Synthetic oligonucleotide; CTG chr11 5164537 5164558 5164542 5164537 -
aggtgcctgacgtccaggcatt

SEQ ID NO: 154075 - DNA, 22 bp, Artificial Sequence
  Synthetic oligonucleotide; CTG chr11 5164528 5164549 5164533 5164528 -
acgtccaggcattcttttacac

SEQ ID NO: 154076 - DNA, 22 bp, Artificial Sequence
  Synthetic oligonucleotide; TTC chr11 5164514 5164535 5164519 5164514 -
ttttacacattggtccctccct

SEQ ID NO: 154077 - DNA, 22 bp, Artificial Sequence
  Synthetic oligonucleotide; CTT chr11 5164512 5164533 5164517 5164512 -
ttacacattggtccctccctag

SEQ ID NO: 154078 - DNA, 22 bp, Artificial Sequence
  Synthetic oligonucleotide; TTT chr11 5164511 5164532 5164516 5164511 -
tacacattggtccctccctagt

SEQ ID NO: 154079 - DNA, 22 bp, Artificial Sequence
  Synthetic oligonucleotide; TTT chr11 5164510 5164531 5164515 5164510 -
acacattggtccctccctagtc

SEQ ID NO: 154080 - DNA, 22 bp, Artificial Sequence
  Synthetic oligonucleotide; TTA chr11 5164509 5164530 5164514 5164509 -
cacattggtccctccctagtct

SEQ ID NO: 154081 - DNA, 22 bp, Artificial Sequence
  Synthetic oligonucleotide; TTG chr11 5164502 5164523 5164507 5164502 -
gtccctccctagtctcttccca

SEQ ID NO: 154082 - DNA, 22 bp, Artificial Sequence
  Synthetic oligonucleotide; CTC chr11 5164495 5164516 5164500 5164495 -
cctagtctcttcccaatgcaac

SEQ ID NO: 154083 - DNA, 22 bp, Artificial Sequence
  Synthetic oligonucleotide; CTA chr11 5164491 5164512 5164496 5164491 -
gtctcttcccaatgcaacttgt

SEQ ID NO: 154084 - DNA, 22 bp, Artificial Sequence
  Synthetic oligonucleotide; CTC chr11 5164486 5164507 5164491 5164486 -
ttcccaatgcaacttgtcccaa

SEQ ID NO: 154085 - DNA, 22 bp, Artificial Sequence
  Synthetic oligonucleotide; CTT chr11 5164484 5164505 5164489 5164484 -
cccaatgcaacttgtcccaaat

SEQ ID NO: 154086 - DNA, 22 bp, Artificial Sequence
  Synthetic oligonucleotide; TTC chr11 5164483 5164504 5164488 5164483 -
ccaatgcaacttgtcccaaatc

SEQ ID NO: 154087 - DNA, 22 bp, Artificial Sequence
  Synthetic oligonucleotide; CTT chr11 5164471 5164492 5164476 5164471 -
gtcccaaatcttccttctttcc

SEQ ID NO: 154088 - DNA, 22 bp, Artificial Sequence
  Synthetic oligonucleotide; TTG chr11 5164470 5164491 5164475 5164470 -
tcccaaatcttccttctttccc

SEQ ID NO: 154089 - DNA, 22 bp, Artificial Sequence
  Synthetic oligonucleotide; CTT chr11 5164459 5164480 5164464 5164459 -
ccttctttccctcccgcctgtc

SEQ ID NO: 154090 - DNA, 22 bp, Artificial Sequence
  Synthetic oligonucleotide; TTC chr11 5164458 5164479 5164463 5164458 -
cttctttccctcccgcctgtcc

SEQ ID NO: 154091 - DNA, 22 bp, Artificial Sequence
  Synthetic oligonucleotide; CTT chr11 5164455 5164476 5164460 5164455 -
ctttccctcccgcctgtcccct

SEQ ID NO: 154092 - DNA, 22 bp, Artificial Sequence
  Synthetic oligonucleotide; TTC chr11 5164454 5164475 5164459 5164454 -
tttccctcccgcctgtcccctc

SEQ ID NO: 154093 - DNA, 22 bp, Artificial Sequence
  Synthetic oligonucleotide; CTT chr11 5164452 5164473 5164457 5164452 -
tccctcccgcctgtcccctcag

SEQ ID NO: 154094 - DNA, 22 bp, Artificial Sequence
  Synthetic oligonucleotide; TTT chr11 5164451 5164472 5164456 5164451 -
ccctcccgcctgtcccctcagt

SEQ ID NO: 154095 - DNA, 22 bp, Artificial Sequence
  Synthetic oligonucleotide; TTC chr11 5164450 5164471 5164455 5164450 -
cctcccgcctgtcccctcagtc

SEQ ID NO: 154096 - DNA, 22 bp, Artificial Sequence
  Synthetic oligonucleotide; CTC chr11 5164446 5164467 5164451 5164446 -
ccgcctgtcccctcagtcccaa

SEQ ID NO: 154097 - DNA, 22 bp, Artificial Sequence
  Synthetic oligonucleotide; CTG chr11 5164439 5164460 5164444 5164439 -
tcccctcagtcccaactccaag

SEQ ID NO: 154098 - DNA, 22 bp, Artificial Sequence
  Synthetic oligonucleotide; CTC chr11 5164432 5164453 5164437 5164432 -
agtcccaactccaagcgtcgct

SEQ ID NO: 154099 - DNA, 22 bp, Artificial Sequence
  Synthetic oligonucleotide; CTC chr11 5164421 5164442 5164426 5164421 -
caagcgtcgctgagtctttcta

SEQ ID NO: 154100 - DNA, 22 bp, Artificial Sequence
  Synthetic oligonucleotide; CTG chr11 5164409 5164430 5164414 5164409 -
agtctttctaatcttccttttc

SEQ ID NO: 154101 - DNA, 22 bp, Artificial Sequence
  Synthetic oligonucleotide; CTT chr11 5164403 5164424 5164408 5164403 -
tctaatcttccttttctacaga

SEQ ID NO: 154102 - DNA, 22 bp, Artificial Sequence
  Synthetic oligonucleotide; TTT chr11 5164402 5164423 5164407 5164402 -
ctaatcttccttttctacagac

SEQ ID NO: 154103 - DNA, 22 bp, Artificial Sequence
  Synthetic oligonucleotide; TTC chr11 5164401 5164422 5164406 5164401 -
taatcttccttttctacagacc

SEQ ID NO: 154104 - DNA, 22 bp, Artificial Sequence
  Synthetic oligonucleotide; CTA chr11 5164399 5164420 5164404 5164399 -
atcttccttttctacagaccca

SEQ ID NO: 154105 - DNA, 22 bp, Artificial Sequence
  Synthetic oligonucleotide; CTT chr11 5164394 5164415 5164399 5164394 -
ccttttctacagacccatctga

SEQ ID NO: 154106 - DNA, 22 bp, Artificial Sequence
  Synthetic oligonucleotide; TTC chr11 5164393 5164414 5164398 5164393 -
cttttctacagacccatctgac

SEQ ID NO: 154107 - DNA, 22 bp, Artificial Sequence
  Synthetic oligonucleotide; CTT chr11 5164390 5164411 5164395 5164390 -
ttctacagacccatctgacgtc

SEQ ID NO: 154108 - DNA, 22 bp, Artificial Sequence
  Synthetic oligonucleotide; TTT chr11 5164389 5164410 5164394 5164389 -
tctacagacccatctgacgtct

SEQ ID NO: 154109 - DNA, 22 bp, Artificial Sequence
  Synthetic oligonucleotide; TTT chr11 5164388 5164409 5164393 5164388 -
ctacagacccatctgacgtctc

SEQ ID NO: 154110 - DNA, 22 bp, Artificial Sequence
  Synthetic oligonucleotide; TTC chr11 5164387 5164408 5164392 5164387 -
tacagacccatctgacgtctcc

SEQ ID NO: 154111 - DNA, 22 bp, Artificial Sequence
  Synthetic oligonucleotide; CTA chr11 5164385 5164406 5164390 5164385 -
cagacccatctgacgtctcccc

SEQ ID NO: 154112 - DNA, 22 bp, Artificial Sequence
  Synthetic oligonucleotide; CTG chr11 5164373 5164394 5164378 5164373 -
acgtctcccctcctccccaggc

SEQ ID NO: 154113 - DNA, 22 bp, Artificial Sequence
  Synthetic oligonucleotide; CTC chr11 5164366 5164387 5164371 5164366 -
ccctcctccccaggctgctcct

SEQ ID NO: 154114 - DNA, 22 bp, Artificial Sequence
  Synthetic oligonucleotide; CTC chr11 5164361 5164382 5164366 5164361 -
ctccccaggctgctccttgcca

SEQ ID NO: 154115 - DNA, 22 bp, Artificial Sequence
  Synthetic oligonucleotide; CTC chr11 5164358 5164379 5164363 5164358 -
cccaggctgctccttgccaggc

SEQ ID NO: 154116 - DNA, 22 bp, Artificial Sequence
  Synthetic oligonucleotide; CTG chr11 5164349 5164370 5164354 5164349 -
ctccttgccaggccgagctagg

SEQ ID NO: 154117 - DNA, 22 bp, Artificial Sequence
  Synthetic oligonucleotide; CTC chr11 5164346 5164367 5164351 5164346 -
cttgccaggccgagctaggtcc

SEQ ID NO: 154118 - DNA, 22 bp, Artificial Sequence
  Synthetic oligonucleotide; CTT chr11 5164343 5164364 5164348 5164343 -
gccaggccgagctaggtcccaa

SEQ ID NO: 154119 - DNA, 22 bp, Artificial Sequence
  Synthetic oligonucleotide; TTG chr11 5164342 5164363 5164347 5164342 -
ccaggccgagctaggtcccaaa

SEQ ID NO: 154120 - DNA, 22 bp, Artificial Sequence
  Synthetic oligonucleotide; CTA chr11 5164329 5164350 5164334 5164329 -
ggtcccaaatcttcctcagcct

SEQ ID NO: 154121 - DNA, 22 bp, Artificial Sequence
  Synthetic oligonucleotide; CTT chr11 5164316 5164337 5164321 5164316 -
cctcagcctcagctcctccacc

SEQ ID NO: 154122 - DNA, 22 bp, Artificial Sequence
  Synthetic oligonucleotide; TTC chr11 5164315 5164336 5164320 5164315 -
ctcagcctcagctcctccaccc

SEQ ID NO: 154123 - DNA, 22 bp, Artificial Sequence
  Synthetic oligonucleotide; CTC chr11 5164312 5164333 5164317 5164312 -
agcctcagctcctccaccctgt

SEQ ID NO: 154124 - DNA, 22 bp, Artificial Sequence
  Synthetic oligonucleotide; CTC chr11 5164306 5164327 5164311 5164306 -
agctcctccaccctgtaatctt

SEQ ID NO: 154125 - DNA, 22 bp, Artificial Sequence
  Synthetic oligonucleotide; CTC chr11 5164301 5164322 5164306 5164301 -
ctccaccctgtaatctttttat

SEQ ID NO: 154126 - DNA, 22 bp, Artificial Sequence
  Synthetic oligonucleotide; CTC chr11 5164298 5164319 5164303 5164298 -
caccctgtaatctttttatcac

SEQ ID NO: 154127 - DNA, 22 bp, Artificial Sequence
  Synthetic oligonucleotide; CTG chr11 5164291 5164312 5164296 5164291 -
taatctttttatcacctcccct

SEQ ID NO: 154128 - DNA, 22 bp, Artificial Sequence
  Synthetic oligonucleotide; CTT chr11 5164284 5164305 5164289 5164284 -
tttatcacctcccctcctcaca

SEQ ID NO: 154129 - DNA, 22 bp, Artificial Sequence
  Synthetic oligonucleotide; TTT chr11 5164283 5164304 5164288 5164283 -
ttatcacctcccctcctcacac

SEQ ID NO: 154130 - DNA, 22 bp, Artificial Sequence
  Synthetic oligonucleotide; TTT chr11 5164282 5164303 5164287 5164282 -
tatcacctcccctcctcacacc

SEQ ID NO: 154131 - DNA, 22 bp, Artificial Sequence
  Synthetic oligonucleotide; TTT chr11 5164281 5164302 5164286 5164281 -
atcacctcccctcctcacaccc

SEQ ID NO: 154132 - DNA, 22 bp, Artificial Sequence
  Synthetic oligonucleotide; TTA chr11 5164280 5164301 5164285 5164280 -
tcacctcccctcctcacacccg

SEQ ID NO: 154133 - DNA, 22 bp, Artificial Sequence
  Synthetic oligonucleotide; CTC chr11 5164273 5164294 5164278 5164273 -
ccctcctcacacccggtccggt

SEQ ID NO: 154134 - DNA, 22 bp, Artificial Sequence
  Synthetic oligonucleotide; CTC chr11 5164268 5164289 5164273 5164268 -
ctcacacccggtccggtttaca

SEQ ID NO: 154135 - DNA, 22 bp, Artificial Sequence
  Synthetic oligonucleotide; CTC chr11 5164265 5164286 5164270 5164265 -
acacccggtccggtttacagtt

SEQ ID NO: 154136 - DNA, 22 bp, Artificial Sequence
  Synthetic oligonucleotide; TTT chr11 5164249 5164270 5164254 5164249 -
acagtttcattccgtgactagc

SEQ ID NO: 154137 - DNA, 22 bp, Artificial Sequence
  Synthetic oligonucleotide; TTA chr11 5164248 5164269 5164253 5164248 -
cagtttcattccgtgactagcc

SEQ ID NO: 154138 - DNA, 22 bp, Artificial Sequence
  Synthetic oligonucleotide; TTT chr11 5164242 5164263 5164247 5164242 -
cattccgtgactagccctcccc

SEQ ID NO: 154139 - DNA, 22 bp, Artificial Sequence
  Synthetic oligonucleotide; TTC chr11 5164241 5164262 5164246 5164241 -
attccgtgactagccctcccca

SEQ ID NO: 154140 - DNA, 22 bp, Artificial Sequence
  Synthetic oligonucleotide; TTC chr11 5164237 5164258 5164242 5164237 -
cgtgactagccctccccaacct

SEQ ID NO: 154141 - DNA, 22 bp, Artificial Sequence
  Synthetic oligonucleotide; CTA chr11 5164229 5164250 5164234 5164229 -
gccctccccaacctgcccagca

SEQ ID NO: 154142 - DNA, 22 bp, Artificial Sequence
  Synthetic oligonucleotide; CTC chr11 5164223 5164244 5164228 5164223 -
cccaacctgcccagcaatttcc

SEQ ID NO: 154143 - DNA, 22 bp, Artificial Sequence
  Synthetic oligonucleotide; CTG chr11 5164214 5164235 5164219 5164214 -
cccagcaatttcctattaagaa

SEQ ID NO: 154144 - DNA, 22 bp, Artificial Sequence
  Synthetic oligonucleotide; TTT chr11 5164203 5164224 5164208 5164203 -
cctattaagaaggtggctgaag

SEQ ID NO: 154145 - DNA, 22 bp, Artificial Sequence
  Synthetic oligonucleotide; TTC chr11 5164202 5164223 5164207 5164202 -
ctattaagaaggtggctgaagc

SEQ ID NO: 154146 - DNA, 22 bp, Artificial Sequence
  Synthetic oligonucleotide; CTA chr11 5164199 5164220 5164204 5164199 -
ttaagaaggtggctgaagctaa

SEQ ID NO: 154147 - DNA, 22 bp, Artificial Sequence
  Synthetic oligonucleotide; TTA chr11 5164196 5164217 5164201 5164196 -
agaaggtggctgaagctaaagg

SEQ ID NO: 154148 - DNA, 22 bp, Artificial Sequence
  Synthetic oligonucleotide; CTG chr11 5164184 5164205 5164189 5164184 -
aagctaaaggcgtagtcaaggt

SEQ ID NO: 154149 - DNA, 22 bp, Artificial Sequence
  Synthetic oligonucleotide; CTA chr11 5164178 5164199 5164183 5164178 -
aaggcgtagtcaaggttaatgc

SEQ ID NO: 154150 - DNA, 22 bp, Artificial Sequence
  Synthetic oligonucleotide; TTA chr11 5164160 5164181 5164165 5164160 -
atgctcctttttctttatccga

SEQ ID NO: 154151 - DNA, 22 bp, Artificial Sequence
  Synthetic oligonucleotide; CTC chr11 5164154 5164175 5164159 5164154 -
ctttttctttatccgacctctc

SEQ ID NO: 154152 - DNA, 22 bp, Artificial Sequence
  Synthetic oligonucleotide; CTT chr11 5164151 5164172 5164156 5164151 -
tttctttatccgacctctcccg

SEQ ID NO: 154153 - DNA, 22 bp, Artificial Sequence
  Synthetic oligonucleotide; TTT chr11 5164150 5164171 5164155 5164150 -
ttctttatccgacctctcccga

SEQ ID NO: 154154 - DNA, 22 bp, Artificial Sequence
  Synthetic oligonucleotide; TTT chr11 5164149 5164170 5164154 5164149 -
tctttatccgacctctcccgaa

SEQ ID NO: 154155 - DNA, 22 bp, Artificial Sequence
  Synthetic oligonucleotide; TTT chr11 5164148 5164169 5164153 5164148 -
ctttatccgacctctcccgaat

SEQ ID NO: 154156 - DNA, 22 bp, Artificial Sequence
  Synthetic oligonucleotide; TTC chr11 5164147 5164168 5164152 5164147 -
tttatccgacctctcccgaatc

SEQ ID NO: 154157 - DNA, 22 bp, Artificial Sequence
  Synthetic oligonucleotide; CTT chr11 5164145 5164166 5164150 5164145 -
tatccgacctctcccgaatcag

SEQ ID NO: 154158 - DNA, 22 bp, Artificial Sequence
  Synthetic oligonucleotide; TTT chr11 5164144 5164165 5164149 5164144 -
atccgacctctcccgaatcaga

SEQ ID NO: 154159 - DNA, 22 bp, Artificial Sequence
  Synthetic oligonucleotide; TTA chr11 5164143 5164164 5164148 5164143 -
tccgacctctcccgaatcagag

SEQ ID NO: 154160 - DNA, 22 bp, Artificial Sequence
  Synthetic oligonucleotide; CTC chr11 5164134 5164155 5164139 5164134 -
tcccgaatcagagcgtttaggc

SEQ ID NO: 154161 - DNA, 22 bp, Artificial Sequence
  Synthetic oligonucleotide; CTC chr11 5164132 5164153 5164137 5164132 -
ccgaatcagagcgtttaggctc

SEQ ID NO: 154162 - DNA, 22 bp, Artificial Sequence
  Synthetic oligonucleotide; TTT chr11 5164116 5164137 5164121 5164116 -
aggctctttcatcaaatatgaa

SEQ ID NO: 154163 - DNA, 22 bp, Artificial Sequence
  Synthetic oligonucleotide; TTA chr11 5164115 5164136 5164120 5164115 -
ggctctttcatcaaatatgaaa

SEQ ID NO: 154164 - DNA, 22 bp, Artificial Sequence
  Synthetic oligonucleotide; CTC chr11 5164110 5164131 5164115 5164110 -
tttcatcaaatatgaaaaaccc

SEQ ID NO: 154165 - DNA, 22 bp, Artificial Sequence
  Synthetic oligonucleotide; CTT chr11 5164108 5164129 5164113 5164108 -
tcatcaaatatgaaaaacccag

SEQ ID NO: 154166 - DNA, 22 bp, Artificial Sequence
  Synthetic oligonucleotide; TTT chr11 5164107 5164128 5164112 5164107 -
catcaaatatgaaaaacccagc

SEQ ID NO: 154167 - DNA, 22 bp, Artificial Sequence
  Synthetic oligonucleotide; TTC chr11 5164106 5164127 5164111 5164106 -
atcaaatatgaaaaacccagcc

SEQ ID NO: 154168 - DNA, 22 bp, Artificial Sequence
  Synthetic oligonucleotide; TTC chr11 5164078 5164099 5164083 5164078 -
atggctcgttcggcagcaaccc

SEQ ID NO: 154169 - DNA, 22 bp, Artificial Sequence
  Synthetic oligonucleotide; CTC chr11 5164071 5164092 5164076 5164071 -
gttcggcagcaaccctgagacg

SEQ ID NO: 154170 - DNA, 22 bp, Artificial Sequence
  Synthetic oligonucleotide; TTC chr11 5164067 5164088 5164072 5164067 -
ggcagcaaccctgagacgcttt

SEQ ID NO: 154171 - DNA, 22 bp, Artificial Sequence
  Synthetic oligonucleotide; CTG chr11 5164054 5164075 5164059 5164054 -
agacgctttacagccctagacc

SEQ ID NO: 154172 - DNA, 22 bp, Artificial Sequence
  Synthetic oligonucleotide; CTT chr11 5164046 5164067 5164051 5164046 -
tacagccctagaccctaaaagg

SEQ ID NO: 154173 - DNA, 22 bp, Artificial Sequence
  Synthetic oligonucleotide; TTT chr11 5164045 5164066 5164050 5164045 -
acagccctagaccctaaaagga

SEQ ID NO: 154174 - DNA, 22 bp, Artificial Sequence
  Synthetic oligonucleotide; TTA chr11 5164044 5164065 5164049 5164044 -
cagccctagaccctaaaaggac

SEQ ID NO: 154175 - DNA, 22 bp, Artificial Sequence
  Synthetic oligonucleotide; CTA chr11 5164036 5164057 5164041 5164036 -
gaccctaaaaggacaaaaggcc

SEQ ID NO: 154176 - DNA, 22 bp, Artificial Sequence
  Synthetic oligonucleotide; CTA chr11 5164029 5164050 5164034 5164029 -
aaaggacaaaaggccactttat

SEQ ID NO: 154177 - DNA, 22 bp, Artificial Sequence
  Synthetic oligonucleotide; CTT chr11 5164010 5164031 5164015 5164010 -
tattctcaatatacattttatt

SEQ ID NO: 154178 - DNA, 22 bp, Artificial Sequence
  Synthetic oligonucleotide; TTT chr11 5164009 5164030 5164014 5164009 -
attctcaatatacattttatta

SEQ ID NO: 154179 - DNA, 22 bp, Artificial Sequence
  Synthetic oligonucleotide; TTA chr11 5164008 5164029 5164013 5164008 -
ttctcaatatacattttattac

SEQ ID NO: 154180 - DNA, 22 bp, Artificial Sequence
  Synthetic oligonucleotide; TTC chr11 5164005 5164026 5164010 5164005 -
tcaatatacattttattaccca

SEQ ID NO: 154181 - DNA, 22 bp, Artificial Sequence
  Synthetic oligonucleotide; CTC chr11 5164003 5164024 5164008 5164003 -
aatatacattttattacccaat

SEQ ID NO: 154182 - DNA, 22 bp, Artificial Sequence
  Synthetic oligonucleotide; TTT chr11 5163992 5164013 5163997 5163992 -
tattacccaatctgctcctgac

SEQ ID NO: 154183 - DNA, 22 bp, Artificial Sequence
  Synthetic oligonucleotide; TTT chr11 5163991 5164012 5163996 5163991 -
attacccaatctgctcctgaca

SEQ ID NO: 154184 - DNA, 22 bp, Artificial Sequence
  Synthetic oligonucleotide; TTA chr11 5163990 5164011 5163995 5163990 -
ttacccaatctgctcctgacat

SEQ ID NO: 154185 - DNA, 22 bp, Artificial Sequence
  Synthetic oligonucleotide; TTA chr11 5163987 5164008 5163992 5163987 -
cccaatctgctcctgacattaa

SEQ ID NO: 154186 - DNA, 22 bp, Artificial Sequence
  Synthetic oligonucleotide; CTG chr11 5163978 5163999 5163983 5163978 -
ctcctgacattaaataaaactc

SEQ ID NO: 154187 - DNA, 22 bp, Artificial Sequence
  Synthetic oligonucleotide; CTC chr11 5163975 5163996 5163980 5163975 -
ctgacattaaataaaactccaa

SEQ ID NO: 154188 - DNA, 22 bp, Artificial Sequence
  Synthetic oligonucleotide; CTG chr11 5163972 5163993 5163977 5163972 -
acattaaataaaactccaaaaa

SEQ ID NO: 154189 - DNA, 22 bp, Artificial Sequence
  Synthetic oligonucleotide; TTA chr11 5163966 5163987 5163971 5163966 -
aataaaactccaaaaattaaat

SEQ ID NO: 154190 - DNA, 22 bp, Artificial Sequence
  Synthetic oligonucleotide; CTC chr11 5163956 5163977 5163961 5163956 -
caaaaattaaattctggacctc

SEQ ID NO: 154191 - DNA, 22 bp, Artificial Sequence
  Synthetic oligonucleotide; TTA chr11 5163947 5163968 5163952 5163947 -
aattctggacctcaaaccccac

SEQ ID NO: 154192 - DNA, 22 bp, Artificial Sequence
  Synthetic oligonucleotide; TTC chr11 5163942 5163963 5163947 5163942 -
tggacctcaaaccccacaacag

SEQ ID NO: 154193 - DNA, 22 bp, Artificial Sequence
  Synthetic oligonucleotide; CTG chr11 5163940 5163961 5163945 5163940 -
gacctcaaaccccacaacagga

SEQ ID NO: 154194 - DNA, 22 bp, Artificial Sequence
  Synthetic oligonucleotide; CTC chr11 5163934 5163955 5163939 5163934 -
aaaccccacaacaggactcaat

SEQ ID NO: 154195 - DNA, 22 bp, Artificial Sequence
  Synthetic oligonucleotide; CTC chr11 5163915 5163936 5163920 5163915 -
aattaacctcaccttcaaggtg

SEQ ID NO: 154196 - DNA, 22 bp, Artificial Sequence
  Synthetic oligonucleotide; TTA chr11 5163910 5163931 5163915 5163910 -
acctcaccttcaaggtgtacaa

SEQ ID NO: 154197 - DNA, 22 bp, Artificial Sequence
  Synthetic oligonucleotide; CTC chr11 5163905 5163926 5163910 5163905 -
accttcaaggtgtacaataata

SEQ ID NO: 154198 - DNA, 22 bp, Artificial Sequence
  Synthetic oligonucleotide; CTT chr11 5163900 5163921 5163905 5163900 -
caaggtgtacaataatagagta

SEQ ID NO: 154199 - DNA, 22 bp, Artificial Sequence
  Synthetic oligonucleotide; TTC chr11 5163899 5163920 5163904 5163899 -
aaggtgtacaataatagagtag

SEQ ID NO: 154200 - DNA, 22 bp, Artificial Sequence
  Synthetic oligonucleotide; TTT chr11 5163853 5163874 5163858 5163853 -
ttgagttgcaattccttgcctc

SEQ ID NO: 154201 - DNA, 22 bp, Artificial Sequence
  Synthetic oligonucleotide; TTT chr11 5163852 5163873 5163857 5163852 -
tgagttgcaattccttgcctcc

SEQ ID NO: 154202 - DNA, 22 bp, Artificial Sequence
  Synthetic oligonucleotide; TTT chr11 5163851 5163872 5163856 5163851 -
gagttgcaattccttgcctcca

SEQ ID NO: 154203 - DNA, 22 bp, Artificial Sequence
  Synthetic oligonucleotide; TTG chr11 5163850 5163871 5163855 5163850 -
agttgcaattccttgcctccac

SEQ ID NO: 154204 - DNA, 22 bp, Artificial Sequence
  Synthetic oligonucleotide; TTG chr11 5163845 5163866 5163850 5163845 -
caattccttgcctccactgtga

SEQ ID NO: 154205 - DNA, 22 bp, Artificial Sequence
  Synthetic oligonucleotide; TTC chr11 5163839 5163860 5163844 5163839 -
cttgcctccactgtgagacaaa

SEQ ID NO: 154206 - DNA, 22 bp, Artificial Sequence
  Synthetic oligonucleotide; CTT chr11 5163836 5163857 5163841 5163836 -
gcctccactgtgagacaaaccc

SEQ ID NO: 154207 - DNA, 22 bp, Artificial Sequence
  Synthetic oligonucleotide; TTG chr11 5163835 5163856 5163840 5163835 -
cctccactgtgagacaaacccc

SEQ ID NO: 154208 - DNA, 22 bp, Artificial Sequence
  Synthetic oligonucleotide; CTC chr11 5163831 5163852 5163836 5163831 -
cactgtgagacaaaccccagcc

SEQ ID NO: 154209 - DNA, 22 bp, Artificial Sequence
  Synthetic oligonucleotide; CTG chr11 5163826 5163847 5163831 5163826 -
tgagacaaaccccagccacatc

SEQ ID NO: 154210 - DNA, 22 bp, Artificial Sequence
  Synthetic oligonucleotide; CTC chr11 5163802 5163823 5163807 5163802 -
cagcacacaagaacttccaaat

SEQ ID NO: 154211 - DNA, 22 bp, Artificial Sequence
  Synthetic oligonucleotide; CTT chr11 5163786 5163807 5163791 5163786 -
ccaaatgcctaaaccgcagtgg

SEQ ID NO: 154212 - DNA, 22 bp, Artificial Sequence
  Synthetic oligonucleotide; TTC chr11 5163785 5163806 5163790 5163785 -
caaatgcctaaaccgcagtggc

SEQ ID NO: 154213 - DNA, 22 bp, Artificial Sequence
  Synthetic oligonucleotide; CTA chr11 5163775 5163796 5163780 5163775 -
aaccgcagtggccaggcgttcc

SEQ ID NO: 154214 - DNA, 22 bp, Artificial Sequence
  Synthetic oligonucleotide; TTC chr11 5163754 5163775 5163759 5163754 -
ctccggaaccacctcccccagg

SEQ ID NO: 154215 - DNA, 22 bp, Artificial Sequence
  Synthetic oligonucleotide; CTC chr11 5163751 5163772 5163756 5163751 -
cggaaccacctcccccaggagc

SEQ ID NO: 154216 - DNA, 22 bp, Artificial Sequence
  Synthetic oligonucleotide; CTC chr11 5163739 5163760 5163744 5163739 -
ccccaggagcttgctacaagtg

SEQ ID NO: 154217 - DNA, 22 bp, Artificial Sequence
  Synthetic oligonucleotide; CTT chr11 5163727 5163748 5163732 5163727 -
gctacaagtgccagaaatctgg

SEQ ID NO: 154218 - DNA, 22 bp, Artificial Sequence
  Synthetic oligonucleotide; TTG chr11 5163726 5163747 5163731 5163726 -
ctacaagtgccagaaatctggc

SEQ ID NO: 154219 - DNA, 22 bp, Artificial Sequence
  Synthetic oligonucleotide; CTA chr11 5163723 5163744 5163728 5163723 -
caagtgccagaaatctggccac

SEQ ID NO: 154220 - DNA, 22 bp, Artificial Sequence
  Synthetic oligonucleotide; CTG chr11 5163706 5163727 5163711 5163706 -
gccaccaggccaaggaatgccc

SEQ ID NO: 154221 - DNA, 22 bp, Artificial Sequence
  Synthetic oligonucleotide; TTC chr11 5163670 5163691 5163675 5163670 -
ctcctaagccgtgtcccatctg

SEQ ID NO: 154222 - DNA, 22 bp, Artificial Sequence
  Synthetic oligonucleotide; CTC chr11 5163667 5163688 5163672 5163667 -
ctaagccgtgtcccatctgtgc

SEQ ID NO: 154223 - DNA, 22 bp, Artificial Sequence
  Synthetic oligonucleotide; CTA chr11 5163664 5163685 5163669 5163664 -
agccgtgtcccatctgtgcagg

SEQ ID NO: 154224 - DNA, 22 bp, Artificial Sequence
  Synthetic oligonucleotide; CTG chr11 5163648 5163669 5163653 5163648 -
tgcaggaccccactagaaatcg

SEQ ID NO: 154225 - DNA, 22 bp, Artificial Sequence
  Synthetic oligonucleotide; CTA chr11 5163633 5163654 5163638 5163633 -
gaaatcggactgttcaactcac

SEQ ID NO: 154226 - DNA, 22 bp, Artificial Sequence
  Synthetic oligonucleotide; CTG chr11 5163621 5163642 5163626 5163621 -
ttcaactcacctggcagccact

SEQ ID NO: 154227 - DNA, 22 bp, Artificial Sequence
  Synthetic oligonucleotide; TTC chr11 5163618 5163639 5163623 5163618 -
aactcacctggcagccactcct

SEQ ID NO: 154228 - DNA, 22 bp, Artificial Sequence
  Synthetic oligonucleotide; CTC chr11 5163613 5163634 5163618 5163613 -
acctggcagccactcctagagc

SEQ ID NO: 154229 - DNA, 22 bp, Artificial Sequence
  Synthetic oligonucleotide; CTG chr11 5163608 5163629 5163613 5163608 -
gcagccactcctagagcccctg

SEQ ID NO: 154230 - DNA, 22 bp, Artificial Sequence
  Synthetic oligonucleotide; CTC chr11 5163598 5163619 5163603 5163598 -
ctagagcccctggaactctggc

SEQ ID NO: 154231 - DNA, 22 bp, Artificial Sequence
  Synthetic oligonucleotide; CTA chr11 5163595 5163616 5163600 5163595 -
gagcccctggaactctggccca

SEQ ID NO: 154232 - DNA, 22 bp, Artificial Sequence
  Synthetic oligonucleotide; CTG chr11 5163586 5163607 5163591 5163586 -
gaactctggcccaaggctccct

SEQ ID NO: 154233 - DNA, 22 bp, Artificial Sequence
  Synthetic oligonucleotide; CTC chr11 5163580 5163601 5163585 5163580 -
tggcccaaggctccctgactga

SEQ ID NO: 154234 - DNA, 22 bp, Artificial Sequence
  Synthetic oligonucleotide; CTG chr11 5163578 5163599 5163583 5163578 -
gcccaaggctccctgactgact

SEQ ID NO: 154235 - DNA, 22 bp, Artificial Sequence
  Synthetic oligonucleotide; CTC chr11 5163567 5163588 5163572 5163567 -
cctgactgactccttcccagat

SEQ ID NO: 154236 - DNA, 22 bp, Artificial Sequence
  Synthetic oligonucleotide; CTG chr11 5163563 5163584 5163568 5163563 -
actgactccttcccagatcttc

SEQ ID NO: 154237 - DNA, 22 bp, Artificial Sequence
  Synthetic oligonucleotide; CTG chr11 5163559 5163580 5163564 5163559 -
actccttcccagatcttctcgg

SEQ ID NO: 154238 - DNA, 22 bp, Artificial Sequence
  Synthetic oligonucleotide; CTC chr11 5163555 5163576 5163560 5163555 -
cttcccagatcttctcggcttt

SEQ ID NO: 154239 - DNA, 22 bp, Artificial Sequence
  Synthetic oligonucleotide; CTT chr11 5163552 5163573 5163557 5163552 -
cccagatcttctcggctttgca

SEQ ID NO: 154240 - DNA, 22 bp, Artificial Sequence
  Synthetic oligonucleotide; TTC chr11 5163551 5163572 5163556 5163551 -
ccagatcttctcggctttgcag

SEQ ID NO: 154241 - DNA, 22 bp, Artificial Sequence
  Synthetic oligonucleotide; CTT chr11 5163542 5163563 5163547 5163542 -
ctcggctttgcagctgaagact

SEQ ID NO: 154242 - DNA, 22 bp, Artificial Sequence
  Synthetic oligonucleotide; TTC chr11 5163541 5163562 5163546 5163541 -
tcggctttgcagctgaagactg

SEQ ID NO: 154243 - DNA, 22 bp, Artificial Sequence
  Synthetic oligonucleotide; CTC chr11 5163539 5163560 5163544 5163539 -
ggctttgcagctgaagactgcc

SEQ ID NO: 154244 - DNA, 22 bp, Artificial Sequence
  Synthetic oligonucleotide; CTT chr11 5163534 5163555 5163539 5163534 -
tgcagctgaagactgccactgc

SEQ ID NO: 154245 - DNA, 22 bp, Artificial Sequence
  Synthetic oligonucleotide; TTT chr11 5163533 5163554 5163538 5163533 -
gcagctgaagactgccactgcc

SEQ ID NO: 154246 - DNA, 22 bp, Artificial Sequence
  Synthetic oligonucleotide; TTG chr11 5163532 5163553 5163537 5163532 -
cagctgaagactgccactgcct

SEQ ID NO: 154247 - DNA, 22 bp, Artificial Sequence
  Synthetic oligonucleotide; CTG chr11 5163526 5163547 5163531 5163526 -
aagactgccactgcctgatcgc

SEQ ID NO: 154248 - DNA, 22 bp, Artificial Sequence
  Synthetic oligonucleotide; CTG chr11 5163519 5163540 5163524 5163519 -
ccactgcctgatcgcctcggaa

SEQ ID NO: 154249 - DNA, 22 bp, Artificial Sequence
  Synthetic oligonucleotide; CTG chr11 5163513 5163534 5163518 5163513 -
cctgatcgcctcggaagccctg

SEQ ID NO: 154250 - DNA, 22 bp, Artificial Sequence
  Synthetic oligonucleotide; CTG chr11 5163509 5163530 5163514 5163509 -
atcgcctcggaagccctgtaga

SEQ ID NO: 154251 - DNA, 22 bp, Artificial Sequence
  Synthetic oligonucleotide; CTC chr11 5163501 5163522 5163506 5163501 -
ggaagccctgtagaccatcaca

SEQ ID NO: 154252 - DNA, 22 bp, Artificial Sequence
  Synthetic oligonucleotide; CTG chr11 5163491 5163512 5163496 5163491 -
tagaccatcacagacaccgagc

SEQ ID NO: 154253 - DNA, 22 bp, Artificial Sequence
  Synthetic oligonucleotide; CTT chr11 5163467 5163488 5163472 5163467 -
taggtaattctcacagtggagg

SEQ ID NO: 154254 - DNA, 22 bp, Artificial Sequence
  Synthetic oligonucleotide; TTT chr11 5163466 5163487 5163471 5163466 -
aggtaattctcacagtggaggg

SEQ ID NO: 154255 - DNA, 22 bp, Artificial Sequence
  Synthetic oligonucleotide; TTA chr11 5163465 5163486 5163470 5163465 -
ggtaattctcacagtggagggt

SEQ ID NO: 154256 - DNA, 22 bp, Artificial Sequence
  Synthetic oligonucleotide; TTC chr11 5163457 5163478 5163462 5163457 -
tcacagtggagggtaagtctgt

SEQ ID NO: 154257 - DNA, 22 bp, Artificial Sequence
  Synthetic oligonucleotide; CTC chr11 5163455 5163476 5163460 5163455 -
acagtggagggtaagtctgtac

SEQ ID NO: 154258 - DNA, 22 bp, Artificial Sequence
  Synthetic oligonucleotide; CTG chr11 5163436 5163457 5163441 5163436 -
tacccttcttaatcagtatgga

SEQ ID NO: 154259 - DNA, 22 bp, Artificial Sequence
  Synthetic oligonucleotide; CTT chr11 5163429 5163450 5163434 5163429 -
cttaatcagtatggaggctacc

SEQ ID NO: 154260 - DNA, 22 bp, Artificial Sequence
  Synthetic oligonucleotide; TTC chr11 5163428 5163449 5163433 5163428 -
ttaatcagtatggaggctaccc

SEQ ID NO: 154261 - DNA, 22 bp, Artificial Sequence
  Synthetic oligonucleotide; CTT chr11 5163426 5163447 5163431 5163426 -
aatcagtatggaggctacccac

SEQ ID NO: 154262 - DNA, 22 bp, Artificial Sequence
  Synthetic oligonucleotide; TTA chr11 5163425 5163446 5163430 5163425 -
atcagtatggaggctacccact

SEQ ID NO: 154263 - DNA, 22 bp, Artificial Sequence
  Synthetic oligonucleotide; CTA chr11 5163409 5163430 5163414 5163409 -
cccactccacattaccttcttt

SEQ ID NO: 154264 - DNA, 22 bp, Artificial Sequence
  Synthetic oligonucleotide; CTC chr11 5163402 5163423 5163407 5163402 -
cacattaccttcttttcaaagg

SEQ ID NO: 154265 - DNA, 22 bp, Artificial Sequence
  Synthetic oligonucleotide; TTA chr11 5163395 5163416 5163400 5163395 -
ccttcttttcaaaggcctgttt

SEQ ID NO: 154266 - DNA, 22 bp, Artificial Sequence
  Synthetic oligonucleotide; CTT chr11 5163391 5163412 5163396 5163391 -
cttttcaaaggcctgtttccct

SEQ ID NO: 154267 - DNA, 22 bp, Artificial Sequence
  Synthetic oligonucleotide; TTC chr11 5163390 5163411 5163395 5163390 -
ttttcaaaggcctgtttccctt

SEQ ID NO: 154268 - DNA, 22 bp, Artificial Sequence
  Synthetic oligonucleotide; CTT chr11 5163388 5163409 5163393 5163388 -
ttcaaaggcctgtttcccttgc

SEQ ID NO: 154269 - DNA, 22 bp, Artificial Sequence
  Synthetic oligonucleotide; TTT chr11 5163387 5163408 5163392 5163387 -
tcaaaggcctgtttcccttgcc

SEQ ID NO: 154270 - DNA, 22 bp, Artificial Sequence
  Synthetic oligonucleotide; TTT chr11 5163386 5163407 5163391 5163386 -
caaaggcctgtttcccttgcct

SEQ ID NO: 154271 - DNA, 22 bp, Artificial Sequence
  Synthetic oligonucleotide; TTC chr11 5163385 5163406 5163390 5163385 -
aaaggcctgtttcccttgcctc

SEQ ID NO: 154272 - DNA, 22 bp, Artificial Sequence
  Synthetic oligonucleotide; CTG chr11 5163376 5163397 5163381 5163376 -
tttcccttgcctccataactgt

SEQ ID NO: 154273 - DNA, 22 bp, Artificial Sequence
  Synthetic oligonucleotide; TTT chr11 5163373 5163394 5163378 5163373 -
cccttgcctccataactgttgt

SEQ ID NO: 154274 - DNA, 22 bp, Artificial Sequence
  Synthetic oligonucleotide; TTC chr11 5163372 5163393 5163377 5163372 -
ccttgcctccataactgttgta

SEQ ID NO: 154275 - DNA, 22 bp, Artificial Sequence
  Synthetic oligonucleotide; CTT chr11 5163368 5163389 5163373 5163368 -
gcctccataactgttgtaggta

SEQ ID NO: 154276 - DNA, 22 bp, Artificial Sequence
  Synthetic oligonucleotide; TTG chr11 5163367 5163388 5163372 5163367 -
cctccataactgttgtaggtat

SEQ ID NO: 154277 - DNA, 22 bp, Artificial Sequence
  Synthetic oligonucleotide; CTC chr11 5163363 5163384 5163368 5163363 -
cataactgttgtaggtattgat

SEQ ID NO: 154278 - DNA, 22 bp, Artificial Sequence
  Synthetic oligonucleotide; CTG chr11 5163355 5163376 5163360 5163355 -
ttgtaggtattgatggccaggc

SEQ ID NO: 154279 - DNA, 22 bp, Artificial Sequence
  Synthetic oligonucleotide; TTG chr11 5163352 5163373 5163357 5163352 -
taggtattgatggccaggcttc

SEQ ID NO: 154280 - DNA, 22 bp, Artificial Sequence
  Synthetic oligonucleotide; TTG chr11 5163343 5163364 5163348 5163343 -
atggccaggcttctaaacctct

SEQ ID NO: 154281 - DNA, 22 bp, Artificial Sequence
  Synthetic oligonucleotide; CTT chr11 5163331 5163352 5163336 5163331 -
ctaaacctcttaaaattcccca

SEQ ID NO: 154282 - DNA, 22 bp, Artificial Sequence
  Synthetic oligonucleotide; TTC chr11 5163330 5163351 5163335 5163330 -
taaacctcttaaaattccccaa

SEQ ID NO: 154283 - DNA, 22 bp, Artificial Sequence
  Synthetic oligonucleotide; CTA chr11 5163328 5163349 5163333 5163328 -
aacctcttaaaattccccaact

SEQ ID NO: 154284 - DNA, 22 bp, Artificial Sequence
  Synthetic oligonucleotide; CTC chr11 5163322 5163343 5163327 5163322 -
ttaaaattccccaactctggtg

SEQ ID NO: 154285 - DNA, 22 bp, Artificial Sequence
  Synthetic oligonucleotide; CTT chr11 5163320 5163341 5163325 5163320 -
aaaattccccaactctggtgct

SEQ ID NO: 154286 - DNA, 22 bp, Artificial Sequence
  Synthetic oligonucleotide; TTA chr11 5163319 5163340 5163324 5163319 -
aaattccccaactctggtgcta

SEQ ID NO: 154287 - DNA, 22 bp, Artificial Sequence
  Synthetic oligonucleotide; TTC chr11 5163313 5163334 5163318 5163313 -
cccaactctggtgctaaccgag

SEQ ID NO: 154288 - DNA, 22 bp, Artificial Sequence
  Synthetic oligonucleotide; CTC chr11 5163305 5163326 5163310 5163305 -
tggtgctaaccgagacgatact

SEQ ID NO: 154289 - DNA, 22 bp, Artificial Sequence
  Synthetic oligonucleotide; CTG chr11 5163303 5163324 5163308 5163303 -
gtgctaaccgagacgatactct

SEQ ID NO: 154290 - DNA, 22 bp, Artificial Sequence
  Synthetic oligonucleotide; CTA chr11 5163297 5163318 5163302 5163297 -
accgagacgatactcttttaag

SEQ ID NO: 154291 - DNA, 22 bp, Artificial Sequence
  Synthetic oligonucleotide; CTC chr11 5163282 5163303 5163287 5163282 -
ttttaagcactcctttttcatt

SEQ ID NO: 154292 - DNA, 22 bp, Artificial Sequence
  Synthetic oligonucleotide; CTT chr11 5163280 5163301 5163285 5163280 -
ttaagcactcctttttcattat

SEQ ID NO: 154293 - DNA, 22 bp, Artificial Sequence
  Synthetic oligonucleotide; TTT chr11 5163279 5163300 5163284 5163279 -
taagcactcctttttcattatc

SEQ ID NO: 154294 - DNA, 22 bp, Artificial Sequence
  Synthetic oligonucleotide; TTT chr11 5163278 5163299 5163283 5163278 -
aagcactcctttttcattatcc

SEQ ID NO: 154295 - DNA, 22 bp, Artificial Sequence
  Synthetic oligonucleotide; TTA chr11 5163277 5163298 5163282 5163277 -
agcactcctttttcattatccc

SEQ ID NO: 154296 - DNA, 22 bp, Artificial Sequence
  Synthetic oligonucleotide; CTC chr11 5163270 5163291 5163275 5163270 -
ctttttcattatccccacctgc

SEQ ID NO: 154297 - DNA, 22 bp, Artificial Sequence
  Synthetic oligonucleotide; CTT chr11 5163267 5163288 5163272 5163267 -
tttcattatccccacctgccag

SEQ ID NO: 154298 - DNA, 22 bp, Artificial Sequence
  Synthetic oligonucleotide; TTT chr11 5163266 5163287 5163271 5163266 -
ttcattatccccacctgccagt

SEQ ID NO: 154299 - DNA, 22 bp, Artificial Sequence
  Synthetic oligonucleotide; TTT chr11 5163265 5163286 5163270 5163265 -
tcattatccccacctgccagtt

SEQ ID NO: 154300 - DNA, 22 bp, Artificial Sequence
  Synthetic oligonucleotide; TTT chr11 5163264 5163285 5163269 5163264 -
cattatccccacctgccagttc

SEQ ID NO: 154301 - DNA, 22 bp, Artificial Sequence
  Synthetic oligonucleotide; TTC chr11 5163263 5163284 5163268 5163263 -
attatccccacctgccagttcc

SEQ ID NO: 154302 - DNA, 22 bp, Artificial Sequence
  Synthetic oligonucleotide; TTA chr11 5163259 5163280 5163264 5163259 -
tccccacctgccagttccctta

SEQ ID NO: 154303 - DNA, 22 bp, Artificial Sequence
  Synthetic oligonucleotide; CTG chr11 5163249 5163270 5163254 5163249 -
ccagttcccttattaggccgag

SEQ ID NO: 154304 - DNA, 22 bp, Artificial Sequence
  Synthetic oligonucleotide; TTC chr11 5163242 5163263 5163247 5163242 -
ccttattaggccgagacacttt

SEQ ID NO: 154305 - DNA, 22 bp, Artificial Sequence
  Synthetic oligonucleotide; CTT chr11 5163238 5163259 5163243 5163238 -
attaggccgagacactttaact

SEQ ID NO: 154306 - DNA, 22 bp, Artificial Sequence
  Synthetic oligonucleotide; TTA chr11 5163237 5163258 5163242 5163237 -
ttaggccgagacactttaacta

SEQ ID NO: 154307 - DNA, 22 bp, Artificial Sequence
  Synthetic oligonucleotide; TTA chr11 5163234 5163255 5163239 5163234 -
ggccgagacactttaactaaat

SEQ ID NO: 154308 - DNA, 22 bp, Artificial Sequence
  Synthetic oligonucleotide; CTT chr11 5163221 5163242 5163226 5163221 -
taactaaattatctgcttccct

SEQ ID NO: 154309 - DNA, 22 bp, Artificial Sequence
  Synthetic oligonucleotide; TTT chr11 5163220 5163241 5163225 5163220 -
aactaaattatctgcttccctg

SEQ ID NO: 154310 - DNA, 22 bp, Artificial Sequence
  Synthetic oligonucleotide; TTA chr11 5163219 5163240 5163224 5163219 -
actaaattatctgcttccctga

SEQ ID NO: 154311 - DNA, 22 bp, Artificial Sequence
  Synthetic oligonucleotide; CTA chr11 5163215 5163236 5163220 5163215 -
aattatctgcttccctgactat

SEQ ID NO: 154312 - DNA, 22 bp, Artificial Sequence
  Synthetic oligonucleotide; TTA chr11 5163210 5163231 5163215 5163210 -
tctgcttccctgactattcctg

SEQ ID NO: 154313 - DNA, 22 bp, Artificial Sequence
  Synthetic oligonucleotide; CTG chr11 5163206 5163227 5163211 5163206 -
cttccctgactattcctgggct

SEQ ID NO: 154314 - DNA, 22 bp, Artificial Sequence
  Synthetic oligonucleotide; CTT chr11 5163203 5163224 5163208 5163203 -
ccctgactattcctgggctaca

SEQ ID NO: 154315 - DNA, 22 bp, Artificial Sequence
  Synthetic oligonucleotide; TTC chr11 5163202 5163223 5163207 5163202 -
cctgactattcctgggctacag

SEQ ID NO: 154316 - DNA, 22 bp, Artificial Sequence
  Synthetic oligonucleotide; CTG chr11 5163198 5163219 5163203 5163198 -
actattcctgggctacagccat

SEQ ID NO: 154317 - DNA, 22 bp, Artificial Sequence
  Synthetic oligonucleotide; CTA chr11 5163194 5163215 5163199 5163194 -
ttcctgggctacagccatacct

SEQ ID NO: 154318 - DNA, 22 bp, Artificial Sequence
  Synthetic oligonucleotide; TTC chr11 5163191 5163212 5163196 5163191 -
ctgggctacagccatacctcat

SEQ ID NO: 154319 - DNA, 22 bp, Artificial Sequence
  Synthetic oligonucleotide; CTG chr11 5163188 5163209 5163193 5163188 -
ggctacagccatacctcattgc

SEQ ID NO: 154320 - DNA, 22 bp, Artificial Sequence
  Synthetic oligonucleotide; CTA chr11 5163183 5163204 5163188 5163183 -
cagccatacctcattgccatgt

SEQ ID NO: 154321 - DNA, 22 bp, Artificial Sequence
  Synthetic oligonucleotide; CTC chr11 5163171 5163192 5163176 5163171 -
attgccatgttttcccccagtt

SEQ ID NO: 154322 - DNA, 22 bp, Artificial Sequence
  Synthetic oligonucleotide; TTG chr11 5163167 5163188 5163172 5163167 -
ccatgttttcccccagttcaaa

SEQ ID NO: 154323 - DNA, 22 bp, Artificial Sequence
  Synthetic oligonucleotide; TTT chr11 5163159 5163180 5163164 5163159 -
tcccccagttcaaagcctcctt

SEQ ID NO: 154324 - DNA, 22 bp, Artificial Sequence
  Synthetic oligonucleotide; TTT chr11 5163158 5163179 5163163 5163158 -
cccccagttcaaagcctccttc

SEQ ID NO: 154325 - DNA, 22 bp, Artificial Sequence
  Synthetic oligonucleotide; TTC chr11 5163157 5163178 5163162 5163157 -
ccccagttcaaagcctccttca

SEQ ID NO: 154326 - DNA, 22 bp, Artificial Sequence
  Synthetic oligonucleotide; TTC chr11 5163148 5163169 5163153 5163148 -
aaagcctccttcacatcctccc

SEQ ID NO: 154327 - DNA, 22 bp, Artificial Sequence
  Synthetic oligonucleotide; CTC chr11 5163140 5163161 5163145 5163140 -
cttcacatcctccccttgtatc

SEQ ID NO: 154328 - DNA, 22 bp, Artificial Sequence
  Synthetic oligonucleotide; CTT chr11 5163137 5163158 5163142 5163137 -
cacatcctccccttgtatctcc

SEQ ID NO: 154329 - DNA, 22 bp, Artificial Sequence
  Synthetic oligonucleotide; TTC chr11 5163136 5163157 5163141 5163136 -
acatcctccccttgtatctccc

SEQ ID NO: 154330 - DNA, 22 bp, Artificial Sequence
  Synthetic oligonucleotide; CTC chr11 5163128 5163149 5163133 5163128 -
cccttgtatctccccaccttaa

SEQ ID NO: 154331 - DNA, 22 bp, Artificial Sequence
  Synthetic oligonucleotide; CTT chr11 5163123 5163144 5163128 5163123 -
gtatctccccaccttaatccac

SEQ ID NO: 154332 - DNA, 22 bp, Artificial Sequence
  Synthetic oligonucleotide; TTG chr11 5163122 5163143 5163127 5163122 -
tatctccccaccttaatccaca

SEQ ID NO: 154333 - DNA, 22 bp, Artificial Sequence
  Synthetic oligonucleotide; CTC chr11 5163116 5163137 5163121 5163116 -
cccaccttaatccacaagtata

SEQ ID NO: 154334 - DNA, 22 bp, Artificial Sequence
  Synthetic oligonucleotide; CTT chr11 5163108 5163129 5163113 5163108 -
aatccacaagtataagacacct

SEQ ID NO: 154335 - DNA, 22 bp, Artificial Sequence
  Synthetic oligonucleotide; TTA chr11 5163107 5163128 5163112 5163107 -
atccacaagtataagacacctc

SEQ ID NO: 154336 - DNA, 22 bp, Artificial Sequence
  Synthetic oligonucleotide; CTC chr11 5163085 5163106 5163090 5163085 -
tacttcctccttcgcgaccgat

SEQ ID NO: 154337 - DNA, 22 bp, Artificial Sequence
  Synthetic oligonucleotide; CTA chr11 5163083 5163104 5163088 5163083 -
cttcctccttcgcgaccgatca

SEQ ID NO: 154338 - DNA, 22 bp, Artificial Sequence
  Synthetic oligonucleotide; CTT chr11 5163080 5163101 5163085 5163080 -
cctccttcgcgaccgatcatgc

SEQ ID NO: 154339 - DNA, 22 bp, Artificial Sequence
  Synthetic oligonucleotide; TTC chr11 5163079 5163100 5163084 5163079 -
ctccttcgcgaccgatcatgcg

SEQ ID NO: 154340 - DNA, 22 bp, Artificial Sequence
  Synthetic oligonucleotide; CTC chr11 5163076 5163097 5163081 5163076 -
cttcgcgaccgatcatgcgccc

SEQ ID NO: 154341 - DNA, 22 bp, Artificial Sequence
  Synthetic oligonucleotide; CTT chr11 5163073 5163094 5163078 5163073 -
cgcgaccgatcatgcgcccctt

SEQ ID NO: 154342 - DNA, 22 bp, Artificial Sequence
  Synthetic oligonucleotide; TTC chr11 5163072 5163093 5163077 5163072 -
gcgaccgatcatgcgcccctta

SEQ ID NO: 154343 - DNA, 22 bp, Artificial Sequence
  Synthetic oligonucleotide; CTT chr11 5163051 5163072 5163056 5163051 -
accatcccattaaaacctaatc

SEQ ID NO: 154344 - DNA, 22 bp, Artificial Sequence
  Synthetic oligonucleotide; TTA chr11 5163050 5163071 5163055 5163050 -
ccatcccattaaaacctaatca

SEQ ID NO: 154345 - DNA, 22 bp, Artificial Sequence
  Synthetic oligonucleotide; TTA chr11 5163039 5163060 5163044 5163039 -
aaacctaatcactcttaccccg

SEQ ID NO: 154346 - DNA, 22 bp, Artificial Sequence
  Synthetic oligonucleotide; CTA chr11 5163032 5163053 5163037 5163032 -
atcactcttaccccgctcaatg

SEQ ID NO: 154347 - DNA, 22 bp, Artificial Sequence
  Synthetic oligonucleotide; CTC chr11 5163025 5163046 5163030 5163025 -
ttaccccgctcaatgccagtat

SEQ ID NO: 154348 - DNA, 22 bp, Artificial Sequence
  Synthetic oligonucleotide; CTT chr11 5163023 5163044 5163028 5163023 -
accccgctcaatgccagtatcc

SEQ ID NO: 154349 - DNA, 22 bp, Artificial Sequence
  Synthetic oligonucleotide; TTA chr11 5163022 5163043 5163027 5163022 -
ccccgctcaatgccagtatccc

SEQ ID NO: 154350 - DNA, 22 bp, Artificial Sequence
  Synthetic oligonucleotide; CTC chr11 5163014 5163035 5163019 5163014 -
aatgccagtatcccatcccaca

SEQ ID NO: 154351 - DNA, 22 bp, Artificial Sequence
  Synthetic oligonucleotide; CTT chr11 5162984 5163005 5162989 5162984 -
tgaaaggattaaagcctgttat

SEQ ID NO: 154352 - DNA, 22 bp, Artificial Sequence
  Synthetic oligonucleotide; TTT chr11 5162983 5163004 5162988 5162983 -
gaaaggattaaagcctgttatt

SEQ ID NO: 154353 - DNA, 22 bp, Artificial Sequence
  Synthetic oligonucleotide; TTG chr11 5162982 5163003 5162987 5162982 -
aaaggattaaagcctgttatta

SEQ ID NO: 154354 - DNA, 22 bp, Artificial Sequence
  Synthetic oligonucleotide; TTA chr11 5162973 5162994 5162978 5162973 -
aagcctgttattacttgcctgt

SEQ ID NO: 154355 - DNA, 22 bp, Artificial Sequence
  Synthetic oligonucleotide; CTG chr11 5162966 5162987 5162971 5162966 -
ttattacttgcctgttacagca

SEQ ID NO: 154356 - DNA, 22 bp, Artificial Sequence
  Synthetic oligonucleotide; TTA chr11 5162963 5162984 5162968 5162963 -
ttacttgcctgttacagcatgg

SEQ ID NO: 154357 - DNA, 22 bp, Artificial Sequence
  Synthetic oligonucleotide; TTA chr11 5162960 5162981 5162965 5162960 -
cttgcctgttacagcatggcct

SEQ ID NO: 154358 - DNA, 22 bp, Artificial Sequence
  Synthetic oligonucleotide; CTT chr11 5162957 5162978 5162962 5162957 -
gcctgttacagcatggcctttt

SEQ ID NO: 154359 - DNA, 22 bp, Artificial Sequence
  Synthetic oligonucleotide; TTG chr11 5162956 5162977 5162961 5162956 -
cctgttacagcatggcctttta

SEQ ID NO: 154360 - DNA, 22 bp, Artificial Sequence
  Synthetic oligonucleotide; CTG chr11 5162952 5162973 5162957 5162952 -
ttacagcatggccttttaaagc

SEQ ID NO: 154361 - DNA, 22 bp, Artificial Sequence
  Synthetic oligonucleotide; TTA chr11 5162949 5162970 5162954 5162949 -
cagcatggccttttaaagccta

SEQ ID NO: 154362 - DNA, 22 bp, Artificial Sequence
  Synthetic oligonucleotide; CTT chr11 5162937 5162958 5162942 5162937 -
ttaaagcctataaactctcctt

SEQ ID NO: 154363 - DNA, 22 bp, Artificial Sequence
  Synthetic oligonucleotide; TTT chr11 5162936 5162957 5162941 5162936 -
taaagcctataaactctcctta

SEQ ID NO: 154364 - DNA, 22 bp, Artificial Sequence
  Synthetic oligonucleotide; TTT chr11 5162935 5162956 5162940 5162935 -
aaagcctataaactctccttac

SEQ ID NO: 154365 - DNA, 22 bp, Artificial Sequence
  Synthetic oligonucleotide; TTA chr11 5162934 5162955 5162939 5162934 -
aagcctataaactctccttacc

SEQ ID NO: 154366 - DNA, 22 bp, Artificial Sequence
  Synthetic oligonucleotide; CTA chr11 5162927 5162948 5162932 5162927 -
taaactctccttaccattcccc

SEQ ID NO: 154367 - DNA, 22 bp, Artificial Sequence
  Synthetic oligonucleotide; CTC chr11 5162920 5162941 5162925 5162920 -
tccttaccattcccccatttta

SEQ ID NO: 154368 - DNA, 22 bp, Artificial Sequence
  Synthetic oligonucleotide; CTC chr11 5162918 5162939 5162923 5162918 -
cttaccattcccccattttacc

SEQ ID NO: 154369 - DNA, 22 bp, Artificial Sequence
  Synthetic oligonucleotide; CTT chr11 5162915 5162936 5162920 5162915 -
accattcccccattttacctgt

SEQ ID NO: 154370 - DNA, 22 bp, Artificial Sequence
  Synthetic oligonucleotide; TTA chr11 5162914 5162935 5162919 5162914 -
ccattcccccattttacctgtc

SEQ ID NO: 154371 - DNA, 22 bp, Artificial Sequence
  Synthetic oligonucleotide; TTC chr11 5162908 5162929 5162913 5162908 -
ccccattttacctgtcctaaaa

SEQ ID NO: 154372 - DNA, 22 bp, Artificial Sequence
  Synthetic oligonucleotide; TTT chr11 5162900 5162921 5162905 5162900 -
tacctgtcctaaaaccagacaa

SEQ ID NO: 154373 - DNA, 22 bp, Artificial Sequence
  Synthetic oligonucleotide; TTT chr11 5162899 5162920 5162904 5162899 -
acctgtcctaaaaccagacaag

SEQ ID NO: 154374 - DNA, 22 bp, Artificial Sequence
  Synthetic oligonucleotide; TTA chr11 5162898 5162919 5162903 5162898 -
cctgtcctaaaaccagacaagc

SEQ ID NO: 154375 - DNA, 22 bp, Artificial Sequence
  Synthetic oligonucleotide; CTG chr11 5162894 5162915 5162899 5162894 -
tcctaaaaccagacaagcctta

SEQ ID NO: 154376 - DNA, 22 bp, Artificial Sequence
  Synthetic oligonucleotide; CTA chr11 5162889 5162910 5162894 5162889 -
aaaccagacaagccttacaggt

SEQ ID NO: 154377 - DNA, 22 bp, Artificial Sequence
  Synthetic oligonucleotide; CTT chr11 5162873 5162894 5162878 5162873 -
acaggttagttcagaatctgca

SEQ ID NO: 154378 - DNA, 22 bp, Artificial Sequence
  Synthetic oligonucleotide; TTA chr11 5162872 5162893 5162877 5162872 -
caggttagttcagaatctgcat

SEQ ID NO: 154379 - DNA, 22 bp, Artificial Sequence
  Synthetic oligonucleotide; TTA chr11 5162865 5162886 5162870 5162865 -
gttcagaatctgcatcttatca

SEQ ID NO: 154380 - DNA, 22 bp, Artificial Sequence
  Synthetic oligonucleotide; TTC chr11 5162861 5162882 5162866 5162861 -
agaatctgcatcttatcaacca

SEQ ID NO: 154381 - DNA, 22 bp, Artificial Sequence
  Synthetic oligonucleotide; CTG chr11 5162853 5162874 5162858 5162853 -
catcttatcaaccaaattgttt

SEQ ID NO: 154382 - DNA, 22 bp, Artificial Sequence
  Synthetic oligonucleotide; CTT chr11 5162847 5162868 5162852 5162847 -
atcaaccaaattgttttgccta

SEQ ID NO: 154383 - DNA, 22 bp, Artificial Sequence
  Synthetic oligonucleotide; TTA chr11 5162846 5162867 5162851 5162846 -
tcaaccaaattgttttgcctat

SEQ ID NO: 154384 - DNA, 22 bp, Artificial Sequence
  Synthetic oligonucleotide; TTG chr11 5162834 5162855 5162839 5162834 -
ttttgcctatccaccccatggt

SEQ ID NO: 154385 - DNA, 22 bp, Artificial Sequence
  Synthetic oligonucleotide; TTT chr11 5162831 5162852 5162836 5162831 -
tgcctatccaccccatggtgcc

SEQ ID NO: 154386 - DNA, 22 bp, Artificial Sequence
  Synthetic oligonucleotide; TTT chr11 5162830 5162851 5162835 5162830 -
gcctatccaccccatggtgcca

SEQ ID NO: 154387 - DNA, 22 bp, Artificial Sequence
  Synthetic oligonucleotide; TTG chr11 5162829 5162850 5162834 5162829 -
cctatccaccccatggtgccaa

SEQ ID NO: 154388 - DNA, 22 bp, Artificial Sequence
  Synthetic oligonucleotide; CTA chr11 5162825 5162846 5162830 5162825 -
tccaccccatggtgccaaaccc

SEQ ID NO: 154389 - DNA, 22 bp, Artificial Sequence
  Synthetic oligonucleotide; CTC chr11 5162795 5162816 5162800 5162795 -
tcctatcctcaatacctccatc

SEQ ID NO: 154390 - DNA, 22 bp, Artificial Sequence
  Synthetic oligonucleotide; CTC chr11 5162793 5162814 5162798 5162793 -
ctatcctcaatacctccatcta

SEQ ID NO: 154391 - DNA, 22 bp, Artificial Sequence
  Synthetic oligonucleotide; CTA chr11 5162790 5162811 5162795 5162790 -
tcctcaatacctccatctataa

SEQ ID NO: 154392 - DNA, 22 bp, Artificial Sequence
  Synthetic oligonucleotide; CTC chr11 5162785 5162806 5162790 5162785 -
aatacctccatctataacccat

SEQ ID NO: 154393 - DNA, 22 bp, Artificial Sequence
  Synthetic oligonucleotide; CTC chr11 5162777 5162798 5162782 5162777 -
catctataacccattattctgt

SEQ ID NO: 154394 - DNA, 22 bp, Artificial Sequence
  Synthetic oligonucleotide; CTA chr11 5162771 5162792 5162776 5162771 -
taacccattattctgttctgga

SEQ ID NO: 154395 - DNA, 22 bp, Artificial Sequence
  Synthetic oligonucleotide; TTA chr11 5162761 5162782 5162766 5162761 -
ttctgttctggatctcaaacat

SEQ ID NO: 154396 - DNA, 22 bp, Artificial Sequence
  Synthetic oligonucleotide; TTC chr11 5162758 5162779 5162763 5162758 -
tgttctggatctcaaacatgct

SEQ ID NO: 154397 - DNA, 22 bp, Artificial Sequence
  Synthetic oligonucleotide; CTG chr11 5162756 5162777 5162761 5162756 -
ttctggatctcaaacatgcttt

SEQ ID NO: 154398 - DNA, 22 bp, Artificial Sequence
  Synthetic oligonucleotide; TTC chr11 5162753 5162774 5162758 5162753 -
tggatctcaaacatgctttctt

SEQ ID NO: 154399 - DNA, 22 bp, Artificial Sequence
  Synthetic oligonucleotide; CTG chr11 5162751 5162772 5162756 5162751 -
gatctcaaacatgctttcttta

SEQ ID NO: 154400 - DNA, 22 bp, Artificial Sequence
  Synthetic oligonucleotide; CTC chr11 5162745 5162766 5162750 5162745 -
aaacatgctttctttactattc

SEQ ID NO: 154401 - DNA, 22 bp, Artificial Sequence
  Synthetic oligonucleotide; CTT chr11 5162735 5162756 5162740 5162735 -
tctttactattcctttgcaccc

SEQ ID NO: 154402 - DNA, 22 bp, Artificial Sequence
  Synthetic oligonucleotide; TTT chr11 5162734 5162755 5162739 5162734 -
ctttactattcctttgcaccct

SEQ ID NO: 154403 - DNA, 22 bp, Artificial Sequence
  Synthetic oligonucleotide; TTC chr11 5162733 5162754 5162738 5162733 -
tttactattcctttgcaccctt

SEQ ID NO: 154404 - DNA, 22 bp, Artificial Sequence
  Synthetic oligonucleotide; CTT chr11 5162731 5162752 5162736 5162731 -
tactattcctttgcacccttca

SEQ ID NO: 154405 - DNA, 22 bp, Artificial Sequence
  Synthetic oligonucleotide; TTT chr11 5162730 5162751 5162735 5162730 -
actattcctttgcacccttcat

SEQ ID NO: 154406 - DNA, 22 bp, Artificial Sequence
  Synthetic oligonucleotide; TTA chr11 5162729 5162750 5162734 5162729 -
ctattcctttgcacccttcatt

SEQ ID NO: 154407 - DNA, 22 bp, Artificial Sequence
  Synthetic oligonucleotide; CTA chr11 5162726 5162747 5162731 5162726 -
ttcctttgcacccttcattcca

SEQ ID NO: 154408 - DNA, 22 bp, Artificial Sequence
  Synthetic oligonucleotide; TTC chr11 5162723 5162744 5162728 5162723 -
ctttgcacccttcattccagcc

SEQ ID NO: 154409 - DNA, 22 bp, Artificial Sequence
  Synthetic oligonucleotide; CTT chr11 5162720 5162741 5162725 5162720 -
tgcacccttcattccagcctct

SEQ ID NO: 154410 - DNA, 22 bp, Artificial Sequence
  Synthetic oligonucleotide; TTT chr11 5162719 5162740 5162724 5162719 -
gcacccttcattccagcctctc

SEQ ID NO: 154411 - DNA, 22 bp, Artificial Sequence
  Synthetic oligonucleotide; TTG chr11 5162718 5162739 5162723 5162718 -
cacccttcattccagcctctct

SEQ ID NO: 154412 - DNA, 22 bp, Artificial Sequence
  Synthetic oligonucleotide; CTT chr11 5162711 5162732 5162716 5162711 -
cattccagcctctcttcgcttt

SEQ ID NO: 154413 - DNA, 22 bp, Artificial Sequence
  Synthetic oligonucleotide; TTC chr11 5162710 5162731 5162715 5162710 -
attccagcctctcttcgctttc

SEQ ID NO: 154414 - DNA, 22 bp, Artificial Sequence
  Synthetic oligonucleotide; TTC chr11 5162706 5162727 5162711 5162706 -
cagcctctcttcgctttcactt

SEQ ID NO: 154415 - DNA, 22 bp, Artificial Sequence
  Synthetic oligonucleotide; CTC chr11 5162699 5162720 5162704 5162699 -
tcttcgctttcacttggactga

SEQ ID NO: 154416 - DNA, 22 bp, Artificial Sequence
  Synthetic oligonucleotide; CTC chr11 5162697 5162718 5162702 5162697 -
ttcgctttcacttggactgaca

SEQ ID NO: 154417 - DNA, 22 bp, Artificial Sequence
  Synthetic oligonucleotide; CTT chr11 5162695 5162716 5162700 5162695 -
cgctttcacttggactgacact

SEQ ID NO: 154418 - DNA, 22 bp, Artificial Sequence
  Synthetic oligonucleotide; TTC chr11 5162694 5162715 5162699 5162694 -
gctttcacttggactgacactg

SEQ ID NO: 154419 - DNA, 22 bp, Artificial Sequence
  Synthetic oligonucleotide; CTT chr11 5162690 5162711 5162695 5162690 -
tcacttggactgacactgacac

SEQ ID NO: 154420 - DNA, 22 bp, Artificial Sequence
  Synthetic oligonucleotide; TTT chr11 5162689 5162710 5162694 5162689 -
cacttggactgacactgacacc

SEQ ID NO: 154421 - DNA, 22 bp, Artificial Sequence
  Synthetic oligonucleotide; TTC chr11 5162688 5162709 5162693 5162688 -
acttggactgacactgacaccc

SEQ ID NO: 154422 - DNA, 22 bp, Artificial Sequence
  Synthetic oligonucleotide; CTT chr11 5162684 5162705 5162689 5162684 -
ggactgacactgacacccatta

SEQ ID NO: 154423 - DNA, 22 bp, Artificial Sequence
  Synthetic oligonucleotide; TTG chr11 5162683 5162704 5162688 5162683 -
gactgacactgacacccattag

SEQ ID NO: 154424 - DNA, 22 bp, Artificial Sequence
  Synthetic oligonucleotide; CTG chr11 5162678 5162699 5162683 5162678 -
acactgacacccattaggctca

SEQ ID NO: 154425 - DNA, 22 bp, Artificial Sequence
  Synthetic oligonucleotide; CTG chr11 5162672 5162693 5162677 5162672 -
acacccattaggctcagcaaat

SEQ ID NO: 154426 - DNA, 22 bp, Artificial Sequence
  Synthetic oligonucleotide; TTA chr11 5162662 5162683 5162667 5162662 -
ggctcagcaaattacctgggct

SEQ ID NO: 154427 - DNA, 22 bp, Artificial Sequence
  Synthetic oligonucleotide; CTC chr11 5162657 5162678 5162662 5162657 -
agcaaattacctgggctgtact

SEQ ID NO: 154428 - DNA, 22 bp, Artificial Sequence
  Synthetic oligonucleotide; TTA chr11 5162648 5162669 5162653 5162648 -
cctgggctgtactgctgcaagg

SEQ ID NO: 154429 - DNA, 22 bp, Artificial Sequence
  Synthetic oligonucleotide; CTG chr11 5162644 5162665 5162649 5162644 -
ggctgtactgctgcaaggcttc

SEQ ID NO: 154430 - DNA, 22 bp, Artificial Sequence
  Synthetic oligonucleotide; CTG chr11 5162639 5162660 5162644 5162639 -
tactgctgcaaggcttcacaga

SEQ ID NO: 154431 - DNA, 22 bp, Artificial Sequence
  Synthetic oligonucleotide; CTG chr11 5162634 5162655 5162639 5162634 -
ctgcaaggcttcacagacagac

SEQ ID NO: 154432 - DNA, 22 bp, Artificial Sequence
  Synthetic oligonucleotide; CTG chr11 5162631 5162652 5162636 5162631 -
caaggcttcacagacagacccc

SEQ ID NO: 154433 - DNA, 22 bp, Artificial Sequence
  Synthetic oligonucleotide; CTT chr11 5162623 5162644 5162628 5162623 -
cacagacagaccccattacttc

SEQ ID NO: 154434 - DNA, 22 bp, Artificial Sequence
  Synthetic oligonucleotide; TTC chr11 5162622 5162643 5162627 5162622 -
acagacagaccccattacttca

SEQ ID NO: 154435 - DNA, 22 bp, Artificial Sequence
  Synthetic oligonucleotide; TTA chr11 5162605 5162626 5162610 5162605 -
cttcagtcaagcccaaatttca

SEQ ID NO: 154436 - DNA, 22 bp, Artificial Sequence
  Synthetic oligonucleotide; CTT chr11 5162602 5162623 5162607 5162602 -
cagtcaagcccaaatttcatcc

SEQ ID NO: 154437 - DNA, 22 bp, Artificial Sequence
  Synthetic oligonucleotide; TTC chr11 5162601 5162622 5162606 5162601 -
agtcaagcccaaatttcatcct

SEQ ID NO: 154438 - DNA, 22 bp, Artificial Sequence
  Synthetic oligonucleotide; TTT chr11 5162585 5162606 5162590 5162585 -
catcctcatgtgttacctatct

SEQ ID NO: 154439 - DNA, 22 bp, Artificial Sequence
  Synthetic oligonucleotide; TTC chr11 5162584 5162605 5162589 5162584 -
atcctcatgtgttacctatctc

SEQ ID NO: 154440 - DNA, 22 bp, Artificial Sequence
  Synthetic oligonucleotide; CTC chr11 5162578 5162599 5162583 5162578 -
atgtgttacctatctcggcata

SEQ ID NO: 154441 - DNA, 22 bp, Artificial Sequence
  Synthetic oligonucleotide; TTA chr11 5162570 5162591 5162575 5162570 -
cctatctcggcataattctcat

SEQ ID NO: 154442 - DNA, 22 bp, Artificial Sequence
  Synthetic oligonucleotide; CTA chr11 5162566 5162587 5162571 5162566 -
tctcggcataattctcataaaa

SEQ ID NO: 154443 - DNA, 22 bp, Artificial Sequence
  Synthetic oligonucleotide; CTC chr11 5162562 5162583 5162567 5162562 -
ggcataattctcataaaaacac

SEQ ID NO: 154444 - DNA, 22 bp, Artificial Sequence
  Synthetic oligonucleotide; TTC chr11 5162552 5162573 5162557 5162552 -
tcataaaaacacacgtgctctc

SEQ ID NO: 154445 - DNA, 22 bp, Artificial Sequence
  Synthetic oligonucleotide; CTC chr11 5162550 5162571 5162555 5162550 -
ataaaaacacacgtgctctccc

SEQ ID NO: 154446 - DNA, 22 bp, Artificial Sequence
  Synthetic oligonucleotide; CTC chr11 5162532 5162553 5162537 5162532 -
tccctgctgattgtgtccgatt

SEQ ID NO: 154447 - DNA, 22 bp, Artificial Sequence
  Synthetic oligonucleotide; CTC chr11 5162530 5162551 5162535 5162530 -
cctgctgattgtgtccgattaa

SEQ ID NO: 154448 - DNA, 22 bp, Artificial Sequence
  Synthetic oligonucleotide; CTG chr11 5162526 5162547 5162531 5162526 -
ctgattgtgtccgattaatctc

SEQ ID NO: 154449 - DNA, 22 bp, Artificial Sequence
  Synthetic oligonucleotide; CTG chr11 5162523 5162544 5162528 5162523 -
attgtgtccgattaatctccca

SEQ ID NO: 154450 - DNA, 22 bp, Artificial Sequence
  Synthetic oligonucleotide; TTG chr11 5162519 5162540 5162524 5162519 -
tgtccgattaatctcccaaacc

SEQ ID NO: 154451 - DNA, 22 bp, Artificial Sequence
  Synthetic oligonucleotide; TTA chr11 5162509 5162530 5162514 5162509 -
atctcccaaacctcaatccctt

SEQ ID NO: 154452 - DNA, 22 bp, Artificial Sequence
  Synthetic oligonucleotide; CTC chr11 5162504 5162525 5162509 5162504 -
ccaaacctcaatcccttctaca

SEQ ID NO: 154453 - DNA, 22 bp, Artificial Sequence
  Synthetic oligonucleotide; CTC chr11 5162495 5162516 5162500 5162495 -
aatcccttctacaaaacaacaa

SEQ ID NO: 154454 - DNA, 22 bp, Artificial Sequence
  Synthetic oligonucleotide; CTT chr11 5162487 5162508 5162492 5162487 -
ctacaaaacaacaactcctttc

SEQ ID NO: 154455 - DNA, 22 bp, Artificial Sequence
  Synthetic oligonucleotide; TTC chr11 5162486 5162507 5162491 5162486 -
tacaaaacaacaactcctttcc

SEQ ID NO: 154456 - DNA, 22 bp, Artificial Sequence
  Synthetic oligonucleotide; CTA chr11 5162484 5162505 5162489 5162484 -
caaaacaacaactcctttcctt

SEQ ID NO: 154457 - DNA, 22 bp, Artificial Sequence
  Synthetic oligonucleotide; CTC chr11 5162470 5162491 5162475 5162470 -
ctttccttcctaggcatagtta

SEQ ID NO: 154458 - DNA, 22 bp, Artificial Sequence
  Synthetic oligonucleotide; CTT chr11 5162467 5162488 5162472 5162467 -
tccttcctaggcatagttagtg

SEQ ID NO: 154459 - DNA, 22 bp, Artificial Sequence
  Synthetic oligonucleotide; TTT chr11 5162466 5162487 5162471 5162466 -
ccttcctaggcatagttagtgc

SEQ ID NO: 154460 - DNA, 22 bp, Artificial Sequence
  Synthetic oligonucleotide; TTC chr11 5162465 5162486 5162470 5162465 -
cttcctaggcatagttagtgcg

SEQ ID NO: 154461 - DNA, 22 bp, Artificial Sequence
  Synthetic oligonucleotide; CTT chr11 5162462 5162483 5162467 5162462 -
cctaggcatagttagtgcggtc

SEQ ID NO: 154462 - DNA, 22 bp, Artificial Sequence
  Synthetic oligonucleotide; TTC chr11 5162461 5162482 5162466 5162461 -
ctaggcatagttagtgcggtca

SEQ ID NO: 154463 - DNA, 22 bp, Artificial Sequence
  Synthetic oligonucleotide; CTA chr11 5162458 5162479 5162463 5162458 -
ggcatagttagtgcggtcagaa

SEQ ID NO: 154464 - DNA, 22 bp, Artificial Sequence
  Synthetic oligonucleotide; TTA chr11 5162448 5162469 5162453 5162448 -
gtgcggtcagaattcttacaca

SEQ ID NO: 154465 - DNA, 22 bp, Artificial Sequence
  Synthetic oligonucleotide; TTC chr11 5162433 5162454 5162438 5162433 -
ttacacaagatccaggactgca

SEQ ID NO: 154466 - DNA, 22 bp, Artificial Sequence
  Synthetic oligonucleotide; CTT chr11 5162431 5162452 5162436 5162431 -
acacaagatccaggactgcacc

SEQ ID NO: 154467 - DNA, 22 bp, Artificial Sequence
  Synthetic oligonucleotide; TTA chr11 5162430 5162451 5162435 5162430 -
cacaagatccaggactgcaccc

SEQ ID NO: 154468 - DNA, 22 bp, Artificial Sequence
  Synthetic oligonucleotide; CTG chr11 5162413 5162434 5162418 5162413 -
caccctgtagcctttctgtcca

SEQ ID NO: 154469 - DNA, 22 bp, Artificial Sequence
  Synthetic oligonucleotide; CTG chr11 5162406 5162427 5162411 5162406 -
tagcctttctgtccaaataact

SEQ ID NO: 154470 - DNA, 22 bp, Artificial Sequence
  Synthetic oligonucleotide; CTT chr11 5162399 5162420 5162404 5162399 -
tctgtccaaataacttgacctt

SEQ ID NO: 154471 - DNA, 22 bp, Artificial Sequence
  Synthetic oligonucleotide; TTT chr11 5162398 5162419 5162403 5162398 -
ctgtccaaataacttgacctta

SEQ ID NO: 154472 - DNA, 22 bp, Artificial Sequence
  Synthetic oligonucleotide; TTC chr11 5162397 5162418 5162402 5162397 -
tgtccaaataacttgaccttac

SEQ ID NO: 154473 - DNA, 22 bp, Artificial Sequence
  Synthetic oligonucleotide; CTG chr11 5162395 5162416 5162400 5162395 -
tccaaataacttgaccttactg

SEQ ID NO: 154474 - DNA, 22 bp, Artificial Sequence
  Synthetic oligonucleotide; CTT chr11 5162383 5162404 5162388 5162383 -
gaccttactgttttagcctagc

SEQ ID NO: 154475 - DNA, 22 bp, Artificial Sequence
  Synthetic oligonucleotide; TTG chr11 5162382 5162403 5162387 5162382 -
accttactgttttagcctagcc

SEQ ID NO: 154476 - DNA, 22 bp, Artificial Sequence
  Synthetic oligonucleotide; CTT chr11 5162377 5162398 5162382 5162377 -
actgttttagcctagccctcag

SEQ ID NO: 154477 - DNA, 22 bp, Artificial Sequence
  Synthetic oligonucleotide; TTA chr11 5162376 5162397 5162381 5162376 -
ctgttttagcctagccctcagg

SEQ ID NO: 154478 - DNA, 22 bp, Artificial Sequence
  Synthetic oligonucleotide; CTG chr11 5162373 5162394 5162378 5162373 -
ttttagcctagccctcaggtct

SEQ ID NO: 154479 - DNA, 22 bp, Artificial Sequence
  Synthetic oligonucleotide; TTT chr11 5162370 5162391 5162375 5162370 -
tagcctagccctcaggtctgca

SEQ ID NO: 154480 - DNA, 22 bp, Artificial Sequence
  Synthetic oligonucleotide; TTT chr11 5162369 5162390 5162374 5162369 -
agcctagccctcaggtctgcat

SEQ ID NO: 154481 - DNA, 22 bp, Artificial Sequence
  Synthetic oligonucleotide; TTA chr11 5162368 5162389 5162373 5162368 -
gcctagccctcaggtctgcatg

SEQ ID NO: 154482 - DNA, 22 bp, Artificial Sequence
  Synthetic oligonucleotide; CTA chr11 5162363 5162384 5162368 5162363 -
gccctcaggtctgcatgcagtg

SEQ ID NO: 154483 - DNA, 22 bp, Artificial Sequence
  Synthetic oligonucleotide; CTC chr11 5162357 5162378 5162362 5162357 -
aggtctgcatgcagtggctgcc

SEQ ID NO: 154484 - DNA, 22 bp, Artificial Sequence
  Synthetic oligonucleotide; CTG chr11 5162350 5162371 5162355 5162350 -
catgcagtggctgccgctgctt

SEQ ID NO: 154485 - DNA, 22 bp, Artificial Sequence
  Synthetic oligonucleotide; CTG chr11 5162337 5162358 5162342 5162337 -
ccgctgctttaatacttttaga

SEQ ID NO: 154486 - DNA, 22 bp, Artificial Sequence
  Synthetic oligonucleotide; CTG chr11 5162331 5162352 5162336 5162331 -
ctttaatacttttagaggccct

SEQ ID NO: 154487 - DNA, 22 bp, Artificial Sequence
  Synthetic oligonucleotide; CTT chr11 5162328 5162349 5162333 5162328 -
taatacttttagaggccctaaa

SEQ ID NO: 154488 - DNA, 22 bp, Artificial Sequence
  Synthetic oligonucleotide; TTT chr11 5162327 5162348 5162332 5162327 -
aatacttttagaggccctaaaa

SEQ ID NO: 154489 - DNA, 22 bp, Artificial Sequence
  Synthetic oligonucleotide; TTA chr11 5162326 5162347 5162331 5162326 -
atacttttagaggccctaaaaa

SEQ ID NO: 154490 - DNA, 22 bp, Artificial Sequence
  Synthetic oligonucleotide; CTT chr11 5162320 5162341 5162325 5162320 -
ttagaggccctaaaaatcacaa

SEQ ID NO: 154491 - DNA, 22 bp, Artificial Sequence
  Synthetic oligonucleotide; TTT chr11 5162319 5162340 5162324 5162319 -
tagaggccctaaaaatcacaaa

SEQ ID NO: 154492 - DNA, 22 bp, Artificial Sequence
  Synthetic oligonucleotide; TTT chr11 5162318 5162339 5162323 5162318 -
agaggccctaaaaatcacaaac

SEQ ID NO: 154493 - DNA, 22 bp, Artificial Sequence
  Synthetic oligonucleotide; TTA chr11 5162317 5162338 5162322 5162317 -
gaggccctaaaaatcacaaact

SEQ ID NO: 154494 - DNA, 22 bp, Artificial Sequence
  Synthetic oligonucleotide; CTA chr11 5162308 5162329 5162313 5162308 -
aaaatcacaaactatgcttagc

SEQ ID NO: 154495 - DNA, 22 bp, Artificial Sequence
  Synthetic oligonucleotide; CTA chr11 5162294 5162315 5162299 5162294 -
tgcttagctcactcttcacatt

SEQ ID NO: 154496 - DNA, 22 bp, Artificial Sequence
  Synthetic oligonucleotide; CTT chr11 5162289 5162310 5162294 5162289 -
agctcactcttcacatttctca

SEQ ID NO: 154497 - DNA, 22 bp, Artificial Sequence
  Synthetic oligonucleotide; TTA chr11 5162288 5162309 5162293 5162288 -
gctcactcttcacatttctcat

SEQ ID NO: 154498 - DNA, 22 bp, Artificial Sequence
  Synthetic oligonucleotide; CTC chr11 5162284 5162305 5162289 5162284 -
actcttcacatttctcataact

SEQ ID NO: 154499 - DNA, 22 bp, Artificial Sequence
  Synthetic oligonucleotide; CTC chr11 5162280 5162301 5162285 5162280 -
ttcacatttctcataacttcta

SEQ ID NO: 154500 - DNA, 22 bp, Artificial Sequence
  Synthetic oligonucleotide; CTT chr11 5162278 5162299 5162283 5162278 -
cacatttctcataacttctaaa

SEQ ID NO: 154501 - DNA, 22 bp, Artificial Sequence
  Synthetic oligonucleotide; TTC chr11 5162277 5162298 5162282 5162277 -
acatttctcataacttctaaaa

SEQ ID NO: 154502 - DNA, 22 bp, Artificial Sequence
  Synthetic oligonucleotide; TTT chr11 5162271 5162292 5162276 5162271 -
ctcataacttctaaaatctatt

SEQ ID NO: 154503 - DNA, 22 bp, Artificial Sequence
  Synthetic oligonucleotide; TTC chr11 5162270 5162291 5162275 5162270 -
tcataacttctaaaatctattt

SEQ ID NO: 154504 - DNA, 22 bp, Artificial Sequence
  Synthetic oligonucleotide; CTC chr11 5162268 5162289 5162273 5162268 -
ataacttctaaaatctattttc

SEQ ID NO: 154505 - DNA, 22 bp, Artificial Sequence
  Synthetic oligonucleotide; CTT chr11 5162261 5162282 5162266 5162261 -
ctaaaatctattttcttcctca

SEQ ID NO: 154506 - DNA, 22 bp, Artificial Sequence
  Synthetic oligonucleotide; TTC chr11 5162260 5162281 5162265 5162260 -
taaaatctattttcttcctcat

SEQ ID NO: 154507 - DNA, 22 bp, Artificial Sequence
  Synthetic oligonucleotide; CTA chr11 5162258 5162279 5162263 5162258 -
aaatctattttcttcctcatac

SEQ ID NO: 154508 - DNA, 22 bp, Artificial Sequence
  Synthetic oligonucleotide; CTA chr11 5162251 5162272 5162256 5162251 -
ttttcttcctcatacctgatgc

SEQ ID NO: 154509 - DNA, 22 bp, Artificial Sequence
  Synthetic oligonucleotide; TTT chr11 5162248 5162269 5162253 5162248 -
tcttcctcatacctgatgcata

SEQ ID NO: 154510 - DNA, 22 bp, Artificial Sequence
  Synthetic oligonucleotide; TTT chr11 5162247 5162268 5162252 5162247 -
cttcctcatacctgatgcatat

SEQ ID NO: 154511 - DNA, 22 bp, Artificial Sequence
  Synthetic oligonucleotide; TTC chr11 5162246 5162267 5162251 5162246 -
ttcctcatacctgatgcatata

SEQ ID NO: 154512 - DNA, 22 bp, Artificial Sequence
  Synthetic oligonucleotide; CTT chr11 5162244 5162265 5162249 5162244 -
cctcatacctgatgcatatact

SEQ ID NO: 154513 - DNA, 22 bp, Artificial Sequence
  Synthetic oligonucleotide; TTC chr11 5162243 5162264 5162248 5162243 -
ctcatacctgatgcatatactt

SEQ ID NO: 154514 - DNA, 22 bp, Artificial Sequence
  Synthetic oligonucleotide; CTC chr11 5162240 5162261 5162245 5162240 -
atacctgatgcatatactttct

SEQ ID NO: 154515 - DNA, 22 bp, Artificial Sequence
  Synthetic oligonucleotide; CTG chr11 5162233 5162254 5162238 5162233 -
atgcatatactttctgatcccc

SEQ ID NO: 154516 - DNA, 22 bp, Artificial Sequence
  Synthetic oligonucleotide; CTT chr11 5162221 5162242 5162226 5162221 -
tctgatccccggctccttcagc

SEQ ID NO: 154517 - DNA, 22 bp, Artificial Sequence
  Synthetic oligonucleotide; TTT chr11 5162220 5162241 5162225 5162220 -
ctgatccccggctccttcagct

SEQ ID NO: 154518 - DNA, 22 bp, Artificial Sequence
  Synthetic oligonucleotide; TTC chr11 5162219 5162240 5162224 5162219 -
tgatccccggctccttcagctg

SEQ ID NO: 154519 - DNA, 22 bp, Artificial Sequence
  Synthetic oligonucleotide; CTG chr11 5162217 5162238 5162222 5162217 -
atccccggctccttcagctgta

SEQ ID NO: 154520 - DNA, 22 bp, Artificial Sequence
  Synthetic oligonucleotide; CTC chr11 5162206 5162227 5162211 5162206 -
cttcagctgtactcactctttg

SEQ ID NO: 154521 - DNA, 22 bp, Artificial Sequence
  Synthetic oligonucleotide; CTT chr11 5162203 5162224 5162208 5162203 -
cagctgtactcactctttgtta

SEQ ID NO: 154522 - DNA, 22 bp, Artificial Sequence
  Synthetic oligonucleotide; TTC chr11 5162202 5162223 5162207 5162202 -
agctgtactcactctttgttaa

SEQ ID NO: 154523 - DNA, 22 bp, Artificial Sequence
  Synthetic oligonucleotide; CTG chr11 5162197 5162218 5162202 5162197 -
tactcactctttgttaagtccc

SEQ ID NO: 154524 - DNA, 22 bp, Artificial Sequence
  Synthetic oligonucleotide; CTC chr11 5162192 5162213 5162197 5162192 -
actctttgttaagtcccacaat

SEQ ID NO: 154525 - DNA, 22 bp, Artificial Sequence
  Synthetic oligonucleotide; CTC chr11 5162188 5162209 5162193 5162188 -
tttgttaagtcccacaattacc

SEQ ID NO: 154526 - DNA, 22 bp, Artificial Sequence
  Synthetic oligonucleotide; CTT chr11 5162186 5162207 5162191 5162186 -
tgttaagtcccacaattaccat

SEQ ID NO: 154527 - DNA, 22 bp, Artificial Sequence
  Synthetic oligonucleotide; TTT chr11 5162185 5162206 5162190 5162185 -
gttaagtcccacaattaccatt

SEQ ID NO: 154528 - DNA, 22 bp, Artificial Sequence
  Synthetic oligonucleotide; TTG chr11 5162184 5162205 5162189 5162184 -
ttaagtcccacaattaccattg

SEQ ID NO: 154529 - DNA, 22 bp, Artificial Sequence
  Synthetic oligonucleotide; TTA chr11 5162181 5162202 5162186 5162181 -
agtcccacaattaccattggtc

SEQ ID NO: 154530 - DNA, 22 bp, Artificial Sequence
  Synthetic oligonucleotide; TTA chr11 5162168 5162189 5162173 5162168 -
ccattggtcctggcccggactt

SEQ ID NO: 154531 - DNA, 22 bp, Artificial Sequence
  Synthetic oligonucleotide; TTG chr11 5162162 5162183 5162167 5162162 -
gtcctggcccggacttcaatcc

SEQ ID NO: 154532 - DNA, 22 bp, Artificial Sequence
  Synthetic oligonucleotide; CTG chr11 5162156 5162177 5162161 5162156 -
gcccggacttcaatccggcctc

SEQ ID NO: 154533 - DNA, 22 bp, Artificial Sequence
  Synthetic oligonucleotide; CTT chr11 5162146 5162167 5162151 5162146 -
caatccggcctcccacattatt

SEQ ID NO: 154534 - DNA, 22 bp, Artificial Sequence
  Synthetic oligonucleotide; TTC chr11 5162145 5162166 5162150 5162145 -
aatccggcctcccacattattc

SEQ ID NO: 154535 - DNA, 22 bp, Artificial Sequence
  Synthetic oligonucleotide; CTC chr11 5162134 5162155 5162139 5162134 -
ccacattattcctgataccaca

SEQ ID NO: 154536 - DNA, 22 bp, Artificial Sequence
  Synthetic oligonucleotide; TTA chr11 5162126 5162147 5162131 5162126 -
ttcctgataccacacctgaccc

SEQ ID NO: 154537 - DNA, 22 bp, Artificial Sequence
  Synthetic oligonucleotide; TTC chr11 5162123 5162144 5162128 5162123 -
ctgataccacacctgaccccca

SEQ ID NO: 154538 - DNA, 22 bp, Artificial Sequence
  Synthetic oligonucleotide; CTG chr11 5162120 5162141 5162125 5162120 -
ataccacacctgacccccatga

SEQ ID NO: 154539 - DNA, 22 bp, Artificial Sequence
  Synthetic oligonucleotide; CTG chr11 5162108 5162129 5162113 5162108 -
acccccatgattgtatctctct

SEQ ID NO: 154540 - DNA, 22 bp, Artificial Sequence
  Synthetic oligonucleotide; TTG chr11 5162095 5162116 5162100 5162095 -
tatctctctgatccacctgaca

SEQ ID NO: 154541 - DNA, 22 bp, Artificial Sequence
  Synthetic oligonucleotide; CTC chr11 5162089 5162110 5162094 5162089 -
tctgatccacctgacattcacc

SEQ ID NO: 154542 - DNA, 22 bp, Artificial Sequence
  Synthetic oligonucleotide; CTC chr11 5162087 5162108 5162092 5162087 -
tgatccacctgacattcacccc

SEQ ID NO: 154543 - DNA, 22 bp, Artificial Sequence
  Synthetic oligonucleotide; CTG chr11 5162085 5162106 5162090 5162085 -
atccacctgacattcaccccat

SEQ ID NO: 154544 - DNA, 22 bp, Artificial Sequence
  Synthetic oligonucleotide; CTG chr11 5162076 5162097 5162081 5162076 -
acattcaccccatttccccata

SEQ ID NO: 154545 - DNA, 22 bp, Artificial Sequence
  Synthetic oligonucleotide; TTC chr11 5162070 5162091 5162075 5162070 -
accccatttccccatatttcct

SEQ ID NO: 154546 - DNA, 22 bp, Artificial Sequence
  Synthetic oligonucleotide; TTT chr11 5162061 5162082 5162066 5162061 -
ccccatatttccttctttcctt

SEQ ID NO: 154547 - DNA, 22 bp, Artificial Sequence
  Synthetic oligonucleotide; TTC chr11 5162060 5162081 5162065 5162060 -
cccatatttccttctttccttc

SEQ ID NO: 154548 - DNA, 22 bp, Artificial Sequence
  Synthetic oligonucleotide; TTT chr11 5162051 5162072 5162056 5162051 -
ccttctttccttctttcctgtt

SEQ ID NO: 154549 - DNA, 22 bp, Artificial Sequence
  Synthetic oligonucleotide; TTC chr11 5162050 5162071 5162055 5162050 -
cttctttccttctttcctgttc

SEQ ID NO: 154550 - DNA, 22 bp, Artificial Sequence
  Synthetic oligonucleotide; CTT chr11 5162047 5162068 5162052 5162047 -
ctttccttctttcctgttcctc

SEQ ID NO: 154551 - DNA, 22 bp, Artificial Sequence
  Synthetic oligonucleotide; TTC chr11 5162046 5162067 5162051 5162046 -
tttccttctttcctgttcctca

SEQ ID NO: 154552 - DNA, 22 bp, Artificial Sequence
  Synthetic oligonucleotide; CTT chr11 5162044 5162065 5162049 5162044 -
tccttctttcctgttcctcacc

SEQ ID NO: 154553 - DNA, 22 bp, Artificial Sequence
  Synthetic oligonucleotide; TTT chr11 5162043 5162064 5162048 5162043 -
ccttctttcctgttcctcaccc

SEQ ID NO: 154554 - DNA, 22 bp, Artificial Sequence
  Synthetic oligonucleotide; TTC chr11 5162042 5162063 5162047 5162042 -
cttctttcctgttcctcaccct

SEQ ID NO: 154555 - DNA, 22 bp, Artificial Sequence
  Synthetic oligonucleotide; CTT chr11 5162039 5162060 5162044 5162039 -
ctttcctgttcctcaccctgat

SEQ ID NO: 154556 - DNA, 22 bp, Artificial Sequence
  Synthetic oligonucleotide; TTC chr11 5162038 5162059 5162043 5162038 -
tttcctgttcctcaccctgatc

SEQ ID NO: 154557 - DNA, 22 bp, Artificial Sequence
  Synthetic oligonucleotide; CTT chr11 5162036 5162057 5162041 5162036 -
tcctgttcctcaccctgatcac

SEQ ID NO: 154558 - DNA, 22 bp, Artificial Sequence
  Synthetic oligonucleotide; TTT chr11 5162035 5162056 5162040 5162035 -
cctgttcctcaccctgatcaca

SEQ ID NO: 154559 - DNA, 22 bp, Artificial Sequence
  Synthetic oligonucleotide; TTC chr11 5162034 5162055 5162039 5162034 -
ctgttcctcaccctgatcacac

SEQ ID NO: 154560 - DNA, 22 bp, Artificial Sequence
  Synthetic oligonucleotide; CTG chr11 5162031 5162052 5162036 5162031 -
ttcctcaccctgatcacacttg

SEQ ID NO: 154561 - DNA, 22 bp, Artificial Sequence
  Synthetic oligonucleotide; TTC chr11 5162028 5162049 5162033 5162028 -
ctcaccctgatcacacttgatt

SEQ ID NO: 154562 - DNA, 22 bp, Artificial Sequence
  Synthetic oligonucleotide; CTC chr11 5162025 5162046 5162030 5162025 -
accctgatcacacttgatttat

SEQ ID NO: 154563 - DNA, 22 bp, Artificial Sequence
  Synthetic oligonucleotide; CTG chr11 5162019 5162040 5162024 5162019 -
atcacacttgatttattgatgg

SEQ ID NO: 154564 - DNA, 22 bp, Artificial Sequence
  Synthetic oligonucleotide; CTT chr11 5162010 5162031 5162015 5162010 -
gatttattgatggccgttccac

SEQ ID NO: 154565 - DNA, 22 bp, Artificial Sequence
  Synthetic oligonucleotide; TTG chr11 5162009 5162030 5162014 5162009 -
atttattgatggccgttccacc

SEQ ID NO: 154566 - DNA, 22 bp, Artificial Sequence
  Synthetic oligonucleotide; TTT chr11 5162005 5162026 5162010 5162005 -
attgatggccgttccaccaggc

SEQ ID NO: 154567 - DNA, 22 bp, Artificial Sequence
  Synthetic oligonucleotide; TTA chr11 5162004 5162025 5162009 5162004 -
ttgatggccgttccaccaggcc

SEQ ID NO: 154568 - DNA, 22 bp, Artificial Sequence
  Synthetic oligonucleotide; TTG chr11 5162001 5162022 5162006 5162001 -
atggccgttccaccaggcctaa

SEQ ID NO: 154569 - DNA, 22 bp, Artificial Sequence
  Synthetic oligonucleotide; TTC chr11 5161991 5162012 5161996 5161991 -
caccaggcctaatagccacaca

SEQ ID NO: 154570 - DNA, 22 bp, Artificial Sequence
  Synthetic oligonucleotide; CTA chr11 5161980 5162001 5161985 5161980 -
atagccacacaccagcaaaggc

SEQ ID NO: 154571 - DNA, 22 bp, Artificial Sequence
  Synthetic oligonucleotide; CTA chr11 5161952 5161973 5161957 5161952 -
tgctatagtacaaaccactagc

SEQ ID NO: 154572 - DNA, 22 bp, Artificial Sequence
  Synthetic oligonucleotide; CTA chr11 5161947 5161968 5161952 5161947 -
tagtacaaaccactagcctgcc

SEQ ID NO: 154573 - DNA, 22 bp, Artificial Sequence
  Synthetic oligonucleotide; CTA chr11 5161932 5161953 5161937 5161932 -
gcctgcctcttcgaacctctca

SEQ ID NO: 154574 - DNA, 22 bp, Artificial Sequence
  Synthetic oligonucleotide; CTG chr11 5161927 5161948 5161932 5161927 -
cctcttcgaacctctcatttcc

SEQ ID NO: 154575 - DNA, 22 bp, Artificial Sequence
  Synthetic oligonucleotide; CTC chr11 5161923 5161944 5161928 5161923 -
ttcgaacctctcatttcctttc

SEQ ID NO: 154576 - DNA, 22 bp, Artificial Sequence
  Synthetic oligonucleotide; CTT chr11 5161921 5161942 5161926 5161921 -
cgaacctctcatttcctttcca

SEQ ID NO: 154577 - DNA, 22 bp, Artificial Sequence
  Synthetic oligonucleotide; TTC chr11 5161920 5161941 5161925 5161920 -
gaacctctcatttcctttccat

SEQ ID NO: 154578 - DNA, 22 bp, Artificial Sequence
  Synthetic oligonucleotide; CTC chr11 5161913 5161934 5161918 5161913 -
tcatttcctttccatcgtagaa

SEQ ID NO: 154579 - DNA, 22 bp, Artificial Sequence
  Synthetic oligonucleotide; CTC chr11 5161911 5161932 5161916 5161911 -
atttcctttccatcgtagaaat

SEQ ID NO: 154580 - DNA, 22 bp, Artificial Sequence
  Synthetic oligonucleotide; TTT chr11 5161907 5161928 5161912 5161907 -
cctttccatcgtagaaatctat

SEQ ID NO: 154581 - DNA, 22 bp, Artificial Sequence
  Synthetic oligonucleotide; TTC chr11 5161906 5161927 5161911 5161906 -
ctttccatcgtagaaatctatc

SEQ ID NO: 154582 - DNA, 22 bp, Artificial Sequence
  Synthetic oligonucleotide; CTT chr11 5161903 5161924 5161908 5161903 -
tccatcgtagaaatctatcctc

SEQ ID NO: 154583 - DNA, 22 bp, Artificial Sequence
  Synthetic oligonucleotide; TTT chr11 5161902 5161923 5161907 5161902 -
ccatcgtagaaatctatcctca

SEQ ID NO: 154584 - DNA, 22 bp, Artificial Sequence
  Synthetic oligonucleotide; TTC chr11 5161901 5161922 5161906 5161901 -
catcgtagaaatctatcctcaa

SEQ ID NO: 154585 - DNA, 22 bp, Artificial Sequence
  Synthetic oligonucleotide; CTA chr11 5161886 5161907 5161891 5161886 -
tcctcaaagaaataacttctca

SEQ ID NO: 154586 - DNA, 22 bp, Artificial Sequence
  Synthetic oligonucleotide; CTC chr11 5161881 5161902 5161886 5161881 -
aaagaaataacttctcagtgtt

SEQ ID NO: 154587 - DNA, 22 bp, Artificial Sequence
  Synthetic oligonucleotide; CTT chr11 5161868 5161889 5161873 5161868 -
ctcagtgttccatctgctattc

SEQ ID NO: 154588 - DNA, 22 bp, Artificial Sequence
  Synthetic oligonucleotide; TTC chr11 5161867 5161888 5161872 5161867 -
tcagtgttccatctgctattct

SEQ ID NO: 154589 - DNA, 22 bp, Artificial Sequence
  Synthetic oligonucleotide; CTC chr11 5161865 5161886 5161870 5161865 -
agtgttccatctgctattctgc

SEQ ID NO: 154590 - DNA, 22 bp, Artificial Sequence
  Synthetic oligonucleotide; TTC chr11 5161858 5161879 5161863 5161858 -
catctgctattctgctactcct

SEQ ID NO: 154591 - DNA, 22 bp, Artificial Sequence
  Synthetic oligonucleotide; CTG chr11 5161852 5161873 5161857 5161852 -
ctattctgctactcctcaggga

SEQ ID NO: 154592 - DNA, 22 bp, Artificial Sequence
  Synthetic oligonucleotide; CTA chr11 5161849 5161870 5161854 5161849 -
ttctgctactcctcagggatta

SEQ ID NO: 154593 - DNA, 22 bp, Artificial Sequence
  Synthetic oligonucleotide; TTC chr11 5161846 5161867 5161851 5161846 -
tgctactcctcagggattattc

SEQ ID NO: 154594 - DNA, 22 bp, Artificial Sequence
  Synthetic oligonucleotide; CTG chr11 5161844 5161865 5161849 5161844 -
ctactcctcagggattattcag

SEQ ID NO: 154595 - DNA, 22 bp, Artificial Sequence
  Synthetic oligonucleotide; CTA chr11 5161841 5161862 5161846 5161841 -
ctcctcagggattattcaggcc

SEQ ID NO: 154596 - DNA, 22 bp, Artificial Sequence
  Synthetic oligonucleotide; CTC chr11 5161838 5161859 5161843 5161838 -
ctcagggattattcaggccccc

SEQ ID NO: 154597 - DNA, 22 bp, Artificial Sequence
  Synthetic oligonucleotide; CTC chr11 5161835 5161856 5161840 5161835 -
agggattattcaggccccctcc

SEQ ID NO: 154598 - DNA, 22 bp, Artificial Sequence
  Synthetic oligonucleotide; TTA chr11 5161827 5161848 5161832 5161827 -
ttcaggccccctcccttcccta

SEQ ID NO: 154599 - DNA, 22 bp, Artificial Sequence
  Synthetic oligonucleotide; TTC chr11 5161824 5161845 5161829 5161824 -
aggccccctcccttccctacac

SEQ ID NO: 154600 - DNA, 22 bp, Artificial Sequence
  Synthetic oligonucleotide; CTC chr11 5161814 5161835 5161819 5161814 -
ccttccctacacatcaagctcg

SEQ ID NO: 154601 - DNA, 22 bp, Artificial Sequence
  Synthetic oligonucleotide; CTT chr11 5161810 5161831 5161815 5161810 -
ccctacacatcaagctcgagga

SEQ ID NO: 154602 - DNA, 22 bp, Artificial Sequence
  Synthetic oligonucleotide; TTC chr11 5161809 5161830 5161814 5161809 -
cctacacatcaagctcgaggat

SEQ ID NO: 154603 - DNA, 22 bp, Artificial Sequence
  Synthetic oligonucleotide; CTA chr11 5161805 5161826 5161810 5161805 -
cacatcaagctcgaggatttgc

SEQ ID NO: 154604 - DNA, 22 bp, Artificial Sequence
  Synthetic oligonucleotide; CTC chr11 5161793 5161814 5161798 5161793 -
gaggatttgcccccacccagga

SEQ ID NO: 154605 - DNA, 22 bp, Artificial Sequence
  Synthetic oligonucleotide; TTT chr11 5161785 5161806 5161790 5161785 -
gcccccacccaggactggcaaa

SEQ ID NO: 154606 - DNA, 22 bp, Artificial Sequence
  Synthetic oligonucleotide; TTG chr11 5161784 5161805 5161789 5161784 -
cccccacccaggactggcaaat

SEQ ID NO: 154607 - DNA, 22 bp, Artificial Sequence
  Synthetic oligonucleotide; CTG chr11 5161768 5161789 5161773 5161768 -
gcaaattagatttactcaacat

SEQ ID NO: 154608 - DNA, 22 bp, Artificial Sequence
  Synthetic oligonucleotide; TTA chr11 5161760 5161781 5161765 5161760 -
gatttactcaacatgccctgag

SEQ ID NO: 154609 - DNA, 22 bp, Artificial Sequence
  Synthetic oligonucleotide; TTT chr11 5161755 5161776 5161760 5161755 -
actcaacatgccctgagtcaga

SEQ ID NO: 154610 - DNA, 22 bp, Artificial Sequence
  Synthetic oligonucleotide; TTA chr11 5161754 5161775 5161759 5161754 -
ctcaacatgccctgagtcagat

SEQ ID NO: 154611 - DNA, 22 bp, Artificial Sequence
  Synthetic oligonucleotide; CTC chr11 5161751 5161772 5161756 5161751 -
aacatgccctgagtcagataac

SEQ ID NO: 154612 - DNA, 22 bp, Artificial Sequence
  Synthetic oligonucleotide; CTG chr11 5161740 5161761 5161745 5161740 -
agtcagataactaaaatacctc

SEQ ID NO: 154613 - DNA, 22 bp, Artificial Sequence
  Synthetic oligonucleotide; CTA chr11 5161727 5161748 5161732 5161727 -
aaatacctcttagtctaggtag

SEQ ID NO: 154614 - DNA, 22 bp, Artificial Sequence
  Synthetic oligonucleotide; CTC chr11 5161718 5161739 5161723 5161718 -
ttagtctaggtagacactttca

SEQ ID NO: 154615 - DNA, 22 bp, Artificial Sequence
  Synthetic oligonucleotide; CTT chr11 5161716 5161737 5161721 5161716 -
agtctaggtagacactttcact

SEQ ID NO: 154616 - DNA, 22 bp, Artificial Sequence
  Synthetic oligonucleotide; TTA chr11 5161715 5161736 5161720 5161715 -
gtctaggtagacactttcactg

SEQ ID NO: 154617 - DNA, 22 bp, Artificial Sequence
  Synthetic oligonucleotide; CTA chr11 5161710 5161731 5161715 5161710 -
ggtagacactttcactggataa

SEQ ID NO: 154618 - DNA, 22 bp, Artificial Sequence
  Synthetic oligonucleotide; CTT chr11 5161699 5161720 5161704 5161699 -
tcactggataagtagaggtctt

SEQ ID NO: 154619 - DNA, 22 bp, Artificial Sequence
  Synthetic oligonucleotide; TTT chr11 5161698 5161719 5161703 5161698 -
cactggataagtagaggtcttt

SEQ ID NO: 154620 - DNA, 22 bp, Artificial Sequence
  Synthetic oligonucleotide; TTC chr11 5161697 5161718 5161702 5161697 -
actggataagtagaggtctttc

SEQ ID NO: 154621 - DNA, 22 bp, Artificial Sequence
  Synthetic oligonucleotide; CTG chr11 5161693 5161714 5161698 5161693 -
gataagtagaggtctttcctac

SEQ ID NO: 154622 - DNA, 22 bp, Artificial Sequence
  Synthetic oligonucleotide; CTT chr11 5161677 5161698 5161682 5161677 -
tcctacagggtctgagaaggcc

SEQ ID NO: 154623 - DNA, 22 bp, Artificial Sequence
  Synthetic oligonucleotide; TTT chr11 5161676 5161697 5161681 5161676 -
cctacagggtctgagaaggcca

SEQ ID NO: 154624 - DNA, 22 bp, Artificial Sequence
  Synthetic oligonucleotide; TTC chr11 5161675 5161696 5161680 5161675 -
ctacagggtctgagaaggccac

SEQ ID NO: 154625 - DNA, 22 bp, Artificial Sequence
  Synthetic oligonucleotide; CTA chr11 5161672 5161693 5161677 5161672 -
cagggtctgagaaggccaccgc

SEQ ID NO: 154626 - DNA, 22 bp, Artificial Sequence
  Synthetic oligonucleotide; CTG chr11 5161663 5161684 5161668 5161663 -
agaaggccaccgcagtcatttc

SEQ ID NO: 154627 - DNA, 22 bp, Artificial Sequence
  Synthetic oligonucleotide; TTT chr11 5161642 5161663 5161647 5161642 -
cttcccttctgtcagacataat

SEQ ID NO: 154628 - DNA, 22 bp, Artificial Sequence
  Synthetic oligonucleotide; TTC chr11 5161641 5161662 5161646 5161641 -
ttcccttctgtcagacataatt

SEQ ID NO: 154629 - DNA, 22 bp, Artificial Sequence
  Synthetic oligonucleotide; CTT chr11 5161639 5161660 5161644 5161639 -
cccttctgtcagacataattcc

SEQ ID NO: 154630 - DNA, 22 bp, Artificial Sequence
  Synthetic oligonucleotide; TTC chr11 5161638 5161659 5161643 5161638 -
ccttctgtcagacataattcct

SEQ ID NO: 154631 - DNA, 22 bp, Artificial Sequence
  Synthetic oligonucleotide; CTT chr11 5161634 5161655 5161639 5161634 -
ctgtcagacataattcctcagt

SEQ ID NO: 154632 - DNA, 22 bp, Artificial Sequence
  Synthetic oligonucleotide; TTC chr11 5161633 5161654 5161638 5161633 -
tgtcagacataattcctcagtt

SEQ ID NO: 154633 - DNA, 22 bp, Artificial Sequence
  Synthetic oligonucleotide; CTG chr11 5161631 5161652 5161636 5161631 -
tcagacataattcctcagttta

SEQ ID NO: 154634 - DNA, 22 bp, Artificial Sequence
  Synthetic oligonucleotide; TTC chr11 5161618 5161639 5161623 5161618 -
ctcagtttagccttcctacctc

SEQ ID NO: 154635 - DNA, 22 bp, Artificial Sequence
  Synthetic oligonucleotide; CTC chr11 5161615 5161636 5161620 5161615 -
agtttagccttcctacctctat

SEQ ID NO: 154636 - DNA, 22 bp, Artificial Sequence
  Synthetic oligonucleotide; TTT chr11 5161610 5161631 5161615 5161610 -
agccttcctacctctatacagt

SEQ ID NO: 154637 - DNA, 22 bp, Artificial Sequence
  Synthetic oligonucleotide; TTA chr11 5161609 5161630 5161614 5161609 -
gccttcctacctctatacagtc

SEQ ID NO: 154638 - DNA, 22 bp, Artificial Sequence
  Synthetic oligonucleotide; CTT chr11 5161604 5161625 5161609 5161604 -
cctacctctatacagtctgata

SEQ ID NO: 154639 - DNA, 22 bp, Artificial Sequence
  Synthetic oligonucleotide; TTC chr11 5161603 5161624 5161608 5161603 -
ctacctctatacagtctgataa

SEQ ID NO: 154640 - DNA, 22 bp, Artificial Sequence
  Synthetic oligonucleotide; CTA chr11 5161600 5161621 5161605 5161600 -
cctctatacagtctgataacag

SEQ ID NO: 154641 - DNA, 22 bp, Artificial Sequence
  Synthetic oligonucleotide; CTC chr11 5161596 5161617 5161601 5161596 -
tatacagtctgataacagacca

SEQ ID NO: 154642 - DNA, 22 bp, Artificial Sequence
  Synthetic oligonucleotide; CTA chr11 5161594 5161615 5161599 5161594 -
tacagtctgataacagaccagc

SEQ ID NO: 154643 - DNA, 22 bp, Artificial Sequence
  Synthetic oligonucleotide; CTG chr11 5161585 5161606 5161590 5161585 -
ataacagaccagcctttattag

SEQ ID NO: 154644 - DNA, 22 bp, Artificial Sequence
  Synthetic oligonucleotide; CTT chr11 5161569 5161590 5161574 5161569 -
tattagtcaaatcagccaagca

SEQ ID NO: 154645 - DNA, 22 bp, Artificial Sequence
  Synthetic oligonucleotide; TTT chr11 5161568 5161589 5161573 5161568 -
attagtcaaatcagccaagcag

SEQ ID NO: 154646 - DNA, 22 bp, Artificial Sequence
  Synthetic oligonucleotide; TTA chr11 5161567 5161588 5161572 5161567 -
ttagtcaaatcagccaagcagt

SEQ ID NO: 154647 - DNA, 22 bp, Artificial Sequence
  Synthetic oligonucleotide; TTA chr11 5161564 5161585 5161569 5161564 -
gtcaaatcagccaagcagtttt

SEQ ID NO: 154648 - DNA, 22 bp, Artificial Sequence
  Synthetic oligonucleotide; TTT chr11 5161543 5161564 5161548 5161543 -
ttcaggctcttagtattcagta

SEQ ID NO: 154649 - DNA, 22 bp, Artificial Sequence
  Synthetic oligonucleotide; TTT chr11 5161542 5161563 5161547 5161542 -
tcaggctcttagtattcagtaa

SEQ ID NO: 154650 - DNA, 22 bp, Artificial Sequence
  Synthetic oligonucleotide; TTT chr11 5161541 5161562 5161546 5161541 -
caggctcttagtattcagtaaa

SEQ ID NO: 154651 - DNA, 22 bp, Artificial Sequence
  Synthetic oligonucleotide; TTC chr11 5161540 5161561 5161545 5161540 -
aggctcttagtattcagtaaaa

SEQ ID NO: 154652 - DNA, 22 bp, Artificial Sequence
  Synthetic oligonucleotide; CTC chr11 5161534 5161555 5161539 5161534 -
ttagtattcagtaaaaccttta

SEQ ID NO: 154653 - DNA, 22 bp, Artificial Sequence
  Synthetic oligonucleotide; CTT chr11 5161532 5161553 5161537 5161532 -
agtattcagtaaaacctttata

SEQ ID NO: 154654 - DNA, 22 bp, Artificial Sequence
  Synthetic oligonucleotide; TTA chr11 5161531 5161552 5161536 5161531 -
gtattcagtaaaacctttatat

SEQ ID NO: 154655 - DNA, 22 bp, Artificial Sequence
  Synthetic oligonucleotide; TTC chr11 5161525 5161546 5161530 5161525 -
agtaaaacctttatatccctta

SEQ ID NO: 154656 - DNA, 22 bp, Artificial Sequence
  Synthetic oligonucleotide; CTT chr11 5161514 5161535 5161519 5161514 -
tatatcccttacggtcctccgt

SEQ ID NO: 154657 - DNA, 22 bp, Artificial Sequence
  Synthetic oligonucleotide; TTT chr11 5161513 5161534 5161518 5161513 -
atatcccttacggtcctccgtc

SEQ ID NO: 154658 - DNA, 22 bp, Artificial Sequence
  Synthetic oligonucleotide; TTA chr11 5161512 5161533 5161517 5161512 -
tatcccttacggtcctccgtct

SEQ ID NO: 154659 - DNA, 22 bp, Artificial Sequence
  Synthetic oligonucleotide; CTT chr11 5161504 5161525 5161509 5161504 -
acggtcctccgtcttcaggaaa

SEQ ID NO: 154660 - DNA, 22 bp, Artificial Sequence
  Synthetic oligonucleotide; TTA chr11 5161503 5161524 5161508 5161503 -
cggtcctccgtcttcaggaaaa

SEQ ID NO: 154661 - DNA, 22 bp, Artificial Sequence
  Synthetic oligonucleotide; CTC chr11 5161495 5161516 5161500 5161495 -
cgtcttcaggaaaagtagaacg

SEQ ID NO: 154662 - DNA, 22 bp, Artificial Sequence
  Synthetic oligonucleotide; CTT chr11 5161489 5161510 5161494 5161489 -
caggaaaagtagaacggactaa

SEQ ID NO: 154663 - DNA, 22 bp, Artificial Sequence
  Synthetic oligonucleotide; TTC chr11 5161488 5161509 5161493 5161488 -
aggaaaagtagaacggactaaa

SEQ ID NO: 154664 - DNA, 22 bp, Artificial Sequence
  Synthetic oligonucleotide; CTA chr11 5161468 5161489 5161473 5161468 -
aatgtcttttaaaaacacacct

SEQ ID NO: 154665 - DNA, 22 bp, Artificial Sequence
  Synthetic oligonucleotide; CTT chr11 5161460 5161481 5161465 5161460 -
ttaaaaacacacctcaccaagc

SEQ ID NO: 154666 - DNA, 22 bp, Artificial Sequence
  Synthetic oligonucleotide; TTT chr11 5161459 5161480 5161464 5161459 -
taaaaacacacctcaccaagct

SEQ ID NO: 154667 - DNA, 22 bp, Artificial Sequence
  Synthetic oligonucleotide; TTT chr11 5161458 5161479 5161463 5161458 -
aaaaacacacctcaccaagctc

SEQ ID NO: 154668 - DNA, 22 bp, Artificial Sequence
  Synthetic oligonucleotide; TTA chr11 5161457 5161478 5161462 5161457 -
aaaacacacctcaccaagctca

SEQ ID NO: 154669 - DNA, 22 bp, Artificial Sequence
  Synthetic oligonucleotide; CTC chr11 5161445 5161466 5161450 5161445 -
accaagctcagccaccaactta

SEQ ID NO: 154670 - DNA, 22 bp, Artificial Sequence
  Synthetic oligonucleotide; CTC chr11 5161436 5161457 5161441 5161436 -
agccaccaacttaaaaaggact

SEQ ID NO: 154671 - DNA, 22 bp, Artificial Sequence
  Synthetic oligonucleotide; CTT chr11 5161424 5161445 5161429 5161424 -
aaaaaggactggacaatacttt

SEQ ID NO: 154672 - DNA, 22 bp, Artificial Sequence
  Synthetic oligonucleotide; TTA chr11 5161423 5161444 5161428 5161423 -
aaaaggactggacaatactttt

SEQ ID NO: 154673 - DNA, 22 bp, Artificial Sequence
  Synthetic oligonucleotide; CTG chr11 5161413 5161434 5161418 5161413 -
gacaatacttttaccacttttc

SEQ ID NO: 154674 - DNA, 22 bp, Artificial Sequence
  Synthetic oligonucleotide; CTT chr11 5161403 5161424 5161408 5161403 -
ttaccacttttctttctcagaa

SEQ ID NO: 154675 - DNA, 22 bp, Artificial Sequence
  Synthetic oligonucleotide; TTT chr11 5161402 5161423 5161407 5161402 -
taccacttttctttctcagaag

SEQ ID NO: 154676 - DNA, 22 bp, Artificial Sequence
  Synthetic oligonucleotide; TTT chr11 5161401 5161422 5161406 5161401 -
accacttttctttctcagaagt

SEQ ID NO: 154677 - DNA, 22 bp, Artificial Sequence
  Synthetic oligonucleotide; TTA chr11 5161400 5161421 5161405 5161400 -
ccacttttctttctcagaagtc

SEQ ID NO: 154678 - DNA, 22 bp, Artificial Sequence
  Synthetic oligonucleotide; CTT chr11 5161394 5161415 5161399 5161394 -
ttctttctcagaagtcagacct

SEQ ID NO: 154679 - DNA, 22 bp, Artificial Sequence
  Synthetic oligonucleotide; TTT chr11 5161393 5161414 5161398 5161393 -
tctttctcagaagtcagacctg

SEQ ID NO: 154680 - DNA, 22 bp, Artificial Sequence
  Synthetic oligonucleotide; TTT chr11 5161392 5161413 5161397 5161392 -
ctttctcagaagtcagacctgt

SEQ ID NO: 154681 - DNA, 22 bp, Artificial Sequence
  Synthetic oligonucleotide; TTC chr11 5161391 5161412 5161396 5161391 -
tttctcagaagtcagacctgtc

SEQ ID NO: 154682 - DNA, 22 bp, Artificial Sequence
  Synthetic oligonucleotide; CTT chr11 5161389 5161410 5161394 5161389 -
tctcagaagtcagacctgtcct

SEQ ID NO: 154683 - DNA, 22 bp, Artificial Sequence
  Synthetic oligonucleotide; TTT chr11 5161388 5161409 5161393 5161388 -
ctcagaagtcagacctgtcctc

SEQ ID NO: 154684 - DNA, 22 bp, Artificial Sequence
  Synthetic oligonucleotide; TTC chr11 5161387 5161408 5161392 5161387 -
tcagaagtcagacctgtcctca

SEQ ID NO: 154685 - DNA, 22 bp, Artificial Sequence
  Synthetic oligonucleotide; CTC chr11 5161385 5161406 5161390 5161385 -
agaagtcagacctgtcctcaga

SEQ ID NO: 154686 - DNA, 22 bp, Artificial Sequence
  Synthetic oligonucleotide; CTG chr11 5161371 5161392 5161376 5161371 -
tcctcagaatgctacagggtac

SEQ ID NO: 154687 - DNA, 22 bp, Artificial Sequence
  Synthetic oligonucleotide; CTC chr11 5161366 5161387 5161371 5161366 -
agaatgctacagggtacagccc

SEQ ID NO: 154688 - DNA, 22 bp, Artificial Sequence
  Synthetic oligonucleotide; CTA chr11 5161357 5161378 5161362 5161357 -
cagggtacagcccatttgagct

SEQ ID NO: 154689 - DNA, 22 bp, Artificial Sequence
  Synthetic oligonucleotide; TTT chr11 5161340 5161361 5161345 5161340 -
gagctcctgtatagatttgcct

SEQ ID NO: 154690 - DNA, 22 bp, Artificial Sequence
  Synthetic oligonucleotide; TTG chr11 5161339 5161360 5161344 5161339 -
agctcctgtatagatttgcctt

SEQ ID NO: 154691 - DNA, 22 bp, Artificial Sequence
  Synthetic oligonucleotide; CTC chr11 5161334 5161355 5161339 5161334 -
ctgtatagatttgcctttttat

SEQ ID NO: 154692 - DNA, 22 bp, Artificial Sequence
  Synthetic oligonucleotide; CTG chr11 5161331 5161352 5161336 5161331 -
tatagatttgcctttttattag

SEQ ID NO: 154693 - DNA, 22 bp, Artificial Sequence
  Synthetic oligonucleotide; TTT chr11 5161322 5161343 5161327 5161322 -
gcctttttattaggccccagtc

SEQ ID NO: 154694 - DNA, 22 bp, Artificial Sequence
  Synthetic oligonucleotide; TTG chr11 5161321 5161342 5161326 5161321 -
cctttttattaggccccagtct

SEQ ID NO: 154695 - DNA, 22 bp, Artificial Sequence
  Synthetic oligonucleotide; CTT chr11 5161317 5161338 5161322 5161317 -
tttattaggccccagtctaatt

SEQ ID NO: 154696 - DNA, 22 bp, Artificial Sequence
  Synthetic oligonucleotide; TTT chr11 5161316 5161337 5161321 5161316 -
ttattaggccccagtctaattc

SEQ ID NO: 154697 - DNA, 22 bp, Artificial Sequence
  Synthetic oligonucleotide; TTT chr11 5161315 5161336 5161320 5161315 -
tattaggccccagtctaattcc

SEQ ID NO: 154698 - DNA, 22 bp, Artificial Sequence
  Synthetic oligonucleotide; TTT chr11 5161314 5161335 5161319 5161314 -
attaggccccagtctaattcca

SEQ ID NO: 154699 - DNA, 22 bp, Artificial Sequence
  Synthetic oligonucleotide; TTA chr11 5161313 5161334 5161318 5161313 -
ttaggccccagtctaattccag

SEQ ID NO: 154700 - DNA, 22 bp, Artificial Sequence
  Synthetic oligonucleotide; TTA chr11 5161310 5161331 5161315 5161310 -
ggccccagtctaattccagaca

SEQ ID NO: 154701 - DNA, 22 bp, Artificial Sequence
  Synthetic oligonucleotide; CTA chr11 5161298 5161319 5161303 5161298 -
attccagacaccagaccaactt

SEQ ID NO: 154702 - DNA, 22 bp, Artificial Sequence
  Synthetic oligonucleotide; TTC chr11 5161294 5161315 5161299 5161294 -
cagacaccagaccaacttagaa

SEQ ID NO: 154703 - DNA, 22 bp, Artificial Sequence
  Synthetic oligonucleotide; CTT chr11 5161276 5161297 5161281 5161276 -
agaatgtgccccaaaaaaactt

SEQ ID NO: 154704 - DNA, 22 bp, Artificial Sequence
  Synthetic oligonucleotide; TTA chr11 5161275 5161296 5161280 5161275 -
gaatgtgccccaaaaaaacttg

SEQ ID NO: 154705 - DNA, 22 bp, Artificial Sequence
  Synthetic oligonucleotide; CTT chr11 5161254 5161275 5161259 5161254 -
gtcatccctgctatcttctgtc

SEQ ID NO: 154706 - DNA, 22 bp, Artificial Sequence
  Synthetic oligonucleotide; TTG chr11 5161253 5161274 5161258 5161253 -
tcatccctgctatcttctgtct

SEQ ID NO: 154707 - DNA, 22 bp, Artificial Sequence
  Synthetic oligonucleotide; CTG chr11 5161244 5161265 5161249 5161244 -
ctatcttctgtctagtcatact

SEQ ID NO: 154708 - DNA, 22 bp, Artificial Sequence
  Synthetic oligonucleotide; CTA chr11 5161241 5161262 5161246 5161241 -
tcttctgtctagtcatactcct

SEQ ID NO: 154709 - DNA, 22 bp, Artificial Sequence
  Synthetic oligonucleotide; CTT chr11 5161237 5161258 5161242 5161237 -
ctgtctagtcatactcctattc

SEQ ID NO: 154710 - DNA, 22 bp, Artificial Sequence
  Synthetic oligonucleotide; TTC chr11 5161236 5161257 5161241 5161236 -
tgtctagtcatactcctattca

SEQ ID NO: 154711 - DNA, 22 bp, Artificial Sequence
  Synthetic oligonucleotide; CTG chr11 5161234 5161255 5161239 5161234 -
tctagtcatactcctattcacc

SEQ ID NO: 154712 - DNA, 22 bp, Artificial Sequence
  Synthetic oligonucleotide; CTA chr11 5161230 5161251 5161235 5161230 -
gtcatactcctattcaccattc

SEQ ID NO: 154713 - DNA, 22 bp, Artificial Sequence
  Synthetic oligonucleotide; CTC chr11 5161221 5161242 5161226 5161221 -
ctattcaccattctcaactact

SEQ ID NO: 154714 - DNA, 22 bp, Artificial Sequence
  Synthetic oligonucleotide; CTA chr11 5161218 5161239 5161223 5161218 -
ttcaccattctcaactactcat

SEQ ID NO: 154715 - DNA, 22 bp, Artificial Sequence
  Synthetic oligonucleotide; TTC chr11 5161215 5161236 5161220 5161215 -
accattctcaactactcataca

SEQ ID NO: 154716 - DNA, 22 bp, Artificial Sequence
  Synthetic oligonucleotide; TTC chr11 5161208 5161229 5161213 5161208 -
tcaactactcatacatgccctg

SEQ ID NO: 154717 - DNA, 22 bp, Artificial Sequence
  Synthetic oligonucleotide; CTC chr11 5161206 5161227 5161211 5161206 -
aactactcatacatgccctgct

SEQ ID NO: 154718 - DNA, 22 bp, Artificial Sequence
  Synthetic oligonucleotide; CTA chr11 5161201 5161222 5161206 5161201 -
ctcatacatgccctgctcttgt

SEQ ID NO: 154719 - DNA, 22 bp, Artificial Sequence
  Synthetic oligonucleotide; CTC chr11 5161198 5161219 5161203 5161198 -
atacatgccctgctcttgttta

SEQ ID NO: 154720 - DNA, 22 bp, Artificial Sequence
  Synthetic oligonucleotide; CTG chr11 5161186 5161207 5161191 5161186 -
ctcttgtttacactgccggttt

SEQ ID NO: 154721 - DNA, 22 bp, Artificial Sequence
  Synthetic oligonucleotide; CTC chr11 5161183 5161204 5161188 5161183 -
ttgtttacactgccggtttaca

SEQ ID NO: 154722 - DNA, 22 bp, Artificial Sequence
  Synthetic oligonucleotide; CTT chr11 5161181 5161202 5161186 5161181 -
gtttacactgccggtttacact

SEQ ID NO: 154723 - DNA, 22 bp, Artificial Sequence
  Synthetic oligonucleotide; TTG chr11 5161180 5161201 5161185 5161180 -
tttacactgccggtttacactg

SEQ ID NO: 154724 - DNA, 22 bp, Artificial Sequence
  Synthetic oligonucleotide; TTT chr11 5161177 5161198 5161182 5161177 -
acactgccggtttacactgttt

SEQ ID NO: 154725 - DNA, 22 bp, Artificial Sequence
  Synthetic oligonucleotide; TTA chr11 5161176 5161197 5161181 5161176 -
cactgccggtttacactgtttt

SEQ ID NO: 154726 - DNA, 22 bp, Artificial Sequence
  Synthetic oligonucleotide; CTG chr11 5161171 5161192 5161176 5161171 -
ccggtttacactgtttttccaa

SEQ ID NO: 154727 - DNA, 22 bp, Artificial Sequence
  Synthetic oligonucleotide; TTT chr11 5161164 5161185 5161169 5161164 -
acactgtttttccaagccatca

SEQ ID NO: 154728 - DNA, 22 bp, Artificial Sequence
  Synthetic oligonucleotide; TTA chr11 5161163 5161184 5161168 5161163 -
cactgtttttccaagccatcac

SEQ ID NO: 154729 - DNA, 22 bp, Artificial Sequence
  Synthetic oligonucleotide; CTG chr11 5161158 5161179 5161163 5161158 -
tttttccaagccatcacagctg

SEQ ID NO: 154730 - DNA, 22 bp, Artificial Sequence
  Synthetic oligonucleotide; TTT chr11 5161155 5161176 5161160 5161155 -
ttccaagccatcacagctgata

SEQ ID NO: 154731 - DNA, 22 bp, Artificial Sequence
  Synthetic oligonucleotide; TTT chr11 5161154 5161175 5161159 5161154 -
tccaagccatcacagctgatat

SEQ ID NO: 154732 - DNA, 22 bp, Artificial Sequence
  Synthetic oligonucleotide; TTT chr11 5161153 5161174 5161158 5161153 -
ccaagccatcacagctgatatc

SEQ ID NO: 154733 - DNA, 22 bp, Artificial Sequence
  Synthetic oligonucleotide; TTC chr11 5161152 5161173 5161157 5161152 -
caagccatcacagctgatatct

SEQ ID NO: 154734 - DNA, 22 bp, Artificial Sequence
  Synthetic oligonucleotide; CTG chr11 5161136 5161157 5161141 5161136 -
atatctcctggtgctatcccca

SEQ ID NO: 154735 - DNA, 22 bp, Artificial Sequence
  Synthetic oligonucleotide; CTC chr11 5161129 5161150 5161134 5161129 -
ctggtgctatccccaaactgcc

SEQ ID NO: 154736 - DNA, 22 bp, Artificial Sequence
  Synthetic oligonucleotide; CTG chr11 5161126 5161147 5161131 5161126 -
gtgctatccccaaactgccact

SEQ ID NO: 154737 - DNA, 22 bp, Artificial Sequence
  Synthetic oligonucleotide; CTA chr11 5161120 5161141 5161125 5161120 -
tccccaaactgccactcttaac

SEQ ID NO: 154738 - DNA, 22 bp, Artificial Sequence
  Synthetic oligonucleotide; CTG chr11 5161109 5161130 5161114 5161109 -
ccactcttaactcttgaagtaa

SEQ ID NO: 154739 - DNA, 22 bp, Artificial Sequence
  Synthetic oligonucleotide; CTC chr11 5161103 5161124 5161108 5161103 -
ttaactcttgaagtaaataaat

SEQ ID NO: 154740 - DNA, 22 bp, Artificial Sequence
  Synthetic oligonucleotide; CTT chr11 5161101 5161122 5161106 5161101 -
aactcttgaagtaaataaataa

SEQ ID NO: 154741 - DNA, 22 bp, Artificial Sequence
  Synthetic oligonucleotide; TTA chr11 5161100 5161121 5161105 5161100 -
actcttgaagtaaataaataat

SEQ ID NO: 154742 - DNA, 22 bp, Artificial Sequence
  Synthetic oligonucleotide; CTC chr11 5161096 5161117 5161101 5161096 -
ttgaagtaaataaataatcttt

SEQ ID NO: 154743 - DNA, 22 bp, Artificial Sequence
  Synthetic oligonucleotide; CTT chr11 5161094 5161115 5161099 5161094 -
gaagtaaataaataatctttgc

SEQ ID NO: 154744 - DNA, 22 bp, Artificial Sequence
  Synthetic oligonucleotide; TTG chr11 5161093 5161114 5161098 5161093 -
aagtaaataaataatctttgct

SEQ ID NO: 154745 - DNA, 22 bp, Artificial Sequence
  Synthetic oligonucleotide; CTT chr11 5161075 5161096 5161080 5161075 -
tgctggcaggactatgttgaat

SEQ ID NO: 154746 - DNA, 22 bp, Artificial Sequence
  Synthetic oligonucleotide; TTT chr11 5161074 5161095 5161079 5161074 -
gctggcaggactatgttgaatc

SEQ ID NO: 154747 - DNA, 22 bp, Artificial Sequence
  Synthetic oligonucleotide; TTG chr11 5161073 5161094 5161078 5161073 -
ctggcaggactatgttgaatct

SEQ ID NO: 154748 - DNA, 22 bp, Artificial Sequence
  Synthetic oligonucleotide; CTG chr11 5161070 5161091 5161075 5161070 -
gcaggactatgttgaatctcct

SEQ ID NO: 154749 - DNA, 22 bp, Artificial Sequence
  Synthetic oligonucleotide; CTA chr11 5161061 5161082 5161066 5161061 -
tgttgaatctccttaggcactc

SEQ ID NO: 154750 - DNA, 22 bp, Artificial Sequence
  Synthetic oligonucleotide; TTG chr11 5161056 5161077 5161061 5161056 -
aatctccttaggcactctttaa

SEQ ID NO: 154751 - DNA, 22 bp, Artificial Sequence
  Synthetic oligonucleotide; CTC chr11 5161050 5161071 5161055 5161050 -
cttaggcactctttaatcagat

SEQ ID NO: 154752 - DNA, 22 bp, Artificial Sequence
  Synthetic oligonucleotide; CTT chr11 5161047 5161068 5161052 5161047 -
aggcactctttaatcagatgtc

SEQ ID NO: 154753 - DNA, 22 bp, Artificial Sequence
  Synthetic oligonucleotide; TTA chr11 5161046 5161067 5161051 5161046 -
ggcactctttaatcagatgtcc

SEQ ID NO: 154754 - DNA, 22 bp, Artificial Sequence
  Synthetic oligonucleotide; CTC chr11 5161039 5161060 5161044 5161039 -
tttaatcagatgtcctaggtcc

SEQ ID NO: 154755 - DNA, 22 bp, Artificial Sequence
  Synthetic oligonucleotide; CTT chr11 5161037 5161058 5161042 5161037 -
taatcagatgtcctaggtcctc

SEQ ID NO: 154756 - DNA, 22 bp, Artificial Sequence
  Synthetic oligonucleotide; TTT chr11 5161036 5161057 5161041 5161036 -
aatcagatgtcctaggtcctcc

SEQ ID NO: 154757 - DNA, 22 bp, Artificial Sequence
  Synthetic oligonucleotide; TTA chr11 5161035 5161056 5161040 5161035 -
atcagatgtcctaggtcctccc

SEQ ID NO: 154758 - DNA, 22 bp, Artificial Sequence
  Synthetic oligonucleotide; CTA chr11 5161022 5161043 5161027 5161022 -
ggtcctcccacttcttagtcct

SEQ ID NO: 154759 - DNA, 22 bp, Artificial Sequence
  Synthetic oligonucleotide; CTC chr11 5161015 5161036 5161020 5161015 -
ccacttcttagtcctttaatac

SEQ ID NO: 154760 - DNA, 22 bp, Artificial Sequence
  Synthetic oligonucleotide; CTT chr11 5161009 5161030 5161014 5161009 -
cttagtcctttaatacctgttt

SEQ ID NO: 154761 - DNA, 22 bp, Artificial Sequence
  Synthetic oligonucleotide; TTC chr11 5161008 5161029 5161013 5161008 -
ttagtcctttaatacctgtttt

SEQ ID NO: 154762 - DNA, 22 bp, Artificial Sequence
  Synthetic oligonucleotide; CTT chr11 5161006 5161027 5161011 5161006 -
agtcctttaatacctgtttttc

SEQ ID NO: 154763 - DNA, 22 bp, Artificial Sequence
  Synthetic oligonucleotide; TTA chr11 5161005 5161026 5161010 5161005 -
gtcctttaatacctgtttttct

SEQ ID NO: 154764 - DNA, 22 bp, Artificial Sequence
  Synthetic oligonucleotide; CTT chr11 5160999 5161020 5161004 5160999 -
taatacctgtttttctccttct

SEQ ID NO: 154765 - DNA, 22 bp, Artificial Sequence
  Synthetic oligonucleotide; TTT chr11 5160998 5161019 5161003 5160998 -
aatacctgtttttctccttctc

SEQ ID NO: 154766 - DNA, 22 bp, Artificial Sequence
  Synthetic oligonucleotide; TTA chr11 5160997 5161018 5161002 5160997 -
atacctgtttttctccttctct

SEQ ID NO: 154767 - DNA, 22 bp, Artificial Sequence
  Synthetic oligonucleotide; CTG chr11 5160990 5161011 5160995 5160990 -
tttttctccttctcttattcca

SEQ ID NO: 154768 - DNA, 22 bp, Artificial Sequence
  Synthetic oligonucleotide; TTT chr11 5160987 5161008 5160992 5160987 -
ttctccttctcttattccattt

SEQ ID NO: 154769 - DNA, 22 bp, Artificial Sequence
  Synthetic oligonucleotide; TTT chr11 5160986 5161007 5160991 5160986 -
tctccttctcttattccatttg

SEQ ID NO: 154770 - DNA, 22 bp, Artificial Sequence
  Synthetic oligonucleotide; TTT chr11 5160985 5161006 5160990 5160985 -
ctccttctcttattccatttgg

SEQ ID NO: 154771 - DNA, 22 bp, Artificial Sequence
  Synthetic oligonucleotide; TTC chr11 5160984 5161005 5160989 5160984 -
tccttctcttattccatttggt

SEQ ID NO: 154772 - DNA, 22 bp, Artificial Sequence
  Synthetic oligonucleotide; CTC chr11 5160982 5161003 5160987 5160982 -
cttctcttattccatttggttt

SEQ ID NO: 154773 - DNA, 22 bp, Artificial Sequence
  Synthetic oligonucleotide; CTT chr11 5160979 5161000 5160984 5160979 -
ctcttattccatttggtttttc

SEQ ID NO: 154774 - DNA, 22 bp, Artificial Sequence
  Synthetic oligonucleotide; TTC chr11 5160978 5160999 5160983 5160978 -
tcttattccatttggtttttca

SEQ ID NO: 154775 - DNA, 22 bp, Artificial Sequence
  Synthetic oligonucleotide; CTC chr11 5160976 5160997 5160981 5160976 -
ttattccatttggtttttcaat

SEQ ID NO: 154776 - DNA, 22 bp, Artificial Sequence
  Synthetic oligonucleotide; CTT chr11 5160974 5160995 5160979 5160974 -
attccatttggtttttcaatcc

SEQ ID NO: 154777 - DNA, 22 bp, Artificial Sequence
  Synthetic oligonucleotide; TTA chr11 5160973 5160994 5160978 5160973 -
ttccatttggtttttcaatcca

SEQ ID NO: 154778 - DNA, 22 bp, Artificial Sequence
  Synthetic oligonucleotide; TTC chr11 5160970 5160991 5160975 5160970 -
catttggtttttcaatccatac

SEQ ID NO: 154779 - DNA, 22 bp, Artificial Sequence
  Synthetic oligonucleotide; TTT chr11 5160965 5160986 5160970 5160965 -
ggtttttcaatccatacaaaac

SEQ ID NO: 154780 - DNA, 22 bp, Artificial Sequence
  Synthetic oligonucleotide; TTG chr11 5160964 5160985 5160969 5160964 -
gtttttcaatccatacaaaacc

SEQ ID NO: 154781 - DNA, 22 bp, Artificial Sequence
  Synthetic oligonucleotide; TTT chr11 5160960 5160981 5160965 5160960 -
ttcaatccatacaaaaccgtat

SEQ ID NO: 154782 - DNA, 22 bp, Artificial Sequence
  Synthetic oligonucleotide; TTT chr11 5160959 5160980 5160964 5160959 -
tcaatccatacaaaaccgtatc

SEQ ID NO: 154783 - DNA, 22 bp, Artificial Sequence
  Synthetic oligonucleotide; TTT chr11 5160958 5160979 5160963 5160958 -
caatccatacaaaaccgtatcc

SEQ ID NO: 154784 - DNA, 22 bp, Artificial Sequence
  Synthetic oligonucleotide; TTC chr11 5160957 5160978 5160962 5160957 -
aatccatacaaaaccgtatcca

SEQ ID NO: 154785 - DNA, 22 bp, Artificial Sequence
  Synthetic oligonucleotide; TTC chr11 5160917 5160938 5160922 5160917 -
tacatgacaaatgtttcttcta

SEQ ID NO: 154786 - DNA, 22 bp, Artificial Sequence
  Synthetic oligonucleotide; CTA chr11 5160915 5160936 5160920 5160915 -
catgacaaatgtttcttctaac

SEQ ID NO: 154787 - DNA, 22 bp, Artificial Sequence
  Synthetic oligonucleotide; TTT chr11 5160901 5160922 5160906 5160901 -
cttctaacaaccccacaatatc

SEQ ID NO: 154788 - DNA, 22 bp, Artificial Sequence
  Synthetic oligonucleotide; TTC chr11 5160900 5160921 5160905 5160900 -
ttctaacaaccccacaatatca

SEQ ID NO: 154789 - DNA, 22 bp, Artificial Sequence
  Synthetic oligonucleotide; CTT chr11 5160898 5160919 5160903 5160898 -
ctaacaaccccacaatatcacc

SEQ ID NO: 154790 - DNA, 22 bp, Artificial Sequence
  Synthetic oligonucleotide; TTC chr11 5160897 5160918 5160902 5160897 -
taacaaccccacaatatcaccc

SEQ ID NO: 154791 - DNA, 22 bp, Artificial Sequence
  Synthetic oligonucleotide; CTA chr11 5160895 5160916 5160900 5160895 -
acaaccccacaatatcacccct

SEQ ID NO: 154792 - DNA, 22 bp, Artificial Sequence
  Synthetic oligonucleotide; CTT chr11 5160872 5160893 5160877 5160872 -
accacaaaatcttccttcagct

SEQ ID NO: 154793 - DNA, 22 bp, Artificial Sequence
  Synthetic oligonucleotide; TTA chr11 5160871 5160892 5160876 5160871 -
ccacaaaatcttccttcagctt

SEQ ID NO: 154794 - DNA, 22 bp, Artificial Sequence
  Synthetic oligonucleotide; CTT chr11 5160859 5160880 5160864 5160859 -
ccttcagcttaatctctcccac

SEQ ID NO: 154795 - DNA, 22 bp, Artificial Sequence
  Synthetic oligonucleotide; TTC chr11 5160858 5160879 5160863 5160858 -
cttcagcttaatctctcccact

SEQ ID NO: 154796 - DNA, 22 bp, Artificial Sequence
  Synthetic oligonucleotide; CTT chr11 5160855 5160876 5160860 5160855 -
cagcttaatctctcccactcta

SEQ ID NO: 154797 - DNA, 22 bp, Artificial Sequence
  Synthetic oligonucleotide; TTC chr11 5160854 5160875 5160859 5160854 -
agcttaatctctcccactctag

SEQ ID NO: 154798 - DNA, 22 bp, Artificial Sequence
  Synthetic oligonucleotide; CTT chr11 5160849 5160870 5160854 5160849 -
aatctctcccactctaggttcc

SEQ ID NO: 154799 - DNA, 22 bp, Artificial Sequence
  Synthetic oligonucleotide; TTA chr11 5160848 5160869 5160853 5160848 -
atctctcccactctaggttccc

SEQ ID NO: 154800 - DNA, 22 bp, Artificial Sequence
  Synthetic oligonucleotide; CTC chr11 5160843 5160864 5160848 5160843 -
tcccactctaggttcccacgcc

SEQ ID NO: 154801 - DNA, 22 bp, Artificial Sequence
  Synthetic oligonucleotide; CTC chr11 5160841 5160862 5160846 5160841 -
ccactctaggttcccacgccgc

SEQ ID NO: 154802 - DNA, 22 bp, Artificial Sequence
  Synthetic oligonucleotide; CTC chr11 5160835 5160856 5160840 5160835 -
taggttcccacgccgcccctaa

SEQ ID NO: 154803 - DNA, 22 bp, Artificial Sequence
  Synthetic oligonucleotide; CTA chr11 5160833 5160854 5160838 5160833 -
ggttcccacgccgcccctaatc

SEQ ID NO: 154804 - DNA, 22 bp, Artificial Sequence
  Synthetic oligonucleotide; TTC chr11 5160828 5160849 5160833 5160828 -
ccacgccgcccctaatcccgct

SEQ ID NO: 154805 - DNA, 22 bp, Artificial Sequence
  Synthetic oligonucleotide; CTA chr11 5160814 5160835 5160819 5160814 -
atcccgctcgaagcagccctga

SEQ ID NO: 154806 - DNA, 22 bp, Artificial Sequence
  Synthetic oligonucleotide; CTC chr11 5160805 5160826 5160810 5160805 -
gaagcagccctgagaaatatcg

SEQ ID NO: 154807 - DNA, 22 bp, Artificial Sequence
  Synthetic oligonucleotide; CTG chr11 5160793 5160814 5160798 5160793 -
agaaatatcgcccattatctct

SEQ ID NO: 154808 - DNA, 22 bp, Artificial Sequence
  Synthetic oligonucleotide; TTA chr11 5160776 5160797 5160781 5160776 -
tctctccataccatcccccaaa

SEQ ID NO: 154809 - DNA, 22 bp, Artificial Sequence
  Synthetic oligonucleotide; CTC chr11 5160772 5160793 5160777 5160772 -
tccataccatcccccaaaattt

SEQ ID NO: 154810 - DNA, 22 bp, Artificial Sequence
  Synthetic oligonucleotide; CTC chr11 5160770 5160791 5160775 5160770 -
cataccatcccccaaaattttc

SEQ ID NO: 154811 - DNA, 22 bp, Artificial Sequence
  Synthetic oligonucleotide; TTT chr11 5160750 5160771 5160755 5160750 -
tcgctgccccaacacttcaaca

SEQ ID NO: 154812 - DNA, 22 bp, Artificial Sequence
  Synthetic oligonucleotide; TTT chr11 5160749 5160770 5160754 5160749 -
cgctgccccaacacttcaacac

SEQ ID NO: 154813 - DNA, 22 bp, Artificial Sequence
  Synthetic oligonucleotide; TTC chr11 5160748 5160769 5160753 5160748 -
gctgccccaacacttcaacact

SEQ ID NO: 154814 - DNA, 22 bp, Artificial Sequence
  Synthetic oligonucleotide; CTG chr11 5160744 5160765 5160749 5160744 -
ccccaacacttcaacactatta

SEQ ID NO: 154815 - DNA, 22 bp, Artificial Sequence
  Synthetic oligonucleotide; CTT chr11 5160733 5160754 5160738 5160733 -
caacactattatgttttatttt

SEQ ID NO: 154816 - DNA, 22 bp, Artificial Sequence
  Synthetic oligonucleotide; TTC chr11 5160732 5160753 5160737 5160732 -
aacactattatgttttattttt

SEQ ID NO: 154817 - DNA, 22 bp, Artificial Sequence
  Synthetic oligonucleotide; CTA chr11 5160725 5160746 5160730 5160725 -
ttatgttttatttttcttatta

SEQ ID NO: 154818 - DNA, 22 bp, Artificial Sequence
  Synthetic oligonucleotide; TTA chr11 5160722 5160743 5160727 5160722 -
tgttttatttttcttattaata

SEQ ID NO: 154819 - DNA, 22 bp, Artificial Sequence
  Synthetic oligonucleotide; TTT chr11 5160717 5160738 5160722 5160717 -
tatttttcttattaatataaga

SEQ ID NO: 154820 - DNA, 22 bp, Artificial Sequence
  Synthetic oligonucleotide; TTT chr11 5160716 5160737 5160721 5160716 -
atttttcttattaatataagaa

SEQ ID NO: 154821 - DNA, 22 bp, Artificial Sequence
  Synthetic oligonucleotide; TTA chr11 5160715 5160736 5160720 5160715 -
tttttcttattaatataagaag

SEQ ID NO: 154822 - DNA, 22 bp, Artificial Sequence
  Synthetic oligonucleotide; TTT chr11 5160712 5160733 5160717 5160712 -
ttcttattaatataagaagaca

SEQ ID NO: 154823 - DNA, 22 bp, Artificial Sequence
  Synthetic oligonucleotide; TTT chr11 5160711 5160732 5160716 5160711 -
tcttattaatataagaagacag

SEQ ID NO: 154824 - DNA, 22 bp, Artificial Sequence
  Synthetic oligonucleotide; TTT chr11 5160710 5160731 5160715 5160710 -
cttattaatataagaagacagg

SEQ ID NO: 154825 - DNA, 22 bp, Artificial Sequence
  Synthetic oligonucleotide; TTC chr11 5160709 5160730 5160714 5160709 -
ttattaatataagaagacagga

SEQ ID NO: 154826 - DNA, 22 bp, Artificial Sequence
  Synthetic oligonucleotide; CTT chr11 5160707 5160728 5160712 5160707 -
attaatataagaagacaggaat

SEQ ID NO: 154827 - DNA, 22 bp, Artificial Sequence
  Synthetic oligonucleotide; TTA chr11 5160706 5160727 5160711 5160706 -
ttaatataagaagacaggaatg

SEQ ID NO: 154828 - DNA, 22 bp, Artificial Sequence
  Synthetic oligonucleotide; TTA chr11 5160703 5160724 5160708 5160703 -
atataagaagacaggaatgtca

SEQ ID NO: 154829 - DNA, 22 bp, Artificial Sequence
  Synthetic oligonucleotide; CTC chr11 5160675 5160696 5160680 5160675 -
tgagcccaagctaagccatcat

SEQ ID NO: 154830 - DNA, 22 bp, Artificial Sequence
  Synthetic oligonucleotide; CTG chr11 5160673 5160694 5160678 5160673 -
agcccaagctaagccatcatgt

SEQ ID NO: 154831 - DNA, 22 bp, Artificial Sequence
  Synthetic oligonucleotide; CTA chr11 5160662 5160683 5160667 5160662 -
agccatcatgtcccctgtgacc

SEQ ID NO: 154832 - DNA, 22 bp, Artificial Sequence
  Synthetic oligonucleotide; CTG chr11 5160645 5160666 5160650 5160645 -
tgacctgcaggtacacatacag

SEQ ID NO: 154833 - DNA, 22 bp, Artificial Sequence
  Synthetic oligonucleotide; CTG chr11 5160638 5160659 5160643 5160638 -
caggtacacatacagatggcca

SEQ ID NO: 154834 - DNA, 22 bp, Artificial Sequence
  Synthetic oligonucleotide; TTC chr11 5160612 5160633 5160617 5160612 -
ctgccttaactgatgacattcc

SEQ ID NO: 154835 - DNA, 22 bp, Artificial Sequence
  Synthetic oligonucleotide; CTG chr11 5160609 5160630 5160614 5160609 -
ccttaactgatgacattccacc

SEQ ID NO: 154836 - DNA, 22 bp, Artificial Sequence
  Synthetic oligonucleotide; CTT chr11 5160605 5160626 5160610 5160605 -
aactgatgacattccaccacaa

SEQ ID NO: 154837 - DNA, 22 bp, Artificial Sequence
  Synthetic oligonucleotide; TTA chr11 5160604 5160625 5160609 5160604 -
actgatgacattccaccacaaa

SEQ ID NO: 154838 - DNA, 22 bp, Artificial Sequence
  Synthetic oligonucleotide; CTG chr11 5160600 5160621 5160605 5160600 -
atgacattccaccacaaaagaa

SEQ ID NO: 154839 - DNA, 22 bp, Artificial Sequence
  Synthetic oligonucleotide; TTC chr11 5160591 5160612 5160596 5160591 -
caccacaaaagaagtgaaaatg

SEQ ID NO: 154840 - DNA, 22 bp, Artificial Sequence
  Synthetic oligonucleotide; CTG chr11 5160564 5160585 5160569 5160564 -
ttcctgccttaactgatgacat

SEQ ID NO: 154841 - DNA, 22 bp, Artificial Sequence
  Synthetic oligonucleotide; TTC chr11 5160561 5160582 5160566 5160561 -
ctgccttaactgatgacattgt

SEQ ID NO: 154842 - DNA, 22 bp, Artificial Sequence
  Synthetic oligonucleotide; CTG chr11 5160558 5160579 5160563 5160558 -
ccttaactgatgacattgtctt

SEQ ID NO: 154843 - DNA, 22 bp, Artificial Sequence
  Synthetic oligonucleotide; CTT chr11 5160554 5160575 5160559 5160554 -
aactgatgacattgtcttgtga

SEQ ID NO: 154844 - DNA, 22 bp, Artificial Sequence
  Synthetic oligonucleotide; TTA chr11 5160553 5160574 5160558 5160553 -
actgatgacattgtcttgtgaa

SEQ ID NO: 154845 - DNA, 22 bp, Artificial Sequence
  Synthetic oligonucleotide; CTG chr11 5160549 5160570 5160554 5160549 -
atgacattgtcttgtgaaagtc

SEQ ID NO: 154846 - DNA, 22 bp, Artificial Sequence
  Synthetic oligonucleotide; TTG chr11 5160540 5160561 5160545 5160540 -
tcttgtgaaagtccttctcctg

SEQ ID NO: 154847 - DNA, 22 bp, Artificial Sequence
  Synthetic oligonucleotide; CTT chr11 5160536 5160557 5160541 5160536 -
gtgaaagtccttctcctggctc

SEQ ID NO: 154848 - DNA, 22 bp, Artificial Sequence
  Synthetic oligonucleotide; TTG chr11 5160535 5160556 5160540 5160535 -
tgaaagtccttctcctggctca

SEQ ID NO: 154849 - DNA, 22 bp, Artificial Sequence
  Synthetic oligonucleotide; CTT chr11 5160524 5160545 5160529 5160524 -
ctcctggctcatcctggctcaa

SEQ ID NO: 154850 - DNA, 22 bp, Artificial Sequence
  Synthetic oligonucleotide; TTC chr11 5160523 5160544 5160528 5160523 -
tcctggctcatcctggctcaaa

SEQ ID NO: 154851 - DNA, 22 bp, Artificial Sequence
  Synthetic oligonucleotide; CTC chr11 5160521 5160542 5160526 5160521 -
ctggctcatcctggctcaaaag

SEQ ID NO: 154852 - DNA, 22 bp, Artificial Sequence
  Synthetic oligonucleotide; CTG chr11 5160518 5160539 5160523 5160518 -
gctcatcctggctcaaaagctc

SEQ ID NO: 154853 - DNA, 22 bp, Artificial Sequence
  Synthetic oligonucleotide; CTC chr11 5160514 5160535 5160519 5160514 -
atcctggctcaaaagctcccct

SEQ ID NO: 154854 - DNA, 22 bp, Artificial Sequence
  Synthetic oligonucleotide; CTG chr11 5160508 5160529 5160513 5160508 -
gctcaaaagctcccctactgag

SEQ ID NO: 154855 - DNA, 22 bp, Artificial Sequence
  Synthetic oligonucleotide; CTC chr11 5160504 5160525 5160509 5160504 -
aaaagctcccctactgagcacc

SEQ ID NO: 154856 - DNA, 22 bp, Artificial Sequence
  Synthetic oligonucleotide; CTC chr11 5160496 5160517 5160501 5160496 -
ccctactgagcaccttgtgacc

SEQ ID NO: 154857 - DNA, 22 bp, Artificial Sequence
  Synthetic oligonucleotide; CTA chr11 5160491 5160512 5160496 5160491 -
ctgagcaccttgtgacccccca

SEQ ID NO: 154858 - DNA, 22 bp, Artificial Sequence
  Synthetic oligonucleotide; CTG chr11 5160488 5160509 5160493 5160488 -
agcaccttgtgaccccccactc

SEQ ID NO: 154859 - DNA, 22 bp, Artificial Sequence
  Synthetic oligonucleotide; CTT chr11 5160480 5160501 5160485 5160480 -
gtgaccccccactcctgcccgc

SEQ ID NO: 154860 - DNA, 22 bp, Artificial Sequence
  Synthetic oligonucleotide; TTG chr11 5160479 5160500 5160484 5160479 -
tgaccccccactcctgcccgcc

SEQ ID NO: 154861 - DNA, 22 bp, Artificial Sequence
  Synthetic oligonucleotide; CTC chr11 5160466 5160487 5160471 5160466 -
ctgcccgccagagaacaacccc

SEQ ID NO: 154862 - DNA, 22 bp, Artificial Sequence
  Synthetic oligonucleotide; CTG chr11 5160463 5160484 5160468 5160463 -
cccgccagagaacaacccccct

SEQ ID NO: 154863 - DNA, 22 bp, Artificial Sequence
  Synthetic oligonucleotide; CTT chr11 5160440 5160461 5160445 5160440 -
tgactgtaattttcctttacct

SEQ ID NO: 154864 - DNA, 22 bp, Artificial Sequence
  Synthetic oligonucleotide; TTT chr11 5160439 5160460 5160444 5160439 -
gactgtaattttcctttaccta

SEQ ID NO: 154865 - DNA, 22 bp, Artificial Sequence
  Synthetic oligonucleotide; TTG chr11 5160438 5160459 5160443 5160438 -
actgtaattttcctttacctac

SEQ ID NO: 154866 - DNA, 22 bp, Artificial Sequence
  Synthetic oligonucleotide; CTG chr11 5160434 5160455 5160439 5160434 -
taattttcctttacctacccaa

SEQ ID NO: 154867 - DNA, 22 bp, Artificial Sequence
  Synthetic oligonucleotide; TTT chr11 5160428 5160449 5160433 5160428 -
tcctttacctacccaaatctta

SEQ ID NO: 154868 - DNA, 22 bp, Artificial Sequence
  Synthetic oligonucleotide; TTT chr11 5160427 5160448 5160432 5160427 -
cctttacctacccaaatcttat

SEQ ID NO: 154869 - DNA, 22 bp, Artificial Sequence
  Synthetic oligonucleotide; TTC chr11 5160426 5160447 5160431 5160426 -
ctttacctacccaaatcttata

SEQ ID NO: 154870 - DNA, 22 bp, Artificial Sequence
  Synthetic oligonucleotide; CTT chr11 5160423 5160444 5160428 5160423 -
tacctacccaaatcttataaaa

SEQ ID NO: 154871 - DNA, 22 bp, Artificial Sequence
  Synthetic oligonucleotide; TTT chr11 5160422 5160443 5160427 5160422 -
acctacccaaatcttataaaac

SEQ ID NO: 154872 - DNA, 22 bp, Artificial Sequence
  Synthetic oligonucleotide; TTA chr11 5160421 5160442 5160426 5160421 -
cctacccaaatcttataaaaca

SEQ ID NO: 154873 - DNA, 22 bp, Artificial Sequence
  Synthetic oligonucleotide; CTA chr11 5160417 5160438 5160422 5160417 -
cccaaatcttataaaacagccc

SEQ ID NO: 154874 - DNA, 22 bp, Artificial Sequence
  Synthetic oligonucleotide; CTT chr11 5160407 5160428 5160412 5160407 -
ataaaacagccccactcctatc

SEQ ID NO: 154875 - DNA, 22 bp, Artificial Sequence
  Synthetic oligonucleotide; TTA chr11 5160406 5160427 5160411 5160406 -
taaaacagccccactcctatct

SEQ ID NO: 154876 - DNA, 22 bp, Artificial Sequence
  Synthetic oligonucleotide; CTC chr11 5160390 5160411 5160395 5160390 -
ctatctccctttgctgactctc

SEQ ID NO: 154877 - DNA, 22 bp, Artificial Sequence
  Synthetic oligonucleotide; CTA chr11 5160387 5160408 5160392 5160387 -
tctccctttgctgactctcttt

SEQ ID NO: 154878 - DNA, 22 bp, Artificial Sequence
  Synthetic oligonucleotide; CTC chr11 5160383 5160404 5160388 5160383 -
cctttgctgactctcttttcgg

SEQ ID NO: 154879 - DNA, 22 bp, Artificial Sequence
  Synthetic oligonucleotide; CTT chr11 5160379 5160400 5160384 5160379 -
tgctgactctcttttcggactc

SEQ ID NO: 154880 - DNA, 22 bp, Artificial Sequence
  Synthetic oligonucleotide; TTT chr11 5160378 5160399 5160383 5160378 -
gctgactctcttttcggactca

SEQ ID NO: 154881 - DNA, 22 bp, Artificial Sequence
  Synthetic oligonucleotide; TTG chr11 5160377 5160398 5160382 5160377 -
ctgactctcttttcggactcag

SEQ ID NO: 154882 - DNA, 22 bp, Artificial Sequence
  Synthetic oligonucleotide; CTG chr11 5160374 5160395 5160379 5160374 -
actctcttttcggactcagccc

SEQ ID NO: 154883 - DNA, 22 bp, Artificial Sequence
  Synthetic oligonucleotide; CTC chr11 5160370 5160391 5160375 5160370 -
tcttttcggactcagcccgcct

SEQ ID NO: 154884 - DNA, 22 bp, Artificial Sequence
  Synthetic oligonucleotide; CTC chr11 5160368 5160389 5160373 5160368 -
ttttcggactcagcccgcctgc

SEQ ID NO: 154885 - DNA, 22 bp, Artificial Sequence
  Synthetic oligonucleotide; CTT chr11 5160366 5160387 5160371 5160366 -
ttcggactcagcccgcctgcac

SEQ ID NO: 154886 - DNA, 22 bp, Artificial Sequence
  Synthetic oligonucleotide; TTT chr11 5160365 5160386 5160370 5160365 -
tcggactcagcccgcctgcacc

SEQ ID NO: 154887 - DNA, 22 bp, Artificial Sequence
  Synthetic oligonucleotide; TTT chr11 5160364 5160385 5160369 5160364 -
cggactcagcccgcctgcaccc

SEQ ID NO: 154888 - DNA, 22 bp, Artificial Sequence
  Synthetic oligonucleotide; TTC chr11 5160363 5160384 5160368 5160363 -
ggactcagcccgcctgcaccca

SEQ ID NO: 154889 - DNA, 22 bp, Artificial Sequence
  Synthetic oligonucleotide; CTC chr11 5160357 5160378 5160362 5160357 -
agcccgcctgcacccaggtgat

SEQ ID NO: 154890 - DNA, 22 bp, Artificial Sequence
  Synthetic oligonucleotide; CTG chr11 5160347 5160368 5160352 5160347 -
cacccaggtgataaaaagcttt

SEQ ID NO: 154891 - DNA, 22 bp, Artificial Sequence
  Synthetic oligonucleotide; CTT chr11 5160326 5160347 5160331 5160326 -
tattgctcacacaaagcctgtt

SEQ ID NO: 154892 - DNA, 22 bp, Artificial Sequence
  Synthetic oligonucleotide; TTT chr11 5160325 5160346 5160330 5160325 -
attgctcacacaaagcctgttt

SEQ ID NO: 154893 - DNA, 22 bp, Artificial Sequence
  Synthetic oligonucleotide; TTA chr11 5160324 5160345 5160329 5160324 -
ttgctcacacaaagcctgtttg

SEQ ID NO: 154894 - DNA, 22 bp, Artificial Sequence
  Synthetic oligonucleotide; TTG chr11 5160321 5160342 5160326 5160321 -
ctcacacaaagcctgtttggta

SEQ ID NO: 154895 - DNA, 22 bp, Artificial Sequence
  Synthetic oligonucleotide; CTC chr11 5160318 5160339 5160323 5160318 -
acacaaagcctgtttggtagtc

SEQ ID NO: 154896 - DNA, 22 bp, Artificial Sequence
  Synthetic oligonucleotide; CTG chr11 5160306 5160327 5160311 5160306 -
tttggtagtctcctcacaggga

SEQ ID NO: 154897 - DNA, 22 bp, Artificial Sequence
  Synthetic oligonucleotide; TTT chr11 5160303 5160324 5160308 5160303 -
ggtagtctcctcacagggatgc

SEQ ID NO: 154898 - DNA, 22 bp, Artificial Sequence
  Synthetic oligonucleotide; TTG chr11 5160302 5160323 5160307 5160302 -
gtagtctcctcacagggatgcg

SEQ ID NO: 154899 - DNA, 22 bp, Artificial Sequence
  Synthetic oligonucleotide; CTC chr11 5160294 5160315 5160299 5160294 -
ctcacagggatgcgcatgaaac

SEQ ID NO: 154900 - DNA, 22 bp, Artificial Sequence
  Synthetic oligonucleotide; CTC chr11 5160291 5160312 5160296 5160291 -
acagggatgcgcatgaaactga

SEQ ID NO: 154901 - DNA, 22 bp, Artificial Sequence
  Synthetic oligonucleotide; CTG chr11 5160270 5160291 5160275 5160270 -
aataaccaatgagtcactaaag

SEQ ID NO: 154902 - DNA, 22 bp, Artificial Sequence
  Synthetic oligonucleotide; CTA chr11 5160251 5160272 5160256 5160251 -
aagaaattaagaaggaaatttt

SEQ ID NO: 154903 - DNA, 22 bp, Artificial Sequence
  Synthetic oligonucleotide; TTA chr11 5160242 5160263 5160247 5160242 -
agaaggaaattttaaaacttct

SEQ ID NO: 154904 - DNA, 22 bp, Artificial Sequence
  Synthetic oligonucleotide; TTT chr11 5160230 5160251 5160235 5160230 -
taaaacttcttgaaacaagtga

SEQ ID NO: 154905 - DNA, 22 bp, Artificial Sequence
  Synthetic oligonucleotide; TTT chr11 5160229 5160250 5160234 5160229 -
aaaacttcttgaaacaagtgaa

SEQ ID NO: 154906 - DNA, 22 bp, Artificial Sequence
  Synthetic oligonucleotide; TTA chr11 5160228 5160249 5160233 5160228 -
aaacttcttgaaacaagtgaaa

SEQ ID NO: 154907 - DNA, 22 bp, Artificial Sequence
  Synthetic oligonucleotide; CTT chr11 5160222 5160243 5160227 5160222 -
cttgaaacaagtgaaaatggaa

SEQ ID NO: 154908 - DNA, 22 bp, Artificial Sequence
  Synthetic oligonucleotide; TTC chr11 5160221 5160242 5160226 5160221 -
ttgaaacaagtgaaaatggaaa

SEQ ID NO: 154909 - DNA, 22 bp, Artificial Sequence
  Synthetic oligonucleotide; CTT chr11 5160219 5160240 5160224 5160219 -
gaaacaagtgaaaatggaaata

SEQ ID NO: 154910 - DNA, 22 bp, Artificial Sequence
  Synthetic oligonucleotide; TTG chr11 5160218 5160239 5160223 5160218 -
aaacaagtgaaaatggaaatac

SEQ ID NO: 154911 - DNA, 22 bp, Artificial Sequence
  Synthetic oligonucleotide; CTA chr11 5160180 5160201 5160185 5160180 -
caggatatggcaaaagcagtac

SEQ ID NO: 154912 - DNA, 22 bp, Artificial Sequence
  Synthetic oligonucleotide; CTT chr11 5160156 5160177 5160161 5160156 -
agagggaagttcatagcaataa

SEQ ID NO: 154913 - DNA, 22 bp, Artificial Sequence
  Synthetic oligonucleotide; TTA chr11 5160155 5160176 5160160 5160155 -
gagggaagttcatagcaataaa

SEQ ID NO: 154914 - DNA, 22 bp, Artificial Sequence
  Synthetic oligonucleotide; TTC chr11 5160144 5160165 5160149 5160144 -
atagcaataaacacctatatcc

SEQ ID NO: 154915 - DNA, 22 bp, Artificial Sequence
  Synthetic oligonucleotide; CTA chr11 5160127 5160148 5160132 5160127 -
tatccaaaaaagtagaaaggct

SEQ ID NO: 154916 - DNA, 22 bp, Artificial Sequence
  Synthetic oligonucleotide; CTT chr11 5160104 5160125 5160109 5160104 -
caactaagcaaccaaacaatgt

SEQ ID NO: 154917 - DNA, 22 bp, Artificial Sequence
  Synthetic oligonucleotide; TTC chr11 5160103 5160124 5160108 5160103 -
aactaagcaaccaaacaatgta

SEQ ID NO: 154918 - DNA, 22 bp, Artificial Sequence
  Synthetic oligonucleotide; CTA chr11 5160098 5160119 5160103 5160098 -
agcaaccaaacaatgtacctca

SEQ ID NO: 154919 - DNA, 22 bp, Artificial Sequence
  Synthetic oligonucleotide; CTC chr11 5160077 5160098 5160082 5160077 -
aaggaaataggaaagcaagaac

SEQ ID NO: 154920 - DNA, 22 bp, Artificial Sequence
  Synthetic oligonucleotide; TTA chr11 5160037 5160058 5160042 5160037 -
atagaaggggagaaataagaaa

SEQ ID NO: 154921 - DNA, 22 bp, Artificial Sequence
  Synthetic oligonucleotide; TTG chr11 5159989 5160010 5159994 5159989 -
agaccaaaaaatacagaaaatc

SEQ ID NO: 154922 - DNA, 22 bp, Artificial Sequence
  Synthetic oligonucleotide; TTA chr11 5159963 5159984 5159968 5159963 -
aaaacaaacagttgctttcttg

SEQ ID NO: 154923 - DNA, 22 bp, Artificial Sequence
  Synthetic oligonucleotide; TTG chr11 5159949 5159970 5159954 5159949 -
ctttcttggaaaggtaaacaaa

SEQ ID NO: 154924 - DNA, 22 bp, Artificial Sequence
  Synthetic oligonucleotide; CTT chr11 5159946 5159967 5159951 5159946 -
tcttggaaaggtaaacaaaatc

SEQ ID NO: 154925 - DNA, 22 bp, Artificial Sequence
  Synthetic oligonucleotide; TTT chr11 5159945 5159966 5159950 5159945 -
cttggaaaggtaaacaaaatca

SEQ ID NO: 154926 - DNA, 22 bp, Artificial Sequence
  Synthetic oligonucleotide; TTC chr11 5159944 5159965 5159949 5159944 -
ttggaaaggtaaacaaaatcaa

SEQ ID NO: 154927 - DNA, 22 bp, Artificial Sequence
  Synthetic oligonucleotide; CTT chr11 5159942 5159963 5159947 5159942 -
ggaaaggtaaacaaaatcaaca

SEQ ID NO: 154928 - DNA, 22 bp, Artificial Sequence
  Synthetic oligonucleotide; TTG chr11 5159941 5159962 5159946 5159941 -
gaaaggtaaacaaaatcaacaa

SEQ ID NO: 154929 - DNA, 22 bp, Artificial Sequence
  Synthetic oligonucleotide; CTT chr11 5159914 5159935 5159919 5159914 -
taagaaaaaagagtcaaataaa

SEQ ID NO: 154930 - DNA, 22 bp, Artificial Sequence
  Synthetic oligonucleotide; TTT chr11 5159913 5159934 5159918 5159913 -
aagaaaaaagagtcaaataaaa

SEQ ID NO: 154931 - DNA, 22 bp, Artificial Sequence
  Synthetic oligonucleotide; TTA chr11 5159912 5159933 5159917 5159912 -
agaaaaaagagtcaaataaaat

SEQ ID NO: 154932 - DNA, 22 bp, Artificial Sequence
  Synthetic oligonucleotide; TTA chr11 5159888 5159909 5159893 5159888 -
gaaaatgaaaaagaggatataa

SEQ ID NO: 154933 - DNA, 22 bp, Artificial Sequence
  Synthetic oligonucleotide; TTG chr11 5159860 5159881 5159865 5159860 -
agacctcagcaacacaaagact

SEQ ID NO: 154934 - DNA, 22 bp, Artificial Sequence
  Synthetic oligonucleotide; CTC chr11 5159853 5159874 5159858 5159853 -
agcaacacaaagactcattaga

SEQ ID NO: 154935 - DNA, 22 bp, Artificial Sequence
  Synthetic oligonucleotide; CTC chr11 5159837 5159858 5159842 5159837 -
attagatactattatgaacaac

SEQ ID NO: 154936 - DNA, 22 bp, Artificial Sequence
  Synthetic oligonucleotide; TTA chr11 5159833 5159854 5159838 5159833 -
gatactattatgaacaactgta

SEQ ID NO: 154937 - DNA, 22 bp, Artificial Sequence
  Synthetic oligonucleotide; CTA chr11 5159826 5159847 5159831 5159826 -
ttatgaacaactgtattccaac

SEQ ID NO: 154938 - DNA, 22 bp, Artificial Sequence
  Synthetic oligonucleotide; TTA chr11 5159823 5159844 5159828 5159823 -
tgaacaactgtattccaacaaa

SEQ ID NO: 154939 - DNA, 22 bp, Artificial Sequence
  Synthetic oligonucleotide; CTG chr11 5159813 5159834 5159818 5159813 -
tattccaacaaattggaaaatc

SEQ ID NO: 154940 - DNA, 22 bp, Artificial Sequence
  Synthetic oligonucleotide; TTC chr11 5159808 5159829 5159813 5159808 -
caacaaattggaaaatctagaa

SEQ ID NO: 154941 - DNA, 22 bp, Artificial Sequence
  Synthetic oligonucleotide; TTG chr11 5159798 5159819 5159803 5159798 -
gaaaatctagaataaatggata

SEQ ID NO: 154942 - DNA, 22 bp, Artificial Sequence
  Synthetic oligonucleotide; CTA chr11 5159789 5159810 5159794 5159789 -
gaataaatggataaattcctgg

SEQ ID NO: 154943 - DNA, 22 bp, Artificial Sequence
  Synthetic oligonucleotide; TTC chr11 5159771 5159792 5159776 5159771 -
ctggacacatacagcctagcaa

SEQ ID NO: 154944 - DNA, 22 bp, Artificial Sequence
  Synthetic oligonucleotide; CTG chr11 5159768 5159789 5159773 5159768 -
gacacatacagcctagcaagac

SEQ ID NO: 154945 - DNA, 22 bp, Artificial Sequence
  Synthetic oligonucleotide; CTA chr11 5159753 5159774 5159758 5159753 -
gcaagactgaagcatgtagaaa

SEQ ID NO: 154946 - DNA, 22 bp, Artificial Sequence
  Synthetic oligonucleotide; CTG chr11 5159744 5159765 5159749 5159744 -
aagcatgtagaaacagaaaacc

SEQ ID NO: 154947 - DNA, 22 bp, Artificial Sequence
  Synthetic oligonucleotide; CTC chr11 5159720 5159741 5159725 5159720 -
aatagaacaataatgaataaca

SEQ ID NO: 154948 - DNA, 22 bp, Artificial Sequence
  Synthetic oligonucleotide; TTA chr11 5159692 5159713 5159697 5159692 -
aagttgtaatataaagtttcct

SEQ ID NO: 154949 - DNA, 22 bp, Artificial Sequence
  Synthetic oligonucleotide; TTG chr11 5159686 5159707 5159691 5159686 -
taatataaagtttcctattaaa

SEQ ID NO: 154950 - DNA, 22 bp, Artificial Sequence
  Synthetic oligonucleotide; TTT chr11 5159673 5159694 5159678 5159673 -
cctattaaagaaaagcccagga

SEQ ID NO: 154951 - DNA, 22 bp, Artificial Sequence
  Synthetic oligonucleotide; TTC chr11 5159672 5159693 5159677 5159672 -
ctattaaagaaaagcccaggac

SEQ ID NO: 154952 - DNA, 22 bp, Artificial Sequence
  Synthetic oligonucleotide; CTA chr11 5159669 5159690 5159674 5159669 -
ttaaagaaaagcccaggactcg

SEQ ID NO: 154953 - DNA, 22 bp, Artificial Sequence
  Synthetic oligonucleotide; TTA chr11 5159666 5159687 5159671 5159666 -
aagaaaagcccaggactcgatg

SEQ ID NO: 154954 - DNA, 22 bp, Artificial Sequence
  Synthetic oligonucleotide; CTC chr11 5159648 5159669 5159653 5159648 -
gatgggctaccaaacatttcaa

SEQ ID NO: 154955 - DNA, 22 bp, Artificial Sequence
  Synthetic oligonucleotide; CTA chr11 5159639 5159660 5159644 5159639 -
ccaaacatttcaagtagaacta

SEQ ID NO: 154956 - DNA, 22 bp, Artificial Sequence
  Synthetic oligonucleotide; TTT chr11 5159629 5159650 5159634 5159629 -
caagtagaactaatactaatcg

SEQ ID NO: 154957 - DNA, 22 bp, Artificial Sequence
  Synthetic oligonucleotide; TTC chr11 5159628 5159649 5159633 5159628 -
aagtagaactaatactaatcgt

SEQ ID NO: 154958 - DNA, 22 bp, Artificial Sequence
  Synthetic oligonucleotide; CTA chr11 5159617 5159638 5159622 5159617 -
atactaatcgtactcaaattcc

SEQ ID NO: 154959 - DNA, 22 bp, Artificial Sequence
  Synthetic oligonucleotide; CTA chr11 5159611 5159632 5159616 5159611 -
atcgtactcaaattcctcaaac

SEQ ID NO: 154960 - DNA, 22 bp, Artificial Sequence
  Synthetic oligonucleotide; CTC chr11 5159602 5159623 5159607 5159602 -
aaattcctcaaacaaacaaaca

SEQ ID NO: 154961 - DNA, 22 bp, Artificial Sequence
  Synthetic oligonucleotide; TTC chr11 5159596 5159617 5159601 5159596 -
ctcaaacaaacaaacaaataaa

SEQ ID NO: 154962 - DNA, 22 bp, Artificial Sequence
  Synthetic oligonucleotide; CTC chr11 5159593 5159614 5159598 5159593 -
aaacaaacaaacaaataaaaac

SEQ ID NO: 154963 - DNA, 22 bp, Artificial Sequence
  Synthetic oligonucleotide; CTG chr11 5159569 5159590 5159574 5159569 -
aaaagaagggcctacttctaaa

SEQ ID NO: 154964 - DNA, 22 bp, Artificial Sequence
  Synthetic oligonucleotide; CTA chr11 5159555 5159576 5159560 5159555 -
cttctaaacttattctatgagg

SEQ ID NO: 154965 - DNA, 22 bp, Artificial Sequence
  Synthetic oligonucleotide; CTT chr11 5159552 5159573 5159557 5159552 -
ctaaacttattctatgaggcaa

SEQ ID NO: 154966 - DNA, 22 bp, Artificial Sequence
  Synthetic oligonucleotide; TTC chr11 5159551 5159572 5159556 5159551 -
taaacttattctatgaggcaag

SEQ ID NO: 154967 - DNA, 22 bp, Artificial Sequence
  Synthetic oligonucleotide; CTA chr11 5159549 5159570 5159554 5159549 -
aacttattctatgaggcaagca

SEQ ID NO: 154968 - DNA, 22 bp, Artificial Sequence
  Synthetic oligonucleotide; CTT chr11 5159544 5159565 5159549 5159544 -
attctatgaggcaagcattact

SEQ ID NO: 154969 - DNA, 22 bp, Artificial Sequence
  Synthetic oligonucleotide; TTA chr11 5159543 5159564 5159548 5159543 -
ttctatgaggcaagcattactc

SEQ ID NO: 154970 - DNA, 22 bp, Artificial Sequence
  Synthetic oligonucleotide; TTC chr11 5159540 5159561 5159545 5159540 -
tatgaggcaagcattactctaa

SEQ ID NO: 154971 - DNA, 22 bp, Artificial Sequence
  Synthetic oligonucleotide; CTA chr11 5159538 5159559 5159543 5159538 -
tgaggcaagcattactctaata

SEQ ID NO: 154972 - DNA, 22 bp, Artificial Sequence
  Synthetic oligonucleotide; TTA chr11 5159524 5159545 5159529 5159524 -
ctctaatatacccaaaccagac

SEQ ID NO: 154973 - DNA, 22 bp, Artificial Sequence
  Synthetic oligonucleotide; CTC chr11 5159521 5159542 5159526 5159521 -
taatatacccaaaccagaccag

SEQ ID NO: 154974 - DNA, 22 bp, Artificial Sequence
  Synthetic oligonucleotide; CTA chr11 5159519 5159540 5159524 5159519 -
atatacccaaaccagaccagga

SEQ ID NO: 154975 - DNA, 22 bp, Artificial Sequence
  Synthetic oligonucleotide; CTC chr11 5159477 5159498 5159482 5159477 -
aaaggaggtacagtaggaacat

SEQ ID NO: 154976 - DNA, 22 bp, Artificial Sequence
  Synthetic oligonucleotide; CTC chr11 5159450 5159471 5159455 5159450 -
aaaataataaaaaccatatagg

SEQ ID NO: 154977 - DNA, 22 bp, Artificial Sequence
  Synthetic oligonucleotide; CTA chr11 5159413 5159434 5159418 5159413 -
acattatgctgaacagagaaac

SEQ ID NO: 154978 - DNA, 22 bp, Artificial Sequence
  Synthetic oligonucleotide; TTA chr11 5159407 5159428 5159412 5159407 -
tgctgaacagagaaacattgaa

SEQ ID NO: 154979 - DNA, 22 bp, Artificial Sequence
  Synthetic oligonucleotide; CTG chr11 5159402 5159423 5159407 5159402 -
aacagagaaacattgaaggcct

SEQ ID NO: 154980 - DNA, 22 bp, Artificial Sequence
  Synthetic oligonucleotide; TTG chr11 5159387 5159408 5159392 5159387 -
aaggcctttcctctaaggactg

SEQ ID NO: 154981 - DNA, 22 bp, Artificial Sequence
  Synthetic oligonucleotide; CTT chr11 5159379 5159400 5159384 5159379 -
tcctctaaggactgaaataagg

SEQ ID NO: 154982 - DNA, 22 bp, Artificial Sequence
  Synthetic oligonucleotide; TTT chr11 5159378 5159399 5159383 5159378 -
cctctaaggactgaaataaggc

SEQ ID NO: 154983 - DNA, 22 bp, Artificial Sequence
  Synthetic oligonucleotide; TTC chr11 5159377 5159398 5159382 5159377 -
ctctaaggactgaaataaggca

SEQ ID NO: 154984 - DNA, 22 bp, Artificial Sequence
  Synthetic oligonucleotide; CTC chr11 5159374 5159395 5159379 5159374 -
taaggactgaaataaggcaaga

SEQ ID NO: 154985 - DNA, 22 bp, Artificial Sequence
  Synthetic oligonucleotide; CTA chr11 5159372 5159393 5159377 5159372 -
aggactgaaataaggcaagaat

SEQ ID NO: 154986 - DNA, 22 bp, Artificial Sequence
  Synthetic oligonucleotide; CTG chr11 5159365 5159386 5159370 5159365 -
aaataaggcaagaatgctcact

SEQ ID NO: 154987 - DNA, 22 bp, Artificial Sequence
  Synthetic oligonucleotide; CTC chr11 5159346 5159367 5159351 5159346 -
actttcattgccattatttaac

SEQ ID NO: 154988 - DNA, 22 bp, Artificial Sequence
  Synthetic oligonucleotide; CTT chr11 5159342 5159363 5159347 5159342 -
tcattgccattatttaacataa

SEQ ID NO: 154989 - DNA, 22 bp, Artificial Sequence
  Synthetic oligonucleotide; TTT chr11 5159341 5159362 5159346 5159341 -
cattgccattatttaacataat

SEQ ID NO: 154990 - DNA, 22 bp, Artificial Sequence
  Synthetic oligonucleotide; TTC chr11 5159340 5159361 5159345 5159340 -
attgccattatttaacataata

SEQ ID NO: 154991 - DNA, 22 bp, Artificial Sequence
  Synthetic oligonucleotide; TTG chr11 5159336 5159357 5159341 5159336 -
ccattatttaacataatattgg

SEQ ID NO: 154992 - DNA, 22 bp, Artificial Sequence
  Synthetic oligonucleotide; TTA chr11 5159330 5159351 5159335 5159330 -
tttaacataatattggaagtct

SEQ ID NO: 154993 - DNA, 22 bp, Artificial Sequence
  Synthetic oligonucleotide; TTT chr11 5159327 5159348 5159332 5159327 -
aacataatattggaagtcttgg

SEQ ID NO: 154994 - DNA, 22 bp, Artificial Sequence
  Synthetic oligonucleotide; TTA chr11 5159326 5159347 5159331 5159326 -
acataatattggaagtcttgga

SEQ ID NO: 154995 - DNA, 22 bp, Artificial Sequence
  Synthetic oligonucleotide; TTG chr11 5159315 5159336 5159320 5159315 -
gaagtcttggaaagagaaattc

SEQ ID NO: 154996 - DNA, 22 bp, Artificial Sequence
  Synthetic oligonucleotide; CTT chr11 5159307 5159328 5159312 5159307 -
ggaaagagaaattcaggaagag

SEQ ID NO: 154997 - DNA, 22 bp, Artificial Sequence
  Synthetic oligonucleotide; TTG chr11 5159306 5159327 5159311 5159306 -
gaaagagaaattcaggaagaga

SEQ ID NO: 154998 - DNA, 22 bp, Artificial Sequence
  Synthetic oligonucleotide; TTC chr11 5159293 5159314 5159298 5159293 -
aggaagagaaagaaagtgcatc

SEQ ID NO: 154999 - DNA, 22 bp, Artificial Sequence
  Synthetic oligonucleotide; TTG chr11 5159264 5159285 5159269 5159264 -
gaaaggaagaagttaaattagc

SEQ ID NO: 155000 - DNA, 22 bp, Artificial Sequence
  Synthetic oligonucleotide; TTA chr11 5159249 5159270 5159254 5159249 -
aattagcctagtttgtagatga

SEQ ID NO: 155001 - DNA, 22 bp, Artificial Sequence
  Synthetic oligonucleotide; TTA chr11 5159244 5159265 5159249 5159244 -
gcctagtttgtagatgacatga

SEQ ID NO: 155002 - DNA, 22 bp, Artificial Sequence
  Synthetic oligonucleotide; CTA chr11 5159239 5159260 5159244 5159239 -
gtttgtagatgacatgatctta

SEQ ID NO: 155003 - DNA, 22 bp, Artificial Sequence
  Synthetic oligonucleotide; TTT chr11 5159235 5159256 5159240 5159235 -
gtagatgacatgatcttatact

SEQ ID NO: 155004 - DNA, 22 bp, Artificial Sequence
  Synthetic oligonucleotide; TTG chr11 5159234 5159255 5159239 5159234 -
tagatgacatgatcttatactt

SEQ ID NO: 155005 - DNA, 22 bp, Artificial Sequence
  Synthetic oligonucleotide; CTT chr11 5159218 5159239 5159223 5159218 -
atacttagaaaaaacctaaaaa

SEQ ID NO: 155006 - DNA, 22 bp, Artificial Sequence
  Synthetic oligonucleotide; TTA chr11 5159217 5159238 5159222 5159217 -
tacttagaaaaaacctaaaaac

SEQ ID NO: 155007 - DNA, 22 bp, Artificial Sequence
  Synthetic oligonucleotide; CTT chr11 5159212 5159233 5159217 5159212 -
agaaaaaacctaaaaacttcac

SEQ ID NO: 155008 - DNA, 22 bp, Artificial Sequence
  Synthetic oligonucleotide; TTA chr11 5159211 5159232 5159216 5159211 -
gaaaaaacctaaaaacttcact

SEQ ID NO: 155009 - DNA, 22 bp, Artificial Sequence
  Synthetic oligonucleotide; CTA chr11 5159200 5159221 5159205 5159200 -
aaaacttcactaaatactatta

SEQ ID NO: 155010 - DNA, 22 bp, Artificial Sequence
  Synthetic oligonucleotide; CTT chr11 5159193 5159214 5159198 5159193 -
cactaaatactattaaaacgat

SEQ ID NO: 155011 - DNA, 22 bp, Artificial Sequence
  Synthetic oligonucleotide; TTC chr11 5159192 5159213 5159197 5159192 -
actaaatactattaaaacgatt

SEQ ID NO: 155012 - DNA, 22 bp, Artificial Sequence
  Synthetic oligonucleotide; CTA chr11 5159188 5159209 5159193 5159188 -
aatactattaaaacgatttaaa

SEQ ID NO: 155013 - DNA, 22 bp, Artificial Sequence
  Synthetic oligonucleotide; CTA chr11 5159181 5159202 5159186 5159181 -
ttaaaacgatttaaaaaaatca

SEQ ID NO: 155014 - DNA, 22 bp, Artificial Sequence
  Synthetic oligonucleotide; TTA chr11 5159178 5159199 5159183 5159178 -
aaacgatttaaaaaaatcaata

SEQ ID NO: 155015 - DNA, 22 bp, Artificial Sequence
  Synthetic oligonucleotide; TTT chr11 5159169 5159190 5159174 5159169 -
aaaaaaatcaataaagttacag

SEQ ID NO: 155016 - DNA, 22 bp, Artificial Sequence
  Synthetic oligonucleotide; TTA chr11 5159168 5159189 5159173 5159168 -
aaaaaatcaataaagttacagg

SEQ ID NO: 155017 - DNA, 22 bp, Artificial Sequence
  Synthetic oligonucleotide; TTA chr11 5159150 5159171 5159155 5159150 -
caggatatgaaataaaaataca

SEQ ID NO: 155018 - DNA, 22 bp, Artificial Sequence
  Synthetic oligonucleotide; TTT chr11 5159113 5159134 5159118 5159113 -
catatataaaaagttatcaatc

SEQ ID NO: 155019 - DNA, 22 bp, Artificial Sequence
  Synthetic oligonucleotide; TTC chr11 5159112 5159133 5159117 5159112 -
atatataaaaagttatcaatct

SEQ ID NO: 155020 - DNA, 22 bp, Artificial Sequence
  Synthetic oligonucleotide; TTA chr11 5159097 5159118 5159102 5159097 -
tcaatctgcaaaaaaaatcaat

SEQ ID NO: 155021 - DNA, 22 bp, Artificial Sequence
  Synthetic oligonucleotide; CTG chr11 5159089 5159110 5159094 5159089 -
caaaaaaaatcaataaaacaat

SEQ ID NO: 155022 - DNA, 22 bp, Artificial Sequence
  Synthetic oligonucleotide; CTT chr11 5159064 5159085 5159069 5159064 -
atttacaatagcaataaaaata

SEQ ID NO: 155023 - DNA, 22 bp, Artificial Sequence
  Synthetic oligonucleotide; TTA chr11 5159063 5159084 5159068 5159063 -
tttacaatagcaataaaaatat

SEQ ID NO: 155024 - DNA, 22 bp, Artificial Sequence
  Synthetic oligonucleotide; TTT chr11 5159060 5159081 5159065 5159060 -
acaatagcaataaaaatataaa

SEQ ID NO: 155025 - DNA, 22 bp, Artificial Sequence
  Synthetic oligonucleotide; TTA chr11 5159059 5159080 5159064 5159059 -
caatagcaataaaaatataaaa

SEQ ID NO: 155026 - DNA, 22 bp, Artificial Sequence
  Synthetic oligonucleotide; CTA chr11 5159019 5159040 5159024 5159019 -
acccaagaagtaaaagatctct

SEQ ID NO: 155027 - DNA, 22 bp, Artificial Sequence
  Synthetic oligonucleotide; CTC chr11 5158998 5159019 5159003 5158998 -
tataagaaaaattataaaactc

SEQ ID NO: 155028 - DNA, 22 bp, Artificial Sequence
  Synthetic oligonucleotide; CTA chr11 5158996 5159017 5159001 5158996 -
taagaaaaattataaaactctg

SEQ ID NO: 155029 - DNA, 22 bp, Artificial Sequence
  Synthetic oligonucleotide; TTA chr11 5158984 5159005 5158989 5158984 -
taaaactctggtgaaagaaata

SEQ ID NO: 155030 - DNA, 22 bp, Artificial Sequence
  Synthetic oligonucleotide; CTC chr11 5158976 5158997 5158981 5158976 -
tggtgaaagaaatagaagaggg

SEQ ID NO: 155031 - DNA, 22 bp, Artificial Sequence
  Synthetic oligonucleotide; CTG chr11 5158974 5158995 5158979 5158974 -
gtgaaagaaatagaagagggca

SEQ ID NO: 155032 - DNA, 22 bp, Artificial Sequence
  Synthetic oligonucleotide; TTC chr11 5158928 5158949 5158933 5158928 -
catgctcatgaactagaagaat

SEQ ID NO: 155033 - DNA, 22 bp, Artificial Sequence
  Synthetic oligonucleotide; CTC chr11 5158921 5158942 5158926 5158921 -
atgaactagaagaattaatatt

SEQ ID NO: 155034 - DNA, 22 bp, Artificial Sequence
  Synthetic oligonucleotide; CTA chr11 5158913 5158934 5158918 5158913 -
gaagaattaatattaaaatgac

SEQ ID NO: 155035 - DNA, 22 bp, Artificial Sequence
  Synthetic oligonucleotide; TTA chr11 5158904 5158925 5158909 5158904 -
atattaaaatgacaatactacc

SEQ ID NO: 155036 - DNA, 22 bp, Artificial Sequence
  Synthetic oligonucleotide; TTA chr11 5158898 5158919 5158903 5158898 -
aaatgacaatactacccaaagc

SEQ ID NO: 155037 - DNA, 22 bp, Artificial Sequence
  Synthetic oligonucleotide; CTA chr11 5158884 5158905 5158889 5158884 -
cccaaagcaatgtacagattca

SEQ ID NO: 155038 - DNA, 22 bp, Artificial Sequence
  Synthetic oligonucleotide; TTC chr11 5158863 5158884 5158868 5158863 -
agtgcaatttctgtcaaaatac

SEQ ID NO: 155039 - DNA, 22 bp, Artificial Sequence
  Synthetic oligonucleotide; TTT chr11 5158853 5158874 5158858 5158853 -
ctgtcaaaataccaatggcatt

SEQ ID NO: 155040 - DNA, 22 bp, Artificial Sequence
  Synthetic oligonucleotide; TTC chr11 5158852 5158873 5158857 5158852 -
tgtcaaaataccaatggcattc

SEQ ID NO: 155041 - DNA, 22 bp, Artificial Sequence
  Synthetic oligonucleotide; CTG chr11 5158850 5158871 5158855 5158850 -
tcaaaataccaatggcattcac

SEQ ID NO: 155042 - DNA, 22 bp, Artificial Sequence
  Synthetic oligonucleotide; TTC chr11 5158830 5158851 5158835 5158830 -
acagaaatagaaaaacaatcct

SEQ ID NO: 155043 - DNA, 22 bp, Artificial Sequence
  Synthetic oligonucleotide; CTA chr11 5158807 5158828 5158812 5158807 -
atatttatatggaaccacaaaa

SEQ ID NO: 155044 - DNA, 22 bp, Artificial Sequence
  Synthetic oligonucleotide; TTT chr11 5158801 5158822 5158806 5158801 -
atatggaaccacaaaagatccc

SEQ ID NO: 155045 - DNA, 22 bp, Artificial Sequence
  Synthetic oligonucleotide; TTA chr11 5158800 5158821 5158805 5158800 -
tatggaaccacaaaagatcccc

SEQ ID NO: 155046 - DNA, 22 bp, Artificial Sequence
  Synthetic oligonucleotide; CTA chr11 5158770 5158791 5158775 5158770 -
aagcaatcctgagcaaaaagaa

SEQ ID NO: 155047 - DNA, 22 bp, Artificial Sequence
  Synthetic oligonucleotide; CTG chr11 5158759 5158780 5158764 5158759 -
agcaaaaagaacaaaaccaaag

SEQ ID NO: 155048 - DNA, 22 bp, Artificial Sequence
  Synthetic oligonucleotide; CTA chr11 5158734 5158755 5158739 5158734 -
tcacactatatgacttcaaaat

SEQ ID NO: 155049 - DNA, 22 bp, Artificial Sequence
  Synthetic oligonucleotide; CTA chr11 5158726 5158747 5158731 5158726 -
tatgacttcaaaatctactaca

SEQ ID NO: 155050 - DNA, 22 bp, Artificial Sequence
  Synthetic oligonucleotide; CTT chr11 5158718 5158739 5158723 5158718 -
caaaatctactacaaagctaca

SEQ ID NO: 155051 - DNA, 22 bp, Artificial Sequence
  Synthetic oligonucleotide; TTC chr11 5158717 5158738 5158722 5158717 -
aaaatctactacaaagctacag

SEQ ID NO: 155052 - DNA, 22 bp, Artificial Sequence
  Synthetic oligonucleotide; CTA chr11 5158709 5158730 5158714 5158709 -
ctacaaagctacagtagccaaa

SEQ ID NO: 155053 - DNA, 22 bp, Artificial Sequence
  Synthetic oligonucleotide; CTA chr11 5158706 5158727 5158711 5158706 -
caaagctacagtagccaaacag

SEQ ID NO: 155054 - DNA, 22 bp, Artificial Sequence
  Synthetic oligonucleotide; CTA chr11 5158698 5158719 5158703 5158698 -
cagtagccaaacagcacagtac

SEQ ID NO: 155055 - DNA, 22 bp, Artificial Sequence
  Synthetic oligonucleotide; CTG chr11 5158674 5158695 5158679 5158674 -
cataaagacagacatacagccc

SEQ ID NO: 155056 - DNA, 22 bp, Artificial Sequence
  Synthetic oligonucleotide; CTT chr11 5158610 5158631 5158615 5158610 -
aacaaccaagtcatctttaaca

SEQ ID NO: 155057 - DNA, 22 bp, Artificial Sequence
  Synthetic oligonucleotide; TTA chr11 5158609 5158630 5158614 5158609 -
acaaccaagtcatctttaacaa

SEQ ID NO: 155058 - DNA, 22 bp, Artificial Sequence
  Synthetic oligonucleotide; CTT chr11 5158593 5158614 5158598 5158593 -
taacaaaggcatcaagaacata

SEQ ID NO: 155059 - DNA, 22 bp, Artificial Sequence
  Synthetic oligonucleotide; TTT chr11 5158592 5158613 5158597 5158592 -
aacaaaggcatcaagaacataa

SEQ ID NO: 155060 - DNA, 22 bp, Artificial Sequence
  Synthetic oligonucleotide; TTA chr11 5158591 5158612 5158596 5158591 -
acaaaggcatcaagaacataaa

SEQ ID NO: 155061 - DNA, 22 bp, Artificial Sequence
  Synthetic oligonucleotide; CTC chr11 5158537 5158558 5158542 5158537 -
acacctgtaatcccagcacttt

SEQ ID NO: 155062 - DNA, 22 bp, Artificial Sequence
  Synthetic oligonucleotide; CTG chr11 5158530 5158551 5158535 5158530 -
taatcccagcactttgtgaggc

SEQ ID NO: 155063 - DNA, 22 bp, Artificial Sequence
  Synthetic oligonucleotide; CTT chr11 5158516 5158537 5158521 5158516 -
tgtgaggctgaggtggggggat

SEQ ID NO: 155064 - DNA, 22 bp, Artificial Sequence
  Synthetic oligonucleotide; TTT chr11 5158515 5158536 5158520 5158515 -
gtgaggctgaggtggggggatc

SEQ ID NO: 155065 - DNA, 22 bp, Artificial Sequence
  Synthetic oligonucleotide; TTG chr11 5158514 5158535 5158519 5158514 -
tgaggctgaggtggggggatca

SEQ ID NO: 155066 - DNA, 22 bp, Artificial Sequence
  Synthetic oligonucleotide; CTG chr11 5158506 5158527 5158511 5158506 -
aggtggggggatcacgaggtca

SEQ ID NO: 155067 - DNA, 22 bp, Artificial Sequence
  Synthetic oligonucleotide; TTC chr11 5158477 5158498 5158482 5158477 -
aagaccagcctgaccaacgtgg

SEQ ID NO: 155068 - DNA, 22 bp, Artificial Sequence
  Synthetic oligonucleotide; CTG chr11 5158465 5158486 5158470 5158465 -
accaacgtggtgacactccgtc

SEQ ID NO: 155069 - DNA, 22 bp, Artificial Sequence
  Synthetic oligonucleotide; CTC chr11 5158447 5158468 5158452 5158447 -
cgtctctactaaaaatacaaaa

SEQ ID NO: 155070 - DNA, 22 bp, Artificial Sequence
  Synthetic oligonucleotide; CTC chr11 5158441 5158462 5158446 5158441 -
tactaaaaatacaaaaattagc

SEQ ID NO: 155071 - DNA, 22 bp, Artificial Sequence
  Synthetic oligonucleotide; CTA chr11 5158439 5158460 5158444 5158439 -
ctaaaaatacaaaaattagcca

SEQ ID NO: 155072 - DNA, 22 bp, Artificial Sequence
  Synthetic oligonucleotide; CTA chr11 5158436 5158457 5158441 5158436 -
aaaatacaaaaattagccaggc

SEQ ID NO: 155073 - DNA, 22 bp, Artificial Sequence
  Synthetic oligonucleotide; TTA chr11 5158421 5158442 5158426 5158421 -
gccaggcatggtggggcgctcc

SEQ ID NO: 155074 - DNA, 22 bp, Artificial Sequence
  Synthetic oligonucleotide; CTC chr11 5158400 5158421 5158405 5158400 -
ctgtaatcccagatactcagga

SEQ ID NO: 155075 - DNA, 22 bp, Artificial Sequence
  Synthetic oligonucleotide; CTG chr11 5158397 5158418 5158402 5158397 -
taatcccagatactcaggaggc

SEQ ID NO: 155076 - DNA, 22 bp, Artificial Sequence
  Synthetic oligonucleotide; CTC chr11 5158382 5158403 5158387 5158382 -
aggaggctgaggcaggagaatc

SEQ ID NO: 155077 - DNA, 22 bp, Artificial Sequence
  Synthetic oligonucleotide; CTG chr11 5158373 5158394 5158378 5158373 -
aggcaggagaatcgcttgaacc

SEQ ID NO: 155078 - DNA, 22 bp, Artificial Sequence
  Synthetic oligonucleotide; CTT chr11 5158356 5158377 5158361 5158356 -
gaacctgggaggcagaagttgc

SEQ ID NO: 155079 - DNA, 22 bp, Artificial Sequence
  Synthetic oligonucleotide; TTG chr11 5158355 5158376 5158360 5158355 -
aacctgggaggcagaagttgca

SEQ ID NO: 155080 - DNA, 22 bp, Artificial Sequence
  Synthetic oligonucleotide; CTG chr11 5158349 5158370 5158354 5158349 -
ggaggcagaagttgcagtgatc

SEQ ID NO: 155081 - DNA, 22 bp, Artificial Sequence
  Synthetic oligonucleotide; TTG chr11 5158335 5158356 5158340 5158335 -
cagtgatccaagattgtgctgc

SEQ ID NO: 155082 - DNA, 22 bp, Artificial Sequence
  Synthetic oligonucleotide; TTG chr11 5158319 5158340 5158324 5158319 -
tgctgccactgcactccagcct

SEQ ID NO: 155083 - DNA, 22 bp, Artificial Sequence
  Synthetic oligonucleotide; CTG chr11 5158314 5158335 5158319 5158314 -
ccactgcactccagcctgggca

SEQ ID NO: 155084 - DNA, 22 bp, Artificial Sequence
  Synthetic oligonucleotide; CTG chr11 5158308 5158329 5158313 5158308 -
cactccagcctgggcaacagtg

SEQ ID NO: 155085 - DNA, 22 bp, Artificial Sequence
  Synthetic oligonucleotide; CTC chr11 5158303 5158324 5158308 5158303 -
cagcctgggcaacagtgagact

SEQ ID NO: 155086 - DNA, 22 bp, Artificial Sequence
  Synthetic oligonucleotide; CTG chr11 5158296 5158317 5158301 5158296 -
ggcaacagtgagactccatctc

SEQ ID NO: 155087 - DNA, 22 bp, Artificial Sequence
  Synthetic oligonucleotide; CTC chr11 5158280 5158301 5158285 5158280 -
catctcaaaaaaaaaaaaaaaa

SEQ ID NO: 155088 - DNA, 22 bp, Artificial Sequence
  Synthetic oligonucleotide; CTC chr11 5158274 5158295 5158279 5158274 -
aaaaaaaaaaaaaaaaaaggta

SEQ ID NO: 155089 - DNA, 22 bp, Artificial Sequence
  Synthetic oligonucleotide; CTT chr11 5158241 5158262 5158246 5158241 -
ttcaagaaacagtgctaggaaa

SEQ ID NO: 155090 - DNA, 22 bp, Artificial Sequence
  Synthetic oligonucleotide; TTT chr11 5158240 5158261 5158245 5158240 -
tcaagaaacagtgctaggaaaa

SEQ ID NO: 155091 - DNA, 22 bp, Artificial Sequence
  Synthetic oligonucleotide; TTT chr11 5158239 5158260 5158244 5158239 -
caagaaacagtgctaggaaaac

SEQ ID NO: 155092 - DNA, 22 bp, Artificial Sequence
  Synthetic oligonucleotide; TTC chr11 5158238 5158259 5158243 5158238 -
aagaaacagtgctaggaaaact

SEQ ID NO: 155093 - DNA, 22 bp, Artificial Sequence
  Synthetic oligonucleotide; CTA chr11 5158224 5158245 5158229 5158224 -
ggaaaactggatatccatttgc

SEQ ID NO: 155094 - DNA, 22 bp, Artificial Sequence
  Synthetic oligonucleotide; CTG chr11 5158215 5158236 5158220 5158215 -
gatatccatttgcaaaagagta

SEQ ID NO: 155095 - DNA, 22 bp, Artificial Sequence
  Synthetic oligonucleotide; TTT chr11 5158204 5158225 5158209 5158204 -
gcaaaagagtaaaatcggaccc

SEQ ID NO: 155096 - DNA, 22 bp, Artificial Sequence
  Synthetic oligonucleotide; TTG chr11 5158203 5158224 5158208 5158203 -
caaaagagtaaaatcggacccc

SEQ ID NO: 155097 - DNA, 22 bp, Artificial Sequence
  Synthetic oligonucleotide; CTA chr11 5158179 5158200 5158184 5158179 -
tctctcactatatacaaaaatc

SEQ ID NO: 155098 - DNA, 22 bp, Artificial Sequence
  Synthetic oligonucleotide; CTC chr11 5158175 5158196 5158180 5158175 -
tcactatatacaaaaatcaaat

SEQ ID NO: 155099 - DNA, 22 bp, Artificial Sequence
  Synthetic oligonucleotide; CTC chr11 5158173 5158194 5158178 5158173 -
actatatacaaaaatcaaatca

SEQ ID NO: 155100 - DNA, 22 bp, Artificial Sequence
  Synthetic oligonucleotide; CTA chr11 5158169 5158190 5158174 5158169 -
tatacaaaaatcaaatcaagat

SEQ ID NO: 155101 - DNA, 22 bp, Artificial Sequence
  Synthetic oligonucleotide; TTA chr11 5158141 5158162 5158146 5158141 -
aagacttgaatccaatacctga

SEQ ID NO: 155102 - DNA, 22 bp, Artificial Sequence
  Synthetic oligonucleotide; CTT chr11 5158134 5158155 5158139 5158134 -
gaatccaatacctgaaattatg

SEQ ID NO: 155103 - DNA, 22 bp, Artificial Sequence
  Synthetic oligonucleotide; TTG chr11 5158133 5158154 5158138 5158133 -
aatccaatacctgaaattatga

SEQ ID NO: 155104 - DNA, 22 bp, Artificial Sequence
  Synthetic oligonucleotide; CTG chr11 5158120 5158141 5158125 5158120 -
aaattatgaaactactggaaga

SEQ ID NO: 155105 - DNA, 22 bp, Artificial Sequence
  Synthetic oligonucleotide; TTA chr11 5158114 5158135 5158119 5158114 -
tgaaactactggaagaaaacag

SEQ ID NO: 155106 - DNA, 22 bp, Artificial Sequence
  Synthetic oligonucleotide; CTA chr11 5158106 5158127 5158111 5158106 -
ctggaagaaaacagtggggaaa

SEQ ID NO: 155107 - DNA, 22 bp, Artificial Sequence
  Synthetic oligonucleotide; CTG chr11 5158103 5158124 5158108 5158103 -
gaagaaaacagtggggaaaccc

SEQ ID NO: 155108 - DNA, 22 bp, Artificial Sequence
  Synthetic oligonucleotide; CTC chr11 5158079 5158100 5158084 5158079 -
cagggcattcattgatttgggc

SEQ ID NO: 155109 - DNA, 22 bp, Artificial Sequence
  Synthetic oligonucleotide; TTC chr11 5158069 5158090 5158074 5158069 -
attgatttgggcaaatactgtc

SEQ ID NO: 155110 - DNA, 22 bp, Artificial Sequence
  Synthetic oligonucleotide; TTG chr11 5158065 5158086 5158070 5158065 -
atttgggcaaatactgtctatg

SEQ ID NO: 155111 - DNA, 22 bp, Artificial Sequence
  Synthetic oligonucleotide; TTT chr11 5158061 5158082 5158066 5158061 -
gggcaaatactgtctatgagac

SEQ ID NO: 155112 - DNA, 22 bp, Artificial Sequence
  Synthetic oligonucleotide; TTG chr11 5158060 5158081 5158065 5158060 -
ggcaaatactgtctatgagact

SEQ ID NO: 155113 - DNA, 22 bp, Artificial Sequence
  Synthetic oligonucleotide; CTG chr11 5158049 5158070 5158054 5158049 -
tctatgagacttcaaaagcaca

SEQ ID NO: 155114 - DNA, 22 bp, Artificial Sequence
  Synthetic oligonucleotide; CTA chr11 5158045 5158066 5158050 5158045 -
tgagacttcaaaagcacaaata

SEQ ID NO: 155115 - DNA, 22 bp, Artificial Sequence
  Synthetic oligonucleotide; CTT chr11 5158037 5158058 5158042 5158037 -
caaaagcacaaataaccaaaac

SEQ ID NO: 155116 - DNA, 22 bp, Artificial Sequence
  Synthetic oligonucleotide; TTC chr11 5158036 5158057 5158041 5158036 -
aaaagcacaaataaccaaaaca

SEQ ID NO: 155117 - DNA, 22 bp, Artificial Sequence
  Synthetic oligonucleotide; TTG chr11 5158000 5158021 5158005 5158000 -
ggattgtttgaagctctgcaca

SEQ ID NO: 155118 - DNA, 22 bp, Artificial Sequence
  Synthetic oligonucleotide; TTG chr11 5157994 5158015 5157999 5157994 -
tttgaagctctgcacagcaaag

SEQ ID NO: 155119 - DNA, 22 bp, Artificial Sequence
  Synthetic oligonucleotide; TTT chr11 5157991 5158012 5157996 5157991 -
gaagctctgcacagcaaagaaa

SEQ ID NO: 155120 - DNA, 22 bp, Artificial Sequence
  Synthetic oligonucleotide; TTG chr11 5157990 5158011 5157995 5157990 -
aagctctgcacagcaaagaaaa

SEQ ID NO: 155121 - DNA, 22 bp, Artificial Sequence
  Synthetic oligonucleotide; CTC chr11 5157984 5158005 5157989 5157984 -
tgcacagcaaagaaaataataa

SEQ ID NO: 155122 - DNA, 22 bp, Artificial Sequence
  Synthetic oligonucleotide; CTG chr11 5157982 5158003 5157987 5157982 -
cacagcaaagaaaataataaag

SEQ ID NO: 155123 - DNA, 22 bp, Artificial Sequence
  Synthetic oligonucleotide; TTT chr11 5157925 5157946 5157930 5157925 -
gcaaactatatattttacaagg

SEQ ID NO: 155124 - DNA, 22 bp, Artificial Sequence
  Synthetic oligonucleotide; TTG chr11 5157924 5157945 5157929 5157924 -
caaactatatattttacaagga

SEQ ID NO: 155125 - DNA, 22 bp, Artificial Sequence
  Synthetic oligonucleotide; CTA chr11 5157917 5157938 5157922 5157917 -
tatattttacaaggaattgata

SEQ ID NO: 155126 - DNA, 22 bp, Artificial Sequence
  Synthetic oligonucleotide; TTT chr11 5157910 5157931 5157915 5157910 -
tacaaggaattgataaccagaa

SEQ ID NO: 155127 - DNA, 22 bp, Artificial Sequence
  Synthetic oligonucleotide; TTT chr11 5157909 5157930 5157914 5157909 -
acaaggaattgataaccagaat

SEQ ID NO: 155128 - DNA, 22 bp, Artificial Sequence
  Synthetic oligonucleotide; TTA chr11 5157908 5157929 5157913 5157908 -
caaggaattgataaccagaata

SEQ ID NO: 155129 - DNA, 22 bp, Artificial Sequence
  Synthetic oligonucleotide; TTG chr11 5157898 5157919 5157903 5157898 -
ataaccagaatatgcaagaaac

SEQ ID NO: 155130 - DNA, 22 bp, Artificial Sequence
  Synthetic oligonucleotide; CTC chr11 5157874 5157895 5157879 5157874 -
aagcaactcaacagaaaataaa

SEQ ID NO: 155131 - DNA, 22 bp, Artificial Sequence
  Synthetic oligonucleotide; CTC chr11 5157865 5157886 5157870 5157865 -
aacagaaaataaataaataaat

SEQ ID NO: 155132 - DNA, 22 bp, Artificial Sequence
  Synthetic oligonucleotide; CTG chr11 5157822 5157843 5157827 5157822 -
aatagatatttctcaaaagaag

SEQ ID NO: 155133 - DNA, 22 bp, Artificial Sequence
  Synthetic oligonucleotide; TTT chr11 5157811 5157832 5157816 5157811 -
ctcaaaagaagccatacaaatg

SEQ ID NO: 155134 - DNA, 22 bp, Artificial Sequence
  Synthetic oligonucleotide; TTC chr11 5157810 5157831 5157815 5157810 -
tcaaaagaagccatacaaatgg

SEQ ID NO: 155135 - DNA, 22 bp, Artificial Sequence
  Synthetic oligonucleotide; CTC chr11 5157808 5157829 5157813 5157808 -
aaaagaagccatacaaatggcc

SEQ ID NO: 155136 - DNA, 22 bp, Artificial Sequence
  Synthetic oligonucleotide; TTT chr11 5157775 5157796 5157780 5157775 -
gaaaaaatgttcaatatcacta

SEQ ID NO: 155137 - DNA, 22 bp, Artificial Sequence
  Synthetic oligonucleotide; TTG chr11 5157774 5157795 5157779 5157774 -
aaaaaatgttcaatatcactaa

SEQ ID NO: 155138 - DNA, 22 bp, Artificial Sequence
  Synthetic oligonucleotide; TTC chr11 5157763 5157784 5157768 5157763 -
aatatcactaatcaccagataa

SEQ ID NO: 155139 - DNA, 22 bp, Artificial Sequence
  Synthetic oligonucleotide; CTA chr11 5157753 5157774 5157758 5157753 -
atcaccagataaatcaaaacca

SEQ ID NO: 155140 - DNA, 22 bp, Artificial Sequence
  Synthetic oligonucleotide; CTC chr11 5157714 5157735 5157719 5157714 -
accttagttaaaatagcttata

SEQ ID NO: 155141 - DNA, 22 bp, Artificial Sequence
  Synthetic oligonucleotide; CTT chr11 5157709 5157730 5157714 5157709 -
agttaaaatagcttataacaaa

SEQ ID NO: 155142 - DNA, 22 bp, Artificial Sequence
  Synthetic oligonucleotide; TTA chr11 5157708 5157729 5157713 5157708 -
gttaaaatagcttataacaaaa

SEQ ID NO: 155143 - DNA, 22 bp, Artificial Sequence
  Synthetic oligonucleotide; TTA chr11 5157704 5157725 5157709 5157704 -
aaatagcttataacaaaacaaa

SEQ ID NO: 155144 - DNA, 22 bp, Artificial Sequence
  Synthetic oligonucleotide; CTT chr11 5157695 5157716 5157700 5157695 -
ataacaaaacaaaaggaaataa

SEQ ID NO: 155145 - DNA, 22 bp, Artificial Sequence
  Synthetic oligonucleotide; TTA chr11 5157694 5157715 5157699 5157694 -
taacaaaacaaaaggaaataac

SEQ ID NO: 155146 - DNA, 22 bp, Artificial Sequence
  Synthetic oligonucleotide; CTT chr11 5157664 5157685 5157669 5157664 -
gtgtggatgtggacaaagggaa

SEQ ID NO: 155147 - DNA, 22 bp, Artificial Sequence
  Synthetic oligonucleotide; TTG chr11 5157663 5157684 5157668 5157663 -
tgtggatgtggacaaagggaaa

SEQ ID NO: 155148 - DNA, 22 bp, Artificial Sequence
  Synthetic oligonucleotide; CTC chr11 5157636 5157657 5157641 5157636 -
ttacactgttggtgggagtaca

SEQ ID NO: 155149 - DNA, 22 bp, Artificial Sequence
  Synthetic oligonucleotide; CTT chr11 5157634 5157655 5157639 5157634 -
acactgttggtgggagtacaaa

SEQ ID NO: 155150 - DNA, 22 bp, Artificial Sequence
  Synthetic oligonucleotide; TTA chr11 5157633 5157654 5157638 5157633 -
cactgttggtgggagtacaaat

SEQ ID NO: 155151 - DNA, 22 bp, Artificial Sequence
  Synthetic oligonucleotide; CTG chr11 5157628 5157649 5157633 5157628 -
ttggtgggagtacaaattggta

SEQ ID NO: 155152 - DNA, 22 bp, Artificial Sequence
  Synthetic oligonucleotide; TTG chr11 5157625 5157646 5157630 5157625 -
gtgggagtacaaattggtacag

SEQ ID NO: 155153 - DNA, 22 bp, Artificial Sequence
  Synthetic oligonucleotide; TTG chr11 5157609 5157630 5157614 5157609 -
gtacagcaattatgaaggacag

SEQ ID NO: 155154 - DNA, 22 bp, Artificial Sequence
  Synthetic oligonucleotide; TTA chr11 5157597 5157618 5157602 5157597 -
tgaaggacagtatggagatttg

SEQ ID NO: 155155 - DNA, 22 bp, Artificial Sequence
  Synthetic oligonucleotide; TTT chr11 5157576 5157597 5157581 5157576 -
gtcaaaaatgtaaagtagaact

SEQ ID NO: 155156 - DNA, 22 bp, Artificial Sequence
  Synthetic oligonucleotide; TTG chr11 5157575 5157596 5157580 5157575 -
tcaaaaatgtaaagtagaacta

SEQ ID NO: 155157 - DNA, 22 bp, Artificial Sequence
  Synthetic oligonucleotide; CTA chr11 5157553 5157574 5157558 5157553 -
ccatatgatccagcaatatcac

SEQ ID NO: 155158 - DNA, 22 bp, Artificial Sequence
  Synthetic oligonucleotide; CTC chr11 5157529 5157550 5157534 5157529 -
ctaggtatatacccttaaaaga

SEQ ID NO: 155159 - DNA, 22 bp, Artificial Sequence
  Synthetic oligonucleotide; CTA chr11 5157526 5157547 5157531 5157526 -
ggtatatacccttaaaagaata

SEQ ID NO: 155160 - DNA, 22 bp, Artificial Sequence
  Synthetic oligonucleotide; CTT chr11 5157513 5157534 5157518 5157513 -
aaaagaataaattagtatgtcg

SEQ ID NO: 155161 - DNA, 22 bp, Artificial Sequence
  Synthetic oligonucleotide; TTA chr11 5157512 5157533 5157517 5157512 -
aaagaataaattagtatgtcga

SEQ ID NO: 155162 - DNA, 22 bp, Artificial Sequence
  Synthetic oligonucleotide; TTA chr11 5157499 5157520 5157504 5157499 -
gtatgtcgaagatatatcagta

SEQ ID NO: 155163 - DNA, 22 bp, Artificial Sequence
  Synthetic oligonucleotide; CTC chr11 5157474 5157495 5157479 5157474 -
ccatctttattatagcactatt

SEQ ID NO: 155164 - DNA, 22 bp, Artificial Sequence
  Synthetic oligonucleotide; CTT chr11 5157467 5157488 5157472 5157467 -
tattatagcactattcacaaac

SEQ ID NO: 155165 - DNA, 22 bp, Artificial Sequence
  Synthetic oligonucleotide; TTT chr11 5157466 5157487 5157471 5157466 -
attatagcactattcacaaacg

SEQ ID NO: 155166 - DNA, 22 bp, Artificial Sequence
  Synthetic oligonucleotide; TTA chr11 5157465 5157486 5157470 5157465 -
ttatagcactattcacaaacgc

SEQ ID NO: 155167 - DNA, 22 bp, Artificial Sequence
  Synthetic oligonucleotide; TTA chr11 5157462 5157483 5157467 5157462 -
tagcactattcacaaacgccaa

SEQ ID NO: 155168 - DNA, 22 bp, Artificial Sequence
  Synthetic oligonucleotide; CTA chr11 5157454 5157475 5157459 5157454 -
ttcacaaacgccaagatttgaa

SEQ ID NO: 155169 - DNA, 22 bp, Artificial Sequence
  Synthetic oligonucleotide; TTC chr11 5157451 5157472 5157456 5157451 -
acaaacgccaagatttgaaatc

SEQ ID NO: 155170 - DNA, 22 bp, Artificial Sequence
  Synthetic oligonucleotide; TTT chr11 5157435 5157456 5157440 5157435 -
gaaatcaactgatgtattcgtc

SEQ ID NO: 155171 - DNA, 22 bp, Artificial Sequence
  Synthetic oligonucleotide; TTG chr11 5157434 5157455 5157439 5157434 -
aaatcaactgatgtattcgtca

SEQ ID NO: 155172 - DNA, 22 bp, Artificial Sequence
  Synthetic oligonucleotide; CTG chr11 5157424 5157445 5157429 5157424 -
atgtattcgtcaacagataaat

SEQ ID NO: 155173 - DNA, 22 bp, Artificial Sequence
  Synthetic oligonucleotide; TTC chr11 5157416 5157437 5157421 5157416 -
gtcaacagataaatggataaag

SEQ ID NO: 155174 - DNA, 22 bp, Artificial Sequence
  Synthetic oligonucleotide; TTA chr11 5157346 5157367 5157351 5157346 -
ttcaaccataaaaaagaatgaa

SEQ ID NO: 155175 - DNA, 22 bp, Artificial Sequence
  Synthetic oligonucleotide; TTC chr11 5157343 5157364 5157348 5157343 -
aaccataaaaaagaatgaaata

SEQ ID NO: 155176 - DNA, 22 bp, Artificial Sequence
  Synthetic oligonucleotide; TTA chr11 5157318 5157339 5157323 5157318 -
tcaattacagtaacataaatgg

SEQ ID NO: 155177 - DNA, 22 bp, Artificial Sequence
  Synthetic oligonucleotide; TTA chr11 5157311 5157332 5157316 5157311 -
cagtaacataaatggtactgaa

SEQ ID NO: 155178 - DNA, 22 bp, Artificial Sequence
  Synthetic oligonucleotide; CTG chr11 5157291 5157312 5157296 5157291 -
aaagcaattacgttaagtgaaa

SEQ ID NO: 155179 - DNA, 22 bp, Artificial Sequence
  Synthetic oligonucleotide; TTA chr11 5157281 5157302 5157286 5157281 -
cgttaagtgaaataagccaagc

SEQ ID NO: 155180 - DNA, 22 bp, Artificial Sequence
  Synthetic oligonucleotide; TTA chr11 5157276 5157297 5157281 5157276 -
agtgaaataagccaagcacaga

SEQ ID NO: 155181 - DNA, 22 bp, Artificial Sequence
  Synthetic oligonucleotide; TTC chr11 5157234 5157255 5157239 5157234 -
taactcgtgtggaagttaaaaa

SEQ ID NO: 155182 - DNA, 22 bp, Artificial Sequence
  Synthetic oligonucleotide; CTA chr11 5157232 5157253 5157237 5157232 -
actcgtgtggaagttaaaaacg

SEQ ID NO: 155183 - DNA, 22 bp, Artificial Sequence
  Synthetic oligonucleotide; CTC chr11 5157228 5157249 5157233 5157228 -
gtgtggaagttaaaaacgtgga

SEQ ID NO: 155184 - DNA, 22 bp, Artificial Sequence
  Synthetic oligonucleotide; TTA chr11 5157216 5157237 5157221 5157216 -
aaaacgtggatcttatgaagac

SEQ ID NO: 155185 - DNA, 22 bp, Artificial Sequence
  Synthetic oligonucleotide; CTT chr11 5157202 5157223 5157207 5157202 -
atgaagacagagagtagattgg

SEQ ID NO: 155186 - DNA, 22 bp, Artificial Sequence
  Synthetic oligonucleotide; TTA chr11 5157201 5157222 5157206 5157201 -
tgaagacagagagtagattggt

SEQ ID NO: 155187 - DNA, 22 bp, Artificial Sequence
  Synthetic oligonucleotide; TTG chr11 5157181 5157202 5157186 5157181 -
gtagttaccggcggcgggaggg

SEQ ID NO: 155188 - DNA, 22 bp, Artificial Sequence
  Synthetic oligonucleotide; TTA chr11 5157174 5157195 5157179 5157174 -
ccggcggcgggagggaagaaag

SEQ ID NO: 155189 - DNA, 22 bp, Artificial Sequence
  Synthetic oligonucleotide; CTC chr11 5157124 5157145 5157129 5157124 -
ccactctctctctctccctctg

SEQ ID NO: 155190 - DNA, 22 bp, Artificial Sequence
  Synthetic oligonucleotide; CTC chr11 5157118 5157139 5157123 5157118 -
tctctctctccctctgtgtgta

SEQ ID NO: 155191 - DNA, 22 bp, Artificial Sequence
  Synthetic oligonucleotide; CTC chr11 5157116 5157137 5157121 5157116 -
tctctctccctctgtgtgtatg

SEQ ID NO: 155192 - DNA, 22 bp, Artificial Sequence
  Synthetic oligonucleotide; CTC chr11 5157114 5157135 5157119 5157114 -
tctctccctctgtgtgtatgtg

SEQ ID NO: 155193 - DNA, 22 bp, Artificial Sequence
  Synthetic oligonucleotide; CTC chr11 5157112 5157133 5157117 5157112 -
tctccctctgtgtgtatgtgtg

SEQ ID NO: 155194 - DNA, 22 bp, Artificial Sequence
  Synthetic oligonucleotide; CTC chr11 5157110 5157131 5157115 5157110 -
tccctctgtgtgtatgtgtgca

SEQ ID NO: 155195 - DNA, 22 bp, Artificial Sequence
  Synthetic oligonucleotide; CTC chr11 5157108 5157129 5157113 5157108 -
cctctgtgtgtatgtgtgcata

SEQ ID NO: 155196 - DNA, 22 bp, Artificial Sequence
  Synthetic oligonucleotide; CTC chr11 5157104 5157125 5157109 5157104 -
tgtgtgtatgtgtgcatatgta

SEQ ID NO: 155197 - DNA, 22 bp, Artificial Sequence
  Synthetic oligonucleotide; CTG chr11 5157102 5157123 5157107 5157102 -
tgtgtatgtgtgcatatgtatg

SEQ ID NO: 155198 - DNA, 22 bp, Artificial Sequence
  Synthetic oligonucleotide; TTT chr11 5157029 5157050 5157034 5157029 -
gtatatatatgtatgtatgtat

SEQ ID NO: 155199 - DNA, 22 bp, Artificial Sequence
  Synthetic oligonucleotide; TTG chr11 5157028 5157049 5157033 5157028 -
tatatatatgtatgtatgtatt

SEQ ID NO: 155200 - DNA, 22 bp, Artificial Sequence
  Synthetic oligonucleotide; TTA chr11 5157005 5157026 5157010 5157005 -
ccactgaaccgtacactcaaaa

SEQ ID NO: 155201 - DNA, 22 bp, Artificial Sequence
  Synthetic oligonucleotide; CTG chr11 5156999 5157020 5157004 5156999 -
aaccgtacactcaaaaatggta

SEQ ID NO: 155202 - DNA, 22 bp, Artificial Sequence
  Synthetic oligonucleotide; CTC chr11 5156987 5157008 5156992 5156987 -
aaaaatggtaaagatgggctgg

SEQ ID NO: 155203 - DNA, 22 bp, Artificial Sequence
  Synthetic oligonucleotide; CTG chr11 5156966 5156987 5156971 5156966 -
ggtgcggtggccaatgcctgta

SEQ ID NO: 155204 - DNA, 22 bp, Artificial Sequence
  Synthetic oligonucleotide; CTG chr11 5156946 5156967 5156951 5156946 -
taatctcagcactttgggaggc

SEQ ID NO: 155205 - DNA, 22 bp, Artificial Sequence
  Synthetic oligonucleotide; CTC chr11 5156939 5156960 5156944 5156939 -
agcactttgggaggccaaggca

SEQ ID NO: 155206 - DNA, 22 bp, Artificial Sequence
  Synthetic oligonucleotide; CTT chr11 5156932 5156953 5156937 5156932 -
tgggaggccaaggcaggtggat

SEQ ID NO: 155207 - DNA, 22 bp, Artificial Sequence
  Synthetic oligonucleotide; TTT chr11 5156931 5156952 5156936 5156931 -
gggaggccaaggcaggtggatc

SEQ ID NO: 155208 - DNA, 22 bp, Artificial Sequence
  Synthetic oligonucleotide; TTG chr11 5156930 5156951 5156935 5156930 -
ggaggccaaggcaggtggatca

SEQ ID NO: 155209 - DNA, 22 bp, Artificial Sequence
  Synthetic oligonucleotide; CTG chr11 5156881 5156902 5156886 5156881 -
accaacatggtgaaaccctgtc

SEQ ID NO: 155210 - DNA, 22 bp, Artificial Sequence
  Synthetic oligonucleotide; CTG chr11 5156861 5156882 5156866 5156861 -
tctctactaaaaatacaaaaaa

SEQ ID NO: 155211 - DNA, 22 bp, Artificial Sequence
  Synthetic oligonucleotide; CTC chr11 5156857 5156878 5156862 5156857 -
tactaaaaatacaaaaaattag

SEQ ID NO: 155212 - DNA, 22 bp, Artificial Sequence
  Synthetic oligonucleotide; CTA chr11 5156855 5156876 5156860 5156855 -
ctaaaaatacaaaaaattagcc

SEQ ID NO: 155213 - DNA, 22 bp, Artificial Sequence
  Synthetic oligonucleotide; CTA chr11 5156852 5156873 5156857 5156852 -
aaaatacaaaaaattagccagg

SEQ ID NO: 155214 - DNA, 22 bp, Artificial Sequence
  Synthetic oligonucleotide; TTA chr11 5156836 5156857 5156841 5156836 -
gccaggcgtggtggcaggcgcc

SEQ ID NO: 155215 - DNA, 22 bp, Artificial Sequence
  Synthetic oligonucleotide; CTG chr11 5156812 5156833 5156817 5156812 -
taatcccacctacttgggaggc

SEQ ID NO: 155216 - DNA, 22 bp, Artificial Sequence
  Synthetic oligonucleotide; CTA chr11 5156800 5156821 5156805 5156800 -
cttgggaggcttgggcaggaga

SEQ ID NO: 155217 - DNA, 22 bp, Artificial Sequence
  Synthetic oligonucleotide; CTT chr11 5156797 5156818 5156802 5156797 -
gggaggcttgggcaggagaatc

SEQ ID NO: 155218 - DNA, 22 bp, Artificial Sequence
  Synthetic oligonucleotide; TTG chr11 5156796 5156817 5156801 5156796 -
ggaggcttgggcaggagaatcg

SEQ ID NO: 155219 - DNA, 22 bp, Artificial Sequence
  Synthetic oligonucleotide; CTT chr11 5156788 5156809 5156793 5156788 -
gggcaggagaatcgcttgaacc

SEQ ID NO: 155220 - DNA, 22 bp, Artificial Sequence
  Synthetic oligonucleotide; TTG chr11 5156787 5156808 5156792 5156787 -
ggcaggagaatcgcttgaacct

SEQ ID NO: 155221 - DNA, 22 bp, Artificial Sequence
  Synthetic oligonucleotide; CTT chr11 5156771 5156792 5156776 5156771 -
gaacctggtgggggcggaggtt

SEQ ID NO: 155222 - DNA, 22 bp, Artificial Sequence
  Synthetic oligonucleotide; TTG chr11 5156770 5156791 5156775 5156770 -
aacctggtgggggcggaggttg

SEQ ID NO: 155223 - DNA, 22 bp, Artificial Sequence
  Synthetic oligonucleotide; CTG chr11 5156764 5156785 5156769 5156764 -
gtgggggcggaggttgcagtga

SEQ ID NO: 155224 - DNA, 22 bp, Artificial Sequence
  Synthetic oligonucleotide; TTG chr11 5156748 5156769 5156753 5156748 -
cagtgagccaagatcctaccac

SEQ ID NO: 155225 - DNA, 22 bp, Artificial Sequence
  Synthetic oligonucleotide; CTA chr11 5156730 5156751 5156735 5156730 -
ccactgcactccagcctggatg

SEQ ID NO: 155226 - DNA, 22 bp, Artificial Sequence
  Synthetic oligonucleotide; CTG chr11 5156724 5156745 5156729 5156724 -
cactccagcctggatgacggag

SEQ ID NO: 155227 - DNA, 22 bp, Artificial Sequence
  Synthetic oligonucleotide; CTC chr11 5156719 5156740 5156724 5156719 -
cagcctggatgacggagcgaga

SEQ ID NO: 155228 - DNA, 22 bp, Artificial Sequence
  Synthetic oligonucleotide; CTG chr11 5156712 5156733 5156717 5156712 -
gatgacggagcgagactccgtc

SEQ ID NO: 155229 - DNA, 22 bp, Artificial Sequence
  Synthetic oligonucleotide; CTC chr11 5156694 5156715 5156699 5156694 -
cgtctcaaggaaaaaaaaaaag

SEQ ID NO: 155230 - DNA, 22 bp, Artificial Sequence
  Synthetic oligonucleotide; CTC chr11 5156688 5156709 5156693 5156688 -
aaggaaaaaaaaaaagtaaaga

SEQ ID NO: 155231 - DNA, 22 bp, Artificial Sequence
  Synthetic oligonucleotide; TTA chr11 5156656 5156677 5156661 5156656 -
cgtatgtatattttaccttaat

SEQ ID NO: 155232 - DNA, 22 bp, Artificial Sequence
  Synthetic oligonucleotide; TTT chr11 5156643 5156664 5156648 5156643 -
taccttaataaaaataaattta

SEQ ID NO: 155233 - DNA, 22 bp, Artificial Sequence
  Synthetic oligonucleotide; TTT chr11 5156642 5156663 5156647 5156642 -
accttaataaaaataaatttaa

SEQ ID NO: 155234 - DNA, 22 bp, Artificial Sequence
  Synthetic oligonucleotide; TTA chr11 5156641 5156662 5156646 5156641 -
ccttaataaaaataaatttaaa

SEQ ID NO: 155235 - DNA, 22 bp, Artificial Sequence
  Synthetic oligonucleotide; CTT chr11 5156637 5156658 5156642 5156637 -
aataaaaataaatttaaaaaat

SEQ ID NO: 155236 - DNA, 22 bp, Artificial Sequence
  Synthetic oligonucleotide; TTA chr11 5156636 5156657 5156641 5156636 -
ataaaaataaatttaaaaaata

SEQ ID NO: 155237 - DNA, 22 bp, Artificial Sequence
  Synthetic oligonucleotide; TTT chr11 5156622 5156643 5156627 5156622 -
aaaaaatattcagtaggccggg

SEQ ID NO: 155238 - DNA, 22 bp, Artificial Sequence
  Synthetic oligonucleotide; TTA chr11 5156621 5156642 5156626 5156621 -
aaaaatattcagtaggccgggt

SEQ ID NO: 155239 - DNA, 22 bp, Artificial Sequence
  Synthetic oligonucleotide; TTC chr11 5156611 5156632 5156616 5156611 -
agtaggccgggtgcagtggctc

SEQ ID NO: 155240 - DNA, 22 bp, Artificial Sequence
  Synthetic oligonucleotide; CTC chr11 5156589 5156610 5156594 5156589 -
acgcctgtgatcccagcacttt

SEQ ID NO: 155241 - DNA, 22 bp, Artificial Sequence
  Synthetic oligonucleotide; CTG chr11 5156582 5156603 5156587 5156582 -
tgatcccagcactttgggaggc

SEQ ID NO: 155242 - DNA, 22 bp, Artificial Sequence
  Synthetic oligonucleotide; CTT chr11 5156568 5156589 5156573 5156568 -
tgggaggcggaggcgggtggat

SEQ ID NO: 155243 - DNA, 22 bp, Artificial Sequence
  Synthetic oligonucleotide; TTT chr11 5156567 5156588 5156572 5156567 -
gggaggcggaggcgggtggatc

SEQ ID NO: 155244 - DNA, 22 bp, Artificial Sequence
  Synthetic oligonucleotide; TTG chr11 5156566 5156587 5156571 5156566 -
ggaggcggaggcgggtggatca

SEQ ID NO: 155245 - DNA, 22 bp, Artificial Sequence
  Synthetic oligonucleotide; CTG chr11 5156517 5156538 5156522 5156517 -
gctaacacagtgaaaccccgtc

SEQ ID NO: 155246 - DNA, 22 bp, Artificial Sequence
  Synthetic oligonucleotide; CTA chr11 5156513 5156534 5156518 5156513 -
acacagtgaaaccccgtctcta

SEQ ID NO: 155247 - DNA, 22 bp, Artificial Sequence
  Synthetic oligonucleotide; CTC chr11 5156493 5156514 5156498 5156493 -
tactaaaaaaatacaaaaaatt

SEQ ID NO: 155248 - DNA, 22 bp, Artificial Sequence
  Synthetic oligonucleotide; CTA chr11 5156491 5156512 5156496 5156491 -
ctaaaaaaatacaaaaaattag

SEQ ID NO: 155249 - DNA, 22 bp, Artificial Sequence
  Synthetic oligonucleotide; CTA chr11 5156488 5156509 5156493 5156488 -
aaaaaatacaaaaaattagccg

SEQ ID NO: 155250 - DNA, 22 bp, Artificial Sequence
  Synthetic oligonucleotide; TTA chr11 5156470 5156491 5156475 5156470 -
gccgggcttggtggcgggtgcc

SEQ ID NO: 155251 - DNA, 22 bp, Artificial Sequence
  Synthetic oligonucleotide; CTT chr11 5156461 5156482 5156466 5156461 -
ggtggcgggtgcctgtagtccc

SEQ ID NO: 155252 - DNA, 22 bp, Artificial Sequence
  Synthetic oligonucleotide; TTG chr11 5156460 5156481 5156465 5156460 -
gtggcgggtgcctgtagtccca

SEQ ID NO: 155253 - DNA, 22 bp, Artificial Sequence
  Synthetic oligonucleotide; CTG chr11 5156446 5156467 5156451 5156446 -
tagtcccagctactatggaggc

SEQ ID NO: 155254 - DNA, 22 bp, Artificial Sequence
  Synthetic oligonucleotide; CTA chr11 5156434 5156455 5156439 5156434 -
ctatggaggctgaggcgggaga

SEQ ID NO: 155255 - DNA, 22 bp, Artificial Sequence
  Synthetic oligonucleotide; CTA chr11 5156431 5156452 5156436 5156431 -
tggaggctgaggcgggagaatg

SEQ ID NO: 155256 - DNA, 22 bp, Artificial Sequence
  Synthetic oligonucleotide; CTG chr11 5156422 5156443 5156427 5156422 -
aggcgggagaatggcgtgaacg

SEQ ID NO: 155257 - DNA, 22 bp, Artificial Sequence
  Synthetic oligonucleotide; CTT chr11 5156385 5156406 5156390 5156385 -
gcagtgagcagagatcaggggc

SEQ ID NO: 155258 - DNA, 22 bp, Artificial Sequence
  Synthetic oligonucleotide; TTG chr11 5156384 5156405 5156389 5156384 -
cagtgagcagagatcaggggcc

SEQ ID NO: 155259 - DNA, 22 bp, Artificial Sequence
  Synthetic oligonucleotide; CTG chr11 5156358 5156379 5156363 5156358 -
cactccagcctgggcgacagag

SEQ ID NO: 155260 - DNA, 22 bp, Artificial Sequence
  Synthetic oligonucleotide; CTC chr11 5156353 5156374 5156358 5156353 -
cagcctgggcgacagagagaga

SEQ ID NO: 155261 - DNA, 22 bp, Artificial Sequence
  Synthetic oligonucleotide; CTG chr11 5156346 5156367 5156351 5156346 -
ggcgacagagagagactctgtc

SEQ ID NO: 155262 - DNA, 22 bp, Artificial Sequence
  Synthetic oligonucleotide; CTC chr11 5156328 5156349 5156333 5156328 -
tgtctcaaaaaaaagaaaaaaa

SEQ ID NO: 155263 - DNA, 22 bp, Artificial Sequence
  Synthetic oligonucleotide; CTG chr11 5156326 5156347 5156331 5156326 -
tctcaaaaaaaagaaaaaaaaa

SEQ ID NO: 155264 - DNA, 22 bp, Artificial Sequence
  Synthetic oligonucleotide; CTC chr11 5156322 5156343 5156327 5156322 -
aaaaaaaagaaaaaaaaaattt

SEQ ID NO: 155265 - DNA, 22 bp, Artificial Sequence
  Synthetic oligonucleotide; TTT chr11 5156300 5156321 5156305 5156300 -
agtagactagctaaaaaaatcc

SEQ ID NO: 155266 - DNA, 22 bp, Artificial Sequence
  Synthetic oligonucleotide; TTA chr11 5156299 5156320 5156304 5156299 -
gtagactagctaaaaaaatcca

SEQ ID NO: 155267 - DNA, 22 bp, Artificial Sequence
  Synthetic oligonucleotide; CTA chr11 5156291 5156312 5156296 5156291 -
gctaaaaaaatccagagatagt

SEQ ID NO: 155268 - DNA, 22 bp, Artificial Sequence
  Synthetic oligonucleotide; CTA chr11 5156287 5156308 5156292 5156287 -
aaaaaatccagagatagttatt

SEQ ID NO: 155269 - DNA, 22 bp, Artificial Sequence
  Synthetic oligonucleotide; TTA chr11 5156267 5156288 5156272 5156267 -
ttgatgcatatgtaaaagtctt

SEQ ID NO: 155270 - DNA, 22 bp, Artificial Sequence
  Synthetic oligonucleotide; TTG chr11 5156264 5156285 5156269 5156264 -
atgcatatgtaaaagtcttcca

SEQ ID NO: 155271 - DNA, 22 bp, Artificial Sequence
  Synthetic oligonucleotide; CTT chr11 5156245 5156266 5156250 5156245 -
ccaatatttacaagtacaatga

SEQ ID NO: 155272 - DNA, 22 bp, Artificial Sequence
  Synthetic oligonucleotide; TTC chr11 5156244 5156265 5156249 5156244 -
caatatttacaagtacaatgaa

SEQ ID NO: 155273 - DNA, 22 bp, Artificial Sequence
  Synthetic oligonucleotide; TTT chr11 5156236 5156257 5156241 5156236 -
acaagtacaatgaaaaaaaaat

SEQ ID NO: 155274 - DNA, 22 bp, Artificial Sequence
  Synthetic oligonucleotide; TTA chr11 5156235 5156256 5156240 5156235 -
caagtacaatgaaaaaaaaata

SEQ ID NO: 155275 - DNA, 22 bp, Artificial Sequence
  Synthetic oligonucleotide; CTT chr11 5156208 5156229 5156213 5156208 -
gaattaagtgtagaactcattg

SEQ ID NO: 155276 - DNA, 22 bp, Artificial Sequence
  Synthetic oligonucleotide; TTG chr11 5156207 5156228 5156212 5156207 -
aattaagtgtagaactcattga

SEQ ID NO: 155277 - DNA, 22 bp, Artificial Sequence
  Synthetic oligonucleotide; TTA chr11 5156202 5156223 5156207 5156202 -
agtgtagaactcattgacaatg

SEQ ID NO: 155278 - DNA, 22 bp, Artificial Sequence
  Synthetic oligonucleotide; CTC chr11 5156190 5156211 5156195 5156190 -
attgacaatgtttcaaaggatg

SEQ ID NO: 155279 - DNA, 22 bp, Artificial Sequence
  Synthetic oligonucleotide; TTG chr11 5156186 5156207 5156191 5156186 -
acaatgtttcaaaggatgtgag

SEQ ID NO: 155280 - DNA, 22 bp, Artificial Sequence
  Synthetic oligonucleotide; TTT chr11 5156177 5156198 5156182 5156177 -
caaaggatgtgagggataaact

SEQ ID NO: 155281 - DNA, 22 bp, Artificial Sequence
  Synthetic oligonucleotide; TTC chr11 5156176 5156197 5156181 5156176 -
aaaggatgtgagggataaacta

SEQ ID NO: 155282 - DNA, 22 bp, Artificial Sequence
  Synthetic oligonucleotide; CTA chr11 5156154 5156175 5156159 5156154 -
aaatttgggcagtacatgctgt

SEQ ID NO: 155283 - DNA, 22 bp, Artificial Sequence
  Synthetic oligonucleotide; TTT chr11 5156148 5156169 5156153 5156148 -
gggcagtacatgctgttcctgt

SEQ ID NO: 155284 - DNA, 22 bp, Artificial Sequence
  Synthetic oligonucleotide; TTG chr11 5156147 5156168 5156152 5156147 -
ggcagtacatgctgttcctgtg

SEQ ID NO: 155285 - DNA, 22 bp, Artificial Sequence
  Synthetic oligonucleotide; CTG chr11 5156133 5156154 5156138 5156133 -
ttcctgtgtacttggaacagag

SEQ ID NO: 155286 - DNA, 22 bp, Artificial Sequence
  Synthetic oligonucleotide; TTC chr11 5156130 5156151 5156135 5156130 -
ctgtgtacttggaacagaggga

SEQ ID NO: 155287 - DNA, 22 bp, Artificial Sequence
  Synthetic oligonucleotide; CTG chr11 5156127 5156148 5156132 5156127 -
tgtacttggaacagagggagaa

SEQ ID NO: 155288 - DNA, 22 bp, Artificial Sequence
  Synthetic oligonucleotide; CTT chr11 5156120 5156141 5156125 5156120 -
ggaacagagggagaaaatctgg

SEQ ID NO: 155289 - DNA, 22 bp, Artificial Sequence
  Synthetic oligonucleotide; TTG chr11 5156119 5156140 5156124 5156119 -
gaacagagggagaaaatctggg

SEQ ID NO: 155290 - DNA, 22 bp, Artificial Sequence
  Synthetic oligonucleotide; CTG chr11 5156099 5156120 5156104 5156099 -
ggctggaaatattgttatagga

SEQ ID NO: 155291 - DNA, 22 bp, Artificial Sequence
  Synthetic oligonucleotide; CTG chr11 5156094 5156115 5156099 5156094 -
gaaatattgttataggagttag

SEQ ID NO: 155292 - DNA, 22 bp, Artificial Sequence
  Synthetic oligonucleotide; TTG chr11 5156085 5156106 5156090 5156085 -
ttataggagttagcacatgaag

SEQ ID NO: 155293 - DNA, 22 bp, Artificial Sequence
  Synthetic oligonucleotide; TTA chr11 5156082 5156103 5156087 5156082 -
taggagttagcacatgaaggtg

SEQ ID NO: 155294 - DNA, 22 bp, Artificial Sequence
  Synthetic oligonucleotide; TTA chr11 5156073 5156094 5156078 5156073 -
gcacatgaaggtgacaactaaa

SEQ ID NO: 155295 - DNA, 22 bp, Artificial Sequence
  Synthetic oligonucleotide; CTA chr11 5156053 5156074 5156058 5156053 -
aattatttggagtagatggagt

SEQ ID NO: 155296 - DNA, 22 bp, Artificial Sequence
  Synthetic oligonucleotide; TTA chr11 5156048 5156069 5156053 5156048 -
tttggagtagatggagtcacca

SEQ ID NO: 155297 - DNA, 22 bp, Artificial Sequence
  Synthetic oligonucleotide; TTT chr11 5156045 5156066 5156050 5156045 -
ggagtagatggagtcaccagca

SEQ ID NO: 155298 - DNA, 22 bp, Artificial Sequence
  Synthetic oligonucleotide; TTG chr11 5156044 5156065 5156049 5156044 -
gagtagatggagtcaccagcac

SEQ ID NO: 155299 - DNA, 22 bp, Artificial Sequence
  Synthetic oligonucleotide; TTT chr11 5156009 5156030 5156014 5156009 -
tagaatgaaatgacccaagata

SEQ ID NO: 155300 - DNA, 22 bp, Artificial Sequence
  Synthetic oligonucleotide; TTT chr11 5156008 5156029 5156013 5156008 -
agaatgaaatgacccaagatag

SEQ ID NO: 155301 - DNA, 22 bp, Artificial Sequence
  Synthetic oligonucleotide; TTA chr11 5156007 5156028 5156012 5156007 -
gaatgaaatgacccaagataga

SEQ ID NO: 155302 - DNA, 22 bp, Artificial Sequence
  Synthetic oligonucleotide; CTT chr11 5155981 5156002 5155986 5155981 -
tggagagcccccaaatttaaat

SEQ ID NO: 155303 - DNA, 22 bp, Artificial Sequence
  Synthetic oligonucleotide; TTT chr11 5155980 5156001 5155985 5155980 -
ggagagcccccaaatttaaata

SEQ ID NO: 155304 - DNA, 22 bp, Artificial Sequence
  Synthetic oligonucleotide; TTG chr11 5155979 5156000 5155984 5155979 -
gagagcccccaaatttaaataa

SEQ ID NO: 155305 - DNA, 22 bp, Artificial Sequence
  Synthetic oligonucleotide; TTT chr11 5155963 5155984 5155968 5155963 -
aaataaaatcagtataagagaa

SEQ ID NO: 155306 - DNA, 22 bp, Artificial Sequence
  Synthetic oligonucleotide; TTA chr11 5155962 5155983 5155967 5155962 -
aataaaatcagtataagagaag

SEQ ID NO: 155307 - DNA, 22 bp, Artificial Sequence
  Synthetic oligonucleotide; CTA chr11 5155916 5155937 5155921 5155916 -
gtctaaattgtttcttagtgac

SEQ ID NO: 155308 - DNA, 22 bp, Artificial Sequence
  Synthetic oligonucleotide; CTA chr11 5155911 5155932 5155916 5155911 -
aattgtttcttagtgacaaaag

SEQ ID NO: 155309 - DNA, 22 bp, Artificial Sequence
  Synthetic oligonucleotide; TTG chr11 5155906 5155927 5155911 5155906 -
tttcttagtgacaaaagaataa

SEQ ID NO: 155310 - DNA, 22 bp, Artificial Sequence
  Synthetic oligonucleotide; TTT chr11 5155903 5155924 5155908 5155903 -
cttagtgacaaaagaataacct

SEQ ID NO: 155311 - DNA, 22 bp, Artificial Sequence
  Synthetic oligonucleotide; TTC chr11 5155902 5155923 5155907 5155902 -
ttagtgacaaaagaataacctg

SEQ ID NO: 155312 - DNA, 22 bp, Artificial Sequence
  Synthetic oligonucleotide; CTT chr11 5155900 5155921 5155905 5155900 -
agtgacaaaagaataacctgaa

SEQ ID NO: 155313 - DNA, 22 bp, Artificial Sequence
  Synthetic oligonucleotide; TTA chr11 5155899 5155920 5155904 5155899 -
gtgacaaaagaataacctgaat

SEQ ID NO: 155314 - DNA, 22 bp, Artificial Sequence
  Synthetic oligonucleotide; CTG chr11 5155880 5155901 5155885 5155880 -
aatattagattagctgcctata

SEQ ID NO: 155315 - DNA, 22 bp, Artificial Sequence
  Synthetic oligonucleotide; TTA chr11 5155873 5155894 5155878 5155873 -
gattagctgcctatatgctctc

SEQ ID NO: 155316 - DNA, 22 bp, Artificial Sequence
  Synthetic oligonucleotide; TTA chr11 5155868 5155889 5155873 5155868 -
gctgcctatatgctctctgaat

SEQ ID NO: 155317 - DNA, 22 bp, Artificial Sequence
  Synthetic oligonucleotide; CTG chr11 5155864 5155885 5155869 5155864 -
cctatatgctctctgaatcaat

SEQ ID NO: 155318 - DNA, 22 bp, Artificial Sequence
  Synthetic oligonucleotide; CTA chr11 5155860 5155881 5155865 5155860 -
tatgctctctgaatcaatttca

SEQ ID NO: 155319 - DNA, 22 bp, Artificial Sequence
  Synthetic oligonucleotide; CTC chr11 5155853 5155874 5155858 5155853 -
tctgaatcaatttcattcaaca

SEQ ID NO: 155320 - DNA, 22 bp, Artificial Sequence
  Synthetic oligonucleotide; CTC chr11 5155851 5155872 5155856 5155851 -
tgaatcaatttcattcaacatg

SEQ ID NO: 155321 - DNA, 22 bp, Artificial Sequence
  Synthetic oligonucleotide; CTG chr11 5155849 5155870 5155854 5155849 -
aatcaatttcattcaacatgca

SEQ ID NO: 155322 - DNA, 22 bp, Artificial Sequence
  Synthetic oligonucleotide; TTT chr11 5155840 5155861 5155845 5155840 -
cattcaacatgcaacagtacta

SEQ ID NO: 155323 - DNA, 22 bp, Artificial Sequence
  Synthetic oligonucleotide; TTC chr11 5155839 5155860 5155844 5155839 -
attcaacatgcaacagtactat

SEQ ID NO: 155324 - DNA, 22 bp, Artificial Sequence
  Synthetic oligonucleotide; TTC chr11 5155835 5155856 5155840 5155835 -
aacatgcaacagtactattgtt

SEQ ID NO: 155325 - DNA, 22 bp, Artificial Sequence
  Synthetic oligonucleotide; CTA chr11 5155818 5155839 5155823 5155818 -
ttgttttatgctccttcacaga

SEQ ID NO: 155326 - DNA, 22 bp, Artificial Sequence
  Synthetic oligonucleotide; TTG chr11 5155815 5155836 5155820 5155815 -
ttttatgctccttcacagagga

SEQ ID NO: 155327 - DNA, 22 bp, Artificial Sequence
  Synthetic oligonucleotide; TTT chr11 5155812 5155833 5155817 5155812 -
tatgctccttcacagaggaaat

SEQ ID NO: 155328 - DNA, 22 bp, Artificial Sequence
  Synthetic oligonucleotide; TTT chr11 5155811 5155832 5155816 5155811 -
atgctccttcacagaggaaatt

SEQ ID NO: 155329 - DNA, 22 bp, Artificial Sequence
  Synthetic oligonucleotide; TTA chr11 5155810 5155831 5155815 5155810 -
tgctccttcacagaggaaattc

SEQ ID NO: 155330 - DNA, 22 bp, Artificial Sequence
  Synthetic oligonucleotide; CTC chr11 5155805 5155826 5155810 5155805 -
cttcacagaggaaattctggaa

SEQ ID NO: 155331 - DNA, 22 bp, Artificial Sequence
  Synthetic oligonucleotide; CTT chr11 5155802 5155823 5155807 5155802 -
cacagaggaaattctggaaaga

SEQ ID NO: 155332 - DNA, 22 bp, Artificial Sequence
  Synthetic oligonucleotide; TTC chr11 5155801 5155822 5155806 5155801 -
acagaggaaattctggaaagag

SEQ ID NO: 155333 - DNA, 22 bp, Artificial Sequence
  Synthetic oligonucleotide; TTC chr11 5155788 5155809 5155793 5155788 -
tggaaagagcacatggggttcc

SEQ ID NO: 155334 - DNA, 22 bp, Artificial Sequence
  Synthetic oligonucleotide; CTG chr11 5155786 5155807 5155791 5155786 -
gaaagagcacatggggttcctt

SEQ ID NO: 155335 - DNA, 22 bp, Artificial Sequence
  Synthetic oligonucleotide; TTC chr11 5155767 5155788 5155772 5155767 -
cttgccttttcatctgtattcc

SEQ ID NO: 155336 - DNA, 22 bp, Artificial Sequence
  Synthetic oligonucleotide; CTT chr11 5155764 5155785 5155769 5155764 -
gccttttcatctgtattccttg

SEQ ID NO: 155337 - DNA, 22 bp, Artificial Sequence
  Synthetic oligonucleotide; TTG chr11 5155763 5155784 5155768 5155763 -
ccttttcatctgtattccttgt

SEQ ID NO: 155338 - DNA, 22 bp, Artificial Sequence
  Synthetic oligonucleotide; CTT chr11 5155759 5155780 5155764 5155759 -
ttcatctgtattccttgttctc

SEQ ID NO: 155339 - DNA, 22 bp, Artificial Sequence
  Synthetic oligonucleotide; TTT chr11 5155758 5155779 5155763 5155758 -
tcatctgtattccttgttctcc

SEQ ID NO: 155340 - DNA, 22 bp, Artificial Sequence
  Synthetic oligonucleotide; TTT chr11 5155757 5155778 5155762 5155757 -
catctgtattccttgttctcct

SEQ ID NO: 155341 - DNA, 22 bp, Artificial Sequence
  Synthetic oligonucleotide; TTC chr11 5155756 5155777 5155761 5155756 -
atctgtattccttgttctcctg

SEQ ID NO: 155342 - DNA, 22 bp, Artificial Sequence
  Synthetic oligonucleotide; CTG chr11 5155751 5155772 5155756 5155751 -
tattccttgttctcctggaaat

SEQ ID NO: 155343 - DNA, 22 bp, Artificial Sequence
  Synthetic oligonucleotide; TTC chr11 5155746 5155767 5155751 5155746 -
cttgttctcctggaaatccatt

SEQ ID NO: 155344 - DNA, 22 bp, Artificial Sequence
  Synthetic oligonucleotide; CTT chr11 5155743 5155764 5155748 5155743 -
gttctcctggaaatccattata

SEQ ID NO: 155345 - DNA, 22 bp, Artificial Sequence
  Synthetic oligonucleotide; TTG chr11 5155742 5155763 5155747 5155742 -
ttctcctggaaatccattataa

SEQ ID NO: 155346 - DNA, 22 bp, Artificial Sequence
  Synthetic oligonucleotide; TTC chr11 5155739 5155760 5155744 5155739 -
tcctggaaatccattataaata

SEQ ID NO: 155347 - DNA, 22 bp, Artificial Sequence
  Synthetic oligonucleotide; CTC chr11 5155737 5155758 5155742 5155737 -
ctggaaatccattataaatatt

SEQ ID NO: 155348 - DNA, 22 bp, Artificial Sequence
  Synthetic oligonucleotide; CTG chr11 5155734 5155755 5155739 5155734 -
gaaatccattataaatattctc

SEQ ID NO: 155349 - DNA, 22 bp, Artificial Sequence
  Synthetic oligonucleotide; TTA chr11 5155723 5155744 5155728 5155723 -
taaatattctccaccattagta

SEQ ID NO: 155350 - DNA, 22 bp, Artificial Sequence
  Synthetic oligonucleotide; TTC chr11 5155714 5155735 5155719 5155714 -
tccaccattagtatgcttccta

SEQ ID NO: 155351 - DNA, 22 bp, Artificial Sequence
  Synthetic oligonucleotide; CTC chr11 5155712 5155733 5155717 5155712 -
caccattagtatgcttcctaaa

SEQ ID NO: 155352 - DNA, 22 bp, Artificial Sequence
  Synthetic oligonucleotide; TTA chr11 5155704 5155725 5155709 5155704 -
gtatgcttcctaaatttgccaa

SEQ ID NO: 155353 - DNA, 22 bp, Artificial Sequence
  Synthetic oligonucleotide; CTT chr11 5155696 5155717 5155701 5155696 -
cctaaatttgccaatgtctaaa

SEQ ID NO: 155354 - DNA, 22 bp, Artificial Sequence
  Synthetic oligonucleotide; TTC chr11 5155695 5155716 5155700 5155695 -
ctaaatttgccaatgtctaaac

SEQ ID NO: 155355 - DNA, 22 bp, Artificial Sequence
  Synthetic oligonucleotide; CTA chr11 5155692 5155713 5155697 5155692 -
aatttgccaatgtctaaacatt

SEQ ID NO: 155356 - DNA, 22 bp, Artificial Sequence
  Synthetic oligonucleotide; TTT chr11 5155687 5155708 5155692 5155687 -
gccaatgtctaaacattatatc

SEQ ID NO: 155357 - DNA, 22 bp, Artificial Sequence
  Synthetic oligonucleotide; TTG chr11 5155686 5155707 5155691 5155686 -
ccaatgtctaaacattatatca

SEQ ID NO: 155358 - DNA, 22 bp, Artificial Sequence
  Synthetic oligonucleotide; CTA chr11 5155676 5155697 5155681 5155676 -
aacattatatcaagtgtctctt

SEQ ID NO: 155359 - DNA, 22 bp, Artificial Sequence
  Synthetic oligonucleotide; TTA chr11 5155669 5155690 5155674 5155669 -
tatcaagtgtctcttagctaca

SEQ ID NO: 155360 - DNA, 22 bp, Artificial Sequence
  Synthetic oligonucleotide; CTC chr11 5155656 5155677 5155661 5155656 -
ttagctacattcaagaaagcct

SEQ ID NO: 155361 - DNA, 22 bp, Artificial Sequence
  Synthetic oligonucleotide; CTT chr11 5155654 5155675 5155659 5155654 -
agctacattcaagaaagcctag

SEQ ID NO: 155362 - DNA, 22 bp, Artificial Sequence
  Synthetic oligonucleotide; TTA chr11 5155653 5155674 5155658 5155653 -
gctacattcaagaaagcctaga

SEQ ID NO: 155363 - DNA, 22 bp, Artificial Sequence
  Synthetic oligonucleotide; CTA chr11 5155649 5155670 5155654 5155649 -
cattcaagaaagcctagaaacc

SEQ ID NO: 155364 - DNA, 22 bp, Artificial Sequence
  Synthetic oligonucleotide; TTC chr11 5155644 5155665 5155649 5155644 -
aagaaagcctagaaaccagctg

SEQ ID NO: 155365 - DNA, 22 bp, Artificial Sequence
  Synthetic oligonucleotide; CTA chr11 5155633 5155654 5155638 5155633 -
gaaaccagctgtaaaatgtcaa

SEQ ID NO: 155366 - DNA, 22 bp, Artificial Sequence
  Synthetic oligonucleotide; CTG chr11 5155622 5155643 5155627 5155622 -
taaaatgtcaaggagaatagtg

SEQ ID NO: 155367 - DNA, 22 bp, Artificial Sequence
  Synthetic oligonucleotide; CTT chr11 5155583 5155604 5155588 5155583 -
gcttagaatttatcagatactt

SEQ ID NO: 155368 - DNA, 22 bp, Artificial Sequence
  Synthetic oligonucleotide; TTG chr11 5155582 5155603 5155587 5155582 -
cttagaatttatcagatactta

SEQ ID NO: 155369 - DNA, 22 bp, Artificial Sequence
  Synthetic oligonucleotide; CTT chr11 5155579 5155600 5155584 5155579 -
agaatttatcagatacttacgt

SEQ ID NO: 155370 - DNA, 22 bp, Artificial Sequence
  Synthetic oligonucleotide; TTA chr11 5155578 5155599 5155583 5155578 -
gaatttatcagatacttacgtg

SEQ ID NO: 155371 - DNA, 22 bp, Artificial Sequence
  Synthetic oligonucleotide; TTT chr11 5155572 5155593 5155577 5155572 -
atcagatacttacgtgataaat

SEQ ID NO: 155372 - DNA, 22 bp, Artificial Sequence
  Synthetic oligonucleotide; TTA chr11 5155571 5155592 5155576 5155571 -
tcagatacttacgtgataaatg

SEQ ID NO: 155373 - DNA, 22 bp, Artificial Sequence
  Synthetic oligonucleotide; CTT chr11 5155561 5155582 5155566 5155561 -
acgtgataaatgaaattgtaat

SEQ ID NO: 155374 - DNA, 22 bp, Artificial Sequence
  Synthetic oligonucleotide; TTA chr11 5155560 5155581 5155565 5155560 -
cgtgataaatgaaattgtaatg

SEQ ID NO: 155375 - DNA, 22 bp, Artificial Sequence
  Synthetic oligonucleotide; TTG chr11 5155543 5155564 5155548 5155543 -
taatgcataatcccattttact

SEQ ID NO: 155376 - DNA, 22 bp, Artificial Sequence
  Synthetic oligonucleotide; TTT chr11 5155525 5155546 5155530 5155525 -
tactaataatttaaaggtaaga

SEQ ID NO: 155377 - DNA, 22 bp, Artificial Sequence
  Synthetic oligonucleotide; TTT chr11 5155524 5155545 5155529 5155524 -
actaataatttaaaggtaagac

SEQ ID NO: 155378 - DNA, 22 bp, Artificial Sequence
  Synthetic oligonucleotide; TTA chr11 5155523 5155544 5155528 5155523 -
ctaataatttaaaggtaagact

SEQ ID NO: 155379 - DNA, 22 bp, Artificial Sequence
  Synthetic oligonucleotide; CTA chr11 5155520 5155541 5155525 5155520 -
ataatttaaaggtaagactata

SEQ ID NO: 155380 - DNA, 22 bp, Artificial Sequence
  Synthetic oligonucleotide; TTT chr11 5155513 5155534 5155518 5155513 -
aaaggtaagactataatttttt

SEQ ID NO: 155381 - DNA, 22 bp, Artificial Sequence
  Synthetic oligonucleotide; TTA chr11 5155512 5155533 5155517 5155512 -
aaggtaagactataattttttt

SEQ ID NO: 155382 - DNA, 22 bp, Artificial Sequence
  Synthetic oligonucleotide; CTA chr11 5155500 5155521 5155505 5155500 -
taatttttttcatttcatttag

SEQ ID NO: 155383 - DNA, 22 bp, Artificial Sequence
  Synthetic oligonucleotide; TTT chr11 5155494 5155515 5155499 5155494 -
ttttcatttcatttagaatata

SEQ ID NO: 155384 - DNA, 22 bp, Artificial Sequence
  Synthetic oligonucleotide; TTT chr11 5155493 5155514 5155498 5155493 -
tttcatttcatttagaatatat

SEQ ID NO: 155385 - DNA, 22 bp, Artificial Sequence
  Synthetic oligonucleotide; TTT chr11 5155492 5155513 5155497 5155492 -
ttcatttcatttagaatatata

SEQ ID NO: 155386 - DNA, 22 bp, Artificial Sequence
  Synthetic oligonucleotide; TTT chr11 5155491 5155512 5155496 5155491 -
tcatttcatttagaatatataa

SEQ ID NO: 155387 - DNA, 22 bp, Artificial Sequence
  Synthetic oligonucleotide; TTT chr11 5155490 5155511 5155495 5155490 -
catttcatttagaatatataac

SEQ ID NO: 155388 - DNA, 22 bp, Artificial Sequence
  Synthetic oligonucleotide; TTC chr11 5155489 5155510 5155494 5155489 -
atttcatttagaatatataaca

SEQ ID NO: 155389 - DNA, 22 bp, Artificial Sequence
  Synthetic oligonucleotide; TTT chr11 5155485 5155506 5155490 5155485 -
catttagaatatataacatctc

SEQ ID NO: 155390 - DNA, 22 bp, Artificial Sequence
  Synthetic oligonucleotide; TTC chr11 5155484 5155505 5155489 5155484 -
atttagaatatataacatctca

SEQ ID NO: 155391 - DNA, 22 bp, Artificial Sequence
  Synthetic oligonucleotide; TTT chr11 5155480 5155501 5155485 5155480 -
agaatatataacatctcactca

SEQ ID NO: 155392 - DNA, 22 bp, Artificial Sequence
  Synthetic oligonucleotide; TTA chr11 5155479 5155500 5155484 5155479 -
gaatatataacatctcactcat

SEQ ID NO: 155393 - DNA, 22 bp, Artificial Sequence
  Synthetic oligonucleotide; CTC chr11 5155463 5155484 5155468 5155463 -
actcataaatagtaggaatata

SEQ ID NO: 155394 - DNA, 22 bp, Artificial Sequence
  Synthetic oligonucleotide; CTC chr11 5155459 5155480 5155464 5155459 -
ataaatagtaggaatataatga

SEQ ID NO: 155395 - DNA, 22 bp, Artificial Sequence
  Synthetic oligonucleotide; CTG chr11 5155434 5155455 5155439 5155434 -
ttttttgaaagaaaaagaagga

SEQ ID NO: 155396 - DNA, 22 bp, Artificial Sequence
  Synthetic oligonucleotide; TTT chr11 5155431 5155452 5155436 5155431 -
tttgaaagaaaaagaaggaagg

SEQ ID NO: 155397 - DNA, 22 bp, Artificial Sequence
  Synthetic oligonucleotide; TTT chr11 5155430 5155451 5155435 5155430 -
ttgaaagaaaaagaaggaagga

SEQ ID NO: 155398 - DNA, 22 bp, Artificial Sequence
  Synthetic oligonucleotide; TTT chr11 5155429 5155450 5155434 5155429 -
tgaaagaaaaagaaggaaggaa

SEQ ID NO: 155399 - DNA, 22 bp, Artificial Sequence
  Synthetic oligonucleotide; TTT chr11 5155428 5155449 5155433 5155428 -
gaaagaaaaagaaggaaggaaa

SEQ ID NO: 155400 - DNA, 22 bp, Artificial Sequence
  Synthetic oligonucleotide; TTG chr11 5155427 5155448 5155432 5155427 -
aaagaaaaagaaggaaggaaag

SEQ ID NO: 155401 - DNA, 22 bp, Artificial Sequence
  Synthetic oligonucleotide; TTT chr11 5155362 5155383 5155367 5155362 -
actcaaatgttcaacaacttgc

SEQ ID NO: 155402 - DNA, 22 bp, Artificial Sequence
  Synthetic oligonucleotide; TTA chr11 5155361 5155382 5155366 5155361 -
ctcaaatgttcaacaacttgct

SEQ ID NO: 155403 - DNA, 22 bp, Artificial Sequence
  Synthetic oligonucleotide; CTC chr11 5155358 5155379 5155363 5155358 -
aaatgttcaacaacttgcttcc

SEQ ID NO: 155404 - DNA, 22 bp, Artificial Sequence
  Synthetic oligonucleotide; TTC chr11 5155350 5155371 5155355 5155350 -
aacaacttgcttccagctttac

SEQ ID NO: 155405 - DNA, 22 bp, Artificial Sequence
  Synthetic oligonucleotide; CTT chr11 5155342 5155363 5155347 5155342 -
gcttccagctttacatttgtag

SEQ ID NO: 155406 - DNA, 22 bp, Artificial Sequence
  Synthetic oligonucleotide; TTG chr11 5155341 5155362 5155346 5155341 -
cttccagctttacatttgtagg

SEQ ID NO: 155407 - DNA, 22 bp, Artificial Sequence
  Synthetic oligonucleotide; CTT chr11 5155338 5155359 5155343 5155338 -
ccagctttacatttgtaggact

SEQ ID NO: 155408 - DNA, 22 bp, Artificial Sequence
  Synthetic oligonucleotide; TTC chr11 5155337 5155358 5155342 5155337 -
cagctttacatttgtaggactt

SEQ ID NO: 155409 - DNA, 22 bp, Artificial Sequence
  Synthetic oligonucleotide; CTT chr11 5155331 5155352 5155336 5155331 -
tacatttgtaggacttagaaat

SEQ ID NO: 155410 - DNA, 22 bp, Artificial Sequence
  Synthetic oligonucleotide; TTT chr11 5155330 5155351 5155335 5155330 -
acatttgtaggacttagaaatg

SEQ ID NO: 155411 - DNA, 22 bp, Artificial Sequence
  Synthetic oligonucleotide; TTA chr11 5155329 5155350 5155334 5155329 -
catttgtaggacttagaaatgt

SEQ ID NO: 155412 - DNA, 22 bp, Artificial Sequence
  Synthetic oligonucleotide; TTT chr11 5155324 5155345 5155329 5155324 -
gtaggacttagaaatgtccatt

SEQ ID NO: 155413 - DNA, 22 bp, Artificial Sequence
  Synthetic oligonucleotide; TTG chr11 5155323 5155344 5155328 5155323 -
taggacttagaaatgtccatta

SEQ ID NO: 155414 - DNA, 22 bp, Artificial Sequence
  Synthetic oligonucleotide; CTT chr11 5155315 5155336 5155320 5155315 -
agaaatgtccattataatttgt

SEQ ID NO: 155415 - DNA, 22 bp, Artificial Sequence
  Synthetic oligonucleotide; TTA chr11 5155314 5155335 5155319 5155314 -
gaaatgtccattataatttgtc

SEQ ID NO: 155416 - DNA, 22 bp, Artificial Sequence
  Synthetic oligonucleotide; TTA chr11 5155301 5155322 5155306 5155301 -
taatttgtcactataagaatgt

SEQ ID NO: 155417 - DNA, 22 bp, Artificial Sequence
  Synthetic oligonucleotide; TTT chr11 5155295 5155316 5155300 5155295 -
gtcactataagaatgttactta

SEQ ID NO: 155418 - DNA, 22 bp, Artificial Sequence
  Synthetic oligonucleotide; TTG chr11 5155294 5155315 5155299 5155294 -
tcactataagaatgttacttaa

SEQ ID NO: 155419 - DNA, 22 bp, Artificial Sequence
  Synthetic oligonucleotide; CTA chr11 5155288 5155309 5155293 5155288 -
taagaatgttacttaatttact

SEQ ID NO: 155420 - DNA, 22 bp, Artificial Sequence
  Synthetic oligonucleotide; TTA chr11 5155277 5155298 5155282 5155277 -
cttaatttactaaaagataaaa

SEQ ID NO: 155421 - DNA, 22 bp, Artificial Sequence
  Synthetic oligonucleotide; CTT chr11 5155274 5155295 5155279 5155274 -
aatttactaaaagataaaaaaa

SEQ ID NO: 155422 - DNA, 22 bp, Artificial Sequence
  Synthetic oligonucleotide; TTA chr11 5155273 5155294 5155278 5155273 -
atttactaaaagataaaaaaaa

SEQ ID NO: 155423 - DNA, 22 bp, Artificial Sequence
  Synthetic oligonucleotide; TTT chr11 5155269 5155290 5155274 5155269 -
actaaaagataaaaaaaacttc

SEQ ID NO: 155424 - DNA, 22 bp, Artificial Sequence
  Synthetic oligonucleotide; TTA chr11 5155268 5155289 5155273 5155268 -
ctaaaagataaaaaaaacttca

SEQ ID NO: 155425 - DNA, 22 bp, Artificial Sequence
  Synthetic oligonucleotide; CTA chr11 5155265 5155286 5155270 5155265 -
aaagataaaaaaaacttcaata

SEQ ID NO: 155426 - DNA, 22 bp, Artificial Sequence
  Synthetic oligonucleotide; CTT chr11 5155248 5155269 5155253 5155248 -
caataaaataaaatgggaagaa

SEQ ID NO: 155427 - DNA, 22 bp, Artificial Sequence
  Synthetic oligonucleotide; TTC chr11 5155247 5155268 5155252 5155247 -
aataaaataaaatgggaagaat

SEQ ID NO: 155428 - DNA, 22 bp, Artificial Sequence
  Synthetic oligonucleotide; CTG chr11 5155218 5155239 5155223 5155218 -
aagaagactgaggaagtaattg

SEQ ID NO: 155429 - DNA, 22 bp, Artificial Sequence
  Synthetic oligonucleotide; CTG chr11 5155208 5155229 5155213 5155208 -
aggaagtaattgtgtggtaaaa

SEQ ID NO: 155430 - DNA, 22 bp, Artificial Sequence
  Synthetic oligonucleotide; TTG chr11 5155196 5155217 5155201 5155196 -
tgtggtaaaaagtagttatgaa

SEQ ID NO: 155431 - DNA, 22 bp, Artificial Sequence
  Synthetic oligonucleotide; TTA chr11 5155178 5155199 5155183 5155178 -
tgaatacagatttttcttttct

SEQ ID NO: 155432 - DNA, 22 bp, Artificial Sequence
  Synthetic oligonucleotide; TTT chr11 5155165 5155186 5155170 5155165 -
ttcttttctgaataaaaagaga

SEQ ID NO: 155433 - DNA, 22 bp, Artificial Sequence
  Synthetic oligonucleotide; TTT chr11 5155164 5155185 5155169 5155164 -
tcttttctgaataaaaagagaa

SEQ ID NO: 155434 - DNA, 22 bp, Artificial Sequence
  Synthetic oligonucleotide; TTT chr11 5155163 5155184 5155168 5155163 -
cttttctgaataaaaagagaaa

SEQ ID NO: 155435 - DNA, 22 bp, Artificial Sequence
  Synthetic oligonucleotide; TTC chr11 5155162 5155183 5155167 5155162 -
ttttctgaataaaaagagaaaa

SEQ ID NO: 155436 - DNA, 22 bp, Artificial Sequence
  Synthetic oligonucleotide; CTT chr11 5155160 5155181 5155165 5155160 -
ttctgaataaaaagagaaaaac

SEQ ID NO: 155437 - DNA, 22 bp, Artificial Sequence
  Synthetic oligonucleotide; TTT chr11 5155159 5155180 5155164 5155159 -
tctgaataaaaagagaaaaacc

SEQ ID NO: 155438 - DNA, 22 bp, Artificial Sequence
  Synthetic oligonucleotide; TTT chr11 5155158 5155179 5155163 5155158 -
ctgaataaaaagagaaaaacct

SEQ ID NO: 155439 - DNA, 22 bp, Artificial Sequence
  Synthetic oligonucleotide; TTC chr11 5155157 5155178 5155162 5155157 -
tgaataaaaagagaaaaacctt

SEQ ID NO: 155440 - DNA, 22 bp, Artificial Sequence
  Synthetic oligonucleotide; CTG chr11 5155155 5155176 5155160 5155155 -
aataaaaagagaaaaaccttgc

SEQ ID NO: 155441 - DNA, 22 bp, Artificial Sequence
  Synthetic oligonucleotide; CTT chr11 5155135 5155156 5155140 5155135 -
gcctcagtgaaaatgtcaccaa

SEQ ID NO: 155442 - DNA, 22 bp, Artificial Sequence
  Synthetic oligonucleotide; TTG chr11 5155134 5155155 5155139 5155134 -
cctcagtgaaaatgtcaccaag

SEQ ID NO: 155443 - DNA, 22 bp, Artificial Sequence
  Synthetic oligonucleotide; CTC chr11 5155130 5155151 5155135 5155130 -
agtgaaaatgtcaccaagatat

SEQ ID NO: 155444 - DNA, 22 bp, Artificial Sequence
  Synthetic oligonucleotide; TTT chr11 5155106 5155127 5155111 5155106 -
atttaaataggaattggcatag

SEQ ID NO: 155445 - DNA, 22 bp, Artificial Sequence
  Synthetic oligonucleotide; TTA chr11 5155105 5155126 5155110 5155105 -
tttaaataggaattggcataga

SEQ ID NO: 155446 - DNA, 22 bp, Artificial Sequence
  Synthetic oligonucleotide; TTT chr11 5155102 5155123 5155107 5155102 -
aaataggaattggcatagaaac

SEQ ID NO: 155447 - DNA, 22 bp, Artificial Sequence
  Synthetic oligonucleotide; TTA chr11 5155101 5155122 5155106 5155101 -
aataggaattggcatagaaaca

SEQ ID NO: 155448 - DNA, 22 bp, Artificial Sequence
  Synthetic oligonucleotide; TTG chr11 5155090 5155111 5155095 5155090 -
gcatagaaacatgtttgcatta

SEQ ID NO: 155449 - DNA, 22 bp, Artificial Sequence
  Synthetic oligonucleotide; TTT chr11 5155074 5155095 5155079 5155074 -
gcattaaatgggctttagaatt

SEQ ID NO: 155450 - DNA, 22 bp, Artificial Sequence
  Synthetic oligonucleotide; TTG chr11 5155073 5155094 5155078 5155073 -
cattaaatgggctttagaattt

SEQ ID NO: 155451 - DNA, 22 bp, Artificial Sequence
  Synthetic oligonucleotide; TTA chr11 5155068 5155089 5155073 5155068 -
aatgggctttagaattttgcaa

SEQ ID NO: 155452 - DNA, 22 bp, Artificial Sequence
  Synthetic oligonucleotide; CTT chr11 5155059 5155080 5155064 5155059 -
tagaattttgcaaatagaaatg

SEQ ID NO: 155453 - DNA, 22 bp, Artificial Sequence
  Synthetic oligonucleotide; TTT chr11 5155058 5155079 5155063 5155058 -
agaattttgcaaatagaaatgg

SEQ ID NO: 155454 - DNA, 22 bp, Artificial Sequence
  Synthetic oligonucleotide; TTA chr11 5155057 5155078 5155062 5155057 -
gaattttgcaaatagaaatggc

SEQ ID NO: 155455 - DNA, 22 bp, Artificial Sequence
  Synthetic oligonucleotide; TTT chr11 5155051 5155072 5155056 5155051 -
tgcaaatagaaatggcagaaaa

SEQ ID NO: 155456 - DNA, 22 bp, Artificial Sequence
  Synthetic oligonucleotide; TTT chr11 5155050 5155071 5155055 5155050 -
gcaaatagaaatggcagaaaag

SEQ ID NO: 155457 - DNA, 22 bp, Artificial Sequence
  Synthetic oligonucleotide; TTG chr11 5155049 5155070 5155054 5155049 -
caaatagaaatggcagaaaagg

SEQ ID NO: 155458 - DNA, 22 bp, Artificial Sequence
  Synthetic oligonucleotide; CTT chr11 5155017 5155038 5155022 5155017 -
gtaaaaaaattttttgcatatg

SEQ ID NO: 155459 - DNA, 22 bp, Artificial Sequence
  Synthetic oligonucleotide; TTG chr11 5155016 5155037 5155021 5155016 -
taaaaaaattttttgcatatga

SEQ ID NO: 155460 - DNA, 22 bp, Artificial Sequence
  Synthetic oligonucleotide; TTT chr11 5155005 5155026 5155010 5155005 -
tttgcatatgaattattctgca

SEQ ID NO: 155461 - DNA, 22 bp, Artificial Sequence
  Synthetic oligonucleotide; TTT chr11 5155004 5155025 5155009 5155004 -
ttgcatatgaattattctgcat

SEQ ID NO: 155462 - DNA, 22 bp, Artificial Sequence
  Synthetic oligonucleotide; TTT chr11 5155003 5155024 5155008 5155003 -
tgcatatgaattattctgcatt

SEQ ID NO: 155463 - DNA, 22 bp, Artificial Sequence
  Synthetic oligonucleotide; TTT chr11 5155002 5155023 5155007 5155002 -
gcatatgaattattctgcattt

SEQ ID NO: 155464 - DNA, 22 bp, Artificial Sequence
  Synthetic oligonucleotide; TTG chr11 5155001 5155022 5155006 5155001 -
catatgaattattctgcattta

SEQ ID NO: 155465 - DNA, 22 bp, Artificial Sequence
  Synthetic oligonucleotide; TTA chr11 5154990 5155011 5154995 5154990 -
ttctgcatttagcctgtgggaa

SEQ ID NO: 155466 - DNA, 22 bp, Artificial Sequence
  Synthetic oligonucleotide; TTC chr11 5154987 5155008 5154992 5154987 -
tgcatttagcctgtgggaaaag

SEQ ID NO: 155467 - DNA, 22 bp, Artificial Sequence
  Synthetic oligonucleotide; CTG chr11 5154985 5155006 5154990 5154985 -
catttagcctgtgggaaaagag

SEQ ID NO: 155468 - DNA, 22 bp, Artificial Sequence
  Synthetic oligonucleotide; TTT chr11 5154980 5155001 5154985 5154980 -
agcctgtgggaaaagagaaaaa

SEQ ID NO: 155469 - DNA, 22 bp, Artificial Sequence
  Synthetic oligonucleotide; TTA chr11 5154979 5155000 5154984 5154979 -
gcctgtgggaaaagagaaaaag

SEQ ID NO: 155470 - DNA, 22 bp, Artificial Sequence
  Synthetic oligonucleotide; CTG chr11 5154974 5154995 5154979 5154974 -
tgggaaaagagaaaaagagaga

SEQ ID NO: 155471 - DNA, 22 bp, Artificial Sequence
  Synthetic oligonucleotide; TTT chr11 5154942 5154963 5154947 5154942 -
ctgcaagtgtagaaataattac

SEQ ID NO: 155472 - DNA, 22 bp, Artificial Sequence
  Synthetic oligonucleotide; TTC chr11 5154941 5154962 5154946 5154941 -
tgcaagtgtagaaataattacg

SEQ ID NO: 155473 - DNA, 22 bp, Artificial Sequence
  Synthetic oligonucleotide; CTG chr11 5154939 5154960 5154944 5154939 -
caagtgtagaaataattacggg

SEQ ID NO: 155474 - DNA, 22 bp, Artificial Sequence
  Synthetic oligonucleotide; TTA chr11 5154921 5154942 5154926 5154921 -
cggggatattaggtgccagtga

SEQ ID NO: 155475 - DNA, 22 bp, Artificial Sequence
  Synthetic oligonucleotide; TTA chr11 5154910 5154931 5154915 5154910 -
ggtgccagtgaacccaagaggg

SEQ ID NO: 155476 - DNA, 22 bp, Artificial Sequence
  Synthetic oligonucleotide; CTG chr11 5154885 5154906 5154890 5154885 -
acttaaaatttgctgggtccct

SEQ ID NO: 155477 - DNA, 22 bp, Artificial Sequence
  Synthetic oligonucleotide; CTT chr11 5154881 5154902 5154886 5154881 -
aaaatttgctgggtccctcgtg

SEQ ID NO: 155478 - DNA, 22 bp, Artificial Sequence
  Synthetic oligonucleotide; TTA chr11 5154880 5154901 5154885 5154880 -
aaatttgctgggtccctcgtgg

SEQ ID NO: 155479 - DNA, 22 bp, Artificial Sequence
  Synthetic oligonucleotide; TTT chr11 5154874 5154895 5154879 5154874 -
gctgggtccctcgtggttttgg

SEQ ID NO: 155480 - DNA, 22 bp, Artificial Sequence
  Synthetic oligonucleotide; TTG chr11 5154873 5154894 5154878 5154873 -
ctgggtccctcgtggttttggc

SEQ ID NO: 155481 - DNA, 22 bp, Artificial Sequence
  Synthetic oligonucleotide; CTG chr11 5154870 5154891 5154875 5154870 -
ggtccctcgtggttttggctat

SEQ ID NO: 155482 - DNA, 22 bp, Artificial Sequence
  Synthetic oligonucleotide; CTC chr11 5154862 5154883 5154867 5154862 -
gtggttttggctatcaactagg

SEQ ID NO: 155483 - DNA, 22 bp, Artificial Sequence
  Synthetic oligonucleotide; TTT chr11 5154855 5154876 5154860 5154855 -
tggctatcaactaggaaatccc

SEQ ID NO: 155484 - DNA, 22 bp, Artificial Sequence
  Synthetic oligonucleotide; TTT chr11 5154854 5154875 5154859 5154854 -
ggctatcaactaggaaatccct

SEQ ID NO: 155485 - DNA, 22 bp, Artificial Sequence
  Synthetic oligonucleotide; TTG chr11 5154853 5154874 5154858 5154853 -
gctatcaactaggaaatccctc

SEQ ID NO: 155486 - DNA, 22 bp, Artificial Sequence
  Synthetic oligonucleotide; CTA chr11 5154849 5154870 5154854 5154849 -
tcaactaggaaatccctcattt

SEQ ID NO: 155487 - DNA, 22 bp, Artificial Sequence
  Synthetic oligonucleotide; CTA chr11 5154842 5154863 5154847 5154842 -
ggaaatccctcatttcatgctc

SEQ ID NO: 155488 - DNA, 22 bp, Artificial Sequence
  Synthetic oligonucleotide; CTC chr11 5154831 5154852 5154836 5154831 -
atttcatgctcataactcctcc

SEQ ID NO: 155489 - DNA, 22 bp, Artificial Sequence
  Synthetic oligonucleotide; TTT chr11 5154827 5154848 5154832 5154827 -
catgctcataactcctcctact

SEQ ID NO: 155490 - DNA, 22 bp, Artificial Sequence
  Synthetic oligonucleotide; TTC chr11 5154826 5154847 5154831 5154826 -
atgctcataactcctcctactt

SEQ ID NO: 155491 - DNA, 22 bp, Artificial Sequence
  Synthetic oligonucleotide; CTC chr11 5154820 5154841 5154825 5154820 -
ataactcctcctacttctccac

SEQ ID NO: 155492 - DNA, 22 bp, Artificial Sequence
  Synthetic oligonucleotide; CTC chr11 5154813 5154834 5154818 5154813 -
ctcctacttctccacacattca

SEQ ID NO: 155493 - DNA, 22 bp, Artificial Sequence
  Synthetic oligonucleotide; CTC chr11 5154810 5154831 5154815 5154810 -
ctacttctccacacattcataa

SEQ ID NO: 155494 - DNA, 22 bp, Artificial Sequence
  Synthetic oligonucleotide; CTA chr11 5154807 5154828 5154812 5154807 -
cttctccacacattcataaagg

SEQ ID NO: 155495 - DNA, 22 bp, Artificial Sequence
  Synthetic oligonucleotide; CTT chr11 5154804 5154825 5154809 5154804 -
ctccacacattcataaaggaat

SEQ ID NO: 155496 - DNA, 22 bp, Artificial Sequence
  Synthetic oligonucleotide; TTC chr11 5154803 5154824 5154808 5154803 -
tccacacattcataaaggaata

SEQ ID NO: 155497 - DNA, 22 bp, Artificial Sequence
  Synthetic oligonucleotide; CTC chr11 5154801 5154822 5154806 5154801 -
cacacattcataaaggaatatt

SEQ ID NO: 155498 - DNA, 22 bp, Artificial Sequence
  Synthetic oligonucleotide; TTC chr11 5154792 5154813 5154797 5154792 -
ataaaggaatattaaattggtg

SEQ ID NO: 155499 - DNA, 22 bp, Artificial Sequence
  Synthetic oligonucleotide; TTA chr11 5154778 5154799 5154783 5154778 -
aattggtggatagccacttttt

SEQ ID NO: 155500 - DNA, 22 bp, Artificial Sequence
  Synthetic oligonucleotide; TTG chr11 5154773 5154794 5154778 5154773 -
gtggatagccacttttttctcc

SEQ ID NO: 155501 - DNA, 22 bp, Artificial Sequence
  Synthetic oligonucleotide; CTT chr11 5154759 5154780 5154764 5154759 -
ttttctccaatttgagctcaat

SEQ ID NO: 155502 - DNA, 22 bp, Artificial Sequence
  Synthetic oligonucleotide; TTT chr11 5154758 5154779 5154763 5154758 -
tttctccaatttgagctcaata

SEQ ID NO: 155503 - DNA, 22 bp, Artificial Sequence
  Synthetic oligonucleotide; TTT chr11 5154757 5154778 5154762 5154757 -
ttctccaatttgagctcaataa

SEQ ID NO: 155504 - DNA, 22 bp, Artificial Sequence
  Synthetic oligonucleotide; TTT chr11 5154756 5154777 5154761 5154756 -
tctccaatttgagctcaataaa

SEQ ID NO: 155505 - DNA, 22 bp, Artificial Sequence
  Synthetic oligonucleotide; TTT chr11 5154755 5154776 5154760 5154755 -
ctccaatttgagctcaataaat

SEQ ID NO: 155506 - DNA, 22 bp, Artificial Sequence
  Synthetic oligonucleotide; TTC chr11 5154754 5154775 5154759 5154754 -
tccaatttgagctcaataaatt

SEQ ID NO: 155507 - DNA, 22 bp, Artificial Sequence
  Synthetic oligonucleotide; CTC chr11 5154752 5154773 5154757 5154752 -
caatttgagctcaataaattca

SEQ ID NO: 155508 - DNA, 22 bp, Artificial Sequence
  Synthetic oligonucleotide; TTT chr11 5154746 5154767 5154751 5154746 -
gagctcaataaattcatcccgt

SEQ ID NO: 155509 - DNA, 22 bp, Artificial Sequence
  Synthetic oligonucleotide; TTG chr11 5154745 5154766 5154750 5154745 -
agctcaataaattcatcccgtg

SEQ ID NO: 155510 - DNA, 22 bp, Artificial Sequence
  Synthetic oligonucleotide; CTC chr11 5154740 5154761 5154745 5154740 -
aataaattcatcccgtgtttca

SEQ ID NO: 155511 - DNA, 22 bp, Artificial Sequence
  Synthetic oligonucleotide; TTC chr11 5154731 5154752 5154736 5154731 -
atcccgtgtttcagaatgctac

SEQ ID NO: 155512 - DNA, 22 bp, Artificial Sequence
  Synthetic oligonucleotide; TTT chr11 5154720 5154741 5154725 5154720 -
cagaatgctacagacctcacta

SEQ ID NO: 155513 - DNA, 22 bp, Artificial Sequence
  Synthetic oligonucleotide; TTC chr11 5154719 5154740 5154724 5154719 -
agaatgctacagacctcactat

SEQ ID NO: 155514 - DNA, 22 bp, Artificial Sequence
  Synthetic oligonucleotide; CTA chr11 5154710 5154731 5154715 5154710 -
cagacctcactatgagttttac

SEQ ID NO: 155515 - DNA, 22 bp, Artificial Sequence
  Synthetic oligonucleotide; CTC chr11 5154702 5154723 5154707 5154702 -
actatgagttttactgggggat

SEQ ID NO: 155516 - DNA, 22 bp, Artificial Sequence
  Synthetic oligonucleotide; CTA chr11 5154698 5154719 5154703 5154698 -
tgagttttactgggggatgagc

SEQ ID NO: 155517 - DNA, 22 bp, Artificial Sequence
  Synthetic oligonucleotide; TTT chr11 5154691 5154712 5154696 5154691 -
tactgggggatgagcacacaaa

SEQ ID NO: 155518 - DNA, 22 bp, Artificial Sequence
  Synthetic oligonucleotide; TTT chr11 5154690 5154711 5154695 5154690 -
actgggggatgagcacacaaag

SEQ ID NO: 155519 - DNA, 22 bp, Artificial Sequence
  Synthetic oligonucleotide; TTA chr11 5154689 5154710 5154694 5154689 -
ctgggggatgagcacacaaaga

SEQ ID NO: 155520 - DNA, 22 bp, Artificial Sequence
  Synthetic oligonucleotide; CTG chr11 5154686 5154707 5154691 5154686 -
ggggatgagcacacaaagatgg

SEQ ID NO: 155521 - DNA, 22 bp, Artificial Sequence
  Synthetic oligonucleotide; CTG chr11 5154660 5154681 5154665 5154660 -
agacagacttccagaagaagaa

SEQ ID NO: 155522 - DNA, 22 bp, Artificial Sequence
  Synthetic oligonucleotide; CTT chr11 5154650 5154671 5154655 5154650 -
ccagaagaagaagaagatgtcc

SEQ ID NO: 155523 - DNA, 22 bp, Artificial Sequence
  Synthetic oligonucleotide; TTC chr11 5154649 5154670 5154654 5154649 -
cagaagaagaagaagatgtccg

SEQ ID NO: 155524 - DNA, 22 bp, Artificial Sequence
  Synthetic oligonucleotide; TTA chr11 5154622 5154643 5154627 5154622 -
gagataaatgaaaagtgtaaaa

SEQ ID NO: 155525 - DNA, 22 bp, Artificial Sequence
  Synthetic oligonucleotide; CTG chr11 5154591 5154612 5154596 5154591 -
caaaatgtccacagtatattat

SEQ ID NO: 155526 - DNA, 22 bp, Artificial Sequence
  Synthetic oligonucleotide; TTA chr11 5154570 5154591 5154575 5154570 -
tattggcacatatcctggcacc

SEQ ID NO: 155527 - DNA, 22 bp, Artificial Sequence
  Synthetic oligonucleotide; TTG chr11 5154565 5154586 5154570 5154565 -
gcacatatcctggcaccaaaca

SEQ ID NO: 155528 - DNA, 22 bp, Artificial Sequence
  Synthetic oligonucleotide; CTG chr11 5154553 5154574 5154558 5154553 -
gcaccaaacagagtaaaattta

SEQ ID NO: 155529 - DNA, 22 bp, Artificial Sequence
  Synthetic oligonucleotide; TTT chr11 5154532 5154553 5154537 5154532 -
atgacattagctggatgctgtt

SEQ ID NO: 155530 - DNA, 22 bp, Artificial Sequence
  Synthetic oligonucleotide; TTA chr11 5154531 5154552 5154536 5154531 -
tgacattagctggatgctgtta

SEQ ID NO: 155531 - DNA, 22 bp, Artificial Sequence
  Synthetic oligonucleotide; TTA chr11 5154523 5154544 5154528 5154523 -
gctggatgctgttacacagagt

SEQ ID NO: 155532 - DNA, 22 bp, Artificial Sequence
  Synthetic oligonucleotide; CTG chr11 5154519 5154540 5154524 5154519 -
gatgctgttacacagagtgcag

SEQ ID NO: 155533 - DNA, 22 bp, Artificial Sequence
  Synthetic oligonucleotide; CTG chr11 5154512 5154533 5154517 5154512 -
ttacacagagtgcagacagaaa

SEQ ID NO: 155534 - DNA, 22 bp, Artificial Sequence
  Synthetic oligonucleotide; TTA chr11 5154509 5154530 5154514 5154509 -
cacagagtgcagacagaaagta

SEQ ID NO: 155535 - DNA, 22 bp, Artificial Sequence
  Synthetic oligonucleotide; CTT chr11 5154463 5154484 5154468 5154463 -
aagggaatgaagctggaatcct

SEQ ID NO: 155536 - DNA, 22 bp, Artificial Sequence
  Synthetic oligonucleotide; TTA chr11 5154462 5154483 5154467 5154462 -
agggaatgaagctggaatcctt

SEQ ID NO: 155537 - DNA, 22 bp, Artificial Sequence
  Synthetic oligonucleotide; CTG chr11 5154448 5154469 5154453 5154448 -
gaatccttggagaagaaaaatt

SEQ ID NO: 155538 - DNA, 22 bp, Artificial Sequence
  Synthetic oligonucleotide; CTT chr11 5154440 5154461 5154445 5154440 -
ggagaagaaaaattggtgagtg

SEQ ID NO: 155539 - DNA, 22 bp, Artificial Sequence
  Synthetic oligonucleotide; TTG chr11 5154439 5154460 5154444 5154439 -
gagaagaaaaattggtgagtga

SEQ ID NO: 155540 - DNA, 22 bp, Artificial Sequence
  Synthetic oligonucleotide; TTG chr11 5154425 5154446 5154430 5154425 -
gtgagtgatgaatgaaagtgtt

SEQ ID NO: 155541 - DNA, 22 bp, Artificial Sequence
  Synthetic oligonucleotide; TTA chr11 5154402 5154423 5154407 5154402 -
tgaaaaatggacaatattcttc

SEQ ID NO: 155542 - DNA, 22 bp, Artificial Sequence
  Synthetic oligonucleotide; TTC chr11 5154383 5154404 5154388 5154383 -
ttcaggtatctggtaagagcaa

SEQ ID NO: 155543 - DNA, 22 bp, Artificial Sequence
  Synthetic oligonucleotide; CTT chr11 5154381 5154402 5154386 5154381 -
caggtatctggtaagagcaaaa

SEQ ID NO: 155544 - DNA, 22 bp, Artificial Sequence
  Synthetic oligonucleotide; TTC chr11 5154380 5154401 5154385 5154380 -
aggtatctggtaagagcaaaac

SEQ ID NO: 155545 - DNA, 22 bp, Artificial Sequence
  Synthetic oligonucleotide; CTG chr11 5154371 5154392 5154376 5154371 -
gtaagagcaaaaccagctctca

SEQ ID NO: 155546 - DNA, 22 bp, Artificial Sequence
  Synthetic oligonucleotide; CTC chr11 5154352 5154373 5154357 5154352 -
tcaataataattgaggagtaag

SEQ ID NO: 155547 - DNA, 22 bp, Artificial Sequence
  Synthetic oligonucleotide; CTC chr11 5154350 5154371 5154355 5154350 -
aataataattgaggagtaagtc

SEQ ID NO: 155548 - DNA, 22 bp, Artificial Sequence
  Synthetic oligonucleotide; TTG chr11 5154339 5154360 5154344 5154339 -
aggagtaagtctcacgattcca

SEQ ID NO: 155549 - DNA, 22 bp, Artificial Sequence
  Synthetic oligonucleotide; CTC chr11 5154326 5154347 5154331 5154326 -
acgattccaagtttcctctcca

SEQ ID NO: 155550 - DNA, 22 bp, Artificial Sequence
  Synthetic oligonucleotide; TTC chr11 5154319 5154340 5154324 5154319 -
caagtttcctctccataattta

SEQ ID NO: 155551 - DNA, 22 bp, Artificial Sequence
  Synthetic oligonucleotide; TTT chr11 5154312 5154333 5154317 5154312 -
cctctccataatttaattacca

SEQ ID NO: 155552 - DNA, 22 bp, Artificial Sequence
  Synthetic oligonucleotide; TTC chr11 5154311 5154332 5154316 5154311 -
ctctccataatttaattaccag

SEQ ID NO: 155553 - DNA, 22 bp, Artificial Sequence
  Synthetic oligonucleotide; CTC chr11 5154308 5154329 5154313 5154308 -
tccataatttaattaccagctt

SEQ ID NO: 155554 - DNA, 22 bp, Artificial Sequence
  Synthetic oligonucleotide; CTC chr11 5154306 5154327 5154311 5154306 -
cataatttaattaccagcttct

SEQ ID NO: 155555 - DNA, 22 bp, Artificial Sequence
  Synthetic oligonucleotide; TTT chr11 5154298 5154319 5154303 5154298 -
aattaccagcttctccaataac

SEQ ID NO: 155556 - DNA, 22 bp, Artificial Sequence
  Synthetic oligonucleotide; TTA chr11 5154297 5154318 5154302 5154297 -
attaccagcttctccaataaca

SEQ ID NO: 155557 - DNA, 22 bp, Artificial Sequence
  Synthetic oligonucleotide; TTA chr11 5154293 5154314 5154298 5154293 -
ccagcttctccaataacaatca

SEQ ID NO: 155558 - DNA, 22 bp, Artificial Sequence
  Synthetic oligonucleotide; CTT chr11 5154286 5154307 5154291 5154286 -
ctccaataacaatcactctatc

SEQ ID NO: 155559 - DNA, 22 bp, Artificial Sequence
  Synthetic oligonucleotide; TTC chr11 5154285 5154306 5154290 5154285 -
tccaataacaatcactctatcc

SEQ ID NO: 155560 - DNA, 22 bp, Artificial Sequence
  Synthetic oligonucleotide; CTC chr11 5154283 5154304 5154288 5154283 -
caataacaatcactctatccaa

SEQ ID NO: 155561 - DNA, 22 bp, Artificial Sequence
  Synthetic oligonucleotide; CTC chr11 5154268 5154289 5154273 5154268 -
tatccaactaaccaggaactta

SEQ ID NO: 155562 - DNA, 22 bp, Artificial Sequence
  Synthetic oligonucleotide; CTA chr11 5154266 5154287 5154271 5154266 -
tccaactaaccaggaacttaca

SEQ ID NO: 155563 - DNA, 22 bp, Artificial Sequence
  Synthetic oligonucleotide; CTA chr11 5154258 5154279 5154263 5154258 -
accaggaacttacatacaccac

SEQ ID NO: 155564 - DNA, 22 bp, Artificial Sequence
  Synthetic oligonucleotide; CTT chr11 5154247 5154268 5154252 5154247 -
acatacaccaccacctgcaacc

SEQ ID NO: 155565 - DNA, 22 bp, Artificial Sequence
  Synthetic oligonucleotide; TTA chr11 5154246 5154267 5154251 5154246 -
catacaccaccacctgcaaccc

SEQ ID NO: 155566 - DNA, 22 bp, Artificial Sequence
  Synthetic oligonucleotide; CTG chr11 5154230 5154251 5154235 5154230 -
caaccctgctatctgtgcctgt

SEQ ID NO: 155567 - DNA, 22 bp, Artificial Sequence
  Synthetic oligonucleotide; CTG chr11 5154222 5154243 5154227 5154222 -
ctatctgtgcctgtcaggtagt

SEQ ID NO: 155568 - DNA, 22 bp, Artificial Sequence
  Synthetic oligonucleotide; CTA chr11 5154219 5154240 5154224 5154219 -
tctgtgcctgtcaggtagtact

SEQ ID NO: 155569 - DNA, 22 bp, Artificial Sequence
  Synthetic oligonucleotide; CTG chr11 5154215 5154236 5154220 5154215 -
tgcctgtcaggtagtactcaca

SEQ ID NO: 155570 - DNA, 22 bp, Artificial Sequence
  Synthetic oligonucleotide; CTG chr11 5154209 5154230 5154214 5154209 -
tcaggtagtactcacatgtcag

SEQ ID NO: 155571 - DNA, 22 bp, Artificial Sequence
  Synthetic oligonucleotide; CTC chr11 5154196 5154217 5154201 5154196 -
acatgtcagctctttggtcttg

SEQ ID NO: 155572 - DNA, 22 bp, Artificial Sequence
  Synthetic oligonucleotide; CTC chr11 5154184 5154205 5154189 5154184 -
tttggtcttgaataagtcagac

SEQ ID NO: 155573 - DNA, 22 bp, Artificial Sequence
  Synthetic oligonucleotide; CTT chr11 5154182 5154203 5154187 5154182 -
tggtcttgaataagtcagacat

SEQ ID NO: 155574 - DNA, 22 bp, Artificial Sequence
  Synthetic oligonucleotide; TTT chr11 5154181 5154202 5154186 5154181 -
ggtcttgaataagtcagacatt

SEQ ID NO: 155575 - DNA, 22 bp, Artificial Sequence
  Synthetic oligonucleotide; TTG chr11 5154180 5154201 5154185 5154180 -
gtcttgaataagtcagacattg

SEQ ID NO: 155576 - DNA, 22 bp, Artificial Sequence
  Synthetic oligonucleotide; CTT chr11 5154175 5154196 5154180 5154175 -
gaataagtcagacattgtgatt

SEQ ID NO: 155577 - DNA, 22 bp, Artificial Sequence
  Synthetic oligonucleotide; TTG chr11 5154174 5154195 5154179 5154174 -
aataagtcagacattgtgattg

SEQ ID NO: 155578 - DNA, 22 bp, Artificial Sequence
  Synthetic oligonucleotide; TTG chr11 5154158 5154179 5154163 5154158 -
tgattgccattaaaggattctt

SEQ ID NO: 155579 - DNA, 22 bp, Artificial Sequence
  Synthetic oligonucleotide; TTG chr11 5154152 5154173 5154157 5154152 -
ccattaaaggattcttattcta

SEQ ID NO: 155580 - DNA, 22 bp, Artificial Sequence
  Synthetic oligonucleotide; TTA chr11 5154146 5154167 5154151 5154146 -
aaggattcttattctaattgtg

SEQ ID NO: 155581 - DNA, 22 bp, Artificial Sequence
  Synthetic oligonucleotide; TTC chr11 5154138 5154159 5154143 5154138 -
ttattctaattgtgattatctt

SEQ ID NO: 155582 - DNA, 22 bp, Artificial Sequence
  Synthetic oligonucleotide; CTT chr11 5154136 5154157 5154141 5154136 -
attctaattgtgattatctttg

SEQ ID NO: 155583 - DNA, 22 bp, Artificial Sequence
  Synthetic oligonucleotide; TTA chr11 5154135 5154156 5154140 5154135 -
ttctaattgtgattatctttgg

SEQ ID NO: 155584 - DNA, 22 bp, Artificial Sequence
  Synthetic oligonucleotide; TTC chr11 5154132 5154153 5154137 5154132 -
taattgtgattatctttggaga

SEQ ID NO: 155585 - DNA, 22 bp, Artificial Sequence
  Synthetic oligonucleotide; CTA chr11 5154130 5154151 5154135 5154130 -
attgtgattatctttggagaag

SEQ ID NO: 155586 - DNA, 22 bp, Artificial Sequence
  Synthetic oligonucleotide; TTG chr11 5154126 5154147 5154131 5154126 -
tgattatctttggagaagaaaa

SEQ ID NO: 155587 - DNA, 22 bp, Artificial Sequence
  Synthetic oligonucleotide; TTA chr11 5154120 5154141 5154125 5154120 -
tctttggagaagaaaaaatttg

SEQ ID NO: 155588 - DNA, 22 bp, Artificial Sequence
  Synthetic oligonucleotide; CTT chr11 5154116 5154137 5154121 5154116 -
tggagaagaaaaaatttgcccc

SEQ ID NO: 155589 - DNA, 22 bp, Artificial Sequence
  Synthetic oligonucleotide; TTT chr11 5154115 5154136 5154120 5154115 -
ggagaagaaaaaatttgcccct

SEQ ID NO: 155590 - DNA, 22 bp, Artificial Sequence
  Synthetic oligonucleotide; TTG chr11 5154114 5154135 5154119 5154114 -
gagaagaaaaaatttgccccta

SEQ ID NO: 155591 - DNA, 22 bp, Artificial Sequence
  Synthetic oligonucleotide; TTT chr11 5154099 5154120 5154104 5154099 -
gcccctattagaaaaagccagt

SEQ ID NO: 155592 - DNA, 22 bp, Artificial Sequence
  Synthetic oligonucleotide; TTG chr11 5154098 5154119 5154103 5154098 -
cccctattagaaaaagccagtg

SEQ ID NO: 155593 - DNA, 22 bp, Artificial Sequence
  Synthetic oligonucleotide; CTA chr11 5154092 5154113 5154097 5154092 -
ttagaaaaagccagtgacttat

SEQ ID NO: 155594 - DNA, 22 bp, Artificial Sequence
  Synthetic oligonucleotide; TTA chr11 5154089 5154110 5154094 5154089 -
gaaaaagccagtgacttatgga

SEQ ID NO: 155595 - DNA, 22 bp, Artificial Sequence
  Synthetic oligonucleotide; CTT chr11 5154072 5154093 5154077 5154072 -
atggatgggagtgtcataaaac

SEQ ID NO: 155596 - DNA, 22 bp, Artificial Sequence
  Synthetic oligonucleotide; TTA chr11 5154071 5154092 5154076 5154071 -
tggatgggagtgtcataaaact

SEQ ID NO: 155597 - DNA, 22 bp, Artificial Sequence
  Synthetic oligonucleotide; CTA chr11 5154048 5154069 5154053 5154048 -
agcattggggatcaaatctgtg

SEQ ID NO: 155598 - DNA, 22 bp, Artificial Sequence
  Synthetic oligonucleotide; TTG chr11 5154041 5154062 5154046 5154041 -
gggatcaaatctgtggaaatca

SEQ ID NO: 155599 - DNA, 22 bp, Artificial Sequence
  Synthetic oligonucleotide; CTG chr11 5154028 5154049 5154033 5154028 -
tggaaatcaaagtatttaattg

SEQ ID NO: 155600 - DNA, 22 bp, Artificial Sequence
  Synthetic oligonucleotide; TTT chr11 5154011 5154032 5154016 5154011 -
aattgacctactagtttacggt

SEQ ID NO: 155601 - DNA, 22 bp, Artificial Sequence
  Synthetic oligonucleotide; TTA chr11 5154010 5154031 5154015 5154010 -
attgacctactagtttacggta

SEQ ID NO: 155602 - DNA, 22 bp, Artificial Sequence
  Synthetic oligonucleotide; TTG chr11 5154006 5154027 5154011 5154006 -
acctactagtttacggtaaatg

SEQ ID NO: 155603 - DNA, 22 bp, Artificial Sequence
  Synthetic oligonucleotide; CTA chr11 5154001 5154022 5154006 5154001 -
ctagtttacggtaaatgtatgt

SEQ ID NO: 155604 - DNA, 22 bp, Artificial Sequence
  Synthetic oligonucleotide; CTA chr11 5153998 5154019 5154003 5153998 -
gtttacggtaaatgtatgttag

SEQ ID NO: 155605 - DNA, 22 bp, Artificial Sequence
  Synthetic oligonucleotide; TTT chr11 5153994 5154015 5153999 5153994 -
acggtaaatgtatgttagctga

SEQ ID NO: 155606 - DNA, 22 bp, Artificial Sequence
  Synthetic oligonucleotide; TTA chr11 5153993 5154014 5153998 5153993 -
cggtaaatgtatgttagctgat

SEQ ID NO: 155607 - DNA, 22 bp, Artificial Sequence
  Synthetic oligonucleotide; TTA chr11 5153977 5153998 5153982 5153977 -
gctgatacagcctccctgtcat

SEQ ID NO: 155608 - DNA, 22 bp, Artificial Sequence
  Synthetic oligonucleotide; CTG chr11 5153973 5153994 5153978 5153973 -
atacagcctccctgtcatgaaa

SEQ ID NO: 155609 - DNA, 22 bp, Artificial Sequence
  Synthetic oligonucleotide; CTC chr11 5153963 5153984 5153968 5153963 -
cctgtcatgaaatgtcctctgc

SEQ ID NO: 155610 - DNA, 22 bp, Artificial Sequence
  Synthetic oligonucleotide; CTG chr11 5153959 5153980 5153964 5153959 -
tcatgaaatgtcctctgctgat

SEQ ID NO: 155611 - DNA, 22 bp, Artificial Sequence
  Synthetic oligonucleotide; CTC chr11 5153944 5153965 5153949 5153944 -
tgctgatttggttctttcattt

SEQ ID NO: 155612 - DNA, 22 bp, Artificial Sequence
  Synthetic oligonucleotide; CTG chr11 5153942 5153963 5153947 5153942 -
ctgatttggttctttcatttga

SEQ ID NO: 155613 - DNA, 22 bp, Artificial Sequence
  Synthetic oligonucleotide; CTG chr11 5153939 5153960 5153944 5153939 -
atttggttctttcatttgaagt

SEQ ID NO: 155614 - DNA, 22 bp, Artificial Sequence
  Synthetic oligonucleotide; TTT chr11 5153935 5153956 5153940 5153935 -
ggttctttcatttgaagtttag

SEQ ID NO: 155615 - DNA, 22 bp, Artificial Sequence
  Synthetic oligonucleotide; TTG chr11 5153934 5153955 5153939 5153934 -
gttctttcatttgaagtttagc

SEQ ID NO: 155616 - DNA, 22 bp, Artificial Sequence
  Synthetic oligonucleotide; TTC chr11 5153930 5153951 5153935 5153930 -
tttcatttgaagtttagcagca

SEQ ID NO: 155617 - DNA, 22 bp, Artificial Sequence
  Synthetic oligonucleotide; CTT chr11 5153928 5153949 5153933 5153928 -
tcatttgaagtttagcagcagt

SEQ ID NO: 155618 - DNA, 22 bp, Artificial Sequence
  Synthetic oligonucleotide; TTT chr11 5153927 5153948 5153932 5153927 -
catttgaagtttagcagcagtt

SEQ ID NO: 155619 - DNA, 22 bp, Artificial Sequence
  Synthetic oligonucleotide; TTC chr11 5153926 5153947 5153931 5153926 -
atttgaagtttagcagcagttg

SEQ ID NO: 155620 - DNA, 22 bp, Artificial Sequence
  Synthetic oligonucleotide; TTT chr11 5153922 5153943 5153927 5153922 -
gaagtttagcagcagttgaaca

SEQ ID NO: 155621 - DNA, 22 bp, Artificial Sequence
  Synthetic oligonucleotide; TTG chr11 5153921 5153942 5153926 5153921 -
aagtttagcagcagttgaacat

SEQ ID NO: 155622 - DNA, 22 bp, Artificial Sequence
  Synthetic oligonucleotide; TTT chr11 5153915 5153936 5153920 5153915 -
agcagcagttgaacatttgttg

SEQ ID NO: 155623 - DNA, 22 bp, Artificial Sequence
  Synthetic oligonucleotide; TTA chr11 5153914 5153935 5153919 5153914 -
gcagcagttgaacatttgttgt

SEQ ID NO: 155624 - DNA, 22 bp, Artificial Sequence
  Synthetic oligonucleotide; TTG chr11 5153904 5153925 5153909 5153904 -
aacatttgttgttgaatatttg

SEQ ID NO: 155625 - DNA, 22 bp, Artificial Sequence
  Synthetic oligonucleotide; TTT chr11 5153897 5153918 5153902 5153897 -
gttgttgaatatttgagtaaac

SEQ ID NO: 155626 - DNA, 22 bp, Artificial Sequence
  Synthetic oligonucleotide; TTG chr11 5153896 5153917 5153901 5153896 -
ttgttgaatatttgagtaaact

SEQ ID NO: 155627 - DNA, 22 bp, Artificial Sequence
  Synthetic oligonucleotide; TTG chr11 5153893 5153914 5153898 5153893 -
ttgaatatttgagtaaacttgt

SEQ ID NO: 155628 - DNA, 22 bp, Artificial Sequence
  Synthetic oligonucleotide; TTG chr11 5153890 5153911 5153895 5153890 -
aatatttgagtaaacttgtatc

SEQ ID NO: 155629 - DNA, 22 bp, Artificial Sequence
  Synthetic oligonucleotide; TTT chr11 5153883 5153904 5153888 5153883 -
gagtaaacttgtatccatttcc

SEQ ID NO: 155630 - DNA, 22 bp, Artificial Sequence
  Synthetic oligonucleotide; TTG chr11 5153882 5153903 5153887 5153882 -
agtaaacttgtatccatttcct

SEQ ID NO: 155631 - DNA, 22 bp, Artificial Sequence
  Synthetic oligonucleotide; CTT chr11 5153873 5153894 5153878 5153873 -
gtatccatttcctcttttctct

SEQ ID NO: 155632 - DNA, 22 bp, Artificial Sequence
  Synthetic oligonucleotide; TTG chr11 5153872 5153893 5153877 5153872 -
tatccatttcctcttttctctt

SEQ ID NO: 155633 - DNA, 22 bp, Artificial Sequence
  Synthetic oligonucleotide; TTT chr11 5153863 5153884 5153868 5153863 -
cctcttttctctttcttccttg

SEQ ID NO: 155634 - DNA, 22 bp, Artificial Sequence
  Synthetic oligonucleotide; TTC chr11 5153862 5153883 5153867 5153862 -
ctcttttctctttcttccttgt

SEQ ID NO: 155635 - DNA, 22 bp, Artificial Sequence
  Synthetic oligonucleotide; CTC chr11 5153859 5153880 5153864 5153859 -
ttttctctttcttccttgttac

SEQ ID NO: 155636 - DNA, 22 bp, Artificial Sequence
  Synthetic oligonucleotide; CTT chr11 5153857 5153878 5153862 5153857 -
ttctctttcttccttgttactt

SEQ ID NO: 155637 - DNA, 22 bp, Artificial Sequence
  Synthetic oligonucleotide; TTT chr11 5153856 5153877 5153861 5153856 -
tctctttcttccttgttactta

SEQ ID NO: 155638 - DNA, 22 bp, Artificial Sequence
  Synthetic oligonucleotide; TTT chr11 5153855 5153876 5153860 5153855 -
ctctttcttccttgttacttac

SEQ ID NO: 155639 - DNA, 22 bp, Artificial Sequence
  Synthetic oligonucleotide; TTC chr11 5153854 5153875 5153859 5153854 -
tctttcttccttgttacttacc

SEQ ID NO: 155640 - DNA, 22 bp, Artificial Sequence
  Synthetic oligonucleotide; CTC chr11 5153852 5153873 5153857 5153852 -
tttcttccttgttacttacctt

SEQ ID NO: 155641 - DNA, 22 bp, Artificial Sequence
  Synthetic oligonucleotide; CTT chr11 5153850 5153871 5153855 5153850 -
tcttccttgttacttaccttcc

SEQ ID NO: 155642 - DNA, 22 bp, Artificial Sequence
  Synthetic oligonucleotide; TTT chr11 5153849 5153870 5153854 5153849 -
cttccttgttacttaccttcct

SEQ ID NO: 155643 - DNA, 22 bp, Artificial Sequence
  Synthetic oligonucleotide; TTC chr11 5153848 5153869 5153853 5153848 -
ttccttgttacttaccttcctt

SEQ ID NO: 155644 - DNA, 22 bp, Artificial Sequence
  Synthetic oligonucleotide; CTT chr11 5153846 5153867 5153851 5153846 -
ccttgttacttaccttcctttt

SEQ ID NO: 155645 - DNA, 22 bp, Artificial Sequence
  Synthetic oligonucleotide; TTC chr11 5153845 5153866 5153850 5153845 -
cttgttacttaccttccttttc

SEQ ID NO: 155646 - DNA, 22 bp, Artificial Sequence
  Synthetic oligonucleotide; CTT chr11 5153842 5153863 5153847 5153842 -
gttacttaccttccttttcttt

SEQ ID NO: 155647 - DNA, 22 bp, Artificial Sequence
  Synthetic oligonucleotide; TTG chr11 5153841 5153862 5153846 5153841 -
ttacttaccttccttttctttc

SEQ ID NO: 155648 - DNA, 22 bp, Artificial Sequence
  Synthetic oligonucleotide; TTA chr11 5153838 5153859 5153843 5153838 -
cttaccttccttttctttcaaa

SEQ ID NO: 155649 - DNA, 22 bp, Artificial Sequence
  Synthetic oligonucleotide; CTT chr11 5153835 5153856 5153840 5153835 -
accttccttttctttcaaaaaa

SEQ ID NO: 155650 - DNA, 22 bp, Artificial Sequence
  Synthetic oligonucleotide; TTA chr11 5153834 5153855 5153839 5153834 -
ccttccttttctttcaaaaaaa

SEQ ID NO: 155651 - DNA, 22 bp, Artificial Sequence
  Synthetic oligonucleotide; CTT chr11 5153830 5153851 5153835 5153830 -
ccttttctttcaaaaaaaaaaa

SEQ ID NO: 155652 - DNA, 22 bp, Artificial Sequence
  Synthetic oligonucleotide; TTC chr11 5153829 5153850 5153834 5153829 -
cttttctttcaaaaaaaaaaaa

SEQ ID NO: 155653 - DNA, 22 bp, Artificial Sequence
  Synthetic oligonucleotide; CTT chr11 5153826 5153847 5153831 5153826 -
ttctttcaaaaaaaaaaaaaaa

SEQ ID NO: 155654 - DNA, 22 bp, Artificial Sequence
  Synthetic oligonucleotide; TTT chr11 5153825 5153846 5153830 5153825 -
tctttcaaaaaaaaaaaaaaaa

SEQ ID NO: 155655 - DNA, 22 bp, Artificial Sequence
  Synthetic oligonucleotide; TTT chr11 5153824 5153845 5153829 5153824 -
ctttcaaaaaaaaaaaaaaaaa

SEQ ID NO: 155656 - DNA, 22 bp, Artificial Sequence
  Synthetic oligonucleotide; TTC chr11 5153823 5153844 5153828 5153823 -
tttcaaaaaaaaaaaaaaaaaa

SEQ ID NO: 155657 - DNA, 22 bp, Artificial Sequence
  Synthetic oligonucleotide; CTT chr11 5153821 5153842 5153826 5153821 -
tcaaaaaaaaaaaaaaaaaaaa

SEQ ID NO: 155658 - DNA, 22 bp, Artificial Sequence
  Synthetic oligonucleotide; TTT chr11 5153820 5153841 5153825 5153820 -
caaaaaaaaaaaaaaaaaaaaa

SEQ ID NO: 155659 - DNA, 22 bp, Artificial Sequence
  Synthetic oligonucleotide; TTC chr11 5153819 5153840 5153824 5153819 -
aaaaaaaaaaaaaaaaaaaaag

SEQ ID NO: 155660 - DNA, 22 bp, Artificial Sequence
  Synthetic oligonucleotide; CTG chr11 5153794 5153815 5153799 5153794 -
ctttttctttcaaagaacagct

SEQ ID NO: 155661 - DNA, 22 bp, Artificial Sequence
  Synthetic oligonucleotide; CTT chr11 5153791 5153812 5153796 5153791 -
tttctttcaaagaacagctact

SEQ ID NO: 155662 - DNA, 22 bp, Artificial Sequence
  Synthetic oligonucleotide; TTT chr11 5153790 5153811 5153795 5153790 -
ttctttcaaagaacagctactt

SEQ ID NO: 155663 - DNA, 22 bp, Artificial Sequence
  Synthetic oligonucleotide; TTT chr11 5153789 5153810 5153794 5153789 -
tctttcaaagaacagctacttc

SEQ ID NO: 155664 - DNA, 22 bp, Artificial Sequence
  Synthetic oligonucleotide; TTT chr11 5153788 5153809 5153793 5153788 -
ctttcaaagaacagctacttcc

SEQ ID NO: 155665 - DNA, 22 bp, Artificial Sequence
  Synthetic oligonucleotide; TTC chr11 5153787 5153808 5153792 5153787 -
tttcaaagaacagctacttcct

SEQ ID NO: 155666 - DNA, 22 bp, Artificial Sequence
  Synthetic oligonucleotide; CTT chr11 5153785 5153806 5153790 5153785 -
tcaaagaacagctacttcctga

SEQ ID NO: 155667 - DNA, 22 bp, Artificial Sequence
  Synthetic oligonucleotide; TTT chr11 5153784 5153805 5153789 5153784 -
caaagaacagctacttcctgaa

SEQ ID NO: 155668 - DNA, 22 bp, Artificial Sequence
  Synthetic oligonucleotide; TTC chr11 5153783 5153804 5153788 5153783 -
aaagaacagctacttcctgaat

SEQ ID NO: 155669 - DNA, 22 bp, Artificial Sequence
  Synthetic oligonucleotide; CTA chr11 5153771 5153792 5153776 5153771 -
cttcctgaatttccagcatatt

SEQ ID NO: 155670 - DNA, 22 bp, Artificial Sequence
  Synthetic oligonucleotide; CTT chr11 5153768 5153789 5153773 5153768 -
cctgaatttccagcatattggt

SEQ ID NO: 155671 - DNA, 22 bp, Artificial Sequence
  Synthetic oligonucleotide; TTC chr11 5153767 5153788 5153772 5153767 -
ctgaatttccagcatattggtg

SEQ ID NO: 155672 - DNA, 22 bp, Artificial Sequence
  Synthetic oligonucleotide; CTG chr11 5153764 5153785 5153769 5153764 -
aatttccagcatattggtgaca

SEQ ID NO: 155673 - DNA, 22 bp, Artificial Sequence
  Synthetic oligonucleotide; TTT chr11 5153759 5153780 5153764 5153759 -
ccagcatattggtgacatgaag

SEQ ID NO: 155674 - DNA, 22 bp, Artificial Sequence
  Synthetic oligonucleotide; TTC chr11 5153758 5153779 5153763 5153758 -
cagcatattggtgacatgaagc

SEQ ID NO: 155675 - DNA, 22 bp, Artificial Sequence
  Synthetic oligonucleotide; TTG chr11 5153748 5153769 5153753 5153748 -
gtgacatgaagcatacggttag

SEQ ID NO: 155676 - DNA, 22 bp, Artificial Sequence
  Synthetic oligonucleotide; TTA chr11 5153727 5153748 5153732 5153727 -
gctgattcatgagcttactgag

SEQ ID NO: 155677 - DNA, 22 bp, Artificial Sequence
  Synthetic oligonucleotide; CTG chr11 5153723 5153744 5153728 5153723 -
attcatgagcttactgagataa

SEQ ID NO: 155678 - DNA, 22 bp, Artificial Sequence
  Synthetic oligonucleotide; TTC chr11 5153719 5153740 5153724 5153719 -
atgagcttactgagataaaaca

SEQ ID NO: 155679 - DNA, 22 bp, Artificial Sequence
  Synthetic oligonucleotide; CTT chr11 5153711 5153732 5153716 5153711 -
actgagataaaacaactttatt

SEQ ID NO: 155680 - DNA, 22 bp, Artificial Sequence
  Synthetic oligonucleotide; TTA chr11 5153710 5153731 5153715 5153710 -
ctgagataaaacaactttattg

SEQ ID NO: 155681 - DNA, 22 bp, Artificial Sequence
  Synthetic oligonucleotide; CTG chr11 5153707 5153728 5153712 5153707 -
agataaaacaactttattgaag

SEQ ID NO: 155682 - DNA, 22 bp, Artificial Sequence
  Synthetic oligonucleotide; CTT chr11 5153693 5153714 5153698 5153693 -
tattgaagtgtctaggaaagaa

SEQ ID NO: 155683 - DNA, 22 bp, Artificial Sequence
  Synthetic oligonucleotide; TTT chr11 5153692 5153713 5153697 5153692 -
attgaagtgtctaggaaagaat

SEQ ID NO: 155684 - DNA, 22 bp, Artificial Sequence
  Synthetic oligonucleotide; TTA chr11 5153691 5153712 5153696 5153691 -
ttgaagtgtctaggaaagaatg

SEQ ID NO: 155685 - DNA, 22 bp, Artificial Sequence
  Synthetic oligonucleotide; TTG chr11 5153688 5153709 5153693 5153688 -
aagtgtctaggaaagaatgaag

SEQ ID NO: 155686 - DNA, 22 bp, Artificial Sequence
  Synthetic oligonucleotide; CTA chr11 5153679 5153700 5153684 5153679 -
ggaaagaatgaagtaactttac

SEQ ID NO: 155687 - DNA, 22 bp, Artificial Sequence
  Synthetic oligonucleotide; CTT chr11 5153660 5153681 5153665 5153660 -
tacttttcactgtatcacaaac

SEQ ID NO: 155688 - DNA, 22 bp, Artificial Sequence
  Synthetic oligonucleotide; TTT chr11 5153659 5153680 5153664 5153659 -
acttttcactgtatcacaaaca

SEQ ID NO: 155689 - DNA, 22 bp, Artificial Sequence
  Synthetic oligonucleotide; TTA chr11 5153658 5153679 5153663 5153658 -
cttttcactgtatcacaaacat

SEQ ID NO: 155690 - DNA, 22 bp, Artificial Sequence
  Synthetic oligonucleotide; CTT chr11 5153655 5153676 5153660 5153655 -
ttcactgtatcacaaacatttc

SEQ ID NO: 155691 - DNA, 22 bp, Artificial Sequence
  Synthetic oligonucleotide; TTT chr11 5153654 5153675 5153659 5153654 -
tcactgtatcacaaacatttct

SEQ ID NO: 155692 - DNA, 22 bp, Artificial Sequence
  Synthetic oligonucleotide; TTT chr11 5153653 5153674 5153658 5153653 -
cactgtatcacaaacatttctc

SEQ ID NO: 155693 - DNA, 22 bp, Artificial Sequence
  Synthetic oligonucleotide; TTC chr11 5153652 5153673 5153657 5153652 -
actgtatcacaaacatttctct

SEQ ID NO: 155694 - DNA, 22 bp, Artificial Sequence
  Synthetic oligonucleotide; CTG chr11 5153648 5153669 5153653 5153648 -
tatcacaaacatttctctaatg

SEQ ID NO: 155695 - DNA, 22 bp, Artificial Sequence
  Synthetic oligonucleotide; TTT chr11 5153634 5153655 5153639 5153634 -
ctctaatgtatagcttaaaatg

SEQ ID NO: 155696 - DNA, 22 bp, Artificial Sequence
  Synthetic oligonucleotide; TTC chr11 5153633 5153654 5153638 5153633 -
tctaatgtatagcttaaaatgt

SEQ ID NO: 155697 - DNA, 22 bp, Artificial Sequence
  Synthetic oligonucleotide; CTC chr11 5153631 5153652 5153636 5153631 -
taatgtatagcttaaaatgtac

SEQ ID NO: 155698 - DNA, 22 bp, Artificial Sequence
  Synthetic oligonucleotide; CTA chr11 5153629 5153650 5153634 5153629 -
atgtatagcttaaaatgtactg

SEQ ID NO: 155699 - DNA, 22 bp, Artificial Sequence
  Synthetic oligonucleotide; CTT chr11 5153618 5153639 5153623 5153618 -
aaaatgtactgattcaaaatat

SEQ ID NO: 155700 - DNA, 22 bp, Artificial Sequence
  Synthetic oligonucleotide; TTA chr11 5153617 5153638 5153622 5153617 -
aaatgtactgattcaaaatatg

SEQ ID NO: 155701 - DNA, 22 bp, Artificial Sequence
  Synthetic oligonucleotide; CTG chr11 5153607 5153628 5153612 5153607 -
attcaaaatatgtaatttttag

SEQ ID NO: 155702 - DNA, 22 bp, Artificial Sequence
  Synthetic oligonucleotide; TTC chr11 5153603 5153624 5153608 5153603 -
aaaatatgtaatttttagaaaa

SEQ ID NO: 155703 - DNA, 22 bp, Artificial Sequence
  Synthetic oligonucleotide; TTT chr11 5153589 5153610 5153594 5153589 -
ttagaaaataactattttgatc

SEQ ID NO: 155704 - DNA, 22 bp, Artificial Sequence
  Synthetic oligonucleotide; TTT chr11 5153588 5153609 5153593 5153588 -
tagaaaataactattttgatca

SEQ ID NO: 155705 - DNA, 22 bp, Artificial Sequence
  Synthetic oligonucleotide; TTT chr11 5153587 5153608 5153592 5153587 -
agaaaataactattttgatcag

SEQ ID NO: 155706 - DNA, 22 bp, Artificial Sequence
  Synthetic oligonucleotide; TTA chr11 5153586 5153607 5153591 5153586 -
gaaaataactattttgatcaga

SEQ ID NO: 155707 - DNA, 22 bp, Artificial Sequence
  Synthetic oligonucleotide; CTA chr11 5153575 5153596 5153580 5153575 -
ttttgatcagagaacttttata

SEQ ID NO: 155708 - DNA, 22 bp, Artificial Sequence
  Synthetic oligonucleotide; TTT chr11 5153572 5153593 5153577 5153572 -
tgatcagagaacttttatataa

SEQ ID NO: 155709 - DNA, 22 bp, Artificial Sequence
  Synthetic oligonucleotide; TTT chr11 5153571 5153592 5153576 5153571 -
gatcagagaacttttatataaa

SEQ ID NO: 155710 - DNA, 22 bp, Artificial Sequence
  Synthetic oligonucleotide; TTG chr11 5153570 5153591 5153575 5153570 -
atcagagaacttttatataaag

SEQ ID NO: 155711 - DNA, 22 bp, Artificial Sequence
  Synthetic oligonucleotide; CTT chr11 5153558 5153579 5153563 5153558 -
ttatataaagcataagagccca

SEQ ID NO: 155712 - DNA, 22 bp, Artificial Sequence
  Synthetic oligonucleotide; TTT chr11 5153557 5153578 5153562 5153557 -
tatataaagcataagagcccag

SEQ ID NO: 155713 - DNA, 22 bp, Artificial Sequence
  Synthetic oligonucleotide; TTT chr11 5153556 5153577 5153561 5153556 -
atataaagcataagagcccagg

SEQ ID NO: 155714 - DNA, 22 bp, Artificial Sequence
  Synthetic oligonucleotide; TTA chr11 5153555 5153576 5153560 5153555 -
tataaagcataagagcccaggt

SEQ ID NO: 155715 - DNA, 22 bp, Artificial Sequence
  Synthetic oligonucleotide; TTT chr11 5153531 5153552 5153536 5153531 -
ttcagaaaattcaatcatcagt

SEQ ID NO: 155716 - DNA, 22 bp, Artificial Sequence
  Synthetic oligonucleotide; TTT chr11 5153530 5153551 5153535 5153530 -
tcagaaaattcaatcatcagtg

SEQ ID NO: 155717 - DNA, 22 bp, Artificial Sequence
  Synthetic oligonucleotide; TTT chr11 5153529 5153550 5153534 5153529 -
cagaaaattcaatcatcagtga

SEQ ID NO: 155718 - DNA, 22 bp, Artificial Sequence
  Synthetic oligonucleotide; TTC chr11 5153528 5153549 5153533 5153528 -
agaaaattcaatcatcagtgaa

SEQ ID NO: 155719 - DNA, 22 bp, Artificial Sequence
  Synthetic oligonucleotide; TTC chr11 5153519 5153540 5153524 5153519 -
aatcatcagtgaaattgaaaag

SEQ ID NO: 155720 - DNA, 22 bp, Artificial Sequence
  Synthetic oligonucleotide; TTG chr11 5153502 5153523 5153507 5153502 -
aaaagtgactaaattttctttg

SEQ ID NO: 155721 - DNA, 22 bp, Artificial Sequence
  Synthetic oligonucleotide; CTA chr11 5153491 5153512 5153496 5153491 -
aattttctttggttattcatag

SEQ ID NO: 155722 - DNA, 22 bp, Artificial Sequence
  Synthetic oligonucleotide; TTT chr11 5153486 5153507 5153491 5153486 -
tctttggttattcatagtgctt

SEQ ID NO: 155723 - DNA, 22 bp, Artificial Sequence
  Synthetic oligonucleotide; TTT chr11 5153485 5153506 5153490 5153485 -
ctttggttattcatagtgcttt

SEQ ID NO: 155724 - DNA, 22 bp, Artificial Sequence
  Synthetic oligonucleotide; TTC chr11 5153484 5153505 5153489 5153484 -
tttggttattcatagtgctttc

SEQ ID NO: 155725 - DNA, 22 bp, Artificial Sequence
  Synthetic oligonucleotide; CTT chr11 5153482 5153503 5153487 5153482 -
tggttattcatagtgctttcct

SEQ ID NO: 155726 - DNA, 22 bp, Artificial Sequence
  Synthetic oligonucleotide; TTT chr11 5153481 5153502 5153486 5153481 -
ggttattcatagtgctttcctc

SEQ ID NO: 155727 - DNA, 22 bp, Artificial Sequence
  Synthetic oligonucleotide; TTG chr11 5153480 5153501 5153485 5153480 -
gttattcatagtgctttcctca

SEQ ID NO: 155728 - DNA, 22 bp, Artificial Sequence
  Synthetic oligonucleotide; TTA chr11 5153476 5153497 5153481 5153476 -
ttcatagtgctttcctcaattt

SEQ ID NO: 155729 - DNA, 22 bp, Artificial Sequence
  Synthetic oligonucleotide; TTC chr11 5153473 5153494 5153478 5153473 -
atagtgctttcctcaattttag

SEQ ID NO: 155730 - DNA, 22 bp, Artificial Sequence
  Synthetic oligonucleotide; CTT chr11 5153464 5153485 5153469 5153464 -
tcctcaattttagtctccccaa

SEQ ID NO: 155731 - DNA, 22 bp, Artificial Sequence
  Synthetic oligonucleotide; TTT chr11 5153463 5153484 5153468 5153463 -
cctcaattttagtctccccaag

SEQ ID NO: 155732 - DNA, 22 bp, Artificial Sequence
  Synthetic oligonucleotide; TTC chr11 5153462 5153483 5153467 5153462 -
ctcaattttagtctccccaagt

SEQ ID NO: 155733 - DNA, 22 bp, Artificial Sequence
  Synthetic oligonucleotide; CTC chr11 5153459 5153480 5153464 5153459 -
aattttagtctccccaagtttg

SEQ ID NO: 155734 - DNA, 22 bp, Artificial Sequence
  Synthetic oligonucleotide; TTT chr11 5153454 5153475 5153459 5153454 -
tagtctccccaagtttgtcctg

SEQ ID NO: 155735 - DNA, 22 bp, Artificial Sequence
  Synthetic oligonucleotide; TTT chr11 5153453 5153474 5153458 5153453 -
agtctccccaagtttgtcctgt

SEQ ID NO: 155736 - DNA, 22 bp, Artificial Sequence
  Synthetic oligonucleotide; TTA chr11 5153452 5153473 5153457 5153452 -
gtctccccaagtttgtcctgtc

SEQ ID NO: 155737 - DNA, 22 bp, Artificial Sequence
  Synthetic oligonucleotide; CTC chr11 5153447 5153468 5153452 5153447 -
cccaagtttgtcctgtcttccc

SEQ ID NO: 155738 - DNA, 22 bp, Artificial Sequence
  Synthetic oligonucleotide; TTT chr11 5153438 5153459 5153443 5153438 -
gtcctgtcttccctgtctagtt

SEQ ID NO: 155739 - DNA, 22 bp, Artificial Sequence
  Synthetic oligonucleotide; TTG chr11 5153437 5153458 5153442 5153437 -
tcctgtcttccctgtctagttc

SEQ ID NO: 155740 - DNA, 22 bp, Artificial Sequence
  Synthetic oligonucleotide; CTG chr11 5153432 5153453 5153437 5153432 -
tcttccctgtctagttctacat

SEQ ID NO: 155741 - DNA, 22 bp, Artificial Sequence
  Synthetic oligonucleotide; CTT chr11 5153428 5153449 5153433 5153428 -
ccctgtctagttctacatttga

SEQ ID NO: 155742 - DNA, 22 bp, Artificial Sequence
  Synthetic oligonucleotide; TTC chr11 5153427 5153448 5153432 5153427 -
cctgtctagttctacatttgac

SEQ ID NO: 155743 - DNA, 22 bp, Artificial Sequence
  Synthetic oligonucleotide; CTG chr11 5153423 5153444 5153428 5153423 -
tctagttctacatttgacttct

SEQ ID NO: 155744 - DNA, 22 bp, Artificial Sequence
  Synthetic oligonucleotide; CTA chr11 5153419 5153440 5153424 5153419 -
gttctacatttgacttcttcta

SEQ ID NO: 155745 - DNA, 22 bp, Artificial Sequence
  Synthetic oligonucleotide; TTC chr11 5153415 5153436 5153420 5153415 -
tacatttgacttcttctaagaa

SEQ ID NO: 155746 - DNA, 22 bp, Artificial Sequence
  Synthetic oligonucleotide; CTA chr11 5153413 5153434 5153418 5153413 -
catttgacttcttctaagaaat

SEQ ID NO: 155747 - DNA, 22 bp, Artificial Sequence
  Synthetic oligonucleotide; TTT chr11 5153408 5153429 5153413 5153408 -
gacttcttctaagaaatctgtc

SEQ ID NO: 155748 - DNA, 22 bp, Artificial Sequence
  Synthetic oligonucleotide; TTG chr11 5153407 5153428 5153412 5153407 -
acttcttctaagaaatctgtcc

SEQ ID NO: 155749 - DNA, 22 bp, Artificial Sequence
  Synthetic oligonucleotide; CTT chr11 5153403 5153424 5153408 5153403 -
cttctaagaaatctgtccttta

SEQ ID NO: 155750 - DNA, 22 bp, Artificial Sequence
  Synthetic oligonucleotide; TTC chr11 5153402 5153423 5153407 5153402 -
ttctaagaaatctgtcctttag

SEQ ID NO: 155751 - DNA, 22 bp, Artificial Sequence
  Synthetic oligonucleotide; CTT chr11 5153400 5153421 5153405 5153400 -
ctaagaaatctgtcctttagct

SEQ ID NO: 155752 - DNA, 22 bp, Artificial Sequence
  Synthetic oligonucleotide; TTC chr11 5153399 5153420 5153404 5153399 -
taagaaatctgtcctttagctt

SEQ ID NO: 155753 - DNA, 22 bp, Artificial Sequence
  Synthetic oligonucleotide; CTA chr11 5153397 5153418 5153402 5153397 -
agaaatctgtcctttagctttt

SEQ ID NO: 155754 - DNA, 22 bp, Artificial Sequence
  Synthetic oligonucleotide; CTG chr11 5153388 5153409 5153393 5153388 -
tcctttagcttttttattttta

SEQ ID NO: 155755 - DNA, 22 bp, Artificial Sequence
  Synthetic oligonucleotide; CTT chr11 5153383 5153404 5153388 5153383 -
tagcttttttatttttactaat

SEQ ID NO: 155756 - DNA, 22 bp, Artificial Sequence
  Synthetic oligonucleotide; TTT chr11 5153382 5153403 5153387 5153382 -
agcttttttatttttactaatt

SEQ ID NO: 155757 - DNA, 22 bp, Artificial Sequence
  Synthetic oligonucleotide; TTA chr11 5153381 5153402 5153386 5153381 -
gcttttttatttttactaattt

SEQ ID NO: 155758 - DNA, 22 bp, Artificial Sequence
  Synthetic oligonucleotide; CTT chr11 5153377 5153398 5153382 5153377 -
ttttatttttactaatttctta

SEQ ID NO: 155759 - DNA, 22 bp, Artificial Sequence
  Synthetic oligonucleotide; TTT chr11 5153376 5153397 5153381 5153376 -
tttatttttactaatttcttat

SEQ ID NO: 155760 - DNA, 22 bp, Artificial Sequence
  Synthetic oligonucleotide; TTT chr11 5153375 5153396 5153380 5153375 -
ttatttttactaatttcttatg

SEQ ID NO: 155761 - DNA, 22 bp, Artificial Sequence
  Synthetic oligonucleotide; TTT chr11 5153374 5153395 5153379 5153374 -
tatttttactaatttcttatgt

SEQ ID NO: 155762 - DNA, 22 bp, Artificial Sequence
  Synthetic oligonucleotide; TTT chr11 5153373 5153394 5153378 5153373 -
atttttactaatttcttatgtc

SEQ ID NO: 155763 - DNA, 22 bp, Artificial Sequence
  Synthetic oligonucleotide; TTA chr11 5153372 5153393 5153377 5153372 -
tttttactaatttcttatgtca

SEQ ID NO: 155764 - DNA, 22 bp, Artificial Sequence
  Synthetic oligonucleotide; TTT chr11 5153369 5153390 5153374 5153369 -
ttactaatttcttatgtcagag

SEQ ID NO: 155765 - DNA, 22 bp, Artificial Sequence
  Synthetic oligonucleotide; TTT chr11 5153368 5153389 5153373 5153368 -
tactaatttcttatgtcagagc

SEQ ID NO: 155766 - DNA, 22 bp, Artificial Sequence
  Synthetic oligonucleotide; TTT chr11 5153367 5153388 5153372 5153367 -
actaatttcttatgtcagagct

SEQ ID NO: 155767 - DNA, 22 bp, Artificial Sequence
  Synthetic oligonucleotide; TTA chr11 5153366 5153387 5153371 5153366 -
ctaatttcttatgtcagagctc

SEQ ID NO: 155768 - DNA, 22 bp, Artificial Sequence
  Synthetic oligonucleotide; CTA chr11 5153363 5153384 5153368 5153363 -
atttcttatgtcagagctcaca

SEQ ID NO: 155769 - DNA, 22 bp, Artificial Sequence
  Synthetic oligonucleotide; TTT chr11 5153359 5153380 5153364 5153359 -
cttatgtcagagctcacaaaat

SEQ ID NO: 155770 - DNA, 22 bp, Artificial Sequence
  Synthetic oligonucleotide; TTC chr11 5153358 5153379 5153363 5153358 -
ttatgtcagagctcacaaaatt

SEQ ID NO: 155771 - DNA, 22 bp, Artificial Sequence
  Synthetic oligonucleotide; CTT chr11 5153356 5153377 5153361 5153356 -
atgtcagagctcacaaaattat

SEQ ID NO: 155772 - DNA, 22 bp, Artificial Sequence
  Synthetic oligonucleotide; TTA chr11 5153355 5153376 5153360 5153355 -
tgtcagagctcacaaaattata

SEQ ID NO: 155773 - DNA, 22 bp, Artificial Sequence
  Synthetic oligonucleotide; CTC chr11 5153344 5153365 5153349 5153344 -
acaaaattatataagcatctca

SEQ ID NO: 155774 - DNA, 22 bp, Artificial Sequence
  Synthetic oligonucleotide; TTA chr11 5153335 5153356 5153340 5153335 -
tataagcatctcacctatattt

SEQ ID NO: 155775 - DNA, 22 bp, Artificial Sequence
  Synthetic oligonucleotide; CTC chr11 5153323 5153344 5153328 5153323 -
acctatatttcattaagaacta

SEQ ID NO: 155776 - DNA, 22 bp, Artificial Sequence
  Synthetic oligonucleotide; CTA chr11 5153318 5153339 5153323 5153318 -
tatttcattaagaactaatgag

SEQ ID NO: 155777 - DNA, 22 bp, Artificial Sequence
  Synthetic oligonucleotide; TTT chr11 5153313 5153334 5153318 5153313 -
cattaagaactaatgagccttt

SEQ ID NO: 155778 - DNA, 22 bp, Artificial Sequence
  Synthetic oligonucleotide; TTC chr11 5153312 5153333 5153317 5153312 -
attaagaactaatgagccttta

SEQ ID NO: 155779 - DNA, 22 bp, Artificial Sequence
  Synthetic oligonucleotide; TTA chr11 5153308 5153329 5153313 5153308 -
agaactaatgagcctttattgg

SEQ ID NO: 155780 - DNA, 22 bp, Artificial Sequence
  Synthetic oligonucleotide; CTA chr11 5153301 5153322 5153306 5153301 -
atgagcctttattgggctatat

SEQ ID NO: 155781 - DNA, 22 bp, Artificial Sequence
  Synthetic oligonucleotide; CTT chr11 5153292 5153313 5153297 5153292 -
tattgggctatattatgctaat

SEQ ID NO: 155782 - DNA, 22 bp, Artificial Sequence
  Synthetic oligonucleotide; TTT chr11 5153291 5153312 5153296 5153291 -
attgggctatattatgctaatt

SEQ ID NO: 155783 - DNA, 22 bp, Artificial Sequence
  Synthetic oligonucleotide; TTA chr11 5153290 5153311 5153295 5153290 -
ttgggctatattatgctaatta

SEQ ID NO: 155784 - DNA, 22 bp, Artificial Sequence
  Synthetic oligonucleotide; TTG chr11 5153287 5153308 5153292 5153287 -
ggctatattatgctaattataa

SEQ ID NO: 155785 - DNA, 22 bp, Artificial Sequence
  Synthetic oligonucleotide; CTA chr11 5153282 5153303 5153287 5153282 -
tattatgctaattataactctg

SEQ ID NO: 155786 - DNA, 22 bp, Artificial Sequence
  Synthetic oligonucleotide; TTA chr11 5153277 5153298 5153282 5153277 -
tgctaattataactctgaacat

SEQ ID NO: 155787 - DNA, 22 bp, Artificial Sequence
  Synthetic oligonucleotide; CTA chr11 5153272 5153293 5153277 5153272 -
attataactctgaacattttaa

SEQ ID NO: 155788 - DNA, 22 bp, Artificial Sequence
  Synthetic oligonucleotide; TTA chr11 5153268 5153289 5153273 5153268 -
taactctgaacattttaaaacc

SEQ ID NO: 155789 - DNA, 22 bp, Artificial Sequence
  Synthetic oligonucleotide; CTC chr11 5153262 5153283 5153267 5153262 -
tgaacattttaaaaccaggaaa

SEQ ID NO: 155790 - DNA, 22 bp, Artificial Sequence
  Synthetic oligonucleotide; CTG chr11 5153260 5153281 5153265 5153260 -
aacattttaaaaccaggaaact

SEQ ID NO: 155791 - DNA, 22 bp, Artificial Sequence
  Synthetic oligonucleotide; TTT chr11 5153253 5153274 5153258 5153253 -
taaaaccaggaaactggactct

SEQ ID NO: 155792 - DNA, 22 bp, Artificial Sequence
  Synthetic oligonucleotide; TTT chr11 5153252 5153273 5153257 5153252 -
aaaaccaggaaactggactcta

SEQ ID NO: 155793 - DNA, 22 bp, Artificial Sequence
  Synthetic oligonucleotide; TTA chr11 5153251 5153272 5153256 5153251 -
aaaccaggaaactggactctat

SEQ ID NO: 155794 - DNA, 22 bp, Artificial Sequence
  Synthetic oligonucleotide; CTG chr11 5153237 5153258 5153242 5153237 -
gactctattctggctaaatgat

SEQ ID NO: 155795 - DNA, 22 bp, Artificial Sequence
  Synthetic oligonucleotide; CTC chr11 5153232 5153253 5153237 5153232 -
tattctggctaaatgattcatt

SEQ ID NO: 155796 - DNA, 22 bp, Artificial Sequence
  Synthetic oligonucleotide; CTA chr11 5153230 5153251 5153235 5153230 -
ttctggctaaatgattcatttg

SEQ ID NO: 155797 - DNA, 22 bp, Artificial Sequence
  Synthetic oligonucleotide; TTC chr11 5153227 5153248 5153232 5153227 -
tggctaaatgattcatttgccc

SEQ ID NO: 155798 - DNA, 22 bp, Artificial Sequence
  Synthetic oligonucleotide; CTG chr11 5153225 5153246 5153230 5153225 -
gctaaatgattcatttgcccat

SEQ ID NO: 155799 - DNA, 22 bp, Artificial Sequence
  Synthetic oligonucleotide; CTA chr11 5153221 5153242 5153226 5153221 -
aatgattcatttgcccattatt

SEQ ID NO: 155800 - DNA, 22 bp, Artificial Sequence
  Synthetic oligonucleotide; TTC chr11 5153213 5153234 5153218 5153213 -
atttgcccattattcagtatct

SEQ ID NO: 155801 - DNA, 22 bp, Artificial Sequence
  Synthetic oligonucleotide; TTT chr11 5153209 5153230 5153214 5153209 -
gcccattattcagtatctgtgg

SEQ ID NO: 155802 - DNA, 22 bp, Artificial Sequence
  Synthetic oligonucleotide; TTG chr11 5153208 5153229 5153213 5153208 -
cccattattcagtatctgtggt

SEQ ID NO: 155803 - DNA, 22 bp, Artificial Sequence
  Synthetic oligonucleotide; TTA chr11 5153201 5153222 5153206 5153201 -
ttcagtatctgtggtttatcag

SEQ ID NO: 155804 - DNA, 22 bp, Artificial Sequence
  Synthetic oligonucleotide; TTC chr11 5153198 5153219 5153203 5153198 -
agtatctgtggtttatcaggag

SEQ ID NO: 155805 - DNA, 22 bp, Artificial Sequence
  Synthetic oligonucleotide; CTG chr11 5153190 5153211 5153195 5153190 -
tggtttatcaggagcaagttct

SEQ ID NO: 155806 - DNA, 22 bp, Artificial Sequence
  Synthetic oligonucleotide; TTT chr11 5153184 5153205 5153189 5153184 -
atcaggagcaagttctcttgcc

SEQ ID NO: 155807 - DNA, 22 bp, Artificial Sequence
  Synthetic oligonucleotide; TTA chr11 5153183 5153204 5153188 5153183 -
tcaggagcaagttctcttgccg

SEQ ID NO: 155808 - DNA, 22 bp, Artificial Sequence
  Synthetic oligonucleotide; TTC chr11 5153169 5153190 5153174 5153169 -
tcttgccgtaggcattgctgct

SEQ ID NO: 155809 - DNA, 22 bp, Artificial Sequence
  Synthetic oligonucleotide; CTC chr11 5153167 5153188 5153172 5153167 -
ttgccgtaggcattgctgctgc

SEQ ID NO: 155810 - DNA, 22 bp, Artificial Sequence
  Synthetic oligonucleotide; CTT chr11 5153165 5153186 5153170 5153165 -
gccgtaggcattgctgctgctc

SEQ ID NO: 155811 - DNA, 22 bp, Artificial Sequence
  Synthetic oligonucleotide; TTG chr11 5153164 5153185 5153169 5153164 -
ccgtaggcattgctgctgctca

SEQ ID NO: 155812 - DNA, 22 bp, Artificial Sequence
  Synthetic oligonucleotide; TTG chr11 5153152 5153173 5153157 5153152 -
ctgctgctcatcttgtccctta

SEQ ID NO: 155813 - DNA, 22 bp, Artificial Sequence
  Synthetic oligonucleotide; CTG chr11 5153149 5153170 5153154 5153149 -
ctgctcatcttgtcccttagca

SEQ ID NO: 155814 - DNA, 22 bp, Artificial Sequence
  Synthetic oligonucleotide; CTG chr11 5153146 5153167 5153151 5153146 -
ctcatcttgtcccttagcagtt

SEQ ID NO: 155815 - DNA, 22 bp, Artificial Sequence
  Synthetic oligonucleotide; CTC chr11 5153143 5153164 5153148 5153143 -
atcttgtcccttagcagttcct

SEQ ID NO: 155816 - DNA, 22 bp, Artificial Sequence
  Synthetic oligonucleotide; CTT chr11 5153138 5153159 5153143 5153138 -
gtcccttagcagttccttctct

SEQ ID NO: 155817 - DNA, 22 bp, Artificial Sequence
  Synthetic oligonucleotide; TTG chr11 5153137 5153158 5153142 5153137 -
tcccttagcagttccttctctc

SEQ ID NO: 155818 - DNA, 22 bp, Artificial Sequence
  Synthetic oligonucleotide; CTT chr11 5153131 5153152 5153136 5153131 -
agcagttccttctctctagata

SEQ ID NO: 155819 - DNA, 22 bp, Artificial Sequence
  Synthetic oligonucleotide; TTA chr11 5153130 5153151 5153135 5153130 -
gcagttccttctctctagatat

SEQ ID NO: 155820 - DNA, 22 bp, Artificial Sequence
  Synthetic oligonucleotide; TTC chr11 5153123 5153144 5153128 5153123 -
cttctctctagatattccataa

SEQ ID NO: 155821 - DNA, 22 bp, Artificial Sequence
  Synthetic oligonucleotide; CTT chr11 5153120 5153141 5153125 5153120 -
ctctctagatattccataaagt

SEQ ID NO: 155822 - DNA, 22 bp, Artificial Sequence
  Synthetic oligonucleotide; TTC chr11 5153119 5153140 5153124 5153119 -
tctctagatattccataaagtg

SEQ ID NO: 155823 - DNA, 22 bp, Artificial Sequence
  Synthetic oligonucleotide; CTC chr11 5153117 5153138 5153122 5153117 -
tctagatattccataaagtgta

SEQ ID NO: 155824 - DNA, 22 bp, Artificial Sequence
  Synthetic oligonucleotide; CTC chr11 5153115 5153136 5153120 5153115 -
tagatattccataaagtgtatt

SEQ ID NO: 155825 - DNA, 22 bp, Artificial Sequence
  Synthetic oligonucleotide; CTA chr11 5153113 5153134 5153118 5153113 -
gatattccataaagtgtattaa

SEQ ID NO: 155826 - DNA, 22 bp, Artificial Sequence
  Synthetic oligonucleotide; TTC chr11 5153106 5153127 5153111 5153106 -
cataaagtgtattaaaatttta

SEQ ID NO: 155827 - DNA, 22 bp, Artificial Sequence
  Synthetic oligonucleotide; TTA chr11 5153092 5153113 5153097 5153092 -
aaattttaaactcacaacattt

SEQ ID NO: 155828 - DNA, 22 bp, Artificial Sequence
  Synthetic oligonucleotide; TTT chr11 5153086 5153107 5153091 5153086 -
taaactcacaacatttcaagag

SEQ ID NO: 155829 - DNA, 22 bp, Artificial Sequence
  Synthetic oligonucleotide; TTT chr11 5153085 5153106 5153090 5153085 -
aaactcacaacatttcaagagt

SEQ ID NO: 155830 - DNA, 22 bp, Artificial Sequence
  Synthetic oligonucleotide; TTA chr11 5153084 5153105 5153089 5153084 -
aactcacaacatttcaagagtt

SEQ ID NO: 155831 - DNA, 22 bp, Artificial Sequence
  Synthetic oligonucleotide; CTC chr11 5153079 5153100 5153084 5153079 -
acaacatttcaagagtttcagc

SEQ ID NO: 155832 - DNA, 22 bp, Artificial Sequence
  Synthetic oligonucleotide; TTT chr11 5153070 5153091 5153075 5153070 -
caagagtttcagctgtttaaaa

SEQ ID NO: 155833 - DNA, 22 bp, Artificial Sequence
  Synthetic oligonucleotide; TTC chr11 5153069 5153090 5153074 5153069 -
aagagtttcagctgtttaaaat

SEQ ID NO: 155834 - DNA, 22 bp, Artificial Sequence
  Synthetic oligonucleotide; TTT chr11 5153061 5153082 5153066 5153061 -
cagctgtttaaaatatatagga

SEQ ID NO: 155835 - DNA, 22 bp, Artificial Sequence
  Synthetic oligonucleotide; TTC chr11 5153060 5153081 5153065 5153060 -
agctgtttaaaatatataggaa

SEQ ID NO: 155836 - DNA, 22 bp, Artificial Sequence
  Synthetic oligonucleotide; CTG chr11 5153055 5153076 5153060 5153055 -
tttaaaatatataggaaaaaat

SEQ ID NO: 155837 - DNA, 22 bp, Artificial Sequence
  Synthetic oligonucleotide; TTT chr11 5153052 5153073 5153057 5153052 -
aaaatatataggaaaaaatata

SEQ ID NO: 155838 - DNA, 22 bp, Artificial Sequence
  Synthetic oligonucleotide; TTA chr11 5153051 5153072 5153056 5153051 -
aaatatataggaaaaaatataa

SEQ ID NO: 155839 - DNA, 22 bp, Artificial Sequence
  Synthetic oligonucleotide; TTC chr11 5153026 5153047 5153031 5153026 -
cctttaactttaaagaaatata

SEQ ID NO: 155840 - DNA, 22 bp, Artificial Sequence
  Synthetic oligonucleotide; CTT chr11 5153022 5153043 5153027 5153022 -
taactttaaagaaatataaaaa

SEQ ID NO: 155841 - DNA, 22 bp, Artificial Sequence
  Synthetic oligonucleotide; TTT chr11 5153021 5153042 5153026 5153021 -
aactttaaagaaatataaaaag

SEQ ID NO: 155842 - DNA, 22 bp, Artificial Sequence
  Synthetic oligonucleotide; TTA chr11 5153020 5153041 5153025 5153020 -
actttaaagaaatataaaaagc

SEQ ID NO: 155843 - DNA, 22 bp, Artificial Sequence
  Synthetic oligonucleotide; CTT chr11 5153016 5153037 5153021 5153016 -
taaagaaatataaaaagcaacc

SEQ ID NO: 155844 - DNA, 22 bp, Artificial Sequence
  Synthetic oligonucleotide; TTT chr11 5153015 5153036 5153020 5153015 -
aaagaaatataaaaagcaacca

SEQ ID NO: 155845 - DNA, 22 bp, Artificial Sequence
  Synthetic oligonucleotide; TTA chr11 5153014 5153035 5153019 5153014 -
aagaaatataaaaagcaaccag

SEQ ID NO: 155846 - DNA, 22 bp, Artificial Sequence
  Synthetic oligonucleotide; CTT chr11 5152986 5153007 5152991 5152986 -
tggctcagatttgtcaaaagta

SEQ ID NO: 155847 - DNA, 22 bp, Artificial Sequence
  Synthetic oligonucleotide; TTT chr11 5152985 5153006 5152990 5152985 -
ggctcagatttgtcaaaagtat

SEQ ID NO: 155848 - DNA, 22 bp, Artificial Sequence
  Synthetic oligonucleotide; TTG chr11 5152984 5153005 5152989 5152984 -
gctcagatttgtcaaaagtata

SEQ ID NO: 155849 - DNA, 22 bp, Artificial Sequence
  Synthetic oligonucleotide; CTC chr11 5152980 5153001 5152985 5152980 -
agatttgtcaaaagtataaaga

SEQ ID NO: 155850 - DNA, 22 bp, Artificial Sequence
  Synthetic oligonucleotide; TTT chr11 5152974 5152995 5152979 5152974 -
gtcaaaagtataaagatttcaa

SEQ ID NO: 155851 - DNA, 22 bp, Artificial Sequence
  Synthetic oligonucleotide; TTG chr11 5152973 5152994 5152978 5152973 -
tcaaaagtataaagatttcaat

SEQ ID NO: 155852 - DNA, 22 bp, Artificial Sequence
  Synthetic oligonucleotide; TTT chr11 5152955 5152976 5152960 5152955 -
caattatttctaaagcattctc

SEQ ID NO: 155853 - DNA, 22 bp, Artificial Sequence
  Synthetic oligonucleotide; TTC chr11 5152954 5152975 5152959 5152954 -
aattatttctaaagcattctct

SEQ ID NO: 155854 - DNA, 22 bp, Artificial Sequence
  Synthetic oligonucleotide; TTA chr11 5152949 5152970 5152954 5152949 -
tttctaaagcattctctttaca

SEQ ID NO: 155855 - DNA, 22 bp, Artificial Sequence
  Synthetic oligonucleotide; TTT chr11 5152946 5152967 5152951 5152946 -
ctaaagcattctctttacatta

SEQ ID NO: 155856 - DNA, 22 bp, Artificial Sequence
  Synthetic oligonucleotide; TTC chr11 5152945 5152966 5152950 5152945 -
taaagcattctctttacattat

SEQ ID NO: 155857 - DNA, 22 bp, Artificial Sequence
  Synthetic oligonucleotide; CTA chr11 5152943 5152964 5152948 5152943 -
aagcattctctttacattattc

SEQ ID NO: 155858 - DNA, 22 bp, Artificial Sequence
  Synthetic oligonucleotide; TTC chr11 5152935 5152956 5152940 5152935 -
tctttacattattctgaatata

SEQ ID NO: 155859 - DNA, 22 bp, Artificial Sequence
  Synthetic oligonucleotide; CTC chr11 5152933 5152954 5152938 5152933 -
tttacattattctgaatataaa

SEQ ID NO: 155860 - DNA, 22 bp, Artificial Sequence
  Synthetic oligonucleotide; CTT chr11 5152931 5152952 5152936 5152931 -
tacattattctgaatataaaaa

SEQ ID NO: 155861 - DNA, 22 bp, Artificial Sequence
  Synthetic oligonucleotide; TTT chr11 5152930 5152951 5152935 5152930 -
acattattctgaatataaaaag

SEQ ID NO: 155862 - DNA, 22 bp, Artificial Sequence
  Synthetic oligonucleotide; TTA chr11 5152929 5152950 5152934 5152929 -
cattattctgaatataaaaaga

SEQ ID NO: 155863 - DNA, 22 bp, Artificial Sequence
  Synthetic oligonucleotide; TTA chr11 5152924 5152945 5152929 5152924 -
ttctgaatataaaaagaaatat

SEQ ID NO: 155864 - DNA, 22 bp, Artificial Sequence
  Synthetic oligonucleotide; TTC chr11 5152921 5152942 5152926 5152921 -
tgaatataaaaagaaatatatt

SEQ ID NO: 155865 - DNA, 22 bp, Artificial Sequence
  Synthetic oligonucleotide; CTG chr11 5152919 5152940 5152924 5152919 -
aatataaaaagaaatatattat

SEQ ID NO: 155866 - DNA, 22 bp, Artificial Sequence
  Synthetic oligonucleotide; TTA chr11 5152898 5152919 5152903 5152898 -
tgttcttgggtgtcaattattt

SEQ ID NO: 155867 - DNA, 22 bp, Artificial Sequence
  Synthetic oligonucleotide; TTC chr11 5152893 5152914 5152898 5152893 -
ttgggtgtcaattatttctacc

SEQ ID NO: 155868 - DNA, 22 bp, Artificial Sequence
  Synthetic oligonucleotide; CTT chr11 5152891 5152912 5152896 5152891 -
gggtgtcaattatttctacctc

SEQ ID NO: 155869 - DNA, 22 bp, Artificial Sequence
  Synthetic oligonucleotide; TTG chr11 5152890 5152911 5152895 5152890 -
ggtgtcaattatttctacctct

SEQ ID NO: 155870 - DNA, 22 bp, Artificial Sequence
  Synthetic oligonucleotide; TTA chr11 5152879 5152900 5152884 5152879 -
tttctacctctattctctttca

SEQ ID NO: 155871 - DNA, 22 bp, Artificial Sequence
  Synthetic oligonucleotide; TTT chr11 5152876 5152897 5152881 5152876 -
ctacctctattctctttcattg

SEQ ID NO: 155872 - DNA, 22 bp, Artificial Sequence
  Synthetic oligonucleotide; TTC chr11 5152875 5152896 5152880 5152875 -
tacctctattctctttcattgg

SEQ ID NO: 155873 - DNA, 22 bp, Artificial Sequence
  Synthetic oligonucleotide; CTA chr11 5152873 5152894 5152878 5152873 -
cctctattctctttcattggga

SEQ ID NO: 155874 - DNA, 22 bp, Artificial Sequence
  Synthetic oligonucleotide; CTC chr11 5152869 5152890 5152874 5152869 -
tattctctttcattgggaatct

SEQ ID NO: 155875 - DNA, 22 bp, Artificial Sequence
  Synthetic oligonucleotide; CTA chr11 5152867 5152888 5152872 5152867 -
ttctctttcattgggaatcttt

SEQ ID NO: 155876 - DNA, 22 bp, Artificial Sequence
  Synthetic oligonucleotide; TTC chr11 5152864 5152885 5152869 5152864 -
tctttcattgggaatcttttac

SEQ ID NO: 155877 - DNA, 22 bp, Artificial Sequence
  Synthetic oligonucleotide; CTC chr11 5152862 5152883 5152867 5152862 -
tttcattgggaatcttttacac

SEQ ID NO: 155878 - DNA, 22 bp, Artificial Sequence
  Synthetic oligonucleotide; CTT chr11 5152860 5152881 5152865 5152860 -
tcattgggaatcttttacacca

SEQ ID NO: 155879 - DNA, 22 bp, Artificial Sequence
  Synthetic oligonucleotide; TTT chr11 5152859 5152880 5152864 5152859 -
cattgggaatcttttacaccaa

SEQ ID NO: 155880 - DNA, 22 bp, Artificial Sequence
  Synthetic oligonucleotide; TTC chr11 5152858 5152879 5152863 5152858 -
attgggaatcttttacaccaat

SEQ ID NO: 155881 - DNA, 22 bp, Artificial Sequence
  Synthetic oligonucleotide; TTG chr11 5152854 5152875 5152859 5152854 -
ggaatcttttacaccaatgtac

SEQ ID NO: 155882 - DNA, 22 bp, Artificial Sequence
  Synthetic oligonucleotide; CTT chr11 5152846 5152867 5152851 5152846 -
ttacaccaatgtactggtcaga

SEQ ID NO: 155883 - DNA, 22 bp, Artificial Sequence
  Synthetic oligonucleotide; TTT chr11 5152845 5152866 5152850 5152845 -
tacaccaatgtactggtcagag

SEQ ID NO: 155884 - DNA, 22 bp, Artificial Sequence
  Synthetic oligonucleotide; TTT chr11 5152844 5152865 5152849 5152844 -
acaccaatgtactggtcagagt

SEQ ID NO: 155885 - DNA, 22 bp, Artificial Sequence
  Synthetic oligonucleotide; TTA chr11 5152843 5152864 5152848 5152843 -
caccaatgtactggtcagagtc

SEQ ID NO: 155886 - DNA, 22 bp, Artificial Sequence
  Synthetic oligonucleotide; CTG chr11 5152830 5152851 5152835 5152830 -
gtcagagtctgttaatttgctt

SEQ ID NO: 155887 - DNA, 22 bp, Artificial Sequence
  Synthetic oligonucleotide; CTG chr11 5152819 5152840 5152824 5152819 -
ttaatttgcttgtctaaaatgt

SEQ ID NO: 155888 - DNA, 22 bp, Artificial Sequence
  Synthetic oligonucleotide; TTA chr11 5152816 5152837 5152821 5152816 -
atttgcttgtctaaaatgttct

SEQ ID NO: 155889 - DNA, 22 bp, Artificial Sequence
  Synthetic oligonucleotide; TTT chr11 5152812 5152833 5152817 5152812 -
gcttgtctaaaatgttcttaaa

SEQ ID NO: 155890 - DNA, 22 bp, Artificial Sequence
  Synthetic oligonucleotide; TTG chr11 5152811 5152832 5152816 5152811 -
cttgtctaaaatgttcttaaag

SEQ ID NO: 155891 - DNA, 22 bp, Artificial Sequence
  Synthetic oligonucleotide; CTT chr11 5152808 5152829 5152813 5152808 -
gtctaaaatgttcttaaagaaa

SEQ ID NO: 155892 - DNA, 22 bp, Artificial Sequence
  Synthetic oligonucleotide; TTG chr11 5152807 5152828 5152812 5152807 -
tctaaaatgttcttaaagaaaa

SEQ ID NO: 155893 - DNA, 22 bp, Artificial Sequence
  Synthetic oligonucleotide; CTA chr11 5152803 5152824 5152808 5152803 -
aaatgttcttaaagaaaattgg

SEQ ID NO: 155894 - DNA, 22 bp, Artificial Sequence
  Synthetic oligonucleotide; TTC chr11 5152795 5152816 5152800 5152795 -
ttaaagaaaattggaaatagtt

SEQ ID NO: 155895 - DNA, 22 bp, Artificial Sequence
  Synthetic oligonucleotide; CTT chr11 5152793 5152814 5152798 5152793 -
aaagaaaattggaaatagttaa

SEQ ID NO: 155896 - DNA, 22 bp, Artificial Sequence
  Synthetic oligonucleotide; TTA chr11 5152792 5152813 5152797 5152792 -
aagaaaattggaaatagttaaa

SEQ ID NO: 155897 - DNA, 22 bp, Artificial Sequence
  Synthetic oligonucleotide; TTG chr11 5152782 5152803 5152787 5152782 -
gaaatagttaaatactagagga

SEQ ID NO: 155898 - DNA, 22 bp, Artificial Sequence
  Synthetic oligonucleotide; TTA chr11 5152772 5152793 5152777 5152772 -
aatactagaggaatagctgaaa

SEQ ID NO: 155899 - DNA, 22 bp, Artificial Sequence
  Synthetic oligonucleotide; CTA chr11 5152765 5152786 5152770 5152765 -
gaggaatagctgaaatgtgaaa

SEQ ID NO: 155900 - DNA, 22 bp, Artificial Sequence
  Synthetic oligonucleotide; CTG chr11 5152753 5152774 5152758 5152753 -
aaatgtgaaatatggagaggtt

SEQ ID NO: 155901 - DNA, 22 bp, Artificial Sequence
  Synthetic oligonucleotide; TTT chr11 5152730 5152751 5152735 5152730 -
attaaccaaattaaaatgcaat

SEQ ID NO: 155902 - DNA, 22 bp, Artificial Sequence
  Synthetic oligonucleotide; TTA chr11 5152729 5152750 5152734 5152729 -
ttaaccaaattaaaatgcaatg

SEQ ID NO: 155903 - DNA, 22 bp, Artificial Sequence
  Synthetic oligonucleotide; TTA chr11 5152726 5152747 5152731 5152726 -
accaaattaaaatgcaatgtcc

SEQ ID NO: 155904 - DNA, 22 bp, Artificial Sequence
  Synthetic oligonucleotide; TTA chr11 5152717 5152738 5152722 5152717 -
aaatgcaatgtccaataaaaat

SEQ ID NO: 155905 - DNA, 22 bp, Artificial Sequence
  Synthetic oligonucleotide; CTT chr11 5152689 5152710 5152694 5152689 -
ctttttttttttgtccacaggt

SEQ ID NO: 155906 - DNA, 22 bp, Artificial Sequence
  Synthetic oligonucleotide; TTC chr11 5152688 5152709 5152693 5152688 -
tttttttttttgtccacaggtc

SEQ ID NO: 155907 - DNA, 22 bp, Artificial Sequence
  Synthetic oligonucleotide; CTT chr11 5152686 5152707 5152691 5152686 -
tttttttttgtccacaggtctg

SEQ ID NO: 155908 - DNA, 22 bp, Artificial Sequence
  Synthetic oligonucleotide; TTT chr11 5152685 5152706 5152690 5152685 -
ttttttttgtccacaggtctgg

SEQ ID NO: 155909 - DNA, 22 bp, Artificial Sequence
  Synthetic oligonucleotide; TTT chr11 5152684 5152705 5152689 5152684 -
tttttttgtccacaggtctgga

SEQ ID NO: 155910 - DNA, 22 bp, Artificial Sequence
  Synthetic oligonucleotide; TTT chr11 5152683 5152704 5152688 5152683 -
ttttttgtccacaggtctggaa

SEQ ID NO: 155911 - DNA, 22 bp, Artificial Sequence
  Synthetic oligonucleotide; TTT chr11 5152682 5152703 5152687 5152682 -
tttttgtccacaggtctggaaa

SEQ ID NO: 155912 - DNA, 22 bp, Artificial Sequence
  Synthetic oligonucleotide; TTT chr11 5152681 5152702 5152686 5152681 -
ttttgtccacaggtctggaaag

SEQ ID NO: 155913 - DNA, 22 bp, Artificial Sequence
  Synthetic oligonucleotide; TTT chr11 5152680 5152701 5152685 5152680 -
tttgtccacaggtctggaaaga

SEQ ID NO: 155914 - DNA, 22 bp, Artificial Sequence
  Synthetic oligonucleotide; TTT chr11 5152679 5152700 5152684 5152679 -
ttgtccacaggtctggaaagaa

SEQ ID NO: 155915 - DNA, 22 bp, Artificial Sequence
  Synthetic oligonucleotide; TTT chr11 5152678 5152699 5152683 5152678 -
tgtccacaggtctggaaagaaa

SEQ ID NO: 155916 - DNA, 22 bp, Artificial Sequence
  Synthetic oligonucleotide; TTT chr11 5152677 5152698 5152682 5152677 -
gtccacaggtctggaaagaaat

SEQ ID NO: 155917 - DNA, 22 bp, Artificial Sequence
  Synthetic oligonucleotide; TTG chr11 5152676 5152697 5152681 5152676 -
tccacaggtctggaaagaaata

SEQ ID NO: 155918 - DNA, 22 bp, Artificial Sequence
  Synthetic oligonucleotide; CTG chr11 5152664 5152685 5152669 5152664 -
gaaagaaataacagactggcca

SEQ ID NO: 155919 - DNA, 22 bp, Artificial Sequence
  Synthetic oligonucleotide; CTG chr11 5152646 5152667 5152651 5152646 -
gccagtagtccaatcccctgtc

SEQ ID NO: 155920 - DNA, 22 bp, Artificial Sequence
  Synthetic oligonucleotide; CTG chr11 5152626 5152647 5152631 5152626 -
tccaggtgattttgctggttct

SEQ ID NO: 155921 - DNA, 22 bp, Artificial Sequence
  Synthetic oligonucleotide; TTT chr11 5152614 5152635 5152619 5152614 -
tgctggttctaatgtatttgga

SEQ ID NO: 155922 - DNA, 22 bp, Artificial Sequence
  Synthetic oligonucleotide; TTT chr11 5152613 5152634 5152618 5152613 -
gctggttctaatgtatttggat

SEQ ID NO: 155923 - DNA, 22 bp, Artificial Sequence
  Synthetic oligonucleotide; TTG chr11 5152612 5152633 5152617 5152612 -
ctggttctaatgtatttggatt

SEQ ID NO: 155924 - DNA, 22 bp, Artificial Sequence
  Synthetic oligonucleotide; CTG chr11 5152609 5152630 5152614 5152609 -
gttctaatgtatttggattgcc

SEQ ID NO: 155925 - DNA, 22 bp, Artificial Sequence
  Synthetic oligonucleotide; TTC chr11 5152605 5152626 5152610 5152605 -
taatgtatttggattgccatgc

SEQ ID NO: 155926 - DNA, 22 bp, Artificial Sequence
  Synthetic oligonucleotide; CTA chr11 5152603 5152624 5152608 5152603 -
atgtatttggattgccatgcac

SEQ ID NO: 155927 - DNA, 22 bp, Artificial Sequence
  Synthetic oligonucleotide; TTT chr11 5152595 5152616 5152600 5152595 -
ggattgccatgcacataacatc

SEQ ID NO: 155928 - DNA, 22 bp, Artificial Sequence
  Synthetic oligonucleotide; TTG chr11 5152594 5152615 5152599 5152594 -
gattgccatgcacataacatcc

SEQ ID NO: 155929 - DNA, 22 bp, Artificial Sequence
  Synthetic oligonucleotide; TTG chr11 5152589 5152610 5152594 5152589 -
ccatgcacataacatcctatta

SEQ ID NO: 155930 - DNA, 22 bp, Artificial Sequence
  Synthetic oligonucleotide; CTA chr11 5152570 5152591 5152575 5152570 -
ttatggcacagtgcctgtgaat

SEQ ID NO: 155931 - DNA, 22 bp, Artificial Sequence
  Synthetic oligonucleotide; TTA chr11 5152567 5152588 5152572 5152567 -
tggcacagtgcctgtgaatgcc

SEQ ID NO: 155932 - DNA, 22 bp, Artificial Sequence
  Synthetic oligonucleotide; CTG chr11 5152553 5152574 5152558 5152553 -
tgaatgccccacctgaaaacag

SEQ ID NO: 155933 - DNA, 22 bp, Artificial Sequence
  Synthetic oligonucleotide; CTG chr11 5152538 5152559 5152543 5152538 -
aaaacagtgatgtatctccatg

SEQ ID NO: 155934 - DNA, 22 bp, Artificial Sequence
  Synthetic oligonucleotide; CTC chr11 5152520 5152541 5152525 5152520 -
catgaatccatcttttcctttc

SEQ ID NO: 155935 - DNA, 22 bp, Artificial Sequence
  Synthetic oligonucleotide; CTT chr11 5152506 5152527 5152511 5152506 -
ttcctttcaaaactgtgaataa

SEQ ID NO: 155936 - DNA, 22 bp, Artificial Sequence
  Synthetic oligonucleotide; TTT chr11 5152505 5152526 5152510 5152505 -
tcctttcaaaactgtgaataag

SEQ ID NO: 155937 - DNA, 22 bp, Artificial Sequence
  Synthetic oligonucleotide; TTT chr11 5152504 5152525 5152509 5152504 -
cctttcaaaactgtgaataaga

SEQ ID NO: 155938 - DNA, 22 bp, Artificial Sequence
  Synthetic oligonucleotide; TTC chr11 5152503 5152524 5152508 5152503 -
ctttcaaaactgtgaataagat

SEQ ID NO: 155939 - DNA, 22 bp, Artificial Sequence
  Synthetic oligonucleotide; CTT chr11 5152500 5152521 5152505 5152500 -
tcaaaactgtgaataagatgga

SEQ ID NO: 155940 - DNA, 22 bp, Artificial Sequence
  Synthetic oligonucleotide; TTT chr11 5152499 5152520 5152504 5152499 -
caaaactgtgaataagatggat

SEQ ID NO: 155941 - DNA, 22 bp, Artificial Sequence
  Synthetic oligonucleotide; TTC chr11 5152498 5152519 5152503 5152498 -
aaaactgtgaataagatggatg

SEQ ID NO: 155942 - DNA, 22 bp, Artificial Sequence
  Synthetic oligonucleotide; CTG chr11 5152491 5152512 5152496 5152491 -
tgaataagatggatgattttag

SEQ ID NO: 155943 - DNA, 22 bp, Artificial Sequence
  Synthetic oligonucleotide; TTT chr11 5152472 5152493 5152477 5152472 -
tagagttatacccaaatcagac

SEQ ID NO: 155944 - DNA, 22 bp, Artificial Sequence
  Synthetic oligonucleotide; TTT chr11 5152471 5152492 5152476 5152471 -
agagttatacccaaatcagaca

SEQ ID NO: 155945 - DNA, 22 bp, Artificial Sequence
  Synthetic oligonucleotide; TTA chr11 5152470 5152491 5152475 5152470 -
gagttatacccaaatcagacag

SEQ ID NO: 155946 - DNA, 22 bp, Artificial Sequence
  Synthetic oligonucleotide; TTA chr11 5152464 5152485 5152469 5152464 -
tacccaaatcagacagactcaa

SEQ ID NO: 155947 - DNA, 22 bp, Artificial Sequence
  Synthetic oligonucleotide; CTC chr11 5152444 5152465 5152449 5152444 -
aatataatgagtttggagaaaa

SEQ ID NO: 155948 - DNA, 22 bp, Artificial Sequence
  Synthetic oligonucleotide; TTT chr11 5152430 5152451 5152435 5152430 -
ggagaaaatcagaaagcagaag

SEQ ID NO: 155949 - DNA, 22 bp, Artificial Sequence
  Synthetic oligonucleotide; TTG chr11 5152429 5152450 5152434 5152429 -
gagaaaatcagaaagcagaaga

SEQ ID NO: 155950 - DNA, 22 bp, Artificial Sequence
  Synthetic oligonucleotide; CTG chr11 5152392 5152413 5152397 5152392 -
actgagaaacttcttttgtttg

SEQ ID NO: 155951 - DNA, 22 bp, Artificial Sequence
  Synthetic oligonucleotide; CTG chr11 5152388 5152409 5152393 5152388 -
agaaacttcttttgtttgcatc

SEQ ID NO: 155952 - DNA, 22 bp, Artificial Sequence
  Synthetic oligonucleotide; CTT chr11 5152380 5152401 5152385 5152380 -
cttttgtttgcatcaggagacc

SEQ ID NO: 155953 - DNA, 22 bp, Artificial Sequence
  Synthetic oligonucleotide; TTC chr11 5152379 5152400 5152384 5152379 -
ttttgtttgcatcaggagaccc

SEQ ID NO: 155954 - DNA, 22 bp, Artificial Sequence
  Synthetic oligonucleotide; CTT chr11 5152377 5152398 5152382 5152377 -
ttgtttgcatcaggagacccaa

SEQ ID NO: 155955 - DNA, 22 bp, Artificial Sequence
  Synthetic oligonucleotide; TTT chr11 5152376 5152397 5152381 5152376 -
tgtttgcatcaggagacccaac

SEQ ID NO: 155956 - DNA, 22 bp, Artificial Sequence
  Synthetic oligonucleotide; TTT chr11 5152375 5152396 5152380 5152375 -
gtttgcatcaggagacccaacg

SEQ ID NO: 155957 - DNA, 22 bp, Artificial Sequence
  Synthetic oligonucleotide; TTG chr11 5152374 5152395 5152379 5152374 -
tttgcatcaggagacccaacga

SEQ ID NO: 155958 - DNA, 22 bp, Artificial Sequence
  Synthetic oligonucleotide; TTT chr11 5152371 5152392 5152376 5152371 -
gcatcaggagacccaacgacac

SEQ ID NO: 155959 - DNA, 22 bp, Artificial Sequence
  Synthetic oligonucleotide; TTG chr11 5152370 5152391 5152375 5152370 -
catcaggagacccaacgacact

SEQ ID NO: 155960 - DNA, 22 bp, Artificial Sequence
  Synthetic oligonucleotide; CTA chr11 5152347 5152368 5152352 5152347 -
tgtccatttccaacatcacagt

SEQ ID NO: 155961 - DNA, 22 bp, Artificial Sequence
  Synthetic oligonucleotide; TTT chr11 5152338 5152359 5152343 5152338 -
ccaacatcacagtctacatgcc

SEQ ID NO: 155962 - DNA, 22 bp, Artificial Sequence
  Synthetic oligonucleotide; TTC chr11 5152337 5152358 5152342 5152337 -
caacatcacagtctacatgccc

SEQ ID NO: 155963 - DNA, 22 bp, Artificial Sequence
  Synthetic oligonucleotide; CTA chr11 5152322 5152343 5152327 5152322 -
catgccctctgtgttgacacta

SEQ ID NO: 155964 - DNA, 22 bp, Artificial Sequence
  Synthetic oligonucleotide; CTC chr11 5152313 5152334 5152318 5152313 -
tgtgttgacactagtagggatc

SEQ ID NO: 155965 - DNA, 22 bp, Artificial Sequence
  Synthetic oligonucleotide; CTG chr11 5152311 5152332 5152316 5152311 -
tgttgacactagtagggatccc

SEQ ID NO: 155966 - DNA, 22 bp, Artificial Sequence
  Synthetic oligonucleotide; TTG chr11 5152306 5152327 5152311 5152306 -
acactagtagggatcccaggcc

SEQ ID NO: 155967 - DNA, 22 bp, Artificial Sequence
  Synthetic oligonucleotide; CTA chr11 5152300 5152321 5152305 5152300 -
gtagggatcccaggcctagaat

SEQ ID NO: 155968 - DNA, 22 bp, Artificial Sequence
  Synthetic oligonucleotide; CTA chr11 5152282 5152303 5152287 5152282 -
gaatctgtgcagtgctggattg

SEQ ID NO: 155969 - DNA, 22 bp, Artificial Sequence
  Synthetic oligonucleotide; CTG chr11 5152275 5152296 5152280 5152275 -
tgcagtgctggattgggattcc

SEQ ID NO: 155970 - DNA, 22 bp, Artificial Sequence
  Synthetic oligonucleotide; CTG chr11 5152265 5152286 5152270 5152265 -
gattgggattccattctgtgcc

SEQ ID NO: 155971 - DNA, 22 bp, Artificial Sequence
  Synthetic oligonucleotide; TTG chr11 5152260 5152281 5152265 5152260 -
ggattccattctgtgccattta

SEQ ID NO: 155972 - DNA, 22 bp, Artificial Sequence
  Synthetic oligonucleotide; TTC chr11 5152254 5152275 5152259 5152254 -
cattctgtgccatttatctcat

SEQ ID NO: 155973 - DNA, 22 bp, Artificial Sequence
  Synthetic oligonucleotide; TTC chr11 5152249 5152270 5152254 5152249 -
tgtgccatttatctcattgcta

SEQ ID NO: 155974 - DNA, 22 bp, Artificial Sequence
  Synthetic oligonucleotide; CTG chr11 5152247 5152268 5152252 5152247 -
tgccatttatctcattgctatg

SEQ ID NO: 155975 - DNA, 22 bp, Artificial Sequence
  Synthetic oligonucleotide; TTT chr11 5152239 5152260 5152244 5152239 -
atctcattgctatgattggaaa

SEQ ID NO: 155976 - DNA, 22 bp, Artificial Sequence
  Synthetic oligonucleotide; TTA chr11 5152238 5152259 5152243 5152238 -
tctcattgctatgattggaaat

SEQ ID NO: 155977 - DNA, 22 bp, Artificial Sequence
  Synthetic oligonucleotide; CTC chr11 5152234 5152255 5152239 5152234 -
attgctatgattggaaattcct

SEQ ID NO: 155978 - DNA, 22 bp, Artificial Sequence
  Synthetic oligonucleotide; TTG chr11 5152230 5152251 5152235 5152230 -
ctatgattggaaattccttgct

SEQ ID NO: 155979 - DNA, 22 bp, Artificial Sequence
  Synthetic oligonucleotide; CTA chr11 5152227 5152248 5152232 5152227 -
tgattggaaattccttgcttct

SEQ ID NO: 155980 - DNA, 22 bp, Artificial Sequence
  Synthetic oligonucleotide; TTG chr11 5152221 5152242 5152226 5152221 -
gaaattccttgcttctgagcat

SEQ ID NO: 155981 - DNA, 22 bp, Artificial Sequence
  Synthetic oligonucleotide; TTC chr11 5152214 5152235 5152219 5152214 -
cttgcttctgagcatcatcaaa

SEQ ID NO: 155982 - DNA, 22 bp, Artificial Sequence
  Synthetic oligonucleotide; CTT chr11 5152211 5152232 5152216 5152211 -
gcttctgagcatcatcaaatct

SEQ ID NO: 155983 - DNA, 22 bp, Artificial Sequence
  Synthetic oligonucleotide; TTG chr11 5152210 5152231 5152215 5152210 -
cttctgagcatcatcaaatctg

SEQ ID NO: 155984 - DNA, 22 bp, Artificial Sequence
  Synthetic oligonucleotide; CTT chr11 5152207 5152228 5152212 5152207 -
ctgagcatcatcaaatctgagc

SEQ ID NO: 155985 - DNA, 22 bp, Artificial Sequence
  Synthetic oligonucleotide; TTC chr11 5152206 5152227 5152211 5152206 -
tgagcatcatcaaatctgagcg

SEQ ID NO: 155986 - DNA, 22 bp, Artificial Sequence
  Synthetic oligonucleotide; CTG chr11 5152204 5152225 5152209 5152204 -
agcatcatcaaatctgagcgca

SEQ ID NO: 155987 - DNA, 22 bp, Artificial Sequence
  Synthetic oligonucleotide; CTG chr11 5152188 5152209 5152193 5152188 -
agcgcagtctccatgagccctt

SEQ ID NO: 155988 - DNA, 22 bp, Artificial Sequence
  Synthetic oligonucleotide; CTC chr11 5152177 5152198 5152182 5152177 -
catgagcccttgtacattttct

SEQ ID NO: 155989 - DNA, 22 bp, Artificial Sequence
  Synthetic oligonucleotide; CTT chr11 5152166 5152187 5152171 5152166 -
gtacattttcttaggcatgcta

SEQ ID NO: 155990 - DNA, 22 bp, Artificial Sequence
  Synthetic oligonucleotide; TTG chr11 5152165 5152186 5152170 5152165 -
tacattttcttaggcatgctag

SEQ ID NO: 155991 - DNA, 22 bp, Artificial Sequence
  Synthetic oligonucleotide; TTT chr11 5152158 5152179 5152163 5152158 -
tcttaggcatgctaggagccac

SEQ ID NO: 155992 - DNA, 22 bp, Artificial Sequence
  Synthetic oligonucleotide; TTT chr11 5152157 5152178 5152162 5152157 -
cttaggcatgctaggagccaca

SEQ ID NO: 155993 - DNA, 22 bp, Artificial Sequence
  Synthetic oligonucleotide; TTC chr11 5152156 5152177 5152161 5152156 -
ttaggcatgctaggagccacag

SEQ ID NO: 155994 - DNA, 22 bp, Artificial Sequence
  Synthetic oligonucleotide; CTT chr11 5152154 5152175 5152159 5152154 -
aggcatgctaggagccacagac

SEQ ID NO: 155995 - DNA, 22 bp, Artificial Sequence
  Synthetic oligonucleotide; TTA chr11 5152153 5152174 5152158 5152153 -
ggcatgctaggagccacagaca

SEQ ID NO: 155996 - DNA, 22 bp, Artificial Sequence
  Synthetic oligonucleotide; CTA chr11 5152144 5152165 5152149 5152144 -
ggagccacagacattgcacttg

SEQ ID NO: 155997 - DNA, 22 bp, Artificial Sequence
  Synthetic oligonucleotide; TTG chr11 5152128 5152149 5152133 5152128 -
cacttgctagcagcattatgcc

SEQ ID NO: 155998 - DNA, 22 bp, Artificial Sequence
  Synthetic oligonucleotide; CTT chr11 5152123 5152144 5152128 5152123 -
gctagcagcattatgccaaaga

SEQ ID NO: 155999 - DNA, 22 bp, Artificial Sequence
  Synthetic oligonucleotide; TTG chr11 5152122 5152143 5152127 5152122 -
ctagcagcattatgccaaagat

SEQ ID NO: 156000 - DNA, 22 bp, Artificial Sequence
  Synthetic oligonucleotide; CTA chr11 5152119 5152140 5152124 5152119 -
gcagcattatgccaaagatgct

SEQ ID NO: 156001 - DNA, 22 bp, Artificial Sequence
  Synthetic oligonucleotide; TTA chr11 5152110 5152131 5152115 5152110 -
tgccaaagatgcttggaatatt

SEQ ID NO: 156002 - DNA, 22 bp, Artificial Sequence
  Synthetic oligonucleotide; CTT chr11 5152096 5152117 5152101 5152096 -
ggaatattctggtttaatgtgc

SEQ ID NO: 156003 - DNA, 22 bp, Artificial Sequence
  Synthetic oligonucleotide; TTG chr11 5152095 5152116 5152100 5152095 -
gaatattctggtttaatgtgcc

SEQ ID NO: 156004 - DNA, 22 bp, Artificial Sequence
  Synthetic oligonucleotide; TTC chr11 5152087 5152108 5152092 5152087 -
tggtttaatgtgcctgaaatct

SEQ ID NO: 156005 - DNA, 22 bp, Artificial Sequence
  Synthetic oligonucleotide; CTG chr11 5152085 5152106 5152090 5152085 -
gtttaatgtgcctgaaatctat

SEQ ID NO: 156006 - DNA, 22 bp, Artificial Sequence
  Synthetic oligonucleotide; TTT chr11 5152081 5152102 5152086 5152081 -
aatgtgcctgaaatctattttg

SEQ ID NO: 156007 - DNA, 22 bp, Artificial Sequence
  Synthetic oligonucleotide; TTA chr11 5152080 5152101 5152085 5152080 -
atgtgcctgaaatctattttga

SEQ ID NO: 156008 - DNA, 22 bp, Artificial Sequence
  Synthetic oligonucleotide; CTG chr11 5152071 5152092 5152076 5152071 -
aaatctattttgattcctgctt

SEQ ID NO: 156009 - DNA, 22 bp, Artificial Sequence
  Synthetic oligonucleotide; CTA chr11 5152064 5152085 5152069 5152064 -
ttttgattcctgcttgcttcaa

SEQ ID NO: 156010 - DNA, 22 bp, Artificial Sequence
  Synthetic oligonucleotide; TTT chr11 5152061 5152082 5152066 5152061 -
tgattcctgcttgcttcaaatg

SEQ ID NO: 156011 - DNA, 22 bp, Artificial Sequence
  Synthetic oligonucleotide; TTT chr11 5152060 5152081 5152065 5152060 -
gattcctgcttgcttcaaatgt

SEQ ID NO: 156012 - DNA, 22 bp, Artificial Sequence
  Synthetic oligonucleotide; TTG chr11 5152059 5152080 5152064 5152059 -
attcctgcttgcttcaaatgtg

SEQ ID NO: 156013 - DNA, 22 bp, Artificial Sequence
  Synthetic oligonucleotide; TTC chr11 5152055 5152076 5152060 5152055 -
ctgcttgcttcaaatgtggttc

SEQ ID NO: 156014 - DNA, 22 bp, Artificial Sequence
  Synthetic oligonucleotide; CTG chr11 5152052 5152073 5152057 5152052 -
cttgcttcaaatgtggttcatc

SEQ ID NO: 156015 - DNA, 22 bp, Artificial Sequence
  Synthetic oligonucleotide; CTT chr11 5152049 5152070 5152054 5152049 -
gcttcaaatgtggttcatccac

SEQ ID NO: 156016 - DNA, 22 bp, Artificial Sequence
  Synthetic oligonucleotide; TTG chr11 5152048 5152069 5152053 5152048 -
cttcaaatgtggttcatccaca

SEQ ID NO: 156017 - DNA, 22 bp, Artificial Sequence
  Synthetic oligonucleotide; CTT chr11 5152045 5152066 5152050 5152045 -
caaatgtggttcatccacacat

SEQ ID NO: 156018 - DNA, 22 bp, Artificial Sequence
  Synthetic oligonucleotide; TTC chr11 5152044 5152065 5152049 5152044 -
aaatgtggttcatccacacatt

SEQ ID NO: 156019 - DNA, 22 bp, Artificial Sequence
  Synthetic oligonucleotide; TTC chr11 5152033 5152054 5152038 5152033 -
atccacacattgcagggtatag

SEQ ID NO: 156020 - DNA, 22 bp, Artificial Sequence
  Synthetic oligonucleotide; TTG chr11 5152021 5152042 5152026 5152021 -
cagggtatagagtcaggcatcc

SEQ ID NO: 156021 - DNA, 22 bp, Artificial Sequence
  Synthetic oligonucleotide; CTT chr11 5151997 5152018 5152002 5151997 -
gtggccatggccctggaccgtt

SEQ ID NO: 156022 - DNA, 22 bp, Artificial Sequence
  Synthetic oligonucleotide; TTG chr11 5151996 5152017 5152001 5151996 -
tggccatggccctggaccgtta

SEQ ID NO: 156023 - DNA, 22 bp, Artificial Sequence
  Synthetic oligonucleotide; CTG chr11 5151982 5152003 5151987 5151982 -
gaccgttatgtggccatctgtt

SEQ ID NO: 156024 - DNA, 22 bp, Artificial Sequence
  Synthetic oligonucleotide; TTA chr11 5151974 5151995 5151979 5151974 -
tgtggccatctgttatccacta

SEQ ID NO: 156025 - DNA, 22 bp, Artificial Sequence
  Synthetic oligonucleotide; CTG chr11 5151962 5151983 5151967 5151962 -
ttatccactaagacatgccaac

SEQ ID NO: 156026 - DNA, 22 bp, Artificial Sequence
  Synthetic oligonucleotide; TTA chr11 5151959 5151980 5151964 5151959 -
tccactaagacatgccaacatc

SEQ ID NO: 156027 - DNA, 22 bp, Artificial Sequence
  Synthetic oligonucleotide; CTA chr11 5151952 5151973 5151957 5151952 -
agacatgccaacatcttcaccc

SEQ ID NO: 156028 - DNA, 22 bp, Artificial Sequence
  Synthetic oligonucleotide; CTT chr11 5151935 5151956 5151940 5151935 -
cacccaccagcttgtcattcag

SEQ ID NO: 156029 - DNA, 22 bp, Artificial Sequence
  Synthetic oligonucleotide; TTC chr11 5151934 5151955 5151939 5151934 -
acccaccagcttgtcattcaga

SEQ ID NO: 156030 - DNA, 22 bp, Artificial Sequence
  Synthetic oligonucleotide; CTT chr11 5151922 5151943 5151927 5151922 -
gtcattcagataggaactatgg

SEQ ID NO: 156031 - DNA, 22 bp, Artificial Sequence
  Synthetic oligonucleotide; TTG chr11 5151921 5151942 5151926 5151921 -
tcattcagataggaactatggt

SEQ ID NO: 156032 - DNA, 22 bp, Artificial Sequence
  Synthetic oligonucleotide; TTC chr11 5151915 5151936 5151920 5151915 -
agataggaactatggtcgtact

SEQ ID NO: 156033 - DNA, 22 bp, Artificial Sequence
  Synthetic oligonucleotide; CTA chr11 5151903 5151924 5151908 5151903 -
tggtcgtactcagggctgctat

SEQ ID NO: 156034 - DNA, 22 bp, Artificial Sequence
  Synthetic oligonucleotide; CTC chr11 5151892 5151913 5151897 5151892 -
agggctgctattcttgtagccc

SEQ ID NO: 156035 - DNA, 22 bp, Artificial Sequence
  Synthetic oligonucleotide; CTG chr11 5151885 5151906 5151890 5151885 -
ctattcttgtagccccatgcct

SEQ ID NO: 156036 - DNA, 22 bp, Artificial Sequence
  Synthetic oligonucleotide; CTA chr11 5151882 5151903 5151887 5151882 -
ttcttgtagccccatgcctagt

SEQ ID NO: 156037 - DNA, 22 bp, Artificial Sequence
  Synthetic oligonucleotide; TTC chr11 5151879 5151900 5151884 5151879 -
ttgtagccccatgcctagtact

SEQ ID NO: 156038 - DNA, 22 bp, Artificial Sequence
  Synthetic oligonucleotide; CTT chr11 5151877 5151898 5151882 5151877 -
gtagccccatgcctagtactga

SEQ ID NO: 156039 - DNA, 22 bp, Artificial Sequence
  Synthetic oligonucleotide; TTG chr11 5151876 5151897 5151881 5151876 -
tagccccatgcctagtactgat

SEQ ID NO: 156040 - DNA, 22 bp, Artificial Sequence
  Synthetic oligonucleotide; CTA chr11 5151862 5151883 5151867 5151862 -
gtactgataaagtgccggtttc

SEQ ID NO: 156041 - DNA, 22 bp, Artificial Sequence
  Synthetic oligonucleotide; CTG chr11 5151856 5151877 5151861 5151856 -
ataaagtgccggtttcaatttt

SEQ ID NO: 156042 - DNA, 22 bp, Artificial Sequence
  Synthetic oligonucleotide; TTT chr11 5151841 5151862 5151846 5151841 -
caattttatcacacaacagtca

SEQ ID NO: 156043 - DNA, 22 bp, Artificial Sequence
  Synthetic oligonucleotide; TTC chr11 5151840 5151861 5151845 5151840 -
aattttatcacacaacagtcat

SEQ ID NO: 156044 - DNA, 22 bp, Artificial Sequence
  Synthetic oligonucleotide; TTT chr11 5151835 5151856 5151840 5151835 -
tatcacacaacagtcatctccc

SEQ ID NO: 156045 - DNA, 22 bp, Artificial Sequence
  Synthetic oligonucleotide; TTT chr11 5151834 5151855 5151839 5151834 -
atcacacaacagtcatctccca

SEQ ID NO: 156046 - DNA, 22 bp, Artificial Sequence
  Synthetic oligonucleotide; TTA chr11 5151833 5151854 5151838 5151833 -
tcacacaacagtcatctcccac

SEQ ID NO: 156047 - DNA, 22 bp, Artificial Sequence
  Synthetic oligonucleotide; CTC chr11 5151815 5151836 5151820 5151815 -
ccactcctactgtgagcatatg

SEQ ID NO: 156048 - DNA, 22 bp, Artificial Sequence
  Synthetic oligonucleotide; CTC chr11 5151809 5151830 5151814 5151809 -
ctactgtgagcatatggccatt

SEQ ID NO: 156049 - DNA, 22 bp, Artificial Sequence
  Synthetic oligonucleotide; CTA chr11 5151806 5151827 5151811 5151806 -
ctgtgagcatatggccattgtg

SEQ ID NO: 156050 - DNA, 22 bp, Artificial Sequence
  Synthetic oligonucleotide; CTG chr11 5151803 5151824 5151808 5151803 -
tgagcatatggccattgtgaaa

SEQ ID NO: 156051 - DNA, 22 bp, Artificial Sequence
  Synthetic oligonucleotide; TTG chr11 5151786 5151807 5151791 5151786 -
tgaaactagcagcagcaaatgt

SEQ ID NO: 156052 - DNA, 22 bp, Artificial Sequence
  Synthetic oligonucleotide; CTA chr11 5151778 5151799 5151783 5151778 -
gcagcagcaaatgttcaagtca

SEQ ID NO: 156053 - DNA, 22 bp, Artificial Sequence
  Synthetic oligonucleotide; TTC chr11 5151762 5151783 5151767 5151762 -
aagtcaacaaaatctatggttt

SEQ ID NO: 156054 - DNA, 22 bp, Artificial Sequence
  Synthetic oligonucleotide; CTA chr11 5151746 5151767 5151751 5151746 -
tggtttgtttgtggccttcact

SEQ ID NO: 156055 - DNA, 22 bp, Artificial Sequence
  Synthetic oligonucleotide; TTT chr11 5151740 5151761 5151745 5151740 -
gtttgtggccttcactgtagca

SEQ ID NO: 156056 - DNA, 22 bp, Artificial Sequence
  Synthetic oligonucleotide; TTG chr11 5151739 5151760 5151744 5151739 -
tttgtggccttcactgtagcag

SEQ ID NO: 156057 - DNA, 22 bp, Artificial Sequence
  Synthetic oligonucleotide; TTT chr11 5151736 5151757 5151741 5151736 -
gtggccttcactgtagcaggat

SEQ ID NO: 156058 - DNA, 22 bp, Artificial Sequence
  Synthetic oligonucleotide; TTG chr11 5151735 5151756 5151740 5151735 -
tggccttcactgtagcaggatt

SEQ ID NO: 156059 - DNA, 22 bp, Artificial Sequence
  Synthetic oligonucleotide; CTT chr11 5151728 5151749 5151733 5151728 -
cactgtagcaggatttgacctc

SEQ ID NO: 156060 - DNA, 22 bp, Artificial Sequence
  Synthetic oligonucleotide; TTC chr11 5151727 5151748 5151732 5151727 -
actgtagcaggatttgacctca

SEQ ID NO: 156061 - DNA, 22 bp, Artificial Sequence
  Synthetic oligonucleotide; CTG chr11 5151723 5151744 5151728 5151723 -
tagcaggatttgacctcacatt

SEQ ID NO: 156062 - DNA, 22 bp, Artificial Sequence
  Synthetic oligonucleotide; TTT chr11 5151712 5151733 5151717 5151712 -
gacctcacattcatcacattgt

SEQ ID NO: 156063 - DNA, 22 bp, Artificial Sequence
  Synthetic oligonucleotide; TTG chr11 5151711 5151732 5151716 5151711 -
acctcacattcatcacattgtc

SEQ ID NO: 156064 - DNA, 22 bp, Artificial Sequence
  Synthetic oligonucleotide; CTC chr11 5151706 5151727 5151711 5151706 -
acattcatcacattgtcctaca

SEQ ID NO: 156065 - DNA, 22 bp, Artificial Sequence
  Synthetic oligonucleotide; TTC chr11 5151700 5151721 5151705 5151700 -
atcacattgtcctacatccaga

SEQ ID NO: 156066 - DNA, 22 bp, Artificial Sequence
  Synthetic oligonucleotide; TTG chr11 5151691 5151712 5151696 5151691 -
tcctacatccagatatttatca

SEQ ID NO: 156067 - DNA, 22 bp, Artificial Sequence
  Synthetic oligonucleotide; CTA chr11 5151686 5151707 5151691 5151686 -
catccagatatttatcacagtt

SEQ ID NO: 156068 - DNA, 22 bp, Artificial Sequence
  Synthetic oligonucleotide; TTT chr11 5151673 5151694 5151678 5151673 -
atcacagtttttcgtttgcccc

SEQ ID NO: 156069 - DNA, 22 bp, Artificial Sequence
  Synthetic oligonucleotide; TTA chr11 5151672 5151693 5151677 5151672 -
tcacagtttttcgtttgcccca

SEQ ID NO: 156070 - DNA, 22 bp, Artificial Sequence
  Synthetic oligonucleotide; TTT chr11 5151663 5151684 5151668 5151663 -
ttcgtttgccccagaaggaggc

SEQ ID NO: 156071 - DNA, 22 bp, Artificial Sequence
  Synthetic oligonucleotide; TTT chr11 5151662 5151683 5151667 5151662 -
tcgtttgccccagaaggaggct

SEQ ID NO: 156072 - DNA, 22 bp, Artificial Sequence
  Synthetic oligonucleotide; TTT chr11 5151661 5151682 5151666 5151661 -
cgtttgccccagaaggaggcta

SEQ ID NO: 156073 - DNA, 22 bp, Artificial Sequence
  Synthetic oligonucleotide; TTC chr11 5151660 5151681 5151665 5151660 -
gtttgccccagaaggaggctag

SEQ ID NO: 156074 - DNA, 22 bp, Artificial Sequence
  Synthetic oligonucleotide; TTT chr11 5151656 5151677 5151661 5151656 -
gccccagaaggaggctaggttt

SEQ ID NO: 156075 - DNA, 22 bp, Artificial Sequence
  Synthetic oligonucleotide; TTG chr11 5151655 5151676 5151660 5151655 -
ccccagaaggaggctaggttta

SEQ ID NO: 156076 - DNA, 22 bp, Artificial Sequence
  Synthetic oligonucleotide; CTA chr11 5151639 5151660 5151644 5151639 -
ggtttaaagcattcaatacctg

SEQ ID NO: 156077 - DNA, 22 bp, Artificial Sequence
  Synthetic oligonucleotide; TTT chr11 5151634 5151655 5151639 5151634 -
aaagcattcaatacctgcattg

SEQ ID NO: 156078 - DNA, 22 bp, Artificial Sequence
  Synthetic oligonucleotide; TTA chr11 5151633 5151654 5151638 5151633 -
aagcattcaatacctgcattgc

SEQ ID NO: 156079 - DNA, 22 bp, Artificial Sequence
  Synthetic oligonucleotide; TTC chr11 5151625 5151646 5151630 5151625 -
aatacctgcattgctcacatct

SEQ ID NO: 156080 - DNA, 22 bp, Artificial Sequence
  Synthetic oligonucleotide; CTG chr11 5151617 5151638 5151622 5151617 -
cattgctcacatctgtgtcttc

SEQ ID NO: 156081 - DNA, 22 bp, Artificial Sequence
  Synthetic oligonucleotide; TTG chr11 5151612 5151633 5151617 5151612 -
ctcacatctgtgtcttcctcca

SEQ ID NO: 156082 - DNA, 22 bp, Artificial Sequence
  Synthetic oligonucleotide; CTC chr11 5151609 5151630 5151614 5151609 -
acatctgtgtcttcctccagtt

SEQ ID NO: 156083 - DNA, 22 bp, Artificial Sequence
  Synthetic oligonucleotide; CTG chr11 5151602 5151623 5151607 5151602 -
tgtcttcctccagttctacctc

SEQ ID NO: 156084 - DNA, 22 bp, Artificial Sequence
  Synthetic oligonucleotide; CTT chr11 5151596 5151617 5151601 5151596 -
cctccagttctacctccttgcc

SEQ ID NO: 156085 - DNA, 22 bp, Artificial Sequence
  Synthetic oligonucleotide; TTC chr11 5151595 5151616 5151600 5151595 -
ctccagttctacctccttgcct

SEQ ID NO: 156086 - DNA, 22 bp, Artificial Sequence
  Synthetic oligonucleotide; CTC chr11 5151592 5151613 5151597 5151592 -
cagttctacctccttgccttct

SEQ ID NO: 156087 - DNA, 22 bp, Artificial Sequence
  Synthetic oligonucleotide; TTC chr11 5151586 5151607 5151591 5151586 -
tacctccttgccttcttctcct

SEQ ID NO: 156088 - DNA, 22 bp, Artificial Sequence
  Synthetic oligonucleotide; CTA chr11 5151584 5151605 5151589 5151584 -
cctccttgccttcttctccttc

SEQ ID NO: 156089 - DNA, 22 bp, Artificial Sequence
  Synthetic oligonucleotide; CTC chr11 5151580 5151601 5151585 5151580 -
cttgccttcttctccttcttca

SEQ ID NO: 156090 - DNA, 22 bp, Artificial Sequence
  Synthetic oligonucleotide; CTT chr11 5151577 5151598 5151582 5151577 -
gccttcttctccttcttcacac

SEQ ID NO: 156091 - DNA, 22 bp, Artificial Sequence
  Synthetic oligonucleotide; TTG chr11 5151576 5151597 5151581 5151576 -
ccttcttctccttcttcacaca

SEQ ID NO: 156092 - DNA, 22 bp, Artificial Sequence
  Synthetic oligonucleotide; CTT chr11 5151572 5151593 5151577 5151572 -
cttctccttcttcacacatagg

SEQ ID NO: 156093 - DNA, 22 bp, Artificial Sequence
  Synthetic oligonucleotide; TTC chr11 5151571 5151592 5151576 5151571 -
ttctccttcttcacacataggt

SEQ ID NO: 156094 - DNA, 22 bp, Artificial Sequence
  Synthetic oligonucleotide; CTT chr11 5151569 5151590 5151574 5151569 -
ctccttcttcacacataggttt

SEQ ID NO: 156095 - DNA, 22 bp, Artificial Sequence
  Synthetic oligonucleotide; TTC chr11 5151568 5151589 5151573 5151568 -
tccttcttcacacataggtttg

SEQ ID NO: 156096 - DNA, 22 bp, Artificial Sequence
  Synthetic oligonucleotide; CTC chr11 5151566 5151587 5151571 5151566 -
cttcttcacacataggtttggg

SEQ ID NO: 156097 - DNA, 22 bp, Artificial Sequence
  Synthetic oligonucleotide; CTT chr11 5151563 5151584 5151568 5151563 -
cttcacacataggtttgggtct

SEQ ID NO: 156098 - DNA, 22 bp, Artificial Sequence
  Synthetic oligonucleotide; TTC chr11 5151562 5151583 5151567 5151562 -
ttcacacataggtttgggtctc

SEQ ID NO: 156099 - DNA, 22 bp, Artificial Sequence
  Synthetic oligonucleotide; CTT chr11 5151560 5151581 5151565 5151560 -
cacacataggtttgggtctcac

SEQ ID NO: 156100 - DNA, 22 bp, Artificial Sequence
  Synthetic oligonucleotide; TTC chr11 5151559 5151580 5151564 5151559 -
acacataggtttgggtctcaca

SEQ ID NO: 156101 - DNA, 22 bp, Artificial Sequence
  Synthetic oligonucleotide; TTT chr11 5151547 5151568 5151552 5151547 -
gggtctcacatctccccttata

SEQ ID NO: 156102 - DNA, 22 bp, Artificial Sequence
  Synthetic oligonucleotide; TTG chr11 5151546 5151567 5151551 5151546 -
ggtctcacatctccccttatat

SEQ ID NO: 156103 - DNA, 22 bp, Artificial Sequence
  Synthetic oligonucleotide; CTC chr11 5151540 5151561 5151545 5151540 -
acatctccccttatatccatat

SEQ ID NO: 156104 - DNA, 22 bp, Artificial Sequence
  Synthetic oligonucleotide; CTC chr11 5151533 5151554 5151538 5151533 -
cccttatatccatattctcttt

SEQ ID NO: 156105 - DNA, 22 bp, Artificial Sequence
  Synthetic oligonucleotide; CTT chr11 5151528 5151549 5151533 5151528 -
atatccatattctcttttctag

SEQ ID NO: 156106 - DNA, 22 bp, Artificial Sequence
  Synthetic oligonucleotide; TTA chr11 5151527 5151548 5151532 5151527 -
tatccatattctcttttctagc

SEQ ID NO: 156107 - DNA, 22 bp, Artificial Sequence
  Synthetic oligonucleotide; TTC chr11 5151516 5151537 5151521 5151516 -
tcttttctagcatttacttgct

SEQ ID NO: 156108 - DNA, 22 bp, Artificial Sequence
  Synthetic oligonucleotide; CTC chr11 5151514 5151535 5151519 5151514 -
ttttctagcatttacttgctgg

SEQ ID NO: 156109 - DNA, 22 bp, Artificial Sequence
  Synthetic oligonucleotide; CTT chr11 5151512 5151533 5151517 5151512 -
ttctagcatttacttgctggtc

SEQ ID NO: 156110 - DNA, 22 bp, Artificial Sequence
  Synthetic oligonucleotide; TTT chr11 5151511 5151532 5151516 5151511 -
tctagcatttacttgctggtcc

SEQ ID NO: 156111 - DNA, 22 bp, Artificial Sequence
  Synthetic oligonucleotide; TTT chr11 5151510 5151531 5151515 5151510 -
ctagcatttacttgctggtccc

SEQ ID NO: 156112 - DNA, 22 bp, Artificial Sequence
  Synthetic oligonucleotide; TTC chr11 5151509 5151530 5151514 5151509 -
tagcatttacttgctggtccct

SEQ ID NO: 156113 - DNA, 22 bp, Artificial Sequence
  Synthetic oligonucleotide; CTA chr11 5151507 5151528 5151512 5151507 -
gcatttacttgctggtccctcc

SEQ ID NO: 156114 - DNA, 22 bp, Artificial Sequence
  Synthetic oligonucleotide; TTT chr11 5151501 5151522 5151506 5151501 -
acttgctggtccctccatttct

SEQ ID NO: 156115 - DNA, 22 bp, Artificial Sequence
  Synthetic oligonucleotide; TTA chr11 5151500 5151521 5151505 5151500 -
cttgctggtccctccatttctc

SEQ ID NO: 156116 - DNA, 22 bp, Artificial Sequence
  Synthetic oligonucleotide; CTT chr11 5151497 5151518 5151502 5151497 -
gctggtccctccatttctcaat

SEQ ID NO: 156117 - DNA, 22 bp, Artificial Sequence
  Synthetic oligonucleotide; TTG chr11 5151496 5151517 5151501 5151496 -
ctggtccctccatttctcaatc

SEQ ID NO: 156118 - DNA, 22 bp, Artificial Sequence
  Synthetic oligonucleotide; CTG chr11 5151493 5151514 5151498 5151493 -
gtccctccatttctcaatccac

SEQ ID NO: 156119 - DNA, 22 bp, Artificial Sequence
  Synthetic oligonucleotide; CTC chr11 5151486 5151507 5151491 5151486 -
catttctcaatccacttgtcta

SEQ ID NO: 156120 - DNA, 22 bp, Artificial Sequence
  Synthetic oligonucleotide; TTT chr11 5151481 5151502 5151486 5151481 -
ctcaatccacttgtctatggtg

SEQ ID NO: 156121 - DNA, 22 bp, Artificial Sequence
  Synthetic oligonucleotide; TTC chr11 5151480 5151501 5151485 5151480 -
tcaatccacttgtctatggtgc

SEQ ID NO: 156122 - DNA, 22 bp, Artificial Sequence
  Synthetic oligonucleotide; CTC chr11 5151478 5151499 5151483 5151478 -
aatccacttgtctatggtgcaa

SEQ ID NO: 156123 - DNA, 22 bp, Artificial Sequence
  Synthetic oligonucleotide; CTT chr11 5151469 5151490 5151474 5151469 -
gtctatggtgcaaagaccacac

SEQ ID NO: 156124 - DNA, 22 bp, Artificial Sequence
  Synthetic oligonucleotide; TTG chr11 5151468 5151489 5151473 5151468 -
tctatggtgcaaagaccacaca

SEQ ID NO: 156125 - DNA, 22 bp, Artificial Sequence
  Synthetic oligonucleotide; CTA chr11 5151464 5151485 5151469 5151464 -
tggtgcaaagaccacacagatt

SEQ ID NO: 156126 - DNA, 22 bp, Artificial Sequence
  Synthetic oligonucleotide; TTC chr11 5151441 5151462 5151446 5151441 -
gcattcatgtggtaaaaatgtt

SEQ ID NO: 156127 - DNA, 22 bp, Artificial Sequence
  Synthetic oligonucleotide; TTC chr11 5151435 5151456 5151440 5151435 -
atgtggtaaaaatgttctgttc

SEQ ID NO: 156128 - DNA, 22 bp, Artificial Sequence
  Synthetic oligonucleotide; TTC chr11 5151418 5151439 5151423 5151418 -
tgttcataaaatccaccttaat

SEQ ID NO: 156129 - DNA, 22 bp, Artificial Sequence
  Synthetic oligonucleotide; CTG chr11 5151416 5151437 5151421 5151416 -
ttcataaaatccaccttaatta

SEQ ID NO: 156130 - DNA, 22 bp, Artificial Sequence
  Synthetic oligonucleotide; TTC chr11 5151413 5151434 5151418 5151413 -
ataaaatccaccttaattaatg

SEQ ID NO: 156131 - DNA, 22 bp, Artificial Sequence
  Synthetic oligonucleotide; CTT chr11 5151399 5151420 5151404 5151399 -
aattaatgcctacatgcttttt

SEQ ID NO: 156132 - DNA, 22 bp, Artificial Sequence
  Synthetic oligonucleotide; TTA chr11 5151398 5151419 5151403 5151398 -
attaatgcctacatgctttttt

SEQ ID NO: 156133 - DNA, 22 bp, Artificial Sequence
  Synthetic oligonucleotide; TTA chr11 5151394 5151415 5151399 5151394 -
atgcctacatgcttttttcttt

SEQ ID NO: 156134 - DNA, 22 bp, Artificial Sequence
  Synthetic oligonucleotide; CTA chr11 5151387 5151408 5151392 5151387 -
catgcttttttcttttgcagta

SEQ ID NO: 156135 - DNA, 22 bp, Artificial Sequence
  Synthetic oligonucleotide; CTT chr11 5151380 5151401 5151385 5151380 -
ttttcttttgcagtagtaacca

SEQ ID NO: 156136 - DNA, 22 bp, Artificial Sequence
  Synthetic oligonucleotide; TTT chr11 5151379 5151400 5151384 5151379 -
tttcttttgcagtagtaaccat

SEQ ID NO: 156137 - DNA, 22 bp, Artificial Sequence
  Synthetic oligonucleotide; TTT chr11 5151378 5151399 5151383 5151378 -
ttcttttgcagtagtaaccata

SEQ ID NO: 156138 - DNA, 22 bp, Artificial Sequence
  Synthetic oligonucleotide; TTT chr11 5151377 5151398 5151382 5151377 -
tcttttgcagtagtaaccatat

SEQ ID NO: 156139 - DNA, 22 bp, Artificial Sequence
  Synthetic oligonucleotide; TTT chr11 5151376 5151397 5151381 5151376 -
cttttgcagtagtaaccatatc

SEQ ID NO: 156140 - DNA, 22 bp, Artificial Sequence
  Synthetic oligonucleotide; TTC chr11 5151375 5151396 5151380 5151375 -
ttttgcagtagtaaccatatca

SEQ ID NO: 156141 - DNA, 22 bp, Artificial Sequence
  Synthetic oligonucleotide; CTT chr11 5151373 5151394 5151378 5151373 -
ttgcagtagtaaccatatcaaa

SEQ ID NO: 156142 - DNA, 22 bp, Artificial Sequence
  Synthetic oligonucleotide; TTT chr11 5151372 5151393 5151377 5151372 -
tgcagtagtaaccatatcaaaa

SEQ ID NO: 156143 - DNA, 22 bp, Artificial Sequence
  Synthetic oligonucleotide; TTT chr11 5151371 5151392 5151376 5151371 -
gcagtagtaaccatatcaaaac

SEQ ID NO: 156144 - DNA, 22 bp, Artificial Sequence
  Synthetic oligonucleotide; TTG chr11 5151370 5151391 5151375 5151370 -
cagtagtaaccatatcaaaaca

SEQ ID NO: 156145 - DNA, 22 bp, Artificial Sequence
  Synthetic oligonucleotide; TTA chr11 5151331 5151352 5151336 5151331 -
tttgagatgctgggtttgtgaa

SEQ ID NO: 156146 - DNA, 22 bp, Artificial Sequence
  Synthetic oligonucleotide; TTT chr11 5151328 5151349 5151333 5151328 -
gagatgctgggtttgtgaaatc

SEQ ID NO: 156147 - DNA, 22 bp, Artificial Sequence
  Synthetic oligonucleotide; TTG chr11 5151327 5151348 5151332 5151327 -
agatgctgggtttgtgaaatct

SEQ ID NO: 156148 - DNA, 22 bp, Artificial Sequence
  Synthetic oligonucleotide; CTG chr11 5151319 5151340 5151324 5151319 -
ggtttgtgaaatctgccagcac

SEQ ID NO: 156149 - DNA, 22 bp, Artificial Sequence
  Synthetic oligonucleotide; TTT chr11 5151314 5151335 5151319 5151314 -
gtgaaatctgccagcacaatag

SEQ ID NO: 156150 - DNA, 22 bp, Artificial Sequence
  Synthetic oligonucleotide; TTG chr11 5151313 5151334 5151318 5151313 -
tgaaatctgccagcacaatagc

SEQ ID NO: 156151 - DNA, 22 bp, Artificial Sequence
  Synthetic oligonucleotide; CTG chr11 5151304 5151325 5151309 5151304 -
ccagcacaatagctggttttag

SEQ ID NO: 156152 - DNA, 22 bp, Artificial Sequence
  Synthetic oligonucleotide; CTG chr11 5151289 5151310 5151294 5151289 -
gttttagatcatcatggctcat

SEQ ID NO: 156153 - DNA, 22 bp, Artificial Sequence
  Synthetic oligonucleotide; TTT chr11 5151285 5151306 5151290 5151285 -
tagatcatcatggctcatatca

SEQ ID NO: 156154 - DNA, 22 bp, Artificial Sequence
  Synthetic oligonucleotide; TTT chr11 5151284 5151305 5151289 5151284 -
agatcatcatggctcatatcaa

SEQ ID NO: 156155 - DNA, 22 bp, Artificial Sequence
  Synthetic oligonucleotide; TTA chr11 5151283 5151304 5151288 5151283 -
gatcatcatggctcatatcaat

SEQ ID NO: 156156 - DNA, 22 bp, Artificial Sequence
  Synthetic oligonucleotide; CTC chr11 5151269 5151290 5151274 5151269 -
atatcaatcagtgggattgtga

SEQ ID NO: 156157 - DNA, 22 bp, Artificial Sequence
  Synthetic oligonucleotide; TTG chr11 5151250 5151271 5151255 5151250 -
tgaattctacgtgactaatgaa

SEQ ID NO: 156158 - DNA, 22 bp, Artificial Sequence
  Synthetic oligonucleotide; TTC chr11 5151243 5151264 5151248 5151243 -
tacgtgactaatgaaagtgaga

SEQ ID NO: 156159 - DNA, 22 bp, Artificial Sequence
  Synthetic oligonucleotide; CTA chr11 5151241 5151262 5151246 5151241 -
cgtgactaatgaaagtgagaag

SEQ ID NO: 156160 - DNA, 22 bp, Artificial Sequence
  Synthetic oligonucleotide; CTA chr11 5151233 5151254 5151238 5151233 -
atgaaagtgagaagtgtgaaat

SEQ ID NO: 156161 - DNA, 22 bp, Artificial Sequence
  Synthetic oligonucleotide; TTA chr11 5151187 5151208 5151192 5151187 -
ttttttctcttttattctttag

SEQ ID NO: 156162 - DNA, 22 bp, Artificial Sequence
  Synthetic oligonucleotide; TTT chr11 5151184 5151205 5151189 5151184 -
tttctcttttattctttagccc

SEQ ID NO: 156163 - DNA, 22 bp, Artificial Sequence
  Synthetic oligonucleotide; TTT chr11 5151183 5151204 5151188 5151183 -
ttctcttttattctttagcccc

SEQ ID NO: 156164 - DNA, 22 bp, Artificial Sequence
  Synthetic oligonucleotide; TTT chr11 5151182 5151203 5151187 5151182 -
tctcttttattctttagcccct

SEQ ID NO: 156165 - DNA, 22 bp, Artificial Sequence
  Synthetic oligonucleotide; TTT chr11 5151181 5151202 5151186 5151181 -
ctcttttattctttagcccctg

SEQ ID NO: 156166 - DNA, 22 bp, Artificial Sequence
  Synthetic oligonucleotide; TTC chr11 5151180 5151201 5151185 5151180 -
tcttttattctttagcccctgg

SEQ ID NO: 156167 - DNA, 22 bp, Artificial Sequence
  Synthetic oligonucleotide; CTC chr11 5151178 5151199 5151183 5151178 -
ttttattctttagcccctggtt

SEQ ID NO: 156168 - DNA, 22 bp, Artificial Sequence
  Synthetic oligonucleotide; CTT chr11 5151176 5151197 5151181 5151176 -
ttattctttagcccctggttga

SEQ ID NO: 156169 - DNA, 22 bp, Artificial Sequence
  Synthetic oligonucleotide; TTT chr11 5151175 5151196 5151180 5151175 -
tattctttagcccctggttgag

SEQ ID NO: 156170 - DNA, 22 bp, Artificial Sequence
  Synthetic oligonucleotide; TTT chr11 5151174 5151195 5151179 5151174 -
attctttagcccctggttgagt

SEQ ID NO: 156171 - DNA, 22 bp, Artificial Sequence
  Synthetic oligonucleotide; TTA chr11 5151173 5151194 5151178 5151173 -
ttctttagcccctggttgagtt

SEQ ID NO: 156172 - DNA, 22 bp, Artificial Sequence
  Synthetic oligonucleotide; TTC chr11 5151170 5151191 5151175 5151170 -
tttagcccctggttgagttatt

SEQ ID NO: 156173 - DNA, 22 bp, Artificial Sequence
  Synthetic oligonucleotide; CTT chr11 5151168 5151189 5151173 5151168 -
tagcccctggttgagttattct

SEQ ID NO: 156174 - DNA, 22 bp, Artificial Sequence
  Synthetic oligonucleotide; TTT chr11 5151167 5151188 5151172 5151167 -
agcccctggttgagttattctt

SEQ ID NO: 156175 - DNA, 22 bp, Artificial Sequence
  Synthetic oligonucleotide; TTA chr11 5151166 5151187 5151171 5151166 -
gcccctggttgagttattcttc

SEQ ID NO: 156176 - DNA, 22 bp, Artificial Sequence
  Synthetic oligonucleotide; CTG chr11 5151159 5151180 5151164 5151159 -
gttgagttattcttctaagaat

SEQ ID NO: 156177 - DNA, 22 bp, Artificial Sequence
  Synthetic oligonucleotide; TTG chr11 5151155 5151176 5151160 5151155 -
agttattcttctaagaatattt

SEQ ID NO: 156178 - DNA, 22 bp, Artificial Sequence
  Synthetic oligonucleotide; TTA chr11 5151150 5151171 5151155 5151150 -
ttcttctaagaatatttctcca

SEQ ID NO: 156179 - DNA, 22 bp, Artificial Sequence
  Synthetic oligonucleotide; TTC chr11 5151147 5151168 5151152 5151147 -
ttctaagaatatttctccagga

SEQ ID NO: 156180 - DNA, 22 bp, Artificial Sequence
  Synthetic oligonucleotide; CTT chr11 5151145 5151166 5151150 5151145 -
ctaagaatatttctccaggagg

SEQ ID NO: 156181 - DNA, 22 bp, Artificial Sequence
  Synthetic oligonucleotide; TTC chr11 5151144 5151165 5151149 5151144 -
taagaatatttctccaggagga

SEQ ID NO: 156182 - DNA, 22 bp, Artificial Sequence
  Synthetic oligonucleotide; CTA chr11 5151142 5151163 5151147 5151142 -
agaatatttctccaggaggatt

SEQ ID NO: 156183 - DNA, 22 bp, Artificial Sequence
  Synthetic oligonucleotide; TTT chr11 5151133 5151154 5151138 5151133 -
ctccaggaggatttataaatta

SEQ ID NO: 156184 - DNA, 22 bp, Artificial Sequence
  Synthetic oligonucleotide; TTC chr11 5151132 5151153 5151137 5151132 -
tccaggaggatttataaattat

SEQ ID NO: 156185 - DNA, 22 bp, Artificial Sequence
  Synthetic oligonucleotide; CTC chr11 5151130 5151151 5151135 5151130 -
caggaggatttataaattatgc

SEQ ID NO: 156186 - DNA, 22 bp, Artificial Sequence
  Synthetic oligonucleotide; TTT chr11 5151119 5151140 5151124 5151119 -
ataaattatgcctttgtcactg

SEQ ID NO: 156187 - DNA, 22 bp, Artificial Sequence
  Synthetic oligonucleotide; TTA chr11 5151118 5151139 5151123 5151118 -
taaattatgcctttgtcactga

SEQ ID NO: 156188 - DNA, 22 bp, Artificial Sequence
  Synthetic oligonucleotide; TTA chr11 5151111 5151132 5151116 5151111 -
tgcctttgtcactgaatttaaa

SEQ ID NO: 156189 - DNA, 22 bp, Artificial Sequence
  Synthetic oligonucleotide; CTT chr11 5151105 5151126 5151110 5151105 -
tgtcactgaatttaaatgcacc

SEQ ID NO: 156190 - DNA, 22 bp, Artificial Sequence
  Synthetic oligonucleotide; TTT chr11 5151104 5151125 5151109 5151104 -
gtcactgaatttaaatgcacct

SEQ ID NO: 156191 - DNA, 22 bp, Artificial Sequence
  Synthetic oligonucleotide; TTG chr11 5151103 5151124 5151108 5151103 -
tcactgaatttaaatgcaccta

SEQ ID NO: 156192 - DNA, 22 bp, Artificial Sequence
  Synthetic oligonucleotide; CTG chr11 5151097 5151118 5151102 5151097 -
aatttaaatgcacctaaggctc

SEQ ID NO: 156193 - DNA, 22 bp, Artificial Sequence
  Synthetic oligonucleotide; TTT chr11 5151092 5151113 5151097 5151092 -
aaatgcacctaaggctcgttgt

SEQ ID NO: 156194 - DNA, 22 bp, Artificial Sequence
  Synthetic oligonucleotide; TTA chr11 5151091 5151112 5151096 5151091 -
aatgcacctaaggctcgttgtt

SEQ ID NO: 156195 - DNA, 22 bp, Artificial Sequence
  Synthetic oligonucleotide; CTA chr11 5151081 5151102 5151086 5151081 -
aggctcgttgttctgaaacatc

SEQ ID NO: 156196 - DNA, 22 bp, Artificial Sequence
  Synthetic oligonucleotide; CTC chr11 5151075 5151096 5151080 5151075 -
gttgttctgaaacatccaggga

SEQ ID NO: 156197 - DNA, 22 bp, Artificial Sequence
  Synthetic oligonucleotide; TTG chr11 5151071 5151092 5151076 5151071 -
ttctgaaacatccagggactca

SEQ ID NO: 156198 - DNA, 22 bp, Artificial Sequence
  Synthetic oligonucleotide; TTC chr11 5151068 5151089 5151073 5151068 -
tgaaacatccagggactcaatg

SEQ ID NO: 156199 - DNA, 22 bp, Artificial Sequence
  Synthetic oligonucleotide; CTG chr11 5151066 5151087 5151071 5151066 -
aaacatccagggactcaatgaa

SEQ ID NO: 156200 - DNA, 22 bp, Artificial Sequence
  Synthetic oligonucleotide; CTC chr11 5151050 5151071 5151055 5151050 -
aatgaaaacaagttgttgactc

SEQ ID NO: 156201 - DNA, 22 bp, Artificial Sequence
  Synthetic oligonucleotide; TTG chr11 5151035 5151056 5151040 5151035 -
ttgactctcattttcttgatca

SEQ ID NO: 156202 - DNA, 22 bp, Artificial Sequence
  Synthetic oligonucleotide; TTG chr11 5151032 5151053 5151037 5151032 -
actctcattttcttgatcatcc

SEQ ID NO: 156203 - DNA, 22 bp, Artificial Sequence
  Synthetic oligonucleotide; CTC chr11 5151028 5151049 5151033 5151028 -
tcattttcttgatcatccctgc

SEQ ID NO: 156204 - DNA, 22 bp, Artificial Sequence
  Synthetic oligonucleotide; CTC chr11 5151026 5151047 5151031 5151026 -
attttcttgatcatccctgcct

SEQ ID NO: 156205 - DNA, 22 bp, Artificial Sequence
  Synthetic oligonucleotide; TTT chr11 5151022 5151043 5151027 5151022 -
tcttgatcatccctgccttaaa

SEQ ID NO: 156206 - DNA, 22 bp, Artificial Sequence
  Synthetic oligonucleotide; TTT chr11 5151021 5151042 5151026 5151021 -
cttgatcatccctgccttaaaa

SEQ ID NO: 156207 - DNA, 22 bp, Artificial Sequence
  Synthetic oligonucleotide; TTC chr11 5151020 5151041 5151025 5151020 -
ttgatcatccctgccttaaaaa

SEQ ID NO: 156208 - DNA, 22 bp, Artificial Sequence
  Synthetic oligonucleotide; CTT chr11 5151018 5151039 5151023 5151018 -
gatcatccctgccttaaaaaaa

SEQ ID NO: 156209 - DNA, 22 bp, Artificial Sequence
  Synthetic oligonucleotide; TTG chr11 5151017 5151038 5151022 5151017 -
atcatccctgccttaaaaaaaa

SEQ ID NO: 156210 - DNA, 22 bp, Artificial Sequence
  Synthetic oligonucleotide; CTG chr11 5151007 5151028 5151012 5151007 -
ccttaaaaaaaaaaatcaaagg

SEQ ID NO: 156211 - DNA, 22 bp, Artificial Sequence
  Synthetic oligonucleotide; CTT chr11 5151003 5151024 5151008 5151003 -
aaaaaaaaaaatcaaaggaagt

SEQ ID NO: 156212 - DNA, 22 bp, Artificial Sequence
  Synthetic oligonucleotide; TTA chr11 5151002 5151023 5151007 5151002 -
aaaaaaaaaatcaaaggaagta

SEQ ID NO: 156213 - DNA, 22 bp, Artificial Sequence
  Synthetic oligonucleotide; TTA chr11 5150973 5150994 5150978 5150973 -
actgtgttcttgtcaaagaaaa

SEQ ID NO: 156214 - DNA, 22 bp, Artificial Sequence
  Synthetic oligonucleotide; CTG chr11 5150969 5150990 5150974 5150969 -
tgttcttgtcaaagaaaatctt

SEQ ID NO: 156215 - DNA, 22 bp, Artificial Sequence
  Synthetic oligonucleotide; TTC chr11 5150964 5150985 5150969 5150964 -
ttgtcaaagaaaatcttatgaa

SEQ ID NO: 156216 - DNA, 22 bp, Artificial Sequence
  Synthetic oligonucleotide; CTT chr11 5150962 5150983 5150967 5150962 -
gtcaaagaaaatcttatgaata

SEQ ID NO: 156217 - DNA, 22 bp, Artificial Sequence
  Synthetic oligonucleotide; TTG chr11 5150961 5150982 5150966 5150961 -
tcaaagaaaatcttatgaatat

SEQ ID NO: 156218 - DNA, 22 bp, Artificial Sequence
  Synthetic oligonucleotide; CTT chr11 5150947 5150968 5150952 5150947 -
atgaatatcaagagacaataaa

SEQ ID NO: 156219 - DNA, 22 bp, Artificial Sequence
  Synthetic oligonucleotide; TTA chr11 5150946 5150967 5150951 5150946 -
tgaatatcaagagacaataaag

SEQ ID NO: 156220 - DNA, 22 bp, Artificial Sequence
  Synthetic oligonucleotide; CTA chr11 5150920 5150941 5150925 5150920 -
aaaatttaaatacattttcaga

SEQ ID NO: 156221 - DNA, 22 bp, Artificial Sequence
  Synthetic oligonucleotide; TTT chr11 5150913 5150934 5150918 5150913 -
aaatacattttcagagtcatac

SEQ ID NO: 156222 - DNA, 22 bp, Artificial Sequence
  Synthetic oligonucleotide; TTA chr11 5150912 5150933 5150917 5150912 -
aatacattttcagagtcataca

SEQ ID NO: 156223 - DNA, 22 bp, Artificial Sequence
  Synthetic oligonucleotide; TTT chr11 5150903 5150924 5150908 5150903 -
tcagagtcatacaaggaattac

SEQ ID NO: 156224 - DNA, 22 bp, Artificial Sequence
  Synthetic oligonucleotide; TTT chr11 5150902 5150923 5150907 5150902 -
cagagtcatacaaggaattaca

SEQ ID NO: 156225 - DNA, 22 bp, Artificial Sequence
  Synthetic oligonucleotide; TTC chr11 5150901 5150922 5150906 5150901 -
agagtcatacaaggaattacag

SEQ ID NO: 156226 - DNA, 22 bp, Artificial Sequence
  Synthetic oligonucleotide; TTA chr11 5150882 5150903 5150887 5150882 -
caggcacaaaaattagaaccag

SEQ ID NO: 156227 - DNA, 22 bp, Artificial Sequence
  Synthetic oligonucleotide; TTA chr11 5150867 5150888 5150872 5150867 -
gaaccaggtgttgcatttgaca

SEQ ID NO: 156228 - DNA, 22 bp, Artificial Sequence
  Synthetic oligonucleotide; TTG chr11 5150854 5150875 5150859 5150854 -
catttgacacatcaatgttgtt

SEQ ID NO: 156229 - DNA, 22 bp, Artificial Sequence
  Synthetic oligonucleotide; TTT chr11 5150849 5150870 5150854 5150849 -
gacacatcaatgttgttgtttt

SEQ ID NO: 156230 - DNA, 22 bp, Artificial Sequence
  Synthetic oligonucleotide; TTG chr11 5150848 5150869 5150853 5150848 -
acacatcaatgttgttgttttt

SEQ ID NO: 156231 - DNA, 22 bp, Artificial Sequence
  Synthetic oligonucleotide; TTG chr11 5150834 5150855 5150839 5150834 -
ttgtttttttttttgctaacct

SEQ ID NO: 156232 - DNA, 22 bp, Artificial Sequence
  Synthetic oligonucleotide; TTG chr11 5150831 5150852 5150836 5150831 -
tttttttttttgctaacctcaa

SEQ ID NO: 156233 - DNA, 22 bp, Artificial Sequence
  Synthetic oligonucleotide; TTT chr11 5150828 5150849 5150833 5150828 -
ttttttttgctaacctcaaaat

SEQ ID NO: 156234 - DNA, 22 bp, Artificial Sequence
  Synthetic oligonucleotide; TTT chr11 5150827 5150848 5150832 5150827 -
tttttttgctaacctcaaaatt

SEQ ID NO: 156235 - DNA, 22 bp, Artificial Sequence
  Synthetic oligonucleotide; TTT chr11 5150826 5150847 5150831 5150826 -
ttttttgctaacctcaaaattt

SEQ ID NO: 156236 - DNA, 22 bp, Artificial Sequence
  Synthetic oligonucleotide; TTT chr11 5150825 5150846 5150830 5150825 -
tttttgctaacctcaaaattta

SEQ ID NO: 156237 - DNA, 22 bp, Artificial Sequence
  Synthetic oligonucleotide; TTT chr11 5150824 5150845 5150829 5150824 -
ttttgctaacctcaaaatttac

SEQ ID NO: 156238 - DNA, 22 bp, Artificial Sequence
  Synthetic oligonucleotide; TTT chr11 5150823 5150844 5150828 5150823 -
tttgctaacctcaaaatttact

SEQ ID NO: 156239 - DNA, 22 bp, Artificial Sequence
  Synthetic oligonucleotide; TTT chr11 5150822 5150843 5150827 5150822 -
ttgctaacctcaaaatttactt

SEQ ID NO: 156240 - DNA, 22 bp, Artificial Sequence
  Synthetic oligonucleotide; TTT chr11 5150821 5150842 5150826 5150821 -
tgctaacctcaaaatttacttc

SEQ ID NO: 156241 - DNA, 22 bp, Artificial Sequence
  Synthetic oligonucleotide; TTT chr11 5150820 5150841 5150825 5150820 -
gctaacctcaaaatttacttct

SEQ ID NO: 156242 - DNA, 22 bp, Artificial Sequence
  Synthetic oligonucleotide; TTG chr11 5150819 5150840 5150824 5150819 -
ctaacctcaaaatttacttctt

SEQ ID NO: 156243 - DNA, 22 bp, Artificial Sequence
  Synthetic oligonucleotide; CTA chr11 5150816 5150837 5150821 5150816 -
acctcaaaatttacttctttat

SEQ ID NO: 156244 - DNA, 22 bp, Artificial Sequence
  Synthetic oligonucleotide; CTC chr11 5150811 5150832 5150816 5150811 -
aaaatttacttctttattaatt

SEQ ID NO: 156245 - DNA, 22 bp, Artificial Sequence
  Synthetic oligonucleotide; TTT chr11 5150804 5150825 5150809 5150804 -
acttctttattaattcatcatt

SEQ ID NO: 156246 - DNA, 22 bp, Artificial Sequence
  Synthetic oligonucleotide; TTA chr11 5150803 5150824 5150808 5150803 -
cttctttattaattcatcattt

SEQ ID NO: 156247 - DNA, 22 bp, Artificial Sequence
  Synthetic oligonucleotide; CTT chr11 5150800 5150821 5150805 5150800 -
ctttattaattcatcattttat

SEQ ID NO: 156248 - DNA, 22 bp, Artificial Sequence
  Synthetic oligonucleotide; TTC chr11 5150799 5150820 5150804 5150799 -
tttattaattcatcattttatc

SEQ ID NO: 156249 - DNA, 22 bp, Artificial Sequence
  Synthetic oligonucleotide; CTT chr11 5150797 5150818 5150802 5150797 -
tattaattcatcattttatcaa

SEQ ID NO: 156250 - DNA, 22 bp, Artificial Sequence
  Synthetic oligonucleotide; TTT chr11 5150796 5150817 5150801 5150796 -
attaattcatcattttatcaaa

SEQ ID NO: 156251 - DNA, 22 bp, Artificial Sequence
  Synthetic oligonucleotide; TTA chr11 5150795 5150816 5150800 5150795 -
ttaattcatcattttatcaaaa

SEQ ID NO: 156252 - DNA, 22 bp, Artificial Sequence
  Synthetic oligonucleotide; TTA chr11 5150792 5150813 5150797 5150792 -
attcatcattttatcaaaaacc

SEQ ID NO: 156253 - DNA, 22 bp, Artificial Sequence
  Synthetic oligonucleotide; TTC chr11 5150788 5150809 5150793 5150788 -
atcattttatcaaaaacctgca

SEQ ID NO: 156254 - DNA, 22 bp, Artificial Sequence
  Synthetic oligonucleotide; TTT chr11 5150781 5150802 5150786 5150781 -
tatcaaaaacctgcaatattaa

SEQ ID NO: 156255 - DNA, 22 bp, Artificial Sequence
  Synthetic oligonucleotide; TTT chr11 5150780 5150801 5150785 5150780 -
atcaaaaacctgcaatattaaa

SEQ ID NO: 156256 - DNA, 22 bp, Artificial Sequence
  Synthetic oligonucleotide; TTA chr11 5150779 5150800 5150784 5150779 -
tcaaaaacctgcaatattaaaa

SEQ ID NO: 156257 - DNA, 22 bp, Artificial Sequence
  Synthetic oligonucleotide; CTG chr11 5150768 5150789 5150773 5150768 -
caatattaaaaatactatacta

SEQ ID NO: 156258 - DNA, 22 bp, Artificial Sequence
  Synthetic oligonucleotide; TTA chr11 5150760 5150781 5150765 5150760 -
aaaatactatactacagaatcg

SEQ ID NO: 156259 - DNA, 22 bp, Artificial Sequence
  Synthetic oligonucleotide; CTA chr11 5150751 5150772 5150756 5150751 -
tactacagaatcgtgacataat

SEQ ID NO: 156260 - DNA, 22 bp, Artificial Sequence
  Synthetic oligonucleotide; CTA chr11 5150746 5150767 5150751 5150746 -
cagaatcgtgacataatagtaa

SEQ ID NO: 156261 - DNA, 22 bp, Artificial Sequence
  Synthetic oligonucleotide; CTG chr11 5150719 5150740 5150724 5150719 -
gcacagtgaataattctcatga

SEQ ID NO: 156262 - DNA, 22 bp, Artificial Sequence
  Synthetic oligonucleotide; TTC chr11 5150703 5150724 5150708 5150703 -
tcatgagtttgtacctatgtaa

SEQ ID NO: 156263 - DNA, 22 bp, Artificial Sequence
  Synthetic oligonucleotide; CTC chr11 5150701 5150722 5150706 5150701 -
atgagtttgtacctatgtaatt

SEQ ID NO: 156264 - DNA, 22 bp, Artificial Sequence
  Synthetic oligonucleotide; TTT chr11 5150693 5150714 5150698 5150693 -
gtacctatgtaattctggaaaa

SEQ ID NO: 156265 - DNA, 22 bp, Artificial Sequence
  Synthetic oligonucleotide; TTG chr11 5150692 5150713 5150697 5150692 -
tacctatgtaattctggaaaag

SEQ ID NO: 156266 - DNA, 22 bp, Artificial Sequence
  Synthetic oligonucleotide; CTA chr11 5150686 5150707 5150691 5150686 -
tgtaattctggaaaagagagac

SEQ ID NO: 156267 - DNA, 22 bp, Artificial Sequence
  Synthetic oligonucleotide; TTC chr11 5150678 5150699 5150683 5150678 -
tggaaaagagagactgaaagga

SEQ ID NO: 156268 - DNA, 22 bp, Artificial Sequence
  Synthetic oligonucleotide; CTG chr11 5150676 5150697 5150681 5150676 -
gaaaagagagactgaaaggaag

SEQ ID NO: 156269 - DNA, 22 bp, Artificial Sequence
  Synthetic oligonucleotide; CTG chr11 5150662 5150683 5150667 5150662 -
aaaggaagagaggtggggaatg

SEQ ID NO: 156270 - DNA, 22 bp, Artificial Sequence
  Synthetic oligonucleotide; TTC chr11 5150584 5150605 5150589 5150584 -
agagagaatgaagcattgaaat

SEQ ID NO: 156271 - DNA, 22 bp, Artificial Sequence
  Synthetic oligonucleotide; TTG chr11 5150566 5150587 5150571 5150566 -
aaatctaaccaaagcaggggag

SEQ ID NO: 156272 - DNA, 22 bp, Artificial Sequence
  Synthetic oligonucleotide; CTA chr11 5150559 5150580 5150564 5150559 -
accaaagcaggggagttgcatt

SEQ ID NO: 156273 - DNA, 22 bp, Artificial Sequence
  Synthetic oligonucleotide; TTG chr11 5150541 5150562 5150546 5150541 -
catttattgtattttgtttttt

SEQ ID NO: 156274 - DNA, 22 bp, Artificial Sequence
  Synthetic oligonucleotide; TTT chr11 5150536 5150557 5150541 5150536 -
attgtattttgttttttggtta

SEQ ID NO: 156275 - DNA, 22 bp, Artificial Sequence
  Synthetic oligonucleotide; TTA chr11 5150535 5150556 5150540 5150535 -
ttgtattttgttttttggttag

SEQ ID NO: 156276 - DNA, 22 bp, Artificial Sequence
  Synthetic oligonucleotide; TTG chr11 5150532 5150553 5150537 5150532 -
tattttgttttttggttaggta

SEQ ID NO: 156277 - DNA, 22 bp, Artificial Sequence
  Synthetic oligonucleotide; TTT chr11 5150527 5150548 5150532 5150527 -
tgttttttggttaggtagttac

SEQ ID NO: 156278 - DNA, 22 bp, Artificial Sequence
  Synthetic oligonucleotide; TTT chr11 5150526 5150547 5150531 5150526 -
gttttttggttaggtagttacc

SEQ ID NO: 156279 - DNA, 22 bp, Artificial Sequence
  Synthetic oligonucleotide; TTG chr11 5150525 5150546 5150530 5150525 -
ttttttggttaggtagttacct

SEQ ID NO: 156280 - DNA, 22 bp, Artificial Sequence
  Synthetic oligonucleotide; TTT chr11 5150522 5150543 5150527 5150522 -
tttggttaggtagttacctctg

SEQ ID NO: 156281 - DNA, 22 bp, Artificial Sequence
  Synthetic oligonucleotide; TTT chr11 5150521 5150542 5150526 5150521 -
ttggttaggtagttacctctga

SEQ ID NO: 156282 - DNA, 22 bp, Artificial Sequence
  Synthetic oligonucleotide; TTT chr11 5150520 5150541 5150525 5150520 -
tggttaggtagttacctctgat

SEQ ID NO: 156283 - DNA, 22 bp, Artificial Sequence
  Synthetic oligonucleotide; TTT chr11 5150519 5150540 5150524 5150519 -
ggttaggtagttacctctgatt

SEQ ID NO: 156284 - DNA, 22 bp, Artificial Sequence
  Synthetic oligonucleotide; TTG chr11 5150518 5150539 5150523 5150518 -
gttaggtagttacctctgattc

SEQ ID NO: 156285 - DNA, 22 bp, Artificial Sequence
  Synthetic oligonucleotide; TTA chr11 5150514 5150535 5150519 5150514 -
ggtagttacctctgattcttga

SEQ ID NO: 156286 - DNA, 22 bp, Artificial Sequence
  Synthetic oligonucleotide; TTA chr11 5150506 5150527 5150511 5150506 -
cctctgattcttgaggaatgat

SEQ ID NO: 156287 - DNA, 22 bp, Artificial Sequence
  Synthetic oligonucleotide; CTC chr11 5150502 5150523 5150507 5150502 -
tgattcttgaggaatgatggat

SEQ ID NO: 156288 - DNA, 22 bp, Artificial Sequence
  Synthetic oligonucleotide; CTG chr11 5150500 5150521 5150505 5150500 -
attcttgaggaatgatggatga

SEQ ID NO: 156289 - DNA, 22 bp, Artificial Sequence
  Synthetic oligonucleotide; TTC chr11 5150496 5150517 5150501 5150496 -
ttgaggaatgatggatgagtag

SEQ ID NO: 156290 - DNA, 22 bp, Artificial Sequence
  Synthetic oligonucleotide; CTT chr11 5150494 5150515 5150499 5150494 -
gaggaatgatggatgagtagcc

SEQ ID NO: 156291 - DNA, 22 bp, Artificial Sequence
  Synthetic oligonucleotide; TTG chr11 5150493 5150514 5150498 5150493 -
aggaatgatggatgagtagcca

SEQ ID NO: 156292 - DNA, 22 bp, Artificial Sequence
  Synthetic oligonucleotide; TTT chr11 5150426 5150447 5150431 5150426 -
aaactagataatgtagtttaag

SEQ ID NO: 156293 - DNA, 22 bp, Artificial Sequence
  Synthetic oligonucleotide; TTA chr11 5150425 5150446 5150430 5150425 -
aactagataatgtagtttaagg

SEQ ID NO: 156294 - DNA, 22 bp, Artificial Sequence
  Synthetic oligonucleotide; CTA chr11 5150420 5150441 5150425 5150420 -
gataatgtagtttaaggtaact

SEQ ID NO: 156295 - DNA, 22 bp, Artificial Sequence
  Synthetic oligonucleotide; TTT chr11 5150407 5150428 5150412 5150407 -
aaggtaactctagttttttcaa

SEQ ID NO: 156296 - DNA, 22 bp, Artificial Sequence
  Synthetic oligonucleotide; TTA chr11 5150406 5150427 5150411 5150406 -
aggtaactctagttttttcaat

SEQ ID NO: 156297 - DNA, 22 bp, Artificial Sequence
  Synthetic oligonucleotide; CTC chr11 5150397 5150418 5150402 5150397 -
tagttttttcaatatggtatga

SEQ ID NO: 156298 - DNA, 22 bp, Artificial Sequence
  Synthetic oligonucleotide; CTA chr11 5150395 5150416 5150400 5150395 -
gttttttcaatatggtatgagt

SEQ ID NO: 156299 - DNA, 22 bp, Artificial Sequence
  Synthetic oligonucleotide; TTT chr11 5150391 5150412 5150396 5150391 -
tttcaatatggtatgagtgcaa

SEQ ID NO: 156300 - DNA, 22 bp, Artificial Sequence
  Synthetic oligonucleotide; TTT chr11 5150390 5150411 5150395 5150390 -
ttcaatatggtatgagtgcaag

SEQ ID NO: 156301 - DNA, 22 bp, Artificial Sequence
  Synthetic oligonucleotide; TTT chr11 5150389 5150410 5150394 5150389 -
tcaatatggtatgagtgcaagg

SEQ ID NO: 156302 - DNA, 22 bp, Artificial Sequence
  Synthetic oligonucleotide; TTT chr11 5150388 5150409 5150393 5150388 -
caatatggtatgagtgcaaggt

SEQ ID NO: 156303 - DNA, 22 bp, Artificial Sequence
  Synthetic oligonucleotide; TTC chr11 5150387 5150408 5150392 5150387 -
aatatggtatgagtgcaaggta

SEQ ID NO: 156304 - DNA, 22 bp, Artificial Sequence
  Synthetic oligonucleotide; CTT chr11 5150359 5150380 5150364 5150359 -
ggggagacaaggaaaatatgaa

SEQ ID NO: 156305 - DNA, 22 bp, Artificial Sequence
  Synthetic oligonucleotide; TTG chr11 5150358 5150379 5150363 5150358 -
gggagacaaggaaaatatgaat

SEQ ID NO: 156306 - DNA, 22 bp, Artificial Sequence
  Synthetic oligonucleotide; CTA chr11 5150322 5150343 5150327 5150322 -
ttaatgttgtgcagagttgctg

SEQ ID NO: 156307 - DNA, 22 bp, Artificial Sequence
  Synthetic oligonucleotide; TTA chr11 5150319 5150340 5150324 5150319 -
atgttgtgcagagttgctggac

SEQ ID NO: 156308 - DNA, 22 bp, Artificial Sequence
  Synthetic oligonucleotide; TTG chr11 5150313 5150334 5150318 5150313 -
tgcagagttgctggactttatt

SEQ ID NO: 156309 - DNA, 22 bp, Artificial Sequence
  Synthetic oligonucleotide; TTG chr11 5150303 5150324 5150308 5150303 -
ctggactttattccaaaagcta

SEQ ID NO: 156310 - DNA, 22 bp, Artificial Sequence
  Synthetic oligonucleotide; CTG chr11 5150300 5150321 5150305 5150300 -
gactttattccaaaagctataa

SEQ ID NO: 156311 - DNA, 22 bp, Artificial Sequence
  Synthetic oligonucleotide; CTT chr11 5150295 5150316 5150300 5150295 -
tattccaaaagctataatgtgc

SEQ ID NO: 156312 - DNA, 22 bp, Artificial Sequence
  Synthetic oligonucleotide; TTT chr11 5150294 5150315 5150299 5150294 -
attccaaaagctataatgtgcc

SEQ ID NO: 156313 - DNA, 22 bp, Artificial Sequence
  Synthetic oligonucleotide; TTA chr11 5150293 5150314 5150298 5150293 -
ttccaaaagctataatgtgcca

SEQ ID NO: 156314 - DNA, 22 bp, Artificial Sequence
  Synthetic oligonucleotide; TTC chr11 5150290 5150311 5150295 5150290 -
caaaagctataatgtgccattg

SEQ ID NO: 156315 - DNA, 22 bp, Artificial Sequence
  Synthetic oligonucleotide; CTA chr11 5150281 5150302 5150286 5150281 -
taatgtgccattggagagtatt

SEQ ID NO: 156316 - DNA, 22 bp, Artificial Sequence
  Synthetic oligonucleotide; TTG chr11 5150268 5150289 5150273 5150268 -
gagagtattcatttgtttgctt

SEQ ID NO: 156317 - DNA, 22 bp, Artificial Sequence
  Synthetic oligonucleotide; TTC chr11 5150258 5150279 5150263 5150258 -
atttgtttgcttgtgttctaca

SEQ ID NO: 156318 - DNA, 22 bp, Artificial Sequence
  Synthetic oligonucleotide; TTT chr11 5150254 5150275 5150259 5150254 -
gtttgcttgtgttctacaagta

SEQ ID NO: 156319 - DNA, 22 bp, Artificial Sequence
  Synthetic oligonucleotide; TTG chr11 5150253 5150274 5150258 5150253 -
tttgcttgtgttctacaagtaa

SEQ ID NO: 156320 - DNA, 22 bp, Artificial Sequence
  Synthetic oligonucleotide; TTT chr11 5150250 5150271 5150255 5150250 -
gcttgtgttctacaagtaagac

SEQ ID NO: 156321 - DNA, 22 bp, Artificial Sequence
  Synthetic oligonucleotide; TTG chr11 5150249 5150270 5150254 5150249 -
cttgtgttctacaagtaagacg

SEQ ID NO: 156322 - DNA, 22 bp, Artificial Sequence
  Synthetic oligonucleotide; CTT chr11 5150246 5150267 5150251 5150246 -
gtgttctacaagtaagacgtgt

SEQ ID NO: 156323 - DNA, 22 bp, Artificial Sequence
  Synthetic oligonucleotide; TTG chr11 5150245 5150266 5150250 5150245 -
tgttctacaagtaagacgtgtg

SEQ ID NO: 156324 - DNA, 22 bp, Artificial Sequence
  Synthetic oligonucleotide; TTC chr11 5150240 5150261 5150245 5150240 -
tacaagtaagacgtgtgtgtgt

SEQ ID NO: 156325 - DNA, 22 bp, Artificial Sequence
  Synthetic oligonucleotide; CTA chr11 5150238 5150259 5150243 5150238 -
caagtaagacgtgtgtgtgtgt

SEQ ID NO: 156326 - DNA, 22 bp, Artificial Sequence
  Synthetic oligonucleotide; CTG chr11 5150189 5150210 5150194 5150189 -
cttgggcatgtggcagcatacc

SEQ ID NO: 156327 - DNA, 22 bp, Artificial Sequence
  Synthetic oligonucleotide; CTT chr11 5150186 5150207 5150191 5150186 -
gggcatgtggcagcataccaca

SEQ ID NO: 156328 - DNA, 22 bp, Artificial Sequence
  Synthetic oligonucleotide; TTG chr11 5150185 5150206 5150190 5150185 -
ggcatgtggcagcataccacac

SEQ ID NO: 156329 - DNA, 22 bp, Artificial Sequence
  Synthetic oligonucleotide; CTA chr11 5150143 5150164 5150148 5150143 -
gggctattgtgttagtgaagag

SEQ ID NO: 156330 - DNA, 22 bp, Artificial Sequence
  Synthetic oligonucleotide; CTA chr11 5150137 5150158 5150142 5150137 -
ttgtgttagtgaagaggaggac

SEQ ID NO: 156331 - DNA, 22 bp, Artificial Sequence
  Synthetic oligonucleotide; TTG chr11 5150134 5150155 5150139 5150134 -
tgttagtgaagaggaggactat

SEQ ID NO: 156332 - DNA, 22 bp, Artificial Sequence
  Synthetic oligonucleotide; TTA chr11 5150129 5150150 5150134 5150129 -
gtgaagaggaggactatattgt

SEQ ID NO: 156333 - DNA, 22 bp, Artificial Sequence
  Synthetic oligonucleotide; CTA chr11 5150113 5150134 5150118 5150113 -
tattgtctaaaattagtggcat

SEQ ID NO: 156334 - DNA, 22 bp, Artificial Sequence
  Synthetic oligonucleotide; TTG chr11 5150108 5150129 5150113 5150108 -
tctaaaattagtggcataagaa

SEQ ID NO: 156335 - DNA, 22 bp, Artificial Sequence
  Synthetic oligonucleotide; CTA chr11 5150104 5150125 5150109 5150104 -
aaattagtggcataagaattta

SEQ ID NO: 156336 - DNA, 22 bp, Artificial Sequence
  Synthetic oligonucleotide; TTA chr11 5150098 5150119 5150103 5150098 -
gtggcataagaatttacggcta

SEQ ID NO: 156337 - DNA, 22 bp, Artificial Sequence
  Synthetic oligonucleotide; TTT chr11 5150083 5150104 5150088 5150083 -
acggctagtcaattgttcttga

SEQ ID NO: 156338 - DNA, 22 bp, Artificial Sequence
  Synthetic oligonucleotide; TTA chr11 5150082 5150103 5150087 5150082 -
cggctagtcaattgttcttgaa

SEQ ID NO: 156339 - DNA, 22 bp, Artificial Sequence
  Synthetic oligonucleotide; CTA chr11 5150076 5150097 5150081 5150076 -
gtcaattgttcttgaaaaacct

SEQ ID NO: 156340 - DNA, 22 bp, Artificial Sequence
  Synthetic oligonucleotide; TTG chr11 5150068 5150089 5150073 5150068 -
ttcttgaaaaacctcaggtcat

SEQ ID NO: 156341 - DNA, 22 bp, Artificial Sequence
  Synthetic oligonucleotide; TTC chr11 5150065 5150086 5150070 5150065 -
ttgaaaaacctcaggtcataga

SEQ ID NO: 156342 - DNA, 22 bp, Artificial Sequence
  Synthetic oligonucleotide; CTT chr11 5150063 5150084 5150068 5150063 -
gaaaaacctcaggtcatagatc

SEQ ID NO: 156343 - DNA, 22 bp, Artificial Sequence
  Synthetic oligonucleotide; TTG chr11 5150062 5150083 5150067 5150062 -
aaaaacctcaggtcatagatca

SEQ ID NO: 156344 - DNA, 22 bp, Artificial Sequence
  Synthetic oligonucleotide; CTC chr11 5150053 5150074 5150058 5150053 -
aggtcatagatcatttttttca

SEQ ID NO: 156345 - DNA, 22 bp, Artificial Sequence
  Synthetic oligonucleotide; TTT chr11 5150037 5150058 5150042 5150037 -
ttttcaaggttatggaaaatat

SEQ ID NO: 156346 - DNA, 22 bp, Artificial Sequence
  Synthetic oligonucleotide; TTT chr11 5150036 5150057 5150041 5150036 -
tttcaaggttatggaaaatatt

SEQ ID NO: 156347 - DNA, 22 bp, Artificial Sequence
  Synthetic oligonucleotide; TTT chr11 5150035 5150056 5150040 5150035 -
ttcaaggttatggaaaatattc

SEQ ID NO: 156348 - DNA, 22 bp, Artificial Sequence
  Synthetic oligonucleotide; TTT chr11 5150034 5150055 5150039 5150034 -
tcaaggttatggaaaatattca

SEQ ID NO: 156349 - DNA, 22 bp, Artificial Sequence
  Synthetic oligonucleotide; TTT chr11 5150033 5150054 5150038 5150033 -
caaggttatggaaaatattcac

SEQ ID NO: 156350 - DNA, 22 bp, Artificial Sequence
  Synthetic oligonucleotide; TTC chr11 5150032 5150053 5150037 5150032 -
aaggttatggaaaatattcaca

SEQ ID NO: 156351 - DNA, 22 bp, Artificial Sequence
  Synthetic oligonucleotide; TTA chr11 5150025 5150046 5150030 5150025 -
tggaaaatattcacatatgggc

SEQ ID NO: 156352 - DNA, 22 bp, Artificial Sequence
  Synthetic oligonucleotide; TTC chr11 5150013 5150034 5150018 5150013 -
acatatgggcagatgtccatac

SEQ ID NO: 156353 - DNA, 20 bp, Artificial Sequence
  Synthetic oligonucleotide; TAG chr2 60448190 60448209 60448206 +
tttttttcacactgtgatct

SEQ ID NO: 156354 - DNA, 20 bp, Artificial Sequence
  Synthetic oligonucleotide; AGG chr2 60448191 60448210 60448207 +
ttttttcacactgtgatctt

SEQ ID NO: 156355 - DNA, 20 bp, Artificial Sequence
  Synthetic oligonucleotide; TGG chr2 60448210 60448229 60448226 +
taggtacttcacttaatctt

SEQ ID NO: 156356 - DNA, 20 bp, Artificial Sequence
  Synthetic oligonucleotide; GGG chr2 60448211 60448230 60448227 +
aggtacttcacttaatcttt

SEQ ID NO: 156357 - DNA, 20 bp, Artificial Sequence
  Synthetic oligonucleotide; GAG chr2 60448239 60448258 60448255 +
attattctgatctctaaaat

SEQ ID NO: 156358 - DNA, 20 bp, Artificial Sequence
  Synthetic oligonucleotide; TAG chr2 60448249 60448268 60448265 +
tctctaaaatgagtgattac

SEQ ID NO: 156359 - DNA, 20 bp, Artificial Sequence
  Synthetic oligonucleotide; AGG chr2 60448250 60448269 60448266 +
ctctaaaatgagtgattact

SEQ ID NO: 156360 - DNA, 20 bp, Artificial Sequence
  Synthetic oligonucleotide; CAG chr2 60448267 60448286 60448283 +
actaggattcctttcaactt

SEQ ID NO: 156361 - DNA, 20 bp, Artificial Sequence
  Synthetic oligonucleotide; TAG chr2 60448294 60448313 60448310 +
ttcttttcttatctaattta

SEQ ID NO: 156362 - DNA, 20 bp, Artificial Sequence
  Synthetic oligonucleotide; AAG chr2 60448303 60448322 60448319 +
tatctaatttatagaatcac

SEQ ID NO: 156363 - DNA, 20 bp, Artificial Sequence
  Synthetic oligonucleotide; AGG chr2 60448304 60448323 60448320 +
atctaatttatagaatcaca

SEQ ID NO: 156364 - DNA, 20 bp, Artificial Sequence
  Synthetic oligonucleotide; AAG chr2 60448332 60448351 60448348 +
tgattctatcatgtatataa

SEQ ID NO: 156365 - DNA, 20 bp, Artificial Sequence
  Synthetic oligonucleotide; AAG chr2 60448344 60448363 60448360 +
gtatataaaagtattctata

SEQ ID NO: 156366 - DNA, 20 bp, Artificial Sequence
  Synthetic oligonucleotide; AAG chr2 60448350 60448369 60448366 +
aaaagtattctataaagctt

SEQ ID NO: 156367 - DNA, 20 bp, Artificial Sequence
  Synthetic oligonucleotide; TGG chr2 60448360 60448379 60448376 +
tataaagcttaagtacttcc

SEQ ID NO: 156368 - DNA, 20 bp, Artificial Sequence
  Synthetic oligonucleotide; GGG chr2 60448361 60448380 60448377 +
ataaagcttaagtacttcct

SEQ ID NO: 156369 - DNA, 20 bp, Artificial Sequence
  Synthetic oligonucleotide; GAG chr2 60448363 60448382 60448379 +
aaagcttaagtacttcctgg

SEQ ID NO: 156370 - DNA, 20 bp, Artificial Sequence
  Synthetic oligonucleotide; AAG chr2 60448382 60448401 60448398 +
ggagcattttttaaaataca

SEQ ID NO: 156371 - DNA, 20 bp, Artificial Sequence
  Synthetic oligonucleotide; AAG chr2 60448389 60448408 60448405 +
tttttaaaatacaaagcaaa

SEQ ID NO: 156372 - DNA, 20 bp, Artificial Sequence
  Synthetic oligonucleotide; AAG chr2 60448393 60448412 60448409 +
taaaatacaaagcaaaaaga

SEQ ID NO: 156373 - DNA, 20 bp, Artificial Sequence
  Synthetic oligonucleotide; AGG chr2 60448394 60448413 60448410 +
aaaatacaaagcaaaaagaa

SEQ ID NO: 156374 - DNA, 20 bp, Artificial Sequence
  Synthetic oligonucleotide; TGG chr2 60448402 60448421 60448418 +
aagcaaaaagaaaggccatg

SEQ ID NO: 156375 - DNA, 20 bp, Artificial Sequence
  Synthetic oligonucleotide; AAG chr2 60448413 60448432 60448429 +
aaggccatgtggttcgtaat

SEQ ID NO: 156376 - DNA, 20 bp, Artificial Sequence
  Synthetic oligonucleotide; AAG chr2 60448433 60448452 60448449 +
aagatatcctaatttaaact

SEQ ID NO: 156377 - DNA, 20 bp, Artificial Sequence
  Synthetic oligonucleotide; TAG chr2 60448437 60448456 60448453 +
tatcctaatttaaactaaga

SEQ ID NO: 156378 - DNA, 20 bp, Artificial Sequence
  Synthetic oligonucleotide; CAG chr2 60448445 60448464 60448461 +
tttaaactaagatagaaaaa

SEQ ID NO: 156379 - DNA, 20 bp, Artificial Sequence
  Synthetic oligonucleotide; TGG chr2 60448462 60448481 60448478 +
aaacagacaatgactgcttc

SEQ ID NO: 156380 - DNA, 20 bp, Artificial Sequence
  Synthetic oligonucleotide; TGG chr2 60448472 60448491 60448488 +
tgactgcttctggattttac

SEQ ID NO: 156381 - DNA, 20 bp, Artificial Sequence
  Synthetic oligonucleotide; AAG chr2 60448475 60448494 60448491 +
ctgcttctggattttactgg

SEQ ID NO: 156382 - DNA, 20 bp, Artificial Sequence
  Synthetic oligonucleotide; GAG chr2 60448479 60448498 60448495 +
ttctggattttactggaagt

SEQ ID NO: 156383 - DNA, 20 bp, Artificial Sequence
  Synthetic oligonucleotide; AAG chr2 60448482 60448501 60448498 +
tggattttactggaagtgag

SEQ ID NO: 156384 - DNA, 20 bp, Artificial Sequence
  Synthetic oligonucleotide; CAG chr2 60448506 60448525 60448522 +
tccatgacttaatgtaactc

SEQ ID NO: 156385 - DNA, 20 bp, Artificial Sequence
  Synthetic oligonucleotide; AGG chr2 60448507 60448526 60448523 +
ccatgacttaatgtaactcc

SEQ ID NO: 156386 - DNA, 20 bp, Artificial Sequence
  Synthetic oligonucleotide; GGG chr2 60448508 60448527 60448524 +
catgacttaatgtaactcca

SEQ ID NO: 156387 - DNA, 20 bp, Artificial Sequence
  Synthetic oligonucleotide; GGG chr2 60448509 60448528 60448525 +
atgacttaatgtaactccag

SEQ ID NO: 156388 - DNA, 20 bp, Artificial Sequence
  Synthetic oligonucleotide; AAG chr2 60448523 60448542 60448539 +
ctccaggggaatgcaaactg

SEQ ID NO: 156389 - DNA, 20 bp, Artificial Sequence
  Synthetic oligonucleotide; GAG chr2 60448525 60448544 60448541 +
ccaggggaatgcaaactgaa

SEQ ID NO: 156390 - DNA, 20 bp, Artificial Sequence
  Synthetic oligonucleotide; TAG chr2 60448540 60448559 60448556 +
ctgaagagtactgtctctcc

SEQ ID NO: 156391 - DNA, 20 bp, Artificial Sequence
  Synthetic oligonucleotide; AGG chr2 60448541 60448560 60448557 +
tgaagagtactgtctctcct

SEQ ID NO: 156392 - DNA, 20 bp, Artificial Sequence
  Synthetic oligonucleotide; CAG chr2 60448544 60448563 60448560 +
agagtactgtctctcctagg

SEQ ID NO: 156393 - DNA, 20 bp, Artificial Sequence
  Synthetic oligonucleotide; CAG chr2 60448548 60448567 60448564 +
tactgtctctcctaggcagt

SEQ ID NO: 156394 - DNA, 20 bp, Artificial Sequence
  Synthetic oligonucleotide; GAG chr2 60448550 60448569 60448566 +
ctgtctctcctaggcagtca

SEQ ID NO: 156395 - DNA, 20 bp, Artificial Sequence
  Synthetic oligonucleotide; AGG chr2 60448551 60448570 60448567 +
tgtctctcctaggcagtcag

SEQ ID NO: 156396 - DNA, 20 bp, Artificial Sequence
  Synthetic oligonucleotide; AAG chr2 60448555 60448574 60448571 +
tctcctaggcagtcagagga

SEQ ID NO: 156397 - DNA, 20 bp, Artificial Sequence
  Synthetic oligonucleotide; TGG chr2 60448580 60448599 60448596 +
atataatattgtttctctgc

SEQ ID NO: 156398 - DNA, 20 bp, Artificial Sequence
  Synthetic oligonucleotide; TAG chr2 60448584 60448603 60448600 +
aatattgtttctctgctggt

SEQ ID NO: 156399 - DNA, 20 bp, Artificial Sequence
  Synthetic oligonucleotide; AGG chr2 60448585 60448604 60448601 +
atattgtttctctgctggtt

SEQ ID NO: 156400 - DNA, 20 bp, Artificial Sequence
  Synthetic oligonucleotide; AAG chr2 60448593 60448612 60448609 +
tctctgctggttaggaactc

SEQ ID NO: 156401 - DNA, 20 bp, Artificial Sequence
  Synthetic oligonucleotide; AAG chr2 60448607 60448626 60448623 +
gaactcaagatgaactcttg

SEQ ID NO: 156402 - DNA, 20 bp, Artificial Sequence
  Synthetic oligonucleotide; AAG chr2 60448610 60448629 60448626 +
ctcaagatgaactcttgaag

SEQ ID NO: 156403 - DNA, 20 bp, Artificial Sequence
  Synthetic oligonucleotide; AGG chr2 60448611 60448630 60448627 +
tcaagatgaactcttgaaga

SEQ ID NO: 156404 - DNA, 20 bp, Artificial Sequence
  Synthetic oligonucleotide; AAG chr2 60448614 60448633 60448630 +
agatgaactcttgaagaagg

SEQ ID NO: 156405 - DNA, 20 bp, Artificial Sequence
  Synthetic oligonucleotide; AGG chr2 60448615 60448634 60448631 +
gatgaactcttgaagaagga

SEQ ID NO: 156406 - DNA, 20 bp, Artificial Sequence
  Synthetic oligonucleotide; CAG chr2 60448632 60448651 60448648 +
ggaaggtgtgcttgcatcac

SEQ ID NO: 156407 - DNA, 20 bp, Artificial Sequence
  Synthetic oligonucleotide; TGG chr2 60448641 60448660 60448657 +
gcttgcatcaccagttattt

SEQ ID NO: 156408 - DNA, 20 bp, Artificial Sequence
  Synthetic oligonucleotide; CAG chr2 60448653 60448672 60448669 +
agttattttggaacttccac

SEQ ID NO: 156409 - DNA, 20 bp, Artificial Sequence
  Synthetic oligonucleotide; AAG chr2 60448699 60448718 60448715 +
tccttcacactatactccaa

SEQ ID NO: 156410 - DNA, 20 bp, Artificial Sequence
  Synthetic oligonucleotide; AGG chr2 60448700 60448719 60448716 +
ccttcacactatactccaaa

SEQ ID NO: 156411 - DNA, 20 bp, Artificial Sequence
  Synthetic oligonucleotide; GAG chr2 60448702 60448721 60448718 +
ttcacactatactccaaaag

SEQ ID NO: 156412 - DNA, 20 bp, Artificial Sequence
  Synthetic oligonucleotide; AAG chr2 60448708 60448727 60448724 +
ctatactccaaaaggagtca

SEQ ID NO: 156413 - DNA, 20 bp, Artificial Sequence
  Synthetic oligonucleotide; TGG chr2 60448716 60448735 60448732 +
caaaaggagtcaaagctatg

SEQ ID NO: 156414 - DNA, 20 bp, Artificial Sequence
  Synthetic oligonucleotide; AAG chr2 60448727 60448746 60448743 +
aaagctatgtggcatactgt

SEQ ID NO: 156415 - DNA, 20 bp, Artificial Sequence
  Synthetic oligonucleotide; CAG chr2 60448732 60448751 60448748 +
tatgtggcatactgtaagaa

SEQ ID NO: 156416 - DNA, 20 bp, Artificial Sequence
  Synthetic oligonucleotide; CAG chr2 60448741 60448760 60448757 +
tactgtaagaacagaaccaa

SEQ ID NO: 156417 - DNA, 20 bp, Artificial Sequence
  Synthetic oligonucleotide; CGG chr2 60448782 60448801 60448798 +
tctaatcctactattacttc

SEQ ID NO: 156418 - DNA, 20 bp, Artificial Sequence
  Synthetic oligonucleotide; GGG chr2 60448783 60448802 60448799 +
ctaatcctactattacttcc

SEQ ID NO: 156419 - DNA, 20 bp, Artificial Sequence
  Synthetic oligonucleotide; GGG chr2 60448784 60448803 60448800 +
taatcctactattacttccg

SEQ ID NO: 156420 - DNA, 20 bp, Artificial Sequence
  Synthetic oligonucleotide; AAG chr2 60448804 60448823 60448820 +
gggacactgatttataaaat

SEQ ID NO: 156421 - DNA, 20 bp, Artificial Sequence
  Synthetic oligonucleotide; AAG chr2 60448818 60448837 60448834 +
taaaataagaattataaaat

SEQ ID NO: 156422 - DNA, 20 bp, Artificial Sequence
  Synthetic oligonucleotide; TAG chr2 60448833 60448852 60448849 +
aaaataagaatttttaaaaa

SEQ ID NO: 156423 - DNA, 20 bp, Artificial Sequence
  Synthetic oligonucleotide; AGG chr2 60448834 60448853 60448850 +
aaataagaatttttaaaaat

SEQ ID NO: 156424 - DNA, 20 bp, Artificial Sequence
  Synthetic oligonucleotide; TAG chr2 60448845 60448864 60448861 +
tttaaaaataggaataaata

SEQ ID NO: 156425 - DNA, 20 bp, Artificial Sequence
  Synthetic oligonucleotide; AAG chr2 60448917 60448936 60448933 +
tcaacgcatacaaaacctga

SEQ ID NO: 156426 - DNA, 20 bp, Artificial Sequence
  Synthetic oligonucleotide; AAG chr2 60448937 60448956 60448953 +
aagatattcctgaccacttg

SEQ ID NO: 156427 - DNA, 20 bp, Artificial Sequence
  Synthetic oligonucleotide; AGG chr2 60448938 60448957 60448954 +
agatattcctgaccacttga

SEQ ID NO: 156428 - DNA, 20 bp, Artificial Sequence
  Synthetic oligonucleotide; GGG chr2 60448939 60448958 60448955 +
gatattcctgaccacttgaa

SEQ ID NO: 156429 - DNA, 20 bp, Artificial Sequence
  Synthetic oligonucleotide; TGG chr2 60448944 60448963 60448960 +
tcctgaccacttgaagggct

SEQ ID NO: 156430 - DNA, 20 bp, Artificial Sequence
  Synthetic oligonucleotide; TGG chr2 60448965 60448984 60448981 +
ggttttaatctgaatgctct

SEQ ID NO: 156431 - DNA, 20 bp, Artificial Sequence
  Synthetic oligonucleotide; AAG chr2 60448975 60448994 60448991 +
tgaatgctcttggaaactcc

SEQ ID NO: 156432 - DNA, 20 bp, Artificial Sequence
  Synthetic oligonucleotide; AAG chr2 60448981 60449000 60448997 +
ctcttggaaactccaagcaa

SEQ ID NO: 156433 - DNA, 20 bp, Artificial Sequence
  Synthetic oligonucleotide; CAG chr2 60448988 60449007 60449004 +
aaactccaagcaaaagtgcc

SEQ ID NO: 156434 - DNA, 20 bp, Artificial Sequence
  Synthetic oligonucleotide; AAG chr2 60449004 60449023 60449020 +
tgcccagaaaatatgctgcc

SEQ ID NO: 156435 - DNA, 20 bp, Artificial Sequence
  Synthetic oligonucleotide; AGG chr2 60449005 60449024 60449021 +
gcccagaaaatatgctgcca

SEQ ID NO: 156436 - DNA, 20 bp, Artificial Sequence
  Synthetic oligonucleotide; TGG chr2 60449010 60449029 60449026 +
gaaaatatgctgccaaggtt

SEQ ID NO: 156437 - DNA, 20 bp, Artificial Sequence
  Synthetic oligonucleotide; GGG chr2 60449011 60449030 60449027 +
aaaatatgctgccaaggttt

SEQ ID NO: 156438 - DNA, 20 bp, Artificial Sequence
  Synthetic oligonucleotide; GGG chr2 60449012 60449031 60449028 +
aaatatgctgccaaggtttg

SEQ ID NO: 156439 - DNA, 20 bp, Artificial Sequence
  Synthetic oligonucleotide; CAG chr2 60449019 60449038 60449035 +
ctgccaaggtttggggcact

SEQ ID NO: 156440 - DNA, 20 bp, Artificial Sequence
  Synthetic oligonucleotide; TAG chr2 60449023 60449042 60449039 +
caaggtttggggcactcagt

SEQ ID NO: 156441 - DNA, 20 bp, Artificial Sequence
  Synthetic oligonucleotide; CAG chr2 60449030 60449049 60449046 +
tggggcactcagttagacct

SEQ ID NO: 156442 - DNA, 20 bp, Artificial Sequence
  Synthetic oligonucleotide; CAG chr2 60449033 60449052 60449049 +
ggcactcagttagacctcag

SEQ ID NO: 156443 - DNA, 20 bp, Artificial Sequence
  Synthetic oligonucleotide; AAG chr2 60449041 60449060 60449057 +
gttagacctcagcagattcc

SEQ ID NO: 156444 - DNA, 20 bp, Artificial Sequence
  Synthetic oligonucleotide; AAG chr2 60449060 60449079 60449076 +
caagattgcactccttgcct

SEQ ID NO: 156445 - DNA, 20 bp, Artificial Sequence
  Synthetic oligonucleotide; GAG chr2 60449062 60449081 60449078 +
agattgcactccttgcctaa

SEQ ID NO: 156446 - DNA, 20 bp, Artificial Sequence
  Synthetic oligonucleotide; TGG chr2 60449083 60449102 60449099 +
agttttctttaaatgatcac

SEQ ID NO: 156447 - DNA, 20 bp, Artificial Sequence
  Synthetic oligonucleotide; CAG chr2 60449110 60449129 60449126 +
tgaaacaattatttctcaaa

SEQ ID NO: 156448 - DNA, 20 bp, Artificial Sequence
  Synthetic oligonucleotide; AGG chr2 60449111 60449130 60449127 +
gaaacaattatttctcaaac

SEQ ID NO: 156449 - DNA, 20 bp, Artificial Sequence
  Synthetic oligonucleotide; TGG chr2 60449130 60449149 60449146 +
caggctgatattcaacatgc

SEQ ID NO: 156450 - DNA, 20 bp, Artificial Sequence
  Synthetic oligonucleotide; TGG chr2 60449137 60449156 60449153 +
atattcaacatgctggatgc

SEQ ID NO: 156451 - DNA, 20 bp, Artificial Sequence
  Synthetic oligonucleotide; GGG chr2 60449138 60449157 60449154 +
tattcaacatgctggatgct

SEQ ID NO: 156452 - DNA, 20 bp, Artificial Sequence
  Synthetic oligonucleotide; CAG chr2 60449146 60449165 60449162 +
atgctggatgctgggtgctg

SEQ ID NO: 156453 - DNA, 20 bp, Artificial Sequence
  Synthetic oligonucleotide; AGG chr2 60449147 60449166 60449163 +
tgctggatgctgggtgctgc

SEQ ID NO: 156454 - DNA, 20 bp, Artificial Sequence
  Synthetic oligonucleotide; GGG chr2 60449148 60449167 60449164 +
gctggatgctgggtgctgca

SEQ ID NO: 156455 - DNA, 20 bp, Artificial Sequence
  Synthetic oligonucleotide; GGG chr2 60449149 60449168 60449165 +
ctggatgctgggtgctgcag

SEQ ID NO: 156456 - DNA, 20 bp, Artificial Sequence
  Synthetic oligonucleotide; GAG chr2 60449156 60449175 60449172 +
ctgggtgctgcaggggcttt

SEQ ID NO: 156457 - DNA, 20 bp, Artificial Sequence
  Synthetic oligonucleotide; TGG chr2 60449177 60449196 60449193 +
agtgtctttctctcccatca

SEQ ID NO: 156458 - DNA, 20 bp, Artificial Sequence
  Synthetic oligonucleotide; CAG chr2 60449193 60449212 60449209 +
atcatggaccccaattctaa

SEQ ID NO: 156459 - DNA, 20 bp, Artificial Sequence
  Synthetic oligonucleotide; CAG chr2 60449208 60449227 60449224 +
tctaacagaccttttttata

SEQ ID NO: 156460 - DNA, 20 bp, Artificial Sequence
  Synthetic oligonucleotide; CGG chr2 60449225 60449244 60449241 +
atacagtgtaataatctgtc

SEQ ID NO: 156461 - DNA, 20 bp, Artificial Sequence
  Synthetic oligonucleotide; GGG chr2 60449226 60449245 60449242 +
tacagtgtaataatctgtcc

SEQ ID NO: 156462 - DNA, 20 bp, Artificial Sequence
  Synthetic oligonucleotide; CGG chr2 60449231 60449250 60449247 +
tgtaataatctgtccgggcg

SEQ ID NO: 156463 - DNA, 20 bp, Artificial Sequence
  Synthetic oligonucleotide; TGG chr2 60449234 60449253 60449250 +
aataatctgtccgggcgcgg

SEQ ID NO: 156464 - DNA, 20 bp, Artificial Sequence
  Synthetic oligonucleotide; CAG chr2 60449253 60449272 60449269 +
gtggcttacacctgtaatcc

SEQ ID NO: 156465 - DNA, 20 bp, Artificial Sequence
  Synthetic oligonucleotide; TGG chr2 60449261 60449280 60449277 +
cacctgtaatcccagcactt

SEQ ID NO: 156466 - DNA, 20 bp, Artificial Sequence
  Synthetic oligonucleotide; GGG chr2 60449262 60449281 60449278 +
acctgtaatcccagcacttt

SEQ ID NO: 156467 - DNA, 20 bp, Artificial Sequence
  Synthetic oligonucleotide; GAG chr2 60449264 60449283 60449280 +
ctgtaatcccagcactttgg

SEQ ID NO: 156468 - DNA, 20 bp, Artificial Sequence
  Synthetic oligonucleotide; AGG chr2 60449265 60449284 60449281 +
tgtaatcccagcactttggg

SEQ ID NO: 156469 - DNA, 20 bp, Artificial Sequence
  Synthetic oligonucleotide; GAG chr2 60449270 60449289 60449286 +
tcccagcactttgggaggcc

SEQ ID NO: 156470 - DNA, 20 bp, Artificial Sequence
  Synthetic oligonucleotide; AGG chr2 60449271 60449290 60449287 +
cccagcactttgggaggccg

SEQ ID NO: 156471 - DNA, 20 bp, Artificial Sequence
  Synthetic oligonucleotide; CAG chr2 60449274 60449293 60449290 +
agcactttgggaggccgagg

SEQ ID NO: 156472 - DNA, 20 bp, Artificial Sequence
  Synthetic oligonucleotide; AGG chr2 60449275 60449294 60449291 +
gcactttgggaggccgaggc

SEQ ID NO: 156473 - DNA, 20 bp, Artificial Sequence
  Synthetic oligonucleotide; TGG chr2 60449278 60449297 60449294 +
ctttgggaggccgaggcagg

SEQ ID NO: 156474 - DNA, 20 bp, Artificial Sequence
  Synthetic oligonucleotide; GAG chr2 60449286 60449305 60449302 +
ggccgaggcaggtggctcat

SEQ ID NO: 156475 - DNA, 20 bp, Artificial Sequence
  Synthetic oligonucleotide; AGG chr2 60449287 60449306 60449303 +
gccgaggcaggtggctcatg

SEQ ID NO: 156476 - DNA, 20 bp, Artificial Sequence
  Synthetic oligonucleotide; CAG chr2 60449291 60449310 60449307 +
aggcaggtggctcatgaggt

SEQ ID NO: 156477 - DNA, 20 bp, Artificial Sequence
  Synthetic oligonucleotide; AGG chr2 60449292 60449311 60449308 +
ggcaggtggctcatgaggtc

SEQ ID NO: 156478 - DNA, 20 bp, Artificial Sequence
  Synthetic oligonucleotide; GAG chr2 60449294 60449313 60449310 +
caggtggctcatgaggtcag

SEQ ID NO: 156479 - DNA, 20 bp, Artificial Sequence
  Synthetic oligonucleotide; GAG chr2 60449300 60449319 60449316 +
gctcatgaggtcaggagttc

SEQ ID NO: 156480 - DNA, 20 bp, Artificial Sequence
  Synthetic oligonucleotide; CAG chr2 60449305 60449324 60449321 +
tgaggtcaggagttcgagac

SEQ ID NO: 156481 - DNA, 20 bp, Artificial Sequence
  Synthetic oligonucleotide; TGG chr2 60449319 60449338 60449335 +
cgagaccagcctgaccaaca

SEQ ID NO: 156482 - DNA, 20 bp, Artificial Sequence
  Synthetic oligonucleotide; TAG chr2 60449354 60449373 60449370 +
tctactaaaaatacaaaaat

SEQ ID NO: 156483 - DNA, 20 bp, Artificial Sequence
  Synthetic oligonucleotide; CAG chr2 60449358 60449377 60449374 +
ctaaaaatacaaaaattagc

SEQ ID NO: 156484 - DNA, 20 bp, Artificial Sequence
  Synthetic oligonucleotide; AGG chr2 60449359 60449378 60449375 +
taaaaatacaaaaattagcc

SEQ ID NO: 156485 - DNA, 20 bp, Artificial Sequence
  Synthetic oligonucleotide; TGG chr2 60449362 60449381 60449378 +
aaatacaaaaattagccagg

SEQ ID NO: 156486 - DNA, 20 bp, Artificial Sequence
  Synthetic oligonucleotide; CAG chr2 60449381 60449400 60449397 +
gtggtacgcacctgtaatcc

SEQ ID NO: 156487 - DNA, 20 bp, Artificial Sequence
  Synthetic oligonucleotide; CAG chr2 60449389 60449408 60449405 +
cacctgtaatcccagccact

SEQ ID NO: 156488 - DNA, 20 bp, Artificial Sequence
  Synthetic oligonucleotide; AGG chr2 60449390 60449409 60449406 +
acctgtaatcccagccactc

SEQ ID NO: 156489 - DNA, 20 bp, Artificial Sequence
  Synthetic oligonucleotide; GAG chr2 60449392 60449411 60449408 +
ctgtaatcccagccactcag

SEQ ID NO: 156490 - DNA, 20 bp, Artificial Sequence
  Synthetic oligonucleotide; AGG chr2 60449393 60449412 60449409 +
tgtaatcccagccactcagg

SEQ ID NO: 156491 - DNA, 20 bp, Artificial Sequence
  Synthetic oligonucleotide; GAG chr2 60449398 60449417 60449414 +
tcccagccactcaggaggct

SEQ ID NO: 156492 - DNA, 20 bp, Artificial Sequence
  Synthetic oligonucleotide; AGG chr2 60449399 60449418 60449415 +
cccagccactcaggaggctg

SEQ ID NO: 156493 - DNA, 20 bp, Artificial Sequence
  Synthetic oligonucleotide; CAG chr2 60449402 60449421 60449418 +
agccactcaggaggctgagg

SEQ ID NO: 156494 - DNA, 20 bp, Artificial Sequence
  Synthetic oligonucleotide; AGG chr2 60449403 60449422 60449419 +
gccactcaggaggctgaggc

SEQ ID NO: 156495 - DNA, 20 bp, Artificial Sequence
  Synthetic oligonucleotide; GAG chr2 60449405 60449424 60449421 +
cactcaggaggctgaggcag

SEQ ID NO: 156496 - DNA, 20 bp, Artificial Sequence
  Synthetic oligonucleotide; CGG chr2 60449421 60449440 60449437 +
gcaggagaaccacttgaacc

SEQ ID NO: 156497 - DNA, 20 bp, Artificial Sequence
  Synthetic oligonucleotide; GGG chr2 60449422 60449441 60449438 +
caggagaaccacttgaaccc

SEQ ID NO: 156498 - DNA, 20 bp, Artificial Sequence
  Synthetic oligonucleotide; GAG chr2 60449424 60449443 60449440 +
ggagaaccacttgaacccgg

SEQ ID NO: 156499 - DNA, 20 bp, Artificial Sequence
  Synthetic oligonucleotide; AGG chr2 60449425 60449444 60449441 +
gagaaccacttgaacccggg

SEQ ID NO: 156500 - DNA, 20 bp, Artificial Sequence
  Synthetic oligonucleotide; TAG chr2 60449428 60449447 60449444 +
aaccacttgaacccgggagg

SEQ ID NO: 156501 - DNA, 20 bp, Artificial Sequence
  Synthetic oligonucleotide; GAG chr2 60449430 60449449 60449446 +
ccacttgaacccgggaggta

SEQ ID NO: 156502 - DNA, 20 bp, Artificial Sequence
  Synthetic oligonucleotide; AGG chr2 60449431 60449450 60449447 +
cacttgaacccgggaggtag

SEQ ID NO: 156503 - DNA, 20 bp, Artificial Sequence
  Synthetic oligonucleotide; CAG chr2 60449437 60449456 60449453 +
aacccgggaggtagaggttg

SEQ ID NO: 156504 - DNA, 20 bp, Artificial Sequence
  Synthetic oligonucleotide; GAG chr2 60449441 60449460 60449457 +
cgggaggtagaggttgcagt

SEQ ID NO: 156505 - DNA, 20 bp, Artificial Sequence
  Synthetic oligonucleotide; AAG chr2 60449446 60449465 60449462 +
ggtagaggttgcagtgagcc

SEQ ID NO: 156506 - DNA, 20 bp, Artificial Sequence
  Synthetic oligonucleotide; CAG chr2 60449466 60449485 60449482 +
aagatcgtgccattgcactc

SEQ ID NO: 156507 - DNA, 20 bp, Artificial Sequence
  Synthetic oligonucleotide; TGG chr2 60449471 60449490 60449487 +
cgtgccattgcactccagcc

SEQ ID NO: 156508 - DNA, 20 bp, Artificial Sequence
  Synthetic oligonucleotide; GGG chr2 60449472 60449491 60449488 +
gtgccattgcactccagcct

SEQ ID NO: 156509 - DNA, 20 bp, Artificial Sequence
  Synthetic oligonucleotide; TAG chr2 60449478 60449497 60449494 +
ttgcactccagcctgggcaa

SEQ ID NO: 156510 - DNA, 20 bp, Artificial Sequence
  Synthetic oligonucleotide; GAG chr2 60449480 60449499 60449496 +
gcactccagcctgggcaata

SEQ ID NO: 156511 - DNA, 20 bp, Artificial Sequence
  Synthetic oligonucleotide; GAG chr2 60449484 60449503 60449500 +
tccagcctgggcaatagagt

SEQ ID NO: 156512 - DNA, 20 bp, Artificial Sequence
  Synthetic oligonucleotide; CAG chr2 60449553 60449572 60449569 +
aataataataataatctgaa

SEQ ID NO: 156513 - DNA, 20 bp, Artificial Sequence
  Synthetic oligonucleotide; AAG chr2 60449563 60449582 60449579 +
ataatctgaacagcccacaa

SEQ ID NO: 156514 - DNA, 20 bp, Artificial Sequence
  Synthetic oligonucleotide; AGG chr2 60449564 60449583 60449580 +
taatctgaacagcccacaaa

SEQ ID NO: 156515 - DNA, 20 bp, Artificial Sequence
  Synthetic oligonucleotide; TGG chr2 60449569 60449588 60449585 +
tgaacagcccacaaaaggct

SEQ ID NO: 156516 - DNA, 20 bp, Artificial Sequence
  Synthetic oligonucleotide; GGG chr2 60449570 60449589 60449586 +
gaacagcccacaaaaggctt

SEQ ID NO: 156517 - DNA, 20 bp, Artificial Sequence
  Synthetic oligonucleotide; AAG chr2 60449574 60449593 60449590 +
agcccacaaaaggcttggga

SEQ ID NO: 156518 - DNA, 20 bp, Artificial Sequence
  Synthetic oligonucleotide; TGG chr2 60449597 60449616 60449613 +
taaaaacaatgccctgtatt

SEQ ID NO: 156519 - DNA, 20 bp, Artificial Sequence
  Synthetic oligonucleotide; AAG chr2 60449612 60449631 60449628 +
gtatttggtctcctccatcc

SEQ ID NO: 156520 - DNA, 20 bp, Artificial Sequence
  Synthetic oligonucleotide; TGG chr2 60449615 60449634 60449631 +
tttggtctcctccatccaag

SEQ ID NO: 156521 - DNA, 20 bp, Artificial Sequence
  Synthetic oligonucleotide; TGG chr2 60449619 60449638 60449635 +
gtctcctccatccaagtggc

SEQ ID NO: 156522 - DNA, 20 bp, Artificial Sequence
  Synthetic oligonucleotide; GGG chr2 60449620 60449639 60449636 +
tctcctccatccaagtggct

SEQ ID NO: 156523 - DNA, 20 bp, Artificial Sequence
  Synthetic oligonucleotide; TAG chr2 60449634 60449653 60449650 +
gtggctgggactctgtcctc

SEQ ID NO: 156524 - DNA, 20 bp, Artificial Sequence
  Synthetic oligonucleotide; CAG chr2 60449650 60449669 60449666 +
cctctagtctgtgctcatgt

SEQ ID NO: 156525 - DNA, 20 bp, Artificial Sequence
  Synthetic oligonucleotide; AGG chr2 60449651 60449670 60449667 +
ctctagtctgtgctcatgtc

SEQ ID NO: 156526 - DNA, 20 bp, Artificial Sequence
  Synthetic oligonucleotide; AAG chr2 60449680 60449699 60449696 +
atttatctctctgcaatctg

SEQ ID NO: 156527 - DNA, 20 bp, Artificial Sequence
  Synthetic oligonucleotide; CAG chr2 60449693 60449712 60449709 +
caatctgaagttccactctg

SEQ ID NO: 156528 - DNA, 20 bp, Artificial Sequence
  Synthetic oligonucleotide; GAG chr2 60449695 60449714 60449711 +
atctgaagttccactctgca

SEQ ID NO: 156529 - DNA, 20 bp, Artificial Sequence
  Synthetic oligonucleotide; GAG chr2 60449697 60449716 60449713 +
ctgaagttccactctgcaga

SEQ ID NO: 156530 - DNA, 20 bp, Artificial Sequence
  Synthetic oligonucleotide; AGG chr2 60449698 60449717 60449714 +
tgaagttccactctgcagag

SEQ ID NO: 156531 - DNA, 20 bp, Artificial Sequence
  Synthetic oligonucleotide; CAG chr2 60449704 60449723 60449720 +
tccactctgcagagaggaca

SEQ ID NO: 156532 - DNA, 20 bp, Artificial Sequence
  Synthetic oligonucleotide; GAG chr2 60449708 60449727 60449724 +
ctctgcagagaggacacagt

SEQ ID NO: 156533 - DNA, 20 bp, Artificial Sequence
  Synthetic oligonucleotide; TGG chr2 60449717 60449736 60449733 +
gaggacacagtgagaacccc

SEQ ID NO: 156534 - DNA, 20 bp, Artificial Sequence
  Synthetic oligonucleotide; CAG chr2 60449720 60449739 60449736 +
gacacagtgagaacccctgg

SEQ ID NO: 156535 - DNA, 20 bp, Artificial Sequence
  Synthetic oligonucleotide; GAG chr2 60449729 60449748 60449745 +
agaacccctggcagatttgt

SEQ ID NO: 156536 - DNA, 20 bp, Artificial Sequence
  Synthetic oligonucleotide; TGG chr2 60449756 60449775 60449772 +
ttccctgcttctgccattca

SEQ ID NO: 156537 - DNA, 20 bp, Artificial Sequence
  Synthetic oligonucleotide; CAG chr2 60449784 60449803 60449800 +
catgatcttgactcatcaca

SEQ ID NO: 156538 - DNA, 20 bp, Artificial Sequence
  Synthetic oligonucleotide; GAG chr2 60449786 60449805 60449802 +
tgatcttgactcatcacaca

SEQ ID NO: 156539 - DNA, 20 bp, Artificial Sequence
  Synthetic oligonucleotide; GAG chr2 60449788 60449807 60449804 +
atcttgactcatcacacaga

SEQ ID NO: 156540 - DNA, 20 bp, Artificial Sequence
  Synthetic oligonucleotide; TGG chr2 60449818 60449837 60449834 +
cccaaattgtcaatcttgta

SEQ ID NO: 156541 - DNA, 20 bp, Artificial Sequence
  Synthetic oligonucleotide; GGG chr2 60449819 60449838 60449835 +
ccaaattgtcaatcttgtat

SEQ ID NO: 156542 - DNA, 20 bp, Artificial Sequence
  Synthetic oligonucleotide; GGG chr2 60449820 60449839 60449836 +
caaattgtcaatcttgtatg

SEQ ID NO: 156543 - DNA, 20 bp, Artificial Sequence
  Synthetic oligonucleotide; AAG chr2 60449829 60449848 60449845 +
aatcttgtatggggtttcaa

SEQ ID NO: 156544 - DNA, 20 bp, Artificial Sequence
  Synthetic oligonucleotide; TAG chr2 60449834 60449853 60449850 +
tgtatggggtttcaaaagtc

SEQ ID NO: 156545 - DNA, 20 bp, Artificial Sequence
  Synthetic oligonucleotide; TAG chr2 60449840 60449859 60449856 +
gggtttcaaaagtctagccc

SEQ ID NO: 156546 - DNA, 20 bp, Artificial Sequence
  Synthetic oligonucleotide; AGG chr2 60449841 60449860 60449857 +
ggtttcaaaagtctagccct

SEQ ID NO: 156547 - DNA, 20 bp, Artificial Sequence
  Synthetic oligonucleotide; CAG chr2 60449845 60449864 60449861 +
tcaaaagtctagccctaggc

SEQ ID NO: 156548 - DNA, 20 bp, Artificial Sequence
  Synthetic oligonucleotide; AGG chr2 60449846 60449865 60449862 +
caaaagtctagccctaggcc

SEQ ID NO: 156549 - DNA, 20 bp, Artificial Sequence
  Synthetic oligonucleotide; GAG chr2 60449850 60449869 60449866 +
agtctagccctaggccaggt

SEQ ID NO: 156550 - DNA, 20 bp, Artificial Sequence
  Synthetic oligonucleotide; AGG chr2 60449851 60449870 60449867 +
gtctagccctaggccaggtg

SEQ ID NO: 156551 - DNA, 20 bp, Artificial Sequence
  Synthetic oligonucleotide; TAG chr2 60449854 60449873 60449870 +
tagccctaggccaggtgagg

SEQ ID NO: 156552 - DNA, 20 bp, Artificial Sequence
  Synthetic oligonucleotide; CAG chr2 60449874 60449893 60449890 +
tagtgcaatgcctctaatcc

SEQ ID NO: 156553 - DNA, 20 bp, Artificial Sequence
  Synthetic oligonucleotide; TGG chr2 60449882 60449901 60449898 +
tgcctctaatcccagcacta

SEQ ID NO: 156554 - DNA, 20 bp, Artificial Sequence
  Synthetic oligonucleotide; GGG chr2 60449883 60449902 60449899 +
gcctctaatcccagcactat

SEQ ID NO: 156555 - DNA, 20 bp, Artificial Sequence
  Synthetic oligonucleotide; GAG chr2 60449885 60449904 60449901 +
ctctaatcccagcactatgg

SEQ ID NO: 156556 - DNA, 20 bp, Artificial Sequence
  Synthetic oligonucleotide; AGG chr2 60449886 60449905 60449902 +
tctaatcccagcactatggg

SEQ ID NO: 156557 - DNA, 20 bp, Artificial Sequence
  Synthetic oligonucleotide; TAG chr2 60449891 60449910 60449907 +
tcccagcactatgggaggcc

SEQ ID NO: 156558 - DNA, 20 bp, Artificial Sequence
  Synthetic oligonucleotide; AGG chr2 60449892 60449911 60449908 +
cccagcactatgggaggcct

SEQ ID NO: 156559 - DNA, 20 bp, Artificial Sequence
  Synthetic oligonucleotide; GAG chr2 60449894 60449913 60449910 +
cagcactatgggaggcctag

SEQ ID NO: 156560 - DNA, 20 bp, Artificial Sequence
  Synthetic oligonucleotide; AGG chr2 60449895 60449914 60449911 +
agcactatgggaggcctagg

SEQ ID NO: 156561 - DNA, 20 bp, Artificial Sequence
  Synthetic oligonucleotide; GGG chr2 60449896 60449915 60449912 +
gcactatgggaggcctagga

SEQ ID NO: 156562 - DNA, 20 bp, Artificial Sequence
  Synthetic oligonucleotide; TGG chr2 60449899 60449918 60449915 +
ctatgggaggcctaggaggg

SEQ ID NO: 156563 - DNA, 20 bp, Artificial Sequence
  Synthetic oligonucleotide; GAG chr2 60449907 60449926 60449923 +
ggcctaggagggtggatcac

SEQ ID NO: 156564 - DNA, 20 bp, Artificial Sequence
  Synthetic oligonucleotide; CAG chr2 60449912 60449931 60449928 +
aggagggtggatcacgagat

SEQ ID NO: 156565 - DNA, 20 bp, Artificial Sequence
  Synthetic oligonucleotide; AGG chr2 60449913 60449932 60449929 +
ggagggtggatcacgagatc

SEQ ID NO: 156566 - DNA, 20 bp, Artificial Sequence
  Synthetic oligonucleotide; GAG chr2 60449915 60449934 60449931 +
agggtggatcacgagatcag

SEQ ID NO: 156567 - DNA, 20 bp, Artificial Sequence
  Synthetic oligonucleotide; TGG chr2 60449919 60449938 60449935 +
tggatcacgagatcaggaga

SEQ ID NO: 156568 - DNA, 20 bp, Artificial Sequence
  Synthetic oligonucleotide; GAG chr2 60449921 60449940 60449937 +
gatcacgagatcaggagatg

SEQ ID NO: 156569 - DNA, 20 bp, Artificial Sequence
  Synthetic oligonucleotide; TGG chr2 60449931 60449950 60449947 +
tcaggagatggagaccatcc

SEQ ID NO: 156570 - DNA, 20 bp, Artificial Sequence
  Synthetic oligonucleotide; CGG chr2 60449940 60449959 60449956 +
ggagaccatcctggctaaca

SEQ ID NO: 156571 - DNA, 20 bp, Artificial Sequence
  Synthetic oligonucleotide; TAG chr2 60449978 60449997 60449994 +
actaaaaatacaaaaaatat

SEQ ID NO: 156572 - DNA, 20 bp, Artificial Sequence
  Synthetic oligonucleotide; TGG chr2 60449982 60450001 60449998 +
aaaatacaaaaaatattagc

SEQ ID NO: 156573 - DNA, 20 bp, Artificial Sequence
  Synthetic oligonucleotide; GGG chr2 60449983 60450002 60449999 +
aaatacaaaaaatattagct

SEQ ID NO: 156574 - DNA, 20 bp, Artificial Sequence
  Synthetic oligonucleotide; TGG chr2 60449988 60450007 60450004 +
caaaaaatattagctgggcg

SEQ ID NO: 156575 - DNA, 20 bp, Artificial Sequence
  Synthetic oligonucleotide; TGG chr2 60449991 60450010 60450007 +
aaaatattagctgggcgtgg

SEQ ID NO: 156576 - DNA, 20 bp, Artificial Sequence
  Synthetic oligonucleotide; TAG chr2 60450004 60450023 60450020 +
ggcgtggtggcgcgtgcctg

SEQ ID NO: 156577 - DNA, 20 bp, Artificial Sequence
  Synthetic oligonucleotide; CAG chr2 60450010 60450029 60450026 +
gtggcgcgtgcctgtagtcc

SEQ ID NO: 156578 - DNA, 20 bp, Artificial Sequence
  Synthetic oligonucleotide; TGG chr2 60450018 60450037 60450034 +
tgcctgtagtcccagctact

SEQ ID NO: 156579 - DNA, 20 bp, Artificial Sequence
  Synthetic oligonucleotide; GGG chr2 60450019 60450038 60450035 +
gcctgtagtcccagctactt

SEQ ID NO: 156580 - DNA, 20 bp, Artificial Sequence
  Synthetic oligonucleotide; AAG chr2 60450022 60450041 60450038 +
tgtagtcccagctacttggg

SEQ ID NO: 156581 - DNA, 20 bp, Artificial Sequence
  Synthetic oligonucleotide; GAG chr2 60450027 60450046 60450043 +
tcccagctacttgggaagct

SEQ ID NO: 156582 - DNA, 20 bp, Artificial Sequence
  Synthetic oligonucleotide; AGG chr2 60450028 60450047 60450044 +
cccagctacttgggaagctg

SEQ ID NO: 156583 - DNA, 20 bp, Artificial Sequence
  Synthetic oligonucleotide; CAG chr2 60450031 60450050 60450047 +
agctacttgggaagctgagg

SEQ ID NO: 156584 - DNA, 20 bp, Artificial Sequence
  Synthetic oligonucleotide; AGG chr2 60450032 60450051 60450048 +
gctacttgggaagctgaggc

SEQ ID NO: 156585 - DNA, 20 bp, Artificial Sequence
  Synthetic oligonucleotide; GAG chr2 60450034 60450053 60450050 +
tacttgggaagctgaggcag

SEQ ID NO: 156586 - DNA, 20 bp, Artificial Sequence
  Synthetic oligonucleotide; AGG chr2 60450035 60450054 60450051 +
acttgggaagctgaggcagg

SEQ ID NO: 156587 - DNA, 20 bp, Artificial Sequence
  Synthetic oligonucleotide; CAG chr2 60450050 60450069 60450066 +
gcaggaggatcccttgaacc

SEQ ID NO: 156588 - DNA, 20 bp, Artificial Sequence
  Synthetic oligonucleotide; TAG chr2 60450053 60450072 60450069 +
ggaggatcccttgaacccag

SEQ ID NO: 156589 - DNA, 20 bp, Artificial Sequence
  Synthetic oligonucleotide; AGG chr2 60450054 60450073 60450070 +
gaggatcccttgaacccagt

SEQ ID NO: 156590 - DNA, 20 bp, Artificial Sequence
  Synthetic oligonucleotide; CGG chr2 60450057 60450076 60450073 +
gatcccttgaacccagtagg

SEQ ID NO: 156591 - DNA, 20 bp, Artificial Sequence
  Synthetic oligonucleotide; GAG chr2 60450059 60450078 60450075 +
tcccttgaacccagtaggcg

SEQ ID NO: 156592 - DNA, 20 bp, Artificial Sequence
  Synthetic oligonucleotide; AGG chr2 60450060 60450079 60450076 +
cccttgaacccagtaggcgg

SEQ ID NO: 156593 - DNA, 20 bp, Artificial Sequence
  Synthetic oligonucleotide; TGG chr2 60450066 60450085 60450082 +
aacccagtaggcggaggttg

SEQ ID NO: 156594 - DNA, 20 bp, Artificial Sequence
  Synthetic oligonucleotide; GAG chr2 60450070 60450089 60450086 +
cagtaggcggaggttgtggt

SEQ ID NO: 156595 - DNA, 20 bp, Artificial Sequence
  Synthetic oligonucleotide; GAG chr2 60450075 60450094 60450091 +
ggcggaggttgtggtgagct

SEQ ID NO: 156596 - DNA, 20 bp, Artificial Sequence
  Synthetic oligonucleotide; CAG chr2 60450095 60450114 60450111 +
gagtccttgccactgcactc

SEQ ID NO: 156597 - DNA, 20 bp, Artificial Sequence
  Synthetic oligonucleotide; TGG chr2 60450100 60450119 60450116 +
cttgccactgcactccagcc

SEQ ID NO: 156598 - DNA, 20 bp, Artificial Sequence
  Synthetic oligonucleotide; GGG chr2 60450101 60450120 60450117 +
ttgccactgcactccagcct

SEQ ID NO: 156599 - DNA, 20 bp, Artificial Sequence
  Synthetic oligonucleotide; CAG chr2 60450107 60450126 60450123 +
ctgcactccagcctgggtga

SEQ ID NO: 156600 - DNA, 20 bp, Artificial Sequence
  Synthetic oligonucleotide; GAG chr2 60450109 60450128 60450125 +
gcactccagcctgggtgaca

SEQ ID NO: 156601 - DNA, 20 bp, Artificial Sequence
  Synthetic oligonucleotide; GAG chr2 60450113 60450132 60450129 +
tccagcctgggtgacagagc

SEQ ID NO: 156602 - DNA, 20 bp, Artificial Sequence
  Synthetic oligonucleotide; TGG chr2 60450151 60450170 60450167 +
aaaaaaaaaaaaaaaaaaaa

SEQ ID NO: 156603 - DNA, 20 bp, Artificial Sequence
  Synthetic oligonucleotide; TAG chr2 60450155 60450174 60450171 +
aaaaaaaaaaaaaaaatggc

SEQ ID NO: 156604 - DNA, 20 bp, Artificial Sequence
  Synthetic oligonucleotide; AAG chr2 60450222 60450241 60450238 +
ttgttgtctttcaactttaa

SEQ ID NO: 156605 - DNA, 20 bp, Artificial Sequence
  Synthetic oligonucleotide; TGG chr2 60450228 60450247 60450244 +
tctttcaactttaaaagcca

SEQ ID NO: 156606 - DNA, 20 bp, Artificial Sequence
  Synthetic oligonucleotide; GGG chr2 60450229 60450248 60450245 +
ctttcaactttaaaagccat

SEQ ID NO: 156607 - DNA, 20 bp, Artificial Sequence
  Synthetic oligonucleotide; AAG chr2 60450234 60450253 60450250 +
aactttaaaagccatgggaa

SEQ ID NO: 156608 - DNA, 20 bp, Artificial Sequence
  Synthetic oligonucleotide; CAG chr2 60450238 60450257 60450254 +
ttaaaagccatgggaaaaga

SEQ ID NO: 156609 - DNA, 20 bp, Artificial Sequence
  Synthetic oligonucleotide; GAG chr2 60450262 60450281 60450278 +
ctttttgttctgtttgtttt

SEQ ID NO: 156610 - DNA, 20 bp, Artificial Sequence
  Synthetic oligonucleotide; AGG chr2 60450263 60450282 60450279 +
tttttgttctgtttgttttg

SEQ ID NO: 156611 - DNA, 20 bp, Artificial Sequence
  Synthetic oligonucleotide; GGG chr2 60450264 60450283 60450280 +
ttttgttctgtttgttttga

SEQ ID NO: 156612 - DNA, 20 bp, Artificial Sequence
  Synthetic oligonucleotide; GGG chr2 60450265 60450284 60450281 +
tttgttctgtttgttttgag

SEQ ID NO: 156613 - DNA, 20 bp, Artificial Sequence
  Synthetic oligonucleotide; GGG chr2 60450266 60450285 60450282 +
ttgttctgtttgttttgagg

SEQ ID NO: 156614 - DNA, 20 bp, Artificial Sequence
  Synthetic oligonucleotide; CAG chr2 60450279 60450298 60450295 +
tttgagggggttcttctcca

SEQ ID NO: 156615 - DNA, 20 bp, Artificial Sequence
  Synthetic oligonucleotide; AAG chr2 60450284 60450303 60450300 +
gggggttcttctccacagtg

SEQ ID NO: 156616 - DNA, 20 bp, Artificial Sequence
  Synthetic oligonucleotide; GAG chr2 60450286 60450305 60450302 +
gggttcttctccacagtgaa

SEQ ID NO: 156617 - DNA, 20 bp, Artificial Sequence
  Synthetic oligonucleotide; AGG chr2 60450287 60450306 60450303 +
ggttcttctccacagtgaag

SEQ ID NO: 156618 - DNA, 20 bp, Artificial Sequence
  Synthetic oligonucleotide; TAG chr2 60450349 60450368 60450365 +
ccccttaaaaatcccacttt

SEQ ID NO: 156619 - DNA, 20 bp, Artificial Sequence
  Synthetic oligonucleotide; GAG chr2 60450351 60450370 60450367 +
ccttaaaaatcccactttta

SEQ ID NO: 156620 - DNA, 20 bp, Artificial Sequence
  Synthetic oligonucleotide; GAG chr2 60450381 60450400 60450397 +
cttatttacaaactgactct

SEQ ID NO: 156621 - DNA, 20 bp, Artificial Sequence
  Synthetic oligonucleotide; AAG chr2 60450384 60450403 60450400 +
atttacaaactgactctgag

SEQ ID NO: 156622 - DNA, 20 bp, Artificial Sequence
  Synthetic oligonucleotide; AAG chr2 60450398 60450417 60450414 +
tctgagaagaaatatataaa

SEQ ID NO: 156623 - DNA, 20 bp, Artificial Sequence
  Synthetic oligonucleotide; TGG chr2 60450401 60450420 60450417 +
gagaagaaatatataaaaag

SEQ ID NO: 156624 - DNA, 20 bp, Artificial Sequence
  Synthetic oligonucleotide; GGG chr2 60450402 60450421 60450418 +
agaagaaatatataaaaagt

SEQ ID NO: 156625 - DNA, 20 bp, Artificial Sequence
  Synthetic oligonucleotide; GGG chr2 60450403 60450422 60450419 +
gaagaaatatataaaaagtg

SEQ ID NO: 156626 - DNA, 20 bp, Artificial Sequence
  Synthetic oligonucleotide; GGG chr2 60450404 60450423 60450420 +
aagaaatatataaaaagtgg

SEQ ID NO: 156627 - DNA, 20 bp, Artificial Sequence
  Synthetic oligonucleotide; TAG chr2 60450407 60450426 60450423 +
aaatatataaaaagtggggg

SEQ ID NO: 156628 - DNA, 20 bp, Artificial Sequence
  Synthetic oligonucleotide; CAG chr2 60450415 60450434 60450431 +
aaaaagtgggggtagaaaca

SEQ ID NO: 156629 - DNA, 20 bp, Artificial Sequence
  Synthetic oligonucleotide; CAG chr2 60450420 60450439 60450436 +
gtgggggtagaaacacagac

SEQ ID NO: 156630 - DNA, 20 bp, Artificial Sequence
  Synthetic oligonucleotide; AAG chr2 60450429 60450448 60450445 +
gaaacacagaccagaaatga

SEQ ID NO: 156631 - DNA, 20 bp, Artificial Sequence
  Synthetic oligonucleotide; TAG chr2 60450434 60450453 60450450 +
acagaccagaaatgaaagtg

SEQ ID NO: 156632 - DNA, 20 bp, Artificial Sequence
  Synthetic oligonucleotide; AAG chr2 60450445 60450464 60450461 +
atgaaagtgtagtgaccacc

SEQ ID NO: 156633 - DNA, 20 bp, Artificial Sequence
  Synthetic oligonucleotide; CAG chr2 60450450 60450469 60450466 +
agtgtagtgaccaccaagtg

SEQ ID NO: 156634 - DNA, 20 bp, Artificial Sequence
  Synthetic oligonucleotide; AAG chr2 60450458 60450477 60450474 +
gaccaccaagtgcagttaca

SEQ ID NO: 156635 - DNA, 20 bp, Artificial Sequence
  Synthetic oligonucleotide; AGG chr2 60450459 60450478 60450475 +
accaccaagtgcagttacaa

SEQ ID NO: 156636 - DNA, 20 bp, Artificial Sequence
  Synthetic oligonucleotide; AAG chr2 60450475 60450494 60450491 +
acaaaggctgaacttgtctc

SEQ ID NO: 156637 - DNA, 20 bp, Artificial Sequence
  Synthetic oligonucleotide; CAG chr2 60450481 60450500 60450497 +
gctgaacttgtctcaagacc

SEQ ID NO: 156638 - DNA, 20 bp, Artificial Sequence
  Synthetic oligonucleotide; AGG chr2 60450482 60450501 60450498 +
ctgaacttgtctcaagaccc

SEQ ID NO: 156639 - DNA, 20 bp, Artificial Sequence
  Synthetic oligonucleotide; CAG chr2 60450495 60450514 60450511 +
aagacccaggattgttgttt

SEQ ID NO: 156640 - DNA, 20 bp, Artificial Sequence
  Synthetic oligonucleotide; TGG chr2 60450501 60450520 60450517 +
caggattgttgtttcagttc

SEQ ID NO: 156641 - DNA, 20 bp, Artificial Sequence
  Synthetic oligonucleotide; TGG chr2 60450512 60450531 60450528 +
tttcagttctggcctccctt

SEQ ID NO: 156642 - DNA, 20 bp, Artificial Sequence
  Synthetic oligonucleotide; AAG chr2 60450515 60450534 60450531 +
cagttctggcctccctttgg

SEQ ID NO: 156643 - DNA, 20 bp, Artificial Sequence
  Synthetic oligonucleotide; TGG chr2 60450518 60450537 60450534 +
ttctggcctccctttggaag

SEQ ID NO: 156644 - DNA, 20 bp, Artificial Sequence
  Synthetic oligonucleotide; TAG chr2 60450533 60450552 60450549 +
ggaagtggtgtcactctttc

SEQ ID NO: 156645 - DNA, 20 bp, Artificial Sequence
  Synthetic oligonucleotide; AGG chr2 60450534 60450553 60450550 +
gaagtggtgtcactctttct

SEQ ID NO: 156646 - DNA, 20 bp, Artificial Sequence
  Synthetic oligonucleotide; CAG chr2 60450540 60450559 60450556 +
gtgtcactctttctaggcat

SEQ ID NO: 156647 - DNA, 20 bp, Artificial Sequence
  Synthetic oligonucleotide; AAG chr2 60450544 60450563 60450560 +
cactctttctaggcatcagc

SEQ ID NO: 156648 - DNA, 20 bp, Artificial Sequence
  Synthetic oligonucleotide; AGG chr2 60450545 60450564 60450561 +
actctttctaggcatcagca

SEQ ID NO: 156649 - DNA, 20 bp, Artificial Sequence
  Synthetic oligonucleotide; GAG chr2 60450547 60450566 60450563 +
tctttctaggcatcagcaag

SEQ ID NO: 156650 - DNA, 20 bp, Artificial Sequence
  Synthetic oligonucleotide; CAG chr2 60450552 60450571 60450568 +
ctaggcatcagcaaggagtt

SEQ ID NO: 156651 - DNA, 20 bp, Artificial Sequence
  Synthetic oligonucleotide; TAG chr2 60450561 60450580 60450577 +
agcaaggagttcagcacatt

SEQ ID NO: 156652 - DNA, 20 bp, Artificial Sequence
  Synthetic oligonucleotide; AGG chr2 60450562 60450581 60450578 +
gcaaggagttcagcacattt

SEQ ID NO: 156653 - DNA, 20 bp, Artificial Sequence
  Synthetic oligonucleotide; GGG chr2 60450563 60450582 60450579 +
caaggagttcagcacattta

SEQ ID NO: 156654 - DNA, 20 bp, Artificial Sequence
  Synthetic oligonucleotide; GAG chr2 60450565 60450584 60450581 +
aggagttcagcacatttagg

SEQ ID NO: 156655 - DNA, 20 bp, Artificial Sequence
  Synthetic oligonucleotide; AGG chr2 60450566 60450585 60450582 +
ggagttcagcacatttaggg

SEQ ID NO: 156656 - DNA, 20 bp, Artificial Sequence
  Synthetic oligonucleotide; AAG chr2 60450569 60450588 60450585 +
gttcagcacatttagggagg

SEQ ID NO: 156657 - DNA, 20 bp, Artificial Sequence
  Synthetic oligonucleotide; CAG chr2 60450578 60450597 60450594 +
atttagggaggaagccatca

SEQ ID NO: 156658 - DNA, 20 bp, Artificial Sequence
  Synthetic oligonucleotide; TGG chr2 60450590 60450609 60450606 +
agccatcacagaaaccctaa

SEQ ID NO: 156659 - DNA, 20 bp, Artificial Sequence
  Synthetic oligonucleotide; CAG chr2 60450603 60450622 60450619 +
accctaatggtcttatgttt

SEQ ID NO: 156660 - DNA, 20 bp, Artificial Sequence
  Synthetic oligonucleotide; TAG chr2 60450613 60450632 60450629 +
tcttatgtttcagcaacaca

SEQ ID NO: 156661 - DNA, 20 bp, Artificial Sequence
  Synthetic oligonucleotide; AGG chr2 60450614 60450633 60450630 +
cttatgtttcagcaacacat

SEQ ID NO: 156662 - DNA, 20 bp, Artificial Sequence
  Synthetic oligonucleotide; CAG chr2 60450617 60450636 60450633 +
atgtttcagcaacacatagg

SEQ ID NO: 156663 - DNA, 20 bp, Artificial Sequence
  Synthetic oligonucleotide; GAG chr2 60450619 60450638 60450635 +
gtttcagcaacacataggca

SEQ ID NO: 156664 - DNA, 20 bp, Artificial Sequence
  Synthetic oligonucleotide; TGG chr2 60450624 60450643 60450640 +
agcaacacataggcagagca

SEQ ID NO: 156665 - DNA, 20 bp, Artificial Sequence
  Synthetic oligonucleotide; GGG chr2 60450625 60450644 60450641 +
gcaacacataggcagagcat

SEQ ID NO: 156666 - DNA, 20 bp, Artificial Sequence
  Synthetic oligonucleotide; GGG chr2 60450626 60450645 60450642 +
caacacataggcagagcatg

SEQ ID NO: 156667 - DNA, 20 bp, Artificial Sequence
  Synthetic oligonucleotide; CAG chr2 60450629 60450648 60450645 +
cacataggcagagcatgggg

SEQ ID NO: 156668 - DNA, 20 bp, Artificial Sequence
  Synthetic oligonucleotide; AGG chr2 60450630 60450649 60450646 +
acataggcagagcatggggc

SEQ ID NO: 156669 - DNA, 20 bp, Artificial Sequence
  Synthetic oligonucleotide; GGG chr2 60450631 60450650 60450647 +
cataggcagagcatggggca

SEQ ID NO: 156670 - DNA, 20 bp, Artificial Sequence
  Synthetic oligonucleotide; GAG chr2 60450633 60450652 60450649 +
taggcagagcatggggcagg

SEQ ID NO: 156671 - DNA, 20 bp, Artificial Sequence
  Synthetic oligonucleotide; GAG chr2 60450635 60450654 60450651 +
ggcagagcatggggcaggga

SEQ ID NO: 156672 - DNA, 20 bp, Artificial Sequence
  Synthetic oligonucleotide; AGG chr2 60450636 60450655 60450652 +
gcagagcatggggcagggag

SEQ ID NO: 156673 - DNA, 20 bp, Artificial Sequence
  Synthetic oligonucleotide; GGG chr2 60450637 60450656 60450653 +
cagagcatggggcagggaga

SEQ ID NO: 156674 - DNA, 20 bp, Artificial Sequence
  Synthetic oligonucleotide; TGG chr2 60450665 60450684 60450681 +
ttatgaaataacttcttgtc

SEQ ID NO: 156675 - DNA, 20 bp, Artificial Sequence
  Synthetic oligonucleotide; AAG chr2 60450668 60450687 60450684 +
tgaaataacttcttgtctgg

SEQ ID NO: 156676 - DNA, 20 bp, Artificial Sequence
  Synthetic oligonucleotide; TAG chr2 60450685 60450704 60450701 +
tggaagtcccaactaattga

SEQ ID NO: 156677 - DNA, 20 bp, Artificial Sequence
  Synthetic oligonucleotide; AGG chr2 60450686 60450705 60450702 +
ggaagtcccaactaattgat

SEQ ID NO: 156678 - DNA, 20 bp, Artificial Sequence
  Synthetic oligonucleotide; AAG chr2 60450689 60450708 60450705 +
agtcccaactaattgatagg

SEQ ID NO: 156679 - DNA, 20 bp, Artificial Sequence
  Synthetic oligonucleotide; CAG chr2 60450699 60450718 60450715 +
aattgataggaagtcacaaa

SEQ ID NO: 156680 - DNA, 20 bp, Artificial Sequence
  Synthetic oligonucleotide; AGG chr2 60450700 60450719 60450716 +
attgataggaagtcacaaac

SEQ ID NO: 156681 - DNA, 20 bp, Artificial Sequence
  Synthetic oligonucleotide; CAG chr2 60450716 60450735 60450732 +
aaacaggccactcgtgcaat

SEQ ID NO: 156682 - DNA, 20 bp, Artificial Sequence
  Synthetic oligonucleotide; AGG chr2 60450717 60450736 60450733 +
aacaggccactcgtgcaatc

SEQ ID NO: 156683 - DNA, 20 bp, Artificial Sequence
  Synthetic oligonucleotide; GGG chr2 60450718 60450737 60450734 +
acaggccactcgtgcaatca

SEQ ID NO: 156684 - DNA, 20 bp, Artificial Sequence
  Synthetic oligonucleotide; TGG chr2 60450731 60450750 60450747 +
gcaatcagggttatttgtca

SEQ ID NO: 156685 - DNA, 20 bp, Artificial Sequence
  Synthetic oligonucleotide; AAG chr2 60450736 60450755 60450752 +
cagggttatttgtcatggaa

SEQ ID NO: 156686 - DNA, 20 bp, Artificial Sequence
  Synthetic oligonucleotide; CAG chr2 60450742 60450761 60450758 +
tatttgtcatggaaaagcca

SEQ ID NO: 156687 - DNA, 20 bp, Artificial Sequence
  Synthetic oligonucleotide; AGG chr2 60450743 60450762 60450759 +
atttgtcatggaaaagccac

SEQ ID NO: 156688 - DNA, 20 bp, Artificial Sequence
  Synthetic oligonucleotide; GGG chr2 60450744 60450763 60450760 +
tttgtcatggaaaagccaca

SEQ ID NO: 156689 - DNA, 20 bp, Artificial Sequence
  Synthetic oligonucleotide; GGG chr2 60450745 60450764 60450761 +
ttgtcatggaaaagccacag

SEQ ID NO: 156690 - DNA, 20 bp, Artificial Sequence
  Synthetic oligonucleotide; AAG chr2 60450749 60450768 60450765 +
catggaaaagccacagggga

SEQ ID NO: 156691 - DNA, 20 bp, Artificial Sequence
  Synthetic oligonucleotide; AGG chr2 60450750 60450769 60450766 +
atggaaaagccacaggggaa

SEQ ID NO: 156692 - DNA, 20 bp, Artificial Sequence
  Synthetic oligonucleotide; TGG chr2 60450756 60450775 60450772 +
aagccacaggggaaaggtga

SEQ ID NO: 156693 - DNA, 20 bp, Artificial Sequence
  Synthetic oligonucleotide; AAG chr2 60450760 60450779 60450776 +
cacaggggaaaggtgatggc

SEQ ID NO: 156694 - DNA, 20 bp, Artificial Sequence
  Synthetic oligonucleotide; AGG chr2 60450761 60450780 60450777 +
acaggggaaaggtgatggca

SEQ ID NO: 156695 - DNA, 20 bp, Artificial Sequence
  Synthetic oligonucleotide; GAG chr2 60450763 60450782 60450779 +
aggggaaaggtgatggcaag

SEQ ID NO: 156696 - DNA, 20 bp, Artificial Sequence
  Synthetic oligonucleotide; AGG chr2 60450764 60450783 60450780 +
ggggaaaggtgatggcaagg

SEQ ID NO: 156697 - DNA, 20 bp, Artificial Sequence
  Synthetic oligonucleotide; CAG chr2 60450784 60450803 60450800 +
aggctgcaacctccctttct

SEQ ID NO: 156698 - DNA, 20 bp, Artificial Sequence
  Synthetic oligonucleotide; TGG chr2 60450800 60450819 60450816 +
ttctcagtgcacacatctgt

SEQ ID NO: 156699 - DNA, 20 bp, Artificial Sequence
  Synthetic oligonucleotide; TAG chr2 60450803 60450822 60450819 +
tcagtgcacacatctgttgg

SEQ ID NO: 156700 - DNA, 20 bp, Artificial Sequence
  Synthetic oligonucleotide; AGG chr2 60450804 60450823 60450820 +
cagtgcacacatctgttggt

SEQ ID NO: 156701 - DNA, 20 bp, Artificial Sequence
  Synthetic oligonucleotide; AAG chr2 60450807 60450826 60450823 +
tgcacacatctgttggtagg

SEQ ID NO: 156702 - DNA, 20 bp, Artificial Sequence
  Synthetic oligonucleotide; GAG chr2 60450809 60450828 60450825 +
cacacatctgttggtaggaa

SEQ ID NO: 156703 - DNA, 20 bp, Artificial Sequence
  Synthetic oligonucleotide; AGG chr2 60450810 60450829 60450826 +
acacatctgttggtaggaag

SEQ ID NO: 156704 - DNA, 20 bp, Artificial Sequence
  Synthetic oligonucleotide; AAG chr2 60450834 60450853 60450850 +
aactctgcatgcctttacca

SEQ ID NO: 156705 - DNA, 20 bp, Artificial Sequence
  Synthetic oligonucleotide; AGG chr2 60450835 60450854 60450851 +
actctgcatgcctttaccaa

SEQ ID NO: 156706 - DNA, 20 bp, Artificial Sequence
  Synthetic oligonucleotide; TGG chr2 60450844 60450863 60450860 +
gcctttaccaaaggccatcc

SEQ ID NO: 156707 - DNA, 20 bp, Artificial Sequence
  Synthetic oligonucleotide; GGG chr2 60450845 60450864 60450861 +
cctttaccaaaggccatcct

SEQ ID NO: 156708 - DNA, 20 bp, Artificial Sequence
  Synthetic oligonucleotide; AAG chr2 60450859 60450878 60450875 +
catcctgggtctgtatgtgt

SEQ ID NO: 156709 - DNA, 20 bp, Artificial Sequence
  Synthetic oligonucleotide; CAG chr2 60450906 60450925 60450922 +
ttatgacttatgtgctaaca

SEQ ID NO: 156710 - DNA, 20 bp, Artificial Sequence
  Synthetic oligonucleotide; AGG chr2 60450907 60450926 60450923 +
tatgacttatgtgctaacac

SEQ ID NO: 156711 - DNA, 20 bp, Artificial Sequence
  Synthetic oligonucleotide; AAG chr2 60450912 60450931 60450928 +
cttatgtgctaacacaggaa

SEQ ID NO: 156712 - DNA, 20 bp, Artificial Sequence
  Synthetic oligonucleotide; CAG chr2 60450929 60450948 60450945 +
gaaaagatactccctttgat

SEQ ID NO: 156713 - DNA, 20 bp, Artificial Sequence
  Synthetic oligonucleotide; CAG chr2 60450937 60450956 60450953 +
actccctttgatcagttaaa

SEQ ID NO: 156714 - DNA, 20 bp, Artificial Sequence
  Synthetic oligonucleotide; GAG chr2 60450939 60450958 60450955 +
tccctttgatcagttaaaca

SEQ ID NO: 156715 - DNA, 20 bp, Artificial Sequence
  Synthetic oligonucleotide; TGG chr2 60450944 60450963 60450960 +
ttgatcagttaaacagagtt

SEQ ID NO: 156716 - DNA, 20 bp, Artificial Sequence
  Synthetic oligonucleotide; TAG chr2 60450953 60450972 60450969 +
taaacagagtttggtgaaat

SEQ ID NO: 156717 - DNA, 20 bp, Artificial Sequence
  Synthetic oligonucleotide; TGG chr2 60450959 60450978 60450975 +
gagtttggtgaaattagctc

SEQ ID NO: 156718 - DNA, 20 bp, Artificial Sequence
  Synthetic oligonucleotide; AAG chr2 60450964 60450983 60450980 +
tggtgaaattagctctggac

SEQ ID NO: 156719 - DNA, 20 bp, Artificial Sequence
  Synthetic oligonucleotide; CAG chr2 60450971 60450990 60450987 +
attagctctggacaagaaac

SEQ ID NO: 156720 - DNA, 20 bp, Artificial Sequence
  Synthetic oligonucleotide; TGG chr2 60450980 60450999 60450996 +
ggacaagaaaccagaaaacc

SEQ ID NO: 156721 - DNA, 20 bp, Artificial Sequence
  Synthetic oligonucleotide; TGG chr2 60451009 60451028 60451025 +
tgctttctctcttactgatg

SEQ ID NO: 156722 - DNA, 20 bp, Artificial Sequence
  Synthetic oligonucleotide; TGG chr2 60451016 60451035 60451032 +
tctcttactgatgtggcctc

SEQ ID NO: 156723 - DNA, 20 bp, Artificial Sequence
  Synthetic oligonucleotide; AAG chr2 60451020 60451039 60451036 +
ttactgatgtggcctctggc

SEQ ID NO: 156724 - DNA, 20 bp, Artificial Sequence
  Synthetic oligonucleotide; TGG chr2 60451033 60451052 60451049 +
ctctggcaagcccttaacct

SEQ ID NO: 156725 - DNA, 20 bp, Artificial Sequence
  Synthetic oligonucleotide; AAG chr2 60451037 60451056 60451053 +
ggcaagcccttaaccttggt

SEQ ID NO: 156726 - DNA, 20 bp, Artificial Sequence
  Synthetic oligonucleotide; AAG chr2 60451060 60451079 60451076 +
cctcaatctccacctccata

SEQ ID NO: 156727 - DNA, 20 bp, Artificial Sequence
  Synthetic oligonucleotide; TAG chr2 60451063 60451082 60451079 +
caatctccacctccataaag

SEQ ID NO: 156728 - DNA, 20 bp, Artificial Sequence
  Synthetic oligonucleotide; AAG chr2 60451066 60451085 60451082 +
tctccacctccataaagtag

SEQ ID NO: 156729 - DNA, 20 bp, Artificial Sequence
  Synthetic oligonucleotide; GAG chr2 60451073 60451092 60451089 +
ctccataaagtagaagtcgt

SEQ ID NO: 156730 - DNA, 20 bp, Artificial Sequence
  Synthetic oligonucleotide; CAG chr2 60451084 60451103 60451100 +
agaagtcgtgagatctgtcc
